United States Patent Application Publication US 2019/0348154 A1 - sequence listing, part 121

SEQ ID NO: 454799 - DNA, 1074 bp, Serratia marcescens
atggttgatgctgctcaattagttgataaagtaataacattatttacaaaattaactattggattactttccaatgcaactctctccgctataggagaattaagagaaaaaacacatcacatattacacacattcaataaacagcttgatcctgcgtacttatcccatgttgttggccttttctcttcacctcaagtgagagaaaaagctcatgaagttgcttttgactacgctacagacattatttcagaagaaataaaatccaaccttcaaattagtcaatcaataacaaataatttaaacttaactagaattcatgattgggtagattatattaatagtgagaaccgagatgatttattccaagttaaaattaacgatgggaataacatttccatcacatccgacagaatcaaaagacttttatccacagaatcggaagatgctctattaaataccttatcagaagcacctgtcattatgaaacgtaatggtgagacaattgaaaaatttaagaaggctaaaatacagattagcctaaatggcgttgaatatctccctcatgaaaacttgagcgcaattgagtgcaaacgtagagatttaaaatcattaaccgactcatccccacttccgactataaaacaaggctctatcgttaaaaaaagtgacactgaattttatatgtgtatgcaaccactttgcgatagcgttcgtatacagagccctactaatttcatttttataaaaatagacaggatgactgcggccaaccctaaatttactcatgtgttacgaagtgcagatgatacttttatgaagtttaaaattaaacccggctctaaggacatccacatattcaaactcattccagatatgaccactagctcaataaaagtaattagaagggataacagacttgttgtttgttacattaaagatgatgagcaacaagctgaattatcatggattggtgaatttaaaaatagtgtagcccaatctatcgctaatagtctcgcctctaatatatctagagttgggttagatacaaatgaatggctgagattgagttgttaa

SEQ ID NO: 454800 - DNA, 264 bp, Serratia marcescens
atgtcaccaattgaaaatattattaaaagtgaaagtgttgaagatgtgcttttacactttgcacccataacgtcatacccaggaattgatcggatgtatgttaattataaattccaggtgatagagcatggcaaattactgtcaacgtatcagcggctagtgaaggaaggtaaactagctaaagacgataaaggccatacgattaaaggaccgaactggaaagaacctaaatttgtgaccgagaaaaaatacggcatcgagtaa

SEQ ID NO: 454801 - DNA, 786 bp, Serratia marcescens
  misc_feature (90)..(99): n is a, c, g, or t
gtgggatataagcatgatgaagttgggggtaggagataccttcctaacccgccttcaaataccgatggattcggtagtgcccattatgcnnnnnnnnnnatgctttattttataactaaagatttgatcttgggtcggggtggtgcggcaacgaaatacatctttattttgttgataatatcacttgcgttgaccttatctcgtgctttttgggcgcagggtgtattctttatcgggttggcagttttgcttgaggcgagcttctccaagatagttaaaatatccgtgcttaccatgatcgttattggtattgttctcttctttacccctgtaggggatgtgatatttacgcttatcgattctcgtttgaacaatagcaaaataaactctgcttcagaccaagagcgtatattccagaatcgtgccttatttaatgctatatctacgcacccgctgttggggcatgggatgggatattttattcctaatgcattgagatcgacaacaacaccatatctgtatgagacacaaacactctctattgtgatggactttggtattattggtgccagtgtattacttttcctttttctgtccggttgtattatgaatgctctgaacgtcaatggtgtaaaaagtgtaaagaatctctttatgccattagtctgcttcactgtttggttactttctggttctgtcaatccgtttctattcggtgcgtctggagggatcattattttcttatttacaagatttcattttattgatgactttcatagagattaa

SEQ ID NO: 454802 - DNA, 321 bp, Serratia marcescens
atgcttcgcatggataatggcccggaatttatctctctgacactggctgaatgggcagaaaagcatgcagtaaagctggaatttatcaagccggggaaaccaacacagaatgcttttattgaacgttttaatcggacataccgtacagaagtactcgatttttatctgttccgaacactgaatgaagtgcgtgagctcacggagaaatggttgtcagaatataactgtgaacgtccgcatgaatcgctgaataatatgacaccggaggagtatcgccaacagcattaccaggccgagatctcaaaaagtgcatggaactaa

SEQ ID NO: 454803 - DNA, 267 bp, Serratia marcescens; identical to SEQ ID NO: 442389

SEQ ID NO: 454804 - DNA, 1011 bp, Serratia marcescens
gtgtatgaaagcattctggcctccggcagcgccgggcaggcgcggcaggcgttccgccagctgtcggggcagatccacgcggatatcgcctcggcgcaggtgaacgacagccgttacctgcgcgatgcgctgaacagccgcctgcgtcaggcggaagggctggcgacgtcgcaggacatcaaggcggatgacggcggtgcgtgggcgcagtttgtcggggcatgggaccatgcgtcgggcgacgtgaacgccactggctatcaggcctcgacctacggggtgctgctgggtctggattcggcctacgacgactggcgtctgggtgtggcgaccggctatacccgcacctcgctggacggcggctacggctcgaatgcggacagcgacaactaccacctggcggtatacggcagcaaacagtacggcgatttggcgctgcgtgccggtgggtcttacacctggcaccggtttgatacggcgcgctcggtgaactacgggctgcagtcggaccgcgcgacggcgaaatacagcgcgcgcaccgagcagctgttcgcggaagcgggctatagcgtgcagggcgaatgggtgaacctggagccgttcgccaatctggcgtacatcaacttccagaacaacggcatcagcgaagacggcggcgcagcggcgctgcacggcgacaagcagcacacggacgccacggtgtcgacgctgggcctgcgtgcggaccatcagtggcagttgagccgtgaaacggcggtgacgctgcgcggcgaggcgggctggcagcatcagtacggcgagctggagcgcggcaccgggctgaagttccgcggcggtgatgcggcgttcgtcagcaacagcgtgccggtatcgcgcgacggcctgctgctgaaggccagcgcggacgtggcggtgagccagaatgcgtcgctgtcgctgggctacggcgggttgctgtcggaccgtcatcaggacaacagcgtcaacgccggtttcacctggcgcttctga

SEQ ID NO: 454805 - DNA, 591 bp, Serratia marcescens
atgttattgtctaatgaggtatctcatgaaccagctaataaactattaactgggagattggttgaaacctatcttaatgcacctcatctttactctacgggtttaacagctaaatattaccaccatatgcactatatgatcactaaggatggtagctgtgagttggcattttctaattactgcggtcataataacttagtagaagaacttaataatgaaattgagaaagtaatatctaattttaattcttatggttttaatcaggaactatttttagaacgttcatttttaaaccaaaaacttcctgaatcagagtgcgaaacgttatttaaaattttattcactggaaataaaaaccttaacacattttgtttagtttttaccttgtcaatggagcattataacaaagatgaatttaatactgtcagtgactatattatttctatagtcaataacgcatgtaaaagtattgaccaaggcattctaaaaactctttcatcaggtcttaaattaaatttattgattatgccaagcaacagaataaatgaattatcacaggctattgtcagggagttatatggtgatgactag

SEQ ID NO: 454806 - DNA, 642 bp, Serratia marcescens
atggctgtaggaattattaaccacgaattcaatcataatattctttctattcgtcgcggcctcaatgaaatgcaagttttcgctaaccgcagtgaaaatttcagagcaatatatgatcgtgtacgttctggcttcgatcatcttgatgcatatcttaaaacatttacaccattgactaggtcgcagtcaagaagacggacgactataacagggaaagctcttagtgaatttatagagtcggtatttgatgaccgatttaagaaagaagaggttcgcataagttacacatctagttttattaaccaaagtattcaagcttatacatcaacaatatattccgtattcattaatttaatagataatgcgatctattgggtatcgaaaggctcggcggataaaagtataactcttgatgcttccaaaaatggtttcaaaataatggatagtggtccaggtattcctactatcgaccatgagaatgtttttgaattcggttttgggcgccgtattggtggacaaggaatggggttatatatcgctcgacaaacattacagcgtgatggttttgatattactcttgaatcttatcaacctaacactggtgccgtttttattatagaaccgatacaagataaagaataa

SEQ ID NO: 454807 - DNA, 135 bp, Serratia marcescens
atgaataaccgccgcatcatccatcacgcctcggccattaaggtcaattgcctgatgctgatagagctgatggttcagctcatcggccgtaagttcaagatctgggtatctgtttttatcataacgaaacattaa

SEQ ID NO: 454808 - DNA, 591 bp, Serratia marcescens
gtgcgttttgacagaaaaaaccggctggtgcatgtatttcggctggacggcagcagctacagcgtggcgtgggacagcgtgttcttcaccaccgggctgaaccaccggaaagatttcaataaagactactacatcagcggccatgtgctggcggaagataaggtaacggtgctggacaccttctgcctgccggcgacgcacggcgacagaaagcagctggagcggcactgggagtttgtgcgccgctatatggaggaggggccggagccggtcatcggggtggtggatttctgcctgccgatagcggaaaagcgtgaggggtttggctttgggctgctctatttaatgtccggttttaacggcgcgccgctatttttattaccgctgttttttgtgctggcatccctttttgtcctgccgcgctatatcgccatgctgaccagccggcgtccgcgctggccggcgagtatcgagtcccagtgccggattgccggggatgacccttaccggcgggatgcgtccgataactccccgcacccgtggcgggatatttttatccggtcagaccggaaagagaagagccaacaataa

SEQ ID NO: 454809 - DNA, 291 bp, Serratia marcescens
atgatagattataattcaatggttaaaaatgagactatgggagatgttattatctttctggttggacaagaagaaaatggcatggcatacccatctatcgaccgattttttggcagatataaagcaggtgaaaaatatgagtcatataacataaaactaattcatgaaatgaagcatcttgaggaagttggacaggtagttttagaaagagtctatggagcaaaatgtaaaaaaggtcccaactggaaagaaccaaaattcgtcaccgagaaaaaatacggcatcggataa

SEQ ID NO: 454810 - DNA, 717 bp, Serratia marcescens
  misc_feature (27)..(36): n is a, c, g, or t
atgcggatgccgactcactgttggctnnnnnnnnnnctgttggcttttggtaacccagctgatctggcaattgaagcgattcgcagcctacgtaccagtttgcattttgcgatgatggaggcaaaaaataacgtgctgatgatttccggcgccagtcctggcatcggtaaaacatttatcagcgctaacttagcggctgttgtggcacaaaccggacagcgcgtgctgttaatcgatagcgatatgcgtaaggggtatgtgcatgaactgattggtgctgacggtcataaagggctgtcaggcgtattggcaggaaaactgtcgattgacaatgcggttcagcacacggaatctaatgtgtttgattttatctcgcgcggccagattccaccgaacccttctgaattgctgatgcatcgccgttttgaagaagttttaaactgggcttctgaaaattacgatctggtattagtgaatacaccgccaatcctagcggtaactgatgcggcgattatcggtaagcacgcaggaacatcattgttggttgctcgattcgaattgaacagtccaaaagaagttgaagtgagtatcagacgttttgaacaaaatggcattgaaattaaaggtgtgattctgaatgctgtagttcgtaaactttccaactactatagctatggttatgatcactatagttatgattataactcacaaaaataa

SEQ ID NO: 454811 - DNA, 291 bp, Serratia marcescens
atgatagactacaatgcaatggttaaaaatgaaaatatggcagacgttattctttatctagttggacgaaaagaagagggcatggcatatccatccattgacctgttttttggcagatataaagcagctgaaaaatatgagtcatataacataaaactaatacatacaatgaaggaacttgaagaggctggccaggtattttcagcaagaacctatggttctggatataaaaaaggccctaactggaaggaaccaaagttcgtcaccgagaaaaaatacggtatcgaataa

SEQ ID NO: 454812 - DNA, 291 bp, Serratia marcescens
atggctcatgtctggcagtttcagaaggggatgtgggttaaggtcagagggttatatagctggttggcgcgctattcctatgagctggacggaaaccggatgttaaagcattaccctatggagcagcaggcgcagattattgcagactattatgttttttcagcaatggggtatgctcgctggagaaactcgcgagggaaagaggttacttactcgggtaaagattatgttgatgccaaaatagtgaaagaaaaatataaaaaagtgttggctggttttccttataagtaa

SEQ ID NO: 454813 - DNA, 237 bp, Serratia marcescens
atgcctgacaaaatcgccacagcggtcgggtattgcacatcgggcggcctcatttgctgggggggtattgcgcgttggttgcatgacctcgactggaacctgatcgccgtcgtcggcggctttgttatcggcctggcaacgtttgccgtgaacgtctatttcaaatatcggcagacaaaggcatatgaagctgcgttaaagcgtgggtatgtgacggcgccgccgcagaaggactaa

SEQ ID NO: 454814 - DNA, 480 bp, Serratia marcescens
atgaactcagcattgaaaaagaagctggcggctgcggctagtggcggcgcagtggctattgccgcggtattgattccagatttagaggggatacggtacgagccatattatgacgtcgctggcgttctgacggtttgctacggccataccggagccgacatcgttctcggcaaaaagtacacagaggcagaatgcaaggcaatgctggataaagacctggtgcccttcgcgcgctctgttgagcgttcagttaaggtgcctgtcagccaatatcagcgggcggcgctcatcagcttcagttacaacatcggcacccacgcatttgagaattcctcactgctacgaaaactgaatgccggggattactccggcgcctgtgatggcttgcggcaatggatttatgccaatggtaagtcatggcgcgggctgatgaatcgccgtgagattgagcacgcagtgtgctcctgggggcagcgatga

SEQ ID NO: 454815 - DNA, 384 bp, Serratia marcescens
atgaacttgttattccacatcaaggccgcgctggtggctttcgctattacgtcactgatttatttcgcggccagcaactgggggctgcgcaaagagttgcggatggcggaacagcaggctgaacagcagaaaaagacgctggcgcagcaggccgaactgctcgcgacaatgcgcgcggatgacgcccgtaatcgtgcattgatggcaaagcagcaacagagagagcagcagctgcgccagcagggcgaaaactaccagaggaaatatcaggatgccattaaaaatgacgactgcgcccgccgcgctgctcctggccctgtcattgacatcttgcgcggaacggatgccggagccagtggcaccgctcgttctactgccccctga

SEQ ID NO: 454816 - DNA, 531 bp, Serratia marcescens
atggtcactttatacacagttgatagactgggcttttaccaaaacaataaacacatatcattaatcaaacagtcttctaaccgaccagagttagatgaatatttaaacaggctctttccagatgggctatcacaccatggaatggtgtatttctggagtagccactcgaaaccaatagatattgagcctacattagaacttcatatcgagatgcaccgaagagcatttcacccacataaaccgtctaggtttacaagtctcttctgctgccaatccattgacgaagcaatggcattccgtgatagaaaaggaagtgcaagctttcctatttatgaagttatttgcgatgaaaaaataattcattcggcagacatgaacataattaaccctgccgccactacgttggtattctcacaacatatggatatgtactggtcaggccaaagcctgaaggaattttgcccagagcatccagaatttaatgaagttttagttccgcttccagctaccattggcaatcgtgtcgcctga

SEQ ID NO: 454817 - DNA, 447 bp, Serratia marcescens
atgatcaacaagcgactggcacgggtagataacctgtccgccatacgcatcgccgacagcataatccgcagcttttttgctatcccattttgcaagtactttgggtatatgctggcgcggcatgctgtaacagacaccgtggatcaggcgatgcatttcgatgtagtcttgccttgctctgtcggcagcaatcaacttaacggcgatctccatctgatactgtggcggccggccggtgccaagatagaaactgatcaggagctcgggaaacatagccagccattgaccaaccatgctgcggaagccagcaaccggaacagcgtcatcctcaagaacaacgacacggtgactctgcttggctgcatattccatcgcgcgccggtgattccagttggcgccgtggtgttcctcatcaatcagcagatgagcccccaaagagccagctaa

SEQ ID NO: 454818 - DNA, 2427 bp, Serratia marcescens
atggccagcaaatctcttggtactttgactattgatcttgtcgccaaggtcggtgggtttgtttctggcatggataaggctgaaagagcgtcagataagtggcgcaagcaagtacaaaaaaacgtcgagggagcgagcaaagcattagctgggatggctgctgctgccgccgctgctggtaccgccgttggtatagctgggtatcagttgttgaagtctacatctaaccagatggctgaagctgatcgctgggcaaaatcattgaatatgtcaactcaggaactgcttgcatggcaatttgcagctgagaaggctggtttatctgccgataacatggcggatatatttaaagatttaggcgataaaattggtgatgcagtattaaataaatcaggagaagctgtagatgcattgaatgcattaggcctatctgctgataaattgtctaaggtatcaccagataagcagctgttggcaataggtgaagcattagggaagataaataccaacgcagagaaaacaaccatacttgaaagtatgggtaacgatctttcaaagatgttgccgctgtttgataataataacgagaaattaaagcaatttatccagttatcgaaagattatggtgttgcccctgaccctgattcaatcgatgatttggtgaaagtaaataccctttttgagaatatggagtctcaagttaaagggttaaaaatagagattgcttcaggtctggctaaagtcgatttatccccattgcagggctctcttgataaacttcaagatgttttgactgaccctcaggttttgcagggcattgttaatctcgtcagtgaagttgcggagcttgccgggtggttagtgaaagctgctgcatctgctggtgatttggctgttaaagtgtcggcaaggcatcagggcgtctttggaacattttcggataataatgtccctgcgatgcaagaacgtataaaatttttgcagatgcaggctgataacgctaaacccggcgggacatggcttggtaatatccttggtaatgatgatagcttggagcattatcagacggagatagcaaagttacagggacaaatcgaaaaggtaaacaatagcgccagaggtgcaatgaaattgcctcttgggcaggctaccattggtaatggagagtattctctaggaagtggagaatcgaatggtaaaccaagtgcacctaaaatacccaaatcatctggttcgtctaaggctatcgagagcgcattcaaatctactgagcaaagctatattaggcaaattgcattaactgaccaattaaatggaaaaaccaaagaagcgacagaacttgaaaaattacggttggatatttcatctggtaagcttgttggtattaataagcagcagcaggccaggctagaaggtcttgccgctgaaattgatagatttaagcttctggaaaaataccggggtcttcaggaagagctattaaccccggaagagaaacttctcgagtcaacgcgtgagagggtaaagcttctcaaggatgccaaagatgctggactgacgaatgatgatgactatgccaaggcttcgaaagccattgccaataacgcttttgaaaaggcgccggagtttggcggcattgatccgatgttcggtggccagctcggtgagctgagaaaggtcgataaagctcagggagaacttgaggagtggtactcaacgcaactcaatatgctcgatgagtatcgccagtcacagtctgaactcaatgaacagtgggacgcaaaagaactcgaactgcgtaagcagcatgcagatagcctacaatctctcaatgaccagcgtaaccagctgatgctaagtagcgtcagtgatgggcttggctcagtagtcgatgtcactaaatctgcttttggtgaacagtcggctatctataaggcggcatttgtcgcccaaaaggctgcggctatcgctcaatcggctattgctattcaacaaggtattgcaatggctgctgctaacccattccctcttaacctggctgctatggcctctgttgctgcggcaacggcaggtatagtttcaaacatatctgcgattggcatggctcacgatggattggatagtgttccagagacaggtacctggctgttgcaaaaaggtgagcgtgttaccacagccaagaccagcgcaaagctggatgccacgcttgatcgagtcggcaaacaatccgtatctggtgtaatgcccgttaataatatcgtagtgaatggtgatcctgataaaagcactattcgcgcgatagaagaagctgttgcccggggagaaaaacgggtttatggccgggttaccggggatgtagcaacagggcgaggtgatatgtcaaaagctcttatggcgggatggaacaccaaacggagggccagctaa

SEQ ID NO: 454819 - DNA, 171 bp, Serratia marcescens
atgaataacttcattaaagcattcgttcgactcggcgccgctgtgtctgcgctttcccttatctcgggactcacccactggcccgatgtcatgttcatttccagctgtgccatgatccttatatgggcgcacgccgaatgggattaccacacacataagcaaaaaaaatag

SEQ ID NO: 454820 - DNA, 264 bp, Serratia marcescens
atgtcacataaagacgatatcattggtatgcggcttttaactggtttccagacagaccacagtgcctacggcagatttgtgttactgcagtcatccttcgtagatacgatgtcctatgtatgcccagataaagaaaatgactacccagaccaagaaataatgatacgtctggaggtcgctaaagagttgatccacgaactgcagaaacgcgtcgattacatcgaggctggcatagaaaacaacgctgtgcacctagtggattaa

SEQ ID NO: 454821 - DNA, 207 bp, Serratia marcescens
atggaagtgttaaacagaacatccgctgtgctcagcttgccgttaaccatactgtgtgtttcattctcctcgctgacaattatgggagaacacaactcgctggttgatgttttcctgtcggtgattgttttttttggttttcttaatctattccggatagcaggaaagttgatcgcctggtttaatgggaacgctaaccaggcatag

SEQ ID NO: 454822 - DNA, 1668 bp, Serratia marcescens; identical to SEQ ID NO: 186544

SEQ ID NO: 454823 - DNA, 1926 bp, Serratia marcescens; identical to SEQ ID NO: 186543

SEQ ID NO: 454824 - DNA, 498 bp, Serratia marcescens
atgttacgtcgtgattttattaagtttaccgctgcgctgggcgcggccagcgcattaccgctctggagccgggccgcctgggcggccgatctgcccgcgctgccgataccgccgctgctgatgccggatgcgcaaggaaagctggcgctggcgctgcagaccggcgagatgaactggctgccgcaggcggcgaccaaaacctggggcgtcaacggcgctctgctggggccggcggtgcgtttgcagcgcggcaagccggtgacggtcgatatcaacaaccaactgccggaagccagcaccgtacactggcacgggctggaaattcccggcgacgtcgacggcggcccacaggcgctgatcgcgccgggcactacccgcaccgtacatttcaccattgaccagccggcggccacctgctggttccacccgcatacgcacggcaaaaccggccatcaggtgatgatggggttggggggggctggtgctgctggaagatga

SEQ ID NO: 454825 - DNA, 1011 bp, Serratia marcescens
atggcacgtgcgcgcaagaacaaagaagacgcctggatgcctccgagggtttacctcgggcgttcggcgtatgaatatcacccaaaaggaggcggaaatatccgcctatgtgatagaacctgcactcaagctcaagtttgggctgcatgggaggcattaattaccgaaaaaccaaatggctctacccttgctgggctaattgataaattttttaaatccggtgatttttttgaattagcagcagaaacgcaaaaggattaccggaaatactcgaaaaaggtaacagacgtttttggtgctatgcccccagataacattaagccggagcacgtgaggaagtatctagataaacgaggcactcaaagcaggacacaagcaaatcgcgaaaaggcattcatgtccagagtttatcgatgggcatatgaacgcggatatgtgaaggggaacccaacgaaaggagttaaacagttcaaagaaactggtcgtgatcgctatataacgaatgaagagtatgacgccctatatggcgttgctcctgatgtcgttcgtgtggccatggagttagcctacctatgctgcgcgcgacaaaatgatgtattggaaatgaaaaagagccagcttattgcagaaggcatattgattaagcaaagcaaaacagctgtagcacagataaaggcatggtctgatcgtctaactgctgctatagatttggctaaagccctcccactaaacgctggaatgagcagcctctatgtactgcaccaggcgtcgggacataaatacacaagagacggtttcaacagtcgatggagaaaggccaaagaagaagctcgtttgaaataccctcacctctgcttcgacttcactttccatgatctgaaggctaaaggaatctcagatttgcaagggaacatttatgagaagcaggcgatatcagggcataaaaatgttgaacagactgcgcgctacaaccggaaaatagctatcgtcccggttgtcggcggacagtga

SEQ ID NO: 454826 - DNA, 549 bp, Serratia marcescens
atgacctgcgaaatggtgactgtgatgatcgataaatatcgactcgataacctgcggctgctgagtgatgagaaaggcgagctggcacgatgggttatccagctccaggcagatttagacacggagcggcgcaaaaaggcatcactggatagtgtcatcgcgaagctggagcagactctggaacgtgagcgtgaaaaatcccggcgggttatgtctgagaatcagcagcaggcgcagcgcatcgcagagctggaggccgcagaaaaggtttgggaatctgcagctcaaaagcatattgcgcgcgccgaggcggcagagcagcgcatcgcggagctggaggaaaaatacagtgaggtatcaggctggtacgtaaaaatgaaaactcgcatgttatccgcagaaaagcggttggctacgccggtgcggttgcctcagttatgtggtgacggcgataacgataccgaatacacggaagggcttaacgacgggataacacaaagcgccatttatctgcggcgccagggtttcaaggtcgagggggatgtgtga

SEQ ID NO: 454827 - DNA, 465 bp, Serratia marcescens
gtgagcaacgaaacgaaaagtctggaagaactggcgcagccggtggcgtggccgaacaactgcaatcgttccgctattgcagcgctgcgctatctcgcagagaaaccgcgccccgcttacgggaatagtgcttacaacacagagcatctttacatgatagccggcgaactgacgcgcatgtctagccagccgctctactcgcaagagtgcgtcgatgcattacagcagcgctctgaacgtctcgacgcaatgctaactgagtcagtcgaggcgctgaaggcagcagagcagcgcgttgcagaagcagagatcaggggggtagagaaactggcggccgctttcaagtcatggtcttgtgatgactctttcccggatcacgaagcacaacggcattgggccactgcgagcaaagaagcatcatcatttgctgatgacctgcgaaatggtgactgtgatgatcgataa

SEQ ID NO: 454828 - DNA, 207 bp, Serratia marcescens
atgactgaactgaagccgtgcccgttctgcggcgccacagatccggaaattactgctgatttttatgactgttttttcgtcgtttgcggttgtggctctcgcggcccggatagcaaggagccgggagacaatttatcggcaatgaataacgccgcgacagcatggaatgagcgtgttgagcacagccagggggtagagcgtgggtaa

SEQ ID NO: 454829 - DNA, 606 bp, Serratia marcescens
atgaaagagcgcccgataattttcaatagcgaaatggttcgcgcaattctcgacggacgcaagacgcagacacggcgcgttgttaccaaatcatcggccagtattttaagcctgttggaacattacccgcataaaaattacagcctgcattgctcgctaggccagcctggcgatcggctgtgggtgcgggagacgtggatgcctgatgcacctcgtgatggaacgtggggtgatgtggagttctacggctgcaaaggatcgccgctcagcatgatacctctgcgctaccgaactcctgagcattgtatttaccgcgcaggctgggatgggcacgaaatggttggctggacgccatcaatccacatgccgcgctgggcgagtcgtatcacgctggaaatcacagcagtgcgcgttgagcggctgaacgatatcagcgatgtggacgcaactgccgaaggttgcagcactacagacatgaagagcggagattgtctggccgatgtgttcgcgcgcctgtggtcatccatctacggcactgacagctggggcgccaatccgtgggtgtgggttatcgaatttaagcgtgtggaggccagcaatgactga

SEQ ID NO: 454830 - DNA, 435 bp, Serratia marcescens
atgatcaagcgatacacaccagactgctctattcacatgaaccatgaaatggcgttcatgcgcgaactggccggcggcgagtatgtgaagtattcagaccaccagcagattctggctgcggtggttgctgagaatgcggcgcttaaagacgtccgatgctggaactttaaaaccggagctggggcgtttgagcaggcacgaaccgcaggttgtgatctggatgactgcattcacgacgtagtccaagtgatgctttgtaagtttgaaaccccgtccactgacgcagcacttgcagctatccaggcgcaatccgttgaagatgcagtgaagcaagttctcagcgtggacacgatcgcatctactgctgtgatttctcatctgctgcgtgtctatgccaccgagctgcgggagggccagcaaaatgcaattaagtga

SEQ ID NO: 454831 - DNA, 300 bp, Serratia marcescens
atggaaatgcagatgctaaagccaggatttacctacaccagggtggatagcaaatgcccgcattgtgggaaagttttttcacaggatcttgattcctcggtaaatgagatatccaccgatgatgtaaaggattatgccagtgatatcaaagcatctcctgaagccagtaccatgccaaacctttccgtacgctggtacaagatgattaaagcgcttgtggctcttccattcaccacaaaagaagaatacgccaccgagcgaaatcagaagcgtagcgttcgttggaagttttggaagtag

SEQ ID NO: 454832 - DNA, 1017 bp, Serratia marcescens
atgcaggataatcaagaagttattatcaactctgaagaagaagctttcgcttttcttgagaaatatgtatctggatattcccttcccgaaaacgtatcatttggcgaatggcctaaccttaaaatcaagctaactggtaaaaaattcaacaagagcttaacaccttcagtgatgaagggatttgttgatatgcagcaccaaatcaacaaatcatatgcgcttgttaagtatggaattgcagacccaagaaaactgtctaaagaagaaaaagatgcccttgaaatagaagttaccgttgagcaaggttcatcgctaatcgaagttaacatagacggttttctaaccaaaataacgcatgaactggtggggaaaatgaaccctcaagacgtagtagtgacggttttgggtgtcgccttgatttggggaggcgtcaccctcttcaaacgattccttgataaccgcaaggaagttagacttgcagaaacaaaaaaagaaagtgaccgagagcatttgcacaccatgaaattcatgagtgagcaagagacaaaacgccttgaaactattggaaaaataattgctgaaaaaccacagttagataatatggagcgtttgtcttacgacgcaaaaactgaaatggtaaaatcctttgccactgcaacaacggcacagatagacaacattgaactcgatagtgcaacatcaaaagaactggtcactaacgctcgccgaaaatcggtcgaactgcgcatggatggcatgtatagaattgaagaggtaaactctacagatcctgagtgctttaaagtcaaggttagaaatataaataacgatcttcggataaattgtgtagttcaagacgttttccttgatgcatccgaaaacaaaaaggcattacaacaagctgagtgggatcgtaagcctgtccatcttagcatcaatgccaaacatattgatggtgacattaaatctgcagttatcctctatgtaaaagaggctgaaccacctaaagaatcctga

SEQ ID NO: 454833 - DNA, 183 bp, Serratia marcescens
atggaaaacgaacagatcgtgccgtttgagatggactgtcatgacgaccatggtcgcctggtgcacgtaaccggagtagatcaggctaaccatcgggttatctttcgccgtcctggttacccgcatgactgcgcagtcccgcgccgggattttggtacgaagttcaggaaggtgccggaatga

SEQ ID NO: 454834 - DNA, 900 bp, Serratia marcescens
atgagtatgaacctgatggctcaagctatgagcattaaggttggcaatcccctgcgtaagttggtgctgattaagatggcagataacgccaatgatgaaggcgaatgctggccgtcatatcagcatattgctgaccattgcgagtgcagcaaaagcgctgtgagggcgcatatcactgcactgataaaaatggggctgatctccaaagagaaccgacttggagccaataacggaaagggtaacacgtccaatatctaccggatgaccctaggcacccctgtgtcgccaaaaagcatagcccctgtgccgtcaaaaagcacaccccctatgccgccaaaaagcacaggtgtgtcgtcagaaagcacagcccctgtgtcacctgctggcaccccctgtgccaccagatggcaccagaaccagtcattagaacctaaagacaaaaaaccttcttgtcaggacgcttcgcaacctgacgaaaagactttgtcgccggaggagaagtttctcgctgctcatccagaggctgttgtgtgggatgccaaaaagcggcagtggggtggcgaggacgatttgaaatgcgctgaatggatttgggggcggattatcggcatgtacgagcaggcagctgaatacgacggtgagattagccgacccaaggagcctaactgggtggcgtggtcaaacgaggttcgcctgatgtgcgctcaagacggcaggagccataaacaaatctgccagctgtttggcagggccaaccgcgacaagttctggtgccgcaacgtgctcagcccgtcaaaacttcgtgagcgctgggatgacctggtcatcaagttggcgccagccgttgctgcagcgtcggaagagtggaacaccgcagaagcttggagtgaaacgctatga

SEQ ID NO: 454835 - DNA, 762 bp, Serratia marcescens
atgtcatcacagccaaaagctaaaacctcagatcttcaccacaaactcgtgggctacattgattccggtgaaattccagatgtaggggttattgaagagatcttgagagatgcgtcatatttacttgagccagaacgctcttacataagagctatggttcatgtagcaaaacgtgatcatagtggagctatgcagtttttcgaacaatcattacgatatgatgatgtacgagtagctctaaactaccttgcttatcttggaacttccgctcataactatacacataggcttgaaatctacaggcttgaagagctctaccacaacagcacgatgcgtcgtattgctagaaatgcgtcatatggcataggtgattctaggcgtgttcgccagtacactctcaagatggcggcgctgcttgatggtgagcaaaagcaacgaatgatgagtgagggagaggctatgatgcaaaggattcaagatttcaaagagctaacttctcttacccaaaaagatgtcgaagacctttgcgatacagccgaggggttggctaatgctcaaaatgtaaactgcattggagttagttactttattgatactcacggtgattgtgcttacatcatcgatgcagaaactgaggacccagaaatactttcagagttgaactttgagctcgcctgcgtattagcagatgaaaagtatatcgataaagcctttacctcttggtttcggagtgtttctcgaaaggatggagaatatcaatga

SEQ ID NO: 454836 - DNA, 1095 bp, Serratia marcescens
atggaaaaatctatccacaaaaagattgattttttaaccagatttcatgtgaaaagcccgcaaatcatgcgggcttttttcattctgttttgtgaagtgagcggcggaaagagtgaggtaacaccccatccgccagttgctcatgtctttggtcacaagcaacctttgcccgtgctgctaacagcaggacgagcgtatcaactaagggcgcttatgatttcaaacacacgtcttatcaacgctgacacaacagcgtttatcaaaactttgccggataactccatcgacctgatcgcgactgacccgccgtattaccgggttaaatcctgcggctgggataatcagtggaagagcgaggccgaatatatcgcctggctggattcgttgctggtggagttctaccgggtactaaagccgaacggcagtctttatatgttctgcggtagccgcttggcgcccgatactgagctgctggtgcgccagcgtttcgacgtattgagccacatcatttgggcgaagcctgccggtccgtggaagcggatgaacaaagaaagcctgcggtcatacttcccatcgactgagcggatcattttcgccggtcactacgctggcccactacaaccgaaggtagacggcttcgctgcgaaatgtggagagctgaagcacaatgtctttaagccgctgattgattatttcagaacggcccggcaatccctcggtgtgtcagcgaaggaaatcaacgcagcgacgaaaactcagatgtgcagccactggttctcagagagccaatggcaattaccgggcgaaaagcagtatcaggcgctccaggctttatttgaccgtatcgcaaaagagcggcatcaggctggtggattgaatcggccccatcatgagctggtgcgggaataccggacactgaaccgtgaatatttggcattgtgccaggaataccgatcacttcgccgccccttcgcggtaacggcagcggttccctacactgatgtttggcactatccgccggtggctttctaccctggcaagcacccatgcgaaaagcctgtaagtaccccgcataatcgaaccattcacatttag

SEQ ID NO: 454837 - DNA, 1482 bp, Serratia marcescens
atgagtctacgagaaaaaacggtcagaggggctaaatggtcagccatatcaacagtgactattataggcctcaattttttacagttgacgctactgtcacatatgatagaccggagcgaatttggtctgttgacgatagctatggtggtaataactctggctgataccatttcagactttggtatatctaattcaattatacagaagaaagacattacacagacacaactgactacactgtactggctcaatgtggggattggcgttacggttagcgtggttgcctttgccacaagtggttggattgccgcctcactgcgcgtaccagatttagagccgctgattaaaattatctctgttgcttttctcttgatcccacatgggcaacagtttcgtgcattgatgcagaaagagcttaatttttcagctatcggtaagattgagtcgtcttcttacctgttgggatttattacaactctaaccctggcaacaatctatccatttgctatagtggctatgtatggctatctggttaacgcagccgtcagaacgttgttgtttgcgtatgccggtcgtaatatttatcggccaagtatgaggtttgctttctctgaggtgaagtcaaatattaaatttggtgcttatctgacagccgacagtttggtcaactttgtcaatacaaacgtatctactgcaatattggctcgtaccttaggtaccattgctaccggggggtataacctagcctacaatgttgccgttatgcctccgacaaaattaaatccaatcatcactcgggtgttgtttcctgcatttgcaaaaattcaggatgacaatgctaaacttaaagattcattttataagttgatatctctagttggcattattaattttccggctttgctagggttgatggtggtggctcataattttatcctttttatttttggtgaacgttgggtgtttattacaccgatactacagatattgtgcgttgtcggtctgttgcgttccatcggcaatcctatcggttcattgttgatggccaaggccagggtagatataagttttaaatttaatttatttaaaacgctattatttatcccaagcatgttggttggcgttaaacttggtggtgtggtaggtgtagcgctggcgttccttgctgttcaggttattaacacttatctgagttactttatactcataaagcctgttttaggggaaagctatcgccaatatgttgaaagcttgtggttgccgtttaaattaactgtaccaacggtgatcgtaagttggtgtgttggttatttcatgccggttactgtctcgacgacggtaactttattcttacaaatactgcttggcctttttgcttttgttataacaatttacttcagtaaggcaccgctgattaatgaggtgaagttacagctaatcaaaagtgaaaaattacgaaaaatgtttagagtggaatgctaa

SEQ ID NO: 454838 - DNA, 960 bp, Serratia marcescens
atgtccaacccagataataatgaccaactttacaatgaaattatcgctttatcaaaggcaagatctcgtcatgtagtagagatatatgatgttttatttgatcaaaataggaatgtcagtggcattattatagagtatcttgatggcagagatttctctaaattctatttagaatatgagaataatccagaacaatttctaaaaatcttattccaaatagccagtggtctctatgatcttcacaaagctggaattacccatagggacatgaagttagaaaatattaaagcctccaacgccggagttgttaaaatttttgatttcggcatatcagcaataacagatgactatatcacgaaaaacaatcgtgggacattgatttatgcggccccagaattatattatgaaaatgcaaggattagtagggaaatggatatctatgcatttgggataattgcctggaatcttgtcaccacccaaaataattttgacagagcattgttagatattcctccacattctaaacatcaatatcaatccatagctcatgtttgtaaaaataaattaccagaagaaataataaatttaattgatgcaacattatgtccaaacccagctaatcgccccacaatagaggaaatagtacctttattggcaaaatacttagtaatacacaagcataaagggattttcacggaaaacgcaagaaatgtatatgaattatcatctacccaaaaaggtgttaaattaaaaatagctccgctgggagagatagatatatattatgacggcctcgaatttaaaataacctacgttgatggcgatgttttcatcaataatatgagaccaaaggtaaacaccgtcttacctaattcttgtctattgacatttggtgccccccatttacgcaacagacgatttatgactttttcatcttcacatccagaggtggtattatga

SEQ ID NO: 454839 - DNA, 927 bp, Serratia marcescens
atggctgtgctgccagagtccgctgtggttctcttcggcgcacaggttgccggcggcgtcgcggctaaagcgcagcgtctccggccagtcgggctgctcgccgcgcgcctgcgcctgctgccacagcgccagcggggtgcgccgtacttccagcgttcgcgcctggtagcggtattcggtgcggctgtcggcggtctctttggcggtcaggcggcccagcgcgtcatagctcagacgggtgtggagcggctgcgccgcgtcgccgtcctgcgccagcgggtactcggttatggcgctgacctgtcccagcgggttgtaacggtactgcctgcggcggccggcaaagtcgctctgggccagcaggcggtggccggcgtcgtagtcaaactgccagcgctcgttgttggggttgaccagcgcggtgagacggccgaagcggtcgtactgatagcgtgtctcgatgccggccgggtcgacggcgcaggttatctggccgcgcacgttgcgctcgacgcggcgttcggagaaggcgtcgatgttctcgcggcagggcaggccggcgcggtcatagtcgtaacgggtttcccggccgtcggggcgcaccagcgcctgcagacgtccggcggcgctccagcggtagcgggtggcgttgccttcggcatcgcaggtgcggagcagattgccggcgtcgtcatactcgcggcggctctggtggccggagcagtcttcgtcgcgggtcagctggccgagggcgttccaccagaactgctgggtattgccgagcgggtcggtgcgggtcagcagatcgccctggtcgttccaggtaaagcggctgacgttgccgagcgggtcggtcatctccaccacgtcgccgaacgggttgtagcggtattgccagcaggcgccgtcgggcagcacctcttttaa

SEQ ID NO: 454840 - DNA, 1881 bp, Serratia marcescens
gtgccaggtggtctgggtggtgttgccgagcgggtcgcgcaccagtatcaggttgccgcgctcgtcatagcccagctcccagcgctggtcgtcgggggtgatgacggcgctgaggttctcgcgcagggcggcccagcggaagcgccagcgggcgccgtagctgtcggtatagtcggtaatgcgcagcaggctgtcccagcggtgttcggtggtgccgccggacaggcaggtgacgctggcgcggcgtgcggcttcgtccgcctccagcagccagtgctccagacactgcagctgcgcgtccagcaccagatactcgctgacgcgccagtggtcgccgtccgccgcgcgctgccagcggtagctgacgcgcagatcggtggcgtagctgtgccaggccagcaggccgctggcgtcgtcccagccgtaacggcgggtgacgatggcgtcggcgtcgcgcaccgcaatcagctgcccctgcgggttgtagtcatactgcaccagcaggtgtttttcctgtccgacgtgctgatgcaccgcaagcagacggccgttgcgcgcgtcgtagctgagctcgacgtccagcgcctggttgtcgctggagatggtgaccagctggccggcgctgttccaggcgaagtggtggcagttctcgtggcggtcataaatgcgcgcgatgcgccattcgccgacgcgggccgggtccggctcgtacagctggtgttcgccctcggcggtctgcagcagcatcacgccctgcagcgagcagtagagggtaaagccgtcttcggtaaagcgaatgacgtcgccgggggtgacgttgccgaggccggtctcgcggccggaggcgtcgcgcaggataaactgcggctggccgttgtcgtccagcatgcgcagcaggcgggtttcgaacggcagcatccagccgacgccgagcaggccggcggcgcggttgcggctgttgtacaggcgctgccagtaaagcgggatgcggtcggggagggtgaagtcaagctcctcctcgccggcgaggattttggcgccggtggggatatgcaccggatggccggtctgggtggcggccaccagcgttgtacccacggcagcgccggcggcgttgcccgccagatcggcggcggccacggcggccagagcgcagccggcatccttcagcgccagacggggcattacgcggcggaacagcgactggccgagcgccaggccctgcttgcccaggccgccaatcaggccgccggcaaagtaggccagcgcgtttttaccgctgcggatatcgcgcaccacgatgccgtcgccgccaatgcgtacgcgcgggttgtccgccacctcgatcttggcttcgcaggtgctgcggtcgccgttgcgtgcggctgggtggccgttgatcagcaccttcttcgaaccttcggccaggaagttgacgttctccgccatatggcccttggtacaggcgacggtgtctttgttggccggggtggcgtacgggctggcgctctcgacggtgggctgggtgatgtcgtcccagacgtcgccgagccagtttttcaccgattcaccgtcgatgctggcgatcttgtcgatcagcgggccgggatgcatcacgctggagatgatgccgccggccaccgccagggcgctgtcgatcaggcccgggccttcttcagcgccaacgtcgggactgttgagaaaatcgtggtcgacggtgccggcggcgcgggccgccggtttgccgttcatatggacgttgtcggagccgctggtgataaaggcgtcgggcgggccggtgccgatcagcgtatccaccagcgcgccggcggcggtgccgattttctccggaatgccggacaccatggcgccggcgactag

SEQ ID NO: 454841 - DNA, 180 bp, Serratia marcescens; identical to SEQ ID NO: 187079

SEQ ID NO: 454842 - DNA, 621 bp, Serratia marcescens; identical to SEQ ID NO: 187080

SEQ ID NO: 454843 - DNA, 204 bp, Serratia marcescens; identical to SEQ ID NO: 454792

SEQ ID NO: 454844 - DNA, 267 bp, Serratia marcescens; identical to SEQ ID NO: 454793

SEQ ID NO: 454845 - DNA, 1713 bp, Serratia marcescens
atgccatatggacgggctgacagtgattacttctcaattgaagaacgtcgatctaagaatgctggacggtacttttggtctaatcgtcgtatgtttgggcgtatcgctataacgcgcgaagacaatcctaatttgaaggacaaagctggccgagaagggtttattgaaaaccgcgcctcaaaactgtttcgtgaaatagttgagaagattctcttagattcagcagaaaaacactttggtaggcttgctaaagagcgaaaaagcacaattgatgatctcagagaaaagaaagctcagttaaaggccgatgaggataggagtaaattacttaacaaggaacgcacacgtatacggacgtcaataaaacgtaacatggcatctctaataaatcttgtaaccacattatctgaatttaaagataatctggcagggagattgagtttagattcaattgatgatctgcaagcgcttaaaaaaactaccgatgaatttattgcgaaaattcagggctattcattgagtcctatacctacaaatcttggtcgtttggaagaagattatcgggcttataggaaagaggaattactctgcaaagagatggtcaaggatctctcatatgtaataaacaaagctattgcagattctacacaaaaaagtgactacgaaaaagcacaagaagtttatcgcagcaaactggcaagtatcaataatagcattacaagatatgcttcccgcggtaaagaaatgcttgtcaagcagcaggttgaactcgaagagttaattaaaaattgccgagagcaatataaacttgttatggaagaaagtcttgaggacttaaaccttgcgagattatcattaccagtggtgcttgagaaattagatcacgaacaagagaaaattgaaatagaaaatgctcaaaaattatctccatatgtcacagcacttgagcgtattaatgaacagatagatctggaaggtctcgccatccacagcatgaatgagtccgttcgttatagagatgaattagctcggttgcattcgctggcgcagctcggaattacagtcgaaattattggtcatgaacttgatgggctagatcaagagcttacttatgcattgaaaatgataaaagatgatcagttgactcctacccaggagaaaaacatcgatgtagcattaaattgccataactcattaattgataagcttaaatttctatcccctctaaaattatccgggaagaaagagattcagaagattacaggcttagctatagaggaatatattacaggatatttttctaaacaactctcgaccgcaggtataaagctttcatgcactcctgaattcaggaatatatcgattatggatttgcagtcaagaatcttcccagtatttataaatataataaataattccatatattgggtgcagagatgcgaaggaaataataaagatatattgttatcatttaaggataatgaaatatatataagtgatgatggacctggtgtagatgttgatgatcttggaagtctcttcacactgtttttcacacgcaagcaaaaaggtggaagaggtgtagggctttatctatgtaaacaaaacctgatggctggcggacatagtatccgttatgaggttcgagatacttttaaaaaacttagcggtgcaaattttgcgattgcatttaaaggattaatcaatgagtga

SEQ ID NO: 454846 - DNA, 1317 bp, Serratia marcescens
gtgttcgaacgccgctaccagtgggaccgtcaggacctggtggtgcagcagaagctgattgagaacgacaacctcaccgacgggccgcagttccagcagcgccgcttcggctatgacgcccgtgggcagctgacccacagtatcctgccgcagcgcgaggagcgtttttactacgaccccgccggcaaccgcagcgacggcccggccgtcaccgtctggcgcaacctgctccagcgcctgaacggccaccgctggggctatgacggcttcggccggctcagctggcgccgtgacggcaacaccggcgtcgagcagcgttttcagtacgacgccgagcaccgcctgaccgccgtcactttcgacggcgacagccgccatcagcgcgccgaataccgttacgacgcgctcgggcgccgtacccggaaaaccctctacccgcaccacggcgagccgcagaccaccctgttccactggaacggcctgcagatggtcggcgagcacagtcccgaccagccgcagcgcagcatccagtatctgtacaaggaagacagctacgagccgctggcccgcgtcgaccgccacggcgacagcagcgaggtgtactggtaccacagcgaactcaacggcctgccggagcgcatgaccgacgcgcagggcaaggtcgtctggcacggccgtttctccgcctggggcgccaccgacgccgagagcggcacgctcgccacggcgcagaatctgcgctatcagggccagtacctggacagggaaaccgggcttcactacaatctgttccgctactacgatccgaactgcggcaggtttacccagtcagatccgattgggttggcaggcggggtgaatacctacgcgtataccccggatccgattagctgggtggatccgttggggttggtaaagtgctctccttcaggcaagtaccaagctgaaaatgttttagggagaaccgtctataaaaatactgttgatattaacccaggggcacctagctcagttcatcgaagtgtacacaaatcaatccgcaaaaaagttgaagatggttggaccaacctagatctaatgagtaatggttatgctccgatcggtcccgacggtaagcaaatgaatctccatcatatattaggtcaagagcctggccccatggctgagctaatctcatcaacacataaaaaataccataagcaactacatggattgattgagaacggcggcagcttcagacacaatggtaggcttgcttaccaatatgatactttcagggcagaatactggaaacttcgagcgttagacttcatgtga

SEQ ID NO: 454847 - DNA, 258 bp, Serratia marcescens
atggattattacgggcttttccctaaattcaaacttaaccggccgcttaatcaagaggaaagagcgtatcagttacatcagaggcaaccggtagacttggccggtcagtccatggtgccggatatcaaagtaattgcgatcaactcccactatctggaattggtggataaatactactcggcaaaagggcttggtagtcttattggtgcttttggtttttttattttttttttcaagttttttatttgtgatttttga

SEQ ID NO: 454848 - DNA, 159 bp, Serratia marcescens
atgtcggttggcaatttcgtgtccggcgcagcatgccggattaaccgtcgctctccgattaacctcgatggtgtaattttatcaaagcgtgtcacgttccagccggaacgttggccgtatgatgaagggcttaataaggaaagggagatttacggatga

SEQ ID NO: 454849 - DNA, 705 bp, Serratia marcescens
atgagtaaacgcagtgaaatagtagacggacgtacgagtagcgatcggaattatgggcttatctataccgaagtgctagggtggatagatttgggacatgctcagggcgatgatatcagaacgctgctacgtgccattgatgccggcgaggcatccggccaggaacgctatgacgtcgcctactcgcagtcgatggtcgacccgaccatgacactgaaaatgggaaagttcatcaagtggcgaattaagcgcggtcgtacctacgcagagcgtcggagcattgctctggccatgatgatgtcattagccatgaaatttgagggcctgcaggcgtcattccctatcaatctggtaaccgacagtgggttcagtggcgaagatctggtgtcggatttactgggtttttaccgcgtcgtcgccattcaaaacccgttccagctcctgcggccggtccgcaaggatgaggcgctgaagcgatgggattattatgggaaaataggttcctggaaaaaccacggctttacgccgcttttgtttcccgatcccgagcgattccgtcatgcccggccctacaaagggatgctgccggcattcatgcgcacggtcacgccgtggaccgatttcagctcgggcatcgtcgggatagcgactgccaacggcaattatatggatagtgcaagagggggcgttttaccgtatgcgtaa

SEQ ID NO: 454850 - DNA, 426 bp, Serratia marcescens
atgcgtaagtcagttaaagttatcagtgttgccattatcctgattgcagcaggtttggtgtatgtctggccatacgtgcagatggaatttgccggctcagcaaattataccgaacaggataagcggaaatataacttttatacccctgaaattttacgggacatgccgaggatatctaaacgctatgattttgattttgccaacattacaggtccagcgaagcatgtctatgccgtcaaattttatggagtgactgaggttggtgaaattgaaaaatatctgatttcaaggaaatacgtgaagcaggactcgtgcaatataaaagcgacctgttggaccgcctctgatcccctcaaaaccatttatgtgggaacgctgacgggagaaaataccgtgattgttcaagtggtttacaacttttcatga

SEQ ID NO: 454851 - DNA, 837 bp, Serratia marcescens
atgcgctattcatccgtggatttttatccacacctgccggttactacgctggcgccgtcatggattcagcaaaacgccaccacccggctgtcggaaaagtggcaaaaagcgctggtttctttttttgtcagaaaagcacacagcgtcaaggaggcgcagcttatcggcagcggttttttatatatgctcggcggtgttcaaccctgcatcttcaccgcgtcgcacgtggtcaacgaactgctccagggcgatacccctttcttttcgatcaacggtgagaaattccgcttccgcaacctggagtactaccataacgagcagcaggactatgcggtgattcccttcagtcaagagatgctggccgccgagcgcagctatacgctgtttcgcggcgaggagcgggcgcttctgaggaaaacctcctcattcgtcattatgggctacccatccaaccgaaaccggctgcacgtggatcgcaacaatgacgggctatacctgcaaaacctcaccttccaccatttcagttacgacacggacagcgaggacatctattttgccttcgacccgaaggcaaaaaaaagcggctttacctatgaacaggcgagtagccgtacctcgctctcttcgctggccggcatgagtggcagcgtgatagcccagattatggaacatcagatcaccggggattttacgctgcgcgcggtgggtatctttaaagagcagccgaaaaaacggcagggaaaggataaatttttggtgggatgtacgctgattcagtttgccgatgaggtgaacgacctgatccggctgaggacgattatgcgtagtgaggcgtga

SEQ ID NO: 454852 - DNA, 183 bp, Serratia marcescens
atggtggcggtgatccagggggcgattactctgggcgcaggtgtgggcggcgtgttgtttgacgcgctcggctggtggagtcctttggcgtttggtctgttgctgctgctggggtcggcgctgtttgcctggtttgccatgatcaacagcgtcaggatcgatatggcggcggtggaacattaa

SEQ ID NO: 454853 - DNA, 156 bp, Serratia marcescens
atggcgaagtatgagctggagcaggccagcgcaacgctgcagctgaacgtcaacaacgtggcggacaagcactatgtcgcttcatgcggtaataccgcagcctgcttctacggcagcggccgcagcgttatcgcctcgctggcttacagctggtaa

SEQ ID NO: 454854 - DNA, 231 bp, Serratia marcescens
atggatgtgctcaggcaccgcgatctgtatcgctgcaatgctgacgaccctgacaagaccgagtattttgtttcggtgaagtggctggaaacccgtagtgaagatgaagcggtcaatgaggtgggctttttcggtaaccagaatacggtgtgtaaacccacggcggccaaatggcggcataccattgataaactgaaacgttattttccccgctgggacagggatgtgtaa

SEQ ID NO: 454855 - DNA, 270 bp, Serratia marcescens
atgattatttctttatcaagaaaaaaagggaaagttttatttaatgatttttccttaaaggagaatgttccacttagtgagcaattagataatcttaaagaagatatgcttcaggttgaatttcctggtggctatattcttgatgtagggtggaaaccttcctttaacataaatggtaagttttatatttatatgataaaagacttcgattgggatgagccattttattttagtgatgctaaagacttgccgtcattgtataaaaaatag

SEQ ID NO: 454856 - DNA, 228 bp, Serratia marcescens
atgggtgaagcagcgcgcgtcggggacagcatcggccattcccacgcgctggcagggatgattggcggcacgcttatcggcggcctgattgccgccgccggggcgcggtttatgaacaaccgctgcgctatgcagggcaataccaggataacgagagcgggcggcactataatctgttccggtactacgagccggaagtggggcgtttcaccacccaggacccgatag

SEQ ID NO: 454857 - DNA, 750 bp, Serratia marcescens
atgccgtcattaacgtctattttcattaatggtgtattaccagaaatcccaaatatgaaaaagttggatgatttcaaaataaaaaattacttcaaaaacatgcccactatcagtgccactccctttgctggttattattttggggacccggcaggtgatatcactatgaactcattcgatgaagataagtcagctgcagtgcatggttcgctcaacaatcaggccgggcttgttgctgttgatgtgaataattacttggataccgcagagctggcaccggtgaagttcacgttaggcatcagctttaagcgaccggaaaaaccgatagaaaacacatggctggtcgcggatttttccggttctggtacacaagggcggggttttgcgctgggcattggcgctaacggaaaattaaggcttgctgcccagaacgctgatgcgattagcgttgccgaggttgatttcccaacatccgtgcctgttggagatatgtgtggtgtgacgtgttttgtccgtcaagggtcagccacggttgctatctacagcccgcttaccgggaaatatgactctgttaatagttctgtaagcggtacccgacctaccgggacaaattctatcttgttggggagaaaatcagacagcaatactgatacatcacccaagatcgaggtgaaaagcttattgctgatggacggtgaactgagtgtgcagcaacatattgctatacaaaaatatttgatagcaatgtaa

SEQ ID NO: 454858 - DNA, 1869 bp, Serratia marcescens
atggttagcaggttaaagcaaaaggcagttaatgaccccgttggtgtcgataaagagatgaaaatatcgcacctccctccggcagagaaatcattaattgatgaccttcttgttatttctcaaagtgatggcgacggctctttacggacaaagaaaatattcctttcgctattaattaagtcaatggtttcagacagagacagcaaccttctcaatattgttgacggtttcaagatttttgctgacaaatcgattctggagagctttacaaagagagcagaagacgccgcaaatattgcggaaagcttcaccaacgccaatacctactacatcacacctgaagatccggatggcacaattgccggtattgctggcaccccggtcggtgagatgttccgggtcgctataccagatgccgctggtggaacggtggcgttcaactactacttgaataacgagggggttgctgagttcattaactctgaacctaataagcgttatgttgatgaatacgtgaattcacggctcgttccaggctcgtatacacccgagtttttccccgcgtttcacgatcaagacggcaacgttccagcgtggtttgataatagccgtctcgatgccgccggccttggccctgttcttcagaatattgtcacatcgttgcctaacgcctggtcccagcaacagctgcgccagttcaatttcagacctgaaatgatgccgctgtggtttgatgaaagtggaaatgtccctgtctggctcgataactcgcggatagatgcggccggttttggtcctatcctatccggcatcatctcacgttcggcaggtgtgggccgctctgttgtgggtgatacatataaaaccatgctcaaaaagagccagttattttccggcagcaaggtcagcctaaacatcgcttttacgggagactcatggacagaaaagaacacgatcccgaaatcactgattaatgttctcaataaaggctataaggaccctggctggatcagttgttcgacgcgagcagacggggaaatggctgggataaagctgtctgtctcaggttttacaaaatacgatggagacaatgaaaacgcaaactcaccgccaccatatggcgccggacctgatggtaatgcttactatgtcaataacaaagcgggttccctgacgtggtctaatgtcacggcaacggatctgaatctgttttattacgatgggtcgggtgaattcacgatcaccatcgatgatggcgagcctgttacgattactggcggtaatactggaacggttatcaagcacgatatttccggccttgccggcactgcgcatactgtaaaaatccaaagtgccggatcgggcgttgtctccatactggggatatatgggaaaaatagcaccgtcccgtctggagtcacaatatcacgaatggggaatggtggggcgatggcaaaggactacctcaattgggatgcatggattgagccggtcgtaaagcatcttgatatagacatgctgtttgtcattctcggtacaaacgatttcaggaagagcgctgggctgtcaggatatcgacaggggattgagtcaattatcagccattataaacgcgccattcctgacgtatgcatctgtcttgtatcgccagcacaatctaacgcaacaggaacgccatcactttcagaatatgacgatgagatgcgccgtatagctgaggaaaatggtgttaattatatcagtggatataaatcgtttcctgacagctatgataacacgcacggcacatgggctgacagattgcatctcagcagcacaggggcgtacattttaaccaaccaaatgaaaaacatttttttccaggagtga

SEQ ID NO: 454859 - DNA, 261 bp, Serratia marcescens
atgacacgaatgctaatcagagcagccgatggaaccatgcacgccggtagcgcagtgtcggtcatcttcggcatcattaattatttttctcagagcgagtggatcattctcggcgttatctttggcatgttctgttcggcatttggtattgccctcggcacttacttccgctgccggcgtgaacggcttctgcgtgactggatcaacaggcgtaaggagaacatcgacatggaagaacttgagatgctggagcgtgactga

SEQ ID NO: 454860 - DNA, 999 bp, Serratia marcescens
atgagtaccattaccatacgtgaagaaaatgacgtttattctttgctgtcacaactaatggataaaaacgtcacaacatctgacgttaaacttaagtttgaaggatggcctaatttcaaggtaaaacttgttggtgaacagttccagtcaactatcacaccaactgtaatgaaagcatttttagagcttcaagctggtatttatcgcgcattcgcgactgccaactatggctcgccaaacgccacgaaactcacaaaagaagaacgtggtatgcttgaaattgtcgttgaagttgaacccgggagctctaagttcaatgtagatttcggggagatccttcaagaagcatgtaaccgtgcggtggaaaaattggacagcaagcacatacttatcgccctactgtcattttctgtcctctacttcggtaactctatgtataaaaactacttggaggatcgtaaagaggcccgacaagtagaagcaaaaaatgaagagcaaagagcattaatcgagcatttatcctttgctcagcaacaagaaactgagcgagcaaaaataattgctgatatatcagccagtaaccctcgagtccatacaatagctgaattgtcgaaagacacgaaagcggagatgctgaaaagaacatctagcgccgagaagatccagctgcaaggcattgatcttacaggggatgaagctgaagaattagctaaaaacgcccgtcagcaagctattgaggttcgtttggatgggaaatacagaattctgaacgttgactcatcagatcttcaagagtttaaagtgaaggttagaaacctcgcaaccggtgaggagttcaccgctattgtacaagacgagactgtggatttttcacacaaactagctttacagaaaggcgaatggcagaggaaagccgtttcgctggttattaatgccaagcaacgcccttccgataactcgatctatgcagccaaagtaatacaggcaaatattgattaa

SEQ ID NO: 454861 - DNA, 192 bp, Serratia marcescens
atgattacgaaacaagatgctatcgataatttaccatcaacgggtcgagtgctgattcgctgtgaaaaaggtagtgtgaagagtattcgtaacgtatatgaaaatgagcatattgcatcatttaacgcgttgattgatttggcaaaatccgcaggttattcgattgtgtcaccagacgggattaagctataa

SEQ ID NO: 454862 - DNA, 210 bp, Serratia marcescens
atgagctttctaaggtcttggggaagtaagttagggaaaggggctttacatctcatagaggctattgtcggcggaatattctctattggtgtgttcgtctcattcttttggttcgatgactggtggcagcggattttaagcgccgcgatttttatggcgctggtgatagcaactattggcgtatgcagttatgccagaggagagcgctaa

SEQ ID NO: 454863 - DNA, 2217 bp, Serratia marcescens
atggaacttaggctaaaaaatgtcacaagttataatgaaaacattttcacaaacttagatctctcaaaaaaaataaatattctatatggtcaaaacggttgtgggaaatctacaatctcaaatttcttttataatacaacccacaaagattttgcagaatgtgaatgcacattactaaacgactaccgtccaatcgtttataactcaaaatttattgaagataacttccatcatgcaaaagaacaaaaaggcgtattcacactcagtaagaaaaatgcagatatagaaaaggacctagcaataaaagaaggtttaagacaagatctaaaagagcaatatcgaaataaaagagatgcagcaacaaagttaaaagaagaacaaaacaccaaagaaaatgactgcatcgaggccatttgggaaaaaacagaatcgataaggtcttctgatctaaaaaacgtcatgcgaggtccactagggagcaaaaaagctttttttgctcaattacaaaaaacacttacattaccagttgcaaacttggatcaactatctaaagactacggcgaactgataaagcacaaaaacaaagaaatacctctcataactattttattatcatttacactttcagaagacgataataaactgttagccacacctattatagactcaagtaatagttatttatcagaaacaataaaacgacttcaaaatcttgactgggtaaaaaaggggaaagaactttacctaaaagataacacatgcccattctgccaagaaagtacaatcaatgctaaattcatagaggcaattgagtctatctttgatgaaagttactctaataaaataaatcaaataagcgcaataaaatcatcttatgagttagctacaaagccaatttatcaaaaactaactcaagaaatatctacttgtgaactgataagtgaagaggaaagagaaatcaccacttctcacatcaaaattctagatgaaattgcaagcaggaatatagagctaataaccagtaaatttaataacccttcatctatcatcacacttgagagtgatgagtcaatcgaaaaaaagataattaagtgcattactgattacaacacaaaaattaaagacattaatcttaaagttgcaaagttcaaggaaagcgaaaactcagttaaaagtaaaatatggccagctcttagagacttttgcagcccagaaattaacacattagctgctcacgaaaaaaacttccaagataactacaaaaagatacttgatgaaatgaaagaaattgaaaatcaaggaaaggagaatactaaaaacattaaagaactgagagggcaaatttctaatatcgatgaaacaatcgaatctatcaacttgaggctgcaaagtttaggcataaatggctttagtgtaaaaaaacatgaagaaaataaggatatgtacatcatttcccgttcagacaaagacgaaaataatgatgtatacaaatctcttagtgaaggagagaaaacgttaatcacattcctctatttcttagaatgttgcaaaggaaaaacggataaagacgacgaagacaatagagataatttaataatcatcgacgatccaatatctagcctttcacaaaattacgtttatgatatagcatcaattattcatcatgaactaatcaaaaatgaaacaacaaaaaaaatattaatactcacacacaatctatattttttccatgagttgataaaactatctcctaaaagtaaagacgacaaaaagtttaaacgtgactaccgcctttttagaatcacaaagaatgaatttagcaccatcaccgaaatacaaaaaaatagcatacaaaatgaatatcaatccctttggcaaatattaaaagatgctaaagaagaaaaggtcaataaaattatcataccaaatataatgagaaacattttagagtactattttggctttgttcatagaacagattatttacaaaatgaattaactaaactcgcaaaagatgagaacaatagcgatttcagggcgttttatcgatacataaatcgaggttctcattctgactctgtgaatatcacagatatgggtgacattgacccagacaagtacctaaaacagttaaaaagtatattctcagcaacaggagatgaaaaacattatgctaaaatgatggatgaaatcgatgaggaaatcgctaccgcttag

SEQ ID NO: 454864 - DNA, 1032 bp, Serratia marcescens
atgaacaactcaattgagcctggttattgcatagcaactacccccggaactctatcaatgcaggcgcagcagctttttagacgcaaagataccgatggggcacgttactttttgcagctgaatgcagatacaccatatgtattaccgggacaaataatgattgtagctgacccgtccaactcgaatcaaaacgctaagcttcatcatttacgtcgtgcaaagaataaagtcaaccacacaatgaagtttattgatggtgaccttgctttatttatggtgaataatcacgaaagtattaatagcattctgaatctttcatcaaaaggtattgaatacacatctgaagttgggtctaaatattttaagcagatcggcaacatcttacagcaaatagaaagtctgtatcagagcgagtttactcataccggtaaactcgccagccctcaattttatgctcgtcgaacagcgctacttgccgaactaaaaatgctaattaaacgtcctattttaaacacattagttcccaaaacactaaaaatgaaaccctacctgaaaatgactcaggcgttagggctctcaactcgctcaatcattcatcaatggtctactgctggagctgcgggagccattagaggctacgctgagcgtcttgaggcatcggtaaaggcagtgaaattttttaaatctggtggatatgtgaccctggctttagggggaatgatgactacgaatgatgtcatccttgcttgttcaactggtcgtgaacatgaatgtagaagggctgcgttaaccaattatatgagttttgccggagctaccatcttatcaggagtttctgcttccaaaggcgtgttggtggctgaatcaatttgtttgggggccggtatagcatcaggaggtttaggttttgctgtttgtgccgctggtggagcactcgccggtggcgccatcggcggcgccggtggggagattattggtacaaaaatgggggaagcaacaaatacccttataggccgaattttggtggactaa

SEQ ID NO: 454865 - DNA, 1335 bp, Serratia marcescens
atgaaaatctatcgtccgttgtggactgacggggccgtgttggccccacagcagttccagcagcaggcccgttgggacgcccatgttgccgatcgcgtggccgccatgtctctggccaatacctggggggtgctacacgctgaatttgatacagcggcgctgtcgctgtcccggttgaatgctacccggcttgcggtgcgttttcaggatggcacgctgattgataccgaactggcggataacctgccggcggtgtgcgatcttgccgacgttcaggatcgtgatcgggttgaggtggtgctggcgttgcctttgctgtctgccaatggcgccaatcttgatgatggtaaaggcagtgagcgtccgcagcgctggcaacaggagtgggttacggttcaggaactggcgggggacgaacgtacggagatcgccgtgttacgccatgccgtttcgctgcgctttgcccaccaggagaacggcgcttggctgacctgtccggttgcccgactggtgcgcaatatgcagggacagtgggcgatggataacgattttattccgccagcgttggcgttttccgccagtccgttactggtgcaggcattgagcgatttactgcatcgcctgcaggctcgccgcaaacgcctgatgcagatgcgacgcgagagtaacgaacgcctggctgattttgccgtcgcggacgtctcgctgttttggctgcttaatgcgctcaacagcgccgaaccggtattgagtgagctttttcaggtgccgtcgcgccatccggagtttttctatcgggaactggcgcgtctggccggcggtctgctgaccttttcgctgacccacagcgctgaagatattccgccgtatcagcatgccgcgccggaacaggtgtttccgccgctgtttactctgttggattccttactggaagccagcctgccgtcgcgggtggtgagtattgaactggagcatgttggccagttttggcaaggcacgctgcatgatgcgcgtttacgtgaaggggctgatttctatctgtcggtacgttcgccgattgccagccacttgctgcagacgcagttccctctgctgtgtaaagccggcagctatgaggacgtgtccgatgtggtcaacgtggcgatgaacggcattgcgctgaagccgctagcccatgtgccagccgcgatcccgttgcgtctggagaatcagtactttgcactggatctgaacggccaggcggcgcaggcgatgctgacggcgggcaactgtgcgttctacatcccggctgcgctgggtgaggtcaaactggaactgtatgcggtattacgctga

SEQ ID NO: 454866 - DNA, 654 bp, Serratia marcescens
atgaaagatgacaacgcgacttttgtcgaccagatgttctatcccggctggctgatggtcagtcggttacgcagcggccaggaaatcaccgacggcaaggcgctgtaccgccgtacctgcgaatggctggatgactggcgtaaacggctggaggtgcggggcgtcagtcagcacagtgccgatcatatgttgtacaccctgtgcgcgctgtttgatgaaagcgtgctgaacaggggcgtgcaggatgatggctatgcctcttggctggctaatccgctgcaggcgaaatatttcaatacgctgaacgcgggggaggaactgtgggagcgtattcgcaccgagctgcagacaccgtccccggaccctgccgtgctgacctgtttttcccgcgcgctgacgctggggtttgtcggtcgctatcgtcagcagacggatgaacgtcgtgaagatgtggtgcgcaacctgagccagagggtggcgcctttcaccctgacggaagaggcgccgattattgcccgtaccggacggctgcgcagcggccgccgttattactggctgtcatggggagtggggattgctctgttggctgcaatctggctgctgctttcgacgtcgttaggacgcatggtgtcatcgattgcagggatgggataa

SEQ ID NO: 454867 - DNA, 1725 bp, Serratia marcescens
atgcgtcatctgacagaagcgctcctcaccctgctggcattgctgctggcgctatggctgatatggggattctggccgctgggcacgggcggccgttttttcctgagcgccgtaagcgtgctgctggcggcttgctggagttggcgtttctggcgcgggttacggcgcgagccggcgtatctcaacgatgatgcattaccgccggagcattttgcaggtgccgtcgtgctgacgtgtggcgacagtgatgcgttgtttcccgacggctgtgattttcgcgaaacgcggcaggggtggtatatcgcggtacgccagccggaattgctggcatccatgacggatactatcgcttcagcccgcccggcgttggtgagccagctctcggtcatgcttgcggtaatgccggaacggtggcaggacgatgaagcctttggcagcaggttgcgccagtggcggcgggcgattagccaatgccgccatgcgctttccggggtaccgccgctctggtgcagcgtttggctgaatgcggcgctgcggcagcctgacgctgaacaccgctggtatttgctgacggataaccgcactggcattcaggtgcaggaaagcaccggtgtagcgcaggattatcgtgcatggtgcggcgaagcggaggacgtggcgcgggcatcccgactgggggactcactttggctgcagggcgtatttagctggctgcaactcagcgtattacgtcccctgagggaacgccatcacgatacgtcggcgttgccgcccggcatgctggctgtgtgctgcgctccggtcgccagcgtggcggataacctgtggcagcagcgtatcgccgcgattgcgacattaacgccggactgttcagtcggtcagacggaaccgttgccgctgccggatatgctgttgtcacggctgccgcatcgccatggcgtcagccgtcagatgcgctattggcggcgtgccggcggattggtcggactattcctgctggccgccatgctggcttcataccttaacaatcagcgcctgattcagagcgtcagggatcatcttgcgctttaccagcatctgaccggaacgccaccggcgccgaagcttcaggctcaggatcaactgcgccgtgatgatgcgttgttggatcgctggcaacgggaaggtgcgccgatgcgctatgtgctgggattgtatcagggcgggcggctggcagcgccggtgcgcgcatcaatgaatgactgggcgccgccgccgccgcccgcgccggtgattaaacaagtggtgcaggggccgaagacgttgcgcctcgacagcatgtcgctgtttgactccggcaaggcggagctgaaagccggctcgaccaaaatgctggtcaactcgctggtggacatcaaggccaaaccgggctggctgattgtggtcagcggccataccgacaacaccggcaagtcaacgctgaaccagcggctgtcgttgcagcgcgccgaggcggtgcgcaactggatgcgtgataccggcgacgtgccggaaagctgttttgcggtgcagggctatggcgcaagccgtcctgtcgccgacaacgatacgtcgcaaggccgtgcgcttaaccgacgtgtcgaaatcagtctggtgccgcaggcggatgcctgccggctgccggacgcaaccccgccgtcatcattggaaggtgacggcgttgataacaacgagtggagaaaatga

SEQ ID NO: 454868 - DNA, 681 bp, Serratia marcescens
atgagcaagcgtagtgacattatcgagcctcctgcggaatttggtaaaaaaatcgggctgatctacacggaggtactcgggtggatagaccttggtcatgcgcttgggcatgatatccagacgttgttagcacaatttcagcagggagagcgcagcaaagcaaagtattatctggtgacttatgcgcagaatatgagcgtcaggcctttgtcaaccgggcgctatattcgatggaatatcaaaagaggccgaacgccggatgaaattcacagcatcatgttggccatgcttatgcggactgcatatttgtttgaatcctggcaggctcagccgtggttcagctggtacacggacagtggatttagcggagaagatctggtttctgacctgcttggtttttatcacattatatatccggcagattacatgcggttaatcaaacccgtgagtaaaaatgccgcgttgaggcgttgggatttttatggggctgtcggtagttataaaaacaaaatttttaaaccaatcttattccccgatccgttaagcaaagggattgcccaccgcccccatcaagctgaattaccgcattttatgaggattgttacgccgtttaattgcttcgattcagatgtggtgagagtgattgataacgccagtatacatgtcggagtgggagggtga

SEQ ID NO: 454869 - DNA, 2526 bp, Serratia marcescens
atggattttattaataatgcacagagaaccctctctgggattatatcaaaaggacttaatcgttacggcttggatatcccttcctgctcagctccgttagatgtagagagctttagtggtacggaaggcatgagtgctatctacgaatatcttatccgctttaccagctcggaaaaagatatccccgcgaaaacgctacttaataagtcagcctgcttaaccatgagttcaggaggattggggagtttaaccgagcgcaaagtggttcatggcgtaattactcattttgaacgaataaaaagctcggcagaacaaactcagtatctcattatcgtaaaacccttcctggctctgctggataatcaatttcgcactcaccgcttttttatcaataaatcggtgccggaagtcgtagagttggtgctgcaggaacacggcctgaaaggatgggaatatgccttcacgctaaaaaatgtgtatccgcagcgtgagcagatcaaccagtatcaggaaagtgacctgacgtttatccagcgtttactggcagaagtggggatattttacttctttacccttcaaccggatacgcagacggaagtagtgcattttgccgaccagcagagtgcgtggcagtttggcaagatcctgccgctgaacagcccgtcgggcgcgcatgataacggggtggaaagcgtctgggggatcgctgtccggcagtatgttgccgagcgctcggtgacggccaatgattacaaccaccggcaggctcagagggtgctgttgtcggcgccggcggatatgacgtacggtgaggacgaggaggtgaactacggtgacgtttatcactaccgtccgcgccatctggaaagcggtgacaaggtagagccggccgcagaaagcggcaatttttgggcgagtctggagcatgagcgttttctgtctggccagaccgtggtcagcggcagcagcagcgacgccacgctggcgccggggcaggtgctgaggattagcgaactgacgctgccgcccacgctgccgacggagaccgcttctggtgtcattatcctgaataccgtgtttaccgccagccgccagacggcgctgcaggttgcctggacggcgatgccatacagtgaaacccgctgctggcgtccggcgctgctgccgcgcccgacggtgagcggtacgatgacggcgcgggtgaccagtgcgaagcagaacgacgagtacgcccacctgagccagagcgggctgtactgggtgaagtttgacgccgaccgcgacgacaagccgcagggctatgaaagcatgccggtgcgtctggcgaagccctacggcggtgatacttacggtatgcatttcccgctgatacagggcacggaagtggcgatagccttccatgagggcgacccggaccggccgtatatcgcgcatgcgctgcatgactcgcgtcacccggaccacgtaacggcggacaataatacgcgcaacgtgctgcgcaccgcggggctgaacaaactgcggatggaggacaagcgcggcgaagagcatatcaagctgagcactgagtacggcggcaagacgcagctgaacctggggcacaatgtggatgcgcagcgggcgttgcgtggcgagggcgcagagctgcgcaccgacgactgggtgagtatccgcggcggtaaaggggtgtttatcacggcggacctgcagccgaaagcgcagggtgacatgctggcgatgcaggcggccttgacgcagctgaagcaagcgcagcagttaaccgaatcgttgcgcagcgcagcggaagcggcgaaggcggagctggcggatttacaggctcagaaggcgcagctggcggagacgctggaggggctgcagcggtcggcgctgttgctgtcggcgccggcgggaatagcgcaggtaacgcccaaaagcctgcagctgtcagcgggagaaaacatcgcggcgacgagcggcggcaatacggatttcagcgtattgaagaagctgacggtcgctgcgggtgagcggataagcctgtatgcccagcggttggggctcaagctgtttgcgagtaagggaaaggtggaaattcaggcgcagggcgatgagatggcgctggatgcgctgaaggatgtgcgcatcagcagcagtgagggaaacatcatcatcagtgcgaagcaggacattgtactggtgggcagcggtggggcgtatatccgcataggcaacggcgaggtggaaagcggcgcgccggacaagataatccagcgtgcggcggtgtggcagaagtttggcgggcagagcgccagtcagatgatgcagcagtgggatacggcaggttttgcgtatactcccaaagttatccatccttatgatggcaatgctatgtccgagcagtctttggtcgtgcaatctgctgattctgccagcaacattgtatcaacagcggatgatgggaaaagcatgttacaaaagcaggttaatgtaacggctgacaggatgtattttaaggaaggaaaataa

SEQ ID NO: 454870 - DNA, 174 bp, Serratia marcescens
atgaagggagctgtggaaaacgaaataattatcctgcctgaatatgacgaaaacggtcgggcattttataccctacctaatgccaaggctgaagataacctggtggtttcctgtccaaaagttgcagagaaagtgattccggtgattttttttaccaggagtaatgggcactaa

SEQ ID NO: 454871 - DNA, 1371 bp, Serratia marcescens
atgggcactaatattcagcatgttgattcaaaagaaaaggtatggtgtgctgacatgtttgagggagttgatgcactggcatggatcattaaaacaaaaaaagaaagaaaagcattgttgaacccggtaacaaccgaagtggatacgactggtaaggtgctttataacaacttggaaggaaaagtctttccttccagagaggatcgcggctggggaagtgcgctttacaagagttatggcgagccgcttcatactctacaatgtatgctgcatgatagtcatattctgttggataacctgcttaatggtactcgcaggcggactccacgacagttacttatcggtgaaaatctcggtgcggaaaaaggtgaggacgcgctgacagaagcagaagtacgacacagttacgactttttatttccgttgcatgtctttggttacaactggctgcaatcgaacgctatatcagctaaaaaacttcaggaatatatccgcggtgtgctggaaacttatcaaggcagactggcaatcgataaagtgatcctgattacgcactctatgggtggattagttgctcgccattattcggaaaatttgaatggcaggagaaatatcctaggtattatacatggcgtaatgcccgatctaggttcaccagcagcgtaccgacggatgaagaccggtgaacgagccatgcccgtaggtgcggtaattggtgcgaatgcggaaaatttaatgccggtactggcccagtcgcccggcccgctacagttgttgccgggctacgcttatggaacaggttggctcaaaatccgcagtgatacgggcgagcttaataagccagaggttgacccctataaggaaatatatctcaataagtctgattggtggcggctgtgtgagaagaaccttttgttgggggaagtggaaagtgaatggagcaattatgttaatcgtattacttacacggtttgtgatttcattgaggagttaaacggtaaatatcatcccaatagttatggtttttacggcgccagtgagaaatacccttctgatgaccatctgatatggcgacagattccaccacccaggccagtttttggtctgccggtggaacagccgttttaccgctattcgcagggaaaaacatttgaactaatatcctcagccggtccgggagatggcactgtgccggtgcgttctgggaggattacattttccggtatgcgctcgctgttagctgtggaagtggatcatgagggcgcctatgctgttggtgaccttgatactgaaagtggcctttcggttgtaatgaagttcaccatacggtcaattataaaaatggtcagggaggtgatgccatgcggataa

SEQ ID NO: 454872 - DNA, 1101 bp, Serratia marcescens
atgcggataaggcatttatggcttgggttgctttgcggtgtgctggtattaggcattgcatactggttattcacccgaccgtgggcagtatcccctttgactacagaggaaaaacggatgacagacaaactttttgcgcagacgaaaccgcagtgtatagggcgttatctctttgaggtgcccgcttcatttaccaatattctggcagaccgggtacaggtgaatgatgtacgtattgccagcaaacgcttgtatcgcccggcatttgaacaacgaatacgcctacgggaacaggagttgggtaaaaaaaacacggtaaatataagggatcaaccctttctgaaacaagtatatcggataaacgataatacggtgatatttgatcgtaatgaaaatgaaagtgttacaggttcgaagcgtattcttgaaggtcatttgtatcgtggtggggttgcatttactctttattcagagttcttggaccattcagatcctaaatatcttgataaaaagaatatgttaataaatgctggtctgagtgaatctaaaattaataccaaagctaatcagttggcagaaatgaaaagcctgctttcaagaataaatggaagagtagatgacgaagtgcccacgcaggcagggatttgcattcctaacgggtttatttctgatggtaatgttagagaaaaagaggaggttgctctactgtatgggcagggagacttttttctctctgttcgtagtgataatactcacccaaaagagagtagcttgctggagaggagcaatgaaataaatgcggtagctatcagagttggggcgcataccttgcagaaaggagcggttatacttccgggaatcgatgctgaagagtggttattgaaagggaagcaggaggtttatcaaccggaagataaaaccgtagcctcttataaatttgtgctttatggtaatgagaaaattgttgacaataaacatccattattttctgttcaattacacaactcgggatttgagaataaaaactatacggactcacagctggttgatatctgggagcgaataacccggacgttccgatatcgaccaaatgcgttctga

SEQ ID NO: 454873 - DNA, 1089 bp, Serratia marcescens
atgataaataaaaaaacgtttgccgttgtcgctatagtggcggccggttttaccggctggcgctggtacagttatctgcctccgcagataaccctaaccgctgaggagcgcaccaacatggaacatattttacagggcatgacgccgcgatgcgtcggtcgctatctgatagacctgccggcaggtttcactaccgggccgggtaacgtgatggcgtttattaataaatcgccggtcagttataagcgaatgtaccgcccggcgtttgaacaaaagatacggttgcgggaagcggcattaaaacagaaacaggcgcttgatcctctggatatgccatttcttaagcaggtgtacgctctgccggcgggtatggagggcgtaatattcgaaagaaacaacagtcgctctgtaccggatgttcgacgcgtacttgaggcatatctatataccaatggcgttgcggtaaaaattgaaatggcggcagataacgggcaggcggaacgttatgctgagcgtagaaagctttaccccgcaatttatagcaacacggtgccgcaaaagctggcggagctaaccgcgttgctgaagaggatatcgggtaaaacggagacggacatgccggttggcgcgggtttatgcctaccggaggtgtttattgcggatgggcaaggtaagcagggagagtcaattgagatagcgtatgagtcaaaaaactatcccgccctgttatttgcctttgacaccgataatatcagccgtccggaaagcacgttgttggataggagtgacatgatgaaacgcaaaatcaaagaatctgaagggtacaccattgccagcggtaggcgtgagttgaacggtctgtatgcagaacagtggctggccgccggcaagacaggcgaaggagaagagaaaggtttgcgttttgcggtgaacatccatgagaaaacggccggcccgacaacgccgcggctgtcggtcagctttatgcagcgggggctggagggggacggtcggctgtcagaaaatgaagcgttgggcgcatggcaggcaatcaccgaaacgttaagaatgcgcccgcgggcgtattga

SEQ ID NO: 454874 - DNA, 1122 bp, Serratia marcescens
atgggttggccgattcctgatattccggaaaaaacacgcatgccggcgccgcattttcgtctatgggcgggagtgctgctgattatgttaatcgcggggtcgttactggcattatttattgggcgggtcgattcctatattcagattctgatttacggcacattacctgcctttttgttatggctgtccattttcggcgtagtgttgaatcgctatgaccagtctggtgtttcagcgtttgcctggtatgaagaatcccagaaaaccaaatcacaatggcggcaatggagccgccggcagttcgccgtgatcggcaacgtactattgacgccggaagccgatggcgtggcgtccatgttaggtgcggcggcggatattcccatgttcccgaaaaaagcgcgccctctatggggagaggaacagaacctgacggcaagatgcaacatgattgataaacggctggaagaacaggccaccggctatcgtcacgatctgtatgccatctatgtcttatgtccgccgccacagcgtgaagaggtggctgatgtggtccttcgccactgggatcttatgccggaatttgttgatgctattgagcaagtccctcccttcaatgttgatgccgaaataaccggtattgcgttagttttatgcgtgcagtgctgggcaggtgatagtgcgccgcaatacagtgaatttattgctgcgcagttgatcggcgcgccggcgtttattcgtacccggcaatatcggctgctggcaggcatggggcgcatcatgccgttatcaccgggccggttgcgggacgatcttgatatgctcttcgattacaacggcctggattttacggcattgcaacatgtctggttatccggtgaaagcgaacagaccgccgtcgatgttgcgttgtatgccgagtcgcgccaatgggtattaccaaaaaagtgcccgtttcattatgttgacctgacgttcggtccgccgggagagttcgcttctactctgtctttaagcatgatggcagaggcggcagcggagacttcccagaatcagcttattatttttcagcagcctcagtcttcaggttggatgtgtttgatcaccagggagttattttcatga

SEQ ID NO: 454875 - DNA, 3408 bp, Serratia marcescens
atgaattctgcgaaggaaacgcagcccccgcgctatggcctttggggatactttctactgattatgggcttggccggtattgcggcgctgttgctgtttgtctttcgggaacgtctggaagcgcggggcgttacattatcatccgtctggcttatctggggcggtgtattttccgcactcctgttcgggttgatagcggcgcggttctggtggcggtggaagcagagcgcggcgcagattttttatcgtcctcacaagatggcgaaagaaaaacccacggcttctgcccggtcatcgtcggcttatcgcacggtgtccgagattaaatcctttttccgtcagcagtacggcctcttttggcgccgcaaggtcaccattctgttgctgaccggtgaggcggcggacgtggaaagcctcgcaccgggcctcagcagccagtactggttggaggacaccggcacgctgctgctgtggggcggcagcgccgccgacacgccggatcgcgactggctgagcgcgatacgtaaactgcgccgccgcccggcggacgcggtggtatgggtgagcgccgccttcgatcgcttttccgcgccggatgctgcggcgttggccgctcaaccctcgatggacaacatggacgcgctggcgcaccggctgagtgaacgctatgcgctgttgggctggcagctgccgctgtatgtctggtcgctgcatccgggctgccgccagccgcagcgggtggtgcaggcggttggttgtctgctgcctgcaggcgcgaaaccggaagatcttgatcggcagctggcggcattggcggacaagctgacggcgccgggaacgcgtcaggtgtgcgccagcctgcagcacaacttcctgctggcgctggaacatgagctggcgacatcgccggccggcttcagccatccgctgtccgtctttctcaatccctatcggccgttgccgctggccggcgtgatgttcagcccgccggcggcggaggcggcgcgggcggtgaagcaccactggggcaaagaccggtgttgggatggattgctggcctccttgcccgttctgcccgccgggttacgggcgcagaaacgcggtttttcctggcgttatgcgctggcggtcgttgcggcggcggtgatggtgctgtggggcgccgggatggtggtgtcatttgtggccaaccgcgccctgattgatgaaggagaaacgctggtcagacaggcggcggacgataaagcatcgcagcaggcccgcttgcaggcgctgctgtcgttacagcagctgatggaaaaactgcagcaccgccagcagcagggcgcgccgtggtatgcccgcgccggccttggccaaaatgacgtattgctgacggccctgtggccgcagtatggcgataaggcgcttcccctgctgcgcgatgcggcggccggttacctgagccgtcggctgcatgtgctgacggcgctgccgccggatagcccgcagcgtgaggcgatgatcaagccggcgtacgaccaactgaaactgtacctgatgttagtgcggccgcagaagatggagccggagtggtttacgcgcaccctgctgcaggtctggccgcagcgggaaggggtcaaagacggttactggcagggcagcggggcgtcgttgctgcatttctacgccgccaatctgccgcagcactccggctggcaactgcgggcgaacgacggcatggtggagagcgtccgggcgattctggtgcgccagatggggatgcgcaacggggaatcttccctgtatcagaagatgctgtcccaggtggccaggcagtatgccgatctgcggctgcaggatatggtcggtgataccgatgccgcggcgctttttaccagtgatgacgtggtgccggggatgtttacccgccaggcgtgggagggggcggtgcaggcggccattgacaaggtggcgaacgaacggcgcgaagagatggactgggtgctcagcgatagcctggcggttttacaggcgatgtcgccggaagctttaaaggcccgtcttaccgcccgctacttcgctgatttttccggcagctggctgaacttcctgaacggcctgcactgggtcaatgctgtgacgctgtcggatgcgatagatcagctcacgctgatggccgatgttcgtcagtctcctctggtggcgttgatgaataccctcagcattcaggggcgcaccgggcagagcggcgcggggctgtcggactctctggttaagtcggcacaaaacctgtttaaccgtagcaatcagcccgctatcgatcagagcaagggggcgcacggtccgctggatgcgtcattcggtccgctgctggcgctgattgatggttcggcgggcggtcagggcagcagcagcctgagcctgcagacgtttctgactcgcgtcacgcaggtgcgccttaagctgcagcaggtgatcaacgctcccgatccgcaggcgatgacgcgtacgctggcgcagaccgtgttccagggcaaagccatcgatttaaccgaaacgcgcgactacggcagtctggtggcggccagcctcggccaggagtggagcggctttggccgcacgctgtttgtccacccgatggagcaggcctggcagcaggtgctgacgccggccgccgacagcctgaacgcccagtggcgcgccgccatcgtcaatgattggcagcgtgcatttggcggccgctatccgctgaaggccagcagcagtgaagtatccctgccgctgttggcgcagtacctgaacggcgaccacggccgcatcgcccgcttcctgcagagccgcctgaacggcgttctgcacaaagagggcagccactgggtgccggatgccatcaatgctcaggggctgcgttttaatccggcgtttattcgggcgctggataccctcagcgatattgcggacgtggcctttgccagcggcccggccggcatgaactttgaactgcggccgggtacggcagacggcgtggtgcagacccggttggtgatcgacagccagaagctggcttatatgaaccagcagccggcctggaagcgcttcgcctggccggcggatacggaagcgccgggcgcggcgttaagctgggtcagcacccaggccggtacccgccagtttgccgatatgccgggcgcatggggttggatacgcctgctggataaggcgcaggttacgccgtatcccggcctgaacagcagttggcgggtgagctggaaagcgcaggacggtcgcaggctgaactatgtactgcgcaccgaggccggagaaggaccgctggcgttgctgaaactgcgcaactttgtcctgccggacgcaatctttctgacttcaggcgcggcagcgtcctcgcctggtacccgtacccactga

SEQ ID NO: 454876 - DNA, 1764 bp, Serratia marcescens
atggatgatttaaccctgcgctatttcgatgcggaaatgcgctacctgcgtgatgccgccaaagagtttgcccgtgcgcaccctgaccgggccgccatgctggatctggacaaggccggcatgccggatccgtacgtcgagcggctgtttgaaggctttgccttttccatggggcggctgcgcgaaaaaatagacgatgacctgccggaaatcaccgaggggctggtcagtcagctgtggccgcactatctgaaaaccatcccctcgctgtcggtcgtggcgtttgagccggatattagcgcgatgaagatgggggaaaccgtcagcgccgggctggccgtttattcccgcccggtaggggaaaaacgcaccgtttgccagtaccgcaccacgcgcgatatggcgctgaacccgctgcggcttatccgcgtggcggtggaaaccgagcctgacggtcgttcacgcctgcgcctgcggctggcatgcaatcctcaggctgactggcggcagtgcgatttacgtcggctggcgttttatctggcgggcgaagaaccggtgagcaatgcgctgcatctggcgctgacccgtcgccagacggccctgtatctgcgcctgccggagcagagcgagcgtatagcgattgacggctggttttcaccgggtggcttcagtgatgaagatctgctttggccaaaaggcgacggcgcattcagcggctaccaactgttgctggagtatttcaccttccgggaaaaattccgctttgtgcacctcaacggtctggaaaatatcacgctgccggtggggatcggtcattttgatatcgaagtcgtgttgagcgaacagtggaacagcgagctgccggtcacggctgaggcgatgtatctgcactgcgtgccggtcatcaatctgtttaccctgcaggccgatccgctgcgaattaacggcctggagagcgaatacctgttgcggccgcgtcgcctgcaggacggctataccgaaatttattccgtcgatgcggtgaccggctccaaacgtaccagcgatgcgcagtatgcgccgttttccagctttcgccataaaggcggcatgatgcgcaaagcggcgccggcgcgttattaccacacccgggtacgccgcgggcctggcggtctgcatgacacctggctgattctcggcggcgacagttgggaagccgaccggagcatcgccggcgaaaccctgtcgctgaaggtgacgggaaccaacggccaactgccgcgcaaggcgttgcagagtacgctgctggaccgctgtgagcaggttacgcagaccgcgctgacggtgcgcaacctctgcaaaccggcgctgcccgcctatccgccggcggaggacgcgttccattggcggatattgagccaccttggctccagcttccttaacatcatgagcagcgccgaggtgctgcgcagcacgctggaactgtataactggcggcacgatgaaatgaatctgcgccggctggacgccattcaggacgtccggcatcacatgattcagcgttttgagaaaggtcacctgctgcgcggtattgatattgaggtgacgctcgatggcaacggttttagcggagaaggcgatatcgtcctgtttggcgagatgctcaaccgttttctggctctgtacagtgatattcacctgttcaaccagctcacccttatcgttcagccggaagacaaatgtatccgatggaaagagaatcacaatcagcgattgcccggctga

SEQ ID NO: 454877 - DNA, 1101 bp, Serratia marcescens
atgtatccgatggaaagagaatcacaatcagcgattgcccggctgacgaagcaactgcaggacgatatcagccgcaccagtttttatcgtttctgtcagctgctggagcagtgccggccggacgcgccggcgctgggcagcacctggcagatcggcaacgatccggttcgttttcgtccgcatccggggatggggttcccggccggggaatttaagcgcctagagctgccggcgcagagcgggctgccggcgacggcccgcgtcacctttatggggctgtatggcgtggagtctccgctgccttcagcttatatcgatgatattacgcagcgccgggaagggtatgaggccgtcagtgatttcctcgatattttcaaccaccgcctgattactcagttttaccgcatctggcgtaaatactcctggccggccgccttccagcccggcggaaaggatcgcacctcgcgctacttgctgagtctggcgggccttgggttgcagggctgcgcggagaatatcgctacgccgatctcccgttttctggccctgccggggatgatgcgtttgccaacccgcaccggggagggtattacggcgattgtccggctgctggcgccggatacccgggcgaaaattatcccgcatgatccgctgcgcgttgcgctgaagcagcaacttacggcaagtgcgacgcgtccggtatcgttggtaaaccggccggtgatgggcagccacgcagtggacgtcaatcatcaggttcatctgcgtctaacgaccgataatccggaagaggcgatgagctggctacccggcgcgccgctgcacaacgatctgctggcgctgctgcaggtttatctcggcgcgcggctggatgtgcgtatgacgctgacgctgaatcaggaactgttgcccgatgccgtgctttcctgtcaacagcagggcggcggtgttcaattgggaagaaccgccgttatgcgccggcagggcgccagccgcccggatagcgcgcgaaccatcaccatcaatctgggccgctatcagcgtctgcaggaacaacaacacagaagggaagccgatgaaccaggcaattatcgtgactaa

SEQ ID NO: 454878 - DNA, 537 bp, Serratia marcescens
atgaaccaggcaattatcgtgactaagaagctggccgccgtcgcgctggcgtccatgctgctaagcagctgtggggtaacgcaaaccgtgaccgatggcaccgtcgcggtgacaaaagctattttttacaaacaggtcaaaacgttgcacttggatatccgcgcccgtgaaggtgcgaataacaatgcgcagggccatgcgctggcgacggtggtcaggatctatcagctgaaagcgcgtcaggcgttcgacagtacggactatccgtcgctgtttactgccgacggcgaggcgattgccgccgatctgctggcggaaaaagatatcaccgtccgccccggcgaagcggtgacggtcgatatgccgatggagaaagcagcgcagtatgttgcggtagcggcgatgtttttgtcgccggatctacagaaaaaaacctggcgggtagtccttgagcggaatgagcttgatcccgacaatgctcgccggttggagctgaatcagcagacgctgagtttgctgcctgtcaaacatcaataa

SEQ ID NO: 454879 - DNA, 687 bp, Serratia marcescens
atggaaattaatatcaaggagcgtcgccccattgcgacgcgcgataaaacctgggcgaagaacagcgcccgttggctgaaaaaccggggcgtcacgccgaatcaaatctcttttgccagcatggtctttgcgctgctggccgggaccgcgctgctgttcgcttttgcctgttcctccccgtggggacgcgccgccgcgctgctgctggcggtgctgatgattcaggggcggctgctgtgcaacctgctggacggcatggtggccgttgagggggggatggccggccccgccggtccggtgtggaatgagctgccggaccgtatctccgattcgctaatcctgatcggcgcaggctacgggctgacgctgctgccatacggtgccacgttcggctggtgtgcggcgctgctggcgctgatgaccgcctatctgcgcctgctgggcggtgtctgcggcctagagcagcagttcctcgggccgatggcgaaacagcaccgtatggcgctgctgtgcggcggggctctgctggcgatggtgctgccggcgtactggggtcagcaactgctgtacctgtgcctgatcgtgatcaacatcgggacggcgatcacctgctggcggcgcggcaaacgtattctggataaattaaacgatcgggcgggaagtcagggagaacgctatgaatcctaa

SEQ ID NO: 454880 - DNA, 651 bp, Serratia marcescens
atgaatcctaatcacagcatgtcgctggaccgccgtctggccgcgggttttctggtgcgcctgtgtcgtctgctgacaggggtacgcgcccgctggctggcgccgctgccggacaaacaggtcagaatttattacgccaatcactccagccatctcgacggcatggtggtgtgggccagcctgccgccccagttgcgtgtgcaggtgcgtcccgttgccgcggcagactattggctgaccagcgggctgcgccgctatatcgcccggcgggtatttaacgcggtgctgatcgcacgccgcccggccgggcaggcggcagaggcgccgaataacacgctggcgttgatgagcgagccgctggagcaggggcagtcgctgattctctttccggaaggcacccgtggcagcggcgaggcgattgccgactttaaaagcggcatctggcatctggcgcgcatgaatccgcaggcggagctggtgccggtttatctggaaaacctcaaccgcgtgctgccgaaaggttcccgtctggtggtgccgatactgtgctccgccgtatttggcgcgcccgtcgaaccgctgggagaagacgaggataaacaggcctttttgacacggctcaaagacgcattggaggcgttgaaatcatga

SEQ ID NO: 454881 - DNA, 453 bp, Serratia marcescens
atgagaaaggaagtaaccacgaatacgtctccggcttttattatgatgtcatggttggcattgattggcggcgtggtggtctatctgataggcctgtggcgtgctggaatggagttgaatgaaaagggatattatctggcggtaatgttattggcgttattttcggctatctcgttgcaaaagaccgtgcgtgaccgaatggataatattccgactacgcatttatattatatttcctgcgtgtttgcctttattgcttcggtgttgttattagcaataggattatggaacgccacattactccccagtgagaaaggtttttatggcatggctttcttcctgagtctgtttggcgctatctccgtacagaagaacgtcagagacgcgggggcggatcaggccgacaagcggcaagaagaacatccgcttgcatcgggtgaagggcgggagtaa

SEQ ID NO: 454882 - DNA, 186 bp, Serratia marcescens
atggacacgattgaagaattaggtgggcgctatttctatgcggggagatatcatctaagcatcggtgagctgtttttcatgatcttctgtgaagagacagctaaccaattaggcattcaaggatgttggggcggttgccgctatcttggggggattcaatgtttcaaaaaaccggggcaaatttag

SEQ ID NO: 454883 - DNA, 1038 bp, Serratia marcescens
atgacctttccttcctatttgcgtattgaacccggttattgcgtggttgaaacaccggggtcactctcttcacagggcaacatgctgttcagaaatccacgcagcgcagccgccggttattttatgcggctaaatgccgatacgccctggctgaagcccggacatatcctgatcgttgccgatccggccaattcccagcaagggccggccttaaggcagttacgtcaggcgaagaatcgggttaaccagacgctggcgcaggcggatacgcaacaggcaagttttctgcaacgccattatgagacgatagccaccgttctcaacggcagcagttcagggctggccacggccagcgatgccggaaagcgctactttagccgtattgaagagattctgaagcagatcgaaagggcctaccaaaatcagttccgcacacagggatcgttgattagccagcagttttttgtggagcgtaaccggttattcgctgaacttaagacgatgctggataagccgattttcaaccgactgccgcgtaaaattattaatctgcatccgtatgagcggatgaaaagggccttaaacttatccagccgttcgattgtccatgagtggacgacggccggtgtgggtgcgattggcggctactcgacctatctggacggcaccagcagagcgataagattcatgcggaatgccggctgggtggggctgggcatggctgcgaccagtaccaccaatgatatctataattcctgtacggtcggccgcgaaagcgaatgcacccgggtcgcgtttaaagggtatggttcatttattggtagcgccggaggaggtgccttgggtggtggctggggcgcgatggccggcggcggtatttgtgttgcgctgggtattatcagcgcaccgatggccggtagcgcggggcttgcttgtgcgataattggtgcctccgcaggcagtctgaccggtggtgccatagggggggcattaggtgagtggagtggtgaacgtatttataaaataataggtaactaa

SEQ ID NO: 454884 - DNA, 624 bp, Serratia marcescens
gtggcaagtaaatttcagaaccgactggtcggtaccgtagtgttagtggccctgggggtgattatcctgccaggtctgctggacggtaagaaaaagcattatgaggacgaattcgccgcgatcccgctggtgccgaagccgggcgatgcgcgggaaaacgacgccattccgccggtgagccagccgctgccgtcgcagccgccggcgggcaccggggcgttgatggagcagcaggcggccaacgaggcggcgacgcagcaggcggtgactcagccgcagcagaacaccgcgccgccgccgccgaagccgaaaccggaagtgaagccgcagccgaagccggaggtgaaaccgcagccgaaaccggctgagaaagcgccgtccggtcaggcctatgtggtgcagttgggggcgctgaaaaacgccgccaaggttaacgagatcgtcgcgtcgctgcgtctgtccggctatcgcgcctttaccgtgccgtctacgccggtgcaggggcagatcacccgtatttacgtcggtccggacgcctcgaagcagaagctgcagtcttcactgtcggcgctcaattcgctcagcgggttgaacgggcaggtgaagccgtacagcgcgcgttaa

SEQ ID NO: 454885 - DNA, 162 bp, Serratia marcescens
atgagctataacaaaaaagtttggctgtcggtgttgctgctatgcgtcctgttttgggcggcggtcatcagcatgttctacacaatgcatggccatcagcacccattaaaccgctcaataacacagcagcaaaccgagcaaaacagacaacgcacaagctga

SEQ ID NO: 454886 - DNA, 963 bp, Serratia marcescens
ttggcggaggtatcgatcggcgtggtttcccgggtgttgaaccctggctctggctccgtgtctgaacgcacccgccagcgtattctcaaagccatgcaaacgctgaactataccccgcagagcgccgcccgtgagctaaaaaccagtttgaataacaccattggcctggtggtggcagatatcgccaacgattttttcgctgaaattgccgatcttattgtccgtcgcgccagagaaatggcgatgaatgtcattttggtcaccacccaggaggatccgcagctggagcgggaaagcctggaaatgctgatgcaaaaacgggtaaaggccatcatcgccacgccgaccagcgacaacagcgatatgtggcaatccatcagcgaaatggggatcgcggtgatcttcatcgatcgctatctcaaggacgtggcgcacgccagcgtcattggttttaataatgaagcttctgcccgtgaggccacctgctatcttgcccggcagggacatcggcgcattggctggatcagcgggccgctgaacacgtcaacctctttgcagaggttggaggggtaccagcaaggattgcaagccagcggcattggctgggagccgcagtatgcggtggtgaagaactttcgcgatccgcttgccagccaggcgcttgacgagctgctggcgctgcagaacccgccgacggccattattatcggcaatacttcaattgcgccgatgattatgtcgcgcatccgggcgctgaaacttgccgtcccggaagatctgtcgctgattgtttatcacgacagccactggagccggttactgagtccgtccatcagcgttatcaaacatccgctggaagcgctggccgataaggcgttatccagcctgtctggcgagaagcaggaaccctgtgaactcaacagccggttaatcaagcgcgagagcgtgctccggattaaatag

SEQ ID NO: 454887 - DNA, 885 bp, Serratia marcescens
atggcagccgaaacacgcattggattgttagggaccggactcatggggcaaccggtggcgagacgcctggccgccgccggttataccgtcacggtgtggaatcgctccagggaaaaagcgcgcgccctggaggaatatggtattgcagtcgcggactcctccgcccagttgctggccggcagtcaggtcatcatctgtttattaagcgatgcgcaggcctgcaatgaggtgattttcgacgctaacgcgctgcggcatatcgccaacggcacggtgattgtcatgatgagcaccctgtcgcccgcgatagtgatggagcagcaacgtcaggcaatgagcgcgcaggctgagtatatcgatatgccggtgtccggcggcacggcgggagcagaaaacggtacgttatcattaatggccggcggtaatgctgaggacatcgatcgcctgcgccccctgctcgctcatctgggaaccgtcacgcgtatcggtgacgtcggagccgggcagttggctaaactcgccaatcagatcattgtcgcaggcaccctgagtttattgtcggaagcctttacgctcgcccagcgaggcggcgccgacccggcaaaagtacgcgaagcactgctgggcggatttgccgattcgaccctgctgcagcaacacggcgcgcggatggtgaacgaggactttaaggcgcgcggtgcggcaaagtggcagctcaaagacacgcgcagcgctgtggcgctggctcagcaactgggtctgacactaccgctgacggaaacaataaatacgctcttcagccagatgattgccgccggcgacggggaactggatcactgcgccattatcaggcaaatccggcggttgaacggttcgcctatttaa

SEQ ID NO: 454888 - DNA, 1356 bp, Serratia marcescens
atgaacttagcagcattgttagccgagcgcgccggtgccgtaaaatcaggttccgcgcagcccgtccgggttggcattatcggcgcaggtaaatttggctcgatggttcttgcccagttacgccatcttgccggcttgcaggtggtggccgtcgccgatcttgatgtgaaaaaagcacggacggcgctggcgcgtgtcggctggccggattcccagtatcaggccgcaaatattgaggcggcactgcgcgaaggatcaacctgcgtggttgaggacgcggaagagctgttccgctgcgagcagattgactgtattgtcgaagcgacaggacacccgctggcaggcacgcgtcacgcactccatgccgtcgaacatggcaagcacgtggtgatggtgaatgtcgaagccgatgtcttgtgcgggccgttgatcgccgaacgtgcgcgtaaaaacggcgtcatttacagcatggcttacggggatcagccggccattatttgtgagctggtggactgggccagggcctgcggatttaacatcgtggccgcaggtaaaggcatgaattttgaaccgcgctatcgctactccacgcccgataccgtgtggggatttttcggctggagcgaagaggaagtggcggccggcgacttcaaccccaagatgtacaactctttcaccgacggcaccaaagcggcgattgaaatggcggcggtggccaacgccaccgggctggactgccccgataacgggctggctttcccccctgccggcgtgcatgacctggcgcgcgtgttctcaccggaatctgacggcgggcggctgagccgcagcggtctggtcgacattgccgccagccaggagccggacgggcgggaagtgctcaacaacatccgctacggcgtatttgtcacctttaaagccaaagatgagtacagccgcgcctgtttcaaacagtatggcttgctgacagaccccagcggatggtatgcctccatgtggcgccccttccacctgattggccttgagaccagcatcagcattctttctgcggtgttgcgcggagaggccaccggttcggcattaagcttccggggcgatgcggtggcgaccgccaagcgcgatctgaaagccggagaaatgctggatggcgaaggtggcttcaccgtctgggccaatgcgctgccggccagcatcagcgtggcgcaggatctcttgccgatggggctggcgcaccacgtccgtctggttcgcgatgttgccaaaaaccaggcggtgcgcttctccgatgttcagtttgacaacaatctggatatcgtcgagctgcgtaagcagatggtcagtctggcaggcttataa

SEQ ID NO: 454889 - DNA, 1359 bp, Serratia marcescens
atgaaacacgtagaagagtatgacagttcactggccggcgctgacgttacgccgggccagcctcagacagaaatctcgccactggcgagtggcgcgatcaaaaaagctcggatgcgtttaatgccgctgatcctgatgatgtatctgctggcgtttattgatcgctccaatatcggcatggcggcattaaccatgaaccacgctctcgggttaacgccggagcagtttggttttgccgtcggcattttctcttttggctatatcctgtttgagatccccagcaacgtgctgctggaacgctacggcgcgcgcttttggctggccaggataatgatcacctggggcgtgatttccatggcgatggcctttgcccaaggggtggtcagcctcagtattttgcgctttttactcggcgtggccgaagcgggtctggcaccgggcattattttctatctcaccacctggtttcctaaacaggagctggccaaggtattttccatttactacctgggggtgccgctggcggcgattatcgccaaccccctctccggctatattctggacaattttcatcaggtcggcggcctggaaagctggcagtggctgtttttacttgaaggctgcccgccggtcattttatcgctgattgtctttctttacctcaccgacgaaccggccaaggcttcctggctcagttctgaagagcgccgggcctaccagacgctgatggaaaaagagcggcaggcgacattagcggtcggccacgccggcttaaaggcgatgttcaaggatcgccgcgtctgggttttaggcatggcttacttctttacggtgattggcctgaccggcctcggcttttggatgccgcaatttattaagcgctttgattactctgataccgtggtcggactgctgggcaccattccctatattgttggcgccgtcgtgatgtgctggtggtcaaaccattctgataaaaccaatgagcgcacctggcatttcatcctgccttcgctgctgttttctctcggatttgtggttgccgccatcagtgattcgccggtgatttccatgctggggctgacgctgtcgaccgtcggcatgctgtcgtgcgtcccgacgttctataccctgcccgcctctttcctgacccgccaaggttcggccggcggtctggcgttgattaattccatcggcaatatcggcggttttttcggccccttcctggtggggctcaccatctcccttagcggtaaatcgcaaaatggtctctacctgttatcgattctggtgctgttttcgccgttactgatttatctcctgagtaaaagccgccgccaggtcgctggctggcgttaa

SEQ ID NO: 454890 - DNA, 1662 bp, Serratia marcescens
atgaacgataaaaacacgacgcacaccacgcacgcgctgtggcgctactggcgcggtctcggcggctggaactactattttctgattaaattcggtctgctgtggttcggatatctgaacttccacccgctggccaacctggtatttatggctttcctgctgatgccgctcccttcgctgcggctgcaccgctggcgccactggctggcgatcccgataggtttcgcgctgttctatcacgacacctggctaccgggtatcagcagcattctcagccagggctcgcagctcaccggcttcagcgccgactacctgctggaactggtaacacgctttatcaactggcaaatggtcggcgcggcttttgtggcgctgatcggctacctgttcctgtcgcagtggatccgcgtgacggtatttaccgtcgcggcgctggtctggctcaacctgctggccatcggcggcccggcgttttccctgctgccatccgcccccagcaccgcggcgacgccggggcctgccgctacgccggcgtccggcgacgacaccgccaacggccagctgcccgccgccagcgggccgcccaccagcgctaatctgacggcctacctcgatcggttctatcagcaggagaaaaagcgcgccaccgccttcccggcgtcgctgccggccgatgcccagccgttcgacctgctggtgatcaatatctgctcgctggcctggtcggatattgaggcctccgggctgcagaatcacccgctgtgggccaaaatggacatcatgttcgacaacttcaactcggcgaccgcctacagcggcccggcgtcgattcgcctgctgcgcgccagctgcggccagacgtcgcaccgcgacctgtaccagccggtgaaccagcagtgctacctgtttgataacctggcgaaactgggcttcaaagagcaactgatgatggaccactccggcgtgttcggcaattacctgaaagagctgcgcgaggaaggtgatatgcaggcgccattgatgtcgcagaacggcatcggcaatgagctggcctcgtttgacggcgaaccgatttacaacgatctgcagttgctgagccgctggctggaacagcagaaaaacggcggcgaagcgcgcaccgcgaccttcttcaacctgattccgctgcacgacggcaaccgcttcgtcggttcgaaaaagaccgccgactatgcgccgcgggcgcagcagctgttcgaccagttgaacaccttcctcgaccagttggagaagtccggccgtaaagtcatggtggtcatcgtgccggagcacggcgcggcgctggtcggcgacaaaatgcagatgtccggcctgcgcgatatccccagcccgagcatcacccatattccggtcggcattaagctggtcggcatgacagcggcgcacccgggcagcccgctgcaggtgaaaacaccaagcagctatctggcaatttccgaactggtggcgcgcctggtggacggcaaagcctttagcgccgaccaggtggactggcagacgctgactcaggggctgccgcagaccgcgccaatctctgagaatgataatgcggtggtgatgcaatatcagggtaaaacctatattcgccttaacggcggcgactgggtgccctacccgcaatag

SEQ ID NO: 454891 - DNA, 600 bp, Serratia marcescens
atgcgcatcaaagatgcgcccccttcgggcgttgctgcgcaacgtggtctcgctgcgctcggctcaaacctccttcggaggctatttcgcgcatcctgcgctcacccttacgggccaacgctaacgcgttgttcaaaactgttcccgacagttttgtctcatcctctatccgctacagacgaaaaaaaacctgctttaaaaagcaggtttttcgaatggtggtcggcgagagaggattatgcgcatcaaagatgcgcccccttcgggcgttgctgcgcaacgtggtctcgctgcgctcggctcaaacctccttcggaggctatttcgcgcatcctgcgctcacccttacgggccaacgctaacgcgttgttcaaaactgttcccgacagttttgtctcatcctctatccgctacagacgaaaaaaaacctgctttaaaaagcaggtttttcgaatggtggtcggcgagagaggattatgcgcatcaaagatgcgcccccttcgggcgttgctgcgcaacgtggtctcgctgcgctcggctcaaacctccttcggaggctatttcgcgcatcctgcgctcacccttacgggccaacgctaa

SEQ ID NO: 454892 - DNA, 168 bp, Serratia marcescens
atggaacagcaagcctctatcatcgcggactacttttaccttaaaaactgggggtatgacatgtggttaaaaaacattggcaacatgataaaattccgtggcgtctccgataaatacatctcccataagtataaatacactttatctcatttttttaagcaacggtga

SEQ ID NO: 454893 - DNA, 417 bp, Serratia marcescens
atgaaaaagatacctatactgcttacccttgcttcactccttagcggctgtttccaccttggcgatccacgcgcgaagatctataacgcatccgtggtggtcgttgccaatcacatctgcgtgttaattcagcccgaaggggatgaaaaaatggtctccctgagtattgatgaacccggtaacgatgaaagcatatttaacaaacattatgatggcgacggcttaacggtttcagccgataaatgcataccaacatacaactatccgtttagagccagccatacttacaatgtttccattaccctgcgttcacaagataaaaagagaaaaggcatcgtgccggcagcccgcttatatgacgttagcttcactttaaaagagagggatggtgaactggttataagctctatcaattaa

SEQ ID NO: 454894 - DNA, 225 bp, Serratia marcescens
atgctgctcagcggctgccattcccgttctccttccatcaatgtgctcggtgcctatttccccgactggctgttttgcatcaccggcggctgtctcaccaccgtcgtggtgtacatgattctgacggcgaagaaaaaagcagagtggctgacgccttatatcctgacctaccccttgcttatcgcactgttttccatggggtattgggctattttctttaactga

SEQ ID NO: 454895 - DNA, 1062 bp, Serratia marcescens
atgttaaacgctgcaggaaatacgctaaaaaaacggctgttcgtcgccatactgacggtggtgacgctggccgtactgatctgggtgatcaaaaccattgatgaagcaccgagaaccgatgacgcttatgtgtatgccgataccatcaatgtcgcccctcaggttaacggccggattatcgagatgccgattaaagaaaaccaactggtgaaaaagggcgacgtgctgttccgcatcgatccgcgcccctaccaggatgcgctgagccgtgcgacagccagcctggcgcagcttgaacagcaaatcattctgacgcagcgcgatgtcgatgcgcagggatacaacgcgcgggcagcggaaaaacgcgtcgacgccgctcgggcggccgccgaacaggatgccaatacgctgcgccgtctggaagcgctgcgcccgcagaactacgtctccaaagagtcgctggatcaggctcgtgcggcgcagcgcgcttccgccgcccagctgcagtcagccagactgcaggcgcagcaggccaacgcggctatcagcagcgtggcggcgctggtcgcccagcgcgacgtcgtcaaggcggatatctccaccgcgcagttcaacctcgaccataccaccgtgacagcaccgttcgacggccgtatcacgtcgttaaccaccaccacggggcaatacgccagcatcggccaggcgatctttaccctgatcgacagcagcacctggtatgtggtggccaacttccgtgaatccgagctgcagaatatccgcgacaacgccaaggtcgatgtctatctgatgagcaacacccgcaagaactttaccggcgtggtggattccatcggctatggcgtctacccggacgatggcggctccacccagggcgggttgccgaacgtgtcccgcagcatcaactgggtgtgcgtcgcccagcgcttcccggtgcgcatccgtatcgtcaatccggacgccaatctgttccgtatgggcacctcggcagtggtcaatgtccgttccggcgaactgttcggccacaatgacgataacgcataa

SEQ ID NO: 454896 - DNA, 2085 bp, Serratia marcescens
atgagtgaacccatcgccaccacggagaaacaaaacgccctgctacgctttttacagcaggagctgagcgtattccccggccgttacaacgccatgctgcgctacctgatctcctcgctgatcgtcatcattatttcgatggcgctcaacgtgccgatgctctccttctccctgctggtgatcttcttcgccacacagcagaacatcgtgctgacccggatgatctttccgctatttattctgagcaatacgctggcggtcgcctgcgcgatcctgattctcaagttcaccatcaattatccgctgctaaggctgctcactgcggcctgcatactgatagtgctgctgtacctgatgcgtgcctcccggctgggttttctgtttttcggcgttgccatcaccgtcacctactcacagagctttgtcgatctgagcgctaacggggaaatgctggtgcgtaactgcctgtgggcttgggtagccggctgctatgccaccgtggtcgcgcacgtgatcaatacgctgttcttgccggtcgagcccgtccggcagttacagcaggaaatggggcgtatactggaacgggtcagcagctcgttatactcgctggcggacggcaagcccgtctccgcgcccagcctggaagagattcaaaacagcacgctgacgctgcataaatacttaaaattctccgtaatgcgcgacgccgactaccgcagtcatgaaggccgccatctggcggaaatcgccacggtggagcgtttgtactccgcaacccgcaacctgcgccaactggccgccgacgcgccgtcgccggagattgccgcacactgccgtctgctggcccgggagtgccgcgtattcttgcaaagcatgcagaatggcgcgcagccgtatcggctgatgctgcagcaacgggaacaggccgacgccctgcccgcctgcctgcgggaaatgtacagcgcgctgctgagtatttcactactggacacgccgcagcaggagacagaagcagccggcagtgcatcgcagccacagccgacagcgaaaacagacatttcgtacacctatgtcaaatacgcggtgaaaacgctgctggcggtagcgatttgctacgtgttttataccagcacccaatggcccggtattcacacctccatgctgacctgcattatcgtcgccctgccggggctgggcgcttcggtgcaaaaaagtctgctgcgcatcggcggctgcctggtgggcagtgcgctggcgctgatctgtacggtattcatccagccgcatctggattccatcgtcgggctgctgctgatggcggcgccggtgatagccctgagcggctgggtgaccgccggttcagaacgcagcagctacgccggcgtccagattctgttcgccttttctctggcaatgttcagcgacttcgcccccagcccggaactgccggaaatccgtgaccgggtagtcggtattctgctgggtatcgtggtcactacgctggtacacggcctgctgtggccggaaaccgaaggaaaaacgctgcggcagtcgctggctggcctgtttacctacttcggcgggaaaatcagcccgctgaaactgaacaacggtgcgcaggcaggcggctgggccaaactggaggccacgcaaaagctgctggcgcaggtggcgctggagcccaactggcgcagtaatgacaacgaactgctgacgctgaactgccagaccctgctggggaaactgcgtgaattgcacgtagccctgcatcggctggaaaccgaatacgcgctggcggctgaaaaaatgccgggcagcccgcggctggccctgattgaacaggcgatgctgacgctggcggcggatctcagcgcctacggcgcggggctgcagcacgagccggttcagccggtagtcatcggccgcgccttggcgcacggcaccccgctaagtcaggcgctgcaggacatttcgccggccccctgggaaaaaacgcttttgcttcacgctcaagaggttattactctatgccgttctattccgccatggcgtgcggacggtgaggtaatcctatccaaggtgtga

SEQ ID NO: 454897 - DNA, 537 bp, Serratia marcescens
atgaaaagagaagtgattcagcgcaatgctgacgagaccagaaacaaattgctgctcgccgcgaaaaacctgctggcggaggaaggctatatcgcctttagcgaaaaccgcatttgtgacatggtcggcgtcacccgcggcgcgttgcggcaccacttccccgccggacgttatgatctgatcaacgctctggcgtcgatgttcctgcaggaggtaccggccggcgatacccgtgacagcaaacagcgtattatcgaactgatgacatttatgtatcagcagccgaagcataatccgctggtgctgctgatggagatctggctggccacctcggccgacccacgactggcggcggcggtgaaagaggtgtttgacctgcgctaccaaatcttcttcggcgttgactcaccggagtcgctgcctgagcataccacgccgtatcgcctgctcttctggggcgccattctggccttgcatcagcaggataacgacacccgcagcctaaaggcggcgctcgatttcctgagcgccaactga

SEQ ID NO: 454898 - DNA, 1722 bp, Serratia marcescens
atgggagcgatggggttttatctgcggttgggggatgccacgacctgcggagggagaatactgacaggggatgaaacgctaagctggtatggcgttgccggggcacgagaaggtgatgccgtggcctgtggtaagcatccgggagtatataaaatactgggcggtacatctgacacttgggacgaaggacgaaggttggcaggaacgctggatagtgtcagctcctgcccgtgttgtgcgcggtttataccgtctattcatgactgctatttcaaagaagatacgtcggaagagcaagcggaggaggagcggttactggcggtagcagctcttgccgtaaaggaaaaagagccggcaactaaagaaaaacgcctgacagaagagcaaaaccaaaacagagtctttgccaaatcccgccagcgtgaggccgggaacacagacgcaggaacagaggacgaaccacaaagtaactttgcggcgatgagtttttatcagtccagcccatcgcaacctgctcctgagccagaacaatacgcacaggccgcgaagaagaagagaacttcaccgcctccgccatcagaaccaccaaaagaaaaatcatggtttgataaaataacgggtttcttctttggtgacgctgaagcaatgccacttcctccgcctccggttgttatgggcggttcagcagaagcaggaatggcagcagcagcaggaggggctacagcaaaagcgaatcaggacgcaaccaaagcccttacgcatacgatgaggcacttatccggccctgaaatctggaatggctcgcttgcaatgagtttgccgtttgttgtcatgggagcgattgttcagtcaaaactcaaaggtgaaaaaagcgatcttctaacgcctgacaagctactggaagtcgcacatagcaagggaaccgtaccaacccgagtacgctacaactggatcactgaagatgaaaccggacggttaaaagccgttggctatcatactagtactgaaagcgggcgtgatcgggttcgtgtccgcatgctggaaaagcaaagagatggtagctatgaattttggagcgacgatcaaagcgataaacctctgatcacatggacgccagcgagtacgccgggatcgcaagatagctggaatacaggtaataacagcccgcaagtgggtaccgtaacgatcccggggcttgaacatcccaatatacatggcgtgactatcaccactacgccagtaccggaagaaaaggattttcgggattatattctggtgtttccgggaaatgtacacccgccgatctacatctatctcagtaagcccccggtagaactgctggaagtagagctttatagtgattttaaagggcgctctcggcagggcaagtatgaggctgatcatatgccttcaagagccgcagttgaacaactcttaatggatgagcatcctgggcttgatcaaaaactgatcggtaaaatggcagatcgggtagcagcaattgttgtgccgaaagaagttcaccaaaaaattagtcaaacttacggtggacgtaatactccagaccaaattgtgagggatgcgaagaatttgaggagtgctttggagcgtaattttgatgcgataaagcccgctcttaaagagtgtggggctactgaggaacaacttgaatccgccagagctaagatgcacaagctgaattcagagcaaggattgtactaa

SEQ ID NO: 454899 - DNA, 480 bp, Serratia marcescens
atgtccatcacactaaccattgatcaacttaaacaatcaggacgttaccacgacgccgtaacattggtgcggcaacaactgcaaaagcaaccggcagatgcagttcttcattatcaacttgcctgtctgtatgacgtgcaagggatggaatcacacgccattccctgctacctggcagcgttgtccggcaatttaccggaaaagcagcgtcaagaagcctggctgggcctgggcagcacttaccgggcgctgggtcaatattcacactcactggaagcctttgaaaacggtttggcagaattccctcaggccagggaactcaccctgttccgggcgatgacgctatacaacctgggcgagaacaaacaagcagtagcggaactgctattgttgctggcagaaacctcagcccacagcgacatccttctttaccagcaggcaatccgtcaatatgccgccgatctggatcgtataggttaa

SEQ ID NO: 454900 - DNA, 1353 bp, Serratia marcescens
atggaacacgatgggttagtgcaatcaattattgcctatgtcgatagccgaaggcagccaaagctggaagccttcgataaagacacggagaaaaagctggccgggttaagcgatgcgctggagattgccgccgtcaggcagagggcggcagagcagcggcgtgagctggagcagcgttatgaggtgcgtaactggctgacggatgcggcgaaaaaatcttggcaaattaaatttgctacacatgcacctaaatattctcatggtgactcaaaaagttgcgggattttgagtaaaagtgtgtgtttagaaaatcaaaattatatgtctagcgtatgcatcaataatccagttgttgatgccatcggtaatgctgctgtatttgatgtggtaaaactattactgcagaaaatagatggaatggcactgattgattttctagagaaggacgattcatctgtatttagggctttttctaatgatgaggacttagtgcatgaatggatgtcttgttttaaaaatatgttgaggaatgatgaattaaaatcacattttttatctaaacagctctattttccgatcggcgataaccaatatcacctgctgagtccattgttttcctcctcgttggcgcaggcgctgcatcagcgtctggcgcaggcgcgttttagcgaacaggcgaaggcgatttccgccgcggtccgggcgggaaaatggcacgcggaaacgcgcgtgatgtaccccaatctggcagtgcaaagcatgggcggcaccaaaccgcagaatatttcctaccttaacagcacgcgcggcggccgtaactggctgctgaactgtgccgcgccgcagtggctcacgcagtccaagccgccgttaaaacacacctctattttttaccgtagcagcgagttcagcgcgatagcgcgcgatgcggtgcgacagctgcgtgcctacctgcttagtgtccagcccagggacagcacaatggagatccgccagcggcgcgcggccggcgtcgatgaagtgattgatatgttgttcagctacgccgccggcctccagaacctggaagcgcaggccggctggagcgcggaggcagagtgtcgcctgaagcgatcccagcagctgtggttggatccgctgagagggcgcgtcgatccggatttccgcgccgaacgcgaagccggcgactggcagcgggagatcgcgctggacttcggcgtatggcttaacagacagctggagcatgaacagatgctgtttagcgaagtggaacgcagggaatggtcaacggcgccgctgtttaagcagcgcctgcgtgagtttgaggcggagtgggcggaggcggcgctatga

SEQ ID NO: 454901 - DNA, 375 bp, Serratia marcescens
gtgcggctggggcaggggcaggaagtgttcccgtcgcaggagctggtgttggacagcaacagcaagaaaagcaaaatcctctatcaggtcaatgaggttgctgcgctgcactcacagaaggtgggcaacgccttgcgcactatcgatacctggtatccagatgccgttgaattaggtctggggccgattgccgtggagccttacggttcggtcaccagccgcggcaaggcctaccgtcagccgaagcagaaaatggatttctataccctgctggataactgggtgaccaaagggcaggtgccggaggtggagcagcagcattacgtgatggcgattctggtgcgcggcggcgtgttcggcgagaagggcgaataa

SEQ ID NO: 454902 - DNA, 1677 bp, Serratia marcescens
atggcactaacagatcgcgctatagtccacgccaagccttgtggcaagccgtataagctcagtgactcgcatggactttacctgctggttaaccctaacgattcaaaacgctggtacatcaagtaccgctttgtaaacaaagagaaaaagctcgctttaggtccttatccgcttttgacgcttgcacaggcaagacgcatgcgtgaagaggcacaattactgctgatctccggcatcgatccgagtgcacaccgaaaggctgaacgtcttgcgataacgccggaacatacgtttgagtctgtggcacgcgaatgggtcaccagtaacgtgaactggtcggcggaacataagaagcgggtgctgcgttatttcgagctttacgtattccccacgaacggcagctgcgacatcaccaaaatgaaggtcaaagaccttctggtgcccatcaaggaggtggagaaagcgggcaaactggatgttgcttcccggcttcagcagcgcactgcctgcgtgatgcgctatgccgtccagaacggcattatcgatcataaccctgcatcagatttaaccggcgcggtctccacgcccaaagtacgtcaccacccggcgctggatctgaatcttatccctgatttcctggaaagaatcgacgattacaaaggccgtcaactgactcaactggcggtaaagctggcgctgctgctgtttatccgttccagcgaactgcgctttgcccgctgggatgaaattgacctgcgtaacgccatgtggacaatccccgccgagcgtgagccgatccccggcgttaaatattcagcgcgtggggcgaagatgcactccccacacctggtcccattgtcgcgtcaggccatcgaactgctgcacgaggtgcggcagcattgcagaccgggaactgaactggtgtttcccggcgatcacaattaccgcaaaccgatgagcgaaaacaccatcaacaaagcgctgcgggtgatgggctacgacacccagaaagacgtctgcggccatggttttcgcactatggcctgtagcgcgctggtggagtcgggcctgtggtcaagcgacgcggtagagcgccagatgagccatcaggagcgtaagcgcgtgcgagcggcgtatatccataaggcgcagcacctggaagagcgccgggaaatgatgcagtggtgggcggattatctggatgcaaaccggttcaggcatgtggtgccgtatggctttaaaaagtcgccgggaggcacactcgaccatatgagcttccaggagcgcaatgaccggcagctagaggagctgaaagccagaatactggccgactcggaatggcttacagcgtctgagttatcggcaaaagcgggtttccgttctgccgatcctgaggctggtccgaaaggctggaaagccgccgggaagatattctcgttgaaggtcgacggggaggatctgtacccggattatgttctggatgagaaaatgcggcctcttaaggttgtccgtttgattctctcactgtttaaggagcgtaaaaccccgtgggggctggctatctggttcggttcggcaaaccgcaggttgcgcggcgggaggccgaaagatctgctggtatcaaagtcagagttggtactgctggcagcgcaggatgaggtggagtcgggggagtag

SEQ ID NO: 454903 - DNA, 264 bp, Serratia marcescens; identical to SEQ ID NO: 95611

SEQ ID NO: 454904 - DNA, 1077 bp, Serratia marcescens
atgaactggaatcccgaagccccttacaacgatctgccaaaactgccgcctgatctgcagcagatagaaacacgcaatgtactaaaagcgtgtataaatgcgcgcgcggcaattgcagagctgaaaacggcgggtgagttgatccccgatcaaggattgttgattaacattctcccgatgctggaagcgaaagattcctcacgcattgagaatatcgtaacgaccagcgatcagctctttcagtatgctgatcgtgcagacggagcagatccagcaaccaaagaagcattgcgctatcgtacggcgctttatgatggttatacccatcttgagacctatccactttgcacaaacaccgcaatcgctatctgtaccaaattacgcgcagttcagaccgatataagaaaaacaccgggcacggtactgcgcgatcagaataacagcgtggtgtatacacccccggtgggtgaagatattatccgtaacttattggcgaactgggagcagttcatacatggcgatgatgatttagatccattggtgaaaatggctattgcacactatcaatttgagtgcatccacccttttccggacgggaatggacgaacaggtcgtatcctgaatattctttacctgattcaaaatgaattactttcactgcctatcctgtacctgtcccgctttattctggagagacgtagtgattactacatgctcttgcgtagggtaacagaagaaggagactgggaatcgtggatattatttatgctggaggccgtagaaaacacgtcccgatggacgactgacaagattgcggttgttcgggcattgatggcagaaacaaccgagtatgtacgtgagaagctaccaaaaatttatacctatgaactcatccaggtgctctatgcgcaaccgtattgccggatcgataaccttgttgaacgaggtatcgctaaacgccagacggcatcagcgtatctcaaacagttagtcgagataggcgtgctggaagaaatgagcgttggtcgtgaaaagctgtatatcaataccaggttggtgcaggaattgaatcagtaa

SEQ ID NO: 454905 - DNA, 267 bp, Serratia marcescens
atgtcatcccggacacaccgccagctcgtaagcgttgaagtgatgtggcctgctcagacgctaccgcttcctctgcaacaggtagtcgaagcattgaatcagggcgaaacgcccgatcagattattatccgcatgaaccaacggggtctgctggcgtggcgtgaggatgtatctgtgcaggatacacacgatatctttctggtacggctggacaataagcatgaggcgcggttcctctgtcgctacgttacgctaccgctgcactga

SEQ ID NO: 454906 - DNA, 654 bp, Serratia marcescens
atgaagaagaaactgccagatcttataccaagggaatttattattgcagctatgcgtgcctatgatgagggaatcactcatccgtttagtgagtctcggttatatgacgtggtatttgaaggccggggctacccaccgaaagcaataataggcatcgcggtgttaaatattaccggtgttatgcttaaacccgaaaattttaatggcggtctaaattctaaatgctttaggttactaattgatcaagggtttgagattgttcagaaagaagaagataatgaacagcctgccatcaccatttttcctgatgaactgccaccgcagagcgtatttactgaaggtgccgctacgcaggtaacggttaaccgctatgaacgcgaccgtaaggcccggcaggccgcattagcctggcatggttgcctgtgcaaagtatgcggcattgatatgatgagggtgtatggtgagatagcaaaaggttttatccatatacaccacctgattccgctatcagacatcaaagataattactctctggatcccaaaaaagatcttattcccgtctgccctaattgccacgccatgttgcatcggcgtaatccgcctttttcgcctgaagaactgaaatcaattattgaatatcatgcggctctttag

SEQ ID NO: 454907 - DNA, 396 bp, Serratia marcescens
atggaactaaagtgggtctatttacatggtgacaataataatttcctgcagtggctgaagaaccacaccagttcttcagccacggtgaatacccggaacggcaaggtacatgtggtggaaaaccatctttttttgatttcgccagggatctttaaaacatacgcaactgaaaccacaggcgatagcggcgactgctggaaactggcgcaacgaatgtttcaggagtcagggctggccctgcgctgtaatgatgacagttttatctggacctgcgaggttcggattccacaaaagaaaagtagtcagttgaaagggtttctgatagaagatccgaagcaggtgttgggggagaaagtgccggtgaataatccgtggctgaagttgctgcgcgaatag

SEQ ID NO: 454908 - DNA, 861 bp, Serratia marcescens
atgatggctgcactgcagttcccctgcacgatatttaaaacgcaaaagcgcatggacgattacggagcgagcgatatgcgttgtggagacctgtccgcatcacagctaaaaacgcattttcgactggcggacgtttccgccaccgtagacccgtggacgctgaccagaaaacgtcttcaccagacgcacccgcgcgcctatgcgatggtcagccgcctgtccgccccgcaacagacgctgacccgccgggagtgcgccgccatactatttgatgagctgcgccagctgtcgcggatgtttgccctttatggcccctacaagtacctgatcggcaaaatgatcgaccatctgcaatacggcaacggcacaccgtttgccagcccgcatctggacagggcgttgagggagcatattttgggggatgtctcaaaaaacagcacttttctcttattaagagagataattaaagaaaatattgattgggaaaaaaagtgttatcctgagaaactaaaggaagagctaagagatgcggtgcttagaggaaggcttccaaaatttgatagatttcaggataactttaatgggatgggtatcactatccatgatacttgggcaactcatatcaccataaaatctctacatattgatgataaccgttaccatgctgttatacattacaaagtgcaggatcactttggattggataatgatgatatttcaaagtttaaatttaagcagttccggtttttccgtatatggtttgtacttcaacgattcaatcagtttggattcaaaccatttatgactaacatggaaacaacgatagaaatcattagcgggtataatcgaaatgataagtaa

SEQ ID NO: 454909 - DNA, 300 bp, Serratia marcescens
atgacaaaaccagtatcaaccaccaaaaagccacgcaagcaacatacacctgaattccgcgacgaagccctgaaactggctgaacgcattggtgtggccgcagccgcccgcgaactcagcctttatgagtcgcaaatttacacctggcgtagcaagcggcagcaacaggcaacgtcctctgaacgtgagagcgaactcgccgctgagaatgcccgcctcaaacgccaactggctgaacgggacgaggagctggccattctccaaaaggccgcgacatacttcgccaggcgcctgaaatga

SEQ ID NO: 454910 - DNA, 717 bp, Serratia marcescens
atgttgctatctcaatatttacagctaaaaataaaagctgaaaaaaaactagctgattcattcagtaaaggaatacaaggtgtaggtaatgtcgctagaaatagtataagtgatatatcctctggtgctgagcgactagcatggcgtagttcatgccttacaaataaatatagtgatgtttgcgcagagctgaatcaggaagacaaaagaatgtttctatctgtctatgaggcatataaaagaaaagacgttttcttagatatgtttactctttacaccttatatttattacgcgatcaagatgaaagaaagcttgaaagccctaactcacctatacaaaaaaaagcgatgtcaattgcggggtttacagcaaatggcaaggcgtccaaagtaacaaagcttgctatatcttatgcaatggctaaaggtatagcagaagccgcgccgatctcgatggcagtaagaacagcgataaatggcactagctacatggctttgactggtttgggcttttatgggaaagtgcaaaaagcagctatggccgcccgtcggcttcgcactaccaaccctctgtattatcaggctctttataaaaataatttagagatgctttatatctacattgaaaaagttatcatgtcatttaatatgaaattaagcggcagaacatcgctaactgaggatgatattattatgatattggatggtataaaatga

SEQ ID NO: 454911 - DNA, 198 bp, Serratia marcescens
atgaaattcataataaagtttatagcaaacattgctattgattacattccggtattaataataataatcgccggtgcgttttatgttaagttttttcctgaacattggggaaaacttttgttaattactatcgttgttgtttttgtgcttagtgttaaggtgtttaataaaatacagtttaagtcaaaaagaaaataa

SEQ ID NO: 454912 - DNA, 198 bp, Serratia marcescens
gtgcatttaccagcagcggaagaaatggtttttttagaacgtattgaactcatcgcccgtctgggggtttgttatgagagccaagcaaaagataaagacattgcattgatatggatttcagaaatggccggggagatgaaaacgaatatctgtccagaaaaagccgcgattatccaaaagctcgccgctatttcgtaa

SEQ ID NO: 454913 - DNA, 426 bp, Serratia marcescens
gtgatactgagcggaatttatggagaaaccaatgccaaaggaaaatacagcggacgtgactacaataccgaccaagccggtggccctatccagaatctggactggaaaacggccaacatcgaccgggcaggcgtggataaagtgaggttgcataccgggcggtttgaagactcccccgaaaacaaggtgataattgaccgactggagaaaattttgcagggtaagctacaggcaacggataccgacaagcgtttttatacccatgaaattagggaattggagcgctaccgggcgttgggtattcctgatggcaccaccccaaaaaatagctacgaagtctggaataatactcacacagcaacattagaagattaccagcttagttctgatgaaaacctgttatatacgccagaggctctgaaatga

SEQ ID NO: 454914 - DNA, 363 bp, Serratia marcescens
atgaatgaaaaagatattatagaatctttgaataaccttgagagaaaggtggggggggttatacctgcatcctataagaaatttttatcggaaaatgttaagggtagtgacgcctatgaaatagaaagtaagaatggcgactttatttatattttcaattataaggatgtagaggaaagaaatgaaacatatgaaatacaaagtgttgagcctgatttcctattagttggtcaagatggtgatctagggtattttgtacatctttcgggtgatgatgatggtgtttatagcttagaccttggtgcccttggtagtttaagtatggataaggaggctaataacatttacgcactcgttagttaa

SEQ ID NO: 454915 - DNA, 426 bp, Serratia marcescens
gtgccgctggaggtgacggatgccggagggcagctgtgctggtcgggcaattacgacaccttcggcaaactgcaggggcagacggcggcgggcatcatgcagcgccggggtgtagtttatgaacaaccgctgcgctatgcagggcaataccaggataacgagagcgggctgcactataatctattccggtactacgagccggaagtggggcgcttcaccacccaggatccgatagggttgcagggcgggctgaacctgtaccagtatgcaccgaacctagtagggaatatacgttccgcaggagtgagttctataaacctgtcagagacaaaacgcttaagcattcagtctggagctagaagccctgctgtattgcaggcttggtttcaggaggatagcaacatgtcagggaaattccccctttag

SEQ ID NO: 454916 - DNA, 276 bp, Serratia marcescens
atgattaacttcaaaaaaatgtttgaaaatgaagaaactcaggagaacatttcgttcctttctggacgaaaagataacggtatatcccatcctcaattagatggttactgcaccacgtatggaaacaattacatatcaaacattgaactaatctctttagtacgaaatatgcaagaaaaaggatgcatttcacctaacggaaaaggtggttataaaaaaggccctaactggaaggaaccaaagttcgtcaccgagaaaaaatatggcatcaaataa

SEQ ID NO: 454917 - DNA, 135 bp, Serratia marcescens
atggcctggcaaaagtggagcggtattaggcgcagctatttagaagactataaaatagatgaacgaaatgaacctttgtatactcctgaagcaatcaaagcggcagaggagcaagctaagagggaagaactatga

SEQ ID NO: 454918 - DNA, 921 bp, Serratia marcescens
atggactggaaaaataataaagaaattgctgcatattttaagttttctaatgttatggaaagtgacccaaatgggttacgccaggcaatagtcagaaaaatggcatcaatacatccagacaatactagtggtatttttattgatgatgagtcaaaaaatctatggcaacaccttaattcagcaaaagaattcattgataatcagtctattgagaaatctacggatgaaaatgacaaacagttgatacccatgtcacaagtgatggatttggttaaagtgattactgcgacaggaactcagactgttagtctgacgccttcattaataaagtcagaagttcggagtgatacacgatcccgtgcatttctccctcgattggggtcaggagtatttgcgacgctaagcgctttcttttttacgtttcccaatacggctaaagataacccaatcattggaccttggctacagctccctgattcgcaatactatctattatgtgtatcgttattatcaggatggctatttattagaacttggattcaagaaaagagacaagaagaattaatagattatttatcatctgatgaaggacttcgaaggattctatttaacatgttctatggacatgttgaacttaacatgtcaggacgacagttttcgcttcctagtttcactcgcgctattaaattaaggcatagtaatcgggagcctagtattgtaagaattatggaagtatataaagctgtattattgggtgcaacgcctaagttatctcgatctattgtagataaaatagctttaatgcagatcgataaacttattcagcggggattggttgtggaattaccccattccggattggatcgggcattcgaactttccgaggctgcgtataatgatattcgtcatagacattattaa

SEQ ID NO: 454919 - DNA, 780 bp, Serratia marcescens
atgagcgaaaaagatttttcacttttttattttgcaaccattgatcgggcttacttcctcgacaaacacaatttttatgtttctgaagccagaaaacgtttattttcgcagtttagcgattctgatcttgaagctgaagctcggcagaaagaaaaagattactatgaggccgccggtaagcgttttgaccccgattatgacgacgagggggctatctgggaacaggctcatgatgaaggaatttcacattggattgccctcagtgatatgaaaaatacggtttcacttgctctgacagcaggaatgtttcatcagttcgataaggaacttcgagaaaagtgtatccgtgaattcagccattggctcgactctaaacccgtaacatcgatgatctgggacatcggcttcccaaggctaattgaaattctagaatgggttgggatggatatcaccggcaaggcttattacgaaaaaatcgatgcctgtcgccaagtagtcaatgtttataagcacggtgatggccatgcccatcgggagctttccgtcgcgcatcctgagtattatcaggatatcaatattccaggaggctatagatttagtctacgtcatgagcaacttgaggttacagaaacacagtttatagagtttgcagatgcgattacagctttctggaatgatatcccaacacactgtatgcgatcagctattcgggaagaacctgaatggataaatggcgaatataaaaagcatgagaagaaagttaaaatgcttcaggactaa

SEQ ID NO: 454920 - DNA, 603 bp, Serratia marcescens
atgaacacgttaccgtggaacaaagaccgtatcataggccaaaaaagaccacttcagatatctcatatctggggtatccgaatccgacttgaactggaaggtaaaacgcgcgatttagctttgttcaatatggccctggacagtaagcttcggggctgtgatctggtcaaactcaaagtatctgatgttgcatatggtagctctgtttcaagcagagcaacggtattgcaacagaaaaccggtagacctgtgcaatttgagataaccaaagggacaagagaagctgttgctgcattgataaagcttggcaatttgcacagtaaagacttcttgttccggtctcgggtcggaactaaccagcacatttcaacccggcaatacaaccgaatctttcatgggtgggtagaaaagcttggtctcgaagattcgctttacagcacacattccatgagaagaacaaaaccttacctgatctacaagaaaaccaagaatctccgggtgatccaacttctgttgggccataagaaactggaaagcacagtccgttatctgggcattgaagtcgatgaggcattagagatctctgaatcgatcgaagtctaa

SEQ ID NO: 454921 - DNA, 582 bp, Serratia marcescens
atgcagcattatggcctgcctacaagacttctggatataacatctaacccactgatagcattatactttgcttgcagttcgaatcctgatgaaaacgggcaggtgatttcgttctcaacaaacagaaagaaaattaaatatttcgactcagatacagtgagctgcatagcaaacttatcagttttatcttacgaagagctgaaaaaattgtcttccattgatgtcagaaaagatactgtaaagctatctgaactcactgataaacttgcagaccttatacagaatgaaaaatcatatttcagaaacaggataatccctgatgatttaaaaaaagttgttatccttaaggctaaaataaataatgaacgcatacagtctcaggcaggcgcttttcttttgttcggacttgatcccattttaccggaagcagatgctgattttcctcttaacagagtggagatagcaaacaaaaataaaattcttgacgagctggcgcagcttaatatatccgaaagcactgtatatcccagcatggagaaaacggcagcggaaattgcaaaaaaatatttatcgatatcataa

SEQ ID NO: 454922 - DNA, 681 bp, Serratia marcescens
atgtttaacttaatcatggccggagaaccggacgtttttgaccgctggccgtgtatggatcctgagctgaaagaaggcgaggatagcttctcgatgtcccgcatgctggaaggcaccccaagcgatatttacagtaaattaataccagtaagacccaataccttaaaagcactcgccatgctaccggtgttgttcatgaccgaaacttatatgaaagatgatgaaaatgataaaaacaagtacattagggtcaggcttgggaaaataaggcatttacgtaaagatggtgatgatattctattttccttcgaaattaatcatgattttggagaaataacaaaccccaaaccggcattatataaagaaaccttagagctaggatctttcgggttaagtcgtacgcactgggcagtaaaagataaggatttgaatattgttctggaacggctgggtttagacaagaaaaacaaccgcctgaaaggtacaataaaattaaaaaaacaaaaataccaggtggttgaaaatgtcagagattatcttgattttattaaaaaaatactcgggatggtctcgttaccttttatcgtgggcactctaaaagctcatatgagcttgtcccctctctttacagaaagaatgaaaacgggacgtacaggcatcttgcttctgaatctgacttag

SEQ ID NO: 454923 - DNA, 822 bp, Serratia marcescens
atgcagtcaatggggatgggaaagaacatggtactttctgtccggcactggattcgtgcactgaatttggtgatatgcgttgataacaaagaacaaatttatcaactgacaccgcttgctgaacagttatttactcataaaaacggtagagcagcgtatgatgaataccttgataagatcgggacgatctggttactacattggctattgcaatccattgatacaagaaatgctgaattaaatgcgtctcgttttttatttaattatttcaatgggataaaagtaaagaaagagtttttagcaaatgaaatcaaagatgcactaactaatcacgagaaagagcttactgaagaaactctaaacaaagatatcgactgtctgttgcagatgtatgcacataagtcattgcaatccaaaaaaattaatgaggacagctttgcttcacctttcacagagctaggtttgttgaagcaagaagatgccaggagctacctggcagaactttctcggcgtccttcactgcccgtagaggtctttacctatgccctcattgactatatgcagagaaaacaccaagagagtaaggtaaacacgttgtcttttgaagcattactgaatgacgtaggctctcctggtcgagtatttcgtttatctgctgccgggcttagtgacaaacttgatcaagttgaaacattaaccgaaggcaaaatagcctggacagatacccaaggtttaaggcaagtacagcactgtttcgaagatatcaataatattaaagctgatcagtaccttaagcattactatcaaccagaaggaaaataa

SEQ ID NO: 454924 - DNA, 3348 bp, Serratia marcescens
gtgactcttagtaaactttactctatcgctacacgccatcaacgttctacccgtatcgatagtgatttgagcgccgatttctttcctggtttggtttaccatggaactgcacaatcttccttagaaacgctcttccggcagtacaaacaaaccggacagagcgcctatacacttactggtgcttatggttcgggtaagtcgacggttgcgttgcttgtagctggtttactgcatgctgatattaatattcgtagtgaagcactcattactataaatgatgagtctaaaattctattagaagaaagtgtcccttaccaggaagggtggttacaaatacgctccgtaggtggagtgagaggccctatagaatcattttggaatgcaactcttagagcactcgaagaacatccaaagacatgcaaatccagcgtactcaataagtatagcaaagtgagcgtagagagtgacagtgagctccttaactcatggaaagccctgtttgaagacattgctccatacgttgatggtgtacttatcatcgcagatgaaatgggcaaaagcctagagtacattaaccgaaatggtggtgatttacatttatttcaggatatcgcagaagagctatctaggattaacacgccagttatttttttaggattgttacatcaggcatttagtgaatatgctaaagaacgtggcaccaagttacaggatgaatggggtaagattcaaggacgctatagcgatattctttataacgtatcaactgatgaaacggttgcattaattagtagctctataaaaacaatattaccgaaaaacgatggtgatcagctcgttaaacgtgtacttgtagcccttgaagataagcgacagcgtaaagagctgctacttacacgattggagcaatgtattccacttcatccattaaccgcgttgctattagggcctattgccaagcgaagatttagtcaaaacgaacgcagcacgtttagttttttgaattctcatgaacagttcagttttcagcttttcttacagcaaacaagtgaccaaaacgctcgatatgatcttagtcatctttgggattatttagaagccaatatggaacatgctattttgggatcccctgatggtcatggttgggcgacagcagctgatgcaataagaaaagccttgaaacaagacttttcaccgcaatgcatcaagctgcttaaaagcatagctttgattaccctgtttggtaaatctgccaacctcaccggcactgagaagatactgcttaccgcaaccgagattacacagcaagaacagcttaatgcgtgtctacaacaactaaaagacgcttcctgtattgtatttagaaaatatttatcctcttgggtggtgtttgaggggtctgatctcgatattgctggtttagttgaagaaaaacttgaccaacttcataatagtcatgaagcgattgaacgtattaattttagctcccaagttattgctaaaggccattatcatgaatttggtacattacgatgggctgctcaatcggtagcaatgcaacttagtagtatcgaaattagttcgttacttacatctcgaaatggtgaattcgcgaatttcttactattactaaaagaagaatcggaagcgcgattgaaggagttgacacgaaataacaagtcactgatgcttgcttgtgcaccaaatgctaatgaaattattaaccttgcgaatgaaaaatacgcgttagatcttatccagagtgataaaataactggagctgcgcttactcatgacaaagtagctcgcgaagaacacaatgctcgtacttttaatgcacaatcagcccttgaaaccgctttaacctatgcattcaacaacgcggtttggtttcacaacggagttgcttatgccaaagagaccattagtgaaatagcaaccttcgctgccgacaacatatttttccaaacacctaaaatcctcaacgagcttgttaatcgtaataagttgtctggtaccgcagtttctgctttaaaaaagcttctcgaagccatgcttgataaagaagactgtgaagatttaggtattgaggggtttcctccagagaaatccatgtatataagctgcttaaaaaatacatctattcactcggccgaaggtgaaaaagggctgcattggttcagagattatttggatacaaatctcagtgccgtgtttgccgcagctgaacaactattgaaagatcgcaaaggtagtgaagttggtttgtctgaaatcgccgaattatggggtagtgcaccctttggtttaacgaaaggtgttattccgattttcatactcgcttttttgaaatcaatgggtgaacaaatcgcatattatgaaaaagatatgtctggcgaatttgcctttatcgcagagccagacagtgactatgttcataaactgatcaagaacccaggcgatcttgccgcgaaatatatcgtattagcaactgacgaaaaagagtggttgcaaaaccttgcgattttcgctgcagcggaaaccaaccgtaatatttcaaataatatattatcagttgcgacaccattagttaccacaatacataatctaccgcagtgggtaaaaaatgcacaccatattgtgccagataatgatgcacgtaataaaacctatttgagagtgcgagatctttttttgcaagcaaatgatccacatactctacttattaagaagttacggaaagagctggtagattttggtgctaatgattttacgagtcaaattgatcttttggaagactgttttaaaactctcaggcaaaagcacgagcaaatgttagtttcgatcaagaccagagtaaaaaatatttttccagaaaatggtgaagaattagctcaaatgtgccggtacgttgagacaaattcaggtgacttgcgcttaaaagcttttgctagagagctcgccaaaagtgatactggattattacagtggctagagagcataattcaaattgtcactgggcgcggaaaacaaaactggaacgaaggaattcttcaaacagcatcaaacaaaatcagtgactacgcacaagattttttgagtgtggtaaagtcgcagcataatgacgaagctaactctagctctggtaaaacaaaattggtctccttagtattagaaggcgatgatggtaagctaacctcatttaagcgagaaattagagttgttgaaatggatgaattgcaaaacacaatgaatactattgaaggtcatctttctgggcttgatgaattccataaaatcaatgtgttgcagcaattgctgagaaagtcccttgaagcaaaaagttaa

SEQ ID NO: 454925 - DNA, 900 bp, Serratia marcescens
atgagtgatgaacgcaaggtgaaacatgttcttggcctatcaggaggtaaggacagtgctgctctctcggtgtatatggctaggaactatcctgagctcgacatcgagtatttctttactgatacgggcaaagaattacctgaagtttatgaatacttggagcaactagaaattgttctaggtaaacctattctgcacataaacgacaaaaaaggatttgattattggttagagcaacacaataattttctccctgcaggacaacaacggtggtgtaccatccgtatgaaactcgagccatttgagaaatggattcgccctttcctcaacgatggctatgaagttatttcttatgtgggtattcgcgctgatgaaccttggcgcgatggttatcgtcccaatgagaaccaaaaatatctcacaatcaaaatgccgtttgctgaggacggcattaaaaagcagggtgtactcgatatattagatagtgcagggcttggtttaccgaaatactacgaatggcgttctcgttctggttgtaccttctgcttcttccagagaaaaattgaatgggtacggctacgtgaagagcatcctgaggcttttgaagaagctaagtcttatgaaaaaagagctgaaactagtgagaatggcgaaacttttttctggatggggccaaatgaaccattagaaacactggaggacccagagcgtgtcaagcagattaaggaaaaccacgaaaaggtaaaagctcgtttcgagaagaaaaaacagcgcgagagaaaacgtcgattaggtatgcatgcaatggtggatgaaagcatgattattgacacgttagatatggacgcgatgtatgatcttgaagagggtggcggcgcttgtattacatgttataagtag

SEQ ID NO: 454926 - DNA, 546 bp, Serratia marcescens
atggaaaatggacatgtaaacaaggaaggttcactgcggcgtctgactttaggtgaaatagcgatggctcgccgtgtatttggtgattctattgtatatagccgcgtatgggtacattgtgaaagttatcttccatttggactacagaataaaaatgtagcaatggctccaaatggagagctttggcttagaaaggaactatatcgacacgatttttctgttaatactgtcattattgatgataaacatttatttattcatgagctagggcatgtatggcaacaccagcatggtcaatgggtaagaatgagaggtttgttcagttgggctgcagagtatcattatcggttggacagaaaaaaactcactgattatccgcttgagcaacaagcttctatcttggctgattattggctattgttggtctatggtattgatagatggcgttactatcagaaaataaagccaattgttaaatacaggggaacagatcatttgcgggaaataccttccctttataagaaaattgttacaggtaaaggataa

SEQ ID NO: 454927 - DNA, 135 bp, Serratia marcescens
atggaaacccccgtgtccaactattgttgtgccttctcgcttttattccattgtgttgaccaatcccgaattggcattcttgccctacattttctcaatctgttttatctggtgaagtattctcaggcgttttaa

SEQ ID NO: 454928 - DNA, 3171 bp, Serratia marcescens
atgctgcagcaggcgtccttccgcatcgtagccgtagcggatttctccgcgcagcgcatcgtcaacgccggctatctcgccgcgcccgctgtagtggtatacccgccacagcacgccgtcctccggcttcgtcagctgcccgtggctgaagccgctgctctgccaactgcgccgccccagcgcgtcgtactgtcgccgctgctgcagcgcgccctgcgtgcgcccggtctcccggtgcagccggtcgcggctgaactcgctcaccagttgctgattgaacctgatggcgctggcgtggccggagccgtaatagagccactgcaaccggtcgccctgcggcagcgtcagcgcctgcaggttgcccagcgcgtcccactgatactgcagttcgccgttgacgccctgctcgctcagcaggttgccggcgttgtcgtaacgcagccggatgctgtccggctcgatgcccagcgccgcgccggcggcggtcggcgtgcgcgtcagcgtcgtcagccgcccgccggcgtcatagccgtagcgccattcggcgctgtcggtggtgcgcgccgtcagttgccccgcctcatcgaagcggaagtgctgccggcgctccgcctgtgtgccgtcggcagcctgcgcgccggtctccaacagcatcgtcggcagcccgtcggcgccgtaatggtagtaacgccgcagcccgtccggccgctgctccgcctgcaggcggcccgccgcgtcatagctgaactggtagtcggcgtcgttgccgttctccagccgcgtcagccagccgcgcggcccgtagtggtagcgccgcgtgcggctgatgcggtcggtaatgctgaccggctggcccagcgggttgtactgccagcgcgtctcgctgccgagcgggtcccggtgtgcggccagttggccctgcgcgttccagccaaactgttcttcgctgccgtccgggtggagcaactgttgcagccggccggcggtgtcccagcggtagcgggtcagcagcccttccgcatcggtgtggtgcgtcagttggcccagcgcgtcataggtgtaggcggtgacgctgccggaacagtcggtatggcgcgtcagctgcccctgcgcgttccaggccagccgcacctcgccgcccagcgcgtcggtaatgcagtccggcaggctctcttcatcgtcgggatagtggtagcgcgtgacatggccctgcgcgtccgtctgtttgccgagccgcccctgcgcatcccagtgctgaaattcctggctgccgtcggggtaggtgaccgagaacagacggccgctgttgcgggaatactgataggtggtggtgcggcccagcgggtcggtctcgctcagcatgcggccgtacgcgtcccactcgctctggcgctgcgcgccgcccggcagcaccacgctgcacagttcgccgcgcgcgtcgtagataagcccgtagcggcggccgtcatagtcggtgaactgcgcgacgttgtcgtcatcgtccagctgccacagcgcctgtttgccgtcgtcacgcaccgcccggcgcgtcccgctggcaacatcgtaatggatgtccagctgctcaccggcgctgttgcggtaggcgaccacccgcggcagaccgtcaatctcctgccagcggtattcgttcagcaggccgttctggtcctgatggctgaccatcagcccgtcctgccagccaaagcgccgcgtcatctcaccagcacggttgcggacggtaaccagttgcccgtcgtcgtcgtactcgtagctcgccagcacctgtgtgtcctggccgttttgccacgctaccgccgccagccgcaccgcgccgccggccgtcgtcaggtagcggcaggccagacgcagcccggcgctgtccaccagctcgctcagctgccccgcgtcgttgtagaacagcgaggtggcgttgccgaccgcatcggtcatcatgctcagccggctcggctgctgcgcctccagacgcggatagtgccacgcctgttcactgacgtcgaacacctgccagctgccgtcggcgttgtgcatcagccagcatttttccgcttcgcagtaggtcttgtggccgcgcggtaccctcgggaaggcgacgtagtcgccggacggcgcgcgccacaccagcccttcctgccaggtctgcaggctgctctcccaaaacaggctccagccgtgccccagcacgccttccgccgggttgccgctgcgccagtagcgctgccacgccaccggcaggcgcgacggcagcacaaagtccagttcgtcgtcgccgtcgagaaatttctggccgctgaccacgtccagcggccgggcgataatgcccgtcgccgcggtggcggtcatcagcgcgccggcgcggcaggcgacgcggcccagtttgttgatgcccggcgccttgctgagcatgcgtccgagcgcccccagcttgctggccgcaccgccgacgccgcctatcaggccggcaaacagcagcgtcaggtcggagattttatacagccagtcgggcacttccggcttgatgggcagcgtggtgacggtgccgccgccgatgcgcacatcaggcgagccggccatcacctgcgcgtcgcagttggtcttgtcgccgctgcgcaccgccggataaccgttgataaacaccttgtccgagccctgcgccatctgcatgctcgggccgtcgtcctcgcaggcgacgcggctgacggtggcgatggccgccggtttgccgttgatgaacacgttgccggaaccggtcagtatcgtgcccttgggcgacagactgccagcgccggcggcggcaatgccgtcgcgcgcctgggtcgccagctcgccggagaggtagcccaccgccaggctggcgccaatcagcagcacgccgacgcccacgcaggaggccgccagcccggcgacaaacagggcgcccgccgccaccgccccggcggcggcaatcaggccgccgataagcgtgccgccaatcatccctgccagcgcgtgggaatggccgatgctgtccccgacgcgcgctgcttcacccatgttcctgctccttttacgcccgtgaggcggcatccgccgccggctgataactcgccaatacctgttgcagcaacgcctcgtcctgcgccgtcagcttgcgcggctgcgccagcgtga

SEQ ID NO: 454929 - DNA, 927 bp, Serratia marcescens
atgtcaatactttcctatagcggaaatgatatgctgaatgattactactcatgcagcgagggatctgcattccacagagacatcagcgaaaagtggccttcaatttgcgcacaagttcgcgatcacgccactcacgagaaatatcattttactctactccgaaagcaggtctcaaaggttgatataggtaacgggtcatttaactgggtgcatgctgaggctggagaggcaatggcattgctgatggggatctcagatgtcggcagtattccggtatgtgaaaatagattggcattcctcaatgacggcataaatagatttctatcgttatatgagagtgaaatggaattcatcactgatttcatttccactttggtatggttaactcctaaaaatacaaccgccaataatggaaatgcatcattttacgagcttccacatattacctttatttccgatgccaccctcttctttgttccaccgtaccatcagcttccaagagagttcgggatacttggatttgtcgaaaatctttatcacgaagcactccatcatcaggtacacgcgttcaacgcatttcatgaccagcaatattgccatggaagccatggagcggcgctgattaatttcccgcagcgacaagaccggactttcagttatactcaagcgttcaatgcctgttacgtctatggtgaaattgttaaatatcgacgtaaagtggctcagcacctttctgagacatatcgaccagaagaattgatatggataaatgaagcagtaagtactgcaaaaatgatgcgatttaatctggccgcacggttatatcacgtcagggacaccttcttacctccatggaaatcactcatcgaagaatggaagtttgaaaatgagacggataaatatttcaattcggagaaatcattatga

SEQ ID NO: 454930 - DNA, 783 bp, Serratia marcescens
atgagcacaatctctgtcattggcagtggcatgctgggtgtcaatcaaatcaccacagaaggtttttccgtcattcagaatgccgatagagttttctggatcggagacattgctggtctgaacgaatatctttaccatcatgaaatatatcatgaggacctatcgcatttgtatgaagatggcggagtcgatgttgacaattatgccagtattatccaatacatgacaaatgcgctttctgagtgtgaacatgtcggccttattgttcctggtcacccgagagtcggcgtgacgatcgttcaattactgcaaaaatcatctcaggatgggagtttttcttttcattgttatcctggtatttcgagcttcgacgcgatgattaatgatattggcattgacccattggaagaaggtgtcagtgtactcgatgtaaatcggctgatcatctatgattacgcaatggaaccctgtatcaattactttatctatcatgtctgctctattggtaattccaatacggattactcatcaccgcagacatcaaataaagtcacctatttgaagtcgaaattattaaaacattaccccgctaataccactatattcttgttgagtgcatcaaccgaaaaaggacaatcttcggataagttacaaggtgatatttctgatatagaggcattactttcaaaagtcacttaccgccacacgctttacatcccaggctctttacccaccaaggagagggtaaacttcgagtttttgaaagaaattaatatttcttag

SEQ ID NO: 454931 - DNA, 138 bp, Serratia marcescens
atgaaggctgatttagacagcaatcaggactatatctataacgacggtaaattgccgccgattttccgaccaaacctcaagagtaaaatgaagagagtagttgtttcttcatttattaattacgtgaataaaaaataa

SEQ ID NO: 454932 - DNA, 1407 bp, Serratia marcescens
atgctactggaaaaaaagcaacgtgagctagagattgcggaaaaagaatatgaagctcaagtaggtaaacttgctcgttttgataagacaacaattgatgaacaacttaagcttcgcaaacagaaaacagagttacttagtgactacgcacggcagcataagcagttcctgtctgaaaaaatctcaaaaacacctgactgggcattgacgacatttagccaaaagcttgcttcgttcgatgtttcagcaattaatactgaagagctcaataagtcattacgttataccgtagacaggcaattgttacgtgagattgtacacaataacgaatgtatttgcggcactcatattgaaaaagacagctcagcggcacggcttttagaggaactcggtaaacatgccgttgaccctgatcttaagcaccgttgggtgagagcgaccaagctacaacaaagaattagcagtcagcaactaccaaaagctagtatggaaaaattattagctgatattgatgactacgaagttggtatgcaggaacttgaacacagtataaaagagttaagttttacgattgtcgagtctgacattgatgatattaagattatcgaacgtgccaaagatttggctaaatctcagtgtgaccaacttaaaggacagattcctcagttagagcagaatatccgtaaaaaagatatcgatattaaagaaattgatcgccgagtgagcagtttgtcatcgactcagcccaaggcccagaaagtccgcaacctgattctagcgacagacaagataatcgagttatatgaggaagctatgaattcctcgcaaaatggagttgagcaattattattgaaaaagatgcaatcattgtttagtcaagttgcttttaatggctacacggttcaaaaggacaccaacggaaaatcagggagctttacatgggcaattgttgataataaaggcaaacgtgcagccgctggtaacggatatcaagctatgcttgcgatatcttttatcgtcgcattaattgagttctcgaaggttcgcgcatataacaagcagcatcttcttacccctggtactattgccccatttattgcagactctattcttgcctttatcggtccagataacggtcgagagcttgttcgttacatcgcggagaaagttgagcagtcaatctttttgttttctcaagctcagtggactgaaacacataccgacaaaggaatacggcataaaataggtaaggagtataatcttgttcaacatacagtgcttaccaaggaagaatttaaaggccagtatccgacgcaacttacggtgaatggcgttaattacgaagttgttcgttttggtagtgattttgacaaagtaactatcgaggagattcctacctatggctga

SEQ ID NO: 454933 - DNA, 453 bp, Serratia marcescens
atggctgaaattttagactggcgtaagttacaggttcaccgggattctcgtttcgaatctttagaagaacgattttgctcgacaaaaggagctaacaatgactcccggatgtttagtacagtcaaagaactaatggtttttgctgcgttagtgggatatcaactagatgaatatcaaccacttgagcctaagattaaaaccacgccgatcctgttggatacttatgcaacaacaggacatgatgcttatatctatcttcttgcgttaacaaaagcgtcatctctagacattctcaaagatgaaaatttaagacaagcaattgatatttttgagggatattgcaatagtggtctcaaaatcattgatagttggataatgaataatattggtgagccactagtgactaatattatatttaatcaaacattagagtacttagttgaaaatgaataa

SEQ ID NO: 454934 - DNA, 1062 bp, Serratia marcescens
atgaataattactacgactatgctgcatctacaccagtttctccgcgagttctagaggcgatgagaccttgggggaccgaaaattttgcgaatgcttcttctgcgcatcaagcaggaaggctgagctctcaagcaatccaacaagcaagagagctaattgcagataaaataggttcacttcctagtgagattatttttaccagtggcgctagtgaagctaacaacttggctttaaaaggagtagctttcaaacatcttactaccaaaggccacattattacctcagctatagagcacaaatgtattctcaatacttgtgcatttctggagtcgattggcttcgaagtgacttatatcccccctgacaggagaggctgcatatcgccatcctcactcgctgcggagataagagaaaatactatccttatttcaatccatcatgtaaataatgagctagggataattcagcccattaaagactttggtgcgatagcttttgagcacaacattccttttcacactgatgcagcacagagcttctgcaaatgcgatattaatgtcgatgatatggatatcgatatgctttcactgtctggccataaaatttatggacctaaagggattggtgcactttatgtgcgtaatgctagaaacgcagaattagttccccttattcatggcgggggacaagaggctgggttacgtggcggcacatcgcctactcccttgatagtagggcttgcagctgcagtagagtgctaccctactcaagcaagcccaatcgaaaagcagtttctagatcttatggtgcaatatgatttcataagaaacggtagcgaggcagtggtaccgacaatctggagtgtaacctttccctccgatgaggaggtaaaacgttttacgaatgattgtccatggttcatatctcaaggttcagcgtgcaatgctctttcaaatgtagcttcccatgttttaacagcaatggggatgtcggaacaagtagcgcgtcgcacttaccgcattagtcttccgccgtataagattagtgacaaattagcctaa

SEQ ID NO: 454935 - DNA, 1941 bp, Serratia marcescens
atgcatgagcttccatctgaattgcaaaaatttataccagctgtggcccgagcagtgaacttaccggatgaacaatggaacctaatcaagttgtttaagaacgaatttcgcttatcattactcaactaccccaacttttatagcgactcgtaccctgtcttggaacaaagtctcaacgtagatttgagcaaactcagtcataaagtaacttgctaccgttcttctgataatccacctattttacaccgaaaggaaaccatgattttgccggggagtgactactatgaacacttcactacattgacagaagaaggggagaaggccgggttgtacgaaaacacccgtactataggattcaaacgttcttggctaaatttgattcacaaaaaaggttaccagctagttgaagggcggttactcagagcagatagcgcacctccgagtattggcgcttcggaacctggcatcgatcgctacaagactgctattgtccgctatgagttatccgggccgatgaaaacgttagctaagcaaggctatctagatggccgtttttctatttttgactatgggtgcggtcgaggagatgacctaagggagcttgaggcaaatggtcttgatgctttaggttgggaccctgtattttctcctgataacgacaaagtaaagtctgatattgtgaacttaggttttgttctaaatgttatcgaagatcaagatgaacgcctcgaagctctcttgagtgcttgggatctagcggacaaaatacttgtcgtatcagtaatgttagctaacgaggcgtatatcgagcagtttcagccttataaagatggcgtaattacttctcgaaataccttccaaaagtattatgcgcaatcggagttcaaagagtacttagaacgttccttgcaagatgatgctattgcagtcgcgcctggtattttttacttgttcaaagataagttagaagaacaacgttatcttcagagtaagtatcaaagacgttataattggcaacaactcacttctcctcaacccattgagagtaaagatcgagcaaaacttgttattacccaaaatagggagatctttgataatttttggaatgtttgtctagagcttggtcgtataccggcaaacgatgagttcaagagttctgaagaggtgagaaacttgattggatctcacaaaaaagtctttggcctgcttcaggaaatgtttggtgctcatgaatttgctaatgcacaaaaatcccataaggaagatctactagtatattttgctatgggattatttgagaaaaggaaaccatatactcatcaccctgaaaatctaaaacgtgacatcaaagctttatttggtgattaccgaacggcgaataatcttgcgaaagaattactttttgcgattgcagatacgcatttaattgaagaagaatgcataaaagcacacgagcaattgcctgcaagtattcttaataatggacactctttgattctccataaagactatattgaggcgctgccactcttattgcgtgtttatgtcggtgctgcattgcaactttacggagaactagacgacaccgttgaactagttaaaatacatattaactctggtaaactcacgttgacacgctacgatgatttcagcaaatctgttccttatttgatagagagaaccaaaataaaaatggttaatcaaaatatagatttctttgactatctagatgaaagtcgccgcccgccactgctcaataagcatttgctactaagtaataaacacgaacaatatgaaaaacaaaagaactttgatgaacgattgtcaaagctcttgggaacaacagccacgggcgaggttatcttgaacaggcagatatttgaggaacggttagcgcttaccggaaagcacgtggctggctttaggctaatttgtcactaa

SEQ ID NO: 454936 - DNA, 1242 bp, Serratia marcescens
atgttgaagtggctacaaagaccatcccagagccagccacctgcgccagacgcagcgctgccggagggttggtttgcgccactatccgcagaacagttgctgacggcaccgttacgccaatcctgtttgcagcagttacggcaactgaccccgctgccggataccctgttcgatagctggatcctcacggcgattaatcgcctcgccgttctagtacaactgctacccgcctcacaaagtcatcatcattccattcccggtggactactggatcattcgctggaggttgcctgcaacgccatccgactgcgccagggttatctgctgccaccggaagcgggtgcggaagaacaggcccggcaggccagcgcatggacggtcgcagtggtctgcgcggcattgctgcacgatacgggaaaaatcgtcgtggatatggagattcatcaacgtgatggcacccgctggcatccgtggcaaggtaatctggcactgccttatcgctggcagtaccagagccacggtcgcgactatcatctgcatccggcggctggcgcaatgttgattaatcagttgataccctcgccattactggactggctggccggatacccggcggcttttgcgtccctgatttatcagctcaccggacactacgaacgggctggcgcactggctgaactggtgcagcaggccgataaagcctctgtcgcccgatacctcggcggcgataccaaaaccgcgctggcgcaaaagccctcttccttcccccagcaacttcttacagccttgcggtcgctggtacagaacgagtaccggctcaataatcccgaatgcggatccgatggctggctaacggaggatgcgctgtggcttatcagcaaaaccaccgccgaccgggttcgcgcctggctgctccagcatggcgtatctagcgtgccagaaaacaataaccgcctgtttgacgaactgctgacgcatcagcttatcgttgccaatgaggataaagcgatctggcgctgcattatccgatcggataagggctggtcgcccgttgaaccgctgacgctgctgcgcctgacaccgtctgcaatatgggagccaggcgaacaacgtcccgccggttttgccggtgatgtgatgccggtaagcgaagctgaacctgtccctgaacttagcgctcccactcaaccgctgccggagatagcagacgacccgaggcttggttgtaagtaccccgcataa

SEQ ID NO: 454937 - DNA, 267 bp, Serratia marcescens; identical to SEQ ID NO: 442389

SEQ ID NO: 454938 - DNA, 231 bp, Serratia marcescens
atggaccttgatgcctttaaagctttgttaaagcaagtcgataaagatacccagatcgctcatctggattactcaaagaaatctgctgtgcataaagcagcactacaggttatgcaatttgagaaagagctttactatggagatttagtgcaaagtcgtcatcttcagaagatcaaagatattattgaggctaatgtggaagatatcataaatgaaactaataagacttga

SEQ ID NO: 454939 - DNA, 342 bp, Serratia marcescens
atgattatggaaagtttcaaagaacaacgcattgattctttagtggctatgaaggtattggatgaagggattgatgtgccggtatgtcgaagtgcttttattttggcaagcacccgtaatcccagacaatatatccagagaagaggtcgtgttcttcgaaaatctttggataaaaatgaagccttaattgtggattttgttgttcttccattaccgggagtggtgaataatattagtcaaaatttacgacgtgcggagttgaaaagaatagatgacttcaagttaaccgctataaaccccgaagagattgataaaaaaatcatcgaattaggactctattaa

SEQ ID NO: 454940 - DNA, 189 bp, Serratia marcescens
atggcgttcgccaccggcgacagctttgccaccaagggcgcgccggtggataaggacgtggcggtggtcggcgtcggtctggacgtgccgctgacgcgttcgacgcgtgtcggggtgtcctatcagggacagtacggctcgcagctgcaggccaactcggtcaatgcacagctgacggtctccttctaa

SEQ ID NO: 454941 - DNA, 321 bp, Serratia marcescens
  misc_feature (260)..(269): n is a, c, g, or t
atgaaggttcgagttcttgtagtaattgttacatacaatagtgaaaaacacatacaatggagtgtggatgggcttaaaaatagccagttcgatatcgagacgcggattgttgactcaggttcgaaagacccaagctatctaaatgcgatagacagtactaacaagataacaataattaaaaaagataatgttggttttgtttctggtaacaactttgcattatacgaactagataatttcgactgggtgcttttccttannnnnnnnnnttcgcaaatagagaagaaaataaaaaagttggtgcttttacggtaccgttga

SEQ ID NO: 454942 - DNA, 909 bp, Serratia marcescens
atgaatcaacgtctcgactcgcttcaaatattaagagcttttgctgctctgtctgttgttatcaatcatttttggggggtaatggattaccctgtgttcaaaagcttagggttggattacattggcggctttggcgttgatgttttctttgtgctaagcggttttatcatgtgttatacgacaaaggatgatgcgaagggcggtgttgctgaagctctgaaattcttttcaaagcgagtaaacagaatatatccatcatatcttattattctggttcccttcttgctatttgccttttttataaagaaggactggtcattataccagattatagggaatatcttcctgttaccaaccttctcgagtaatcctgattactatatgtatatcacgccttcatggactcttgtctatgaaatgttcttctatttgattttttctcttgctattcttctcgcgactaataaggttaagatcgttattattgcagcgtgtattatttctctgatggttcttggtgtgaacatttttgatctgcaaggagaacgattaaagtgggttaattttagttttatgatcggtgacacgttaatgcttaactttgttgctggttgtatatttgcattggtatataaaaatctttatgcgctaacatttaataataagtttcttatggtggcctcggttatccttttcttcttaggaatgtatctggccccacatgatatttcacgcttcctatcttttggtatacctgcaatatttattgttgcgttcgttagtctttatagaaccaagaaaagtagcattaatgacttcctaatttttttagggaatgcatcatatagcatttatcttattcattacttgtttgctgcagttctttatctgtctcttatacacatctga

SEQ ID NO: 454943 - DNA, 498 bp, Serratia marcescens
atgtcaaccgataaaaaggatttaattctatcatttatcatgaataaaataaccgccactgaactgatcagttcatataatgaaaattacggagagataaatatatgcaaagaactttacaatgctcgcaatgaaaaagatccagatgcagtagatatttttttatattttggagacgttataggctacagatacacttgtataaatttattaaacaatctacttacagaaacttggcataaaaaacacgaagaactagtccggctgctggcacaatataaaagcgaaacaagcataaatagtttatttgaaacatctttattaaatcttgattacttggattatgatgaagatcatgtcttggctgataaatgcatcagagctctagcaaagataaacacaaaagaatccatagaaaaaataaaaaaattaactcactcagataacgcatccattagaaaaagtgcaacaaagcatctacagaagattaaaatgtaa

SEQ ID NO: 454944 - DNA, 516 bp, Serratia marcescens
ttgaaaatcaaacatttattccccagtaataaatacgagccccccttaaatttctctaggtgcatcatttcatttactctctcttcgcaccgcctgaccgccgtcaccttcgacggcgacagccgctaccagcgtgccgaataccgttacgacgcgctcgggcgccgtacccggaaaaccctctacccgcaccacggcgagccgcagaccaccctgttccactggaacggcctgcagatggtcggcgagcacagtcccgaccagccgctgcgcagcacccagtatctgtacaaggaagacagctacgagccgctggcccgcgtcgatcgccacggcgacagcagcgaggtgtactggtaccacagtgaactgaacggcctgccggagcgcatgaccgacactatcaaggccggtacctcgacagggacaaatcaaccaacgactgaagcaaaggtaagtactccatatgctaaagaaaaaataaactcactgtcaagaaccaacaaaaagaaataa

SEQ ID NO: 454945 - DNA, 348 bp, Serratia marcescens
atgaaagaagaaatatggaaaaacattcaacctttaagagtaccaagcagatgggtaattgatgtaaataacttctacaactatgagcctactaaagaaaacatggattggttctatggatcaattttgattagcggtcataattctcttgatggtctttgcttcgattcacgatatgaaccagaaggagaacctaatggtttctttgtattggattttttcatcataaaaataaataaaaagacaggaaagacagaagaggaaaaattcctaggtagtaagcagacaaaagataaatctatgttcattaacatgcttgaagagtttatgttcacagggaaatattaa

SEQ ID NO: 454946 - DNA, 726 bp, Serratia marcescens
atgttgaatgaatcaggtattcaacgtgccattatggacgttgcgaatacgttatttgaactgggcgtaatagactcgcttaataaaaatatggaaatggacaaagatgttcgtcaggaactcggcctggatagtcaggaattaatgacactggtgaatattatttcttctttagggctttccgctgatcctatttatgaaaacaatgtcacaacgctttctgacctagttgactatcttaaagaacacagggatagctggttgcacaatgatgttccctttgtcttgcaaggtagcacgattatttctcaggatatagacacagtattttcttatatcagagattatcaaaaatggccggaggttttggcccatgtcacgaaaatagaaaaagacatggatgatggacggctgcaaagcttcattatgcatattgaagaattgggcaccaaacaagattactttgttaagtcttggcgttatgtcaatgatgaacatcggatcatcgatttctctcaacctctaccgcccaaagggttccgctgccataaaggcggctggcgcttccagccacttgctgatggccgcactcgtttaatcagttatcacggtttttcactgcatgatgatgctcaagcagattatgctattaccttgattagaaaacacattcatgccgcgctgagcacgtgggcgcgcttcggcaacggtgagtgtaatgtctga

SEQ ID NO: 454947 - DNA, 924 bp, Serratia marcescens
atgcgacagcgaatagccattgtcggtggtggagttgccgctggcatggctgcgcgcctgctggcccctttgggggaagcgacgctgattcaaccgggcgctgccccagcgagcggcatgcctgaaattgtgccgcgtcggccctttttcaccgcgcttggggaagacaaggagaatgagtgggttgccgagatcgcgccacgtctcactgaggtgagctggcgcagcggaacaaacatgcgctcaatccgattagcttctaccgacgacttcttagtttacgacaaaggccgattggcggcgttgttgctcgatagtgtgccggttgctcggcggataatcggtgaagtcgccgagatcgctgaattgaaagggtttgatcgggttttcgactgccgtggggccagggcggtgaaaaacgatcctgcttatcaatatcgggaaattcactcagcgcgcacggcatgccgttatctcgtcacatttgcctcgccggagaactatggcgacgtcatgcaattttggacggaaatagcgcccagcggtaaacagcgtactttctttcagataccggtgagcggagagcgtgtatcgctgggatgctcttgcttcccagatgatttgctgtccgatgccgagctgcacaaggcaatggaaaaagaaggcgtaatgccgttaccggaagctgtgctgtttagtggtgctgtcgttccacaaccgagcacgatgcagtgcagcattgcacatgttacccccctgggcgatgcctacgcattgccctgcccgctgactgaatatggcatgttaaaagcgctttcgcagattgtagtgctagccggtggcaagcctatgtcggagagtgtcctgctgcgttctttgagcgagagcgtcgatccgcatttaccacaggagttgttttcatga

SEQ ID NO: 454948 - DNA, 1149 bp, Serratia marcescens
atgagcaagctctatatcaccaacgcgtcggcgataagcccgctcggcggcagtttaaatgagatttggcagcaggttctgcaaggcgatgctgtctacggccatgtgcgtttgcccgggcagcgcgattttttcgtcgctgaaagcgtacctgggagcggttcggacatcaccgcatacgcttcgttgttcaaagaggctatccgccgccttgtcgagcagttggagattgacacccccgtggaagccatcttcttcgccagtgcggtgggcaatctggcggaagtcgaaagcgatatttacgccgatcgaccggtttcgcttgaacagttggatttttccgcgatggaggctgtgtttgccgaaacatccgcctatggtaccgggacgaagttcgtctgcattcctaccggatgctgcgccgggcttcaggctatcgggttggctaaaagcgccatgccgcgcctcggcctgacgcgggcgctcatcatgtctctggactttggcctaacgccgctggcgcttgagtcgttcaacaaaatcaacgcgacgtgcgcttatgatcccgctatctctggcagcccgtcgcgccccttttgtcgtgaccgggacggttttttgttcgccgatggtggaggcgcggtgttggtaacgacggaggcgccggcgcagtcggtaccgtacatctccggttatggttgtgtgtcgagcgcatttcatatgaccgatatcgcgaccgacggtagctctatccgacaaagtattgagcaggcgataggggacgccggaacgacgggggcggcgatcgaccatgtgaatctgcatgcttcaggtacgcagcagaacgatcaggccgaataccaggcgcttgtggatgtcatcgggcccaatttgccgccgatcaccgcttttaaagggaatcatgggcatgcactaggaggtgcaaatatgatcgaagttgcgttggcttggaaaatgatgactgcgggcatattgccgcccacggcgggatcactacctatggacgcctacgaggctgtccccccgcgtgagcgggcggtttcccttcctacagcttcactgttgaaaacagccagcggcttttcgggtatccacgcgacaatgattatggagaacggcaatgtctga

SEQ ID NO: 454949 - DNA, 654 bp, Serratia marcescens
atgtctgaaacttttagctgcgtgctacatagagattttgccgagctcagggagagtgctacggcagcggtaacgcctgttgcgagaaaggatttcgaggttctgattccccgacggcagcgtggcaagttgcctacggcttcccgcatggccggcggattatggcagcactatgaccttagtcggcgtttggtggcgctggatgccgatccgaaagagacgccgttgctgatcctcaaccgttacgccaattgggactatgtggccgatatgatgtgcgacgacgtggccgtcacgctggaaagcgttaacagctacgtcgctaccgcctggtttcccgccagcctgcaggggtatctgacgatcgagcagggtaattgtgctgaagcgatcactttggcgaccaaagacattgatatgcaggctgccgcgattgagggcttgttcctacgcgatttgcggggtgagaaggtcagcgcggtcgtggtgggcacttttgaatcaatacctgaaaagatcggccaccatggcgtcattcatggcaaaccgacctcttttggcgcttttagccttatttcttctcaagacagtgaaaacgcgataatcgcggcgttaaccattcatcaggagctttatcatcatgacaactgctaa

SEQ ID NO: 454950 - DNA, 468 bp, Serratia marcescens
atgacaactgctaacggtaacacgttcattttcaaccattcagtcgacatccccgctgttgctgctcctcatgtgtgggccgcttggagcgaactgacggactggcatcgttgggatgcttctttgcggggcactgatgcggtggacaatggtttggctttgggaaaacgtttcgcggtgattccgaacggggggccaggtgcgatcgtcgtcaatgtgaccgcattagtggagggcacgcactttaccacgacggccaatagtccaatgggattactctctttcggccatactttgacgctgagtgaggatcgactgcgtgttcagttgctgcattcaatctgtgctattccggcggaaaacggggctacattgccgccgccgctgctggaaaagttacgcgccgatgttattgacagcgtacggcgtctcgcagctttcgctattgaggaggagaggttggcatga

SEQ ID NO: 454951 - DNA, 417 bp, Serratia marcescens
atgaagcattggatcgccgttatttcgcgggctcatgcccgcatagccgcggagtcgggttttctgcaagtttgccatggaaaggccggcccgttgcggaaaactcgtgctggcgacgaagtattcatttattgcccgcgcagcgaaatgggagggggggacgtgttgaaaaccgtcgaatttcactgtgttttcaataatgacgacgtgtatcaagtagagcagtttcctggttttactccacaccgtaaagacgtgattttcaaccgtaatgctcgcccggtagtgctgaaagaggtcacgggattggcgtttaccgcggattctcactggggaatgttggcgcgccgtggctttttcgagatcggttcgcacgacgccgctttgctgaaaactgcgatggggggaaaggaatga

SEQ ID NO: 454952 - DNA, 1173 bp, Serratia marcescens
atgtcaaagaatgctatttcggccgttatgatggcggtactcgctgccactacattttcagctggcttgtctgaattcatcgtcattggcctgttggggcaaatggccggtgaactggatgcgcccttgccgcagatggggttgctggtcactgcctatgcggtgggcattacacttggcgcgccactactgacccggattacgctgtcgctgcacgcgcgttcgctaaccgtcggtctgatgttgctttttgccacagtgagcgcagcttcagcggccgcgtcctcgttggggggcttattggcgctgcgtatcgtcgctggcgcgatacatggtgcctatttcagcatcgcttccgccagtttgtcgacgatacttgacgggcgccgtacaccgatcgctattgctttgatgttctccggcctaacgctggcgatggtgatgggcgtgccgttggggatgttggcggcggtggattatggttggcaggcacctttcttggcgatagcggttgtggcgtgtgtgagcggcggcttgttgtggtacgttttacctgcaaattttgggccggcgctgccagtaccgcggggcagtgcgctgctgtggagcgcgctgttcaatcctgcactaatccgaccgtactgcttcaccgtattggcatttggaggcggttttgtctttttctcgtatgttgaaccgtggctttctcgcgtggctgtgctggatgcgtctgccgtggcgctcgctctggcgctggtcggcggcggctctctggtggggaatatcctcggaggcgtgttgcccaggatattgggcttacaaacggtgttggttatcgcggtgttgctccagtgcgcgggattggcagggctcttttggggcgggggcgctttcagccccattcctttcctattgttatggagcctcggcgcgttcgcgacggcgccaatggtacaaaactgggcgattgtcggtgcagacaaagccaatgcgcgtctgtcggccagcctaaatgtctcggcgtttaatcttgggctttctctcagctcttttattgccacacgtcaggtagagctgaacggcctggcgtatttgccggtgacggctgcactaatggtcgcgttggcgctgccattctgctttttccgcccacgcggagtgtttataaagtaa

SEQ ID NO: 454953 - DNA, 447 bp, Serratia marcescens
atgtttacatggacttacagcgaacaagtgacgacccaggcgactccggagcaaatctgggcgatgtggcaagacgccgcttcttggccctgctgggacagtgagttggaatgggttcggctggaagggaagttcgtcgtcggaactgttggccgtatgaaacccgtcagcggccccgaggtgaagttttgtctcagcgatgtagttccactgcaatctttttccgatgtggcgcaattacctctgacgcgcctggtattcactcatgagtatctttcccctcaggagggtgatggtgccgcgaaaatccgccattcagtgaccatgaatggtctactggcaccgttgttcggacgtttgattggcggaaaaataaaaaaccatttgcggcaggcgatgcaggaactaagtcatcgggcgttaaccgaggataagacattgaggtaa

SEQ ID NO: 454954 - DNA, 441 bp, Serratia marcescens
atgatgaatgaagatgaggtaaggtcgatattctcacatcgttcgccgatggacagtcctggtttcaggttttggcaaacgttcttgcagtggcaaaggcagattgatattgccctggctccctataatctgacgcagcagagtttcagcattctggccgtgattggctggttgtcagagcagaattatcaggcgacgcagaatagcgcggtcaggcaaaaaatgatcgttgaaaaatcttgtgtgcaaaagatgcagatctctctgttactacgcaaattggagcagggacagctgatcacggtgcaaccctttttgctggatcggcgtgagcggttgatcactttgacgccgcacgggttgcgtatgttgaaagaggctatcccgttggtggaaaaggaagataagcgttttttgaccaaagttcatatcgacggctga

SEQ ID NO: 454955 - DNA, 252 bp, Serratia marcescens
atgttcgttttgatgcaatgggctttgaactgcgtttccttagcggagaatagtgcggtggtacgcgcctgggggctgggcgtcaaaaaagtgctggcggaggtgtttgatgacacgacgtggtgtacggcactgcagatgttgcgcgcccgggcgcaggcagagaggaccgtgatatgcaacatcacttttctgccacttagcttcctggccaatcccggtttaacatcaaatccctcggtatggtcatga

SEQ ID NO: 454956 - DNA, 1131 bp, Serratia marcescens
atgaattttgattttacccgtctggcactggcgctatccgtcacattgcttggcagttgtagcctgttccccggttcccatttgccgacggccggcaagtttaaggtgacgacatcggacgatcgtgacgccccggcgcagccggtcgcggtataccgcatgacgccgatgctgctggccaagatgcggcgggtggagccgtcggcgcggcctaatccgcagttggaactgttccggcagaattatcaataccgcatcggcgtcggcgacgtgctgaacgttacggtgtgggatcatccggaactgaccacgccggccgggcaataccgcagcgccagcgataccggtaactgggtacacaccgatggcagcattttttatccgtatattggccggctgcaggtagtgggaaaaacccccggcgaggtgcgcggtctgatcgccgccaggctggcggcatttgtcgagaatccgcaggtggacgtcaatatcgccgcatttcgttcacaaaaagtatatgtcaccggcgaagtcaacgtctccggccaccagccagtcaccaatataccgctgacggtgctggatgcgatcaacgccgcaggtggcctgaccgaatctgctgattggcgcaatgttaccgtgacgcatcagggaaaagagcaggttatctccttgcaggcgctgatgcagtacggcgatctgagtcagaacctgccgttgacggcgggggatattctctacgtgccgcgtaatgatgaccagaaagtctttgtgatgggcgaggttggcagacaggccactctgaaactggatcgcagcggcatgacattgaccgaagcgctgggcaacgcagacggcgtcagccagtcgctggcggacgccaccggggtattcgttatccgtcccgggcgtgacaaagacggggagccattggcggcgttgtatcagtttgatctttcggatgcgaccgcgttggcgatggggacagagtttcacttacaaccgtacgacgtggtgtatgtcaccgctgcggcggtgacgcgctggaaccggctgattagccaattggtgccgaccatttccggtttgaacgatctgagcgaggccgcgctgcggctgcgtaattggtaa

SEQ ID NO: 454957 - DNA, 255 bp, Serratia marcescens
atgtttaagactatagctctgttcgtcgcctgctttgtggtgtcgttcctgatcctcaataagatgccgccactcaaagaaatggtggactcaaccgtcattatggttggtgactggatgaacgaggccaacatagcgacaactgacggagagcgagacccagcatttctgcctgtagtcctcggctatttgctcatcaccaccgtccttctgatgtctgccatccggtggaccatccgtaagctcaaacgctaa

SEQ ID NO: 454958 - DNA, 528 bp, Serratia marcescens
atgcagatatgcagaatggactataacgatgtgtccaccgaccgtcgtgttctgaagttccacgtttacggtattggtgtcttcccggtattcagcggtaaaccctcaatgattaatcgacctgagtgctcctttaaaggtgcggcggccctacctcccggtcaatattggattgtcgaccgccctcagggaagcatacgcaaccggctacagactttcgccaaggacttttggaacggaaccaatcacgatgaatggttcggcctctacagcttccatactctcactgatagtctgtggattaacggcagagacaggggaagctttaggattcacccgttacggccagacggtagcggagagtcacacggctgcataaccttctacaatatcccggacttcaaccgattccggcaagcaatcattcagcgtaaaaagttcaggatccccggttcccgttcaggactccttgcttacggacgcgtagatgtaacgggatcgaccaacttcgaggcttgcaatgtttaa

SEQ ID NO: 454959 - DNA, 987 bp, Serratia marcescens
atgacaactattaaagattcctatcagttcggcattgagccagctcatatcgttgacaccaccaacattcgagtcactgagggcgatgtccctacactggcagaccctcaggcctacgcctacagtctcgccaagctggtcaagaccatgctgaacggtgtgctgcaagacgctgaggagaacatcccgttccctgtggagttgctcccagctcgcaacagcctgccgactccaatcattgctcacacgctggctgaccgttcggtcctcgttccagtccgtggcggcaaggctcctgaggtcgtgacagcgccagcgggtagcgaaatcaccgtagaaccgattgagcaagccatcatggtcagccatcagaccaaggtctgggaccacaagacggccaccggttacactcaaggcactctccagcaggacgcagtaaacatctctgagagtgttgtccgcaccattaacgccaagatggtcgagactctggagtcctccaagctgttgaagaccgtcaccgctccagctctgtccggcagtctgacccagaaagctgacgccatcatggacgctctgtatgagaacaccgagtccgctttcggttctcaagtcactgactacggtatcattgttcatgagtcccacctcaaggccctctcccgtctggcggctaagcaaggcttcagtggtgaggatgccatcaaggatatgctggggacagacctagcgtattacaacggtgaagaccgtggtgtgttcatgctggctaaaggctttacggccctgagcttcggttgcttccgccatgatggtgagcatatcaccgtagtcctgagccgagatggcgactcccagtcccataacttggaaatcttcgggaaggtctttgtggtggctgaagctgcgacgacaatcaagatgggtgaaggtgtgaaacccgcagtcctgccggtagtcaagcgcattcagttcactggtgagtaa

SEQ ID NO: 454960 - DNA, 492 bp, Serratia marcescens
atgttattcaataacaacgattggaaactgaaagtaaccgacatcaatctctacgaagacactgtgtccattgagggcgtacagcagcctctgagctacgcaatcaaagtgaccatcccggcatacctatcaggcttcggacctcgtaacagtaccgctctggcccttctggagcaactggagcaagcaggcatcaagctcgccaacttcttcagtcaggaacgtgttgacgcttataggctccaccagagtaacaagcttaaggaagccgaacgtctggcccgtgagcagcaactccaagagcagcgactcaaagaagaacgcatgtccaatgccgaatggcaacaggagctacagcgccgtgagaaggtccgagctgaacgccgtgcctatggtgacaacctgcgcagccagacggcctctacgggtcgctctcgggcttcaatgatggctgatatcgcaagcaccggtaactggatggacagcctgtag

SEQ ID NO: 454961 - DNA, 699 bp, Serratia marcescens
atgtctaccaaagaaatcagcatcattaaccttgaccagcttgtgtcgatgacctccatggaaatcgcggagctgacaggcaaggaacaccgtaacgtcatgcgtgatgtccgtaatatggtcgatgaacttaacgcgctcaaaactgagcacgttggcgaagaactgtacaaggacgctaaaggagagacccggacaatgtaccgcctcgaccgaaagcacacctttatattggtcgctggttattctgtccacctccgcgccaagtgctacgaccatatccagacactggagcgccgagtcctccaactggaggaggacaagaagcgggcagccattcagtccgccaaccgtcgaggcgtcacttggggtgactactgcaagacccatgacctaccggcccagaagctaatgtctgcgctactggctaaccggggtctactccgcaagtccaccgggaatgagtgggttgtcaatcctaaatacgctgactgttttcgtattatcaagcccactgaccaaaggttctccgcccgtggttacaacttccggtttaatgctaaaggcttggaggtcttcgggtcgcctgagatggtggacaagctcagagggctggtagtcgctgctatggggacggaccgacagaagcaggagtggctactcaaacagtcccgcgccggtcgagtggaggaactataa

SEQ ID NO: 454962 - DNA, 369 bp, Serratia marcescens
atggcacggccaaagctgcaacacgacaaccaattcaccaaaacttacctacacgcaaaaggactcgcggaactggcgactccgggcggcccatccctgtccagctggttggatgacattctcaccggtgccggtcgcctctgtgagtcggccaacaataacaccaaggcggtcagcccgtatgtaattcttgttcagttattgacccatgatgttatcacggttgaagccgtccgccggtccatcagccggaagcggttagccatagatggcgtactggtctctgaacggtatgcacgatatgtgaccaacgtggttatttctgcctcaaagtccgtggagttccacagccagaaagaagccgcctag

SEQ ID NO: 454963 - DNA, 1296 bp, Serratia marcescens
atgcagcgctatgaccatctttcttcagtcgttaaggcattcctattagataaggacgatatcaccgtggaggagcttagagagcacctgaggtccatggctgagcagttcctgactgatagcgaccctcaaggctactggaacggtgtggacgtggacctcataggggatactcaggcacagctgcgggaggtcgttgcaactcgtcacctgaccattgagcagcatagacacgtggcggaggctctgagcctcatggataaggtgaaggacaagagccgaggtgatgcctctggtctgctggagttcattgcctgtaatggtaatgatgacgataaaagcgccgattccggtgatgctgtgagcaatctgaaagatgggcaagcctctagtcctacagaatccacgagagcaccgatgaccctgagtcacctcgcaagtctttacctcgcagaacatgcggtccagttgggtgaggcgaccctaagaggcacaacgtccgtctacaaaaaactggccgaggccaccggcagtctggacatgcggacccacacacgggctgacctagtgcagctacgtgaggtcttggcggaggaccgcgctaagtccactgttaacgggatgcttgccaagctgtctaccctgttgtcttgggccagattgaacggacacatagataatgattactcccagaagctgaagttcaccaagggggctgagagccaacgtaaggcgtttagtcctgagcaggtgcaatcccttgtagacggggctagaggtcgtcctatcgcttccttggtcgctctggcggccatcacaggggcgagacttggtgagttgatgcagctgaacatagaagacatccagacagaagatgatacaggtcttgtttgcatcgacatcaatgatgatggtgaaggtaagagccttaagaacaagtatagcaagcgtaaagtcccgctaactgatggggcctacgggttcgacctgaagtccttccttgatgacctcccagagtcaggccgtgtattcgctaacctcacccgttttgtagccagtaaagcattcaagaagctgcaggaggagactgagggttgtaacgctgatgggttggtcttccacagcttgcggcattccatggctacagccttgaggtctgcctcggtgtcactggagacatcacaggggatacttggtcacagctcccagtccatcaccttcgacctgtacgggagggacggcagtgagggcctgaagacgctagcggcgggactgaagaaggcgctaggagtctga

SEQ ID NO: 454964 - DNA, 780 bp, Serratia marcescens
atggaaactgctgaagaaagagaggaaaatctctacatctcaatattgaacaaaaaatatagaattcaattcaaagataatgaggctcacattataaaatgcggtcactgcatgagacattcatcgattgcagactggagaaaactttcaattaaggaaacgtctgattcaatcagagatagagaccacccacattgggaacctgaatggattagaggaacttattccttgccgtatgtttgcactgtttgcaaaggaacaacacactctattggaacaacagagcatcattatgatgtcaacgttgatccaaatacagaagaacaatacattgagcagtatgatgtatatctaccacaatttttcaccccgacaatggttatttttgaaataccaaaaaaatgtccaaaggagataaaggaagggttaattaactcgttccagcttgcctattgtgatatatctgcagcagcaaataggttaagagcgactcttgaaaccttgataaagttgcactttacaaaagctgaaataggcgagagaacacttcatgaccaaattccacttttaacaaaaaaattctcaacaattggtaacctatcgcttgctataaaatggatagggaatgaggggagccatggtggtggtgaggtgaaggaatatactttagcatttgcatacgaagcttttgaaaaaatattaaatataatttatggtaagaaagaagtaacattagaagatgctgccgaattatttgttagaacaaaaggaaagctataa

SEQ ID NO: 454965 - DNA, 201 bp, Serratia marcescens
atggtgattttcgacagtatttcgctcttgcccatgatcgtcaatttatcgtggctggcagtgggtattgcgtggatagaagtggttattctcgatgcctttggcaagagcgggctcctgctcagccgcatttccactgagcaggaagggatggattcattacctttgctattaggctatgcccagactcctctgtactga

SEQ ID NO: 454966 - DNA, 267 bp, Serratia marcescens
atggtctccctcagtattgatgaagtaggtaataaggaaaacatattcaacaaattttatgatggtgacggcttggcagtttcatcggacaaatgcataccgacctacaactatccgtttagagccagccatacttacaatgtttccattaccctgcgttcacaagataaaaagagaaaaggcatcgtgccggcagcccgcttatatgacgttagcttcactttaaaagagagggatggtgaactggttataagctctatcaattaa

SEQ ID NO: 454967 - DNA, 372 bp, Serratia marcescens
atgaccgacagcggcaatgcccaacgtcaaacctcactggcgctcggcgtactcggcgattttgtcgcctggctgggcttccagcactgcttgccgcaacggcggccaaccagccgcatccagcaggggcagccgatctttacctctccgcacgcgccgtccggcgatctgacgcagccgcgtctgacccggctggcggccgcaccggtcaatgacgccgccttctatatttatgactggctggtgggattaaatacgctggcggcagacaacgtcggccatcgcgcagcggccggcctgtcggcacggcagcagcggcgtttggcgcagatcgtggcggcgctggatgatggcaaattggcgggggaataa

SEQ ID NO: 454968 - DNA, 579 bp, Serratia marcescens
gtgaaaaatgaatgcgttaatcccggttattatcatgaagacgatctcagagagtgtgggtttaagtcagtaggaacgaatgttttagttgcaaaaaattgcaccattatcggtattgagaatatctctctgggagataatgtcagaattgacgggttttcgacaattattgcggcaggcgatggttttcttgatataggttcttatgttcatatcggcggctatgctgcaattttcgcgggcgcgggcgttattatgcgcgacttttccggtatatcacagtcggtgaagctttattcaaaaagtgatgactatagcggcaggtttatgacaaatcctaccgttcccgccgcacttacgggcgtcgtttctggaacgattgtacttgaacggcatgtgattgtggggtctcaatccattgtcatgccggggataacgctggctgaaggaacgtcggttggcgccaactcattggtaatgaaaaatacagaagagtgggcgatgtattttggttctccggccaagaggattaaaagcaggaaaaggaatccattggaattagagaaatcattacgctaa

SEQ ID NO: 454969 - DNA, 603 bp, Serratia marcescens
atgaagacgtcaccgtggaacaaagaccgtatcatcggccaaaaaagaccacttcagatatctcatatctgggggatacgaatccgacttgaactagaaggtaaaacgcgcgatttagctctgttcaatatggccctggacagtaagcttcgaggctgtgatctggtcaaactcaaagtatctgatgtggcatatggtagctctgtttcaagcagagctacggtgttgcaacagaaaaccggtagccctgtgcaatttgagataaccaaagggacaagagaagctgttgctgcattgataaagcttggcaatttgcatagtaaagacttcttgtttcggtctcgagtcggaactaaccagcccatatcaacccggcaatacaaccgaatttttcatgggtgggtagaaaagcttggtctcgaagattcgctttacagcacacattccatgagaagaacaaaaccttacctaatctacaagaaaaccaagaatctccgggtgatccaacttctgttgggccataagaaactggaaagcacagtccgttatctgggcattgaagtcgatgatgcattagagatctctgaatcgatcgaagtctaa

SEQ ID NO: 454970 - DNA, 1434 bp, Serratia marcescens
atgtacccaaatacgcaattatttatcgatggtgaatggcgcgacgccgtcgccggtaaaaccctgaccgtcaccaacccggccaccgatgccgttatcggccaggtggcgcacgccggcgaagccgatctggagctggcactggccgccaccgagcgcggttttaagctgtggcgtgaaacctccgcccaccgccgcgccgccattatgcgtcaggcggcggtgctgctgcgtgaacgcgccggtgatatcgccaaagtgatgaccgcagagcaaggcaagccggtagcacaggcaaaagccgagatcctcggcgccgccgacgtgatcgactggttcgccggcgaagccagccgcacttacggccagatcattccgtcgcgccagcaggacgttcagcagcagacgctgaagctgccggtcggcccggtggccgccttcacgccgtggaacttcccgattaaccagatcgtgcgcaagctgtccgccgcgctggcggccggctgctcgatcattgtcaaaggcccggaagagacccctgcctcgccggccgcgctgattcaggccttcgtcgacgccggcattccggccggcgttatcggcctggtgtacggcacgccggcggagatctccgaatacctgatcccgcatccgaccatccgtaaaatttccttcaccggttccacccgtgtcggtaaacatctggcggcgctggccggccagcatatgaaaaaagccaccatggagctgggcggtcacgcgccggtgctgattttcgacgatgccgatctggatgccgcggccaaagagctggcggcctccaagttccgcaacgccgggcaggtgtgcatcgccccgacccgtttcctgatccaacagggcgtttacgaagccttcgttgagaagtttaccgccgaagtgaataaactggtggtgggcaacggccaggaggacggcgtcaccatgggaccaatggtgctgggccgcagcgtcgacgcgattgagacctttgttgaggacgcgattgccacgggcgccaagctcaccaccggcgggaagcgtctggccggcaacggtaatttctttgcgccgaccgtactgcgcgacgtgccgctgaacgcgcgcgccatgtcggaagagccgtttggcccggtggcgctgctgcgtccgttcaacgactatgacgaagccatcgctgaagccaaccgcctgccttacggcctggcggcatatgcctacagccgcaacatcgccaccgtcaacgcgctcggtcgcgatgtcgaaagcggtatgctgaccattaaccatatcggcttcggcctgccggaaacgccgttcggcggcgtgaaagactccggccacggcaccgaaggcggcagcgaagcgatcgaagcctatctggaaacccgcttcgtcaccgtcgccggccgttaa

SEQ ID NO: 454971 - DNA, 729 bp, Serratia marcescens
atggaaacgtctaatcaacatagtcagtttgattcgctgccttttttttatgaggagatgttcaactggtcattccgtaaaaatgttgaagttccttcggtattagaaagccttggcgatatttcatcgcttaacgttctggattttggctgcggcaccggctattacgccaggctgttgaaacagcagggcgccgggcgcgtggtgggttttgacgtggcgggcggcatgctggaatatgccaaagcgcgcgaaaaggaaactccgctgggtattgaatatatatctaaaatacctgttagcatgaaccaacaatttgatttagtgctggcggtttatgtcttgccctatgcaaccaattatgaagtattgcgtgatatggtggcggcaatggcgcgcctgttatcacctggcggacggttattgaccttgccgctgaatccggaatataacgcacgcagcgagtattatgaaccctacggctttcagctcagcagtgaaaccccttatcaggacggcacggaagtgcgactgcgtttcccacaaaaatctgctgcggatatctgcgccaactactggtcgcgcgccgcgattgaccgcgctttgtcgcataatcatcttgcggttaccagttggcgtaacccgcaggcgtacggtgagccaacggaaaatctgcaggcctatctggcccatccgcacaccgtattagtcgactgtcaattgcgttaa

SEQ ID NO: 454972 - DNA, 1029 bp, Serratia marcescens
gtggaaaaaatagttgaaacgttttcctcactcaatcaaatgaatgagggagaataccaagaattacacgcgcgttgtggtgcgccgttgttttatgactggcgttttttgcaagcggctgaaaattctccgctattgccggtaaaagcaacatattatctgacgatgcgcatcagcggtaaactcaccgccttcatgccaatatatttacagcggatggatgtcgtcgatccgtttaaagtgttagagcaaaaggcaaatatgcataatagcggtgatgattatggattattcagccatgtaatgcactgctttaacagtacgatattaaatggcggcggtgatccggacatatatgacgacctgatgtcacgagcaataacaattggcgaaaaggtgggtgcccgttattttggcctgctgaatgttgaagaatcacagttattaactcagtcaaaacaggcaaatatgcaggtcaattatatgtttgaccgttattatgtcgacttgccccatttcaatcattttgaccactttgtggagagcctgtcttacgacggccgcggagaaatgcgccggcaaatgcgcaagtttgccagcagcggtgcccgggcatcgatcgtcgcgccgccgtttgaccagcggctggatcaactgtgcgagctctgtttccagaccactgcccgacacggcacgccacaatattttcccgcccggccgctggccagttttagccgtcagtgcggcgatctcattcggctgaacctgatagagcaggacggcgaattgctagccggcatggtgtgctttcaggagcaaggcaggctgcatttatggtcggccggtatgaaatacgaagggctggggtttagcccctataccatctgtttcgccaatgcctatcagtatgctttcgaacaaggtttagagcgggttgaagcggggcggctgaacgccaaaatcaaaacccggctgggtcttcagccgctgccgctgtatgccgtaaccagcaccacacatcagtcatag

SEQ ID NO: 454973 - DNA, 1368 bp, Serratia marcescens
atgacagaactttctttgaactgttccgctgacgactatcgtatattcagctgccaaatgaccggtaaggttcgttcccgctatcatgccgaatatgccggctggtatcgccagacaagctggaacagacgggattttcatcgttttcctgaactgatcgtacgggcggagtgtcgtgacgatattgccgccaccgttaatttcgcccggaagtacggcaaaaaactgtgtatccgtgccggcggacacagctatgccggtagttttttgcaaaatgacagtatcctgctggatatctccgcgttgaatgatatcgaagtcgatcgacaaaacggtattgcccgcatcggaccaggcgtcaccgggcgtcagctgatggcgcagttggcaccgctcggactggctttccccaccgggcacggcggggatgtggcgctcagcggtttcttgctgggcggcgggcttggcatcaacgccggcgcctgggggcagatgagcgtattcaatgtggtcgccgtggatgtggtgaccgccgacggccagtgtttgcacgccagcgccacagaaaatgccgagctgtggtgggcggcgcgcggcgccgggccgaatgcgttctttgtcgtcagtcatttttatttacagtgttggccgcaccctgaaatgatgaccagccacctgtacagcgtgccgcaggcggcgttgccgctgttgtttgaaatgctcgacagccatgaatgggatcgccgcctgcaaattatggtgatcctgagcggtgataacctcgaccaggctattgtcaatacgctggcattcgccgacagccggcggcaggccgatgagctgcaggcgctgttcacccagcgtattcaggggttccatgtcgatatacgctgcctggcagcggaacagatgccggacttcgaggccatctatcgccagaatgaacaggcgctggtttgttcgcgttttcgcactgataatctgtttaccgaccgcattcttgatgcgtatgcggtgctgcgtgagcaactgcccggccagccggcgccgcacgggatgagcatgatcgtctggcgtggccgacagcagctgcccgatgctgcctattcggcaaccggccgctactttatctcaacctacttgcagtgggacgatgccggcgacgacgagcgtaaccgccagtggctgaaacagtgctatgaccagctgacgccgtatgccagcggacactatatcaatgagtttgaccttgaggggcgggcggcgtcgatcggccgttgttacaacgaggccaattggcagcgttttgtcgcactcagagagcagtacgaccctcatgcgctgttcccgcgcttaaataacggctaa

SEQ ID NO: 454974 - DNA, 489 bp, Serratia marcescens
gtgccgggggaatatatcccggcggtgaaaaaaggcgttcaggaggcgctgaacaacggcattctggccggtttcccggtggtggacgtcaaggtgcacctgaccttcggctcttaccacgacgtcgactcttcggaacaggcgtttcgcatggcggcgattttcggctttaaagaggcctgccgtcaggcgaacccggtgatcctggagccgattatgaaggtggaaatagagacgccggaagagtatgctggcggcgtgatgggcgatctgtcatcccgccgcggtcagttgcagggcatggaggatatcgccggcggcggcggtaaggagatccatgccaaagtgccgctgtccgagatgttcggctactccaccaccctgcgttcaatgacgcaggggcgcgccacctttaccatggagttcagccactacgcggaagcgccgcgcaatgtggccgatgagatcatcagccagcgcgcgcgttaa

SEQ ID NO: 454975 - DNA, 1644 bp, Serratia marcescens
atggcacgcactacccctatcgaacgttaccgcaatatcggcatctcggcacatatcgatgccggcaaaactaccaccaccgagcggattctgttttacaccggggtcagtcacaagttgggcgaagtgcacgacggcgcagcaacgatggactggatggcacaggaacaggagcgcgggatcaccatcacctcggcggcgaccacctgcttttggaacggcatggaacataattatccgcagcaccgcatcaatattatcgacaccccgggacacgtcgattttaccattgaggtcgagcgctcgatgcgcgtgctcgacggcgcggtgatggtctatgactcggtgggcggcgttcagccgcagtcggaaaccgtctggcggcaggccaataaatatcatgtgccgcggctggcattcgtcaacaagatggatcgcgtcggcgccaactttttccgcgtgcggcagatgatgatcgaccgcctgaaggccaacccggtgccgattgtcattccgatcggcgctgaagataacttcagcggcgtggtggatctcatccgtatgcaggccattttgtgggacgacgccagccagggcatgaccttccgctttgaggccattcccgtcgagctgcaggccgaggccgacgaatggcgggagaaaatggtggaagccgccgccgaaggctcagaagcgctgatggagaaatacctggccggcgaagcgctgagcgaggcggagattaccgccggcctgcgcgcgcgcaccatcgccggcgaaattcaacccatgctgtgcggttcggcgttccgcaataaaggcgtgcagcgcatgctggacgcggtaatagaattgatgccctcgccgctcgacgtaccgccgatggaaggccacgatgaggatgatcggatcgtggtgcgccatgccgacgatgaggaaaaattctcggcgctggcgttcaaactgatgaccgacccgttcgtcggccaactgacgtttgtgcgcgtctactccggcgtgctggcgaaaggcagcagcgtctacaacccggtgaaaggcaagaaagagcgcatcggccgcatcgtgcagatgcacgccaacgaccgcaaagacgtcgatgagctgcacgccggcgatatcgccgcctgtgtcggcctgaaggacgtcactaccggcgatacgctgtgcgatcccaacgcgattatcacgctggaacgtatggtgtttccggagccggtgatcgcccaggcgatcgagccgaaaaccaaagccgaccaggagaagatgggtattgcgctgcaacgcctctcttccgaagatccgtcgtttcgggtacgtaccgatgaggagtccggtcagaccattatttacggtatgggcgaactgcatctggaaatcatcgtcgaccgcatgcggcgcgaattcggcgtggacaccaacaccggcaagccgcaggtgtcgtaccgcgaaaccatccgcagcaaagtgagcgatgtggaaggcaaattcgtgcgccagtccggcggtaaaggccagtacggtcacgtggtgttaacggtcgaaccgaacgaagccggcaaggcttcgagtttttcgatgagatcaaaggcggcgtggtgccgggggaatatatcccggcggtga

SEQ ID NO: 454976 - DNA, 2256 bp, Serratia marcescens
atgataatcagtccgccgtttgtccgtccccggaacgccggagaaagtgacgcgtcatggctcgacaggatgatgcccgtggatatcaaccggggattccctctcaactggcacgcctcatggcatgggggcgtgcatattctccacaccgacctccatgacgaagagcatgatcgcattgaatttgttcgtgccattgcggatggagaagtcgtctctttccgtagaccgtcaggcacagataagcgcgatgccttcccgctgaattacaatggcagaaccgatgacggatatgtactgctgaaacataagaccgatatcggcgaagactgtagcgtcgtgtattactccctgtacatgcaccttcgggacagactggaacccgccatcagggacggggccaaagtctggcgcaaagaccgcatagggcagaatgggatggtggacgaaaccaatgcttttcaccttcaggtgttctgtgacaacgagaacatgctgaagctgaccggacgcacgacccccgaagtggatatcacccgtgacggcagaaccgacactgtttacggcgacatccatttttatctgcctcccggcacacacttttacgaatctgtacctgacgctgcttcaccggacacagaccacctgaatgctgtttataccagtaccgaaccactgttcgtcagcatgacctttgaaaaaggcgactgtacgatggtcacccgtaggcagaacgttaccactgcggcacgcttcgacacagtaggggagccgctggtcaatatcgatactaaccagcttgataacagccggaatacatcaggaaggtatgaatataatctgtctcggacagcccgtcgcctgtacccacagaatccgtctgccgggttcgaactgcttcgctttgggcgggtcatcagtacagagcgtgaagccctgacgcctgctaatgccccactgtggcgtaccatcagctttaccggcggaaccggcatggtcaatctggccgcatctgacatcaaaaaattcagtgatgccgacttcccgcactggacgggctggcggatggtggacgatgatacggacaataacagccagtgtaattccccttttatcgccggattgcaggaaggcggacacttcagcgacctgagcagccgtctgatctgtcattttccgctggagtggaatgtcgccacctttgaccagcgttatgcctggctcaaaaccggctctgacgatgttcctgccatgtctgaagaagactatgaacggctgagaagccatgcttcagtgctgtgctttgacacgggagaacacggcgcaggccggttatggcattttcatccggctgccttcatcacccatttccgtaagtgctgctggctcagcaagtcagagttgaagcaacttgttccccggaacctgttaagaatggctgggcggaataattaccgctgggaagctatcacctaccgggacggtgctggcagcgtcgcggacaatatccgcacgcacatgaacagggcaatgcaaaaatacctggtaaccaccccgctgcgaatcgcctgtttcttgggaaacggcattcaggaaacgggctggctcaggactatggaggaaggatatcgttatacggaaagagatccgcgcacgcatcaggtcgttcgccgctacaacatctggtattacccttggtacggacgcggtctgttacagcttaccagtcctgtaaactacttcgattatttcagattcagaggacgaatctgcccagaaaatattaagaatgccctgacagatgaatataatcgtctgtattcacaccggaacattcgctacaccgataatcacctgtctgatactgaaaaccacgtacctgaaaatattatccggtggcgaaataatgtcagcagtgacaaccatgaggccgccagtagcgccggtttttactgggtggaaagaggtatgtcaccctacgccgataacgaacatgtgctggagcggtgtagcgtcaatacacggggcgacgggataaagatttactatcgtagccaggccttctggcaggccagcgccgccgttaatttacccagccaggtcgataacgaacaatatcagggactgaatggttttgatgaacgctgttgcgtatacggtagcgcgatagccatccttaccgagcagagattcccggacagggataacaacccggtcgacgagaaacccgaatcaaaccagctaaggagaggctga

SEQ ID NO: 454977 - DNA, 648 bp, Serratia marcescens
atgaaaatattattactgttggtggcaattccgtttctttcccttggaaaaataacgccggagattacctctccagacagaaacagtgagcagttttttgaccaacttacattacatcgaggtaactatctggcgaacactgctagctgcggagttatttcattaaaattgttctacccacctgaacataaaagatacccaccatcaggaccatggctttgcctgttccctgttgatgtcatcagggacgggtatggcccaggaagatcgctttctgaaaaggtctactttgataaaaaaacaggcctgtggaaaaagaaaaaacatagccgtaacagggaagaagcccagcgaaccctggaaatttatggtattaaaaacctgagcgaattgcatcccgtggtgctgtataatattcagtcagtaaatggtcgtggctatgcagttatcgacagaaatattcccctacaggaaaaacggaaaggggtgaaaaaaaatctctcattctgtctgatacaaaacaagagctattcagcattctgtggttcaggatcaatcattgatgaaaaaaacggaaaggaaatcgatttcaccccctacatgctcaagtctcttaagaccgtcgaaataggactgccggaaaaataa

SEQ ID NO: 454978 - DNA, 1038 bp, Serratia marcescens
atggccacgtttccccgccgacccgtagaacccggctactgcgttgttgaaacgccgggttctttagcctttcaaggaagtacgctgttcgccaatccacgcagtactgcggcccgctattttatgcagatcaatgcggatacgccgtggctgaagcccgggcagatagtgattgttgccgatcccgaacattcacgtcaggatgcgttgctacggcagttataccaggcgaagcggacggttaaccgggctatggagccggttaacgttgagcaggcgaacttcctccagcgccactatgccgctattgcgaccatacttaacggcaccagccgagggctggggatggccagcgatgccggcaagcagtactttatgcgcatcgacacgattcttaagcagattgaggccagctatcaaaaccagttccgcactcagggaacgctgatcggccagcagttttttgtggaaagacagcggttgtttaacgagttgaaagcattgttggataaaccgatcttcagtcggctcacgcgtaacctccttaacctgcacccttatgagagcatcaaacgagcgttgaatctctccagccgttccattgtgcatgagtggtcaacggcgggcgtcggggcgataaagggctatgcgagctacctggagggcgccggcaaggcggtgaagtttatgaaaggcgcgggctggattggtattgcgaccgccggggccagcgcgaccaatgatatttatcatgcctgcacccttggccgagagaaggaatgtacgcgggtggcgttaaaagggtatggtgcttttggtggcggagtatggcttggtgccgttggcggtacttggggagcagcagccggaggtgggatttgcctggcattaggtattatcagtgccccaacggcaggtgccgcgggtttggcctgcggacttataggcacggccgcaggaggattggccgggggatatgcgggagaaaagttgggagaatacggtggtaataagatggctgatttactactgaaataa

SEQ ID NO: 454979 - DNA, 321 bp, Serratia marcescens
atgaagaaaaatatacaaaatatagatgaattaaaagagatcttgacctctatggaggagattgttgttgtaatagataaaatcgggtctggatttgttgatgaaaatagaacagcatcagccctgctgcttttttttaatcaatgcaatgtcttagataaattatctaaaaccagaaaatatctatatcatgaattagagtcaaaaatatcttctgaggaatttgatgaatggatagaaaacgactcacctttatggagacctccttacgataaaagtgaggaggagatattagagatgctaaaaaataacaaatattaa

SEQ ID NO: 454980 - DNA, 1161 bp, Serratia marcescens
atggatgacttaaccctgcgttattacgacgccgaaatgcgctatctgctggaagccggcgaagagtttgcccaggctcaccccgaacgcgcggcgatgcttggcctggaccgggccggcgcgcgcgacccttacgtcgagcgtctgtttgagggctttgcctttctgatggggcggctgcgcgagaaactggatgatgacctgccggagctgaccgaagggctggtcagcctgctgtggccgcattatctgcgtaccatcccgtcgatgtcggtggtggagttcaccccggactggcgggaaatgaaagagaaaatgggcattgccaaaggttttgaggtgctctcccggccgattggcgaaaagggcacgcgttgtcgctacaccaccacgcaggagctgtgcctgcagccgctgtcgctggaaacggcgacgctgaccacggacccggacggccgctcgctggtgcggctgcgctttaactgcagcaggctggcggactggagccgtatcgacctccgctgcatcccgctctacctgaacgccgacgcgccgctggcctgcgccatgcatcaggctttcaccatgaatgtctcccgtatgcggctgcggctgccgggtgagaccgacagccggccgctggaaggccattttacggcgctgggctttggtgatgatgacgccctgtggccggcgggcaacagcagtttcagcggctatcagctgttgttggagtatttcaccttccgcgagaagttcatgttcaccggtctgaaggggatggacgccgtggcgcttccggcgcagctggcgtggttcgagatcgaggtggtgctggccgagcgctggcaacacgactttacctttacggaacagcacctgcggttacattgcgtgccggtgatcaacctgtttccgctggagtccgatccgctgacgctcgattcgctgcagaccgaatacctgctgcgccgatgcgggtacaggacggccataccgagatttactcggtggatgcggtggtgtcgtccggcaaccatacctatgtgccgtttgccagttttcgccataagggcggcatgttgcgccatgaggcgccggaatattattaccacacccgcgtgcgccgggggccgtccgggctgtataacacctggctga

SEQ ID NO: 454981 - DNA, 540 bp, Serratia marcescens
ttgagtcaggtaaaggggagggtaactagtgatgaaaaggcaatacttatttactcttggaatgtatatataaaaacggatgaattggcatgctgtgggaataaactattaaggctacataaaatccctatggctaataataacaatatttatagtgttgtcgatattaacttccataaaaagataattttggcacttgttgttattgatgcgaaaaccagttcatatcaggcactggtatcttattttaatagtgatgaaaatcttttctcgggtaaaggtttttggaatgataatgtagatgatgtcgatgttaaaaatgacactttttatgtgaatttggatggtttctatcttgggcggatatcactaagtggaatattcttttcccccagtactctagactgttccgctgattattttcctggtgtttgggacttgggaaataggaaaaggttgtttttcatgacagtgatgagtcagttgttaagtggaaatgcaaagagatttttgaaggaaggaaaacacctgagcaattaa

SEQ ID NO: 454982 - DNA, 2355 bp, Serratia marcescens
atgatggcaaatccgcttgcggtgattttcagccacagccaccacctgctgcatgtggcggactgcgacgcgctgctggacgtgctggcctttgaggggcaggaggaactaagtaaaccgttcagctaccggattgaatttaccagcgccgaccacggcatccatcgggaggcgatgctgatgaaggcggcgtcgctgacgctgcaggcgccgctcaatcagggcgtcggcattaaactgcagcggccgctgcgggtgatccagggcgtggttaccggctttgagcgtctgggcaccaccaaagatgaaagccgctatgccctgactctggcgccgcggctggcgctgctggcgcgcagccggcagaacgccatctatcaggatatgtcggtgccgcagatcgtggagaagatcctgcgcgagcgccacggcatgcacggtcaggatttcctgttctcactgacgcaggactacccgcggcgcgagcaggtgatgcagtacggcgaggacgacctgcgttttatcacccggctgctgggggaactgggcatctggtttcgcttcaccgccgacacccggttgaatatcgacgtggtggagttttgcgacggtcgtcagggctacggcgcggggctgacgctgccttcggtgccgccctccggccagcatgacgagggcgtagagtcgtgctgggggctggagagtcgccatcaggtggtggaaaagcaggtcagcctgcgggattacaactaccggcaggcgctggaggcgatggatgcgcaggcggagattggcgccggcgacggcaccacctatggcgatgcctatcactatgcggataactacctgacggccggcagcggcgacgggcgcagcccggccgcagagagcggcgcgttttatgcccgcatccgccatgagcgctacctgaaccgtcagacccggctgttcggcgtcagcagcagcgtgacgctggtgccgggcgaggtggtcagggtgagtggcggcgcggaggtggcggaggtattccgccggggcgtggcgatcgtgcggacgatcagcacggcgcggcgcgacaagagcctggaaatcggctttgaggcgatcccggacggtgcggactacgcctaccggccgggcgtgccgctgcggccggtgatggccggcacgctgccggcgcgggtgaccagcaccaccgagaacgacagctacgggcatatcgaccgcgacggccgctaccgggtcaacatgctgtttgaccggtcgaactgggaaaccggctttgaaagcctgtgggtgcgccagtcgcggccctacgccggggagacctacggcctgcacctgccgttgctggcgggcaccgaggtggcgatcggctttgaggacggcaacccggaccggccgtacattgccggcgtgctgcatgattcggcgcacccggacctggtcaccatccgcaactacaaacgcaacgtgctgcgcacgccggcgaacaacaaaatccgcctggatgacagccggggccaggagcatatcaaggtctccaccgagtacggcggcaagagccagctgaacctcggtcatttggtcgatgcggaaaagcagaagcgcggcgagggctttgagctgcgcaccgacagctggggcgccatccgggcgcagaaggggctgttcatcagcgccgatggccagccaaaggcgcagggcgaagtgctggcgatggaagcggcgctcggtaatctggagaatgcgcgcgagcagatgagcagcatctccgacgatgcgcaaagcgcgacggcgaacccggcggatgtggcggcccagatagcgttgctggagcagcagctgaacgcgctgaagcaatcggtggtgctgatgagtgcgccggacggcatggcgctgagcagcggggagcagctgcagctgtcggcaggcagtaacctgattgctaccgcgggaaagcatgcggatatcagcgtggtgaaaaacctgtttgtcggagtgggcaatgcattaagcgtgtttgttagaaagctggggatcaagcttatcgccaaccagggcccggtgcaggtgcaggcgcagaacgatctaatggcgctgctggcgcgcaaggagatcaacatcatcagcacggaagatgaaataaagatcgttgcgcagaagaagatcacgctgaacggcggcggcagttatatccggcttgatgcgaatgcgatagagctggccacgttgggggattaccggacaaaggcggggcattatgaccgacaggaaaaatcgaactaccctgccgagttcccgagtgtagcaccggaaacggccgaaccgccccgcacatttatctttagctga

SEQ ID NO: 454983 - DNA, 1464 bp, Serratia marcescens
atggatactataaaaccaagaatacctacactggcggaagccctgttgccgattatcaccatggtgctgctgctcggcatcggttatgccgctttcgatctgccgccggaaccgttaatggtgctgtccaccgtcatcgccgccctgctggtcaaacatcttgggcatgactacggtgccattctgaatgccatctcacagaagatcgccaaaaccatgccggcgctgctgattctgatctgcgtcggcctgctgatcggcacctggatggcagggggtaccattccgctgatgatttattacggccttaaactgatcaaccccgccatgctttatgtcaccgcactgctggtcaccgccgtcgtctccgtctgtaccggcacttcctggggttccgccggcaccatcggcgtggcttttatgggcgtggcaatcggcatggaagctaacctggccgccaccgccggtgcggtagtcgccggcgcctacttcggcgataagctttctccgctgtccggcgacaccaacctggcggcgatggcggcgcaggtcgatctgtatgagcatatcgcccacctgctctataccaccctgccgtcgctgatcctctccgctgccgtaatgctgtgctatggcctgtccgccgatctcgccggcgcggccatcacggataaagtcacggtgatcactcagggcctgcagggcatctaccactttaactggctgctgctgttgccgatcgtcatcgtgctgtacggctccgccagcaaaaaacccaccattccggtgatgctggtctccgccctgtgcgctatgcttaacgccgcctttatccagggctttgcgctacacgacatcgtcaaaagcgcggtcgacggcttcaacgtgtcgatgctgggggatacgccggttaatccactgctgagtaacctgctcaaccgtggcggcatgaactcgatgatgggcacgctgctgatctgcttctgcgcgctctcttttgccggtactttggcgctgagcggcgcgctggaggtgattgtccataatctgctgaagctggtgcactccaccggtacgctgattttggccacgctggcctgcggcctgaccatgatcggcgtgacctgcaacgggcagatttctatcctgatcccgatagagatgctgcgcaatgcctatatcgaacgcgggctgcacccgaaaaacctcagccgcaccgtcgaagactccgccaccattttcgaacctatcctgccctggaccgccgccggcgcctatatggccggcacgctgggcgtcgccacgctcgcctatctgccgtgggcggtactgtgctggagcggcatcttcttcgccatgctgtgggggttcagcggcttcggcatcgcccgtctgagtccggaacagcagcaacaaatggcggcgcaggacgccaccccgctcaacgaaaaagcggcgcaataa

SEQ ID NO: 454984 - DNA, 1167 bp, Serratia marcescens
atggacgcctatgattttggcaaaaacatctcccgcaaacacaccttcagtgcgaagtggaatggcgacagcctgaacaacggtcaagaaatcatttcgctctcagtggcggatatggatattgccttacctgacactattattaatcagttagttgaacacagtaaaaaaggcatttatggctataccttactgagcgaaaattggcgccaggtggtatcacaatggatgctgcgccattatcagtggcgggtacaaccggaacacatcgtgttctgcccgcgcattatccaggccgtatcgctgtatattcaaaactttactgctcccggcgatgccatcgtcagcctggccccctcctatcacccgattgtacatgcggtgacccttaaccagcgccggctgttggaaagcccgttaatttatcagcatggccgttacagcatcgacgttgacgatctggaaaataaattcaaacaggcgaaatgctttattttactgtcgccgcataatcccaccggcaccgtctggtcatcagaaatattaataaaaattaccgagttggccgaacgctatcaggtttttattatttccgatgacgtacatgccgattttattttcagcacacaacggcatcagattatctctacatttaatcattatgtggcacaacactcttttatttgcacctcgccgtccaaaaccttcaatatggccggactggaagtggcaaatattattatcgctaatgataaatatcgggaaaagttcatccactgcctggcagcagccggtattcataaccccggctattatgccgtcccggcgtttctggccgcttatcagcacggcgatgcgtggctggcgcagcttaagtgctacctcgccgaaaaccgtatgctgctgattgacaccttccgcacgcattttcccgcctggcagataacccgcagcgatggcacctacatgctgtgggtcgattaccgcgccagcggcctgtgcgaacagcagctcaaaacgtggttcctgacgcgagccggcgtagagccaagctggggttctgacttcggtgcagccggacagggcttcttcagaattaatatcgccaccccgcgcaacattctcgcggcggcgctgcaacgcatcgtcagtacttccccgttttaa

SEQ ID NO: 454985 - DNA, 405 bp, Serratia marcescens
atggtggaaaatcactctcaaccggcgggtcaggcgtcagtcgcgcgccgctggtttcatcctttgttatgggcgctggtgctgatcggcctcaatatgcgcccgctgttaacctccgtcggcccgctgctgcccacgctgcgccaggccaccggcctgagctttggcggcgcggcgctgctgaccgcgctgccggtgctgatgatgggcctgatggcgctggccggcggatggatcaaccgcctgctgagcgaacgcgccagcgtattgctgagcctgctggcgattgcgctgggggcactgtggcgcgaactggcgccggacagcgtgcagctgctgctcagcgcggtgctgggcgggctgggcatcggcgtgatacaggcggcgggctgggggcggcggtga

SEQ ID NO: 454986 - DNA, 1200 bp, Serratia marcescens
atgcgtattttcacaggtaaaacagcgattgccgcggcagtaaccgccgccctcgccgccgtgccgctgtccgcgccggccgccacacagccggtaaccccgctctcgcagctggcggccgataaagccatcggccacgccgagctggtcgccacctttagcggcgccagcgcgatgcccaccggcgtcacggtatccagaaacggccgtattttcgttaacttcccgcagtggggggataatgtgccctttgccgtcggcgaggtgaaagacggcaaggtcaccgcctggcccaaccaggaaattaaccgccccgacagcgaccagcctgctacgcatttcctgagcgtgcagagcgtggtggcggatgaccgggggcgtatctgggtgctggatactgcagcgccgaaatttgccgccccgcagcccggcggcgccaaactggtggccattgacgagcaaagcggcaaagtggtgaaaagcgtggtgttcccgcccgaggtgatcctgccgaccacctacgtcaacgatatgcgtttcgacttccgcataggtaaagaaggcgtcgcctatatcaccgactcgtcgctctccggccccggcggcattatcgtagtcgatctggccagcggtaaagcaacacgccgcctgagcggcgaccgttcaacttcggccgagccagggtttacgccggtggtagaaggggaaagcctgctgcagcgccggccggacggcagcactgcgccattcagcgtggcgtcggacggtatagccctgtctccggacggcaaaacgctctactactgcccgctgtcgagccgccagctgtacgccatcgacaccgccctgctgcgcgaccccaacgtcagcgaggcacagctggcaaaagcggtgcgccacctcggcgagaaaggcgcttccgacgggttggaatccgacgccaatggcacaatttacgccggcgactacgaacgcaatgcgattcgcaaaatgacgccggacggcgtctggagcacgctcgtccacgggccgcacatcctctggccggacacgctctccgtcgggccggacggctggctctactttaccgtcaaccaactgcaccggcaggccgggttccacggcggtaaggatatgcgccagaagccttacgcgctgatgcgcgtacgcatcaacgccgcgccggcacccatgcattaa

SEQ ID NO: 454987 - DNA, 498 bp, Serratia marcescens
atgatcattggaaatgcaccagagatagcgattcagttggaatacattatcccactgaattcaccaagtggcctttttaatttcataatagatgatggtcttattccagggaaaggtacggtaatagatctttacatggtgatatcgtcactcaaggatagtttggcttaccatttaaattcaggaattcaagatattggcgatataaatttagagaagctagatttctctgacggagccccagaaaatataatatggctggacagtggtgaattgtctgactatggctgtgtattttggttgggattcgatggtgaggaagaaaggtttttttattcagtggattatgaaaagactatacaggagaaaaggtatgttcgaggaactattgagaaactaattaatagtctaccatcccctgaaaagctcaaaataaaaaaaactaacgatatgatatctattacagatattgatgattcatatatagttcagagctga

SEQ ID NO: 454988 - DNA, 345 bp, Serratia marcescens
atgaacatcacctttacactccaaccgatcccggagctgacgatcgacgacgatgcactggccgagctggggtttacacccggcacacccttccagctcacgctccgacccgatgacctgtggatcccctccgtcaccgatgcagccacttggaacacactgtgcaaagccagccagcaacggcaagatttgggagcggattggatacgagagaacggccaactgatcatcggtagcgactggctcaccgcatccggcattaccagcgcggaacaactggaactcaccgccgcacccggtgtgctccggttgcagcggcgggaggtggaaattttcaaggcataa

SEQ ID NO: 454989 - DNA, 951 bp, Serratia marcescens
ttgcacgccagtgaaaagaccgagcttgagatagcgaagcagaaactccagaacagcaaagatccggcagagcgagagaaagcgcagcagaaaatcaatgagctgaaagagctagatatcagtcgcgatcagaaggtcatcgatgcatgtggtaatggaaatgcagcaagtgcagcctgtgcaggtgccagactggaggtcattgcggccaaaggtgagtacgaaaccgggcagtacaataataaagtcagtgacatgtacccggatgcctacgggcagatagtgaacctgctgaatatcaccagtgttgatgcgcagaatcagcagcaggtgaaggatgcgatggtgaactatgccatgcagcagcttggcgtggataaggccacggcagagcagtacgtatcgacgtatgatgggatgaagattgtagcggcttcgatgtctcccgtgttgggtacagcggtagcaaacaaactaagtacattggtcaaagaggctaatgtttatccttcggggattagttttaaaatggatcagccagagcatatgggatctgttgcaaaatacagtcagcagaaaggtattacaggaggacacaacgccgatgccttctattcaacagtaagtgagaaaaatgtgaaaattgtcggtgaaaataaaactggcatgaagggaataacagaggttcaatatcaaataccttcttatgatcgtgctggtaatgttacaggttataaagagaaggtatttaccaaaacaatctacgaccctaaaatttttactgaccaaaaaatattagaactggggcagcaagccgcaagtggtggttacaaagcagctattgcatcagggcaaagagagtatacggcaacagtcggtgggataaccttccaggtttacttggatcaaaaaacaggaatggtagaaaacttctacccggtggctaaatga

SEQ ID NO: 454990 - DNA, 738 bp, Serratia marcescens
gtggagaataatgcgctgggcgcggcagccggttcagacctgggattctggttcggtaagacaccggactgtgatacagcctgtaaagcaaatatcgcaaaaggtgtggctgaagggaacctggtggtatcggcaggtgttgctggcgtagccggtggtgcgatgatagtgggtgccacaccggaaatcgtggcggcggctaaagcggcgctggaaggctgcaaggcagcaccgacaatctgcctgaacaatgccgggttgcaggtagcggaagcggtaacgccgggaggagttggtgcggcgggagctatcggggttggtaagactgtggttgaggcgacagcagcgaaggctgaggctgtggcggctaatgcggcgaataaactttcttcaaatgttggtaagatcaatgccggtaaatttggacaacttgaattaaattccttatctaaaaccggaaccaatattgatccagccgctaaatctgggaatttcactgttgcaggaagggcattacagaaatatggaagccgtgaaggaagcgcttatcctgccgctaaaggtacaccggttcaaatcaatgagcaggggcagaaaatattagacgggataattaaagcaccaggagcatctgttaaagaaggaaaccgttttggagggtttgatgttatcgctcctgatggacgaggtgctaggtttgatccccaaggaaacttccgtggatttttggaaccttaa

SEQ ID NO: 454991 - DNA, 222 bp, Serratia marcescens
atgaactctaaagatcaactaaagatcgtaatcgctagtgatatcgattatgaagaattaatagctgaaatttattgtaatgatgaatttatcgctctcttacagcaagaggatggaatagatgacattaagattgaattttcacctaatcttgcttcattaaatctcgactggcttcagaatgcgttaaatgaggctaagagaaagcttttagaacagtaa

SEQ ID NO: 454992 - DNA, 327 bp, Serratia marcescens
atgaacatcacctttacaccccaaccgatcccggagctgacgatcgacgacgatgcactggccggactggggtttacacccggcacccccttccagctcacgctccggcccgatggcctgtggatcacccccgtcaccgatgcagccacctggaacgcactgtgcgaagccagccagcaacggcaagatttaggagcggattgggtgcgggagaacggcgaactgatcatcggcggcgactggctgacagaggcgggattcgggactgatacaccggttaccattgccgttgaacgcgggcaactggtgatccggcctgctgagtga

SEQ ID NO: 454993 - DNA, 246 bp, Serratia marcescens
atggccaagaccaacgcacaacgccaggccgagtaccgcgcacgccgtcgccgcgacggggtgagcactcgcctgaacatcgacgtgagccttatcgcccagtttgcgcttgaacgactggcacaccatcacggcctgacccgacgccagatgctggaacggctgcttatcgaaccccatgagacgctgtgcaagacactggatgaagaagcatttcagcgctatatcaacaagggggccgcatga

SEQ ID NO: 454994 - DNA, 597 bp, Serratia marcescens
atggatacgctgttaacaaacccgaaggggaataataaccagcctcatcccgttatttttcccctgcacggtaacgatcgctattatatttatgcgcttaatgcgctgctaaaaaatttatttattgaagaacctggcctggaaaagtgggtgccggatatctgggttatcagcgaggtcagggatatatttggctgcatccaaaaattgcaggagaattccgacagcgtggtgattggcgatgagcatcattatcgcctgctgtgcggtattcccggtattcgttgggtatgttttattgatgcctcgctcgcagtagctgaaatggcgcgctgttttaagtctattctgcgccgccggccttgctgtatgagactcggcgaatatcggcagatcggcgttgaggcattttccgccagaaccagaaaaatcatcgggctgttgctgcaaggctgccctccacatgatatcgcccacgagtgtggcattcaggcaaagacggtcagcctgtataaaagaaacgtaatgcggcagcttaatgtgaacagtacgcaggagctggtgataaaaagcgcgttgatggatgcgcagtggtag

SEQ ID NO: 454995 - DNA, 891 bp, Serratia marcescens
atgagcaaactgacgggccgcgccctgctgaccgcactgatgatgaccaccggcggtacggcgctggcggatccggtcggcggcagcgacggcggcgccacgttgaacctgaaggcgcgtatcgtggagtccacctgcgccttttcatttagcggggctaacggcgcgacgctggattttggcgagtggtcctacgtgaacgccggcacgccgacggcgcccaaatatatgctgatgccggtgcgcggcaagggggagatcgccaccaataccgtatttaacgtcagcgtcacggcggacccgaactgtccgacagaggggaaaatggtggtgatgattgacgggtttgatgtgtcgccggggaccgcggggtttgcgggggcgaaattattgaaaggctctccttcggcggtactggccgccccccggataaatgcggacggcagtgaggcggctaccccttattacttcccttatgatgtttcttttattttaaaacagaatagtgggagttgtacggctgtgagtaatgtaccttttattacagtaggaagttatacaggttatattgcgcgcagtgacaacagttattcagtaggatgttctgaatcgacaactggttggggagggaatgatacaaaaagttatatggcaccttctgaacaaagaatttttattacgagtggggatagagatatcagttataataggctgcatataaaaggtagccttccgcaaaagggaacctggggggttgatcagtcctctactactcaactagacatagcttttgcaggcccgactgaaatcaccaccctctggggcgctaacccgccgccgccgggcaccgtctttaccggtcaactgacgttaaccgccacctatctatag

SEQ ID NO: 454996 - DNA, 225 bp, Serratia marcescens
atgatttcattcctctatatggcatccatattagtaattgtactggactatggaataacaaaaaaatacaacgacatactcaacgataagacgatcacaattgaagcctgcaatgcagtggttgccgaatttgaccagtattatgacagactgattaatatttctctctttggctacaccatttctaccgtgttgatcctcctcatcttcaaaaaagtgagatga

SEQ ID NO: 454997 - DNA, 1125 bp, Serratia marcescens
atggcagcaaaaggttattatttgttccgaagggataaaacaacctgcggcggtgtcattgttgatgggtgtatcgatcaccagcattttggtaaagacatggcctgtgaaggccatagagtaacctgtggtaatcatgaaggccttttccgtattgccggtggaattcacgacactattcacggcaaaagagtagcggggacgctgcacagctatagctcttgtccctgtagagcgcgctttgttccgtcaaatttcgttgatacttatgaactcggtggagaagcaaccataactcacactgacttctcccatcttgttaagactccagtgctccctgggccaattggagattatcagttaggtaacgttactgaaacctgcaaaccagaagataataatttattgaacggtgtttacatctggactgaaatcacagacgcgggtcatgctttcgtttccgtacaccagaacaactctatctacgtatatacatacggacgctttgggcgaagagggccagctaacttaacgggagatggaatactaaacttttttaccggagatgatgcacacagctactaccgtgaagaactctatcaggttaatgctcgagtattcaagattgatgatgcatccatagcggagacacgctcattgtttgaaaacctttggaactccggagcaaagccaatacctactgcaaaaatgggtgaaagaaccaaacgcaggggaagagtcattgatgtttatgatcttacaggtagtaactgtacaactcatactgttcaggtaattcgcggagctggttcaaaaatttttgacacaagctacacatcaattacaacgcaattaccgattgaaggcaaagaagattttacggtacctctgtctcttcaaaattatcttatgaataaaagcagcgatctaaattcaatgcaagtatttgaggttaccaatgaattcaaaaaacagtatccaaatgtaaacaattacacctctgggaacgagagtgctatggagaaaaaccttgctaagggagcctcaacattaggttctgcttcaggctattctggtggcaccgtcggagggttcctcggaggctcctatgatcttgacgagtag

SEQ ID NO: 454998 - DNA, 174 bp, Serratia marcescens
atgcatcaggaggaagtacggctggaggctatcagattgcacgagttggagataaagttttatacgcagacggtagtgaagccatcattatttctggtgcaggtgaagcgcgaattatgcagggtgcatctgctgcactggttggcagtatgcttgataacggcgatgaaataa

SEQ ID NO: 454999 - DNA, 1125 bp, Serratia marcescens
atgactgaagccaagaaaaatgcacaagtgttgaacggtgtgaatgatgacattagcgaactgaaagcgttatccacgctgcgcaaacgcgtcatcagcgacggcgagatcgtcgccaaatcaccaaacggtttccgtctggcaaacggcaacaccggcgtgatattgcgtaacgacggtaaggatttttacgcgctgaccacgccgagcggccaggctcaaaatggctcgtggaacaccttgcgtcctttctcattcaatcttgcctccggcagagtatcgctgcgcaacggtgttgatatctccggcggcgcaatgatctcgcataacgccggtatttccaccaagaccaccggaccggctccgctaatcaacggacaaatttattatgccgcagatgtcagcgccaatttcaccagcggtaatgtcaccaccaccatgttgatgggatcgcgggtcgtcgccggcaaagaggattatgggttactttcttaccgcgattggcaagggaactggaacgaaatccaggtgagagccaatgccgagttatcggtgggacagctgaccaaacgcaattctgacagttggttctttgcgaacccgcctcagaataccgataaatcgaaagaatcgcttaccaaagggatgcatttacaaggtccacataacaaacacgcgagtatctatcaccacgaccatgtgaaatacaatgaactcgttataaatgtgagtgacggtaatcggaatagttggttcgttttcaaagaagacggctacgccataaccggtggcggatggaacatcagctccgacgcccgcatgaaaacggatatcacgaaaatctcaggcgcgctggagaagctgaccacaatcagcggttacacctacctcaagcagggcatgccggaagccggtgtgattgcccaggaagtggaaaatgtcttgccacagtccgtcacccaaaccgaattgaccatgaatgacggcagcgttctgaaagacgcccgcagcatcaatatcaacggcgtcgtggcgctgctggttgaggcgcttaaggaagaacgggaagctcgcatcacattggagacgcgcatcgcagctctggaaaaaacacttgccggctaa

SEQ ID NO: 455000 - DNA, 573 bp, Serratia marcescens
atgccacacccccagcacgccacgctggtgatcacccaccgtccgacgccgggcaatgtgccggcctatgaagcatggctgaaacgcatcatgccggacgccgccgaatttaccggccatctcggcgttaacgtgattcgccccgccggggcggagcagggctacaccattctggtgcgctttgacaacgtggataacctgtaccgctggctgcactcgccgcagcgcgaagaatatatccgtcaggtcacgccgctgctgacggcggaagaccatattgaaatccgtcccggcgccgaattctggtttacgccgcccgatccgcacgtacgcccgccggcgaaatggaagcagtttctgatcacgctggcggtgatctttccgtcaacccatctggtgccgtggctgtggggaacgctgttaccccggctgcaaggcacagtcggcggccacctgctcaatgacgccagcgtcgtcgcgctggtcgtttttttctggatgccgattgtgacgcgcctgttgaaccactggctgacccaccattcacccacgtcgggagaagataatgaataa

SEQ ID NO: 455001 - DNA, 165 bp, Serratia marcescens
atgacgtttaacaaaggatttatacggctagcgggcgtgatatccattatctccgttgtcagcggtttcacccgctggcctgacgtgatgtttatctccagctgcgcgatgatcgtgatttggatccatgccgaatgggactggcgccggcaggataactcctga

SEQ ID NO: 455002 - DNA, 468 bp, Serratia marcescens
atgaaagtaaaagttaaaaaaacaaggttttttatattggtttgcatctgtgctttccttagctatcttctatggtttctgatacgcccagtgaagatcgttgcggttcataaagatggacattttagttccgtacttgtaagaaattttccatttaccgatcgggggaagatagattggtggttgaaaaataaagaaatgctaaaaaataggtatggcataccagagttttatcccaatggtgatttttatattaccttctggctttttggtgaagggtataaagaagaaggtaagtatgacaggagatgttttgacgatatgaaaacaaaggtaaactgcattgaaaaaaatgcagttttttcagtgaacaatgatagccgtaatagagttcactttactgtatttgatggtggtgattatttacttaaaaataatggtgaagtggttaaatatgagtacaaataa

SEQ ID NO: 455003 - DNA, 861 bp, Serratia marcescens
atgatggctgcactgcagttcccctgcacgatatttaaaacgcaaaagcgcatggacgattacggagcgagcgatatgcgttgtggagacctgtccgcatcacagctaaaaacgcattttcgactggcggacgtttccgccaccgtagacccgtggacgctgaccagaaaacgtcttcaccagacgcacccgcgcgcctatgcgatggtcagccgcctgtccgccccgcaacagacgctgacccgccgggagtgcgccgccatactatttgatgagctgcgccagctgtcgcggatgtttgccctttatggcccctacaagtacctgatcggcaaaatgatcgaccatctgcaatacggcaacggcacaccgtttgccagcccgcatctggacagggcgttgagggaacatattttgggggataactctaaaagtagttcattactacgaataaaaagggtactgtcagattatattaattgggaacggaatttttatcctaaagataaactgacttatatacataaagctatttgcgatggaaaactccctaagtttaatcgctttcaggataactttaacggtatggggattactgtccatgatacttgggctacacatatcgtaataaagtctttacacattgatcatggacactatcgtgctgtaatccattacaaagtgcaagatcactttgggttggatgataatgatatattaaagcttggatttagtcagtttcgcttttttcgaatctggtttgtactgcagcgatacaattattttgggtttaaaccgtttatgactaatatggactctactatagaaattacatggagcgtagatgaaagtaaaagttaa

SEQ ID NO: 455004 - DNA, 4311 bp, Serratia marcescens
atgggtgaagcagcgcgcgtcggggacagcatcggccattcccacgcgctggcagggatgattggcggcacgcttatcggcggcctgattgccgccgccggggcggtggcggcgggcgccctgtttgtcgccgggctggcggcctcctgcgtgggcgtaggcgtgctgctgattggcgccagcctggcggtgggctacctctccggcgagctggcgacccaggcgcgcgacggcattgccgccgccggcgccggcagtctgtcgcccaagggcacgatactgaccggctccggcaacgtgttcatcaacggcaaaccggcggccatcgccaccgtcagccgcgtcgcctgcgaggacgacggcccgagcatgcagatggcgcagggctcggacaaggtgtttatcaacggttatccggcggtgcgcagcggcgacaagaccaactgcgacgcgcaggtgatggccggctcgcctgatgtgcgcatcggcggcggcaccgtcaccacgctgcccatcaagccggaagtgcccgactggctgtataaaatctccgacctgacgctgctgtttgccggcctgataggcggcgtcggcggtgcggccagcaagctgggggcgctaggacgcatgctcagcaaggcgccgggcatcaacaaactgggccgcgtcgcctgccgcgccggcgcgctgatgaccgccaccgcggcgacgggcattatcgcccggccgctggacgtggtcagcggccagaaatttctcgacggcgacgacgagctggactttgtgctgccgtcgcgcctgccggtggcgtggcagcgctactggcgcagcggcaacccggcggaaggcgtgctggggtgcggctggagcctgttctgggagagcagcctgcagacctggcaggaagggctggtgtggcgagcgccgtccggcgactacgtcgccttcccgagggtgccgcgcggccacaagacctactgcgaagcggaaaaatgctggctgatgcacaacgccgacggcagctggcaggtgttcgacgtcagtgaacaggcgtggcactatccgcgtctggaggcgcagcagccgagccggctgagcatgatgaccgatgcggtcggcaacgccacctcgctgttctacaacgacgcggggcagctgagcgagctggtggacagcgccgggctgcgtctggcctgccgctacctgacgacggccggcggcgcggtgcggctggcggcggtagcatggcaaaacggccaggacacacaggtgctggcgagctacgagtacgacgacgacgggcaactggtcaccgtccgcaaccgtgccggcgagatgacgcggcgctttggctggcaggacgggctgatggtcagccatcaggaccagaacggcctgctgaacgaataccgctggcaggagattgacggcctgccgcgggtggtcgcctaccgcaacagcgccggcgagcagctggacatccattacgatgttgccagcgggacgcgccgggcggtgcgtgacgacggtaaacaggcgttgtggcagttggatgatgacgacaacgtcgcgcagttcaccgactatgacggccgccgctacgggcttatctacgacgcgcgcggcgaactgtgcagcgtggtgctgccgggcggcgcgcagcgccagagcgagtgggacgcgtacggccgcatgctgagcgagaccgacccgctgggccgcactaccacctatcagtattcccgcaacagcggccgtctgttctcggtcacctaccccgacggcagccaggaatttcagcactgggatgcgcaggggcggctcggcaaacagacggacgcgcagggccatgtcacgtgctaccactatcccgacgatgaagagagcctgccggactgcattaccgacgcgctgggcggtgaagtgcggctggcctggaacgcgcaggggcagctgacgcgccataccgactgttccggcagcgtcactgcctacacctatgacgcgctgggccagctgacgcaccacaccgatgcggaagggctactgacccgctaccgctgggacgccgccggccggctgcaacagctgctccacccggacggcagcgaagaacagtttggctggaacgcgcagggccagctggccgcacaccgggacccgctcggcagcgagacgcgctggcactacaacccgctgggccagccggtcagcatcaccgaccgcatcagccgcacgcggcgctaccactacgggccgcgcggctggctgacgcggctggagaacggcaacgacgccgactaccagttcagctacgacgcgacgggccgcctgcaggtggagcagcggccggacgggctgcggcgttactaccattacggcgccgacgggctgccgacgatgctgctggagaccggcgcgcaggctgccgatggcacacaggcggaacgccggcagcacttccgctttgatgaggcggggcaactgacggcgcgcaccaccgacagcgccgaatggcgctacggctatgacgccggcgggcggctgacgacgctgacgcgcacgccgaccgccgccggcgcggcgctgggcatcgagccggacagcatccggctgcgttacgacaacgccggcaacctgctgagcgagcagggcgtcaacggcgaactgcagtatcagtgggacgcgctgggcaacctgcaggcgctgacgctgccgcagggcgaccggttgcagtggctctattacggctccggccacgccagcgccatcaggttcaatcagcaactggtgagcgagttcagccgcgaccggctgcaccgggagaccgggcgcacgcagggcgcgctgcagcagcggcgacagtacgacgcgctggggcggcgcagttggcagagcagcggcttcagccacgggcagctgacgaagccggaggacggcgtgctgtggcgggtataccactacagcgggcgcggcgagatagccggcgttgacgatgcgctgcgcggagaaatccgctacggctacgatgcggaaggacgcctgctgcagcatcgcgaggcgcagcagggcaagccgggccaccggctgcggtacgacctggcggataacctgctgggcgcgcagagcgccagtcgggccctggaagagcaaccgccgccgctgagcgacaaccggctgacgcactggcagcagctgttctaccggtatgacgcctggggcaacctgatccgccggcgcaacgggctgtatgagcagcactacgtctacgatgcggacaaccggctgacggcggcatatggccacggcccgcagggcgagttccgggcgcagtatcactacgatgcgctggggcggcgcacgcgcaagcaggtgagctacaagggcaaggcggcgcagagcacgcgttttctgtggcagggctaccgattgctacaggagcagcgggaagacggcacgcgccgcagctggagctacgagccggacagcccgtggacgccgctggcggccatcgagcaggcgggcgacagccggcaggcggatatcttctggctgcacagcgaccagaacggcgcgccgctggaggtgacggacgccggggggcagctgtgctggtcgggcaattacgacaccttcggcaaactgcaggggcagacggcggcgggcatcatgcagcgccggggcgcagtttatgaacaaccgctgcgctatgcagggcaataccaggataacgagagcgggctgcactataatctgttccgctactacgagccggaagtggggcgcttcaccacccaggatccgatagggttgcagggcgggctgaacctgtaccagtatgcacctaatccgtatgggtgggtggatccgctggggttgagtccatgtaattcgccaaatggctataaaaccggtgatgtagatccccatggtaatttatcaccaagagcaaatcgtgcttcggggcataccaatagcaaagctgatggttttgttcagagccatcatccaatacaggatgcatgggctaagaaaaggattaatggataccagagaaactcagcgccggcaacgttgctcaaatcagcttctggtagccctcatgctggaattagtgctgctcaacgagtacgacgggcttcatctggaggttgggatacaaaattaaagcaagagtttaatattagttatagagaaatgttgaatgcaggtgtgccgatggggcaggctaggaagtcactcaatgatgcatataaatatttctctgagctgagaggtcgtaacattgataatccattctttgatatttga

SEQ ID NO: 455005 - DNA, 453 bp, Serratia marcescens
atgtccgtgacacttaaagaaaagcttaagattgccaaaaataaaaagcaaaaaaagataatcattaaagaaatttgcgatgagcttttaatttgtgattcggatgtctcgtttgtggatgttagttataacgatctattggcccctttgtttgggcatgatgttcagtcaattgggtttgagattaatgatgagttattatttgataggtttgtttgttttttaaatgagaggtgtgttagtggagatgcatacttttatatattgaaagatgattcttatcatgttataagaattaacatttcatatttcatatctaatccagcttttttttggaggctgaaaggtggaagtaatggaaaaagtgactgcatattagtatccgtaaatgagacattcgggttctgtaagctatatactgagtataactatgagttggttgagtgggggtga

SEQ ID NO: 455006 - DNA, 270 bp, Serratia marcescens
atgctggaatttatcaagccaggtaaactgatgcaaaatgcgtttatcgaacgttttaaccggacgtaccggacggaaatactggatttttatctgttcagaacgctgaatgaagcacgagaaatcatagagcgctggctgacggaatacaacagcgagtggcctcaagaatccctgaacaacctgacgccggaagagtaccggctgatggctgaaaaaccggaactctcaaaagcacgtggaactaaagccaggatacttacaccttga

SEQ ID NO: 455007 - DNA, 252 bp, Serratia marcescens
atgaccgtcactattgaacgtttgcaggcctttttggcagacccttcagccggacaggatgtgcatgagatggcgtcggagctgttggctgtcagggcgatcaccgcttgttatacgaaagagggcctgagtgtccttttggaaacatgcaacgtcctgataaacagaaaaaacacctctggttactcggataatctcagagagattgcacgcgtagcccatgggctcttggccaactgggagaacaattaa

SEQ ID NO: 455008 - DNA, 264 bp, Serratia marcescens
atgaagccgttagtgttgatgccggggctttatgccccgcgttccgcccctcctgcctgtcagaaaaaagcgcgggaacaggtaagacgttttcgccagggggcaaggaattacaaggcactgcatgtaaagggtaagcaccgcagtggccgtgcctggatgaagatcaatattagtgacagctggcgtttgctcagcagaaacagtggtgttgattgggagctgctgacccacgaacgctacaacaatgaattatggaaatga

SEQ ID NO: 455009 - DNA, 363 bp, Serratia marcescens
atgaccatgaccaataagcaactggaagccctgaaagaacatctgccggccgcgctggcaacctggcaacagtcgaaaggcagcagagtcactgtgggctggctgcatgtggctaatcctgaggttatcgcaacgctgctcactgaactggaaaaagcaccgcatctcattaaggaagcggaaatcagaggtgtagaaaaattgtcggcagcattcaaatcctggtctggcgacagcacttatcttgattacgaagcacagcggcactgggccacagcgagcgaagaagcgttgtcatttgctgatgacctccgcaatggggccaatattgaacgggaaggggggcattatgaagaatgttaa

SEQ ID NO: 455010 - DNA, 570 bp, Serratia marcescens
atgtcgaatcgttctaattatattgttgtgatcaccactcttctgtcctcggtattcagagccttgtttgtctggcccggtgtggttctggctatttttggcctcattttttttatcgcaactctctgtgatgacggcgcgcaaaaggctgcctcatacatggcggacacagcgcaggaataccgtacagccccggccgggatggtgcgcacgtgcctgcacccagatgatcctgtatgggatatctccacaggtccggcggcggcaccggtaataaaacgggactgtaaacctcatccgaagacgttcgctgacgtcgccaggcaagagcagcgcatcattctctggatcgggagtgtgcttattgtccttggcatgttggttgaactgttttatttactgtaccgtcgccgccagatgaatctgaacgttgtttacggaagtatcaatgcaagaggtgagtatcgtgctgtgacctacctcggtgaagccaatgctgatgaatgtcgccgctctccatcacgtgatggcggagtgaccgggaataacaaggatggtcgcaatgagtaa

SEQ ID NO: 455011 - DNA, 297 bp, Serratia marcescens
atgaaaaatcatggggttttaaagataaagtataattttcaacaggctcctgttgaggatgaatttgaatgggatggcagtgatgagattggtagcatccttgcttatctcgtcaaaaaacatgtagaaccgcctgtgattgtagctcaagagcggagaggaaaaagaaatacacatccctcatcagttaatcttattgagaacggtatagatgacgtgttttactttgaatgtaagtctgatgaggatactggtgagtggttagaaattcctgaaaaatggctcgttgatgcttaa

SEQ ID NO: 455012 - DNA, 576 bp, Serratia marcescens
atgaaaactcaagcagcatcagcgttgacgcgtaatgaggtgcaggaatttgccaaggggctgctaactgctcacagcaaccccctctatcatgatgtattcaagtttggtctgaatgtatctttgcggattgctgacctactcaagctgacctatgaggaagtgttgagcgggaaaatccgtattaaagaaagcaagacgaaaggtgttaaaggtaaggcagttcgggagatcccagtaacagcagcagcgatgaaaatcgccaaggcacggcgcaaagctaacccggaacacgtctacctgttccagaacgacagccgccgcagtaccggcaaaccgataaccaaagaagccgttatcagagcatttgcaaaggccaatgaggagtatgtaactcataagcatgtttccacgcacaccatgcgcaagacaccagcgcggattatgtgggatgagggcgtgccgctggagatcatcagcagccgcctaaaccatagcagcactgatgtaacgctgcgttatctggatatcaccaaggatcaggtgaatgaaacatatcagaattatcagttttga

SEQ ID NO: 455013 - DNA, 1164 bp, Serratia marcescens
atgaaacggttacacgtaatcaatttagagaaaatgggtggcgccgagaaaattttcctgcagttcttacataacgcgacggccggcagcgatagcatactttgcatcagtaataaaatcgggccagaaatagccagtgaactgggtgatacgcccctgctgtttgccaaccgcatcatcaatgaccgtactctgaagtatccggtgtttctgcgtaaatccgcgttactacgcaaaatcgaaaaacagcgggccgacctggtgatcttttgggatttcgtccccaatctggcgcgcaaaatacgcaatagcaaaacgatttattacgatcatggctgctcttggcgtttcccgttgaatgcgaaaacattgggatttttcgaaaaagtagacggctgcattgctgtcagtttcgcatccaaacgcgtattagaggaacgttttaagctgacctgcccgatagaaatcgtcagcaactgcgtaccgccgccaagcgcgatctctcccaaaaccgtggcgccgacaacgcgtgtggtgttaggtacggcttcccgtctcgtctcactgaaaggtattggggtttctattctgacgctgaatgccctgcggcaaaaaggtatcgacgctgaactgtacatcgccggaaaagggcctgatgaagcaaagttacgtgaactagtcacaaaactgggtgttgagaaatacgttcattttctgggattccaacaggatttgacgtcattttttgaccgtatcgatttttacatcagctctccggtgacggaacctttcggactctcctgcatggaagcgttatatcacaccgtgccggttatctttccgctgatagatgggcaacctgaggtcattcccgatggagaatgcggcatcggtatcgcgccaacgctaagcttcgaacaatatcgtttattaaccgggatagaaatagactttcctcatcaggttttcaatacggtaacgcaaaaaatgacgccgcctttagtcttatcgcctgaggattgcgcacgtcaaatcattaatataattgaacaaaacagttacctgacgctcagcaataatgctctgcgccatgccaatggggcatttgactacacccgtttcgttaaagagttagagcggagttttgcatgcttcgtaaattaa

SEQ ID NO: 455014 - DNA, 1245 bp, Serratia marcescens
atgcttcgtaaattaagcgccgccaatctggctgccatttcttttttattcgccattatcgccgcatcaaccagcttaaccgatagtactattactcggaatgcgttttatttagcggtactttttgccattgtggcctttataagcagcaggccccgggtgttttcccgcgatgccatactgatatctgccgcaatattttgcatcgggttaagccaggcagtttggctcttgcgcttccctgcaactattacgccgtataacgaatatctgaccagcgcgacgcgcttgctatgcggcgccgtgctggttattacgctgggctcattacagaacagtctcagtcagaacgtaaaaaacttttccaagggattgttgatattcggtttcttttacacatcaggaatagggatttatcttcacgccaagaatcctgacatgcgactcgagatcaataccgtcgccacaattaccgcatatatttacacgctgcagtcgttattaacgatatacgtcataacaaacacatcatggcgctataagtccatcagtacagttatcgttatattattaaccatatgggttattttattgacagaaacgcgcacagctctattaatttacccggtgttattgttgatatttttctgccgacgccaacacatgacggtgaaaactatcttgtcattcggcctgctcatcaccctcatggtagcggcggcctgccatctgtttactacggcaacggagcgtctcaccaatacggtcaatgaactcagcaattatcaaaaaggtaatggcgattcttcgctcggctcacgcatcagcatgtggaaagctggcatccacgccatagaacaagcgccggaagggcaaagcgccactcaccgattggatctcgcgacgcagtacatcgaacagcatgaaggaggaaacccggaggcgctgcgcaacatcgtctaccacctccataatgatttcattgaggctggctctttacagggcgccgccggcattatcgcattagtatttttctttgcgttgatatccgtcgccaacatcagatacatgcatacacacgctatgttactgttgcttatcttgccgacgcttattattggcatggtagatacattatttatcgatcatcgctttgtaaccagcctgacgctgatgttggttatctacctcatcctgcagccttcccgacgaagcactccgggttccggcatacaggaaaactga

SEQ ID NO: 455015 - DNA, 1017 bp, Serratia marcescens
atggctattttagttaccggaggcgccggctacattggctcacataccgttcttagcttgttggagcgtgatgaagacgtcattgtcatcgataatttatctaacgcctcggcagtctctttacggcgcgttgctcagatcacaggcaaggaagcaacgttctatcaagccgatgtcatggatcgtgcagccctgcagcacattttcgcctcacacaatattacggccgtcattcactttgccggtctgaaatcggttggcgagtcagtcagaaaacctattgaatattatcagaataacatcacaggcactctggttttgctggatgaaatgcgtcgggccggcgtttatcaattcattttcagctcctccgccacggtatacggaacgccaaaacaaaccccgttgtttgaaacctcagaaaccggcggtacaaccaatccttatggcacatccaaatttatggtcgagcaaatcctgcaggactttgccaaagcagagccggagttcaggattacaattttgcgttatttcaaccctgtcggcgcccatccatcggggctgattggtgaagatccacggggtatccccaacaaccttatgccctatattgctcaggtcgccattggcaaattggaaaaactggcgatatttggcaacgattatcctacacctgacggcaccggcgtacgggattacatccatgtgatggaccttgcagaaggacatctgaaagcgatagagcatatccacgctcacaacggcgttgccgtttacaatctcggtaccggcgttggatattccgtattacagatgttaaggatgttcgaacaggtgtcaggtcgccaaattccctaccaaatcgtcgctcgcagacctggcgatattgccgaatgttgggcggatacatcgctagccgcgagccaactgggctggaaagcacggcgtaatttggaagacatgctgcgtgacgcctggaactggcaacaacaaaacccgaaagggtacacgctatag

SEQ ID NO: 455016 - DNA, 1092 bp, Serratia marcescens
atgagagagaaaaagaaattcaaaattgggctgagcgattctctgctcggactgttgttccgtcaggcgttggcgacaccggaaaaaaaacggactttatcgacgacaaactttgacagcattctggtgtattcaacgacggcgctgggtgactatatgttcaactcgccggcattgcgggcgattcgtcagcgttacccgtcagcaaagattacgctggtggtgcatccgaaatataaagacctgatcacgacgcgtgatttttttgatgatgtcttgttctggaccaataaagccagcgatatgtttactttggttaagcaggctaaagagcgtaggccgcagctggcgattttactgcattcccacttaccgtatgacattgtcagcgccgcgatggccggatgccaatatattgtgcgcgataactatgccaaaccggtcggcaagatggaccgctggttgacttacggcttggatgaattcgatgagcatgtcattgcgcgtaaaatgaagctggctagcgcgctggggtgtgaaacggataatgtggcgatggcgttgccctgcgcctatgagaaacatccaaaggcagaaggtgtgatacgtatcggcttccaactgggcgcgtcaacgcttgtccgttgctggccgccggaatattacgcggaattggcacagcggctgatagccagcgatagccgcattgaaattgtgctgatcggctccgcgcctgaaaaatgcctggcggaagcgttgatgcagcatgttgaaccgacgctgcgggataaaatcaccagccatgtgggaaaaacgtccttgccgcagctgttgggggttatcgcctcgatggatttactggtgacgggcgacaccgggccattgcacctggcgatagcattgcgggtgccgaccttaagtctgttcgtgactgaaaatccacgtcgcagcgggccttatcaggataaaggccgtcatgaatatatttacttgccgctggaggacccgcgggtagttgacgagcaggctccgctgagggcgatatccgtcagcgaagtttttactcgcgctgagcgaatgctggctatctga

SEQ ID NO: 455017 - DNA, 1107 bp, Serratia marcescens
atgaaagaacatattctgtttattatcgacgggttaccgggcggcggcgctgaaaacgtcacgctggccctcgccaaaggcattcagcagcgtggctatcacgtcaccctgctgtcattaagcaataagcgcgattatgaaatccctgcgggcattaattatatcgttgatgcggaccgcggaagcggcccattgcgcaaactgaccgaactctccagacgggcagcctcgctcgatacattgctcgtcgagctcttcgcgaaagttgggcaaccaaaactggttatctccaacctgcacaaaaccgaccgtatcgttgtccgctcaaaagttctgcgcgcaaataatgtctggcattgcattcacggcatgttttcacgttcgtatctgggaaacaaaaccggcctgagccgctggcttaaacagcggaaaatgcagcatgtttataaacatcgtaagctcatcaccgtgtccgatgcggtaggcgaagacgtggtacagcaggtgggtatcaagcctgcgcagcttattaccatctataaccctttccatattccagaaatcaaacagcgcgccgccgctgccaacccattctccggtgaagattacgtcctacacgtaggacgttttcaccaggtaaaacgccacgatcggctattagaggcatttgcgctggcccagttgccgggcaaactggtactgatcgggcagggtgaagaatctgtgacaaaagcaatcacggaaaaaatagcggcattgcagttacaggataaggtgattcttgccggcttccagcaaaatccgttgcctgcaatcagcggagcaaaaatcgtggcgctcagttccgatagtgaaggtttgccgacggtactgatcgaggcgttgatttgtcataccccgattgtcagcacgcaaagccccggcggcgtggctgaaatcatgaccggtgagttagccccctatatgtccgcgatgaacgcgcagtcccttgcggaaaagctacgattggcgtgggacaatccccccgagatcgtcccggatatgtatcgaaaattcgactacgaacatattatcgacaagtaccttacgttgataaaacacccgtag

SEQ ID NO: 455018 - DNA, 690 bp, Serratia marcescens
atggtagggctacatactgcgaagcaggaagaaccaggcaaattttacaccttccaatcacggcttcctgaaggcgtcttttttgagctttcaccccgcaaccgcccactaaattcgcaaccgatattggatgacgaaacggggatgtgtattggttactccgtcacacaggctccaggtctgtggcaaatatacgacgctgatggcacgtttgttcgtttggaagaggctcctttagaaagtccgtttatcgatcctactgacttggtactaatagcgtttggtgtgtttcgtattcttcgtacagggcgggcactgctcgaggctggcacgaaggccgctatctctgtgaaactcagtaatgcaacgatgagttttctacgtggacgcctaaagttagggctgtcggcgcgaaacctaaaggttacggaaaccgttgctcgacgaatgagagaccctgggcgttttgtaccattgcaaatccaggagaaagctatccgatatggtgttagacgtcccgaccctcatggagtgacaggacaatttgtttaccgtgcagaaatgaacagactggttaaacgcaaggtgggcgaccagattcaatatgtacgtacacgttataaactgcacgtggtcgtcagagaaaaagactggacgattacgcactttcattacgacaacctcctctga

SEQ ID NO: 455019 - DNA, 1083 bp, Serratia marcescens
atgctgggcggttggatactgtttatcgcaggtatctttatcgctgccttaatgaacgatggtacaggtttatacaccgtagcaaaatacctgctgttcgttgtcgtcatattgtcactgcttctgatctcgtcactgacgccgtcactattggaaaaggcgctgaatgtttcactgatcgtttccctcgtaccactgctggtttttgctctgtctcgacaaactgattatatgatagtactcggcgatggccgtatggggtggttagccagttggcctggcgttatctggaaagctggcgcttatgcatggcctttcattgcctggcgttgcctgaagaaaatcagttgccgcaatctgttattagccctttccgctattttggttatggcgcttgatggtagccgtacatccatgctttggataacgctggtttggtgttctctggcggttgttaccttgttcgtcaagattccaggacgaggcatcaaaggccatatagccctcctggctatggccctcttttcttttacggtgctgcaaccaacgctgctaggctgggtttggggcaaatatgatcctcttatcgccgaattgtttaccgaaaataaacttggagatttgttacaaaaagcgtactcggggccgaaagaagaggcaacagcggatcgtctgatcaatggcgacaatgcaacccggctggaaatgattcaaaccggttggcataaagcggtcgctaccttcccatggggaggcggttttggttcaacacaggtagccgataataatgtcagcagtgtgatacatatgacttatgtacaacttctggcagatgagggggtgttttcctttaccggttatttactaatcattttggttccgctgtttgccggactgaagtttgtctttgctagccgtgaaacctttattgagcgctttgagctgatgctctccccactctctgtcctagctttgtttactatgatgggatgcttccacccattaagcaatgagctaacagaatggggaattgtgctggtcgccattacgctggtgatgacgcatgtcacgcatcgcaagtaa

SEQ ID NO: 455020 - DNA, 1194 bp, Serratia marcescens
atgctggcgcaaatcgggggattatttattcccctgattgaactgcctgtgctggcccgagcactcggtcagcaaagctatggccaggtactttatgctctgggcatagccttgacagcttccgtgttcgttgagttcggttttaatttcagcgcagcccgtagcttggtgaaagcccaaaaccagccacagaaagtagcacagttagtgaccaatatactgaccgccaagctgtttctcagcttggtggtgactatcgccgtcgccctgctgatgttttccggcgtcggggccaccgcaataccttctcactggttgctatgggtatcactttttatcctggccttcggatttacaccactctggtattatgtgggtattgaaaggcttatattcccagctctgctcgatcttgctttgcgcagtaccgggcttctgctgaccatcctcctggtttcggccccgcagcatgcacagcgcgtcctggcaattcaggcaaccgttgggatcattaatacattagtaccaacgctgttaatgattcgccaaacaggccttgcccccgtgagtgtgttaggggcaaaacaggttttaaaggacagttgggaacttttcctttataaaggcgcacaaagcatcatgggttcgattgcttcgactctgttagggttattaggtggcgcacgcgccgtcggcgcttttgtcccggcagaaaaactcgtgcgtgctgccagcggcttggctgcgccagtgctgaatgccgcattcccgcatttggttaatgtacaatcgaactccaaacacgcagcgaagaaaattgttgccttaacccttgcagccttggcaggtataacgctgagtttctccttattgaccgtactccttgcaccttgggtggttaatatcgtctttggcccgggctacgaagatgccattgaactgctaagaattctggtttggattgtaccattgcggatctgcagtatggcgcttgccatattatggtttatccctacaggaaaggaacgcgtcgcaagtcgcgtaatgatagtaaatatcgcgcttatctgtttattggcatccctgttagttccctctctgggaggactgggaatgaccattgcgttcttgacagcagaaatcattatgtttgcactgctaatgacattctttataaagaaaaaaaataattaa

SEQ ID NO: 455021 - DNA, 894 bp, Serratia marcescens
ttgagtcagtttaacctgagcgtagtcattacaacctataatcggccagagcttgtccaacgtgcagtaacgtctgtcgtaaagcaacgtcgtggcgatttcaacattgaaatcatcgttgttgatgatgcatctccatgccctcttcctcaattcgcggaagcggacgttatcacttaccaaatgccggtaaatggcggcccggggccggcacgcatgcagggactgggtatggctcattctgcttgggctttaatgctggatgatgacgatatgttagaacctgacgcaatttcccatttgatgacctacttagccgatccggcattacagcaataccctgtcatgcagttcgctcgtaccaatggcaaattatctggcgttgatcgtgtaattaacttcaatgactatttgagcgggcagattaccggtgatttcaccccgatctttaaccgtgctgtttttctgcatacagcgcttggttatccaaagaatcgggccggcggggaacatatcctctggtggcgcctggccatggattatggtatcccgacattctccaaaattttggtcaagctttatgacgatgctcaggaacgcatgacccacttctcctcacaaatcaaaaaagcagccgaccatcaaaagcttgcagagatcacactgagcgagtttggcgcgcagttgcaggcagactatccaacggaatatcagcgagtatgcatggccagagttacatatagtatgcttaataaccagtgccgcctggcacgcagctacttaatgacggcacctctgggaaagaaaatgaaatcgacactctggttggttagctggctgccacagccattgattaacaagctgtttttgtcttatcgtcaacgacaagggtga

SEQ ID NO: 455022 - DNA, 1083 bp, Serratia marcescens
atgcgtgtagattacgtgattaccggtctggatattggtggcgcagaatttcaggttatcgcactgctcgagcgcctggcccagcgtggacatcaggttcggttgatttctatgactccgccacgcgcctttacagagcgactcgatgccgcagacatccccgtatattcgctgggtatgtcctcaggattacagctgccgcaggcgctatggcgactgaacaaaatgctgcgccaatcgccgccggacattttgcatggccatatggtccatgccaatatcctcgtgcgtttagcccgtttgtttatgcctaagcttaaagttattagtacagcacataacactcgggaaggcgggaaactacgtgactgggcctaccggttgaccaacccgctcagtcagttgaacaccaccatcagtgctgcggccactcgccgctttactgaagaaaaagtctttcctcgtcacaatacccaaactatttttaatggtattgacacggaaaaatttcacgccagtgatgttcctcacgcgccttccaaaccgttccgctggttagcggtcggcaggttgatggagcagaaagattatccgaccatgctcacggcttttagcctattgcctgacagccggttactgatcgcaggacaagggtatttattatctcagctacagagccaagtcactcaattaggtttggaaaatcgcgtagaattcttaggggtgcgtcatgacgtcgacgagctctaccggcaagtcgatgggtttgtcctgtcttccgaatgggaggggtatgggctagtcgttgcagaggcaatggcatcagggttgcccgtagttgtaactgacagcggtggccccggagagattgttggcaaagacggttcttctggcctccttatcgccattaaagatcctcaggcactggcaacagctttagcaagggttgaagcaatgccgatagcaagtaggtatgatatgggctgtaaggctagaaaaaaaattcaggagaacttctccctcagccagatagtttcccaatgggaacgcatttacacggaattatacaacaataacaaataa

SEQ ID NO: 455023 - DNA, 1128 bp, Serratia marcescens
atgaaaatagcattgataggcaccacagcaaactgcgttgtcggctttcgcgccgatatgatcaagtctcttcgtcaacaggggcatacggtgtatgcattagccctgaattatgatgcggccacacgcacccaggttaaaatgttaggcgctatcccggtggactatcatttcagcagaacaggtctgaatccagtacgtgatattatcgacactattgcattgagcaaactccttaaagaactcaatcccgaccttgtcttttcctacttttccaagccttgcatcttcggcacgctggcggcgtcgttggccggcgtcaaaaaacgttttgcaatgcttgaaggcttaggttatctgtttactgaaaagccagaaggcgttagcctaaaggtaaaattgctcaaaaaaatccagatcgcactgtatcgctttaccttccctaaacttgacgctttgatcgttttaaatccggacgatcgccatgatctgatagaaaagtcagacgttaaagttaaaaaggtacatgtcttaggtgggatcgggctaaatttggctgactatcctttctctgttccgcccgtcgatcccatttcttttattttcattgctcgcttattagtcgaaaaaggcgtttatgaatatgtatctgcagcgaaaaaagtaaagcaacgttatcctgacgtccagttctatatgttaggtgcggtggatacacataatcccggcagcctgacggagcagcacctggcacagctgatcaaagacggcgttattcactaccccggccatgtagatgatgttccctcatggatagccaaggccagcgtattcgtactaccttcttaccgagaaggattgccacgtagtacacaagaagcaatggcgatgggacgtgccgtactcagcagtgatgtgcctggatgccgtgagacggtggtacaaggcgtgaacggctttttagtcgaacgctggtcctctgatgctttagtggagaagatgattaactttatagaaaacccacaaaaaattattgagatgggtcacgccagccatcaaatcgcacaaagcaaatttgatgcggaaaaggtcaactcgcgcttgttggaaatattagatttacaataa

SEQ ID NO: 455024 - DNA, 1011 bp, Serratia marcescens
atggcaattttggttaccggtggggctggctatattggctcgcacacggttttggcattgcttgagcgtggggaagaggttgttgttttggataatctgtccaactcatcaaaagaatccctgcatcgtgtggagcagttgaccggcaaagccgcggtgttccatcagggcgatattcttgatgaacaatgcctcaagcatatctttggcactcatcaaatcacctccgttatccatttcgccggtctgaaggccgttggtgagtcgacgcgtaaaccgttggaatactatcaaaacaatgtggccggtacgttagtgctgctgcaggcgatgcgtgacgccggcgtacaccagtttattttcagctcttcggctacggtgtatggtacacccgaacagatacctttggtcgagacctcacgggtaggcggtacaaccaacccttatggcacatcgaaattgatggttgaacagatcttgcaagacttcgccacagcggaacctcagtttgctatcacggcattgcgttatttcaatccggtcggtgcgcatgagtctggcatgattggtgaggatcctaatgggattcctaataaccttttaccttatattactcaagtagccattggtaagttagaacaattgtctgtttttggcgatgattatccaaccgctgatggaactggcgtacgtgattatattcatgttatggacttggctgaaggtcatctcaaagctatcgataatattactaaaggattctccgcatataacttaggtacgggaaaaggttattcagtgttggaaatggtcgccgcatttgaggacgcatcggggcggaaagttgcttaccaggttgtccctcgccgccctggcgacattgctgagtgttggtccgatcctgctctggctgctgaaaagttaggttggcgggctaaacgcgatcttaatcaaatgatgcatgacgcctggaactggcaaaaaaataatcctcagggctataaaaaataa

SEQ ID NO: 455025 - DNA, 1332 bp, Serratia marcescens
  misc_feature (357)..(366): n is a, c, g, or t
atgaatcgtaaaatatcatctagtcatgatgataatacgcagtttggcgtacatggtatggaaagacccttagtgaaggtgggggttgattcggagaaagtagataaagcatttgagctattggcgcgtgccggtgttgatagtttacggagtacggagtcagcctggcaccgtatcgctgataaacagggaaatccaactaacttcaaagatctcgactatcagctaaaagaagctaaaaagtacggaatgagtcatttgtttgttatcggatacccgcctgcaaaattcacggtggcaaataataaactttctgctgttgctcctcgctatacggctgcttatcaaaattacctnnnnnnnnnnctcgccgtccttttaaaacgtttccaaggctatgatgttaagtatctggaactaggcaatgaagtcgatgctccaaaagtatggtgggttaactctacgcctgccatgtatgttaacgaaatgcgcatgctaaaaaatgcaacgaataaatattatcctgctgccaagaccgttgctttttctgctacttattcaaggacgccagggaagggaggcccagctggcggacgtaatttcattgaaaaaagttttgctctcggtattgataagtatactgacgcttactccattcatcatttttcattcgcggggcagggaaaccttccagcttatatgcaagcgatgatgaataaatataacgccggaagtaaaccattactggataccgaacagctggatacagggattgctgataaaaccaagtcaaatccgtatgatataatcaaactatttgctcgtgcgttcttctatcacgatatgaagagaatggattattatcttgcgcgggatgtctactttggcaggaagctctatagcatggggctgtttgatcttgagtggcgtccaaagttgcgtttgttggcctatgcgatggctgctgacgcaatgaaagggaaaaaactggtgtatatggctaatcctgcaaaagatgtggaggcctatgttcttacctcgaataaaggaaacggtaaaaaatacaccattctcatgtggaaaaattcggttaacaatggcaaggtttctcctgtgatggttccgggtatcaaaggtagcgtagatatagagaaatggaacctggatgttgaaagtaagagcgatatctcaaaaggtatccctcttgacggccgtccaatcgctatctataccaatgagaaaccagattggcaacctgcggataaatctgtttttaagaaaaatggccctgcggtacaggctagtcattctccaatgccgaatgatgactga

SEQ ID NO: 455026 - DNA, 3063 bp, Serratia marcescens
atgaaagcatttacaggaaagaaaaagccgacatggaaactgaatgccttactgtgttcactgttagctgcaggcagcgtacaggcaaacgaggggaaagtcggagacccggccagctggcgcagcgacgagtttaacgccgactgggggctgggggcgattcatgccgaccaggcctacgctgccggctacaccggcaaaggacaaaaagtgggaattctggatacgccagtgtataaccagcatcccgagtttgccggcgacggcaagttgatcaatgtggtaacgcagggcattcgcgcctataccgatccccaccggccgggcattaacgccggcgatccgttctatttcgacggcagtttccatttctacaacggcgagacgctgagcaatcacggtgtgcatgtggcggggatcgctgccgccaaccgcgacggtgcggggatgcacggcgtggcgtttgattcgcagattatcagcgtggacaacgacaatgacggtccggcctacggcgagtttctggggctggacggcgcggtaaccaacgccggctggcaggcgatgatcgaaagcggtgtacgggtgattaataacagctggggcgttagcattccggatttcttgtccgacggcggtaaggatccggatgcgctgcattttgaattccatgatgcgcaagagcagttcaatcaggtgaagccgctgctgggcagcctggccggcgcgggctatcagggggcgatcgatgccgcacgccacaatattctggtgctgtttgccgcgggcaacgacggtaactacaaccagccggacgtcatcagcgggttgggctattttgtgccggatattgcgccgaactggctgactgtcgccagcgtggcgcaggatgatgcctcggccaatagcgtgccttacaccctcagttccttctcatcccgctgtggttacaccgccagcttctgcgttgcgtctccgggcagcaaaatttacagcgcggtggccaacggttccgatccacagcagctgacgtcggactacggcaataaaaacggtacctcgatggcgacgccgcatgtgaccggcgcggttgccgtattgctgcagcgtttcccttacctgtcgacggcgcaaattgccgatgtgttgaaaaccaccgccaccgatatgggagcacccggtattgacgcgctgtacggctgggggatgattaacctcggcaaggcgattaacgggccggggatgttctacaccgagcaggatatcccggaagcgttccgcattcccgatgccgatggcgtggcctatggcccgacgcagtttgtcgccaacattccgggcgtgggggcggaagtggatagcggcacgcgctatcagcgtatctgcgacgatgtacattgtggtctggaagtctattcgaacgatatttccggccatggcggcctgaccaaagagggcgccggttcgttatacctgaccggtaataacagctacagcgggccgacgctggtcaatcaggggttgctggcggtgaacggcacgctggtgtcggacgtgacggtagagaacggcggggcgctcggcggctcgggccgtatcggttcactcaccgccaacgccggcgctaccgtggcgccgggcaactcgatcggcacgctgaacgtcaccaacgacgtgacctttgccgccggctcgcgctacgcggtggaagcggcggcggacggcagcagcgatcggatcgtcagcggcggatcggcgcagatcgacggcggcgaagtggcgatgctgctggatcagcagaacgtactgaacggcgacgccggcggcagcgccatcggccagtatgacattttacaggcgcagcaggggatcagcggccagtttgacggcgcgacaaccacttcgccgttcctggcggccacgctgtccacgcagggcaaccggctgacggcggacgtggcgcgtaacgacaccgcgttcgccagcgtggcggccacgcagaacgagcgagcggtggcgacggcggcggatgcgctggcggcgggcaacccggtgtatgaaagcattctggcctccggcagcgccgggcaggcgcggcaggcgttccgccagctgtcggggcagatccacgcggatatcgcctcggcgcaggtgaacgacagccgttacctgcgtgatgcgctgaacagccgcctgcgtcaggcggaagggctggcgacgtcgcaggacatcaaggcggatgacggcggcgcgtgggcgcagtttgtcggggcatgggaccatgcgtcgggcgacgtgaacgccaccggctatcaggcctcgacctacggggtgctgctgggtctggattcggcctacgatgactggcgtctgggtgtggcgaccggctatacccgcacctcgctggacggcggctacggctcgaatgcggacagcgacaactaccacctggcggtatacggcagcaaacagtacggcgatttggcgctgcgtgccggtgggtcttacacctggcaccggtttgatacggcgcgctcggtgaattacgggctgcagtcggtccgcgcgacggcgaaatacagcgcgcgcaccgagcaggtgttcgcggaagcgggctacagcgtgcagggcgagtgggtgaacctggagccgttcgccaacctggcgtacatcaacttccagaacaacggcatcagcgaagacggcggcgcagcggcgctgcacggcgacaagcagcacacggacgccacggtgtcgacgctgggcctgcgtgcggaccatcagtggcagctgagccgtgaaacggcggtgacgctgcgcggtgaggcgggctggcagcatcagtatggtgaactggagcgcggcaccgggctgaagttccgcggcggtaatgcggcgttcgtcagcaacagcgtgccggtatcgcgcgacggcctgctgctgaaggccagcgcagacgtggcggtgagccagaatgcgtcgctgtcgctgggctacggcgggttgctgtcggaccgtcatcaggacaacagcgtcaacgccggtttcacctggcgcttctga

SEQ ID NO: 455027 - DNA, 2103 bp, Serratia marcescens
atgcttagccgcattaccgcgacaaccccgttcgccaatcaattactgttctggtcgctttcaggacgtgaggcactatctgaaccttttgtgtttgatgtcgaattgttaagttcccaaaccaggctggataagactctgctgctgggtaaaccgatgaccgtgtctgttcccttgccccgcacattggatcaccgccacctcaacgggaagatcacctctgtcgatattcataaccagacattaggtggaacacgctataccgtttatcgcctgcgtatggagtccaatctctggcccctgttgcatgaccgtaatcagcgcatctttcaaaaccagacggtgccggaaatcatcaaaaccctgctggacgagaatgatgttatttttgaagcacgcctgaacgccagttatcgcccatgggaatactgcgtgcaataccaggagagttcattcaactttatcagtcgactgatggagcttgagggcatttactactatttcgaacataccgcagatcggcacacattaatactgaccgacgatttagtcagtcattccgcatttcccggttatgaaaccattcgttatcactcgacgccttccggaggggtcaccaacgaagaagggatcggccaatggcgtgtacgtcatgatgccacaccggggctgtacagccttaacgactacgacttccgtaaaccttacgcgcacctgctgcaggcacgacaaaatccggcagccgcgcagcccggcagcgtagacgtctacgattggccgggacgctatgtggagcccacgcagggggagcactatgcgcgcatccgccagcaggtatggcaagccgcgcatcaaacgcagagcggcaccgctactgcgttgggcatcgcgcccggccggatcttcaatctttatcaggcatcttttgccggtgataacagcgaatacctcacgaccgccgccatgtatcaactgcgcgaaaaccgctatgccagcggcgaggatagcgacgttcaacacagtatcgactttaccgttatctccaaagacgtgcagttccgcgctccgccttcggcccgctggccccgcacctatggcccgcagacggccagagtggtatgtcccgaagggcagtccatctggacggatcaatatggccgcgtaaaagtgcagtttcactgggaccgagaggccaaaggcgatgacaccagttcttgctgggttcgcgtatccagcgcctgggccagccagggctttggcggagttcagatcccgcgcgtaaacgacgaagtcgtggtggactttatcaacggcgatccggaccggccgatcatcatcggcagagtgtataaccaggccaatatgccgccgtgggcattgccggcgaatgcaacccaaatgggttttttcagtcgctctaaagacggtacgccggagaacgccaatgcattgcgctttgaagataaattgggcaaggagcaggtgtggctgcacgccgaacggaatatggacaccgatgtggagcacaatgaaacgcgccggatcggtaataaccaaactgaaaccgttatcggtaaccaaagcatcaccgtccataaaaatgaaacggaaacggtaggcggcaaccaaagattgacggtaaaacgcaatcagcaagaaaccgtatttctcaacaaatcggaaagcatcggtattgcgaaggcgctcagcgttggcgcggcctaccagacaaccgtaggcatggcgatgaatacttccgtcggcctcagccaatcctcacagattggcatgatgaaatccttgctggttgggcaagattaccatgccgatatcggccagaaagtcacctatagcgtaggcaaatataaaacagaaacggtgggaaaagtatacatcctcaacgtcggcgatcattttgaactggtctgcggaaaatcacgcattgtattaaccaaaggcggtgaaatttatctccagggggaacgtattgaattactggcgcaaagcgccctcaatggcgatgcaggcgtggtgcaatggaactgcagcgccacatcagaaccgccctctccccctcctcaggacgataccctgacagcataa

SEQ ID NO: 455028 - DNA, 4056 bp, Serratia marcescens
atgagcggaaaaccagcggccagacaaggcgacatgacagcgcaaggcggcgcagttattcaagggtcgaccaacgtactgatcggcaccgcaggcggtgtcgcctgctcatcctgcccaggcggtattgctatcggcaatccgattaaccctttactcggcgccaagtttctggctgctgagatagacatcgccctaccgggctcattcccctacacgctgtcacgcagctatagcagctatcaaaccgatacgccggctcccatcgggctatttggtcccggttggcaatcccacgcagaaatgcggttgcaattgcacgataatgccctgattttaaatgacgacgtcggacgcagcattcattttgatccgctaattccaggtgaaatcagctttagccgcagcgaaggattatggttggcgcgcggtggcgcaacacaattaattaaaggccacccgttggaaaaactctggttggcactgccagcgaaattacgccagaaccggcacctttttttcgccacaaatcacgccctaggcccatggtgggtactgggatataccgaaccgtttatcgtatctgaagatttagcgctacctcagcccctgcccccttaccgtaacctacaagggcttattgatcgcttcggacgcgtgacacgttaccgccgcgctccagatgggagagaaaaagatcgggtggtcgccgttaccgacagtagcgggcgccattatcagtttgagctgacgaccattcccgaccccgtccctacgagtcacggatggggggaagatagcggcatccgtctgaaagccgtctatctgactcatgaccccgtgtacggtccgtatctggcaggaccgctggtcagttatgactatactcagcgcggcgaactcgcgacggtttacgatcgcaatggccagccgcaacgtcattttcgataccatactgatttgcttggccgcatggctgcccatcgttttgttggccgcccggaaagccgttatcgctatgatgcgaaaggccgggttatcagtcagcacaaccccgatggcctgtgttatcaattcacttatcatcgcgactataccgtcgttaccgataatctgtcgcgacaggatagttaccattttcacggcgaacgtggattacgccgcctgataaaacatcagcgggcggacggcacaacaacacgctatgagtatgataatagcggccgcaggatcgccgacattgatgccgcagaccgcaaaacagaatatcattttaacgtgggcaacgggcgtctcctccacattaccacgcatgataagcggcagacacgctttgactataacccgcaggggcaaccaacgcagatcattgcgcctgacaacgccagaatcacctacggttatgatgcgatgggccgccccgtcatccaacgcgatccgctggggcgcaccatgcgctatcactatcccgacaataacggcgaccagccgaatatcactaccgacccggccggcggtgagcaacgactctcttggacatgttttggtcagttggcatctcatactgattgttcgggtaaaacgacccgctaccactatgaccgctgggggagcattattctgaaagagctacccgccggactgcagatcgcgtaccgttatgatgaacaaggccgcctctgtgcccaggaagatgctgagggtgaggttatccgttatcaatacagtgatgcgggagacctgcttgcgatcgtttatcccgatgatcacaccgagcatcgcagctataccactcaggggcagctcgccacagttcgcactaacgggttcttgcaacgctttgaatacgacatcgcagggaggctcagccgtattgttaatgagaacaacgctgaaacctggtttagctatgatgcgatggatcgcctgacacaagaggtcagttttgatggccgtaatcaaaactatacctatgctccaacagggctattgatccgcagcgaaagcgccggatacgtcacacaatggcattacgatgcggcagacagactgagtcagcgcatctggcaggctcccgatggcgacaacataggcgaagaattttggcgctatgacattatgggccggctggttgaaacctctcatctcaaccaagcacatcaggtcagcgtccattatcaatacaacgctggcgggcaactactcctagagcagcaacgcgttgtcaagcccgaagacaaactggtctggtcgcatacggtcaggcatgaatatgacgtccagggtgtacggggggcaagttacccgaacggtttgccgccgctgtgctggcaaacctacggtagcggtcatttactggcgctggcactagggaagcagacgctgctggaattcgaacgcgatgaactgcaccgtgaacagatgcgcagcttcgggcagcatgtactgcgtcgtcaatataccccagcgggacgtctgcaggcgcagatgtataatgacctccctcaccacccgctcagccaacattattcatacaaccaacggggtttgctcactgcgctgaggctcggcaacagcgaagaacagcgctaccagtatgatgcaataggacgtctaacgcaggcagagacagcccatggaaacctgcagcagtaccgttttgatccggcaggcaaccgcctatcggctccggattatcatcatttcgccactaaccgcctgactgaaagcgaacgctaccgctatcagtatgatattttcggtaatctggtagagaaaacttcaaaagatgacgacagtgaaagtcattcctatcggtatgattatcagcaacgactgtgccattaccaacgcacatcccgtcatggccgatgtcttagcgccgtgtacctgtacgaccctttgggtcgccgggtaggtaaacaaataaccttgagtgagccgggcgatcggccgccgccaacagagactttctggtatggctgggaaggcgacacgctaaccgttaccgaacataacggtaaacagatacatacggtctactatccgggcagttttgtgccgttggtacggatagaaggagatacgccgctagtcacaccatcgctggcggaaaggctggcacaagaagcggaagtgaccttcccagcatccgtcatccagtcgctggacgacattgaacaagcactgcgtgcggatcccctggagctgtcggcagagcatcagcaatggctggcaatgaccggttttacccgagaaggactcagcgactttttgacgcctcagccttctacaaaacagcgtatccacttatatcactgtgaccatcggggaatgccgttggcgcttattgaccagaatggcttgcccgagtggcaagccgaatgggatccatggggaaatacggtacaggaaaataatcagcaggaaatataccaaccgctcagaatgcaggggcagcaccatgacgaggagtctggattattctataatcgccatcgctattacgatccagaaattgggcgctatgtgacacaggatcctattggcatagccggagggttcaatcattatatttatccgttaaatcctcaacaaagtagggatcctttagggctggaaggatggccagtattggagtcctgggttagccaaacaggtataacacaggctgtgcaccagacaataggcaacaatccccctcaaccatctatacggtctgactctgtctgggaatttgcgggatggaatgtggaagaaggaccagcatggcaattttgggcgagatggaagcgagtcagtgcaatatgtaagaatcaacacggtggtcaaaaacttgcttatgcaaaaatatttcaaataggacttatttgcataaatgaaaactgtcctggtgaacatagagatatcgacatgatcgatatgaatccagcagacgtaatagccgatatatatgaagcccatagtgctgctaaacagtgcggaggaaaaagtggctttcagtgctttatggatactgaagcaacaccggctctgggcgagcggctctgtaaataa

SEQ ID NO: 455029 - DNA, 336 bp, Serratia marcescens
atggtcggcacgctggaagaatgggaagacatcaacccgtacgccgtgcggtcgtttagctatcgccttgtgtggattggttacgatccatcagaagccaacggcggcgatagcgccaggtgtgcagttatcgccccacctatggtggccggtggtaaattccgcgtactggagcaccaccaattgcaaggcatgaactttgccgatcaggcccagaaaatcaaagacctcaccgaaaaatattgcgtggaatacatcgcattaatgcaaccaccgtcgggcaaggggttttccagttggtgcgcgaattcttcccggccgcgagagaaattgtaa

SEQ ID NO: 455030 - DNA, 267 bp, Serratia marcescens
atgcgtaaagcccgatttaccgagcaccagatcatcactgttctgaagtctgttgaagccggacgtaccgtcaaagatgtctgccgcgaagcgggaatatctgaggcttcgtactataactggaaagcgaagtatggcggcatggaagcctctgatatcaaaaagatgaaggatcttgaggacgaaaaccgccgtctcaaacagatgtttgccgacctgagtctggcaaatcgcgcgttaaaagacgtcatcgaaaaaaagctttaa

SEQ ID NO: 455031 - DNA, 1251 bp, Serratia marcescens
atggatatttcaatcacacagccaggtcataaacagtggttcagaaagcacgggattaaatggatctccggagggctggttttcgccacgttaattgtgatttataacgtaaaattttctccttataaggtcccgctcagtagcctctccgtagcagaggtgaaatttggcaatttttcggtggatgtcagagggaatggtgtattgcttccacaggacattaactgggtttcagccagcgttgatgcccgggtcgaggcggtcatttacaaagcaggcacgcgggttaaaaaaggccagttgctggttaagatgagtaatcctacggttgaacaacagtaccaggaaaacaaactggaatatgatgcgctgcaggcagagactgacgccagaaatgcggagctaaaaaataaaattcttaatcaggaagctgtcctactggatgcaaagtctcgtttatcgggttctgaaatgaagcttaaagcgcagaaaaagtacatcgctgccgtacccgtgctggattatgagacgacccgtattgcgactgagctcaatcgtcatcaggttgaatttgaagaaaaacgtttagctaccctgaagcagagtgttgacgctgacaccaaagccaatctgatgcgcctgagaaaatctgcctccctggtcgtcctgagcgaagagcaaatgcagtccctgaatgtgacctccccgattgatggagtattgcaggatgtcgccgtgcaggccgggcagcgcattataacgggaagtaacattgcccggctggccaaagaaaaagacctttacgctgaactgaaagtccctgagttgcagtcgcgggatttagcggtggggcagccagtgatgatcaacacaggaagaagcacgtttcaggggcgggtatcgagggttgatccggcggtggttaatggtacggtcaaagttgatgtgacgtttgaggggcctctgccgcaggaagcccgacccgatttaagtgttgatggcttgattgccgtggcaaagatttcgcaaacgctgtttatggaaagacccccttatgcgcaaaacaatctgccttccacactctacaggcttgatgaaaaagagcagtcagccaccaaaatgaaggtggattttggtcagggttcagttgatttcatccagatcaccagtggcttgcgcgctggcgacaaaattattctgagcgacagttctgcttggcaggatgctgatcagatcgcaatcacgccctga

SEQ ID NO: 455032 - DNA, 732 bp, Serratia marcescens
atggacaccgaaacaatggaaaatttggtagaactcaacaatatcaacaagatttttctgacggatgaaattgaaacgcatgcgttaagcaaaatcagctttaccctgtctaaaggtgaatatgtggccatttccggtccttcaggatgcggaaaatcaacgcttctttccattcttggtttactggacgtcgcatcttccggcacctataccctggccggacataatgtcgaaaatatgactaagcagcagcgtgcctctttgcgtaatcgcgacattggctttattttccagtcatttaatctgattagcgatctgaccattgaagaaaatgtggcgctgccgctgacctaccgtaaagagatgagtaaagcagaaagacaaagccgggtaagtgatgcgctggcgaaggttcatatgtcgcaccgggcgcgccattatccttcgcagctgtcaggcggtcagcagcagcgcgttgcagtcgcgcgggcaattgtcggctctccctccgtcctgctggcggacgaaccgacaggtaacctggattcaaaaaatgccgaagcggtaatggatattctggacaatctgcacagagagggcgcaaccatctgtatagtgacgcatgacccgcgctctgctgaacgcgctcagcgcagtatcattctttctgatggtcaggttgtcgccgatggtttacataaccatgaactcacgctgatcagggaagcataa

SEQ ID NO: 455033 - DNA, 2430 bp, Serratia marcescens
atgctatttgatatccgatatgctttgcgactattactgaaaagccccgctttttctgccatgaccgtgttaattatgtcgtgcggtcttgcgctgacgctgtatatggtgtcggtaatcaatacgtttatgttttcacctctgccgtatacgcacggcgagaatatggtgttactcaaccccgtcgtaaatggcgcaagcctgagcgactccgggcttaattatcttgattacgccgaaatcaaagcgcacagcaccgcgctggagaatgtgggctacttttacggtgagcgtgcagatatcagcgatggcaataaagccgtttcatatatggcgacgcgcagtactgacgatatgttctcctatacgggcgtgcagcctcttcagggcagggcgttcagccagggcgataccgagcccggtgctgaaccggtcgctgtgatcagttacgcactgtggcaaaattattttgccggaagcccgtcagtgattaaccgcagcatactgattaacagtgtcaggacacgcatcgtcggtatcatgccgaaagaatttgcctttccattttttcaggatctctggcttccctcgcagctgaatccgtcacagtttttgacccgtaaggatgccccggagatttccgtctatgcccgtctgaaacctggcgtttcggccagtgccgcaaatgcggatctgaatgcagtgatgcaaagtctggcgagccgctatcctgaaaccaataaggggctgtcagcacaggtactgactttccaggaaaacttcatgggcgaagagacggtgacaattttcgtcgtcatgctgatcgctgtgggattcgtgctggttctagcctgttgtaacgtcggcaatctcctgcttgcccgtaccacggagcgcgccaaagaaattgccattcgggtggctctgggttcgccggcagccagattggtgatgcagatgatgtgggaaagtctgttcatctgtcttctttccggggttattgctgttctgctggccgcctggggactggaaatgactaatcgcctcctgccaggcttcgtccctaacaagatccctttctggtggcatctgagtctggacagcggaatgatccttcaggcgctggttctggtcatcctgacagtggtgacgacaagtgcactgccagcctggaaaattactcacggcaacttcaacgatgtgctgcgtgacggaacccgtggtgcgcaaagccgcagtgcgggtcgcatttcccgcatcctggtgacattcgaagtgggcttatcctgttcgatactttgtattagtgccctgttaggtgtgctggtttatcaggctacgcgtgcggattacggtgtaaatacgcaggattacctgacggggcagattcaccttaacgccacccagtatcctgatgaaaaaagccaggtcctgttttaccagaaactgcagaatgtcctgaatacgattccgggaagcgatcgctcggcaatcacaaccagtaccgtcgggcagtttactgttccacagcaggtggatgtggatagttcaaccgttaacagccgcgataagtgggcctatccgctggttaatgatgttcaggtgatgccgggcagtctttctggtatggggatcaaagcggtgacaggacgcgagtttgcgttcagtgatgacagcgattcacagccggtcgtggttgtcagtcagtcttttgtaagtcagtactggccgggtgaaaaagatgtgattggcaagcgactgcgtcttcgcaatgcggaggatccgcgttggtacagtgtgataggggtcgttcctgacgttatccacggtcgtcctttcagcaccttccggcatcgcgctaccgtttatcgctccctgcaacagcagacagcaccatcagtgaatgtcctgctgcacgccagaaatccggcgttgtcggggcctgcgctgatcaacgccgtcagacagattgacagtaacctttccgtcagccagattcagaccttggaccagcgtctggcgcgcaacacggccggactgcatttcattgccagcctgttcatgctgtttggcctgatcgcaacgatactggccgcaacgggcatttacgcggtgatgcgtaatgttatcaaccagcgcgtgcaggaaattggtgtccgcatggcgatgggagcgacagagagtatgctcatgaaaatgctgatacttcagggcggaaaacagctactggccggactgatcattggtctgccactggcactgtttaccgcaccgaaactgatccgtattctgggtgatggcagcacaggttttatgttgctgtttgcaggtgtagcattaaccatctcgctggtggttgcggtcgcggtctggtttccctctcgtcgggcgacacgtttgtcaccgtcagaagcgatcagacatgaataa

SEQ ID NO: 455034 - DNA, 1410 bp, Serratia marcescens
atggatgaaaaaaaacggattctcatcattgatgacgataccggaattttaagcagccttgaattattgctgcgtatggaaggctatgatgtgacccttgaaacgcaggccagccagctgatgcggcatctcaccagcaagccgtttgacctggtgctgatggatatgaacttccagaaggatacgacttcaggcaaagaggggctgcagctcctcgatgagctgaaaaagtttgacgactgtctgcctgctgtggccatgaccgggtggggcagcgtggatattatcgtcaacgcgatgcgtgccggcgcagcagacttcattcaaaaaccctgggataatgaacgtttgctgagcatttttcagcagcaaatcgaactcagtcgtgcaagacgttcaggaaactgtttacgggaagagaataaactcctgaaacgtgctcgcgatgatgacatggacagtgagtgggtggttcagtcccgttccatgcaacagctgctgaacatggttcaggctgtctcgggaacggataccagcattcttattctgggcgaaaatggcacgggcaaaagtttgctggcgcgccatattcaccatctctcgtcccgcaaagacaatagcctggttgaggtcaataccggctgcattaacgaacatctgtttgagagtgaaatgtttggccacgtgaaaggcgcgttcaccgatgcgcgcgaaaaccgcatcggacgttttgagctggcagacaaaggcaccctgtttctcgatgagattggcaacctgccgttgtcacagcaggtgaaattgctgcgtgttctcgaagagcggcagtttgagcgtgtcggctcctcccgtacgcaaaaaacgaattgcaggatcattgcagcaaccaatgccgatctggaaaaagctgtggctaacggcgctttccgccaggatttactgtaccgacttaatgttattcagttacatctgccggcgctgcgtgacaggcaggaggacattgagattctggcagagcgctttctgatgcgctttgcacgaaagtacaataaacccgtgccgcagttatcccgcccggccattcagggactgcatgactacacctggccggggaatattcgtgaactaagccacctcattgagcgggccgtccttctctgcaggaataaccggatcgacattgaggatctctgtctgccgggaaatgtgccgatggagccgcagcgcgttgaacccgtgactgaaggcgagtccgctgactcactgaccctggcggaagtagaaaaatcactgttgctgaaacgcctgcatcaatatgagggaaatgcgattaaagccgcagactcgcttggcctgagccgcagtgctttttatcgcagactggacaagctaaaaataagtcatgagtaa

SEQ ID NO: 455035 - DNA, 1314 bp, Serratia marcescens
atgagtaaacttttcgacaccttcaggttacggtatttcattctgtgcagcctctctccgctggggggaatactggcctatctgcttctctggggatttccgtcgcagtctccttacctcaaaatattaactgttctgattttagcggtaacgtcactctattttggctaccacttttttctgcaactgaataataaagtcaatgtgatctcaaatctgctcgaggcggtggaacaggaagatttcagcctgcggggaagcacccagggacgggacatctttgacggcgtaatcagtcagatcaacgctattgccatgcagctatcacgtcatcgtcagcagcagcgtgaaatggatttcctgttacagaaagtgctctctaatatcagcatttccattttcgctctcgacagtcagcatcgggtcatctggtgtaatgatgccgccgcacggatgctggagcgtcccatcgaatcgctgatcggtgaggacggcgagcagtggcagtcaggctggctgttgaaaaatgccaataccggccatcctgttgagttcagtcgtaatggccggcccggtcgttataaggtgaacagcgatacctatatcgtggatggcaaaaaaaacgtgctgttattcatcaatgacgtggatgagttactgcgacatgaggaaaaaaaggcctggcagaatctgctgcgcgtaatcagtcatgaaatcaataactcgctgagtcccatcgcctccataagccagatgctgcaacagcattaccgcacccatgccgcgcaggcacccgagggctttgtggagggcgtcgatttgattaaccgcagagcaaaagagctgattaccttcatcagcagttatcagcagctgaacaaactggccccgtctaaccgggtggaagaggatctggccgggctgattaaagaactgcctttactctttatgcaccgtaagttcgagctcgatgggccagaacccctgatggccagaatcgatcgggggcaaatttatcaactgctgattaatctggtcaaaaatgccgatgaggcgatgggggagaatccgggcgcgattaccctgacctggcaggcgcaaaatgaccgggttctgatctctctcctggacagcggggtcgggttgagcaatccggacaatctctttgttcctttctatacaaccaagtcagcaggcagtggaataggattgatattgtgccgccagattgctgaacagcacgatggctacttaacgttaaaaaatcgcgacgggatgccgggatgccatgccaccattagcctgcaacgataa

SEQ ID NO: 455036 - DNA, 663 bp, Serratia marcescens
atgccaccattagcctgcaacgataaagtattgcccggacccgaatccgggcaggcgtattgtctggttcgttcgtttgaacacacgccggacggcccgttaaggcgtgatgcgatacagggctggctacgcgctacgcttgctgacacgctgaagatcccgcatgaagagttacagcttgccagaaccccgaccggtaagccctggctgcctgctcatgcatggctgcattttaatttatctcacagtggcacgctggctgcggtagcgatgagcagccagtatccggtcggcgtggatattgagcatgtcacggggaacgctgagattaaacgaagagtagcagaccgtttttttcatcctgttgaacgcgcatggctggaggcgcagacggatgatcatctgctgcacttcactacgctctggagccttaaagaggcctggatcaaaatgtccggagcgggtctggctcaacccctctcatcgttttacgtgttacccggggaggaagggagggcaagaatctgtgggcgtgaaggcgcggcgattggagtggcacattatcagactctgcaggacgatcgttgttactctctggcctgcgttgcaggcagcgcgctgaaaaacccgccgttacgctggcgggttatttttcagcggtga

SEQ ID NO: 455037 - DNA, 657 bp, Serratia marcescens
atgaaaaacacgactgccggaatgacgttcctggccctgctcttctgcggaaccgcccaggccgcagaaaaaaatatccccgttgaagcgttcactgcggtaagcgcgcagcaggggataaacctgacgataaaatgtgcctctgctcccgcgctggttgtttcgggttcccaggatacgctgaataaattccaggtcactaaccagagcggtaacctgttgttaaataacagagcggccgaggacgatcgttttgtgtcgaatacgctgaatattaccctttataccagccagccgctgacggccttgtccggaaaagctggcgtgaaaatcgatgcagaggcatgctcagtcagccctgcacagctcagtgtcaaaggaagtatgggcacagacattcgcgctgcaggcaaaacagatgaattgcaactggagctggcgatgggcggcagttttaaccgcaagcccgcagacttttccgcaaaatcggctacggtgcggatgagtatgggtgccgaaacagcactgtgtcatatcccacgcattaccggcacgcttgcagccggagcgcggatgtcggtcagtccctctgcgaatgtagataccggttcagctggcacgtttgccagtgaggtctccacctctgattgtgcttaa

SEQ ID NO: 455038 - DNA, 1086 bp, Serratia marcescens
atgtgtgctgacatgaccccgataacgtccgctatacctgatttgagtctgtttttcttttctaacgtgacgaagggaacatcagcatcgcagtatcagcagcttatcagtatggcgcagcaggctgacgaactgaattttcatgccatctggacgcctgagcgacacttcaacgccttcggtggcatgtttcccagcccatcagtactgagttcggcgctggctgttttaacccgccgcattgcaatacgtgcaggtagcgtcgtcctgccccttcacgacccactgcgtgtggctgaagagtgggcgctggtggacaacctttctgaaggcagagtcggtgttgcctttgccgctggctggcagaggaatgattttgtactgaatgcagcgaattataaaaaccgctatcagagtttgttccgttcgctggagcaggtggagtcactctggcgcggtgatcacctcctgcggcatgaattatctcttccgggcagcccggagccggttgaagttcactcatggccagcaccgcttcaggctaacatccccgtatggattaccgccggcagcaaccctgatatgttcgaggaagcaggaaaacgggactgccatgtgctgacacacctgatcaatcagacatgggagcagctggatatcaactgcgcccgttatcgccaggcacgtatcgatgcgggcttcgcgcacaaaacgggaaaagttacgctgatgatgcatacccaggcgggtcctgagaaagctgcgatgctggatgaactgcgaccggctctgcatcagtatttatctgcatttatgcagctttccaacaatctcagtcaaccttcctccccgcagacaggcgaaactcataaacggcaggcgtactcgctgaaatggggtgttgaaaaataccttactcagtatggcctgtttggttcggcagccgagtgccgacagcaacttatcgcgctgaagcaaagaggcattgatgagatcgcctgcctggttgatttcggcatgactgaagagagtgtcagaacaacgattgccaccctggcctcactgataaataaggaaatatcatga

SEQ ID NO: 455039 - DNA, 1314 bp, Serratia marcescens
atgtcagggtctgacactattccgcactatattcccccctcagaccgtgcccgccagaatgggtttcttcaccaggccgaaacggcccaccgtttgcacggcgatctggtgtggatcggtgaggcgtcgggtcctttgctactgctcgcaggcggtcgacatgtccgcctgatgattgagcaggagtcgctgtttctgaaagattttgaatcggtaacctccgcctctgccgtgggacgaatcatcatggggccggcgttgaccacctctctggatggcgaggaatggcgaatagccagaaagctgactacgccagccgttaaccccagatcgccacgcctgaaagaggggaccgaacggtcggcacactggcttgcagccacgctgtcagagggagaacctccatcactgcgctcactctgcctcaactgggcgctgatgtgtgttgcagacggcttttttggctcagcaatcagtatggtgcagctggaccgtatgattgaccacttcagacgcatctatctccagctcatcatcggcgcgccagcgatgagctatgagcagatgtgtcaccattcagccctggcattgttccgcgaagaggtgagatcactgatctccccacacattggctgcagcgctgctggtcaacaccagaccaccatgcttcagcgtctttgccaggcactggatgttaaggccagccacgatgaacgggagcgcgttatcagccttttactggggaatctggcagccagcgtcgataacaccggcattgcgctgctgtggaccctgacccacctttcgcagcatcaggccttccagcaccgcattcgcgaagagcatgcccagggaaaacagaccacggcgcttgccgtggtaaaggagtcgctgaggctgactcccgtaacagcatttttcgagcgcaggacagcgggcgaactggtgatcgatggcgtaacccttgctcagggaacgcgcgtcgtgttctccccgtggctcgtccagcgtaacaggcaatactgggccgacccgttaatctttcagcccgaacggtttctgaccgggacgaaaatacccaacgaacactattttccttttggtgtgggaaaacgccactgcgtgggaatgacactcgcactcgatcagctgacaaccgcgattgtggctttctgcgaacatttcgccttttccctggcaccggacatcctgccggctgcgcttaagcctctgtttgaacttaatgttatgccaagaggcgatatccgctttaacctgcaccctcacagcaaggtttttcccaatgtgtgctga

SEQ ID NO: 455040 - DNA, 951 bp, Serratia marcescens
atgaatgttgtcagccttaagacttttgtgccggaaacgcacatttcactggagtcagtggttgaagcgcggggaggcaccccctctgaagcaaaaacatttcgtcagttgtttggcctgacgggcgtattttcactggctggcgaagagtctgctcagacctgctttcaggatttgatccggcaggcctgcctgtcacttaacgacgatattcacatcgacgccatcattctggttcaggggcttcccgcgcgctctccgcgtcaggatgtgaatcttgacgctatccgggcatcctccaggttcatctctgaccaggccggactgtttacgattaatcagcacaactgtgccaccctgttctggggtctgaaactcgcagacagactgctgcacagtggtgatgtaaaaagggttgccttactggccggggataccctggccgatttcgccttagcagaacggtacgtgcctggctgcacactgatcggtgatgcttttgcctgtctcattcttgaggcgggtcccggggcgtgccagatatctgacatccattgctatcatcggcctgaattctggcccgggctggatgggagccaggaggacaccaaacggttttaccgcgctcatggcgaactgataagcctggtcctcgatcactacccgaccgggttgcgcgatcaggcctggttgcttcctcacaatatcaacaaactggcctggcagacgtggcgacgctatcccatgaatgcccggcagcgtgtcgctaccgatctgactggcctgacaggtcactgttacaccacagatcccctgctcctgcttgaaacttatgcccctgccattacaggccgtccggccattatgctctccgttggattgggaggatgggtaggatccgccagaatcacttgtcatcgtcgtgaggagaacagccatgtcagggtctga

SEQ ID NO: 455041 - DNA, 867 bp, Serratia marcescens
atgaaaagtgccgccatgatatacctcgacccgcgtgatatcttttgccgctcatttttttgtaccgaaacaagccagcctgaatgggaagaggaaattcctcactggcaatcctatgtagaatgcttttttgctgcaaatgggcttacgctaacggataagcagaagcgggtaagcgaatggattaacagcccggaacgggccgctttcagtgacatggtgctggcaattctgccagaggcgcgagccgccatctcccctgcccgtatcagcacggtactaatggcacactggacgcccgatctgcatatgggcacctctgtggtcaatgctgcgatacacgcgttaggccttgccgattgtctggcgctggcgatcagcgacagaggccccgatgccggtctgtttgcgctggacggtttgcaggactgcctggccggcaaaaatgaagacggccttctgcttatcgctgaacaaaaaaatctgatgtatcactccccgctcatggcacagcttcagcctgaaaacaccgcctgcgtctgtgttgtgaacacgcaacagcggggtttgcgctacagggggtataaaaaggtcccgcattccactctctcacctgcatggcttgaagatcatctcatcggcgctggattagaaaggaaatacactacgatcatcggtccggcacacgtgcttgaggcgataaaaacagatttccacacgcaggcccacaaggaaacgttgctttgcgctgccccttttgcggcgctcaaacaacactggcaacctgcacgtcactatgtgctgatcagtgaatatcagggcgaatgcagcctcagtacctttgcagccgcagagtcatgcttatga

SEQ ID NO: 455042 - DNA, 1110 bp, Serratia marcescens
atggcaactgatatcacgcgagtctatccccggcttaaaacactcggcaaatatctgctggaggcgggttccctggctgaacatcaccggccgggcgcgttagcattgctgacgcatccggagctgatgagtattgcctgcattgggattcctcagcaattcaacccctgcccggcagcgtcctgttctgatatcagctatgtgcaccatttgcagatcattgaatatctgtgtcgttctgatgccagcgccatgatgatgttaccgggtgcctctctcagcacccgtgccattctcaccctgggaacaccgtcacagcaggcacgattcttctcctgtttcgctcagcgtcccgcctggactttttttgccgttactgaacctgaaaaaggttcagatgccaccgccatccagtgtgaacttaccctgcagcaggaaaatggatggattaacggcacaaaaatgtttatcggtggtgcctccgacgccagtgctggcattgtgtttacccgttacgcacaaagtcagcgtctggttatggtgtttccggaacaggcaggggagaaaatgttgcgtgaacggctgacaacctttggtctcaacggtgccggactgacgcgaatcaccttcaaccactgtccggtgcagaaagacgatattctgggacacgatcaccgggggttacaacagggactgaatgcattaagtctggtttttgaacgtcaccgcccgatggtagcagcgatggcgctgggcacgacttatgggttgctgacaagcctggagaattacacgctttctgcatcggctacgcagtggaaaactcgacaatggcgtaagtaccattcggtataccagcgtatgctctgcgtcgccagtgggtttgcatccggcaggcaccagtatactcagaccagtcagcttaaattgattgccacgcagctggtggaagaaaccgcacgtcatcttccgcactggcttcacagtaaagcgtggtcagcagaccacgctttacgcagaaaatatcgtgacagcttcgcatttgaatacatggaaggaacatccaatattcatctgcttaccagcctccgtcctccccagacagtatga

SEQ ID NO: 455043 - DNA, 957 bp, Serratia marcescens
atgcctggtcacattgagtctattacgctctacatacctgatgagtatcagtctctgaatgagctggtaccttcgcttgaacttacgccgctggatgtccggatgttttcccgcttttatggcctggcgcgtttcccccgcgcgccaggctcactcgatgatctgtttcgtccactaatgagccagtttaccgcccgtcacgagcccctgctcccggacatcagatatgttgtgcatactcacacactgcccgccgttaagccctttcctgacagtatcagtgcacagctcccggagtatggctttcgccatgacatcgagttttgctcactcactatggggcactgttcttcctctctgacagcagtggattggctgtcccggaaattaaaagcgggtgaatatgctttgttgctcattggcgaaaaagcgtttcatcccagggtagagctgatcgctgatacgaccattatgggtgaatgtgcctgtgccgtactgatttcaaacccggagggcagaggcaatgttcttggccgatttactactcaggcaggtgaatttaaccgtcagtctggtcacgcatctgattgttctccccgcttcagcgaccattatttcccttttatattacgcgcgcttcatgctgcgctgaatcattttgacgtgacgccagaaacgctctcctggctggcgccgcataatgtcaatatttcttcctggaataaaatcctgggagaaatcgacctccccaaaaataaagtattactggagaatatcagcaaatatggacactgctttggtgccgacccttttattaatcttttaaccttgctgcaacaggaacgcgtccagtccggcgataaaatattgctggccagtgtgggaatgggggcaacattctcttcccttttaattcaggcagattccagccatcctatagccgttattgcaatctga

SEQ ID NO: 455044 - DNA, 822 bp, Serratia marcescens
atggatgagcagctaagcgcgattattcgttcactgagacagcctaatcttttccctttgcgcaaaagtgaacacaatgaaatgagtcagatggggagctatgtcattgaggcgggcggatgtctcagccgggtttttgtctcgctgagtaaaaggaaagctgcgcctaaagcactgcttattcacggctggggcggaaacccttttatgctgacaccgcagaaggctatccttcagcagcttggatttgatatttatctgccctttttatcaggacacgatctggactaccccacgccctgttctgttcctgatcagatccagctgttgctgaaacttcaagagcagatgggtgaatttgatgtggtcattgcacactctgcgggtggcgtcatcgctgctctggccgcgactcagggattcaggcttcatcagcttattttactggcctcgccccgctcatttcctgcacttctggattataaacttaacgaaaaaatgccattgccaggcctgcgagccgcactgcatgacacttttttccgccactacgaggcgattccggcgctgatgtctgaaaccctgttttcagcactggatgcacatgtgctcgttcttcatggaaccgccgactgcaaaatcccctgccaggatgccgaatccatacacctgcagctggcccgcagcagcatgttactggtagacgatacgggtcatcttggcctgctccagcaccaggctacccggcaggctgtctctgactatttatgcccctgggccttgccaatacaggaagcaacagacgatgcctggtcacattga

SEQ ID NO: 455045 - DNA, 495 bp, Serratia marcescens
atggcctcggtaatcgaactgattgaccatcagaccttaactgttcgcagcctgtgccagccggtggtaccagatcgtcgccattttatttcctctcaggccgctgaacaggcttcatcctggtttcatcactggccggaaaatccttgctcgcatcgtttgcatgaagctgaaacgctctcaatttgtcagactcacctgataacagcgcatcctgccatgctgatctatgacgccctgtttccagcagccagaggggccacgccgcttttgcaaagcctgctgaatcattgtcctggctatcgtgaggcctggggagtacacagtgggccattttcacttcaggccattacccaactaagttcacattatattctgcctggctttcgcctggtgtatgttcatgacccattgcgcagattgtcaccttcatcgattcagcaggacgttacgctgaatattcttatttaccatcttcgggataacgccagataa

SEQ ID NO: 455046 - DNA, 1140 bp, Serratia marcescens
atgaaaaaaacatatcaacaaattcaactgcgcaatctgctgcaaataggtgacgatgccggattgatagcagagagaatcaggaaggcgaatgatcctgattgctcacgttcaatcattgcagagtggtcatttgcggcggcgcttaatcaactgggcctgcccgccgatcccagcgaaaatagccagagtcagcaaccggcagatatttcattaacgcaacgcctgaagttatatgaaaatattggctatgtctctcctgcgttgatctttctggcccccgggcctggcatggcggctttcgttgttgccgggctgggtacggcagagcagcaacgtcaatttttcgcaccgttccggcagggtcttcactggtcctgctttgctatgacagaacccggtacaggcagtgatgcccgtgctatgcgctgtcaggctaaacgcgtaaaggggggatttcgtctgtcaggcgaaaaaatgttgatcggtaatggcacacttgctgatatcggtgtggttttcgcccgcaccaccgaagggcccctgggtgtagatgcctttatctttcatccccagtccgagggtgtcagacgccgccggttacatcttaacggactcgacggtatcagcctggcccagctgaccttcgacaatctgtttattccggatgagcaagcgctgggacaacacctgaaaccaacggagcgatttgcccgttcagcaatggccacctttgatgcacttcgtccttgtgtcggtgcgattgctctgggcgtagccagacgggcgctggacgactggcaatgtcatgcactggcagcatgccctggtctgtctggcatgttctgtcacgccggccgtgaactcgatgccgcttatctgcgcgcaagccgtctttgccagcaactcgatgaacatctgactcccgactgcacgcccggtatgtctaaaacacacagtgtgacagtggcagaatctatcattacccggcttattcacgctctgcctgctgagataacgacactgcatcatcgaatctggcaggcttatcgcgacgtgaaagcgtttgaatatacggaaggtacaaggcagattcatctgctcagccacaccgtcatgccactcagcgaggcgtactga

SEQ ID NO: 455047 - DNA, 405 bp, Serratia marcescens
atgcatttcgatcattcaggctatgtggttgctgacagtgacgaaacaatcgctgccatgaaacctttttatcctgtcgtcgtgcgatataaagaagaaatcccctcacagaaagccctgattagtttgctttcaacacaggataatttatatcgcatcgaactggttgaacccctgaatgacaatatattactcaatcagatgttgaaaaagtctgaccggaaatgcataccttatcatatctgttttgtgacaaccgattttgacaaacaatatcagtcaatgaagcaggcgggctgggcgacgttaacccggcccttcaatggcatggtaactgaacagcgcgccagccatctatatcatcctgctgcggggattgttgaaataatgacgcatccattatga

SEQ ID NO: 455048 - DNA, 1506 bp, Serratia marcescens
atgtttttatctcaggtaagtcccctttttgaaaaaatgatccgtcaggacagagccactgcgattgttaaccagcagggtgagtacagctttgctgcgctgggacagcgtgttgccgacctcacggcgtaccttgccccctggtcgggaaagaatgttctgatttatggtcataaacagattgatgccgtggcggccattctggcctgcatacgcagtagctgttgctttacgtttgtggatgaagccaatccggtatcacgactgcaaaaaatcgccttaatgagtggcactcagctgatcatcaataccagccaacatgcgcttgagggagtcaatccctgtgcgcaggttatgacggcagcgctgtcagcaggagatatcactctgctggaactgccccggacgctaagtcagcagctgttttatatccttccgacctctggcagtaccggcgaaccgaaaggggttcgcatcacgtatgccaattttgctgcttttaacgcgtggtttgctgatgaggtgacgcagaatcctgagggctgtcatgttaaccatgcctgtctttcatttgatatgggtatcctggatttgatcccccctttgtgccggggaaaaaccgttcttatgctggatcataaaaataatatgttacccagacagaatatccggctcatgttacgcaatagccaactgcctgttacaagctggttctcaacgcctggctttgctgagctgatgctgaaagatccccggttctgcgcccgcaacttcccacatttcgcccggatatacctgggcggtgatcgggtatcgcttaaacttatccaggaatttcagcgtcgttttccggttgccacgattttgcacggatatgggccgacagaaacaacctgcctgacacatacccatgtccttacctctcctgtggagcatgactcaggccggcttccgctaggcgacgtacgcggtttaaatcagatagttattgttgatgagcagggttttccgctgccgtcgggtaccacaggcgaagtcaggctgtatggaccccaggtttcgcccggttatttaccggatgaacatccccgtaacgtggcatttggatgcgatgcaaagggtcactattactcaaccggtgataagggtttcatcaatgcggcgggatcgcttttcatttgtggccgggaagatggacagttcaaactgaatggtaatcgcattgaggttgcggaaatcgagagcgcagcctacgcgcatcaaaatgttatgcaatgctgtcttgccatgagtgaaaaacaacctgccggtaagacactgcatctttttgttcagctgcatgatgacggcccggcatatcacgatgatttccgtcatcatcttgctcagtgtttacccgcaaacatgatcccacgctcggtcatttttcgccctgattttcccatgacccttcataccaaaatcgataaaaaagcgctgataaaggcggttgaagaccagatgtag

SEQ ID NO: 455049 - DNA, 1554 bp, Serratia marcescens
atgaatgcttcctggtatgaacttatcaccctgtttctgcggttcaggcataattccgggctggcctggcaatctggcgacagccaatttaactaccatgcgctttataatcgtgcctgtgatattgctcacttagtcaaaacgcaacagcaggaatgtcagagtgagttcacgccggttataatttatggtcataaagcctttgattttgtggccgcctggtgggcctgcctgctctgcggcagtccggttatccccgttgaagcggataatacgcccgcgcggctgagccgcattgcgcaaacaacaggtgcgggattgttagtcaatacgcagcctgccatgttgccactggatcaggtgccggtcttgtccacggcgtgcctggcgatggacaggcatcaggataatcctgacaacatcattcaatccaccttacacgctcagaccctgccagactggcatgggctggcttacatcatgttttcatccgggaccacaggcgaacctaaaggtatcaaaattaccctcgacaatttggccgactttgtccggtggattcgcactgattttccgcttgatggaccgatcaccggaaacgttcgctactgttttgacgtttcactgtttgagctgtggggggcatggagcggcctgcagccggtatcggtactcgaccatgctgagttgatcaatacacgcaaattgattgcccagcatgcagcaattggcctgagtttttgggtgtccacgccttcgattatcaggctctacctgctggacaaaaccttcaatcatcagacccttcctcatctcaaacgctttctcttctgcggagaaacgctgaccaaagatattgtctcattgctctgggcgcgttttccgggggctgacatcattaatacctatggaccgacagagtgcaccgttgccgtcacctcagtacacattacatcggaaatgatgagtgccggggcaccgcttccgattggtgaagctcgcgcgggtactaccctgcatcttgagatgaaagatgcagcctgcgacagcggcgtattgttaatacgcggcgccagtgtgggtgccggatatatcaatgcgccggcagaccgtgaagccagcttcaccaatctggcagaaggccgctgctacaacaccggtgatacgggcacctttgatggccgttttttttatttccttggaagaattgaccgggaggtaaaaattcagggctatcgtattgatctccataccattgaacactacctgctgagctgccctggcatatctggcgttatcgttgaaccctttttccgtaaaggcagggctgaagcgcttcagatatttatcgtgacggcgagcgacacaaattttgcgctgctggcccaggagatgctggagtattttccagcctggtctgtcccccgttactggtatcggattgctgatattcacctaaaccacaacggaaaactcgatcaacagacggttaaacaaaccgcattaacggatgggtgccactatgtttttatctcaggtaagtcccctttttga

SEQ ID NO: 455050 - DNA, 255 bp, Serratia marcescens
atgtataccacccttattattgaagctatcggactggttcttgaaacaacaaatgtgagtgagcttaatccgtccacccatcttgagcgcgatttaggttttgaaagcggcctttatatcgaactaattatgtatctcgaagagaagattgattctctgattctggacccggcgacgttagagtttaaaaatttcgagacggtcggaacgttatccggctacatcgaacgccaactcgcaaatcaggcggcataa

SEQ ID NO: 455051 - DNA, 1581 bp, Serratia marcescens
atgagtgttgatcatctgacacgctggttatcagcgaccagcaccgcttatccagacaatattgccatcatcaccgccagcgacgaaatctcatggctggcgttaaaacagcgcgcgctcagtgcggctcactatctgaaaagttgtggcgtcagtcgtggcgaccggatcctcgtctggcttcctaatggcatcgattttgttgtcagcttttgggcaactcagtatcttcaggcggtttttgtacccgttaatcctgaaacgccaccagaacgggtgacctggttactgaatgatgcagaggcgcaggccattattgctgatgggtgccgcgccgggttgcttgatgcgctgcagactgatgatgcatcgtcgcataccgcctctctgattcgaatttatgaccgcctagacccacagcaacgttgcagcgcatcattgcttacgctggaacaattagcagcattgcctccttctgaaacatttccgtgtaccccgactttggacgtcgatctggcgtgtctgatctatacatcgggttcaaccggaaatcctaaaggcgtgatgctgacacagcgtaacatgctcagtgcagctacctctgtcagcacttacctcgaactggctcacagtgatcgaatctactgcaccatcccgatgagttttgattacggactctatcaggcgattatggcggccagggtgggcgcctcactggtgattgaacgcgattttacccggcccatttttgcgctctcacagattgcgaaatatcgggcaactgtgtttcccattgtgccgtcactgctggctctgattgcaccactggccagccgttatgatttctcatcaatccgtaaaatcactaacacggccgctgccctgcaccctgccgatattgacaaattaatgcacatttttcctcaggcagacatttattccatgtacggtctgactgaatgccatcgatgcacctggctcccgccggccatgctgaaagaaaataaggaaagcgtgggctatgccatcccgaatactgagctgtgggtagtggatgatcaggggcatgcccataccgccgatgccactggcgaactggttatcagaggagcaacggtcatgagcggctactggcggaatgaagcgcaaacgaagaagaaactccggcccggagcaattccgggtgagcaggttctctacaccggagatatctgtcatctggacaagaatggattgctctattttgtcgcccgactggacgatatgcttaaatcgtgtggcgaaaaagtcgcgcctaaagaagtcgaaggcgtaattaaacgttttcctggcgtatcacaggtggcagttatggggttgccccatgcaatttatggcgatgagattgtagcctgtgttgaagcagacaataatctggacctgacccagttaaaagcgttctgcaaattacatctggagggctataaatgtcctcatcgctattttatagacacgctgcttccccgtaatccaaatggaaaaatcgacaagaaccgactgatgacatcgttactcaggcagtctcagcaggaaacgctttaa

SEQ ID NO: 455052 - DNA, 966 bp, Serratia marcescens
atgtatataaatcatatcacccgtctgatctcgccggccctgacaccgctcagcgtaatgagtgagaaatatcgctggggaaaccgtaacgataagattttcagtcgctttcacaattttgtttcggcaagtttattccctgagacggctttgccggtattgatcgagaatcttttcagccagctcaggcaggagtgccatccagcgttacttgaaaacatagactttattgtctgggcgcattcgcttcacgctgttctgccttttgatattaaccgtgtggttcagaaccagttcagctgcatatttaataatccgaatatcgaatgcttctctgttactcagggatcctgcgccagtggcatgctgacgctgaaatatattcagcataaacttgccaatcagaaatggcgctctggattaatgattaccggagaaaaatgttttcatcagaccgtgcagtttgtcgatcagaacggatattttggtgagggattgagcgccacgcttataggcgtaacgccggcggcgtcagctttaaaaatcaaagccatccgccttacccaactgggcgcctttgggaaacgaatgcgggaaaccacgcgagaccatgagaatcattatgaccgtgaatttctgccggcgatgcaaaaaaccattgcgctcactctgtcggatgccgggtgccggggcagcgagctgagtgttttattaccttaccatatcagcccggtcacctttgatcgtctcgctgaccgcactggtttcagccgcgacatcatttatagaaagaatatgtatacgcttggacactgcttctgtagtgacgcttttatcaacctgcatgacctggtgttgcaaagcggcgcagaactaaagggtaaacctattctcagtctggcatcgggcgtagcgggaacattcgctgcgatgattattgaatcagaggcaggagttaaagaatga

SEQ ID NO: 455053 - DNA, 933 bp, Serratia marcescens
atgtcaataacgctggcctttacggcatcagagctgtgctggcaacagtatgattgcccggccactctacgggtctcagataacgatcagaatgagtgtgaagctctgacgtcattcgtaaatgccctgtatgagtctcatggcgtaaatgaacaggcttcaggtaacacaataagcagttggctcaccgcacgcaaaaacaccttctttatgatggtgaagccattactggcaaggttgaatgaccgccacggtttgtcatcagtggatttggtcgtgctggcgcactggacgcacgacacgataataggtcattcggtgacgaatgccgttatccatgagataaacgctcagcatgcctttggcattgcgctcagcgatcacggaataagcggctcgtggttcgcactctcattgatcaacgattatctggacgctgatgagggtaaagcgggtgaacgaacggctttactgctgattgccgatcaaagcaccgctctgcataacaatcagcatctgaaaaatatctctgcagtgccctgcgcaggtgcggtgctgctcaggagtcgcgtagcgggttcaggatctgcttcagacggcagttttaccttcaagggttatcaaaaagtccagaagtccgattctaggacgctttttgagatttgcgcgatgcccgaaagattttttaccgcggcggaaagccgttttcctttgacaatcctgacagagagcaaactggggaggcaaatgaaagcttcctcgctgtttaataacgtctgcgtacaaatctgggaccagacactgatgtcagtggcaccttgggcgcaactgaaacaatgtgccacaccgcaaaggcgttatctgtttattcaggaagagcctgacgcataccgggttgccgcatttttttcagggcaaagcgcatgtatataa

SEQ ID NO: 455054 - DNA, 1320 bp, Serratia marcescens
atgtcaacttttccgcctgacagtgagtttattaaccgttcccatattgaaaacctgacatatcaacaacttgctgagtcagtttccaccccgttttatgcttacagtgcctcacagatcaggaaagacttttgcgatcttaaaaccgcgcttccccaggggctcattttttattactcgctaaaggccaatcctaataaagcactggtcgcgttacttcatcaggcgggtactggctgcgaagtctgctcgctggctgaactgaaaaccgctctttctctgggtatcagtgcagaggagattatttttgtcggcccgggaaaacatatacctgagctgacagcctgttgtgaagcagggatcaaagccgtcgttgtggaatcgcttcaggagttaaatctgctgaatgatattgcggcaaccctgaacaaaacgcaaaacatcgcgctgcgtatcaacccggcattcagcggcgaaaaagcccgactggtcatgagtggtaaaccccgtcagtttggtattgatgaggagcaactgccctcgattattggggaacttcagaacctgaccagcttgcgactgaacggtattcatatctatcttggcacccgcattcttgaatggcaggcgatcgtccgtaatacgcagaatattctcaatcttgcagaaaaaattcagcaaacgtatggtctgacgttcgattttgttgatgtgggtggcggttttggtgtgcgctacttcgaccatgaaaagaagctggatctcgacgcactgggtcacgctttactccctgtgattcaggcctatcagcagacctttccacagtcccgcattgtgtttgagctgggaaggtatcttattgcgcgtgcgggtatttttgtcacccgggttaactgcctgaaacagtcgcgggaagaatggtttgccatctgtgacggtggcgcaaactgccacggcagcgcagcaggaattaacgcgatgatacggcgaaacttccctatggcgcgtctgggcaacgcagagccaggcgaacaatcacgttatcaggtcacagggccgttatgtacgccaacagatatgctgggggaaaatatcctgctggataccttacaggctggcgatcttattggtattggacactccggcgcttatggtgccagtgcatcgccggttaattttctgagttttggccatcctgcagagctgctgattgaacatgacaaagctgtgctgattcgaaaaccggatgatgtagacaccattcttgccccacaggtttatcaatccatagcgctgtccggtactcagaaatgtcaataa

SEQ ID NO: 455055 - DNA, 306 bp, Serratia marcescens
atgagcacgttacattcagtcattgaagtttttatattacgctccctgcagaatatgggcgtcgggcctcagacattaaatgatattgtcaggggagccgatatgtatggcccggctggcgttcttgattctgttcatctggtcgggttgatttctgatattggggatgctgtcgagcgcgcagatatgtgctcagacacactattcgacattctggatggcgatctctttctgcagtttaaaaacatagaaagcaccctattatttttgagtgagaggtttggcaatgtcaacttttccgcctga

SEQ ID NO: 455056 - DNA, 1056 bp, Serratia marcescens
atgttttatagttttttatatccttttcttttacttctttgcctttgccaccagaattatctccgcctgttggtgattatgcgactgcgcccgtcgctgctgttaaaggcaaagataagacccgccacacattattccagagcgtgtcatctcatcagtctcattgatatgtactcgctgcatgttatgtcatcctacttatctgcactctacgcgatgcatctgtttgagaaaacacgggcgcttccctataagcagggggagttaaaactgttaagcagttgcacacaggacacgttgcaatggcgtaaccgggcggtgaaaatttttatttaccctcagccatcgccgactgttgagaaagttcttttactgcatggctgggacggccgcagtattatgttccgacatatagctcagcatcttcagcaacagggctatgctgtcatcgcacctgatttgcctgcacacggtgtgcctaagggcagtaaagtctcattctatgatctggccagttttgtccttcatttagaggcttattatggcaaattttccattgtcatcggccattcaactggcggactgatcagctgtatggctgcgctacaggggttgtcatttaaaggtcttgtcctgatgagcagccctggcagctatggcgacatggttgacaaatatgtttcggccaaccgtctgcctgcacgcattgccagctcaatgaaaaggatctatcagctacgctatggtcttcatcccgaccagattggcccggcactctatcaggatatcgaaaaacccgttttaattctgcatgacatgcaggacctgagtatcagccttgacagtgctaaagcgttaaataaagccttcagccgcagtgaactcatcaccacgcagaataaaggtcacaatggtgcattaagggacgcggccacactggaaaatatatcaacttttatttcaggtgcgataagcgaagaattttatgcatttgaaaaacatgttttcagaaaaaatctttacagcgtaagattacgaaatagccgtacgcactga

SEQ ID NO: 455057 - DNA, 1353 bp, Serratia marcescens
atgaatatggcacctgacattgcgctaccccgtccggcatctgccggcagagatctcaacgacctgataagacttgcatggcctatggtagtggtggcctttgccgtctctcttgcgcagaatctgcagacagcaatactgggtcatgggaatgaatcagcctcactttatgttttgtccctcacccagccatttagttttctgtttttggcgatactggagtgtctcgccatcaccaatcaggtgttcagcgcacgttcggtgaaccagtggtccagacagaagctgttgccagctacatcgcttctggcgacagctggcatcgttatcacgggttgcgtcgggggcctgatctcattgagcgcgccgttgctgatgaagttcctgccagtggctgacactcaattctattcactcaagctgcccctgttcttcctttcaatgctgccctttgtgatgcttgaaatgtgtaacagtgctctaagaggacaaggcaaaagtgcggcgagcatggtgctggtgttagcgaacatctgccttaacgcgtctctctgctatttttgctaccacgtgaaaaatcttggcttctggtcagtgattatcgctaatgcgctttcatcgaccgtgctgattcctgtggctctggctatggtctggcaggcgggtaaaggtgagaccgaccagcaacctggcgcatttattcctcgcctgaccggattgatgctgaatgtgggtctgccagtattcgcgtcactggtgatactcttttttggttcggtcctgattatcccgttgctgggccagctgggcgagcagtatgtttctgcattcctcatcgttagccggatcaggatgctcattgtgatccctgcggttgcctgtggttcggcactggccatcatgctgaatcaaagaatgtcgacacattcagcagtggcgcttaaacgactgcttctccgtggcatgggctttatcggtgcgctctatttacttctcacggtcggggtttatctgctgcagtctcagctcgtcagtctgctttccgttgatgcgcgtatacagcacatcagtacagcaatgatgatgatgttactgcccgcctttttcatcacgccttttgttgcctcactgcaggctttactggagcaactgaatcaggcaaaacgtgttcttatcctgacggttgcgattgaactggccaccgtggccgtgattttaactggctggaaagcatttgatcagcttaatgctgtcttatatctgattcttgccttcaatattatttatttcattgcgtttggcagagagtttttccgtctctcagataaaataggtgataaaaatgttttatag

SEQ ID NO: 455058 - DNA, 630 bp, Serratia marcescens
atgcctgatgcattatttaatgacatctatgcgctatttaaaaatcagcttcctgctcaggccattcaggcgtttcacctgaggctggcagagaaaggtgcgcaggtcactcagtttcagcttgccgtcatcccctcttctgagcacagagaggagaatgacccggtgttgcaggaactgggcctgtatctcgcgccagccgtggcacaacagaataaccgcgttatcaactatcagaccttaagcgcggttgccgcgcggctgggcttactcgcccggatcctggctgtcagctggcagcatttatcctgcagaaaaagctttggggtgaaaaccacgaagcatcagcttattaaggccgagtttgcggatatcagtaatcacattgacgccctgcttatgcaatggcaactgcgaatggcccaggcagattttgccggggcagaagaagaccactggcagattagcgtattgaccaatcgggcagaaaagctgatgggcgggcatggttatctgctcggtaatactcactcgctctcttatctctcaatgatgatctacagcctctacggcaaatcctgttgcaatgaacatctgcctcaggtcgaaaacatggagcaacaggtatga

SEQ ID NO: 455059 - DNA, 261 bp, Serratia marcescens
atgaaaactctgttactggctatcaatgatgcgttaaacgatgtgctgccgtcgaaagttaccattactgaaaacactgactttaatgatgacctggacctggactctgtattatttgtccagtttttactgctccttgaagataatgtaccgggtttgatcttcgaacccgaccagatcaatcaggatgcgtttacaaccgtcggtaaactgatgacatggataagcgaacatcaggatatggagagcgctgatgcctga

SEQ ID NO: 455060 - DNA, 1002 bp, Serratia marcescens
atgaagaaaagtggaaacaggttattccggtgtcctgattttgtgatccactacactcttaattatttatgctggttgcatgaacgtgttacgttagtccctcttgctgatttagccgacatacatgatttagggccaggccagataaaagttttacaacgattttattccattatctccgtcgccagacatccattttcacatacagagatgttcagcgaagtaatacaaaaagttactcaggaaaataatcatttaatactcaaggaaggattattgatttatgcaaaaacgcagacacataatactttctatgatgataactggctttcagaactggcccaacggcacggcataggtcactgggattcagctacgctaagtctgaatcactgtgccacggccttatccgccattcattttttaaaaggaaaagccagaaaagaaaataagcctgttattttgctgaccggcgaaaaagcttttcataaggatattaataaactggacaatggtctgctggctgaaatcccggttgccctgctcctgaacgcgggtcaaaaagcagaatggtccatttcagatagttgtgtcatacatttagctgattttcataacaatcaccgggataagccgcagcagcagcggcgtgagcttttttccactctggataatcactatattgaattttatctggctctgttaaagaaatttaaactggaactggatgatatagacgcgattgttcctggtaatttagatcttccccagctgaaaagagttttttcagcactcaactaccagggggaaatatttactgacgcgctgtcacactacggtcatgcctattgttcagacattccgctaaacctttgcatgttactgaaacgttttcgcggaaaaagagtgctgtgcgtcacgatgggaatgggaattactttgtcaggcattttaattgaaagggatcaaagcaatgaaaactctgttactggctatcaatga

SEQ ID NO: 455061 - DNA, 444 bp, Serratia marcescens
atgtccgagctgatgcaaataatgtacggcctcaaaggcggcggtcaggttgtcgatgtgcaccgtgggcagttccagttccggcgcaaactcattggccatcaccatcggcggcaggttgcgctgctcttccttgctggcgtcaaaaggcagattggagccgagcagcagcatgccgtcgatctgtttggtgataatcagattaacgaaggtgcgctcctgctgattttgctgcgcgcagtcgccgatcagcaccaggtagccttgctgcgcggcagtctgctcgatcccttgaataatatcggcgaagaagggatcgcagatatccgggacgatcaccaggatggtgcgggattcattgcgtttaacgttgcgcgacagcgcatgcggagagtaacccacggccagtacggcctgttccactttctgacgcgttggcgctga

SEQ ID NO: 455062 - DNA, 267 bp, Serratia marcescens
atgcgtaaagcccgatttaccgagcaccagatcatcactgttctgaagtctgttgaagccggacgtaccgtcaaagatgtctgccgcgaagcgggaatatctgaggcttcgtactataactggaaagcgaagtatggcggcatggaagcctctgatatcaaaaagatgaaggatcttgaggacgaaaaccgccgtctcaaacagatgtttgccgacctgagtctggaaaatcacgcgttaaaagacgtcattgaaaaaaagctttaa

SEQ ID NO: 455063 - DNA, 1104 bp, Serratia marcescens
atgatcaaggcagttgcaggatattcgctgaaatctgtgcgcaatatgatcaccgcgattcgtgagcaaacgggtacaccacagaaccctgtcgactggtctgagccaaacgtctggatcgaggaaagactcaaaggattagatgccgagattgctcaacgaatttgggcaaccgatgaccacgtgcttaatccaaggcatagttacggtacttatatgtttatcaataactttttattgatgagctgtaatgatgaaggggattggctgccaaccgagaaaggacaacaattcctcagcaataatgatgctgcactgcgagaacttgacgatcaggaaggcttattgcagctgctcgaattgcttgccagccgggagcaggccaagcgttccgacctgatggccgagtggcaggccttcctgcatcaacattctaaatttgccgcaataagctccattaaaaccaccctgtatgccagattgtataacctggtggatcgcggattagtcactcgcgaaggttttagctaccaaatcacagatgctgggcgacagtggcttggaaaggcattgcctgaaagcaaaagcgatccgcgcaaagagctgcttgatgccgtgaaacgctacaaccaacagcaaaaactgttactgcgcgaacagctgacaaccatgaatccttaccgtttcgagcatttggtcggtcagctattggaagccatgggctacgaacaggtcgaggtgacaaaagcctctggagataaaggcgtggatgtgatcggcaaagtacaagtcggcatcaccaccgttaccgaagtcgtacaggtcaaacggatgcaaaacacgattacgcgcccgtatatcgatcagttgcgcggcgccttgccatatcataaagccattcgcggcaccttaatcaccacgggtaagtttgcagccaaatgtgcggaggccgccctctttccaggagcagccccaattacgctaattgacggcgatcgtctattagaactgttgattgaaaacaacgtcggcatccgtcgcagcaacgcggtagagctgctggatgttgatctgcagctgtttgatgagttggaaatggagtag

SEQ ID NO: 455064 - DNA, 777 bp, Serratia marcescens
atgttattgcgatcatgctcgcaaaaacggggaagttcaatcgctacggctgcggtaaacagaccgggcaggatgcgcgacggcccgtgttacgcaacgcgtttaccagatgcgcgtaagaccctactgattgacgattctggctggaaaatgttcttatttaaccctgttcaggatgacagggtttttattatggaaagtgggaaaagtaagcaaaaagattcgttgaatcatccaaacaatgttcaagtggaagaaggtacattgcgcttgatgactcctggggagatcgcgatggctcggagagtgtatggtgattcgataatctatgggcgtgtttgggttcactgtgatagttacttaccttttggattacagaaacctaaatatgcaatggcaccgaatggtgagttgtggttcaggaaggaaatatacgaacctgacttttcaatctcgtcggtttctctggaatataaatatatatttatccacgagctagctcatgtttggcaacatcaaactggacagtgggtcaggttgagaggtttattcagctgggctgcagattatacgtaccgattggataaaaagagactaacggattactctcttgaacaacaggcatccatacttgccgattattggttgttgatcgtctatgggataaaaagatggcgagataatcaaactaccggcaggattggtaaatataggggggtggacaatcttaaggatgttccatcgctttacaaaaaaattattactggccggagataa

SEQ ID NO: 455065 - DNA, 300 bp, Serratia marcescens
atgacaaaaccagcatcaaccactaaaaagccacgcaagcaacatacacctgaattccgcgacgaagccctgaaactggctgaacgtattggtgtggccgcagccgcccgcgaactcagcctttatgagtcgcaaatttacacctggcgtagcaagcggcagcaacaggcaacgtcctctgaacgtgagggcgaactcgccgctgagaatgcccgcctcaaacgccaactggctgaacgggacgaggaactggccattctccaaaaggccgcgacatacttcgccaagcgcctgaaatga

SEQ ID NO: 455066 - DNA, 312 bp, Serratia marcescens
atgaaagaacgtgacatctttagcgaactgcaggaaggcatgaccgcatggggtgagttcaacgagggcgttaaagtggtgcggacacaccgtgtcagcgtgaaacctgcctcaatgacgcctgaagaagtgaaagcggtgcgtgaaaagctaaagctttcacaggcggttttcgcgcagtacatgcataccggcgttaaaacgttgcaaaattgggagcagggagtggcaaagccgaatcagcaagccgtcttgttgctcaagatggtagataagtaccccaatacattgaaagagctggcagcgttataa

SEQ ID NO: 455067 - DNA, 351 bp, Serratia marcescens
atggaggcattatttgttgagttgccgccgttcgaacggcatcgcgctgaatacctcaccgatgatgaattccgggcgtttcagcagatgctgctgaaaaatccggtatgcggtgatgtgatccagcataccggcggattgcgtaaagtgcgttttggggatacgagacgtaacaaaggaaaacgtggcggcatccgggtgatttactactggtatctggagaaatcccatttcctgttgttcaccctttacgacaaagatcagaaagacgatttaacgaaagcacaacgcgatattttgcgcgaaatgcttgaacaggcaaagaagagaggggcagatgaaagaacgtga

SEQ ID NO: 455068 - DNA, 228 bp, Serratia marcescens
atgatcgttacccgtccggtttcatcgaacgaacccgatttgcttcgtggatatgaggcttcaacattggtcgtaaaagacttgtccggtgccaatgctattgaatatgcgacacctgaacagggttggacacatgcagccctcgaggcgttagacctctgtgtcgcgttcccagatggttgggacgcatttcttggcggagagtgggtaggcagctcggagatttaa

SEQ ID NO: 455069 - DNA, 549 bp, Serratia marcescens
atggcaactcgaggcgtaaacaaagtcattctgattggttttttggggcaagatcctgaagttcgttatatgccaaacggcggtgccgtggcgaatatctcattggctacatctgacacctggactgataaggcgaccggcgaggagcgccaaaaaaccgaatggcaccgggtcgtgattttcggcaaactggcggaaattgctggcgagtatctgcgcaagggttcgcaggtctacatcgaaggggcgctgcaaacgcgtaagtggcaggatagcgatggccaagaccgctacaccacggaaatcgtcgtgaaggtcggtggttcacttcaaatgctggggagtcggaacgacagcagtagccgtgtaccacagcaaagcgggcagtcagcgcagcaggaacaggaacctgtgccggccgcagctgcgccagcaaaaagcactaagggcaaaaaaggcaaggcatcggcggtcaacaaggctcctgccaagtctgcagcgcagcatgaggattttccgccagactgggacgaaggcgcaccattctga

SEQ ID NO: 455070 - DNA, 546 bp, Serratia marcescens
atgatagatgtgacctaccgacccggcgaccgccggggtaacacacgcaaggaagactacctcgacgcgcttgacagtctcatcgccagccggggtgaacactgttattccccgttaccgggtgacacccgcgacaggctgttcccggtggtgagccgccgccgccgtcagcggttcgaacaccggctggcgatgaagcatacccggcaggtgcgcatcgatgacaccatccggcggcacaaacggcggcgttatcaggtgcggctggcgcaggcggaaattgagctggcgtttgtcacgccgggcgcgcttgacagctgggtgcgccgtgcgcagcagcagggactcaccgaggatgacctaagtggtttggtgctggcgtggacgacgcggtttccctgtctggccgaactggatcgctacctctgggcggccatgccgttttgggaagcctgcctgcaggtcagcctgatcagcagagatttatccgccgctgacagggctgataacgatgcccgtcttccgaatcgcctggtgcgccgctaa

SEQ ID NO: 455071 - DNA, 2064 bp, Serratia marcescens
atgtctatgactgagtctaaagcaccggccaagggaaaaacaacccgtccggccaaaaccagcaagaaaaacgccgtcgctgaaaaaatcgatgcggcgctggccaaagccgagcgcaaaaccgttacgctcggccagctggtgctgactgaccttaacgtgcgtaagaaaaagtcctcgcaggcgtcgatcgaggggctggcggcggctatccgttccgccggtctgctgatgaatctggtcgtgtttgaaatggaagatggtcagtttggcgtcgccgctggtgagcgccgcacactggcgctgcgttggttgatggagcagaagaaagacgcggacaagaccaccccggacggcatcgtgaccgacgattacccggtcgaggtgttggtcgtcagcaagccgatggcgcgcgtggtgtcgatgatggaaaacagccagcgcgaacagatgcacccggccgatcaggttacggcattccgcgatttgtcggcggacgggcagacaccagcccagatcggcgacctgctgggattcagtacgcgccatgtccagcgctgcctgcgtctggcaacgatggcaccggaactgctcgatgcgctggccgaagataagatcaccctcgaccagctgcaggcgctgtcggccaccgaagaccatcaacgtcagcgtgacgtgtgggaaaacgcttacggctggtctgcatcaccgcatcaactgcgcgacgcggtactgaaaggtgaagtctcggccaaggacaacagccagctggcgttcgtcgggcgtgatgcctacgaagcggcgggcggcaccttcaaatttgacctgtttaccgacgaaggctttttgaccgagccagcgttgttggagcgtcttgcccgcgaaaaactgcacgcgctggcgcagcaggtggctgagggcgagggctggagctgggcggaagggcgcatttcgcccattaaaacatggggtgaggatgcggatctgtaccgcgaaatggacgcaccggagccggaattcacagacgacgaacaagccgagatcacccgcctgaaagcacggtttgccgaactggaggatgcatttgaagcggcggatgttgatgcggatctccaggcgatgattgcagaaagcgacgcgattgaagcagatattgaacgcttaaccgcagaggtgattatccgttcatggccgcagtcgatgcgcagcaccggtggggtcgtggcattcctgcgtagcggcaaggcgttttaccaacgcgggatcgtgttacgtgccagcgaagaagctgccggaaatgccgccgatggcaacggcagcggaacggcgaccaccgagggcacagcaccaaaaaccaaagagaaggagaaaggtctgtcggcagcgctgatcaccagtttgtcggcggaacgcacgctggcggttatgggggcgctggtcgaaaacccgaccgttgcgctggcgctgcacactcacacgctggccgtgaaggtgttcggttcacgctacgccggatcgctgctgaaaaccgacctgacgcccaaacgtgcggaactgctgaccaaagccccgacggcggaagggagccgcgccgatcgccagctgggcgatctgtacgcgcagtgggaagcgaaactgccacccgagtggaacagcgatttcacatggttactgacgtgggagcaggccgaggtcgtggcgctgctggcgtactgcgtcggccagtcactcgatgccgtgcagctgtggtctgccggtaatggcaaggtcggcgatgagctgacgccgctcgagaacgtgctggatttcacgctgtgcgactggtggcagccgaccaaggccaattacttcgggcggatcagcaaggagcagataagcgatgctctacttgacgccggaaaggtggcgcaggcggcctcggtgctcaagatgaaaaagggcgatgccgcgcagctggccgaggatgaactgaccgccagcggctgggtacctgaatgcctgctgccgatggtcgatgataataccactgaatcacaggacgctgacaacagcgccgccgcataa

SEQ ID NO: 455072 - DNA, 291 bp, Serratia marcescens
atgtctcaacaaaacgtcaaaggcgcgacaacgaagcctacagcagcatcagcacagacccacagcggtctgaccgtaccgcaggtgtgtgacctgtttcgctacgtgcaggccgtgtgcggaagctcgactggcaccattgaaccaccggccgtaccggccaatgcggaagaggtgttcgcggactttggggattttgacaccattgtggtgtggcttgtcgatggctggccgatcgccgccagcgatcagatgaccatgatccactggcatgtgaatgcagggcaataa

SEQ ID NO: 455073 - DNA, 564 bp, Serratia marcescens
atgcatacagcgctgaaacaacgcattgatatgatgcgcggcaaggttgaccgctgcgcctcacgcattgaggttccgggtagctctcaattatttgtcaccccagacgagatttgcggccggttggtctctcttgccggcattcaggagaatcatgtcattttggagccgaacgcaggcactggcgccatattacgggctatcagggcggcagccccggcggcgcggtgtgaggcggtggaaattaacgcccaactgtgcctgaacctgcaaaatgagtttgagggcgccaccgtggtttgtggcgattttttgcaattccgggcgaatagctatgaccggatcgtcatgaacccgccattcaatcatggggcggatattaagcatatcttacatgcacgatcactacttaaatctgacggcgtgctaacggcgatatgtctgaacggcccgcgccaaaatgacacacttcagccgcttgccgatcactgggagccattgccgcgggggacgtttgcgtataccgaggtgtctactgtgttattacgcatagccgtcggttga

SEQ ID NO: 455074 - DNA, 1377 bp, Serratia marcescens
atgtcacaacaaaacgtcaactgcgcgacagcgaagcctacagaagcatctcttgaaaaccagatgcaggaatatcgtgcgacttattccccggatgataacaaattgcgtttatatgcctcttgtcggcttgatgcagaaacctacgcgaaagtaagccgtgccggctttaagtgggcaccgaaacaaaaccttttcgttgctccggcatggactccgggccgcgaagatttgttgatcgcgctggccggggaaattggggatgaagacaataccttgtttgatcgtcaggaagaacgggcggagcggttcggtaattacagcgaaaaacgggcaagcgaatctgagcaaacattgtcttacgttgacgcgttggcctcgtcagtcccattaggccagccgatccttgtcggacaccacagcgagcgcaaagcgcgcaaccatgccaaaaaaattgaaaatggcatgcaaaaggccgtgatgctatttgagcgcgctgagtattgggaagaaagggccgaggcgtcactgcgtcatgcgaagtataaagagctgccggaggtgcgttatcgtcgcatcaagaggattcaggccgatttacgcaaggctgagaaagaaatcgccaacgccgagaagtttacaaaattatggcgctctgaaaatctcgatctcaacatggccagagtgatcagctgtcatgatcgtatttcagcctgttttagtctcgaaaaatacccacggccattggaaaaaagccaatacgaagggcgtatgagcctatattcagcgctggaagaggacattatcacatttgagcaagcccgtgatattgcgatcccctgccatgagagaacaatcagccattaccagcgctgggcaacacattaccgtcaccgcctgagttatgaacaagcgatgctggccgaaaatggcggcgttattacgtgtacccaggattttcaggttggcggtgaggtattaagccgtggcgagtggctgaaaattatccgcatcaataaaagcaatggcgaggtgagttctgtagaaacgccgtgctatagctttttagggtacggcgggacaataaaaatcaccgttgaccgtatcaaagactacaaggctcctacggcagaagaagcgaaagcggccagggcggcggcaaaacgtccgccgatcgtcaattacccgtcagagggtttcgtaacgatgaccaaggccgaatgggctgcaaaacatcgtgattacaaatgcgtccggggcgtggcggccaacgatgaacacggcgcttatcgttaccggcgagtgatgagtaacgcctatagcctgtcaaatgtatacatcagtgatatgaaagtgattgaaatcccaaataaataa

SEQ ID NO: 455075 - DNA, 798 bp, Serratia marcescens
atgaacgataatactactcttaatgctcttgtgctgcgccgtgcgcgtgactttctggccgcgggcggatggcctgcgcatacggaggcggatcagcgtgatcccactaactggccgggctgggttagcctgtatgttcggctcgacgtagacgatattatcgggatgctaacccgttattgcgaaacgcatgaacatgtatcgactgaaataccaattttacagcgcgccatggctaatcttgcccggagttcggtcaacatggtgttatcaggcaactgctatcaagacgccccgatgttgcctggtgacggtacgcagatcagctttccctacgccggggcatggctgagggaagatgaagtgaatgctgttatcacggttgtacgtagcatgattaacgacgtgtgttcgaacgtagcggacgacactcgaaaaatacaatcaggactggctacgtccggacgaacgttgtttgttcgccagacccgtcgctttcgccttgtggtgaaagagagtgattatccatgtggacttgaggaagacgatccacatcttgcggaggttttgaccgcggtgttgcaaggcgcgaggttcggctcaattgaactgcatattgtcagtgatatggtcgagcatacccttgctttcggtgtaatgactgacaccctacactttccacaagagccgtcgtggcgttggtttgaccgctttgtgctgcgtgaagttgtggcggaagcgcgccacgaaatcaacagcatctgccagtcattgggaaagatcaggttgctggcgtag

SEQ ID NO: 455076 - DNA, 420 bp, Serratia marcescens
atgattggagttagagaaaacgtgtgccagatgctggaagacaattactcacctgacgctaccctcgccgtgctggtctggacggatgcgggaatcaaagagttggccaacagccggaatgatccggcaaccgatgaagatgtgcgcgccgtaatggaaagaatagggcaggtgcaagacgaggggtatcagctttcgggggtggcggcggagcttgccgccgggcagttggccgaagtgaagttggagaacgaaagcgtaacgatgccggcggtgctgttatcgcgattagtcgtcgcggccgagcaggcattgtggccggaagagtgggctgcaagagacgcaggcttgcccgtgccggcaggcattaagaaaaaattggccgttgtcgcgcaggcgcgcgagttactgaatcgctga

SEQ ID NO: 455077 - DNA, 222 bp, Serratia marcescens
atgaactacatcgggcacgaacaattacgcggcgatgttgcggcgctggctaacagcatgtgcgatgtgcgcacgacactgaacgagcttaccgaccgttatcgctatgacgccgattcactgcctgaacggttagcgcgccagaccttgagccaaattaacacgctgtacttggaggcataccgccaaatcctagagctggatgcgtgttttaaagactga

SEQ ID NO: 455078 - DNA, 681 bp, Serratia marcescens
atgtccagatttttgcagggtaactgcgtccaaattatgtccaaatttcctgaaagggcgatcgactttattctgaccgatcccccgtaccttgtcgggttccgtgaccggtctggccgtaccctggccggtgacaaaacggatgaatggctgcaaccagcctgccacgaaatgtatcgcgtgctgaaaaaggatgcgctgatggtcagcttttacggctggaaccgtgccgatcgttttattgccgcctggaaagccgcagggttcaagattgtcggccatctggtattcacaaaatcctacacatcaaaagcggcatacgtcggctatagccacgaatgcgcatacattcttgccaaggggcggcctttattgcctgaaaacccgctgccagacgtgctgggctggaaatattcagggaatcgccatcacccaacggagaaacccgttaccagcttgcagcctctgatcgagtcttttacttcgcgcggcgcgattgttctcgacccgtttgccggcagcggctccacatgtgtcgccgcgctgcaagctggccgccggtatatcggtattgaattgctcgaacaatatcaccggatcggttcggaccggctggcggcggtacggcgtgccatgcagaaaccggccgcaaacggcgattggctgccggaggctgcgtga

SEQ ID NO: 455079 - DNA, 1326 bp, Serratia marcescens
ttgaaactggtaacaaaaaaagccccacgtggccgcctgtatcgggagttatcacgtgaagaaacccgagctgtagagaacgtctgcggtcggggagaggtgacgtcattagcagagaagcaacttgccgagacggtactcagagcgatgcgcgatcatgatttatggctggcctgtgactgcaaaggcattgaagaacggccgctcaacacagcaaaaaatcttgatggcacattgttcctggtgaacttcagtggtgaacaccataacgcatgcccattgcatcgctcaaaacgtgaaggggataacgccgggccgggcggcagccgccggaacgcagggatattgcccgttgatttccgttcgtttttgccgcgagacgaccatggcgcccgtatctcggagccgaccggcagccaaaatcctggtggtgataaaattagtcggcgccgtgtgccggcgctcgcccgactgctgctcacattgatagacctggctgaattaaaccgtatcgatcctgtgttcccgcaacccggcaggactaaaaaacaggctcttgctgcagtgaagctggtcaccgacctggagcaatttgctcaggggcgcccgctgaatgaaattgtcttctttgagccgtggctgaagcaggcgcgccttgaagaacgcatgaaaagcctggaaaccgacggtaaggcctggcctgcaggacgggcacgtaccttctatcagatcttcttttccgaaaacgtctcccaggacgaggtagtattttccggccagtacgacccaatcgtgttccaccctgaaaaacgcgtcagtattaacggcgaaattgacggtagacgcggaaaatactgggtgatcctgatgtaccaacgtaatgatgccggtaaggtcgtttgccgggacgcctatgcgcatgcactgtatgattatgcctgcccggtcccggtcgacagtaatctcgaacgcgataccattacgtcagtaattaacacaggaaaatggctgcagagcgctgggtttgaaattgcgctgaataaaccgcttttcgacatcaaagtgatgatcgagggtgaagaggggttcgtgttgccagatttcctgcttacagttaggcatccgggaaaactgcgtaccacgcagctggtcattgaaacgatgggatacaccgatgatgactatgtcgaacgaaaggcaaatcagcaccagggtatggccacattgggactgttactcaaagatccaccgcgctggccagagccggccgcaaaagctgatgcattttcccgctacctttatggccacattctacacctcgattag

SEQ ID NO: 455080 - DNA, 405 bp, Serratia marcescens
atgctgaaatcgcagccggctggctttgtgctgcttcagaaaatgcggcgcgctggcgtgaaaggaaaaggtcatgaagacatgaagactttctcggcaatagaggccgcattgacaaacactgggcgacgttcctatgccggcgcggtattgagctgtttgctggatgcatatgaccgcaacaaaaccgaactggaaaaacgtgtggtggcagataccactggcataacggagaccaacgtggcaacagtagcccgctatctggcagaacaagggatcattgacattctttactgggatacaaaatccgatagtcccttactgtcgaccattcgcaatggcaaatggtcaataccgtattatcgtctgacacctgcagtgctgaagttatatcgccgaaaatag

SEQ ID NO: 455081 - DNA, 1155 bp, Serratia marcescens
atggcgaagaactttaaaaccgcgatgcggaaaaaacgcgaaggcgctgcggcaccccaacaacaggcggaaaccgcggtacacgaacgtgagctggaactgccgaaaaatgacctgcagcagtcagagctgaaggtcaaccgtccggccgacgaaccggccggtcaaatcatccgcgtcagcatcgatgaagtctacgcagaagaacaggttcgtcccgaagaggatttcgaagaagagaccattgagggaatgtcacagacgtatgacggtttcggcattctaactccgccgcgctgcttcccccgtgataaacgtggctatcgcctctggatgggtgaaacgcgctggcgctcggccaagcgtcatggcgaccagtttatcgatatttatgtcggtcagccgcccgaaaacgacacaaagcggatttatggccagctgatcgaaaacattcaccaatcgggtcttaagccgctcgcgacggcaattcagttgaagaagctgcgtgatgaacacggtgaaacgcaggaagcgatcgcacgcaaactggggatacccaaggcgctggtcagtaaatatttgcgactggttaatgcacctgacgcagttatcgcactgctgagggacaaggtgacgaaagacgtcgatctggtctacaccttgtgtcagatcaacgacattaacccacagagtgttgaaaaactggcaacgatggcgagaaccggaaagctgacgcgacagacggcgataaaagagctgaacgtgctgaaagggaaaccggaaaaaaacaaaacgccaccagaaccgcctgctggtcaggtttctgacggtacaacaggcggtaagccacccggtgttgaaaatcagtcatctgagacgacgattataacctcatctgcagctgctgcagacgatgctcagcgtgcgggtgcggaaggaactcagcagcttacggaatcgggctgccatacacctgcaggcaatatccaggtgcctaaagtaccccgcattgttgttaagtttgaagacagcgagggttacctgctgacagaacagatccctgatgagtttggccaggtctgggtagagctgtcagttggcactatttgtgtcgatgctgccgatatctctatcctgggcatcaaagaggtctga

SEQ ID NO: 455082 - DNA, 2346 bp, Serratia marcescens; identical to SEQ ID NO: 444610

SEQ ID NO: 455083 - DNA, 360 bp, Serratia marcescens
atgctgagaatactgaccgacaggggcacagagtactgcggtaaagtagagcaacatgattatcagctgtatctggccatcaacgatatcgaccatacgaaaacgaaggcgatgtccccgcagacgaacggtatctgcgagcgcttccataaaactattttgcaggaattttatcaggttacgttccgcaagaagctatatgcaaacctggagagcctgcaaatggatctggacaactggttgtggcattacaataatgagcgaactcatcaggggaaaatgtgctgcgggcgtacgccaatggccacgttacttgatggaaaacgggtctgggcagaaaagaatctgaaccagatttaa

SEQ ID NO: 455084 - DNA, 393 bp, Serratia marcescens
atgaaattaagattggcttttttatttatatctacatgtctgctaatcggttgtggggacaatacgccgaaatgtaatagtgatgaagctaaaaaactcgtgactgacattgcacagaagcagattaataaacaattcgaccaactcagaaactcacaactagccggcatggtgccaaagcatacagatagtctcatgttaaaagtcatcaatatcagaacagttaaacataactcatccgtagacgtttatcaatgttctgccaatctgcaaatgactatgttggatgatgaatcaaaacttccaaaaacaaacgagataccgataacctataacatccagaaaacggatgatagtaatgggcaattttacataaacgtatttggcttgtaa

SEQ ID NO: 455085 - DNA, 528 bp, Serratia marcescens
atggctaccaccatcacttcggtaacggaaagctttgagtacttctttcattccctttaccgcactgagtttgtaaaaacactacgccttaatgagtgcagtgaaagggaacttctaccactggttcgttgctaccttttaggctgtttttccgatgatgtgtcgcctgaagtgaaagggaagcttccaggctctattacagggaatggctatatcgattttgtaattgatgatgtggcggtggaattcgccgtccgtaagcccaccgcagccaaatcaacggtatcagccacggtcaatagcacggaaatgaagaagttgatgaagtatgacggcaaggcgttgctcgtactgttcgacttctctactactccctattcggaagcccagattgaggctttccgcgactggccttctcttggtaagggcaatcataaaaagtcggcgttcaatgttgcctatttttacgtcgagaaacgcagaccgctcacttttgggaaaatcaccaaaaatattcgtattaactga

SEQ ID NO: 455086 - DNA, 279 bp, Serratia marcescens
gtgaatgaccacgtagcatcgcaaaaaaagcgaactaaaggaagggttaaggactggcacagggccgacattgtggctgcactacacaaacgtggattaagtctggcgcagttatcccgcgatcagggattaggttcccgtacactgaacaatgccttcagtcagcactatccgaaggcagaacggttgatagctgcggcgttgggcatgatgcccgaggagatatggcccagccgctattttgataaacaaccttcaatacattccggcaaggattag

SEQ ID NO: 455087 - DNA, 393 bp, Serratia marcescens
atgccggggacggcaaagggctgccgcctgcgtctggaaaagcttgcagctatgcacccggaaatcaggagaaagagaacagggcataagggctttgagtaccatattcgcgctgcgggaatgtcgctaaaaagtgaacgggcagagcaagccactcaatctgtcgtttctccttttggtactgacgaacagcttaatctctgggttcagttgttcaaaacgatgaagccccattcccgtgaccgcttgttgaagcaggcgcttgaacaggtggctgatgatcttgcgttaacccagccagctttgccaacagaagtaatttcactggcgcaccagttactgacgttttcggaagagcagcgtaaacaattgctggagactatttcgaagtaa

SEQ ID NO: 455088 - DNA, 393 bp, Serratia marcescens
atgcccgttgctcaggagttaataaacattatattaaatgaggcgggaagtccgccgcctcataaagccagaacaaccgctgttagtttattatttaaagatctgacttatagtgctgagtatgggggttatcatcctgtcgaaatacggcttatttcacgcaatcatgaatggtattttgattacattaccgacttcagttatatggggacggtataccccgaactggaaaaggaaattgattttagctggagtcggcaatatgtctttctggcacatgtgggtgacctgcctgttaacaccggaagggagctgtttgaactctggcaatccaactttattcagtatcaggccatgaacgtctacaccattaccgtcctgtgggaaagctaa

SEQ ID NO: 455089 - DNA, 546 bp, Serratia marcescens
atgttagaacgcagactgacagaagcagaaaaagagggatttagccggaaaatagtggatgatcttgaaaaccggcatctggtcatttatggcaaacaagcgaaagcagaaaaggcacactgcatcgttaaagttattgactacatcattgaaaatatctctgaagacattttattagaagatctcgaacgcatcagcggcaagacccgctttgatatctgccgcgtctttaacctgttctatggcatcacgccaataaaatggatgtggaaggtcagactcaccttggcaaaagaatttatcgatctggcacccgactggtctttaactgacatcagctgtgcctgtggctttacctcgctacctcacttttcacggagctttagtcttgcctataagcagtctcccatgaagtttaaaaaaacagcacgcgcaagactgaaaatagatgataaaaaagatcatatggagtttgacaggatgtttggcgttgaccgcaacagtttctcgaaaaatgtactgattaataatcttcacctgatataa

SEQ ID NO: 455090 - DNA, 528 bp, Serratia marcescens
atgaggaaaatattaacaggattactcctggccagcgtattaacggcatcatccctgcaggcggcgccgtcggtccagacaggtttttctcctgagggaacggcgcagcaactggtgctgtccgtcattggtgaggcgcgccacgacatccgcgtgatggggtatgccttcacgtccccggagattgcgaaggcgttgattgctgcataccggcgcggagtcgatgtgaggatcgtggtcgatgagaaggccaaccagaaccgcgctggccgggcagcacttaatctgctggccaacgccggcgtaaacgtcagaacggtgaacacctataaatatttgcacgacaaaatgatcgtcgtggatggtgttacgaccgaaacaggcagcttcaattttagccgagctgcaaatcgcgccaactcggaaaatgtggtggtactgcgcgatatgccggaggtcgcacggtcatacctggcgcattggcaatcccgctggatacagggccaggactggcagtcaacttactga

SEQ ID NO: 455091 - DNA, 783 bp, Serratia marcescens
atggcgatgttcgatccgcacaacggaaaattgcgtcaggttcgcgacgtggttcgcttcacttcactgcagcaagacgtactgaaatttttggcgctggtgctgatggtgcttgaccacgccaaccgggcgctggggctgcatgagccggtgctgttgctgctgggacggggggcatttccgctgttcgccctgctgtgggggtacaacctggcctcgcggcctgtccggcagtcacaagcaacccgtctctggctgtgggccattattgcccagccgggttattggctggtgatgcgccacgatgggctggcgatcaccgatcccaacattttgttcctgtttgccgcagtgacccaagcgctagcgttggcttcgctgccgatgcacaagggtacacccaatccggtattggccggcggcgtgctgctggcactgtggtgggcatatggtgccacaggcgggaattacggggcggcaggtatcttactgctactggccagttacggtttgtgcgtcactcttccggaatacgtgacgaccatctgtccggtgcgggggctgtcgatcgtgacctggccgctactggtgttgatgctcaacgcggagctgtctgtctcgctcatgctggccggactgatgctgccggcaatgctcatcctggggacgctaccgctggccatgtcaataaatcaacggcgtctgttgccacgtggatttttcttatacggctatgtagggcatttgttggtgctggcgttgctcgcctggttggtccgttaa

SEQ ID NO: 455092 - DNA, 243 bp, Serratia marcescens
atgtcacaagccgtaagcgtagtaacttcctcatcgaaacgtggttaccgtaaaggcagtcctctgagtgtgactgaacgaaaaacacgctcggtatctcgtaaacgagaaacccataagcctgtgaatgtatttatacgtaatgcccttaaagacaagcttgatgcactctgtaaggagtgcgggttaacacaggcagaggcgatcgaacgactgcttgaacgtgaaataggctgtgaatag

SEQ ID NO: 455093 - DNA, 369 bp, Serratia marcescens
atgcatagagttctggccatggcggccagcgcagacaacgaggtagtgaacggcatgacaacaacaatcgaagtgctccaatacacgttaaaaccgggaacaggtgccgcatttcacgatgttatgaaaaatcagagcgtgccgctgcatcgacaatgtggtgtgaacatattacgttttggcaactcgcttcacgatccggatcggtattacctggtgcgctcatttcaaaatgtgtcaaaaatggaagaacaactcactcaattctatgccgatcctcgttggcgcgaaggcccgcgcagtgcgataatcaatatgatctgcgacagtcaccgggtagtcatgccgggagaatcgcttgcaaaatga

SEQ ID NO: 455094 - DNA, 348 bp, Serratia marcescens
atgggtttcactgaaccggaaatgttaatcgtccgcaaagagacaatcatcggtacgctcagtattctcagagataaattggaacatatcgttgaaaagcgccttgatgcacgcgaacgctacgtgttgcttgcgttggatacgctggctaatccttatgaagtgtgggaaaccatgtacgatgacggattggtacgctttctttttatcggtgcataccggcagaaacagcagatgctggttgtcgtggcgccgtgggaaggaaaagtgctctggaatttcatgcacactgacgcgaaaagcctcaataaacatcgccagggaactttgcgttataaacggcaataa

SEQ ID NO: 455095 - DNA, 984 bp, Serratia marcescens
atgaaaactatgatgatctatggcgctaccgggtatacaggaagcatgattgttcaacacgcattagattcgggcataccggtgactattgcaggccgcagtgaagataaacttgtagctatggccagtgagctgaacttaccatacaaagttttctctcttgaaaatccgtttgaaatagatgaggcgctggcaaatgttacggtattgctcaactgcgcagggccttttgcgtacactgccgacgccctgataaacgcagcggtacgcaataagattcactatctcgatattgccgcagaacaggacagttacaggctggctgaagcctatgaagaggatgcgagcgctgcaggcgttatgctgctaccggggtgtggaggatcggtagcaatgctggggtgcctcgcagtacatgccgcagaacgggtaaagtatcctgtaagcatttctctggcactgaacgtggccggatcaatgtcacggggctcagctgtgagcgcgatggagaatttatcgcctgaatgtctcataagactcaatggacagctggtgccaaaggaccccggcgaactgagattttttgattttgggagtggtgcgcgagaatgttttccagtaaccctgccggacctggtcactgtctggaaaacaacgggcatccctgacatctcaacatttgtacacgttagtgggattgggtttccacaaggggatttatctacattacccgagggcccttcagcaaaagaacgtgaaagcagtcgttaccaggctgttgccgaaatagtagacgctgaaggaaagacagtacaaatgctgctagacacggttaatggatacagttttactgcgatagccgcagcggaggcagcgcgaagagtgctggcgggagatgcaaagcctggtttccagacgcccgcagacttatttgggaaacatttcgcggaaaccatcgcagatacgcgtatcactcagctgtaa

SEQ ID NO: 455096 - DNA, 270 bp, Serratia marcescens
atgcttctgtgctcccggtgggtgaatttcggttgcaccagcagcaagagcttcagcatgcgccgcgttaaccatggactccgattctgcgatgaaacctacatgaacagcatcaacgcaaacagtcccctgcctgagccagaaaaatatccggccatttgcaccgaatcctttgaggttagggtgtccgtgaggcccctgcgcaccgtcatagtcatggcggtttacgatgccaagaacaggcagtacgcgctcataaaatgcgattga

SEQ ID NO: 455097 - DNA, 744 bp, Serratia marcescens
atgaaacacgttctgattaccgggggcagcaggggaattggtgccagcacagcgatcgagtgtgcaaggcgtggatttggcgtcattctgacgtggaacaatcaggctgaatcagcgcaatccgttgtcaagagcatcgaagcctccggtggtaaagccattgctatgaagctgaatgttggcgacgccggtagttttgatgagttccgaactgcattagagcgggtgatgaaagcacaatggaatacaaccggtcttgatggcctcgttaataacgccggctacggactctttaaccccattgaagccgtaactgaggagcaatttaatggcttgatgaatgtgcatctcaaggggccattctttctgacacagaagctgctgcctcttctgcgcagagactcctgcattgtcaatatcacaagtgctaccacgcgtgtcgccaccgctggtgtcgccccttacgcagcatttaagggggggcttgaagtccttagtcgctatatggcgaaggaatttggcgaacgcgggattagagtaaacgcagtatcacctggccccatccgcactgaacttggcggtgggcttaatgacgaatttgaatctctgctcgcttcacaaactgcgctgaggcgcgttggtgagcctcatgaagtcgctcgggtgattgcctctttgctgacggacgatgggggctggatcaatgcgcagtcaatcgaggttgcgggtggctataacgtctga

SEQ ID NO: 455098 - DNA, 807 bp, Serratia marcescens
atggtgcagggagaaattcctgagcacagactttctgctgtttatgaacctatgattaatctgatcctgacaggttcaaaaagcatgactgtcggcgaaaggacattaaactataatccagcgacttactttgtcatgtcagtagacttacccgcagtaggtaatgtgtttcctgataacgttactaatgcaccttatctggctgtcagcctgacgcccaagcctgaaattattgccgatctgctggacaagattcccggcactggtgacgcttctctctatcattcaggattttcagtagcgccagtcacccgggaattactggatgcatggattagaatgcttactcttatcagaaagcctgacgaaattgccgctctggctccggcgtatgagcgggaaattctttttcgtgtactgcagggcccccttggatggatgctgagggagatcgcaacgcctgaaacccaccttgcaaggatttacaaagtgatcaactggattaagacaaactacacacaagctatacgtgtagaagatctggctgaaatggcagcgcttagcgtgtccgcttttcaccgccattttcgcgccataacttctctaagccccgtgcaataccagaaacaaattcgcctgatgcatgcccggctcaagctcgccacatcgggcgaaaatattatgaatgtcgcgctatcggtaggctatcaaagccacactcagttcagtcgggaatatgcaagacagtttggattaccgccctcagctgatttgaaaaaaatctccctcagccatgcccgcaattag

SEQ ID NO: 455099 - DNA, 402 bp, Serratia marcescens
atgtcagcagacaatagtcaggcgcacagtccggagtattcctccggtcattcatgcgaggacaaggcttcaggccggttattactggatcaaataactgacaagtggtctgtctcaatcctttttgctctgtgcagcaaaccattgcggtttaacgagataaagcggtgcatggatggcatttcccagaagtcactgactcaatgtttacgccgtcttgaacgaaacggcataattgcccgtcgcgtcattccatcgtcccagattgcagttgaatacagcattacccccctggggcgcactctggaagcgccctttcaggcgctatttaactggaccattaagtacagttctgacgtgacacttgctcaggctgcgtttgataccaggacaaccgaatag

SEQ ID NO: 455100 - DNA, 465 bp, Serratia marcescens
atgtcagtatcactcagtgaaaatgttgcaaacaagcttgctatcgtcgattcgctttaccgatatgcggcaggaattgatctcaaagacccggagttaattaaaggggcatttactgaagatgcggtgtctgacttccgccctgcgggagctaaagtgggttttgaatatcctgtcctggagggtaaagaaacgatagctgatgcattgctgaattcgcttaagccgattgtcaccactcattcagtgacgaacccacgtgtaacgatcgatggagataaagcatatctggaggcgattgtggaagcacagcacttgcctgaatccgatccctcacgccactatctgatgaaaaatcgttatgacgttgaacttttaaagcaacgagacggctggttcatatgccgggtcacagttgataatgtctggaggactggtgacccgacagtgctggcaggagtgtaa

SEQ ID NO: 455101 - DNA, 2736 bp, Serratia marcescens
atgaccatggatttaccaagtttaaaacccgaccaattacgtgccattaacaacgttaccggccgtttaagtttacgcaagccgcagcaagactcgctgcgcgctttggcagtggcgattagcgcctcagagcacaagcttctaaaccctaagcgcgatgtaccggaattattagaaactttaaaagcgcagtttcctaagctcagtgattttgaacgtgacttcccttcattgtgttttgccttggcaacgggtgtaggtaaaacccgtttgatgggggcgtttattacctatttgtatcaggtacatgatattcgcaactactttgtgttagcacctaacctgaccatttatgaaaagctgatcagtgatttttcgccagcttcacctaagtacgtgtttaaaggtattaccgattttgtgctagcaccgccagaagtaatcacaggtgacaactatgaaagccgtggcgcacaaatgatgggtgatttatttggctcagtacggattaacgtgttcaacatcgccaaaatcaacactgaggtgagaggtggtaaagccccgcgtattaaacgcttagccgaaaccttgggagaaagttacttcgagtacttatcgaacttgcctgatttagtgttgctaatggatgaatcgcaccgttatcgtgccgatgccggtatgcgtgcactcaatgagcttaatcccttgttcgctttggagcttacggcaacaccatttacagagtctagccgtggccccgtgcactttaaaaatgtggtgattgactacccattggcctgtgccatggatgatggttttgtcaaagagcctgcagtagtaactcagcgtaactttgatgccagtcagtatgacaaagacgaattggagaccattaagttaatggatggtattcgtttgcatgagcaaaccaaggtggacttaaccacttacgcgcatgaaaacgatgccaagttagttaagccctttatgttggtgattgcgcgggataccatccatgccgccgagcttttaaccaagctggaaagcgtatttgaagaacgctaccggggcaaagtgatccaagtagacagcagtaaaaaagaagaagaaactattcaggcactgctgaatgttgagcatgtcgatgagccaaccgagattgtaattcacgttaacatgctaaaagaaggttgggatgttactaacctgtacactatcgtaccgcttcgggccgctaatgccagaaccctcattgaacagtcgattggccgtggtttgcgtttaccttatggcaaacgcactggtgttgaagccgtcgacactctaagtattgtcgcgcacgataaattccaagaaattgtcgatgaagccaatgacccgaacaatccactgcgcctgaaaatgcgagtattagatcgtccagaggacgatgtaaccaagctaagtgtgcaggtgaaatctaacttagagcagcagttaacaggctcaggcgtaactacaactggtgcggatggtaaccgtgaggtacaagaacctaaggccacttataccacgccgaaccaacaaacggttgcccgcgctgcattggatgtgattaagcaatatcaaacacgcccctcagatgtgccaaccagcaaagcattgttaacggttgaggtaaaagcacagatcaccgagcaggtaaaagctcagttaactcaagagcagcgtgaactatttactgaagaatcggttgatattgaccagattgttgagcaagtggcgcagctgacggtggataacactatagatattccgcgtattattgtttccccatcaggagaagtgcgtactggatatcatccgtttgatttggatattgccgcgattaaaggtttaaaaccaatcgaccgagcgctgattcaacagagtttgcaagacaatcaccaaactattcgtggggaaggggactcgggtaactacgaacctgtgaagcagaactatattttaaagaagctgttcgactacgacgatattccttatgacgaacaagctgagctattgtatgacttggcaactcaggcagttaagacactgatggctgaaaacgaaggtgatgtggttgaaaatattctgcaaaaccaaagtgataaaattgcgaaattaattcatgctcaattgaacaaccatttctttgaagaagcgactgagtacgttgtagatgtgcgcagtggctttagcaccctgcgtgattgtgcttataccatagcgcaagaccaaccgttgcaaaattaccgtgacacagtgcgcgatgtcagtcgcattaaacaaatgctttttgatggttttagccgttgtttatacccattgcaaaagtttgattcagacactgaacgccgttttgcggtgatcttggaacgtgactgtgagaagtggttcaaacctgccaaaggccaattcaagatgtactacaagcgtggcagtgaacatcctgaatacgtgcccgactttgttgccgaaagcaccgactatgttttgatgattgaaactaaaagtacccaacatcaaaaccaagatggcagctggaatgaggaggtgacagaaaaagcccgcagtggtatgaaatggtgtagccatgcaagtgaataccttgccctacacggtggtaaaccttggaagtacttactgatacctcacgatgcagtaaaagaatctagctctctagaacacttcagtaatcatttctgttgggtttaa

SEQ ID NO: 455102 - DNA, 171 bp, Serratia marcescens
atgatttatgcctctccgttgttcatccttgctatcgctttcctcatcttgatcatgctggtagcgattatctgggatatatcaaacgaacgtattggtgctggggtccttattgccctgatctgctgcgtgatgattatgtggaccgtggggacgtcctatagtggatag

SEQ ID NO: 455103 - DNA, 267 bp, Serratia marcescens
gtgcaaaaatttctcataagggtgattgacgaaatcaccgaagtggctggatatattattggaacgcttttgctctatgatggtgcctggcggatttttacaagttcagatgggtacctggttgggcttaaccagttaacgcaacaactggactttatcactctgcgtgtaccaaataccccagctgccggaggggttgaactgggcgtgggggtgtttgttcttctctttgcgttggtccaacgtcaaaaaaacaaagcacgttaa

SEQ ID NO: 455104 - DNA, 696 bp, Serratia marcescens
atggcgcttatccacgatgacctcccgcggtatctgttggcaccagaggtcgcggctcttctccactatgttcctaactggtcacgccatgcactgattaacctgatgtggaattgcggttgccgggtaaatgaggcgctggctctccgccggcgtgatttccggttgagtgttgatgttccttatgtggttgtcagaacagcaaagcagcggcgttctggccctggacggccggcaaagggtaaaagcgccaaccgcatcatcccactgacggatatgctattcgtcgatgagctgcggcggctgtttgccagcacggaagaagaggtcgaggtcggcgcaaacggcgcaaggtcgccactgccgatttggaatgtcagtgcgcgaacagtgcgcaactggatcaatgctgcggtgcagctggcagagcaggatggcgtcaggttcagcctgcatatatcaccgcacacgtttcgtcatagctatgctgtacacatgctgtaccaagggacgcaactgaaagttttgcagggtttaatggggcacgaaaagctggagagcaccgaggtttacactcggatttttgcgctcgatattgtcgcggagcgccaggttcaattctcaatgtcctcccaggatgcggtcgatatgctcagaggtgtagccagtcataatcttctgagtaaccacgagtag

SEQ ID NO: 455105 - DNA, 1425 bp, Serratia marcescens
atgagattgatttcactatcaacggaagagctcgaacctttccaattttcccgtatttttcatcccagttcggcacgttatgagttggagtcaaaatatctgttcggggcgtcatcgatgccctcgatcaatcgtcgctatccggtcagccgccgtgagatttccggcttgggtgtgtcgcagttccgggaagaccggcagataaaaaatcaggtgctggccgagttggattcagggcagctgcttgccattgatgacaactgttttggctggtcgccggcgcggcacctgttctttatcgaccaaaccggccggctggtgcagtacccggccattttgccgccgctctacccgacgcagcggataattcagcgctatgaggcgatggttgcccgctatcgcgtccgtccgccggcgacggtgctgccccccagctaccggccgcagcagaaagcgccggcagtcgtcgcggcggccaccgcgatggcggtgcgccgggatccgctggccgctatgcgggatatgagcaagcgcgaacgttggcagacccggcaaaatctgatcggccgcgggcagcgcagcatttaccccgatgcgcgcattgccgcgacgcgcctgggtgagaacaatatcgccgttgagtatgccaaactggcgcaaaatgtttacggcgttgacgggcaaccgattgacgcgttgggtacgatgccgaacgtacccgaagggtggcgtgatatcagtaataataaaaatgctttagaccggctggggttaaagccagagatgttgtatgacaatcctgacatgccagactttttttctagagtttatgcgccagatccgacggtgttcggtaacgctatgaagccaaccgtagtattccgggggaccaggatggagaaaatggttgattgggaaaacaacctggggcaaggcgctagtctcaattcagtttattatgagaaatcggtcactattggcaataagttgatagatttcccaggccaggtagctattgctgggcattctctggggggcggccttgcctctgcggcggccgttgccagtggtaagcccgcctggacgtttaatgccgcaggccttaatgccggcacggtggaaaagtatggcggcacggccatcggcgacggttcaaaaattgccgcctatcgggtgcatggcgaggtattaacgaagctgcaggaattccacttactggatgatttaaagagtgtgaactacgatattccgctgctgatgatgaaacggcagctctctgcgctattaccgagcgcggcgggcgccgcgaaatggctgccgggcggtgagggtagcgccattgataagcacggtatgcagcaggtgatcgacagcctggaggagcagaaagaggcggatatgaccaccattactaacaggttataa

SEQ ID NO: 455106 - DNA, 690 bp, Serratia marcescens
atgaagaaaattgaaccggaagactattttacgggccaacagctgatattggccaaggctattgaggcgggggacctgggcagggtaaaacaactggcgccggaaacagatttaaacaccccgggtgaacaggatttaaccttattattcttcgccttgaatgagacgtactacaataataatcccaaaccacgtttgcaaattgtgaccgcgctggttaaagcgggagctgatcccctgcaaccgcagtctgatgggatggccagtcctgctgaaatggttgctatgggggataaggatctctggctacaggcgctattggatggtgggttatcagcaaatgcaaaaaataaacagtggggaaccgctattatctttgacacgctaagagcaaagaacacggcaactctggctctattaatagaacgtggagtaaatatagattcccgtaactcattaggagaaacaccgttaatggcagcctttcttcgcaaccgctttgaacacgtaaactatcttctggatcatggtactgacccaaacccggtaaataaacagggctgggtatttgcttcgctggtgcaaagcagcatcaatgacagccggccggaaactgaataccaccagaactgtctgcggttgcgcgacaagatgatcgcgcggggggtgaagtggccgtcggaggcgtaa

SEQ ID NO: 455107 - DNA, 729 bp, Serratia marcescens
atgagagatcaacgtaattcttacttgctgcaagataagtcggggctgtggtttgttcgtgttcaaatccccgtttacatgcgccccctgcttgggaaccgcacggcctattataaatcgactggcacgcatgacgtgcgagaggcacggcttgttagagatagtgcagtagcagagtttaagcggttgcgtgaagctctcaagccaagcaagccagaaagcaaaatgcacgctatcttgtcagaactgagaggattaaagtctttagtcgctgaaaatccgcatatcaccgataacagcgctattgtagaacgctgccccaccctatgcaaaatccgtgatttatacctattgcaatacgcccagaccagaaagctgaccacactttccaaagtgaccaaggctgttgatgtgctgctcgatttctataagaaacgggattttgagctaaaccagattgacagaacaatggttactaaatggatcgaacatttaaaaaaccagcttgccccacaaacaataggtaactatttgtcagccctcggccaactggtggattacgccgttagccgttaccacgatgcaccaagcaagaatgttttcaaaggtcataaaatcgaggtaaaacgctcaatccagtcctatgaggcaataacacctgatgaactcaatgagatttaccctaccctgaatagtgatcctacccacgtaatgtggacacggccctaa

SEQ ID NO: 455108 - DNA, 252 bp, Serratia marcescens
atgactattgaagcgtcaatcatgacattgaccgatgcatatgtaaagcagctggacggtactggaaaacgccagcagcggatcgcgcgcggcgatatagcagcggcagacgtcgatccggatctgcgatcgttcgggcgtcatatcgtcggttgtgtccgcaagggcaaatcggtgcgggtgccgccgatgcggggcagtgaatgggggcacgttctgcgtgcgctggaattaacgcgggctttggcctga

SEQ ID NO: 455109 - DNA, 348 bp, Serratia marcescens
atgtatcagacagaaatcagcaccgaaaaccgcatggtgtgggatgcgagcactgaggcggcgtactggcagcagcgtgaacgtcaggcgcgcaccggggtggaagaaatcacgttggctgcgtttatggatgccatcgcggtgatgtatccgcgcgactggtgcggcgacgtcgaatgtgagtcgttcaaattggccgacatgtattgcggcgaagtgaccacgatttacgccaaggtcaaggaacgctatttcaagtttcgcgacgttgtctcgttaccgcataccgccattctggcacgcatcgataaggaggtattaagccgggaacagcaagcccttaaatga

SEQ ID NO: 455110 - DNA, 420 bp, Serratia marcescens
atgaaaactcagagcatcaacgccgcagctacaggatctgcagaagattgggaggtcaaagcctgccgttttcaaacgcggctgatcgggcgttacagcgtcagatttgtctcgtcggtcgccggtactgacgtgatagtgaactgtcggcatatcaccaatgcgtataacgcgtttgatgctgtcgcgcgatttgtacgtgagaccaaaaatgcagactgcaaggtgtacggggtggacgaacttgaacccgcgtgcattgtgtgcctgagcaatacggggtatcgccttgtacaacgaggctatatctggctgtgtctcgataccggcgtgattgtagaagtggcagaaaacggcaccatgcgccgcggcgatgatggccgtctcctgccagcttacggaacgttagcacgtctttaa

SEQ ID NO: 455111 - DNA, 423 bp, Serratia marcescens
atgaacacacaaaacgtcaacgtcaaaaccgccgctcaggaacgctcggaaagatatgggtggacggaagcccatggttgggggctgtcgccagctgaacgcattgctgaacaacagggctatctgaacgagctgcgctactttaacgatcagtggaagccggaacgcgcgcagcggctgatggaattgctgatggccatcgccgataacgtgctggactcggtgacgaactggaaggatgtaggggcttttggtgataagcctcggatcccttacaggattatgcgcggctggttggacgcgatggcgttggcaccaatgatatgcggggaaatgggcaccaatgccgtggcgtatgtcctcgaaaaattggcggggaaatttgagtttgaatgcgcgatggctcggatggatcgcccataa

SEQ ID NO: 455112 - DNA, 468 bp, Serratia marcescens
atgcagcttaacggttgtgtccaaagtgatgcaaaagaacaggatttagtacaccagttccttggttatcaagtggccctgtctgacttgtttgcgctggcgcgtcatgcgatagaaaaacaagtaaacgaacgtaatcttggtttttttgagcaggaagttagcaaactagatacatgggccgatgatttaaaagaagggattgagcaatcaattaaagaactcgataagcagatcaaacaagttcgccgagaagccaaaatagtggcatctctggaagagaagctgagtttacagaaacagcaacgacaactcgaaagcctacgtaacaaaagtaggcgagagctttttgatcgacaagatgaggtagacgaacgtcgtgagtctttgattgaaaccttagaacggaagcttaataagaaaactgacgtggaaacgctatttacgatcagttggcaattaatataa

SEQ ID NO: 455113 - DNA, 186 bp, Serratia marcescens
atgaatatcttcatcaaagttctcaagcaaaagttgctgggtttcacgcatcttttgattgatttcggtttcaagatctttttgaagttgatcaaaagccgcttcaatctcagcagggtggcgacaagtttcgtaaatgtgttggatgcgtttttcgaagtcaatgccggattcgatgctacctaa

SEQ ID NO: 455114 - DNA, 318 bp, Serratia marcescens
atgaaatattttattgatgaatgtggtcattgccgcgttaaaacagaaaaagaacaccgcctcatatctttatttttagaagaagatattaaaagtagtttatatggtgtcaacgagtatatttctgcatgtgaatccgtcaataatggttatattcctgagtggaaaggaacaggcaatgctcatactattaccatcaaacaggatggcgtcgaaatttttaacgagtacacagaagagagcttaacgattccaacaatagaaaagttcaaaggctatcttgaaaagtggaaagaattaattctgagtaaagagtga

SEQ ID NO: 455115 - DNA, 453 bp, Serratia marcescens
atgattgaagtaaagtcttatataaagtcaaaagaagattacataaacatattagaattcagtggtgaaataaaagactgcaactatatcgaaggcgctttggaattaaccataaacaatgttaatttgatcaaccttgaaatgtgggattacattgatcagttatgggcttatttgtcagaaggattggatgccatatctaaaaacaatgagttcaatacttattttccagaccaaccgatagaggttaaattaaaacccataaaggacaatgtacttatcagtgtaaaatgcaactcaaaagtaacaacattgaccaacaagaatgagtttgtatctgcaatgtcaaaacatgctttggatttttttgaaagattatcaacaataaaaggcattgagaaagatcattataaatatgagattgaaaacttaagaaaaatccacaataaataa

SEQ ID NO: 455116 - DNA, 1503 bp, Serratia marcescens
atgaaaaacattagcgagctaataatcccgtccgttgatgccattgattatacatcatcggaaaggcagaacttctttagagagtcatacctatcgacaagcttctctgataaggcttgcgaagaaaactgttattactttgttggtgagaaaggaactgggaagacagctctggcttttcatatacaaaatgatgaacctaatgacatcaatgcaaaattgctaccaatttccgaggctcaatacacgagatttatcaacttaaaaacctccgggaaattagcatatactgactacccgatcatttggcgagctacaatactgtatttaatctgcaagctaataattgagaaaagaaagaggtggtatcacagattaacaaaaaaattcaatatgcttgaatcagcaataacaacctatgacaaagatgcgcacattccagaattagaatatgttatagagtttgccacatcattaactgaaggaggtaaaatatcagcgaatctcccagaagcctttaaacttgcattagaatcaagtgaaacaaactcagttaaaacgacccagacatcgataaaagcctcactacttgagtgcgagaaagttcttaaaaatagtctttatgaactaaaattaaacaaacaagtagttttatttctagatggtattgatgcaaagcccggtgatgttgagtttatagaatatcaaaagtgtattgctgggttggctgaagcagcttggagtttaaataaagattttttctcaaatttaaaatactccactaagaagccaagggttgttttgttgctacgtccagatgtatttgactcattaaacctgcacaattcaaattgtaagctgactgataactctgtgatttttgactggggctcttcaaagcttgggtataaacaatctgacctttataagatgtcagataaatactttaattcgcaaaataatagtaaaaatggttgggaagactatttccaagactccactttaccgaataaaaataaatcatacagaaaactactgagaatatcataccaaaggcctcgggatattttttctgcaataaaaatcctgatttggttatacaaaaagaacggaaagaacggatctgaactattcaccggacaagacattcatagccccgagttcactaaactttattcacaatatcttcttggtgaagtgaaaaattattcaaattattacatatcaaacaatcaatttgatgttctaatttctttcttccaatattttgatggtaagagtaacttcacagaagatgagtttgaagatgcatatgacaaatttagtgcaaaacttagttatagagaaagaatagcggaggaaaataataatttttatcattggtcttatcgtgaaagaaatgcaatgaacgtaatgcctaagattaaaaagggttgtacatatataatacacccaggaatagcaaaagcattagatataggaaaacaaaccatcaaagcatag

SEQ ID NO: 455117 - DNA, 156 bp, Serratia marcescens
atgaagttttctgatatctgggacgacatgctgcacgttacccaggagaaaaccggttcacgtctggctatcccgctggatctgacctgtggagcgatcaatatttcactgagggaagtcgtggctaaatgtcgtgatgcggtactaagccagtaa

SEQ ID NO: 455118 - DNA, 300 bp, Serratia marcescens; identical to SEQ ID NO: 455065

SEQ ID NO: 455119 - DNA, 300 bp, Serratia marcescens; identical to SEQ ID NO: 455065

SEQ ID NO: 455120 - DNA, 1323 bp, Serratia marcescens
atggaactttcacaagccctcggcattattaatcttactgcacccgatgaagttcagagccttgccgagcttcttcccccagagctcatccagcaggcgtttgccctcaccgatacggtgactctgcgtaaacgtaaacttcctctggaatccatggtctggctggttatcggcatggccatgttcaacaataaacccctctctcatatcgtcaatctgatggatatcgctgaccgcaccggcaggtcatttacggcccccagttctgttatcgcacgccgcaaaaaattgggggaagatgccatccgagaactgtttaacctcacgcaacagtactggcacgaggaagcccggcatccactctggcacggcctgacgctgaacgccgtcgatggtgttgtctggcgaacaccggacacaccagaaaatgcagccgccttcgcgaaagcagaaaaccagtatggtgaaaaagggtatccgcaggtccgcatggtatgtctgatggaactgagcagccatctgctgcgtgcgagcattatggaccggtatgacatcagtgagatgcgtctggcagcaaagctggtggagcaggtgccggataacagtgtgacgctgttcgacaggggcttctggtcactgggtctgttgcacgactggcatcgtgctggagaaaatcgtcactggttgctgccgctgaagaaaggcacccagtatgaggtggtacgcaggctggggaaacaggatgaactgataacgttgaaaacctctccacaggccagaaagcagtgggcggaactgccggatacgctcaccgtccggttaatcagacgcaaggttaacggtgtggagcgtcaggttgtcacctcgatgacggatgcaatgcgctacccggcgggagacgttgccgaactgtataaacatcgttgggaaatagaactgggttaccgtgaggtgaagcaatatctgtgcggaaaccgctggacactgagaagcaagttaccggagatggtgagacaggagctgtgggggatactgctgacgtataacctggtgcggtatcagatggtaaaaatggcgttcagcctgaaaggaggctatctgccgtatcagctgagcttcagtggttcagtgacagaaatactgcggctgctcatcgggctgccatggtcatcaccgggcgcagtgccgggtcacctgaagcacttttacagtcatgcagcgatgctgaaactgccgccgaggcgagaacgagagtatgaaagagaagtcaggccgaaaaagccaaaatatcccttaaaaaacaatgccggtcaccttaagtga

SEQ ID NO: 455121 - DNA, 135 bp, Serratia marcescens
atgcaacggaatgccattattgagccgtgttttgacagtctggaagctaatatcaaactctcgacaaagcgcaaatcggcttctacggggttttattaccttacctatgcaatgggcattccctaccatatttaa

SEQ ID NO: 455122 - DNA, 321 bp, Serratia marcescens
gtgggtgaagaacgcaagaacatcaatcataatacgcatatagttttatatgatgaggtaagtggtctttgcccaaaatgctttaaacctttaatggttcagaatggcaaacgaaaaataaagctctatgaagtagcacacatatatccattttcccctcgtgaagaggaaaaggaattacttaaagatgagcaacttctttgcgatgatgttgatagcgaagataatttaattgccttgtgcagagactgtcataagttgttcgacaacccaagaacgattgagggttatcgggaaatgtacgctatcaaaaagcagtag

SEQ ID NO: 455123 - DNA, 1035 bp, Serratia marcescens
atggcggcaaaaaaagtgacgctggcggagatcgccaggcaagcgcaggtggggatcgccacggttgaccgggtgttgaacaaccgggcgccggtgagaccgggtacggaacgtaaggtgctggagaccgcccggcggctgggctttaatctggagcaatcccattaccgactggtggccggcaagtcagcggtcagcctgaaaatgggttttattctgctgcgcgaatcgcactctttttatcacctgctgagcgaggcgctgcagcagcatgcggcaccttaccatcactcacaacaggcgccgatatttatccatcacgatattaacgccattgaacataccgtggcggccattgagcagctcagtgaacaggtggatgtcatcggcctggtcgcgctggataacccgctgattcgccatgctgtggagcaggcggtcgccagaggggtacaggttttcacgctgttttcggatctgtccgcaccagggcggacgggctatatcggcatggacaaccaaaaaatggggcgtaccgccgcctgggccattgaccgtatgagccggcccgacggcgacatcgggattatcattggtgataaccggtttatgtgtcaggagacctgtgagatcagctttcgctcctatctgcgggagcagggtaaagggcgaagggtactggagccggtgctgggccatgagcaacagcagcaggcgtttgccgtcacggaacgcctgctgcagcagtaccccgcgctgacggctctctatgcgccgtgcggcggcgtggaaggcatcatcgacgcgctgcgccaatacggcaggcagcaggaggtgatgctggtctgccatggcccggttcagggcggcgaactggcgctgatcgacggcagcgtggatgtgatgctgtcgcagcggctggatgcgttggcggcggcggtgatccgcaccttcgtcaatgccgcgctgcaaacaccgggcggctttatcagcgctctccagccgtttgatatcatcaccaaagaaaacctctga

SEQ ID NO: 455124 - DNA, 1149 bp, Serratia marcescens
atgcggcgcttcgcaggggcttgtcgcttcgttttcaatcgtgcgttagcgcttcagaatgagaatcatgaggctggaaataagtatattccttacacaaaaatggcttcatggctcattgagtggaaatcacgctctgatacccaatggctaaaagacgcgccatcacagccgttgcagcagtcactgaaagatctggagcgcggctacaaaaatttcttccagaagcgtgctgcattccctcgtttcaagaaacgcggccaaaacgatgcattccgctatccgcaaggcgtgaagatcgatcaggccaacaatcgtatatcgcttccaaagttgggatgggtacgctatcgcaatagccgtgaagtcatcggcgaagtgaaaaacgtcacggtcagcctgtcatgcggcaaatggtacgtcagtatccagacggaatacgaagcggctgaacctgttcacaacgcagagtcaatgatcgggctggatgccggagtcacgaaactcgccacgctttcagatggtacgatatacgcccccgtaaacagttttaaagcaaaccagcgcaagctggcgagacttcagcgtcagttaagccgaaaagtgaaattcagtgccaactggcagaaacagaagcgaaaaatccagcggctacactcacacattgccaatatccggcgcgactaccttcacaaagtcaccagtgaaatcagcaaaaaccacgcgatgatcgtcattgaggacttgaaggtcaataacatgtcgaaatcggcaaaaggcacggcagagcagcacggacgaaacgtcaaagccaaatcaggcttgaaccgctcgatactggatcagggctggtatgaaatgcgtcgccagcttgagtacaagcagctctggcgtggaggtcaggttctggcgatacctccggcatacaccagccagcgttgcgcctgctgcggtcatacagcgaaagagaaccgcctgtcacaaagcaaattcgagtgccttgagtgcggatataccgaaaatgctgatatcaacggtgcgcgtaacattttagcggcaggacatgccgtgcttgcctgtggagggatggtgcagtcaggccgcccgttgaagcaggaacccaccgaggcgagtcaggctccggtctga

SEQ ID NO: 455125 - DNA, 483 bp, Serratia marcescens
atgaagttaaaatgtacctttcatttgaataatcaatacatgtcttgtctctgtgttgatgggcttggctcctttgctgcttggtcaggccaaggcgagggacgcaacaaccctaacatgacacatgtccccagcattggcgcattgcttaacggccgctactacatcgtagaaaggccaacaggcggcaggctaggcacaatcaaagacgcttatgccaagcacatttacgggacagatagaagcctgtggtttgggctgtaccgggatgatggaaagatagatgatgtgacgttcacacaaggcgttaaacgtggcgggttccggttgcatccagtcggcccccgtgggatctctgagggctgcataacgctgttcaatccgagggagtttaatgttctccggtggcgtatccttaactctcctacgttcaaaatccccggttccaaccttcgggcttatggtgaggtcagagtcatatga

SEQ ID NO: 455126 - DNA, 201 bp, Serratia marcescens
atgttaaataaaatatctgctattctaagtttaccgttaaccctgttgtgtgtgtcgctctcatcaatgacaattatgggagaacacaactcgctggttgatgttttcctgtcggtgattgttttttttggttttcttaatctattccggatagcaggaaagttgatcgcctggtttaatgggaacgctaaccaggcatag

SEQ ID NO: 455127 - DNA, 1005 bp, Serratia marcescens
atggttgatatggtaaaaaaatatttccctgtattggtggtattttctacattatacggctctttattgttgtttaattattgcgtggattacagcgtcccattcataaatgtctacactgcaaattacatgctggtttttggtatattgtcccttgtaattattatgtccgttttagttttacctatcacattgactttcactggggaatttcttgcggagaaagaacatgatcgtttggtaagtggtttgacacagtgtattttccgagataaagaattgctggtgtatttttttattaaaatatttcaattctcatcattcggattatgtttgtactttgactctttgccagtttatttttattcttcgattgtctttgtcttaagcgtagttgcggccattattacctttaaagattttaaaggggagaggctcaggtctgttgtttcatttttgttctattatacgatggatactctgatatgtttttctattctaattactatttaccttctttttcctacggaaatcaaaagcattaataatgtattgaaggcattggtcgtggtggcggtctttatcgctttatctatgtcttctggcccatttaaagggaagggcgctgttaaaacaaaaaatatcatgaaaaagaacagacatgctgttagaagtatggttattgtccttatcgtggcggaaggtatatttgctagcccttttttgatgtcagattttattgcgccgagggtatcctctgtcatagggtttggtaatttaaatgagtgtttttatgccaaggatttgacgaagtatgacataccgcaggatatggtgtctcaaaccattcgaatcgatatcgtgaagttatctattgtggcaagaataggtggtgaatactatatcacaactcgattgggcgagaaggcgggctttaagtttgaagcagacaaactaacagaggttgcgtgtcctatggggcttgtaaaaaaatcattgatatga

SEQ ID NO: 455128 - DNA, 279 bp, Serratia marcescens; identical to SEQ ID NO: 454605

SEQ ID NO: 455129 - DNA, 1029 bp, Serratia marcescens
atggccttacctccccgtcaacggattgaacctggttactgcgttgttgaaacccctggttcgctcacttcgcaggcaaacatgctgttcagaaacccaaacagcgaagccgcccgctattacctgcagcttaatgccgatactccatgggtgaagccgggacatattctgatcgttgccgatccgcacaacccccaccagggcccagccctacaccatttacgccgggccaaaaaccaggtgaataaagcgatggcgcaggtggatgccgaacaagcgacatttctgcagcgcaattacgacactctcgccaccatacttaatggcagcagcaccggattaggcatcgccagtgattcagggaaacgctactttgaacgaattgatgaaatattgcgaaaagtagaagctacgtatcagaaccagttccgcacccaaggtacgctaattggtcagcagttttttgtcgaacggaatcgcctgtttggggagctcaaagtgatgctggataaacctgtattcagccgactaacgcgtaaaatcctgaatctgcgtccgtatgacagcatcaaaagcgccctgaatttgtcaagccgctcaatcgtccatgagtggtctacggttggggtgggcgcgattagaggttattcgacttatctggatggaaccagcagagccattaaatttatgaagaatgctggatgggtgggtttggcaatatcagcgaccagcacgaccaatgacgtgtatcatgcctgttccactggacgtgaaagcgaatgtacccgagtcgctatacaggattattcaaaattctctcttggtaccgctggagggattgggggtggaatggccggctcgtgggctgttggtgggatttgcgttgctgctggtattgcgacaggggggacggcagcattagcgtgcgcgatcgtcggaagcggccttggagcatatggaggggccgctgcgggtgaagccctcggccagaaagcgggcagtttaatggccgatattttagtgaaataa

SEQ ID NO: 455130 - DNA, 1038 bp, Serratia marcescens
atggccttacctccccgtcaacggattgaacctggttactgcgttgttgaaacccctggttcgctcacttcgcaggcaaacatgctgttcagaaacccaaacagcgaagccgcccgctattacctgcagcttaatgccgatactccatgggtgaagccgggacatattctgatcgttgccgatccgcacaacccccaccaaggcccagccctacaccatttacgccgggccaaaaaccaggtgaataaagcgatggcgcaggtggatgccgaacaagcgacatttctgcagcgcaattacgacactctcgccaccatacttaatggcagcagcaccggattaggcatcgccagtgattcagggaaacgctactttgaacgaattgatgaaatattgcgaaaagtagaagctacgtatcagaaccagttccgcacccaaggtacgctaattggtcagcagttttttgtcgaacggaatcgcctgtttggggagctcaaagtgatgctggataaacctgtattcagccgactaacgcgtaaaatcctgaatctgcgtccgtatgacagcatcaaaagcgccctgaatttgtcaagccgctcaatcgtccatgagtggtctacggttggggtgggcgcgattagaggttattcgacttatctggatggaaccagcagagccattaaatttatgaagaatgctggatgggtgggtttggcaatatcagcgaccagcacgaccaatgacgtgtatcatgcctgtacaaccggccgcgagaatgaatgcggtcatgttgccttcaaagaatacggcgcctttgttggcggagtaggattaggttcagctggaggtacctggggagctctggctgggggtggagtttgtgttgccttaggaattatcagtgcccctatggccggtagtgccggcgtagcatgtgccatcataggcagtggtattggagcatacgctgggaccaccgcaggtgaagctattggtagaggtgtaggacgcggtatggccgatatcttgtttaagtaa

SEQ ID NO: 455131 - DNA, 414 bp, Serratia marcescens
ttgaatgataacatatctaattaccttgagaatatgtattcagaatttaatattgaggttaaagagtatattatccccttcccattcaatgaggtaaacatagcatatatacttgatggtacgctgagaatatccacaacacaggagggggggattattggcgtgggatgcaatgaaaattacaaggggagatacaacaacaccttatacccaggtattacaatgggggagcttatcgcattgacaaccagccaacgaatattaaatgggacgataattgttaatgataactatggtatgtcttttaccttaccatcgccttatgatgaaatagccgactacatagagcatatcccctacgatgtaaagctcaatgaaatttatatttcagactattcagactgggctgcataa

SEQ ID NO: 455132 - DNA, 822 bp, Serratia marcescens
atggtcggcgagcacagtcccgaccagccgcagcgcagcatccagtatctgtacaaggaagacagctacgagccgctggcccgcgtcgaccgccacggcgacagcagcgaggtgtactggtaccacagcgaactcaacggcctgccggagcgcatgaccgacgcgcagggtaaagtcgtctggcacggccgtttctccgcctggggcgccaccgacgccgagagaggcaccctcgccacggcgcagaacctgcgctatcagggccagtacctggacagggaaaccgggcttcactacaatctgttccgctactacgatccgaactgcggcaggtttacccagtcagatccgattgggttggcgggtggggagaatacctacgcgtataccccggatccgattagctgggtggatccgttggggttgaagtgtggcccatctaaaggatttaatcgaagaaatagtattaccaagcgttggactggtcgtttgacaggtaataaaccagaggatgttcatggctatttaacctcaaaaggatggactgcaaccagaccgcaagcgagtaacgatagggctattcagcatattgtttatgtcaaaaaaacaaagtcagggacaacttataaattagactatcatcctggaggctctccgagccaacccaatattcatgggaatgactattggaaagtttataggactacaaataaaggtgctgatgaggttttaggacgaataggacacagtgattttaaaaactacgatcttatacaagattcaccagtttatattgacggtgtattaatgaatggtggttaa

SEQ ID NO: 455133 - DNA, 609 bp, Serratia marcescens
atgaacgtgaaaaacatcctaataagtttatcatcacataatgaaaaactaaaaaaaatgataattaacctccccacaaacagtactaaaacagaaaaaaagacgctagaaacactgacaaaagtggcttttttcgcatatacaaacgacgatatagatacctccatggagatatgtgatgaactatcaaaaataaaattcaataatgattacgagtattggacctggatagagtactctttagcgttaagagctgagctagcaattaaaaaacaattagtaagcaaaaagcaagagtccataaaaaaaataaaagaagctttaaactctggtgagggtctacataagaaaataagattaaatgttcacgacagatttatgagcggtgaaggtgtaacgcttgatgaaatagaaaaaaacattaccccgcctattgagcttagttatcgactaattcacttaatgaagctaattaaaataaaagtacttggcggatcctctttgtttacagccgaaaaactaacacttgaagtaaaaaacaacttagatagaatgagagagctattaacagatgatgaagatattctgaaatcctcactcaagatataa

SEQ ID NO: 455134 - DNA, 399 bp, Serratia marcescens
atgaagaaaaaaatcaacgacaaatatgtttccatgatctggcaaacattatctgaggatccaagcattagcaattcaattctcaatttaaatatgaataacccggaagtcatatctacaattgtgaatgaaagaatctttcctggcgttaattccttcccggagttcattaaagatagaataaaaaacagcttgaaatatgcaattaacgtctacgatgaaaaaaaactaacacgtttatatgaatcagcaataccagaaatagacttacccacaaacattagtgttaaggagttttacatcaccatatggaaatctttatataacaacagtgattacttaattgaaaacgactcagaatacaaagaaatagacttctctgagctatattcaaaataa

SEQ ID NO: 455135 - DNA, 510 bp, Serratia marcescens
atgaataaattgctgttggggttgttggttatatctttggcagggtgttcggcaaagtatagtgaaagtatattggataaaccggaagagaatttagtaagagataagccaataatcattgcggagccagcaaaagggtcgtacggcagtattcagtatatagactcaggaaaaatgacagctgaagcaattaaaacagcattttctctttatgctgatacggttacaataaaatcagagtgtagagacctagtatgcttgagtaaagctataggtaccttcaatggatattatgtagtcccagagatccttcactgggaggatcgagcaacagaatggtcaggtattccagataaaatagatataaaactgtcagtttatgatggaagccagaaaagggttgcctcgacgttactgtcagggagaagtaaatggatgacgtttggcggagatcaccctcaagacttacttgctgatcctataaataactatgtgaaatcattatattaa

SEQ ID NO: 455136 - DNA, 522 bp, Serratia marcescens
atgaatattaataaagatgaagatactcttgttataataaagaacaaaggcaagctctattggtttgctgcttttaaagaaatgtgggtattggatagaataaagtggatcagtgattttatacagcatggaatagagaatgttagtcttgatgatcataaggaaaggtatgatatagccatagtagatgaatctaatgtggttgattttattcgcttgttaagaagtgatggatatctttttgataaaacagacatagctaatgagttttataaacgtatttctttagaaaccacatggtgggatgtatacgacttgcttccagatctattcattgattttgactctagaaaactttattcagaatatgttgaaggtatacattatgaacaatatgtcccagatggatggggcggtgagttagtggatttttgtaataatggtacacttccagataatgaaatgttttggattaaaaatggaattgattacagaaaagaaattatatcaaaaggaaattaa

SEQ ID NO: 455137 - DNA, 675 bp, Serratia marcescens
atgcggctgaccgacgtacagggcgagctggtgtggtcggaacaatgcggggtctggggtgagccgggggtggtgcatgcagaccgggtggccaacccgttgcgcttccaggggcagtactttgatgcggaaacggggctgcactataaccgctaccgctactacgatccgcagaccgggagctatatccgtcaggagccgatagggctggcggggggactgaatttatatcagtatgcgcctaatccgctgacatggatcgatccactggggctgagttgtggtagtacgactgagtcagtattcagggttcaggggggaattccaccgaatgctagccgtaacagaataactttgaatgctgctaacagtcctaaaattcagcgtggaacattaaatatcagccttggagatagttcccatgcccaacattttcttgatataagaggtggtggcgcgcaagtagttagtttcaaagtaccaaagtggatggcggatttcatcgaggagagcgctataccacaggctggttatcgtactaatccactgaaccaagggggattggcgccaaaacgagttgatccgacaacgcctggcagatcttatgaattgcctccgatatgggcggagtggctggaagaggttgctatacctggttccggggcgattaaatag

SEQ ID NO: 455138 - DNA, 360 bp, Serratia marcescens
atgttcgatgattttttagataatgaagaaacatacaggcgacttgaaagtttttgggaagagcttttttggggtatcattgacaactataagttacatcatgatcattggcaggttccctattacaatacttttttttctaatggaaaaaaattcatggatggtaatcctattttttccgcgaaaaataaaataaacaataaatcaataagagtcattcaagaagatagtgacggtggtaatgaggttatctcaagggttgataataaagataagaatgagttggtattaatctgtactctaaaagactctaacattacggaaataaaagagatgatctcatcttgggttatcgattga

SEQ ID NO: 455139 - DNA, 1662 bp, Serratia marcescens
ttgaccgtctggcatgagtacgcagaagcgataagaaacggtgaaattccagcatgtgagcggctaaaacaggccgtaaaccgctacttttccgacctgagcaaccccatctacgtgttcgatacggatacggtagagcgttttgtcgctttttctcgcctctgcccccatgtcaaaggcccgttgcgtggtcagccgatagagcttgagccgtggcagcaatttgcttttgccaacctgctgggcttcaagaacgtggccactggtcaccggaagtacaaaagcgcttatgtgcaggtgccgcgtaaaaactcgaaatcaacaatggcagcgatcctttgtaattggtttgtgttgatggagaaaggccaacacgatgtttttaccgctgctgttagtcaggatcaggcaagggaggtttttgatgccgcccgccaaatgtgccttatttcaaagccattgaaaaaacgcctgaagatccagcagcacaaaattatttacccaaaatccaataaccttatgaggccattagcatcaaaggccaacacgattgaaggtaaaaaccccagcttggcggtggtcgatgaatatcacctccatcctgataattcggtttattcatccttaaagctgggtaccggtgcacggccagagcctatcttatttgcgatcaccacggctggaagtaataccgtatcggcctgcaagcagcattacgattactgttgtgagattttggctggtcaggaaaacgatgagtctttgtttgttctgatctatgagctggatgatgaaagcgaagtcgatgagcctgaaaaatggatcaaggccaacccgaatctggaggtttcactctacatcgagggtttggagggcgatattcagcaagcccgtggcattccctctcagtgggtagagatgctgacaaagcgctttaacatctggtgccaaggggaaacaccgtggatgggggaaggtgcttggaaagcctgcaaggcggaatacacggaatctgacctcgaagggctggcctgttatgccgggctggatttgtcctctaccagtgatattaccagcgtgtgctacaccttcccgattgagcgcggtgtgcgcctactgacgcgccactacatccctgaagcccaattgcataaccccgccaacaaaaaccgcgccttgtaccgccagtgggtaaaactgggctggttgcgcaccacgccgggcgattgcattgactacgaccgcatccgcgatgatgtgcttgccgataccgagcgtttcagtattgagctggtgggctttgacacctggaacgccacacacctgcgcacccagttacagggggctggacttgatgtggagccgttcccgcaaacctttatgaagttcagcccggtggcgaaatcggcggaagtgtttgttaaccgcaaggtgattgagcacaacggcgatccggtactggcctgggcgatggctaacgtggtgatggaaaccgacgccaacgccaacatcaaaccgaacaagaagaaggccgccaacaagatagacccagcaatcgccttcctcatgagctttggtacttatcagctccagcatgaagaatttgcattcgacatgagcgacgagcagcaacagcgccttgcggcgttcgacggtatttaa

SEQ ID NO: 455140 - DNA, 297 bp, Serratia marcescens
atgggtgagccattaatcacgttggaagaagcaaaagaacactgcagagttgatggtgattgggatgatgcagccttaaaaatgtatatcgccgcggccttagaggcttgccaaacgcatattggcaagcgtttcgatgaggggttgatatttccccccgccataaagatcgggtgcctgatgtatgtgtgtcagatgtatgaaatccgaacgatggtgagtgaggctgcagtaacagaagtcccattcaccatatctaatttatggaatgtctaccgtgatccgggagtgtactaa

SEQ ID NO: 455141 - DNA, 738 bp, Serratia marcescens
atggaagataaagtttacacaaacaacatagcaaggcggtcgtttagagacgtagcagatcaggattacatagctgctagagtttgctatagatatggattaacactgcaatttttatggatggctcagcaatccattgaaaaatacttaaaagcgatacttatatttaacaatcaagataccaataaactaaatcatgacttattggcatcattaaataaattatcagaaatacctggcatggaattagatttaagcgatgacgtacaagaatttataaaatatataaaccaacaaggcccaaacagataccttgaaaaagaattgtatactttagggaatgaactattaagacttgatagatgcgtatgggaaataaggagatactgcaagcctcttgattattcaatcaagacgagtgaaggggaagtgataaatttatatgaaaaagaaataaaattaattcacaaatggaaacattataaaaacaaacatttatttagaataagtgacggacacttagaaaaaattcttgacagcaaaaacaaaagggatgataaacaaaaagaaataataatttggaagaatttttactatggtaaaataaaaaagaacacaatacagtgggcccggtcatcacggtcaataacaccgactcacattctttacccagaagcaactgatgccattgctaagttagttagattaaccggacaaaaaaagaataaaaaaaagtaa

SEQ ID NO: 455142 - DNA, 267 bp, Serratia marcescens
atgagtgagaaattaaagtctgatattgaacgttcaacacgtattttaaaagagattaaagagcaccaagattattatggcatccatgatctagacacaatgagcataaccgattatcggcgggcccttgatgagggcgcattattctggatcgatcatcatgagcatgtacgtagcacattctcagaggaaattttggctactaatcgcgaacaactggatgtaatgattgagcaccttaaaaaattcagagaaaagatgccttga

SEQ ID NO: 455143 - DNA, 267 bp, Serratia marcescens
atggttagagctaaagaacgaaaaacgggcatcgaaattctggacatgcatccggccttgcccggcatcaaggtgagggtggtaaaccgcaaaaccaaagaagttgtcgctgaacatgatgtgatcagctatgtcgatgtcaactattttcacatttatagcgatgccccaataacgcgactaatgccatgtgttaaggtcaatggcgaagcggtgccttttgaagcacctgcaggacacgatttagtgactgtattttttaattga

SEQ ID NO: 455144 - DNA, 1737 bp, Serratia marcescens
atgagccgggcacagaaaagccgtgtgagccactggccagatgcactattttcctgtgtctaccgctgggtgaatggtaagcctgtagagagagaagaagctgaggccgctcagttgagttcgccggctgaaactcctgtcggcaacttggctttaaaaatgcgctctctggccattggtaatgtaacgcctgaatggctgaccgataacgggtttctttctgccaggtcgccagatttagctagggagaaacgagaagcagtggtgttggagtttattagccgccctgagctggtcgcagtgctgtccgattccgagagggtgaatcgtatttttaatgcggtgccgccagcagtcgaaccatcagtgactcctgcattaaatcaaatgggggccagtcagaggggagaagtactgctggctcgctatgatggagcattggcgatacatggtgactctgacaccgttcatcattatgacggggtgatctggaagcctgtaccagataaagatctgcagcgggaaatggctgcaattttcattgagtctgagatttcctattcacagaacggtatcaaatcagccgtagatacgatgaaactcagtttgccgttgatgggcggtaccgcccgtaacttgattgggttcaataatggcgtgtttgacaccaaggtcgggcagttccggccacatcggcgcgacgattggttacttatcgccagtaatgttgagtttagccaggcacaggagggagaaacgctggagagccatgcgcccaacttctggaaatggcttacacgctcaacaggtggtaatgctcgtaaagccgatcgggtactgtcggcgctatatatggtgatggctaaccgttatgactggcaattgttccttgagataaccggacccggtggtagtggtaaaagcgttctggcggagatttgcaccatgcttgctggtaaggctaacactgtatcggccagtatggcggcgttggagaatccgcgagagcgcgcactggtggtggggtactcactgatcatcatgccggatatgtcacgctatgcaggtgatggagcaggtattaaggccattaccggcggtgacaaggtggcgatagacccaaaacataaggcgccttattcgacccgtataccggcggtgattctggctgtgaataacaatgctatgagctttagcgaccgcagtggtgggatcagtcggcgacgggttatcttcaactttgccgaggtagtaccggagaacgatcgtgatccgcttctatcggagaaaatagagggcgagcttgccgttatcatccgtcacctgctggcgcgattctctgaccagagcgaagccaagcgcctattgtttgagcagcagaaatccgaggaagcattagcgattaaacgtgagggagattcgctggtggacttctgcggctatctgatggcgtctgtgcagtgtgatggcatgtttgtaggtaatgctgagatcatgccgtttagcccccgttcttatctttaccatgcatatctggcgtatatgcggggtaatggattgagtaagccaatatctgttatgcgattcggtacggatatgccaggggcaatggcggagtatggcgctgaatatttgcgtaagaagaccaagcgaggaatacgtaccaatatcaatttgcgtcaggatgcggacgattggatgccttcggctgtaggtgccatagagggtaaaaattga

SEQ ID NO: 455145 - DNA, 366 bp, Serratia marcescens
atgataagtaccgtgaaatttaatgaactcacctcccgcgttaatcagctggtggcacgcatcaatgaattggaaggccaactcaaatcactggctgcaactcaggggggagagatccccccagagatgtgcactatcacagtattggcggccgagtttggtatatcgaccaagaaagccgaggaactggcccgtaactgtggggtgatgcttgttaagcatggtggcagctatatcgtgcatgagactaagttccgggaagctgcgctgatcgttattcgcggcgcaaagcgtaaatacggtagcaaatattggtaccacccgttgatcggtaaattcatcatgacaaagggagcactggtatga

SEQ ID NO: 455146 - DNA, 306 bp, Serratia marcescens
atgatgaatgacatctataacgccttgctcaacttcgaattagagaagaaatcagatgaggatctgagggagtacagcaattcatgcagcgatgccactcatgggattttctgtgcgttacgcctgattggaaatctgaccgtaatggcaaattccaacgaggattacgatgccgaggatgctaaaagagatctttatttagtgggggctgtactacagcatttgcctagaatagctgaggcattggaacagaatagcagtagtgcggatttcgttttgaggcaacgtaaagaggtggggaaatga

SEQ ID NO: 455147 - DNA, 192 bp, Serratia marcescens
atgcgtgagccaatatcacttgatgccgccgcacatcgtgccgggctgaatgtttctctctttgaagtcattttagatatggcagcaaaagaatctgttacggctgtcctgtatgacctgatcagtattgcttgcgaaaccaatagcgagatccatcgctccctcgataagggggttggcaatgatgaatga

SEQ ID NO: 455148 - DNA, 1248 bp, Serratia marcescens
atgacgcataaaacaaaggcggccatgccgggccgcccatgtaactacacaaaattgaagcaattccagcatatcacgctggtggaactggtcaacaatgctgctggctccccagaaaggggttcagacatggggggatcaactatctctacagatctgcagggtttgtcgggggtatatccaaaatctgttacaccccatacatacggggtatacgaggtttcccgtacaccctatcagccttctgaacaggagccttattcttgcttaccaccgaaaattttttcgcatacgggacggaaaatatcaccttcgttatcactacataaaacggatgacggtgaacatgaccgagcaataagcacaataattacgactaaaagtaataagatccatttattcatttttaatccttatggctcaatgccacgttgttgcagctccttgcggatgatgcgttttatccaggcagatacagaggcatcaccatcctgggccagagcttgcttgatcccctcttccaagcttggctctacacgtaatgcgatctgtttgttgcccttacctttgatttctatggttgacatttggttgacacctgattaccttgaattggtaatcaagtgtatgacaagtgcataccaaaaggcaacgccccggagtgcggcaacactgccgaggcgtctaaccaccacgttagagggactaacgctatggctacgtcaaagtgtacctacatctttgcggcgatcaaccgcacccagaagaaagttaaacccgtcatgctgcgtattacggcgactgatgagcaatcagcacgccagcgttatgctgctgattatgtcctggtatttgctggccgcttgccgctgctgggaggttcccatgtctaacctgatagaaagaaccccgctcacccctgatgaattggcgtttcaatgtttggcgttgactcatgccgctttattttcagatgagcctgctgtcaaagaatcactgctgttcgttctcttggaaaaggttgatgcgctctatgatatgttgccggaaatttgtcctgcttgcagcacacagccagcggtaggagatttctatacccaaaatgattgcggcatgacggctatcgttagaacgatttcagatggtcgtgtggtgttctcctacgagcaatatccagaggcccgccatgattacccgcttgatgggtttattcgcggctttactcgccaggaggtgcatcatgcgtga

SEQ ID NO: 455149 - DNA, 216 bp, Serratia marcescens
atgaacaatcaatccttcaccactgaacgtactattcgcgaaccggaatgccggagaattaccggcttatgccgcaccactcgatacttaatggaaaaagaagggaagttcccagcgcgccgaaaactcggtggccgtgctattggatggctgctttctgaaattaatgagtggcaaaataatcagccaaaggtaactaccgataaagcggcgtga

SEQ ID NO: 455150 - DNA, 951 bp, Serratia marcescens
atgaaattaccagaacgattatactatactttggataaagcggctaaagagctcggctgtgatatctctgacgtcatacattatggggctaatggatacttgaatctatgcgtaaaagtatattattcaccacgagggattgaagaggttagtgaagattggtctgcaaatttgttagttaacgaaaaacatcttaatagcatagttaaagagtattatgctcctttcaaaaaattcgaaaaaacagaagctggtagctatgttgcagaggacgagaccaattttgattttgtgaattcctatacgcgtatgcaagggaatatccatttttgggttgataaaataactaatgatgtctgtgattacactacttctctatatggtatctatgggcttctccagcttagcgatagggatatctatattaatgaagaacgtcttttgaatggcaatagcttcaaagcaagaagtttttctattcccattgatgaaacacattctttagcaggtggatatttcaaaaaatacgtaagtgaatttgcacatgaaggttgggtttcagactatattgataaagactctcatgatcttagggaacaaacaattgagaatattatctctaaagatggtgatccaataactgtgaatgttaataatatttacatcacgtgcgatgagataaaaagaataaaagatgggaaggaaaatccttacgttttttctagtgagcctaatgttgaatcggcaaaaacaattgcaaaaaaaggcgagatgatatcttgtcttttaggtatgattcctgagttttcaaatgtaaatatagatactactcctgtatctaagattaaagagattgtagaggctttggctgcagagaagggggttgatttcccagacactcacacccaaacatgggcaaggtatttaggtcgcatgaggaaggttaaatga

SEQ ID NO: 455151 - DNA, 429 bp, Serratia marcescens
gtgatagatatcacaagcggtaccaggcatcttaagttaacgccttatgaaaggttatctgagccagaggagccagactatagccgcattatggtgtgggttgaattttctgtccccgggctaaaaactgagtttgcggcagagttttttgttggtcagttggagcagttcaggaaagaggtgcatggattccagcaggctctgaaaaacggaataaaatttaaggatattgatttatcctcggcatttgagcaggtaacgctgaaatttcaccagttacactttgccggagccgttggggtcagcatggtgctgaaacctgaagaccatgctgacagcgttacgcttgaggattccttcgatattgatgagagttattttccagagctactcttaggtctggaagaaatcatttcatggcagaattga

SEQ ID NO: 455152 - DNA, 360 bp, Serratia marcescens
gtggtgattggcgacaaatgttattatcgcctgctgtgcggtattcccggtattcccagtattcccagtattcccggtattcccggtattcccggtattcccggtattcccggtattcgctgggtgtgctttattgatgcctcgctcgcggtagctgaaatagcgcgctgttttaaatctattctgcgccgccggtcttattgtatgcggctcggcgaatatcggctgaccagcgttgagacattttccgtcagaaccagaaaaatcatcggactgttgctgcaaggctgtcccccgcatgatatcgcccacgagttcggcattcaggcgaagacggtcagcctgtataaagaagcgtga

SEQ ID NO: 455153 - DNA, 756 bp, Serratia marcescens
atgcaaggatctgtataccaatcaatcactaaagttatattcatcacaatgctattaatcggatgtaaccgcgtgaatatcgaaccggcagattacttttccggtcaacagctaacgctggctaaagccattgaggccggtgataccgtttcggtagagaaattagcaataaacgccatattaaataagcctggcaatgatgatatgacgatcttgttttttgccctctcgacagcaattaataacaatggcgacgaaaaacatctatcactcattacccagctagttaaagccggcgcagatcctatgcaaaagcgtgctaaagggcaggccagccctgcggttaccgtagctaaagccgataaagccatttggctgaaagcattactggatggtgggctttccccaaacgccaaagtacgtgacgaaacgttgctatttgctgcgataaaagccgaaaaccttgatacaacccgactattactcaccgccggcgcggatatcaatgcaaaaaattcgctgggagacacccccctaatcgctgcattgcatgatatggcccttgaacatgctctctatttgctggagcaaggtgccgatcccaccatcaaaaatgacagcggctggacatttgtccaactggttaaacgcaacataagccatctcagcaagaatgctgatcctgatgtgcagcaggcttacgacaggataaaaaccacgttaatgcaggatggcgtctggccgcagcaagattaa

SEQ ID NO: 455154 - DNA, 210 bp, Serratia marcescens
atgatgcgctgtcctttctgccgcagcggtgcacatacccgcaccagccgctatttaacagaacaaaccaaagaggcctactaccagtgccagaatatcgactgctccagtacgtttaaaacacgggagagcattgaatacgtgatccgccagccactgccgctaaaccgttacggtgatcctacccacgtaatgtggacacggccctaa

SEQ ID NO: 455155 - DNA, 570 bp, Serratia marcescens
gtgaagtttgtaatgaagattaaagtttctttagttgcttttctgatgattctaatcccgattgctgttgttgcaactaacagaatagaatatcaagataaaccgacagaggacgcggctaatctggtaactaagtatacgctttctggtgatgaggaaaggggggagtatctaaaacagttggaggaaatgactgttaagcaccccgggaataacaatgtaaggaatatgtacgcaaacatattacttgctgagaaaaattaccccatggggttagaacaattaaaggtaataaataaagataaccccaaacccggttcaaagctgacagagtgtatgctgatggaaaaaacgggtgaaagtgttggtagatgctatcaggacgccgtttgtctattcgaaaaaagcaataatgacgatgataattatattctggccctttacttggctgacgatcctaaatttgaagttgagaaaaataagctggtgagttctggaaggttaacggacgcagagaaaaagatattgtcgttgagcaggaacgagttgattggttctgtactgccctga

SEQ ID NO: 455156 - DNA, 2274 bp, Serratia marcescens
atgcatatattgaaaattgaaattggaaatttccgaaaacatgtagctactcaaatagcacttgcccctgaaaagacagtgttcgttggggcgaacaatagcggtaaaacctccgcgatgaccgcacttcgccgctttctcgttgattctcgaggatttacagtcaacgattttagccttgctcactggcaagcattgaatgctgagggtgaggcttgggaggtagccatcaaagaaggggaagctcttcccactccaaatctcttgagcttcctgccgcaattggacgtttggttgcaggttggaaagggcgagatgcactacgtgcaaaggttgcttccaacgctggattggaaatctgggccgctcggcgttaggttgcgatacgaacctgatgagccgaccaaatttcagcaagagtacattgctgcgagaactaaagccgctggcaccactgctgccgcaatcaaggctgcggaagggaaaggtgatccgcctcagctcgaattatggccgttgaatttaatcgacttccttgagcggcgagtacgttcctattttaaagtaaaggcctacctcttggatcctgcaaaactggcagatcctaaggatggcttggctgaaatgcaggaacttccagaggatttagaccccattgagggaaatccgcttgatggccttattcagattgacgagatcagtgcacagcgaggctttggctctcctgcgaccccgcgggttctgcgtgaagatgtcggcgcagaggctaggggaggtcgccgtctctcaacacagctgcgctcctactatgacaaccatctcgactggcaggacacgccggaactgtctgacatcaaggccatggaagcgctcgacaaggcacgcaaggcctttgacgaaaggctatctgagtcgtttgataaagcactgaaggaacttcagaagcttggctatcctggcatatctgatcccaagctccgaattgccaccaagctcaaattgcaggacggtttgaaccacgattccgctgttcagtatgaaattcaagctgcggcgggtggtcatatacatcgactgcccgaagactccaacgggcttggctatcagaatcttgtctcgatggtttttggtctgatgagctaccgtgatgcatggatgcgagttgggaaagccgccgtgtcaggcgacgaggctaagcctcttccaccgttgcacctaatgttggtggaagagcccgaggcctatcttcatgcacaggtacaacaggtctttattaagcacgcttacgatgttttgcgaaatgatccgatgcttggcgaatcgactgatttttgtacgcagctcgtcgtgagtacccactccagtcacgttgctcatgcctgtgattttgcggctctacgttacttccgacgtcttccgcctacagagaaacgtttaactccaaccgcgtgtgtgattaatctttcgtcagtgttcgggaagcctgatcagacagccaagttcgttgctcgctacctcaaggccacgcattgtgacctgtttttcgctgacgcagccatattcattgaaggcagcgcagagcgggtcttggtaccgcattttgtggatcatgtcgacgcgtttgagtacctgcggagttgttacattacttggctcgaagttggtgggagtcatgcgcatcggtttaaaggccttgtagagacgcttggtctgacaacattgatagtaacagatttagacgctaaagacccaacgaccaataaggccgaaaacccggtgttgggtaaagggcttgaggcccgaaatgaaaccatacggtcttgggctccaaagcaaacctcagttgacatactcatgaatcttgatgagaaggataaggcacttgtatatcctaatggatacgccgttcgctctgcgtatcagaccagcgcaaagttaaagattggaacgaattatgtagatgtttacgcgaatacgtttgaggatgcgttattttatcggaacttcgacttctttaaggggcgaaagggtacagggcttgccagtaagttcagggatattgccgatactgtgaaggatgcagacgacctcacagcgaaagtgatattagcgattggcaatggtgataaggccgaatttgctttggatttgttgtttagcgatgatcttgagaagcttagtgtccctgattacatcgaacacggactgctttggttgaaggaacagcttgagcgcaaagaagcggatcttgctcctaaggttggtacagcatga

SEQ ID NO: 455157 - DNA, 1836 bp, Serratia marcescens
atgactgtagcggccacgataataaacaacgatctcgatctacatgtggatgaggagatcaaaaagtgtctcgatccccaagcaccacagagcttcttcctatttgctggggctggttcgggtaagacacgctcgctagtagcagcgctcgatcatctgcgtgctactatggggaagcgtttgataatgcgtggccagaaggtcgcggttatcacctacacgaaagcagcgcgcgatgaaattatttaccggacacagttcgatcctgtaattgcagtctcaacgatacatagcttcgcttggacgctgatcgatgggttcaaccacgatatcagggaatggttgcgtgccgcgctgaacaacgacattctggatttgcaagccaaggaagcgaaggggcgcgcgggtaccaaggcgtcggctgaacgtctcgccgacattgcttccaaacaaaggcgccttgctctgctcgataccacgaagaaattcgtctatagcccagacagcgacaaccgcgcgcgggactcgctcaaccacgcggaagtgcttaagattgctggtgattttatacagaccaaaccaacgctacagcagattctacgtgatggttatccgtatatactggtcgatgagagtcaagacactaatcgacatatcctagaagctctatttactctccaggccgcacacaagagtgaagttgttgttggtctcttcggagatatgatgcaacgcatctacggtgatggtcagccaaaccttggcgaaaatctgcctgcggattgggctacacctactaaaagactgaacttccgatgcccgctgcgggtgatcgagcttttaaacaagatccgagaagtcactgataagcagacccagattccttacagtgaagctgaagagggccatgtccggatgttcgtgttcccttctgaggggacagataaggttgcagtggagaaggctatctgtgcacatatggctggcctcaccacagatggtgactggttgaatgaggaagcagtcaagactcttatcctagagcaccgtatggcagcgatccggatgggcttcgatgatttgctgtcggcactatatccggttacgcagttccgaactgcgcttcttgatggatcacttccgttgatcaattttttctcgaacttaatcctgccgctttgggacgccaaaaacgataagtttggtattgcacggctcattcgagcggcatcgccgctcgctagtataagtgcgctgaagaatgctgaggaccagcttgagcaacttgccgaggcccaagctggggttgatgcgcttatcaggttacttgatggaaatccggcggtcacgttcggggaggttttgaacaacgtagctgaaactggattgttcgtgatccctgaaatacttaaggtagggctggttagtgacggcagtaaggtggctgatgaggaagagcggaccgaccgtgacaaggggatcgaggcatttttggctacaccatttggacaggtgcgagcttacaccaaatatgtggagggtaaggcacgattcgacactcatcagggggtgaaggggctcgaatttccgcgagtgatggtcataatggatgatcgcgaagcacgcggctttatgttcaaatacgataagcttttcagtggtggagcagaagagaatcagagtgcttcgacgcgtcgtttactttacgttacgtgtagccgcgcggaacgatccctcgctttggttgcctatgctgagagccctgagcgtgtcagaaagcaactcttagcgaatggttggtttaagccggaagaaatatttattggcctgccatag

SEQ ID NO: 455158 - DNA, 378 bp, Serratia marcescens
atgccggcggcggtcgtggcggtcattagcgtgccgaaccggcaggccgtccgccccagtttattgatgccgggcgccttgctcagcattttccccagtgcacccagcttgctggccgcaccaccgacgccgcccaccaaaccggcaaacagcagcgtcaggtcggagattttatacaaccagtccggcacttccggttttatcggcaaggtggtgacggtgccgccaccgatgcgcacgttgggcgagccttccatcacctgggcgtcacagttggttttatcccccacgcgcgccgccggctggccgttgataaacaccttgtccgagccctgcgccatctgcatgctggggccgtcctggtcacaggcgacctga

SEQ ID NO: 455159 - DNA, 525 bp, Serratia marcescens
ttgaaagattacagaaacaaaaacatcgttaaattaacctacttaagatttgtgatttcagagatgttacgccccccaagaaaatcactcttctttgaactatgcatccacccctccagctattgttcaatactcaagaaaggttgcaacagaaataaagcatggccaacaaaggaaaatgcgcaccaaaatagaccgatgaaggatctgtgtgagacattactcaacaagtttgatctggagataaaaaaagaaaatggcgtcttgattcataacgatgggctagggccaacccgtgtcgaaaaaaaaccgaaaggggatataagtagtgacgctaaattttttatagagacaaaccccggctatgtaaacggcgatggactagccatcattttaagcctttcagtgaaagatatactggttaatatcttccaccagacgttgagtaaaataaatcgtaaattgattatcagaccgcctaatggtcaagaggaatcccctcaagagaaacctaatgaaatataa

SEQ ID NO: 455160 - DNA, 270 bp, Serratia marcescens
atggctatcctcgaagccgccaatattatattaacgtttgccattatcttggtatgttattattttgccatcagagttatcaaaggttcccgccaacgtgaacaggtgatgactgaacggggagcagacgtttacgtgactatcctttcgctaaagcaaagcggcgtattcataaataataaccctgttatcgagatggatttgcagttggagaatcctgaaacaaaagaagtgtggatgctggaaaaacaccgggaaccgtgttgctga

SEQ ID NO: 455161 - DNA, 327 bp, Serratia marcescens
atgacggagtttattgtcttacttatattgttttttttcctgttttatatagtacgcgagttttattttacctataagatagatagtgagggtaaagagtctacagcaacaattattcaatctaaacaaattagttctaacaccggagggtctattaatggtgagtttgctataatctttaaaaatgaattaggagatgatgaagctcttttgtttcaggaaacaattcctcaattgtatgcttcacgcgttcaggttggtgataaaataaatatcaaatatatcagaaagaaaaataaaaaaccgttggtgtcatttgttttttga

SEQ ID NO: 455162 - DNA, 381 bp, Serratia marcescens
atgggttttatctcagagcatccgtttatctttgcgtggtcagttatctttattcttgtttttatttctataaggggacttagaggtcaaaaggacgacattaaagaaattaaaaattggattggtagagacttatggaaaggtagtgtctccactgccagactcatctcatggaaacagctgcaggcgacacacaatattgattacttctactcgtttactgttgaaagcgagctggacggtaacttaaagcagtacagcgctgcaggggtggttaaagcttcggaggttggcaaattgcggaaagggctagtcgtgacgataaagcatcaaggcgtaccccctaagaaaatcgctgttattggcgttgattttgactga

SEQ ID NO: 455163 - DNA, 1755 bp, Serratia marcescens
atgctgaaggcgatcaaggagctgctggtcggcacggcgccgaccagggctaaatcatcctctgtggcttcatcgccggctgggccggcggggtattttatgccgcagtctgccacgcagctgctggacatgcctgctcgtaaacagtgcctgcagcagctgtgggaaaacagtgcgctgccaaaggatttgtacgaaaagttttatctgcagccgctccatcacctggtgacgttgatgcaggtgctgccggcaacccggcagggtgagtatgccagcgaaggggggctggttgacgtcacgctgcagacgacgacctatgccgttcgcctggccaaagggcatatgttacccccgggggcggcacctgaagatcagtcagcgcaaaatattctgtggaacgtggtggtgttttacgcggcgctctggcgttacctgccgcaattagacctggtagaaggcgagcttcaaagcggccgggcgtggttacctggcgtgaccgttcctgccgaaccttaccgttttcgattcaaggcggcggcgccagaaccaggtatcacgatgagccaaagcgcgttaatagcgtgccgtctgctgccggcggaagcggtcaactggctgtctactctgccggctgcagcgcaggcagtgatgctgatagcgtcacgtcagccgagctccctgccggtgatcgatgaaattatcggggaggccgtcaaactggcacgcggtgatgccattgccaatccggtggccgttgccattccctcctctccagtgcccgtgccgtcagagacaccgtcagtgcctgttagcacacctgctgcgcaggagagcagtgtacctggtgtcgatgtgcaaagtgctgtgtcgggtgaatcggctgccactaacgaccaggaagatggtgttgatactgctgctgcagtcagctctgtgaacgccatggctgctccatcgggtgatgtactactgagctccgcgctggatgcccccgtaaatgatttaccgttggccgagatggttgttgcacccgaacctgctgttgaggttgaggaggatatgcaggcactgctttcgctgatgaatgtcagtgtatctgcgccggaagcccccgaaatgttggctcaggaggacgcgccccaggaggaggctccagagcctacagaaagtgagcgaccggcagcagatttactcaatgtagtggatacggtgacgacgttgccagagaaaactccggcccttatacctgaagcaactgcttttgatgaagttccagctgttgccgaagcagtcatacctcaagaccaacctgtaaattctgaaccggtgatggggcaaggcgcttctgaagttggtaaaggggaagtgccgatctctgatgagcattcaggggagcagttcctgcagtggctgagtacaggtctgacttcaggggaaattcctatcaatacggcaggcgcgagggtgcatcttgttgccgggtttgtcttcttaactgttccagggatcttctacctctaccttaagcaatcgggactggaaggtaatcaacgcgaggcattacaggagagctttgagcgattggataagcatcggcgtgtaaagggtaagcggttttattttgctgagttgtacggaaaccctgagcgtacaggtccttttaaacgtaccaaggggtatctcattaaagcgagtttgctctatcgaggggcatcggtgccagccgacagtccggtgctggtcatcccttga

SEQ ID NO: 455164 - DNA, 627 bp, Serratia marcescens
atgattctctttgatgaaaacaacctgtcgccggtgcgtcggagaaccctagagcggttaacaaacgcagcacttaagctgtacaaggagaacaagttcccaaccgctgaagaaatcacgcgtgaagcggagtacgccaaagtcaccctcaaaacctatttcagcacgcacagcgaattcgtggagtatgtcgtgcataaagtgattggcgcttttgaaaaacccaaaatgggggatgatgcgcaagaaaatattaagaatttactgagctggggttatggggaactttgttctcacgagggattgatgcgtgacgctatgcgcatcgctcaacagcgctggcagagccagtaccaagatcaacagccaaacaaagagagcagcagcctgcttaaaaagagtaaccgccgcgaagcactttcggaagcactagcaccgctggagcagcagcttccaccggagaaagtgcaaaaactgattatgctgatgtcagtgctctatgggaccgaagcgatgaccgtacttaaagatacctttggcctggaacaggaagagatcgtagatttgaccacctggggagcaaaattaatgttgcgacaggcaaagctggaagaagacagcaaatga

SEQ ID NO: 455165 - DNA, 987 bp, Serratia marcescens
atgagaacacattacgataatttgaaagtctcaatggatgcaccagttgaggttattcaagcggcatataggactctggcgaaaaagtaccacccagataaaaacaaagataatccagaagcagaacgcatcatgcagattatcaatacggcatatgaaatactgtcagatcctgttaagcgtgaagagcatgatgcatggattaggaaagaaagctcgcgaaataataccgaatccagtaatgcggaacgtcaaaaaactagcgggaattataaacgagaggctcccaatgaaaagaatgccccagacaatcgtacgcatgcttatacttccagagctaatcaatcaattaaaagaaaagtatcctcgaatttaaaactctccctttacggggtggttggaactttaaagttttcactaaaatgtgttattgtcgttgggttgttgatagggggcgtcaagttttttgaaaaggattttgtctcagacgataactcaaaagaagttggtgtatcaaaagttaatgcttcagcagagactctaccggccgcgaaagtgatatcaccaaattgttctggcccacagttctctcatcctgacggcaggcagtggccatcttcggcatatattatgtcggtacgagattacaacaagcctggattatcaagcttattgcttgataactcccgtaataatcagaatctatatataaaacttgtgcaggaaaaggatgctacgaccaaacgctttacgcgtgatgcttatatacctgcttatcaggaattaaaactcactaatgtggctaaaggaaagtattttatcaagatgatgaatgtggctgatggttgtgcacagatctctcagcttattaatatacaagaaacaaaaacaaacaaaggaatagaatatagtgattattcccttacattttatcctgtaagatatgggaatacccatctagactctctaccttcgtctcagttttaa

SEQ ID NO: 455166 - DNA, 750 bp, Serratia marcescens
atgaatgtttttaaacgtttgtttggtcgaaagaagaatgtgaagcaagatgttgtcaacaaggatgagtgcatatcagacgagattgtgcaggccccaaagcactttctaaattttgctgcacaaaatcgagatataatatcaggcatggaattttttgctacgtgtcagttgcgtacccccgtaagtgtaatgagaaaacatggtgaggtttacactggggatggagagcctccaacatatggctcaccgcgagatggtatctgggtgccaaaattactagatagttcattcgatttccttaatgaaggtgcaacagcagcttcggatgccggaccagtaaatgcagctgaatatatcgaatatgcaattggattgcttagtatctttgagttaaatatcacaataaatgaaaagatggctcgtgccttattgcattcggcggggagtgaatcaaaaaaaagaattgagcgaggcctattgcagttttatggggaaagcaatgttgctgatgtcatgtcgcggtacatatcggaccaagaacgattaagttattacttcagtacgccagggcggttaaccttggcaaatggagtaaataagagcgtggctgttgagttgcagcggctagggatatataccttacaagatttgtcaaaaatgacagagagtgacttgtgcaaagttaaagggattggaaaggttagcgcaaaaaaaattgtagagaatcttagtgggataaaccgatag

SEQ ID NO: 455167 - DNA, 669 bp, Serratia marcescens
atgtccggactcattaaccatgaaaaagcgtttatctcactcttcaatgagacggcgcggtatcaccggcgcaccaaggtgtttgaggacttcgtcagctgcagcgtcatcgcgctggaaaaccgcctttgcttcaaccaaaagcgggaagacaagtacctgcagatcgtcaaagggtatgagaaaacggacgtcagtcgcatggcgcagctgcttgccctggtgtcgacgagtatgatggatcaattcaatgacttcctgggaaaggtcttcatgcagcttgacctgggggacaaataccgcggccagtttttcacgccgtgggacgtcagcaggatgatggcgcagatatccctgggcgatgttgacaccattttccgggataaaccgttcattacccttgccgaaccggcgtgcggtgccggctgtatggtgctggcctatgccgatgtgcttaatcaggcgggctatctgtcacaccgccatatgtgggtgtcggccactgacatcgatccgctggcggccggcatggcgtatatacaattgtcgctcagtggagttgcgggggaagtggtgatcggcaactcgctgcataacgagcggcgccgaatactttatacgcctggtcactatctggggaattggtccactcgattagaacatgcttaa

SEQ ID NO: 455168 - DNA, 1170 bp, Serratia marcescens
atggacaagtcacacaaaccgtcatctttatcgcgttggattttattgcgggtcctctcactggctattggttgcgtgatcattattgccagttgtatgtggggtgcttatcgtctggtatatctttggaaactgcactctatgcctgagtctaccagggaagagatgcagaaactgttggcagacccagacattaatatcacacgctatcatcaactggtggatgcttggtatggcgtaaacttctctaatccttctgccacctctattgacttgatgctgctttgttccctagttttggtcgctataccgacaattgttatccttgggctatatgctgcccgtccgctatcacgccaatttacccgtattgcgaaaatagcgaggaaggtctctgaaggggagttttcgcatcgtgtcgggctggaaagaagagcgccggtagagctcatcaacctgactaacgactttaatacgatgacggagcgcctttcgcaatatgaacgtgaactcaaggcttctcacgtggcaatggcccatgagctacgctctccccttactgcagcgaccggacggatgcagggaatgattgatggcatttttccttgtgaaacgaagcagcttaaccttgtcatgagtcagcttcatcatcttaaccgtttgattgatgatctgtacctgttatccatggcgcaggcggggcaactgttactggataagtctccggttaatattgttgaattacttagagaacggatcctctggttgaggccgcaggctgaactacaaggctttactttcactctggaatcacatacctcaccgagtcttttggtcgatccttatcgtatggggcaggtatttatcattttgatggataacgcattgcgttatgccaaagaggggcggcatcaggagatcagcttatgtgacgaacccggttttctagcagtacgtttccgtgattacgggcccggggtaagcagtgagtttttaccgcatatgtttgaacgttttgctcgcgctgaaagctccagagcgagatcttcaggcggtagtgggttgggactttctatcgcacgtgctatttgtgagttacatagagggagcctagatgcggaaatcgctccagaagggggaatgactttcacgttacggttgcaggtgtga

SEQ ID NO: 455169 - DNA, 690 bp, Serratia marcescens
atggacaaaaaacatgtattgattattgaagatgacagtgatgccgcacaggtgctggaagcttatctacaacgggagcatttccatgtctcagtggctggggatggttctaaagggatggagatggttcagcgcctgaagcctgacttaatcttgcttgacatgatgctgccgggtatcaacgggacggaaattttgagccagttaaggaaaaagagtgacactcccgtcattatgatcaccggaatgggggatgcgacggataagatcggtgcacttcgttatggtgccgatgactatatcgtcaagccttatcatcctggggaagtgatggcccgtgtgcatgcggtaatgcgacgctattactatcaaaatcatgtgaaagagagcctgtcttttggctcattgcgccttgatactgaatcgatggtggcctccgtcgaaacctccgctgataaagtccaaaatctcgagctaaccccgacagaattcagcttgttggcgacacttttacgtgcacctaccaaggttttttcacgtcaggagttgctagaaaagtgtttaccagaaagtgaggctatggagcgagtgatggacatgcatatttataagctacgtaaaaaattggagaatgccggcgtcactggagtgctgctcaccgtcaggggcttcggatacaggttcaggtaa

SEQ ID NO: 455170 - DNA, 426 bp, Serratia marcescens
gtgatactgagcggaatttatggagaaaccaatgccaaaggaaaatacagcggacgtgactacaataccgaccaagccggtggccctatccagaatctggactggaaaacggccaacatcgaccgggcaggcgtggataaagtgaggttgcataccgggcggtttgaagactcccccgaaaacaaggtgatgattgaccgactggagaaaattttgcagggtaagctacaggcaacggataccgacaagcgtttttatacccatgaaattagggaattggagcgctaccgggcgttgggtattcctgatggcaccaccccaaaaaatagctacgaagtctggaataatactcacacagcaacattagaagattaccagcttagttctgatgaaaacctgttatatacgccagaggctctgaaatga

SEQ ID NO: 455171 - DNA, 402 bp, Serratia marcescens
atgatgaaagagctggatatcgggctggtggcgaaactctccggcgtgtcgccttcgacgctgcgtttttatgagaaaaaagggctgattaagccgattgggcgtaacggcctgagaaggcaataccgcgaggacgtgttgaataaactgcagctaatcgcgctgggtcaggcggcaggttttacccttgatgagatgagcgggatgtttgatgtgcagggaaaggtgacgattgagcgagaaaaaatgcttggccgggcgcgagcgatcgataacaccattcttagacttcagctgttaagccgcggcctgaaacatgtcgcaaactgcacgcagcaggatcatagccagtgcgctgaatttcaaaaaaccgtcgcgcggggaagattgctgacgaaatag

SEQ ID NO: 455172 - DNA, 300 bp, Serratia marcescens
atgcgtgatacttacaccttgctcggctgccgcggctgcggttcgaccatcgtcgccgccgcgctggagctgaccggctttccctggggctatgaagaggtggactacgcggcggacagcccggagcgcgagcgtctgctgcggctcaatccgctgggggaagtgcccaccctgattctgcccaataatgaagtgatgaccgagagtgcggcgatcgtgctgctgctgcatgcgcgcgcgccccatgcggaactggcgccggaggcgggcgcggcgacgctgccgcgttttttacgctag

SEQ ID NO: 455173 - DNA, 249 bp, Serratia marcescens
atgttggatgatttattaccagttagcagtaaagatggacttgttaaacttgtattggctctggcgaaagatcttaaagacaacccagatgaatgggaaaataaagatctcagctcttatcttgaagctatagcttcatggatagaagatatggatgggtattatgaaaatactaaccagccgttaccaaaggatacgaactggaaagttcttgcagatattttaatggctgaaaaagtctacgaataa

SEQ ID NO: 455174 - DNA, 399 bp, Serratia marcescens
atggaaagctttattaattacctcactcatgaaacgctgaatgacgttattgttaccggctatattgattctgaggaattacctgtttttcatcctatgtatgaaagattgttttttgtctttagtgatctaacttatgaagtgtatttagatgacggattgattaaagtaaatagagtcaatgaaataaaagtatggtttgatgttgacgaagatgataagttttcattaatgtcaatatactctcagttatttaaaactgaaaatgaaataagagtgtcaaaagttagttatgaacaaacacctctttcgggtatgtctattacataccatgagggtgatattgaaagagtgctaacattagatcctaataacttttttggctttactttcttataa

SEQ ID NO: 455175 - DNA, 285 bp, Serratia marcescens
atgatgtggctttactcttttatttcggcattcgtcgctttactttttcttgttataaaactgaaggttaaccacactgacaacaaactatccacaacgctgcttatgattgcgggctggatattggccacctggcaattcataatatttgccaatggcagagctttatttattacagattcaactcaatggatcagtgataactggcttctgcgctactccgcattagcatttgcgatcatacatatcatcgccacgtttgagtttaaagcgaaaaaacgctaa

SEQ ID NO: 455176 - DNA, 360 bp, Serratia marcescens
atgaacaggaactttatctggcgtgcagtagcccactctgcattgattaatcgcgatgaaacccatgtttttgtcgatgctcctgattatgaaactgcaaaacaacatctttatgagcgcttgtctgatgaatggggcattccgcgtgggttcattgacttctataacctgtggaatgaagaacaactacgagaaatgtcggcagggcagaagattcctagtgggcttcaattactcgagacagggggaggtaatggggaggtttgttacgaccattcacctctgattctggttgcatcagccatgcttcgcgaaatcttggagtacgcactgcgtcagccggaggtgcgtcatggctga

SEQ ID NO: 455177 - DNA, 1725 bp, Serratia marcescens
atgggacgtataaataccaaaaatattgacctggggagcgcattgctcctgcagggcaagaccgcagtaggcactgatagtaatgctcccgctgaaggggcattacctgccacggaaatgccgatggtgctgacactggacgacgtcagtcctttcccggataacccaagaacctcccgtaatccacggtatgaggaaattaaagcctcaatccgggcgcgtggcctggatacggtacctaaaatcactgcagatcctgatcgtcccgagctgggtttcttctttagtgacggggggaatactcgccatcaaattttgtctgaattgtggcaggaaaccggggatgaacggttttaccgtatttcctgcatgtttaagccctggccgggccgtttatcatgtgtgataggtcatttggctgagaacgaagttcgcggtgaattgagttttattgagaaagcatttggtattaagaaagcccgcgctatttttgaggaagaactcggcagggcagtatcattacgtgagctctccgcattattaggtgaagcaggttatcctgttcataactccaatattagtcgcatggaagatacggttaaatatctgtatccatttatgcctttgcttttggaatctggggtcggagcaccccaaataaggggactgttagccttgcgaactggttctgaaaaagtatggaagcttttttcaaatgatattaaatctacaacttcatttgctgaggtttttggttcagtctgcagccaatttaatgatccggatgcgtattcattagagatgttccgtgatgagttaattggcgccttggttaaagctctcccacatccctctttgaattacgatcgctggcttctcgagctggatcccaaagagcagaatcgccggcaacagcttggtgaagagcacctgcaaagcgtgcctaattttgccgttcagccaagggttggatcacccgttgatggcagtggcgaaattgatagcagtgcagcaatcccgttatcttcctctgatgcacctgtgccgggtacgtcggctttgacgctgagcagcgcactggatgaacaggaaggtgaagaggactcatccgacgctgagcctatttcttccggatctccgcgcattgtaacccaacatgacctgtatggcgcgccgccggttctgtccggagatgttgacgagcagccctcaccaggcatgtccggaacagagactgcaggggcagggcaacctgcgcaaccgtgccctgtagcaccggaagttaccccgaacgcagagggatcagaagtcgctttcgctgaagaagggcttgaaccagtggtttctgtctgggccatcccggcccttcaggatgacattgaacacctgcagggcatggcttatcgccttgctttcgaactggccgaacaagccggctgcgaaactgagctcaaagccgataaggcaacgctgattgcggcagggtactgcctggccacacagcagtcatccccattcactgcattacttctctcactgactgggccggcctcggccaatgaagcctgttcattaagcgaggcgttgattggtgctgctgatggtgccggcttcccgctgcttgatgatgtccatgccgtgaagtttttgcgccttgttcgcgttcttcgccggctgcgtgagctgcagcgtgatgttgacactgacactggggaggacgcatga

SEQ ID NO: 455178 - DNA, 714 bp, Serratia marcescens
atggcagacacgaccgaaagtgcacagcgcaagcccgcgcagtcaagggctggggccctcaagtccacgctgacggtacagttacacacccaatatgccatcctgctgtgggaagggcgccagcgagataaagaagccaataaaccccaaatcgtcggtatgccgcaggtgattgcgcgagccggcaaaatcaatgccgattcaaacgatgataacccttacgccgaccatgccatgctgttacttgaagaggcgatcgagcgcggtaccggaaggctgcaatcggccgttgccgacctggaaaaaaccttgtccagcttgcctggacaggtatcaatgtcagaggttgcgtcggtttctcctctgaacatcggtgtttttagccgtacgccactgggttatcgttgcgtttggttgcttgttgggtttgaccaactggcgatgaaagccttccaggcctggcattatgggctgatctcccgtcaaaaacgtgatgatttactgagccagggcgggcactgggttcgccaggtttatggtgttgttcaacaataccgttcggtcgcagcgacgcgtgatgatattcgactgcaaacccctgccggcattgatgctgtaaaacgtctggggcagcctgatgctgacatcatgagtggggctaaacgctctgctttttcacctgcacttcgtccggctaaaggagacactgcatga

SEQ ID NO: 455179 - DNA, 933 bp, Serratia marcescens
atgtccttaggtgagattatatccccggtcagtgcatttttacggctcatcctaacattggggctgaaaaaaaagctccaggagcgtcagctggaagctcggttgattgcccgttgtattattgcggaattacccgaggatattcctttttatatcgccactgagggtggcatccgggaaaaagggatttatgtcattggattattgatctggaaccgggggacgttgcctgtggtggaaagcgattttctgccaacatctcctcttatcgtcaaggtcggtgagcaagcaaaaattgtaggcagccgtattctgccggttgaagacgaagtgcgatgttcctgccaacagcttaacgatcaccaaattcaaatacatttcgattgcctcaattccgaggagtatctggtgatccctctatttgtcactggtgacccctatgtcaatgttgagctgagtggacgaattatcgggcagaaccatccggtcgatcacactgcggctgaggtgaaagctggttttatggagcgattggcttcgtttatagccttggttttcgcattaaatatgttgccgggattctttatcggaggcgtaatgatcataaaagaatatggcttccgcgttttaatgaacgatatcgattccattccctattggtactccatgccttttttacttggttgttctgcggtttttctatttctgctttctcgtattgcttactggtttgaacgtcgtaattatcctgagggttacccacttcaggcagaccttgagcctccgttacataagacgataattggtttatgtagatgtatttttcaagggaagaaaatacgtgtttccacatcgatattcaattggggagaacctaccataatgttgaacaagcccgtgcatcgccgtagcattaatgattgggtaaagtaa

SEQ ID NO: 455180 - DNA, 366 bp, Serratia marcescens
atgaatgctgtagttcgtcttttccgtcacttctccacgcgcattgcggtggcgacatctctggccgttgcggccaatcaacccgcacaggctgccttacctgcagtggagccgccgtcgtccggtggtggcggcggtctgatggataccatcaaaggttacattcaggacgggattgtcctggtgggtctggtgctggccgccgtcgcatttatcgtggtcgccaatgctgccgtttcaacgttccacgaggtacgggaagggaaggcggtctggggtaaattcgctgccatcatcgtggttggcgtggtgttggtcgtggccgtgatttggctggtcggcaaatccgctgaaatcctgttctaa

SEQ ID NO: 455181 - DNA, 831 bp, Serratia marcescens
atgacaaaagaggaaggtttaaaggttgtgctttcaccggtacaactggcggcagccatgtcagacaagaatgtcactgagggggaaaccttaagcaatcgcctgtttggcggtttgggtcttgctggtggcgttgttgaactcattggtgctggcgcgatgtgttatgcacctgaccccacgcttttaaccaaagtcggctgcgttattatgggcactcacagcctggacagcatcaaggccgcttccaatcagatcgtcaccggtcagccgacaactaccgatacctatcaatctgctgtcgcaatggctaaaaccctaggcgcggatgatgagacggcctataacgtagggcttacagtagatgttgcggtgccattggtgtttgcgacagtgataggcgcggcgcgagtttcctctgttcgtatgggtaaggtaaagctgattgagcatgagtctgtccccggtataaaaggcggcggacatacgattagcaagcatgttgccaaaacacccgaggaactacttgagcgtttagctaagagcccaaccatgcaatccgcatcaacgtttactgatttgcgcaccgccgaacaggcgataagtcgaacactgagattcaataaagcgctaattaagagatgggcacaacagccaacatcaactaacgtgcttgaactgacacaaaacgcaggtaaaccgattggttttggctacaggcaagggaactccataaagttaacttctaactccgtacgcgtggttctgctaaagaaagtgtacaacggtaaaccctattacattttgacagcctatccaattatcagataa

SEQ ID NO: 455182 - DNA, 321 bp, Serratia marcescens
gtgcgaacggctggccgataccacgctgtcgcgctgttctggctgcaagactggcaccgggcgttccagctgtggtttgtgcttagcgtggcgattttcatgattgattcgctggcggaaaagcgttggcgcgatcctgccaccactgcattggcgcagctgctgctagggcagaatggttgggcggaaaacgctgaccagctgcacaaggcggtgatcgcacagatggcatgcacagcgctgatactgctggtgatgctgttgcacagccagttacgcatcaacctgtgggcgctgtcactatggccgtggattagctaa

SEQ ID NO: 455183 - DNA, 957 bp, Serratia marcescens
atgaaggtaatgcaaatcgttacatttctcgcggcaatttacggctcatggatgttgttttcatttgcgaaagagaacaacataaaatacacagatttagttggatcaagctttatcatttcatttggtgctttaagtgcagcggcaatactctcaatcgcattattcccttcactcatagttatactcagtcatgtaaactcaaagaacaattacaaaaccttagtttttcactctagattcaccatagtaaaaaacaacaaactaaaaacattactcgcgtacaacctaattatatctttatggccatttattcacattctgtcaaaagaacatcacgcacttattcttacactactctacccacctttaatacacttagttctatccgtactattaaacaaaaatccaataagtattatcaaaccatcagcaattcaaataatgacattaaccatggaggttatactagcgcttatatctattattttcttgtcgtcattcataaaaagcatatacagtgaaataaacgatggagtgttgagcttaatattctccattgtttttttccttcttaaacaccccgggttatcaacagacaataaaaaggcaaaagtaacaacggtaatcatagtattcctattatcggctgaagcgttctttatgttctcattcccgttttcgagtaatataggaaacacaattgcaaagtccattgacttaaagttaggtgagaaatgcttcctagccaataaagagctcacaaataaaatcccagtagaatatataaataacgtaacattagatgataaattagcgaaattaaatgtgggaacaaatgttggagacatatattaccttatcaaagacaaggaagacaaaccatcaataagacttgagggactacatttaaccatgaaaaactgcccatctaaaaaatctagagaggtacaataa

SEQ ID NO: 455184 - DNA, 129 bp, Serratia marcescens
atgtctgacttagaacaaatcgataaaaaaaccttaaatcttaaattaacagaattagaaaagaccattcaggaactgcaagaaataggaacaaaagaaaaaaagaagaaagaaaacgtaaaaagatag

SEQ ID NO: 455185 - DNA, 1194 bp, Serratia marcescens
atgagcgagctgagttatctggaaaaactgctggatggggttgaggttgagtggaaacttcttggcgattcttcattttttgaaatagccaacaacggaagaaaacctgtgaagtcgtctttgcgcatttctggcaaaactccctattatggcgcaaacaacattcaggactatgtagatggatatacccacaatggtgagtatgtattaatcgcagaagatggctcggccaacttagagcgttactcaatacaatatacaatgggtaaattttgggcaaacaaccacgtccatgtagttcgcgggaaatctggagtgaactccaggttcctgtaccattatctgtgcattgttaactttattccatttctcacaggtggaggacgagcaaaattaactaaaggccagttaattgaaatacctgtccccatcccgtgcccggacaacccggaaaagtcccttgccatccagtctgaaatcgtccggattctggataaatttaccgcccttaccgctgagcttaccgctgagcttaccgcacgtaaaaaacagtacaactactatcgcgaccagttgctgaattttgatgagggtgaggttgagtggaaggcattggaagaagtatctgacatttatgattctctgcatcaaactccccaatatactgagaatggcttgagtatgatacgcgttacagatataaagaatggatatgttgatttaaataacacattgaaagtcaataatgaagtatttgctacatttacaaaaaaatactctccacaaaaaaatgacttagtaatgtccagagttggctcgtatgggaatgtgggcattatccctttagataattcagcctgcatggggcaaaatacggttgtcattcacccccgaataaatagcagctacctcttttatatactgtcatccaatatcggccaaaaattcatcgaaagaaatgtcggtggtgggagtcaaaaaacgctaagcctgagatctataaaagcaataccgatcccacttgtaagcgaaaaagaacaattcagaattgcttctattttgggtaaattcgacacattaaccaattcaatcagtgaaggcctcccccgagaaatcgagctgcgccagaagcagtacgaatactatcgtgatttgctgttcagcttcccaaagcctgagactaccagtcactga

SEQ ID NO: 455186 - DNA, 543 bp, Serratia marcescens
atgaaaaagttaatcgttgctgctgctgttgttgctgctttcgctggtgttaatgcgcaggccgcttcaactggcaccatcacttttaacggcgaattgaccgccacgacttgtgacgtaatcgttgatggacagactgcagatgctaccatcgttttaccaactgttagcgttaatcagctgactactgctggtcagactgcaggccagactggtttcaacatgtctctgagcaactgtgaaggcacgctgaaaactgcttctgctttctttgagtctggttcatctgtggacctggtaactggtcgcctgaaaaatgtttccggtactgctactaacgttggcctgcagctgcgtgacgcttcaagcgcatctaacgcagttatccaggcgggtaactcaaaccagaccagcaacaccacctatgttgatgttgcttctggttcagctaacctgccttacaacgttgaatactatgcagacggcaaaaccactgctggtaccgttgttagcaacgtgatctactctattcagtacaagtaa

SEQ ID NO: 455187 - DNA, 699 bp, Serratia marcescens
atgaaaaagtttgcccggatgttaaatattttcagtgtgtttgcattgtgtctggcgagtgcaacatcttatgccagtatcgttatcagtggaactcgtgttatctacccctctgatgccaaagaagttaccgttaaattaaataatgtaggcgtaagcccggtgcttatccaaagctggattgataccggcgacgtcgaagccaagcctgactctattcaagtgccatttattatcactccccccatgaaccgcgtcgatccggctaaaggccaaacgctgcgtatcagttctaccgcaacgtcgctgcctaccgatcgcgaaagtgtgttttggctgaacgtgttggaaattccggccaaaaaacaggctaaaagcagtgaaaatctcctgcaactggctttccgttctcgcatcaaattgttctatcgccctaccggactgcagggtaatgcgaatgatgcaggtaatgcactgacctggcagaccgtttctggtggagtaaaagcgacaaacccaacgccttactatgtatctctggtgacgctttccgttaatggtaagcaggtcgaaggtgaaatggtcgcgcctaaatcatcgctgacgtttaaattaccagcgtcatcaggaagtaaaattagcggtgagtttgttaatgattacggtgcaataaataagttcgaaaatactattaaataa

SEQ ID NO: 455188 - DNA, 2550 bp, Serratia marcescens
gtggcaacacaggaaatagaaaaaaacgtggaatttgatccgtcgtttcttaacctggctaacaatacttccgttgatttatcgcgttttgctaatggcgcctctgcattgccgggtatttatcgcactgcggtttatgtcaataaccagcttattagcaacgaagaaattaagtttgttgtacgtgatgacaaaacggtttttccctgcctgacaccctcgctgttaaagaatattccctttaattatgaaaagcttccgtcagatgcactgactgcaggcagcggtgggcaagagtgtgttgacctggaaaaacaactcccggaaacccagatcaattttgatagtggtgaacagcgcctggatatcactatcccgcaaatttatattaataaactggctcgtggcagcgtgagtccggcattgtgggatagcggcgtacccgctgcgtttgtcggttataaccttaatggctataacaaccgttcacgcggtacatcaacaaattctttttatgccggattaaatgccgggatgaatatcggtgcctggtatttacgccataacggttcttataactggatggataacgggccgaagcaatacaacactattaatacctatttgcagcgcgatattcctgtgttgcagggtcgggtattaatggggcaatcaaataccccaggacaggtatttgatactctgccgttctctggtgtccagctggcaagcgacgaacgtatgctgccggaatcacagcgtggctatgcgccggatattcacggtattgcccgaaccaacgcacgcgtcacggtaaaacagagtggccaggtcatttatgaaaccacggtcacgccaggcgagtttctgattaatgacctgtatcccaccggctacggcggcaaccttgaagttaccgtgcatgaggctgacggcagtgaacagactttcctggtgccgtatgcttctgtggcccaactcttacgtcccggatcttcacgttactccgtgacgctgggcgaagcgcgcaatgacaatatccgcggcaaacctgcgctttatcaggcggtttatcaacgtggactgaccaacgccatcaccggttacggcggcgtgcaggcgagtcaaaactattatgcggtgcagttaggtgcagccttggggacgccaatcggcgcgctggcgttcgatgccactcaggcgcgaacccatttgggtaagagcagcgatgaatctggcagggttaagtccggcaataccctgagtgggcagagctatcagatcagttacagcaaagcgatcagcgaaaccaacagcaacctgtcgctggcggcctatcgtttttctactaacggctatatggattttatgaccgcgatgcaaacgcgtgacgcggtttctgaaggagtggacccgaataccgtctggcgtgcaaagaaccgctttaccgttactgcgggccagggattaccgggtaactggggacagttttatgccagtggttcagtacaaaattactggaataaagagggtagcgatagtcagtttcaggtcggttacaacaacagctataagcgtctgacctatggactgacgatgagccgtagcttctccaattacggacgggcgcaaaacaactatttgttaagttttagtctcccgctgggacgtgctgatagcagccacacgccacaggttcgctttgatcttaaccatgacaacaacggtcgctatggagaacaggcaactatctccggcaccggtggggcggaaaaccagtatagctatggcgtaacggcaatgaatgctaaccagggtgcaggcaccagcggctcggtaaatggacagtatcgtaaccagatgacatcgatgagcggaacctatagcgcagggaaacattatcagggcgcttccgtgggcttgacaggttcggtgattgctcacccgggcggtgttacgttgacgccttatacctctgagacgatggcaatcgtcgaggcaaaaggagccaaaggtgcagcggtatcttcttatccgggcgtgtatatcgaccgatttggctatgcggcggtgccttacctgaatccttatgcgctgaacgaagtcagtatcgatccgaagggcatggctaacgatgtggagctggagaacacttcgcagaaagtagcaccttactctggtgcggtggtcatgctgaaatataacactcgccgcgggacgccggtgctggtgacctcaacgcttaacggcgaaccggtaccttttggcgcgaacgttgtagacagtaatggtaatagcgtgggttctgtagggcagggcggacagatttatgcacgtgtagaaaaagagcagggaacccttcgcgttaaatggggtgatgcaccagaccagcagtgttctgtgtcttatcgtctgccgactaaggcgaaaaaagatgctgcacagtttgtaacgcgctttaacgccgcgtgtgaaggcgttgcgggtgcgatatcgcaaggagcgggacaaatggcactgacaaataaagacagtactccttacggttga

SEQ ID NO: 455189 - DNA, 1131 bp, Serratia marcescens
atgaaacaacagtttgccagaatattaaaaaatacattacttattgcctttgctttgatgagtggttctgcattagcgatagattgtcattatactgcccaggcttggggagaaggcggggatatgggatcgatacctgaggattctaccgtcgatttaggcgggatcactatctctgtaggggaagatattccggtcggcagcgtggtatttacttcacgccagtccagtatcgcaaatttaaccaatggggtggcatgtaatgcaccctttgatttaaccagcaatattgattatttaacgaagccacttccaattgcatcatggtcgggatctcccaccgtatatgagactggagtacctggattagctgtttacttatcaacctatgatagtaaaaatccgtttcctcagcatttgccttatataaataatgcacctgggggaggatttaagactcaacgcacagggtatgaccttagtatcataaaaattggaccggtaacgcccggcattattaatggtgctcagttgccaacgctgcgggaaactattccagctaaggctggttataccgggctgccactaacgcttaagacgctgcgtttttccggtagtctgctgattaagtcagaaacctgcatcacaccggatctgacggttaatttaggaaaatatgataccagtcaaatcgggagcataggcgcagcaactccgtggattaactcatcactccagcttaaagattgtccgatattttacggctactatccgaaggcggcggtgaactggcaaagtggttcgggtacgctaaatcagggcacggcaaatcgtaatatgcttggtctttcattgcgaccgaataacggcattattgacgctactcagggtattatggctattgcgtccggcagcaatgcggccagcggaatcggtatacaaattgcgtctggtgaggtaagtggttcgcctgtgaattttaatttttcccaggaaaaaccctactacgcaccgtcaggtgaaggtaaaaattatcgtctccctttagttgcacgttatattcgaacagaaaaagaaataaaacctggtcaggcgaatggtaatttaacttttactatcacttataaataa

SEQ ID NO: 455190 - DNA, 576 bp, Serratia marcescens
atgtcaacgtatagttatatacttctttcagaggatttattcctttgtcgagcgatgagcgataaatctttagggttgccacccatcaagtgtcatgccagtgaatattcatcagccggtatggaaacgcaagagaaaaagcttatcttattaattgatagtcggctaccctctaaaattattagcctgtggcaagggatctatacgagtatctatcgttgcgtaacgcctgtaatgttagtttttcccatgaatgcagggaaagaaaactcaggtgtaagctgccactggattgatatgacatctaccatgctgatgtttaaacgcgagttggaaaaaataaattgtgatatccgatatgagttaaaaaacaccagtgtattcaataatagcgatatccggttaaccaaaagagaaagtgaagtattcaacttttttatgttggggtttaccgtcagaaaaatagcaaaattttataacctcagtgagaaatcggtttatacacaccgacgtaatatcatgcagaaatacgggtttcaaaactttaataatttttatcgacatctgatcaaataa

SEQ ID NO: 455191 - DNA, 666 bp, Serratia marcescens
atgtgcatcgagttacgagaacaaggttttaacgtgggcagataccgcgttcggcagataatgaaaaccttattactggtagctaaacgccccgggcgccatcgctatccacgcggtggaaaacctgctgtcgttgccgctaatctgttgaatagacagtttaatccagagatattgaatacctggtggtcaggtgatattacctatctgcgtaccgctcagggttggttatatctggctatcgtcatggacttatgttcaagaaaaatagtgagttgggccttctcagacaaaccggacagcgacttgaccgtccgggccttaaggttggcagtaaataaacgacgaccaacagggtctgtggtgttccatagcgatcaaggggcgcagtataccagcgctcagttccaattatgccagcaggagcttgatgtgacgggcagtatgagccgcaagggcaactgtctggataatgcggttacagagaggtttttccgcagcctgaaaggagagcgagttaactaccgtcgctatgaaacgcgaagtcagggtattgcagacgttatcgattatatcgacagtttttataacctgaagcggcggcattaccggctgggaaatatatcgccgaatgaatatgaacgccgattacaacaatgtgcctaa

SEQ ID NO: 455192 - DNA, 294 bp, Serratia marcescens
atgaaccatcaacgtgagttgatcactccggccgtctccgcttctcccgtggcacgctgtactttgattaaaaaactcggaggctatggctttatcgagtgttcactactggtgagttttctacaactgttttgtaatgaagagcttggtgtgattgaactgcagtatatcagggataaagctagagaattcctggttaaacatgataatcaaagcgattatttttctgccatgagacagatttcccaagacactcatgatgctattacccgtattattaaagtaccactctga

SEQ ID NO: 455193 - DNA, 1959 bp, Serratia marcescens
atgagccaactgcacaaacatgcgattcctgccgcaattgcggaacatgccctgattagcccggcacaataccagcaatactatctgcaatcggtgcaagacccggcggccttctggggagaacacggcaagattgttgactggatcaagccttatactcaggtaaaaaacacctctttcgcgccggggaatatcagcatccgctggtttgaagacggcactctcaacctggcggccaactgcctggatcgccatctggccacccgcggcgaccaaaccgccattatctgggaaggtgacgacccgaaccaatccaagcatgtgacctataagcaactgcatcacgatgtctgccaatttgccaacgtgctcaaaagtctgggggtgaagaaaggcgacgtcgtggcgatttatatgcctatggtgccagaggcggcggtagcgatgctggcctgcgctcgtatcggggcggtgcactccgtgatctttggcggcttctcaccggaagcggtggccggacgcattatcgactccaacgcccgcctggtgatcaccgccgatgaaggcctgcgcgccggccgttccgttcccttgaaaaagaatgtggatgacgcactgaaaaatccaggggtgaccagcgtcgacaatgtggtggttttccaacgtaccggtaaacccggctactggcaggaaggccgcgacctctggtggcacgagctgaccgtcggggtctctgcagagtgtccgccggaagagatgaatgccgaagatccgctgtttatcctctatacctccggttcgaccggtaaaccgaagggcgtactgcatactaccggcggctatctggtctatgcggcgatgaccttcaaatacgtcttcgactaccatgatggcgacatttactggtgcaccgccgacgtcggttgggttaccggccacagctatttactgtatggcccgctggcctgcggcgccattaccctgatgtttgaaggcgtgccgaattatcccggagttaatcgtctgtcgcaggtcatcgacaaacatcaggttaatattctgtataccgcaccaacggcgatccgtgcgctgatggcggagggcgacaaagcgattgaaggtaccaaacgcgactcgctgcgcattatgggctcggtgggcgaaccgattaacccggaagcctgggagtggtactacgaaaagattggcaacggccagtgtccgatcatggacacctggtggcaaaccgaaaccggcggttttatgatcaccccgctgcccggcgctaccgagctgaaagccggttccgccacgaagccgttcttcggcgtacagccggcgctggtcgataatgccggtacgccgcaggaaggcgcctgcgagggcaatctggtgatggtcgactcctggcctggccaggcgcggacgctgtttggcgatcacgcgcgctttgaacagacctatttctcgacctttaaagggatgtacttcagcggcgatggcgcacgacgcgacgaagacggctattactggattaccggccgcgtcgatgatgtgctgaacgtttccggccaccgtctgggaacggcagaaatcgaatcggcgctggttgcccacccgaaaatcgctgaagccgcagtggtcggtattccacataatattaaaggccaggcgatttacgcttatatcacactgaatcacggtgaagaaccgacgccggagctctataccgaggtacgcaactgggtgcgtaaagagatagggccaatcgccacaccggatatcctgcactggaccgactctctgccgaaaacccgctccggcaaaatcatgcggcgtattctgcgcaaaattgccgccggcgataccagcaatctgggtgatacctcgacgctggcagatccggcggttgtcgacaagctgttggaagaaaaacaatcaatgaaagtaccgtcgtaa

SEQ ID NO: 455194 - DNA, 1344 bp, Serratia marcescens
atggtgtttccagtgaacctcaaaggaagatatgcatatcattttacttctcttgacaaccttggaacgataattgaaaatgggttattgtgtacaaacttaaaagatcatctgaatataccccatcataatattgccgaacttgggatacaaggaagaagaagcactatgtcggtaccgtgttctgatggaaagtttgttcacgattatgtccctttctacttctcaaaaagaaattccatgcaacttggtgtgattaataaaaaaaacatagaccaagcgttccttatttattttgcaatccccatagagattatttgtgaaaaagctggtgttgtgttttcagatgcttcagcaaatactgatgtgccaccaaacttttataattcgctatcattaaacatgcttaattctttaaactggaattctattgatagtaggaaatggtcatgcccgtcagagaaggaacgtcaccagaagatggcagagttacttgtccccggtagtattcaagtttcagaagtggcttacatggtagtgtggaatagttggataaaagatgaagtagagcaagtgtttaaaaccaaagcagtaaagccacctgtaatccgaggggatgaggatcattactatataaacttttatgataatagtagaaaatcaattgtgactgggccgttttttttaaaaaaaggtatggaagagacgattgtagatatatgtaaaactggtagtgtgctgaataagtatgaaagtattcgtgatgcactggatgcaatagaaaaaaacttttcatctataaaagaacttggtgatatagatgggttaagggctagttatgggccgcacactgatgatgttggcacacatagcagaaaagttgcaggtgctctcaatcagtttcacgaatataatggactatctgatgaggataaagaaattgttcttatttccgcatatcttcatgacataggtaaagggccgaaatctcgctgggggcaatatggaatgactaaagctgataatgaccatgctgcgaaatccttgcctatgttaaagcgaattcttacagaggatattggcgggcttagtgaggaatcagtgagaaagatagtaacattagtaacttatgacgacttaatcggtgacatcgttgcgagggaccgtgatgagaagcagttggttgatataattaaaaatgaaaatgatttgcaaatgcttatcgctctatcaaaagcagatatgagtgcaatcaatccagaatgggtaacagcctacagtcaatcaatagatgatttagcattgagaacggtgcatgtgattaggagtaataacatatgctaa

SEQ ID NO: 455195 - DNA, 1131 bp, Serratia marcescens
atgctaaaatttgttaaaggtaacttctttgattttgatgccgatattagagttaacacggttaattgtgtgggcgtcatgggggcgggggttgcgctagccttcaagaataaatatcctgagatgttcaaagagtatgttcgtcaatgtaaggctaatgaaatatctcctggaaaacctagtgtgtggaaaaaagaagatatgttctcgaaagggattgaaattataaacttcccaactaaggcacattggcgaaacccatcagagtatgaatatattgaaagtggtctcatctggctttcagattacttaaagaataaagaaggcttgacgataacactaccagctctcggttgtgggcatggtgggttggattgggttaacgtgaagaaactaattctgaattatctttcggaaacgaaaaataatattttagtatttgagccggaatcttcaaaaaaagccgggagagaggcggttattacaccggataaacttgcaaatcttgaaggcttaggtgtaagtatgataagaaaaagtgaaaaatcctatccggctggattgatgcgatatacagaaaaggatctctgggttcttggtaaggtaattagagaattcgatatttctttaatctcaagcaccaaacctaatgagcaagaaaaaatgattgtccttaagttaatagaatactgtaaaatcaattgtctgagtattttgtttggtggttctgcttttgataagaaaatggctttgcatgctattagacaaggggttgaggcagggatttttttgccgaacgggatttcgcattctgcagagaaaatgcggaacaaaggtgttgcgcataatatatctattctttcaataggtgatccttttaaatcatttgataaaaaagactacatgccatctgttatggggcgtatgtttatctgtaagtcagttatttttactacagaaagattgaaatggcttgagaaacaaaggggtgcaattataaacggcggtttggatttgtattttatgaaatatgaaagtattcaagatgaggattattttgctgctattaatataaacgcaaaaccaatgaaaccgtttgacggtgaccgaatattgcaaatcacattttga

SEQ ID NO: 455196 - DNA, 228 bp, Serratia marcescens
atgcgccaaactatgcgcgaaaccaaagaattaggggacttccgcaacctgttgatgtacgctccaaacagcaagctagacgacattaaaattgtgccacagtcgaaagtcaccaccaacgatgactttttcaacatcaataacgccagacgcgaaaatctgatgagtgcgtaccgagtatcgcctcagatggtgggtattatcccgaacaataccggcgacttctag

SEQ ID NO: 455197 - DNA, 417 bp, Serratia marcescens
atggatcctataatgaaaggaaatctctcaaagctgcaaaacgaaaagggcctggctgctaatatgaatagaaatttgaaaattagaataattaatagtaaagatgatttggttgaggggacattttgctactctttatttgaggatgcaatatttaatagtgacttgttaaatgaattgataagtgactctgagtgcttttttaataacaatgagtatgatgaagaggttgctgatgtattgtcttggcttgttaaatgtgtgaatcaatgttttttatcaaatggtgaaaagaatgatttatattttataaaaaactacagtgctgaaatggaaagcaaatggaatgattattgggagccaaaaataaaaaaattattagagaaaaatataatgagtagtaaatcttcttcgtag

SEQ ID NO: 455198 - DNA, 297 bp, Serratia marcescens
atgagcaagatggtattttgccgcggctgcggcaaagaaattcacgaaacggcaagaagctgtccacactgcggcgcgcctcagtcggtgcccggcgagaaaaaccgcattgccgccgcgctgctggcgttctttctcggcgcattcggcgtacataaattctatctggggaaaattggccagggattcctgtacctgattttctgctggacgctgatcccgtccgttatcgcctttattgagtttattctctacctgtgccagtccgacgaagagtttgccagaaagtatggctga

SEQ ID NO: 455199 - DNA, 1050 bp, Serratia marcescens
atgaaaaatagcgcctgcacggggttattgagcatgatgatcctcagcgcgcccgcgctggcggcaaacagcggcgtgtcattcagccacaaagattgggaagtggtttgtgataacacgctgacctgccgggctgcggggtacagttccggtgagggaaagggcggttccgtgctgttaatccgccaggccggggcgcgaagtgctgttaccggtgcagtccggctgggggagattgagtctgacggtaatttatcgtttgacgcattgacgctctggattaacgaccggcaggccggcagcgttagatctggtgacgacgatacctggctgctgtcggaaaagcagacgcgcagtctgattcaggcgattaaaggcagcgggaaggtggaattcagaggcggaagcgagtctttcgtgctctccggcgacggggcctatgccgtgctgctgaaaatggatgacgtgcaggggcgtatcgggacgccgggcgcgttgagcaaaaccggtaataaaccggaaggcagcgtgcgtgccgcgatacccgcaccgatcgttcagcgtgtacagatggaaaaggcgcaggaacgggagctgacagcaccggagttggcggtgttgaaaccgaaactgctggcaaccctggatgaagatgaggattgtgagcgcatccggccggcagaggatggcgaagaagagcacgcagaaacgttcggcctgacgccgctggacgacgcgcacgtgctgatttccgcgctttgctggcgggcggcatataacgaagggtacggctattgggtggttgacagtaaactcgagggcaaaccgcagctcatcacctcatcaggttctggctatgatgagggggaaattttcatgagccagaaaggacgtggtctgggtgactgctgggggatggctaattgggtgtgggatggcatgacgttccgcaaaagcatagaagccaccacggggatgtgtcgctatatccggctgggaggcacctgggacttacccacctgggtgaccgaggttaaaccggccaaataa

SEQ ID NO: 455200 - DNA, 1098 bp, Serratia marcescens
atggcgaacttgcacctgaactgtatgaccggatcatcataccatctcgtgcatggagcatggtttgccgtgactaatacattcgatgataaaagtgccataggttttagtaattttggctcggatatcaaagaacgtgctgcttggaacaacgcccccgttgataagcaaggttattatgccaagtcgatgaaacacaacatcgagcatggtgacgttgtttatatcgacaccaagtcgctatggaacccgttagactccgcgttttacatcaatcaccaagggtgtctggtatcgaattctggctacagcgcctttaagcttgatggtgccaatcgaattattcgctattacgaacaagccattacatcacgtcgtgggcaggagcgaccggcagccaccgttcgtcctcttccaccgcagcctcaaaaggccaagcaacagctccatacgttaaacagcaaagcggttggacggttgttagccgcaggggggatatataaccagaacgtaaagggatacgcagagacagcaaagcagctcggtggcgaggcagcagatggttttagccaggttgcaaatcctcagtctattggctcactgatagcactctcatccatcgtagctgttgccagacttccaaacaacagtgttggcaatgtcaaatccttggaagaattacaacattttttagggacatataaaggcgatccgaagttacttaataatattaatgttgttaagatgaattacattcgtcgagatagcgttgagaggaacttgctaagaaaacagttttctagtgttaaaaaggattttcttaaatccatcgctaacaacccagaagtaaaaaaacgagttggaccagatgatttgttacgtatggctgatggtaaaaacccatataaatgggatgtgcaccataagttaccgcttgatgacagtgggagtaatgacttcagcaatttagttttaattagtaaatctcctgaacattctgttttcacaacaagccaagcacgaataactcgtagcattgcatccggtggctcaactgaagttttatgggctgtaccaaaaggcatcatctatccatag

SEQ ID NO: 455201 - DNA, 210 bp, Serratia marcescens
atgagctgggccaagccagcgctgcgcggcaccacgctgcagctgaacgtcaacaacgtggcggacaagcactatgtcgcctcctgcggcaacacctccgcctgcttctacggcagcggccgccggcgtttttcgtcaccgcgtctagcttatccggacggcgccgccgctcaccgacagccccagacgtgccgcaacgcgctgcgatga

SEQ ID NO: 455202 - DNA, 213 bp, Serratia marcescens
atggatgtaaaatcaatagccaaaggaatggttgcgggaaaaggggctttgcatcttattgaggctattgttggcggaatattctctattggcgtgtttgtctcatttttttggttcgatgactggtggcaacgggttttaagcgcagtaatttttatggtgctggtcatagccactgttggcgtatgcagttatgccagaggtgagcgctga

SEQ ID NO: 455203 - DNA, 240 bp, Serratia marcescens
atgaaaacaattactacgaatgaacttctggatacttatgtttttactagcgaaaaaccttcgcgtgtaaaatatgaggtatatgacagctacagcgagttgacagcggatgtgactgtatatcgtattgaccctgtagggatagcgtctcgtgatattattttattagatacatctcgagaacaccctgagcttgcttttgatgaagtaaagagtcatttcgagaaaaagtatgcctaa

SEQ ID NO: 455204 - DNA, 1056 bp, Serratia marcescens
atgaagaaaaatattttttttggaataacagggcttagggccattgctgcctctcttgttttgattgttcattcatcagcaatgttatcttttggccacagcatcagcccactagttattctaacaaactctggggtagatatattctttataataagtggttttataataacatacgcacactggaatgatttcggtgggggaatatcaaatattcgcaagttctttaaaaaaagagccatcagaatatatcccatgtatgttatttttacattaataacaactggtattctcattgcaatcccatcgttattctttagcttaaaatatagcaacagcctactactttcatcgttatttttcatcccatcacaaatggataatggagatatcacgcttattcttgcggttgcatggacgttatcatatgaagttgttttctacctcatatttgcaatagcgatgatattcccaagaagatatggattagcattgatatgtatctctctagcactatggtctatacttcacacagtataccatggagaatatatatcagaatattttttatccactcttcctcttgagtttttatttggggtgttactgtgctcagtattcatgcacagtggaaatggtttgagagtaaataaaccactgtcttacttttttgtgttgttatctatagtgtccattctgacgataccattccattttccttatgatataagtgagttgcgcggaaatggccgtttcatttactttggcattccatctctgattctcttttttgccctattcaatacagggaggcctaagaaccccattgttagcaaatcaattgagttaattggaaatgcatcatacgtaacatatctttcgcacttccttactattggtgtgataaaattcataatgaagcggattgaaataattcaatcaatacctctttctattatcgttattttttcctgcatcgcgtgtaccactgtgggcattttagttcatatttttgtcgagagaaaagttctaggatttctaaactctagagcttaa

SEQ ID NO: 455205 - DNA, 216 bp, Serratia marcescens
atggccaaactatactattccctgtgctgcatcgtgttgaccatcggcatcggcatctctgtcctcagcgccgagttccccgacagcgctgacggtggcgagatgcccctggcttttggcgccggactgtatatcgcatttatcgctattctcggcgttgctgcaggcttaatagcacaatgcctctcagcggtgataaaaaagctaaccagataa

SEQ ID NO: 455206 - DNA, 1260 bp, Serratia marcescens
atggctgatctgttcggtgaaatcgtggtgattggcgcggggccggccggattatccgctgcgctggccgccgcgcaaagcggcaaatcggtgctgttgctggacgataacccgcatccgggcggacaaatctggcgcaccgggccggcggtcgttctgccggcgctggcgcggcattaccgccaggcggtggcggcgcaaaaaaatatccgctggctgcacggctgcaaagtggtggcgctgtgcggcccgcggcggctgttatatgaggatgcacagcactgcggcgtgattgagttccggcatctgatcctgtgctgcggcgcgcgtgagctgctgctgccgtttcccggttggacgttaccgggcgtaaccggcgccggtgcgctgcaggcgcagatcaagcaggggctggatgttcgcggccgacgggtggcgatcgccggcagcgggccgttgctgctggcggtggcggatacggtgcgtcgggccggcggcgaggtggtgctgctggcggaacaggcgccgctgcggcgcacggcgcgctttgcctgcgggttatggcgctggccgggcaagctgcggcagtccgtgcggctgtttaatccgcgttatcgcggcgacagctatgtgctggccgcccacggcgggcgccggctggacagtattgaggtgcaagaacgcggacgcgtgcgccggctggcctgcgattggctggcctgcggctatgggctggtgccgaatattgaactggcgcagttgctgggctgccggatagcgcggcaggcggtggccgttaacgcccggcagcagagcagcgtggcgcatatttacgctgcgggggagtgcaccggcgtcgggggcagcgagctggcgctggctgaaggggcaatcgccggctatgccgccagcggtgcggcggcgccgtcgcggacgctgcgggcgcgtgaacgctggcagcgttttgccgccgcggttgcgggtactttcggtcttaacccggcgttaaagacgctggcgacggcgcaaacgctgctgtgtcgctgcgaggatgtgaccctggaacaggtggccgggcaggcggactggcgcagcgccaaactggccagccgctgcggcatgggcgcctgccaggggaaaatttgcgcaacggcggcgcgctatttgttcgactggccgctggcgccgccgcggacgccgttgacgccggtacgcaccgcgacgttgctgcgcggcacagagcgcgaatccgacgcgtaa

SEQ ID NO: 455207 - DNA, 249 bp, Serratia marcescens
atgagtaagatagccatcaccattgatggagaacgtctgtgggtcaaggcaggcatcagcgttgcggcggcgttgagtatgacgtcgcagccgcactgccgtttgtcggtctccgggcagccgcgcacgccgttttgcggcatgggcgtttgtcaggagtgccgcgtcagcattgatggcgtccggcggctggcctgccagaccctgtgccgggccgatatgcatattaccaggagtgacaatggctga

SEQ ID NO: 455208 - DNA, 453 bp, Serratia marcescens
atgggaaaggaagtaaccacgaatacgtcgccggcttttgtcatgatgtcatggctggcattacttggcggcgtagttgtctatctgataggcctgtggcgtgccggaatggaactgaatgaaaagggatattatctggcggtaatactgttggcattattttcggcaatctcgctgcaaaagaccgtacgtgacagaatggataatattcctactacgcatttatattatatttcctgcgttgtcgcttttatcgcttcggtcttgttgctggccatcgggctatggaatgccacgttgcttcccagtgagaaaggcttttatggcatggctttcttcctgagcctgtttggcgccatctccgtgcagaaaaacgtccgggacgcggggacggatcacgacggcaagagccgtgcagaacgtccggccgcgccgggggaagaacgggaataa

SEQ ID NO: 455209 - DNA, 375 bp, Serratia marcescens
ttgaatagttttgaaagcagcgttacgacctgcagtttatacagcgtgttctttctgaggtggggatccggttccgtaccggcgtttaccgttagaaatagcgccaccaccacgggagaacactaccgctatgccgcgcctttcctggacgccggtgatgacggcacgtcagagccggaaaccggaagcggggcgttttatgcgcgcatttaccatgagcgcgagctgaacagctcggccagactgcatctgttcagcaacgccgcacagctgatgccgggtggggggctggaagcggacggcagccgtttgtggagtttttctttggaacagaattataaggtaactcatgtcaacaaaagcgcagtttcttaa

SEQ ID NO: 455210 - DNA, 141 bp, Serratia marcescens
atggtggtgggggttttaaaggtgcagggattgaaaggtggggatgtgttttactcggcgttatattatgtcttctggccggttgttatattttttatttatgtaacgaaaggggtgttatctgatttttttgggaaataa

SEQ ID NO: 455211 - DNA, 750 bp, Serratia marcescens
atggaattcactgagagccaggttttatcacttaaagagttgtcattttcaaggtatataagtgaactctacgagcattgtcgaatcattttccctaacttgattcctttgtttgataaggcgacacttaataaacattttgaaaatattattatgtcggcgaagaagtctggatatacgcaaagagggccagtacgcttttatgttgatatgacaataatgtttggatccgggtttgagtatgatccgctttattattggttaaaaaacaacattgaacatgaacttccacagttagaaaagagtatggcaatttacttattagtggagcagtacggtagctctgcccacggtatgggatgtgtttacttgaaagaaagtcaggctaattttcagaatttagatgtcaatggtttgccttctcgtttaattgatggggatgggagtttacataaactgttaaatgatttatatcctcagcgctattcatttgtgggcgctaatgccgtagatgaattaataatgctttcagatgttaattctgaactatataatttaaatgacgaagtgtgtaaaacatatttcatcgtgattatgtttttattcggggttgggtttgataaagatttttttcgatctcaccttattacacccccgttgctaagcttctttaacggtgacagggaaaatagtcactataaaatctcatcaatatattcatgctttcatttgaagcatgattcagtatga

SEQ ID NO: 455212 - DNA, 612 bp, Serratia marcescens
atgaagttaaatttcctatggtttttgttttttatattaattgtttttagtgttggagactattatatgtatgcacagtctaataaaatggctgtatttgtaattccagaaagcgaaaatgatcatgaatggccaagcaggaagaaatggatagatgcgagcaaatggcttgaaacatcacaatatattaaaattgatgatttctatctattaaatctcaattatacaccaatagatgatttaaatgtgttcgggattacggcaagaatacaggaagccataaagaacgctggggatgatattcctgagctagctgctcttaacaatttagatagtcaagtttttttccaactgatggatggtaaactttctagtgagtatttgaggactgagtttaataacgaatcattaacgccgattgatgattattttctaatattttttttgtataaaggaaataaatatgaagtagaactgctaaggaccattttcgatgggaagcctatttttatgacatatggcagtgccgtaagaaaatcaggctactggcattcaatattacctgctgggtattcatacaaggacttcaaagagggtaagccggtaaagtaa

SEQ ID NO: 455213 - DNA, 1320 bp, Serratia marcescens
atgactgacaactcaccattagatcctacctcaatgacaaattgcactggtgaagtgggggagcctgcaggacagtgtaatcaagagtttactaaccaaattaagcttgtgcccgtgaatggtgatgctgtcgttctgaagggggttccttggtccgtccattttaaagatacgactaatcaacggggtaaaaccaatgataggggtgaaacggaacggtttaaaacatcaaaaccagagcttttcttcgcccttgtcggaaaattatcggagggattccggaagcgtggggggcgttttggctcgctgggcgaaattgaagaaagaaaaatatcactggttaccatgccagactatcctgaaaaagaggtgccatactgtagcggttatgactatatcacagtggttggagcaagaacggcgccaagagactggcgctggcaggggggatatggcctgacggcggagagtaagggcaaccaatatcgatttattaattgtggaatacgtcaactgtgtgagtttcctccggccagtaaagataattattctgtacagcgtattatggtggtttttcaacaaggatatactgagtatgatattggtaaaataaatgaatatacagaagggcatcatgcccgcattgtatatgtaaagaataaagagggacttgttgattttttgataaaaagaaaaagtaaaaataggcttatcaaggagatggtgtttttttgccatggcatcatcaatattgcgtcttttcattatgcaggaaatgatgtagaagctggagagttttctattaatgatattaagaatgtgtatgagtcaatttttgattatgatgcagaaatcacaacttatgcgtgtagagcagggatttcagtgggggggggtgatttcactggaaaagatgctgggcagaagaatagtccggcacagaaaatggctgacagttgggatgtaaaggtaaatgccttcgaaatgagatccagctatgtaggtatttatggtgctgtggaagaaattaaaaaggctagtggttatggggatgttataaaaaaatatcaatatgagatggatgtctataaagcagagaaagctaaaggtaatatacatgcaaaacctcctgagcttccaagtgactatgatgtgaatgtcagaagacatatcgattttaaagaaagaacaaaaaatgaaaaaataggtgggcctatatcacctaacggatcttggcgatatccaagaacaggtaatactcctgccggactaaagaaaggtttacaaccataccagccaaccgagtggaagttgttatga

SEQ ID NO: 455214 - DNA, 558 bp, Serratia marcescens
atgcgggatcaacattatgcttttcaggcgctaactgagagcaggaaaaaatcagatgtcgtgaagatatatgctctggtggatggcattcagtatgaaagagcttttggtggaccaatagaagaaaacaagattgttcggcctcttttaactttgcctgaagacagacctattgcgtttgcaggcccatggttaatggatgctgagcagttatcaatgaatgagctttcgaatatttttgtgcttgaaaaaaaatacccagcagtatcatggattgtaagtgagaaagaattatatccgctggcagcccatttaacgtcttgtcttatgatatcctttccttcaaaggaaacgggtttgtttcggttttacgattgtcgggttctgttactactacctcaaattttattgccctttcaaatcgagaacctgatgaaacttacgcggcaatggctttttctgagtaaaggcgccataaacagttttcattatcatgatgcagtgctgaaaataacaacccaggaaaacaaacaaaacgaaaatagggatataccataa

SEQ ID NO: 455215 - DNA, 300 bp, Serratia marcescens
atgatcgatgggcagatagcaagcattacctggaatattacaattaaggatgacgaaaatgcagttgttactgtgtcatcatggcatgccccgtttacctgtgatggtaaatatattgtttcacatgaaggtaagaaattagcgctcagctggtccagtaatgataatctggatactgagtgtgatatgccatcaccgcaaattttcctgaaaaaatccccgatcgggaaagtcttggttcacagtaaattattcatttgggatcccaatggttggaaaaacacccgtgttattcgttag

SEQ ID NO: 455216 - DNA, 213 bp, Serratia marcescens
atgagacgttttcttgctattttagttggcgccgctgtcggtattggcaccatgttgttgatattcccgtatcttgcgtactggatcgtggggcctattcatggtgatgaccaaatgaatgcaaaccttgtagtgcttatcgtagggatttttatctgtaccctgattggcgctttcctgggtaatggcctttactcccggcggaaacaataa

SEQ ID NO: 455217 - DNA, 519 bp, Serratia marcescens
atgccaataacgttcaatacattgtgggaaaatcatcccgagattaatggcgatgccaacccatgccgcaaatctaacggtgataaagctttcgatgaccagtgcgctattcgcattggtactgccctggcccgatgtgggtatgatgtgacaaaattgtcaggcgttacttcttgttggatgcacccaaaaagcgatgggcatatcttacgggccgaagaactggccaacgcattggccagaacggcggtgccagggttaggccgcatggtgaaagttgctccggcaaaatttgatcaggcattgaaggggcaaaccgggatcatcttttttaaggactactggcggcgaaaaaatgaaagctttcgcaatcgatcaggtgatcatatcgacttatggaacggtacacgcctaacgtcaaaactcagctatgtccgtatacagtggggggtgtcgtgggaaggcaccattagtaactacttcaaatcaagagaaatttggttctggagagttatatga

SEQ ID NO: 455218 - DNA, 1401 bp, Serratia marcescens
atggtcgatgtactggtgattggcggcggcaatgccgccctatgcgccgccctgacggcccgtgaggccggcgcgtcggtgctgttgcttgaagcagcgccgcgcgaatggcgcgggggaaactcgcagcacacgcgtaatttacgctgcatgcacgatgcgccgcaggatgtcctggtggacagctacggcgaagaggagtactggcaggatctgcggcgggtcaccgacggtcataccgacgaagcgctggcgcgcctggtgatccgcacttctgcgcactgccgcgactggatgcgccgccacggcgttaacttccagccgccgctgtcgggcgcgctgcacgtggcgcgcaccaatgcgttctttatgggcggcggtaaagcgctggtgaacgcctattaccgcagcgcagaacgtctgggggtgcagatccgctacaacacgccggtacagtcgcttgagctgcgggaaggaaactttgtcgccgccatgacgggagaggaacggatcgaagccaaagcctgcgtgctcgccgccggcgggtttgaatccaaccgcgcgtggctgcgcgcggcctgggggcaaaatgcgcgcggcgaatggccggccgacaattttttaattcgcggcacccgctttaatcagggcgtactgctcaaatttatgatggacgcgggcgcggatattatcggcgacccttcccagtcgcactgcgtggccatcgacgccagagcgccgcgctatgacggcggcatctgcacccgcgtagactgcgtgtcgctggggattgtggttaaccgcgatgccgaacgtttctatgacgaaggcgaagacttctggccgaagcgttacgccatctgggggcgtctggtagcccttcaggcaggacaaatcggctattcgattatcgacagcaaagcgatcggccattttatgccgccggtgttccccggcgtacaggctgacacgctggccgaactggcccggcggctggggctggacgccgcgcgctttacccacaccgtgacgcaatacaatcaggcctgcagaccggggcgtttcgaccacaccacgctcgacgactgcagcacggaacatctgacgccgccgaaaacgcactgggcgcgcccgctcgatacgccgccctattacggttacgccctgcgcccgggaataaccttcacctaccttgggctgaaagtgaacgatcgcgcggccgtgcactttgccggccggccgagccgcaacctctttgtcgccggggaaatgatggcgggcaacgtgctgggcaagggctataccgccggggtgggcatgtctatcggcaccaccttcggccgcattgccggtaaagaggccgctctggcggcacgggaggcgcagcatgcagccgcttga

SEQ ID NO: 455219 - DNA, 924 bp, Serratia marcescens
atggaaaactggatacataaactcaaactgcaccacctgcagatcctggtggcgctgggcgaacagggtaacctgacccaggtggcgaagatcatgcatatcacccaacccgccctgtcgaaatggctgacgcagtttgagggagaaatggggatagaactcttcgatcggcacagtaaagggctgcgcgcatcaaatgcaggaaaactgtttttgcaacatgccagacggttaattcacgacatagagcgcacccagtcagaaatgaaacgctacaagcatggcggactatcaggaagccttaaaattggctgttcgccggtagcgaccgactgtgtctcgcaggctattttgctgttgctcaaagagatgccggatgtgcatttcaatatcgaagaaaaggtgatggagccgctgctgaccgacctgctttccggtgcgatcgacgtcgtcgtcggccgagtcggcgggcgggctcttgggctacctcttaattatcgggtactttacacagaaccggtctgtttcgtcgcccgcaccgatcacccgctgacgaaacaaaataccgtagcatgggacgacctggcgaactggcgctggatcgtctggccaaccggtactcccattcgtcagagtattgatagcgcgcttgtcgataacaacgtcatgctgccggataatattatcgaatcatcttcaatgaacgtaagtattagcctgctgcaaaacagcgagatgatatcgatcctctctttgcgactggcggaacattatgccagaaagaaacagctggcaattcttgctctgcccaatatcgaacaaaaaggcagcgtaggcgttttctggcccaaagactctccgccctccagcgtgctcagcgcattccttaaccaattaacacaatatcgtgagtccgccctctag

SEQ ID NO: 455220 - DNA, 1359 bp, Serratia marcescens
atgaccgaacaacgtgatttacaggcgctgattgatgccgcaccgataggcagcgttcagtggcgcgtcatcatttgctgttttctggtggtgatgtgcgacggatttgataccgcggctattggttttatcgccccggacattcgcgacaattggcaactcaatgctggcgaattggcaccgctgttcagtgctgggctgctggggctgaccgctggcgcgttgctgggcggcccgctttctgaccgctttggacgtaagcgcgtgattgagctgtgcgtggcgctgtttggcatatttagtctggcgtcagcgttttcaccgagccttgaaacgctggtgatactgcgtttcttaaccggtctcgggcttggcggagcgatgccgaacacgattaccatgacttcggaatacttgccgtcgcatcgtcgtggcgcactggtgaccatgatgttctgtggttttacgattggctcggcgctggggggcgtcatgagtgcgcaattaatcccacatatcggttggcaaggcattttgatatttggtggcgtattgccgttggcactgtgtgtcgccttgctggtttggttaccggaatccccgcgttggcaggtacgacgcaaactggcgccggcggttattgctcgcacggtcagcgccatcaccggtgaacattatggcaatacggaattcttacttagcgagagcgaggccacggcaaaaagcagtgttggacaacttttcacccgccgccagttaccgatcaccttgctgttatggctcgtttttttcatgagtatgctgattatctatctgctttcaagttggatgccgacgctgctcaaccagcaggggattgacctgcaacatgcttcttgggtaacggcgacctttcagattggcggtacgctgggcgccatcctgcttggttttctgatggataaattaaatccctaccgcgtgctggcgctcagttatgcggcaggcgcggtgtgcattgtcatgattggcatgaacgaaaatggcctgtggttgatggcgctggcggttttcggcaccgggattggcgtcagcggttcccaggtcggccttaatgcagtaaccgccacgctttatcctacgcagagccgcgcaacaggcgtaagttggtcaaacgcggtaggacgctgcggcgccatcgtcggctccctttccggcggtatgatgatgacgacggatctcgctttcaacacgctctttttcatcattgccgcgccggctgcaatgagcgccgttattttgctgttgctggcgttggtgactaacccaccggaaatactccccgacagtagctccccagctggcgccgcgaacgaataa

SEQ ID NO: 455221 - DNA, 1038 bp, Serratia marcescens
atgtctgtaactcaacgtgatgtgaacacgaaacgtcaacagttctaccagcatatttcagaaaaaaacctgtctccgctttgggaatcgctgcatcacctggtgccaaacacgcctaatgccaactgcgatccggcttactggaactatcaggaaatccgctcgctgttgctggagagcggcagccttatcggcgcaaaagaagcggtgcgccgcgtgctggtactggaaaatccggcgctgcgcggtcagtcatcgataacctcgtcgctgtatgccgggttacagctgattctgccgggcgaggtggcgtggagccaccgtcataccccgtcggcgctgcgttttatcgtcgaaggtcaaggggcatttaccagcgttgacggagagagcacccaaatgcatcccggggatttcgttctgacgccacagtggcgttggcatgatcacggcaacccaggtgatgaagccgtggtttggctggatggccttgatttaccgctggttaactatctcggttgtggttttgccgaagagtacccggaagagcagcagccgctgatccgcaaagaaggggattacctgccgcgctacgccgccaacatgttgcctttgcgccatcaggtcggtaactcatcacctatcttcaactatcgctatgaccgcagccgcgaaacgctgcacgacctgactcgttttggcgatgctgacgagtgggacggctacaaaatgcgttacgtcaatccgcttaccggcggctatccaatgccatcaatgggagcgttcctgcaactgttgccaaaaggatttcgttctcgtcaggccaaaaccaccgacagcaccatttatcacgtcgtggaaggtgccgggaaggttgccgtgggcgatcggaccttcagcttccaggaaaaggacatttttgtggtgcccacgtggcacagcgtgtccttcgacaccagtgaagaaaccgttttgtttagtttttcggatcgccctgtacaggaagcgttgggactgttccgcgaagcacgatattaa

SEQ ID NO: 455222 - DNA, 699 bp, Serratia marcescens
atgactagttatgtttttgcaccacaaaatcctgtgagcgtgccggttgtcggcagtgaacaacagtttccggtccgccgcgtttactgcgtgggccgtaattatgcggcgcatgccagagagatgggattcgatcccgatcgcgaaccgcctttcttcttctgcaaacctgcggatgccgttgttccggtcgccgatggtcagacgttggaactgccttatccggcgaaaacgagcaactatcattatgaaatagagctggtcgttgccattggcaaagcgggtaaagatattccgcaggaacaagctcatgaatatatctggggttatgccaccggccttgatatgacccgccgtgacctgcagatggaaatgcgccagatgggacgaccgtgggaaatcggtaaagcctttgatctttctgcgccgattgcgccgttgcataaagctgcggaggtgaaggtagacgaagcgccaatctggctccaggtgaatggtgaagatcaccaacgtagcgatatacgtcatctgatttggtcggtaaatgagaccatcagttatctttccggcctgtttgagctccggccgggcgatctaatattcaccggcacgccggaaggcgttggggcggtggtgaagggcgatgtcattagcggcggcgtagacgggttgacgcctatcgccgttcgtgtggtatga

SEQ ID NO: 455223 - DNA, 645 bp, Serratia marcescens
atgaagctgtacagtttttttaatagctcagcctcctaccgcgtgcgtatcgcgctagcgttaaaaggtattgactatcagagtgttggtgtcaatatccgccttggccagcagaatgagcatgagtaccgccagctgaatccggcggggttggtgccgacgctgatcaccgatgataacgaatcgctcggtcagtcgctggcgatagtcgactggttggatcgccgttacccgcagagacctttgctgccgcaggaagagccggcacgcatgcgggtgctagagatggtttatagcattgcttgtgatacccacccgattaataacatgcgtgtcttacgctatctcagtgacgaactgaaggtgagcgaagaagataaaaaccgctggtatgcgcactggattcagcagggatttagcacccttgagacgttgctgcggcaggcgaagtccggcgatttttgcgttggcgatgcgcctacgctggcagactgctgcctggtgccacagtgggctaacgcgttgcgtatgggctgcgatttgagtggctatcagcgcagcaaagcgatttatgacgcctgcactcggctaccggcatttatcgccgccgcaccggaaaatcaacaggataaaatttcggcttag

SEQ ID NO: 455224 - DNA, 948 bp, Serratia marcescens
atgacaggcaaaaaaatcgcgtcggcaaagcctgccggcccggctctggaaatcagtgcattgcgtgtttttgttgcggttgcagaggcagggagttttgtggccggtgggaaggcagtaggactgacgcgctctgcagcaggtaaagcgctggcgcgtttagaaacctacctggagacgcgacttttccagagaacaactcgccgcctgtctcttacggcagaggggcacgaattctatcatcgttgctgtcaactgctggaagatttggaagaagccgaatccagcgtccgtcagaatccaccgctgccaaagggcattctcagactgaccatgtcagaaggttacggcaaaatgattgttctgccgtttattcatgcgtttttacagggtgcgccggctataagcatcgaagtaagcttcagcgaccgggttgtggatctggtggaagaaggattcgatcttgctatccgtgtaggcaacgggaccaccagttatcaatacataacgcaggtaatcgacagaacatggccgcagctttttgcctcacctgattatctcagacaatggggaatgccggaatcgcttgctgatctcagcaaccatcgtcgtcttgtttatggtttgggagcgtcttccaccgcatggacattaactgataagaaactggggcaagtaaccctgaacggccggaaccatgtcaggtttgatagtggagatgcaattcgcacagcagcaataatggggttgggtatctgttttttaccagcgttcatggttgaaaaggatctgcgggaaggccgcctggtacaggtgctgactgacacacaaggtagtgaagttgctgtccatgctatttaccccaaccggagatatctttctgttcgggtaagggctttcattgacggttttaaaaaatttctggttaatacaaaaacagcaatataa

SEQ ID NO: 455225 - DNA, 930 bp, Serratia marcescens
atgttgtctaaaaaagcccaaaatgccctgaatggatggattgatgcagctcgtccggttgttgagaagctgtacggtaaatcagaagcaggctggcccgaagttcgcacgcaatatatgcagggtctcgaaaaaatcttccccgcgatcgatggtgtttcctacaaaacaatcacgttgggagatgcgccagcgatgatcagtgagaggcatgaacataccgggagcagggtggttctttatattcatggtggaggctatgtccacggtggtgtcgaggcataccgtggccttacggggcgaattgccacagctttaagagccagagtttatgcgccagactaccggcaggcacctgagtttcctttcccgactcctgtggatgatgtcttttcagcttatcgcgcacttcttaatagcggtgtccatcctgaaaatcttgtgctggcaggtgattccgctggaggggcgatggttgtcacaataatgcgcaaggcccgtgacgcgggtattccgctgcctgctgccggtgtggcgatctcaccctgggcaaatcttacccatagcggtttgtctgcgaccacccgggagggaattgacccgctttgcagcgtcgattttctcaatatgctggcaagaaactttcttgcgggtgagcttgccacacaccctgacgcttcccctattttcgcgaatgttcaggggcttgcaccgatcctcatccagatcggcgaaaatgaggtcatgctgagcgatgctataagactggcttcgaatctgggggaagcgcgtgtgcgcaccacgctcgaagtctggccaggcatgtttcatgtatggcatctgttggccggcattctacctgaagccgatcaggctttgcgaaacgctgtccggttcctcgatgatgctctgactactgacggcagctaa

SEQ ID NO: 455226 - DNA, 1146 bp, Serratia marcescens
atgagaaccagactacaaaacaaactcgacgacatgtttatgagctatgttgagcagcgcatacttgttggtgcggacatcgccgtcattcatgacggcgagcaaatttatcggcggtcctggggatggaaagatagggaaaacgcggtgcggatgacatcagggagcatctttcgctatgcctcgctgacaaagattatcgtttcggcggtggctttacgcctgaatgagttgcgcataatcaacctcgacgcacccgtgactcgatatctgccagatttcagacctgcgctgctctctggtgaaacaccgggtatcaccgtgaggcagttgatgacgcatatggctggcttgacctacggttttctacaggaacaagacgggagctaccgcagggcaggcgtgtccgatggccttgatggcgcgggtatatcgaatgctgagaatatcagacgcattagcagcttgcctcttagttacacgcctggagaaagatggggatattctgtcgcaaccgatgtgctcggtgcagtgcttgaaggcgctacagaaaacgatttagaaacattggttcgccattacgtcaccaggccattggaaatggaaaatacaaatttcatgccctgcggttgggaaaaagtggctattccttaccgtgatggcacacccaccccagtgcggatgcaagccgacgagtggatcgctgttggccctgagtcagcagcgcacttcgaaccttatcgcgcctgtgctgcgggtaccggaaattctggaggagcggggctgtttggcactgtagatgattatgtgcggtttctcgaggcgatccgccggagaggaaatcccatattaaccgcagcgtcagttcaggagctgaccacgaatgcggtgggttcgcttaacgtgacgccacctgggccaggatggggttttggattaggcgttgcagtcttgctcgatccggtcctggcccacacgcctcaggctaaaggaacgtggcactggagcggggcttacgggaattactggttcgttgatcctatccggaagctgaccgtggtgatgctgacgaatactgcctttgcaggaatggcaggggaagttcccgacaacttgcgagactgcgtgtataaatacgtccagtaa

SEQ ID NO: 455227 - DNA, 942 bp, Serratia marcescens
atgatgacaaacccgaaccgtatcgatgtgcatcaacatgtcgtgccgccatgctggcgcgacgccttgccgcagcacggcggcgatccttccggctggcgcagccccgactggtcgccggacagcgcgctgcgctttatggacgacaaccagatcgcctgcgggatcctatccttgacggcgccgggcgtaaccggttggcagggaaaagccgcggcgaccatggcgaccagagtcaacgaatataccgccgggctggcccaaaagcatccgacacgttttggcgtttttatcacgctaccgctgccggatattgacgcctcactggccgaggttgcctatgcttttgacagcctgcacgctgacggcgtggtgctgctgagcaattatcacggcgtttacctcggtgatacccgctttacaccgctgtggcaggagctgaaccgtcgcgccgccgtggtgtttattcatccggccaagccgccgataccggcgcttgacggccttcccgggccgattgcggactatccgatggacaccacccgtacggcgctgcatatggtgatgcagggcgtgatgcggcgttatagcgcgatgaaggtgatcctggcgcatgcgggcggctttgtaccgtacgccgcccagcggtttgccgcgctgctgccgggcattcatccgcatatcacgcaggaaagcattctggccgatctgcagactttttattttgataccgcgctgtcgggcagccacgtaacgttgaagagcctgttggcctttgcatcaccggggcacgtgctgtacggcagtgatttcccttacgcaccggtttcggtcagtcgcgctttcacccgcgaacaggatagctacggcgactgctcggcggaggaacatgcgcgcattaaccgcggcaacgcgctgcaactgttcacacgcctggcgtaa

SEQ ID NO: 455228 - DNA, 888 bp, Serratia marcescens
atggagctacgtcatttacgctatttcaccacgctggtggaggagatgcattttggtcatgccgccgaaaaactgcatatcgtgcagccggccctcagcaagcagatcctggcgctggaggcacagatcggcacgccattgctgatacgcaacagccgcaacattgtcctgaccgaagccggcgaacggttttatcacgaagcgctgctgacgctcagacaggcggataaggcggttgaattggctcgccgcgcgggccgcggtttgatcggcgttttgcgtatcggctacgtcggcaatgcggcgctgagcggcgccctgtcgcactgcctgcgccactaccggcaggattatccggatgtggagatcgcgttgcagcaaatgccgctgcgcgcgttatgcgaggggctgcgggacaaccgcctggacgtggcgtttgccagcaatctgccggcggacaacgttgaaaatctcggcaaacagacgctatgcgcctggccgtggatcatcggcatgtctgacgatcatccgttggcggtctgcgatacgatacagccggaacagctccgggaggaagcgttcgtgctgtatggcgacaagggcagcgacagcgaccagatcgccattttgcagcgtctgctgggacggccgccgcgtgttgcctgtcaggcggccgacacgataacgacattaacgctggcggcggcgggctatggcctgtccctgctgccggcaacgctgcgcaatattgctatgcccggcatcacgtatcgtgatttggcgcactgtacggaacggctgagtatggacgttatttaccgggaaaatgacgaaaatccggtcattcagggctttctgcaaagattaaccgccgcaggagcgtggtga

SEQ ID NO: 455229 - DNA, 1329 bp, Serratia marcescens
atgtctacttatcccggcgtgtatattgccgaaaaatccaacctgtcgttggcaacgtcaagcatgagtggcctggtgccgctgttggtggggcgtttttaccgtaaagatggcagtgaggtgaaacttgacgatggcctgacccatatttctaactggatggcgtttactgagcagtttctgtcgacgccgcttaaaatcacgctgtcgtcagagggcaacgagccttcccaggagaaattgcttaatagcgccggtaaagaaccggtggaaattcggttgtctgagaggcatctcaataccggcgcactggcgttgaaccactatttcagcaacagagggggagcctgttatctgctttctctgggaacagaagacaacccggcggatattgccacacagatacaggaatacagtgaactctcattgttggcggtgattgatagtgaagcggaaaagctggtaagcatcaatgctcagcttgatgcgtttatcaccgacaatccgcaaagttttctgttggcttccggggcatcagagggcgagtatgtgaataagcaacatgttgctgtttatacgcccgatctgcgtctgcagttgtctcctttgctcgatgaggcagggattctggtccagtccagggatgatgaaaaaaacacggtcaaacccatggctgaattgaagaccagccagaacgttgccgatacccagtcgtataaactggtaagagaacggctcaagaacagcgaaattaactacgatgctgtccagaatgcggttatttcccccgttgctgccgtagccggcgcctattgcgccacggaacgctcgcgggggatctggaagtctccggctaacgtcagcgtgatgggcgcatcaccggtcagaatcatcgatgagtcagaacatggcgagcttaatcagcaaggaataaacgcgattatctggcggccaaacgccgggacgcgaattatgggggcgaggactcaggtcgaatccactacaccggcctggcggtatgtctccgtgcgcctgctgtttaataccgttgagcgggatattcgcaacatgctcgccccggtagcgtttgagcctaattcagccgccacccggcaatccgttacggctgcaattaacaattatctctacacgttgtggaagaaagggggcttgtgcggcaacacgcctgaatcggcctatcgtgtagaactgggcgatgacacagataacgggatcctgcgggtgcgtgtcggactggcagcattgcgcccggtagagtttatctacctcgaatttacccaggatatcccatcgacggcgtcggcctaa

SEQ ID NO: 455230 - DNA, 249 bp, Serratia marcescens
atgaccacttttcccaaagctccgggtgtttatatcgacgaagtcgacggattgtcattctccatctcatcagcaacgacggccgtaccggttttcgatgtatcccaggaaaaagatctccccttggttactcctgaggaggaaacgcaggtgaacggtcccttaaagacgcgtattgggttggcggtggttcggcctgccgagttcgtgatcctggagttcacccaacaggtcgtcagttacgactaa

SEQ ID NO: 455231 - DNA, 450 bp, Serratia marcescens
atgtcagacgaagcagattttattgcatcaaattatcctgtccctgtatttcggtttgtggtcaacatcggcgacgaggttatccgctgcaactcggtcagcgggctggaccagcagtttgaaaccgctgagtatcgcgatggtatgggcgggctgttccgcatggccacccgagcacagcttccttcaataaccttgtcacaagcggttttacccggacagtgcaaactgtatgaatggctgcacaattattctgcaaatgctgaggggaaaaaagatatctccatcagtttaaccgatgaatctggcaaggaactatatgtaacctggcacgttgctaacgcattcccgaccggtataaccgggccaagcctggatgcggccagtaatgaagtggctataaaacaaatcacgcttaatgccgatcgtattactacgagctgtaactga

SEQ ID NO: 455232 - DNA, 438 bp, Serratia marcescens
atgagcagagcaagggttagggtatcggcaatcgtgcttgttgccatcggcgctatattcgccttcgcctggccctatataaaaatggaatttgccggtagcgcatactatacccagcaagatcgtcgggaatatgcgttctacacgcctgaactgctgaaaaacatgccgcgtatcgcggagcactatagctttgaatacggcaatatcagtggtccacaggcttttgtgtatggcgtaaagtttgaaggcacaacggaaactggccgcattcgtgactatttgctcgctgccggttatcaaccgcagacacgctgcgatgttgaagcggaatgttggctgtccagccgcgccaaaggagacatcgtgacgctgtatacctctgacccattaaatatggtgggtgtacaaatttatcgcacaccctacgcagagtaa

SEQ ID NO: 455233 - DNA, 1029 bp, Serratia marcescens
gtggaaaaaataattgaaacgctttactctcttgagcagataaatgagagggaataccgagagtttcatgatctctgtggtgcgccattgttttacgattggcgttttttgcaagcggctgaaaactctccgctattaccggtaaaagcaacgtattatctgacgatgcgcattggcggtaaaattaccgccttcatgccaatatatttacagcggatggatatcgtcgatccgtttaaagtattggagcaaaaggcggatatgtacaatagcggtgacgattatggattattcagccatgtcatgcactgttttaatagcaccatactgaatagtagtgacgatcctaatgtctattatgaattaatgttatgtgcgagggaaatgggtgaagccgtaggggcccgttattttggtttgctaaatgttgaaccatcaccgctgttaacacagtcaaaacagacaagtatgcaggtcaattatatgtttgatcgttattatgtcgacctgcccaacttcagtcattttaaccactttgtggaatgcttaccctacgatggacgcggagaaatgcgccggcaaatgcgcaaattcaccaacagcggcgcccgggcctcgatcgttgcgccgccgtttgaccagcgtctggagcagctgtgtgaactctgttttcagaccaccgcccggcatggcacgccgcagtattttcccgcacggccgctggccagtttctgccgccagtgcggcgatcttatccggctgaacctgatagagcgggacggcgagctgctggccggcatggtgtgtttccaggaacaaggtcggctgcacctgtggtcggccggcatgaaatatgaaggcttggggtttagcccctacaccatctgtttcgctaatgcctatcagtatgccttcgaacaggggttgcagcgggttgaagcggggcgtttgaacgccaaaatcaaaacccgtctgggcctgcaaccgctacctctgtatgcagtaaccagccgcacgcctctgtgctag

SEQ ID NO: 455234 - DNA, 729 bp, Serratia marcescens
atggaaacttccaatcaacatagtcagtttgattcgctgcctgttttttatgaggatatgttcaactggccatttcgcaaagatattgaagttccttcggtattagcaagtcttggtgatatttcatcgcttaatgttctcgattttggctgtggtaccggttattacgcccgattgctgagccagcagggcgcaggtcgcgtggtgggttttgatgtggccggtggcatgttggaatatgccagagagcgggagagggaaaatccggcaggtattgaatatatatctaaaatacctcttaccatgaataagaagtttgatttgattttagcggtttacgttttaccctacgcgacaaattatgagttattacaggatatggtgtcgacgatggcgcggttactctcccccggagggcggttattaactttgccgctgaatccggaatataatgcccgcagtgaatattacgaaccctatggttttcagctcagtagcgaaactccctatcaggacgggtccgaggtacgactgcgtttcccgcaaagatcggccgcagatatttgcgctagttactggtcgcgcgccgcgattgaccgggctttgacgcatagtaacttcgaagtgaccagttggcgtaatccgcaggcgttcggtaatccggcggaaaatctgcacgcctacctggcccatccgcacaccgtattggtcgactgtcagttacgttaa

SEQ ID NO: 455235 - DNA, 5442 bp, Serratia marcescens
atgaaaataaccttagtaaaaactcttttttatttttttacgtttctgctggcagtcatcatgcctgggctggtttgggctcaggatttaccgccgcagattattgtcaccttcagtgaggatactcatattgttccaacagggtatgtattcctgctggctgcattgggcattatcttggtcacactgcttgccgtacgtataggcaagctgcgcggcatcagcctgtttgcggttgtgtccgggctcgcgttcgtcattgcattgctggtgttgcccaccagacttgccgatattgacacggcacgcacacagcccacgcagcggacgctggcgctggtgagtagccctgccatactgcaggtacaagagggtcagaacgacagtattctggtacagaacaccacaggccacaccattgttgtacaagatatccgtattgacaatgacagcaccaatcaatacagccttacctccactcccgccaccacttgcacgccaggggctcgcctggaacacgaggcaagctgtgttatgcatatagcatatacatcagatggtggtaatggtggaaacgatggctttatcgacaacccacaaaccccggatgactttataaaccgcgctcaggcgctggccgatggtgatgagcggattcccctcagcacgccaaaacagctggaggaagcgttcaaggctcaaaaggaccctgaggtcattgcgcacaataaccgcctgcaccaaaaccacagactcgtactgggagccgtcgaccccgatccgacctggcacaagaccggcagcagcacggacttcattattggtgaaccaggctccagttatgttgttgatctcaataaaattgacttgcaaggaaacgatcttggcgctctgagtaaaaccgatcgggccaggcttaaatttgaagttcgtattcagcagaacgagactaccgttaattatgttccgtcccacagccacaaagactacatccgctgggacgacagcacgcctggtcgtctgcacgttcaggtgccgccagacttgaaccaagggcgtcttctcattggtattcgccccctatttaaagacaaaggccagactgcgatcgctgaacgctggagtacgtccgtcgttgtagaaatctggcccaagcgagcgggtgtacaaaccatcagtcttaacagcatctactatccaacccgatacagcaaaggcattcagcctcgtgccggcagtgccttcagtcaggccgagataatagcgcatctgcaacaggctaccatcgattttcctgatgaaggaataatcaaacctctggtcgttacgggggccaacctggctatcaatcagctcctcgatgcacgcattccacgccctgaaggaggggtctatccttacagtggtcgggtgctgcgcgtcatcccgggcagtaacgggcagcagcttgccatccttaattttgatctggcctccgtgtacaacctgctcgaagacgaccccttggtcaaagaaggcgttatgcctgaatttgtcacctatcgtctgggttcagcgcagcaaataccgggggaacagggcgaccctgaacttgagtattttggaccagaagaacgtagcggaataaaaaccagagccattcaacctgcgtcgactgaaaaggagacgagagagaaccctattggtggcggaataattgagggtgattgtgaacatatagggagtattgcccttacacccagactggcaattgctgagccaaatgttaatgtcattcttgaatacatgctgggcctggcaggcatcaaagccgattgctcgcttgaagtggatgtttctgactttcttttaaaaaaacttcctctgcagcgacttaattcgttggttggcgccaatcttgaggctaccatgtatatcgaacttaagtccgatctggaagaggaaaccaatacaggggttgaagcctattttacggctgcgggaaatgtcgatattaatggaagctcggtacccaaatttgagataagaagcctgctggaatctgccaatggcctaaagagtgaacctttggccttgaatattcttttcgggagtaatttgggtctcaaggtgaatctatcgcttgacccttttgaaagtgaagacttcggcaacttatttcaacttggaacattacaagctgacgtgggccttaatatgggccattccatgcaggatcgtaatgcggcagcaattaagcagggcaaaagtccatcaaaaagctctaccagcttcaagcctcatggcaatttgagcatgtcagcagggttttctcaaattttgaactatttggggttacccaccacatgggaaacaaaaaccaatttcaacgcctttaacatcgttagtgaagcaaactacagcataaaaaaagtggatgatagtggagcggggcaaggttcagtttcttttaaagaactttctgtcaatggcgggttagcgaatatctttactaaccgtataaagggttatgccagtctggaaggcagctcggtctataatgattctaccgaagatataacctatgatctggatgaatgcgagtctcgaggtggcgtgattagcacaccgctgattgcttgcatgggccgccatttctgtggtccggtggatacaaacgctaacttttgtaaaatagcctgggtttctccactgatagcctgggcttatatggacgaggaggcaagcacaagcggcattattggcgctaatggcgcggaagccgttgatgttagtgttaccggttcgccgttgcagccagagcaaaactcgttcgtggtttcccctgccagtcctcaggagttccgggtcaacgccacatgctcgcagcgcggcgtgacgagagggaagacccggctctcgacaggtggcaaggtcgtggatgagcagtccaacatgctgatctgccactgcaagccgggctcaaaggactgcgaccgcgtctggggcgacccttacatggtaaccgcggacggcatggcctatacctatttggctacgggaaactacattctgtcgcgtgtgcatgatgccaaagaacagccgatgcatggctttgaagttcaggcaaacttcctgcccggcttcggcgcggcctggctttattcaacggccatgcaggttggtgatgatgtggtggaactccgtcctgccattctgggccatggcacattcagtatcgggctcgaggttatggtcaatggtgaatatctctatgcacccgccaaaaacggcacaggcggtacctggccgcaaacctctgagcggttggtacaactgcctggcggcggcctgctctatgtcgacgcgttcgttcagcagtattttacatacaagccacgcagtctgaccgtcatctggccggagaatggatcgtttgacgggtatgcggtcaatgtttcggtgctggatgggcaatttaccgcacctgaaccgtttatggagttgcaatttacccgtccgcagaagtatgccgggcgcgaacgcggcctgctgggcaataacgacggcgatcccaacaatgactttatccgtcgcaatggccagatcctggggcaggcgacgcctctgagttcaaccgcgctgtacgccctgtttggtggcgattggctggtcaaaccgcgtgagtgtctgtttgccagcggctgcaacactgagccgagctttgcaacacaacctgtggaacttacaccggaacaacgtgccgtcggcgaagtagcttgtggcggattgagcggtttttacaaacaggcttgcattaacgacgtgggtttgaccggctcaaccgagctggtcaaagactactacgccaatactgaagacctgaatgcgatggcggatcaactggtgacccccggtgtggatgtaccggtgtatacgctatcgtctgttggcagcaaagagacgggtttaccaggctatctcggcacaggattcaggcaggcctacaacgttatgcactacagcggcgggggccagttcctgctgacaatccggcccccacggggagcttcggcctttttcagcgaaggtagtgctggtgcactgaaaaaaagtttttccgcaacaggcagccaggatgtttcagttgatgtgcagtgtgatacccccgattctctctggtcaaaatcaggcaccgattggccgtccgccggagctgtgcaactgtgggcgatagatcctttgtcggggttcgcgtcgcaattattgggtgaaaaatatctttcttgctttacggttaccggagataaaaacaggatggctgcgggatcgctccattcgcttattctggataataaagaccgaatatggacttggggttttaatcggcgtgggatgttgggtgacggtacgaatagagacaggacccggcctgttctgaccgatcttacgccgctgggtggtagtactgtggtatctatttcgacaggtggtggcgcatcccgttcgcaggcaatcgacgaccaggggcgtttgtgggcctggggctctaacttcgccggcgttttaggtgatggcactagtatcgatcgaaaccggcctgttctggttgatctttcgtcgcttggcagtagcaaggtaacggctgttgcgacaggtcgctatcataacctgatgcttgatgatctgagccgtttatgggcctggggccataatggtgacggtcagttgggtgacggcacaagaacaaacgtagcctacccgctccccatccaggtggatcttgagccacttgctggcagtacggtaacaggcgtttgggcaggtgacttccactcaataatactggacgatctgggccgtctgtgggcctgggggaaaaatcaatacggtgagttaggtgatggcacgaccacatatcaaacccgccctgttctggttgatctgctgccgctgaatggccgtaaggtcatgactgtttcagcaggcgaacaccatactgtggcgcttgatgaacagggaggtctgtgggcatggggtcttaatgatagcggaaggttaggtgacggttcgatcacggatcggcaccgtccggtgcaggtagatcttacaccattggatggccataaggttgtggctattgcgacaagtgactggaacaacgtggcgcttgatgacctggggcgtttgtgggcctggggttataatggccttggccaactgggtgacggtacaaccaccaatcaacaccgtcccgtacaggttgatcttacgccgctgaatggtcgcaaggtcgtggctgtttctgcaggctcatcttacttttttgtggtggatgatcatggcgaactgtggacctggggggctaataattacggtcagttgggggatggcacgaagacgaggcgcttaaagccagtacgggtcgacatgagcgcaatgaacaacacaagcaggcagtaa

SEQ ID NO: 455236 - DNA, 216 bp, Serratia marcescens
atgaaaaacgctggaattctcaaacgaggcataagcttcttccgggatgtactgtttcaactgatgcttttcgtcatgttggcactatgcgtctattttttctttcactttgaaacggtggccgcacggctgatatccatcaccgcgacggtggtggttttttatattgttcataaaatcatggatcttatgtccaggaagatgaaaggctcctga

SEQ ID NO: 455237 - DNA, 402 bp, Serratia marcescens
atgaggaaactaaatctcaacgaattgggctgtttcattacgatttattttggtcaggactatgatcttattgacgacagtaatgagatagaacccaaaatcagcgcctttctaaatagctcggacacagctaactggcacggtctgcttgcggatattgacctgttggtagaggaaagtgacgacctggatagtgagtttatgcagcagtttggatttgagtttgaccccgcattgtgggggactagcccaacgaattttcttcaactggtgaagagtaagatactccaggcgctgagtgagtatactgatgatggtatgcgtcctcaatctgctcgagggggacagacagattctcaatacgcaaattcgcaaaagaacaaacttggccgggaggcatga

SEQ ID NO: 455238 - DNA, 1395 bp, Serratia marcescens
atgagcagggaaaccgctgcctggtctctgcacacggcgctgcaggcgatacgggaacgaaaattaaatgcgtccgaatttctgcacgatctgctcgctcatgaacgacaggtcggcgatttcaacgcttacatcacgccgacccgccgacaggcgcagaaccacgcggccacggccgataagcttgccggtcatgcaggcgcactgtgcggcattcccttggtagtcaaagataatattgacgtcgctggcgtaccgacaaccgcagcgacgccaagcctgcggcaccatgtgccaacggtagatgcggcagtgtggcgacggttatcccatgccggcgccgtgctgctgggtaaaaccagtatgcatgagctggcttatggcatcaccggcgtttgctccgcggctcccagcgcgctcaaccctgtgctgccaggctatctggccggcggcagcagttccggcaccgcggcggcggttgccgccggcctggcgccggccgggctgggcaccgataccggcggttcagtacgcattccggcggcgctatgcggcattgtcggcttccggcctaccaccggtcgctatcctcacgatggcattctgcgtatttccccctcccgcgacaccgccggattaatggcgcgtacgcttgaggacatcatcctgttggatgcgattatcaccggcaacgcgcgtaagacgcagacagcggccatctcgccccgtcagatacgtcttggcgttccgctgccggcgtggcgcggcctttcacctgaggtagcacaggtggcctacagcgccctagacatgctggaacgggccggctatcagctggttgagaccggctccgagctgtttgcggccgctccggaggcgctgctcgacagtgcaacgtcaatccctctggctgaaaccgccgacgccattgcggactatttacacgctgcagggtcgcgcatcactttctctgaggtagtgcaggccattgcctcgccggacgtctttcaactgctcgccccgctgcgcgacgcgccccagccgcagctacgctatcgccgggccattgccagacaaagcagccagcggttggaagccgcagaagcgcgccgggcgtaccgcgtcgatgccgtcgtgatgccaaccaccactctgacggccgccgccgccaatatcggcgagcacgtagagattaacggcgcaagcatgccgaccttccaggcctatatccgtaataccgcccctgcgaccattttagcgctgccttccatcaccctgcccgccggcatcaccgccggcggtgcgcccgttggtttactgttggacggccatccttatcgcgacacacatctgctgcacattgcctcgcactgttttcagcttctcaatccatag

SEQ ID NO: 455239 - DNA, 1227 bp, Serratia marcescens
atgcaatcacctgacgatatcttgaattccggcagcctgcccaatccactgaccgatgcgcagctgattcacgactgtgcgctgccggacagcctgatctacctcagccttggcgaaacctggacgccaccgcccgatggactgactgccgccttgcaacggctgcccgcccatacccatggctatacgctttccccttacggcctgccggccctgcgccagattttgaagagctatatcacccgcacgcatcaactgcccgccgacggcgcctacgacgtcgccgtcagtcaggccggtacacgtacggccatggctaattttgccgaatacctgttaagccgccataacggcccgccaagcgtactggttcccgatcccggatgggattactcggggatattcgcaccgatggggtttaccgttcatcgctatcccatgcgggcagagcaggattggcagcccgtccccgagcagctgacgccgctcatgacgccccattcactgctggtgctcaacccgcagcacaaccccaccggcgtcgaatggtcgccgcagacggttacgcgactgattcaggccgcgctggagcgccagtgcgccattttgattgatgacgcctactatgcgctgcatacgcccggacagtcgccgaccaacgcactgcgtactttaattgcacaggcgggctcatcagcggttcctccttggctggccgtgcggacgctgggcaaacagttccgctgtaacggctgggggattggcgcgctcagcgccgcgccggaaacgctggcggcgctcgcccatatcgcccatcggcgcacctatggcacggcgctgcctctccaggcggccatggcgacctggctgcaacagccggccgccgaccactacctcgatcgtttgcgtcagcactatgctgctaaccgggaacttgtggcgcagcggctcgccgggctgctgggcttcccgcaaagcgccattcacgcggggacatgcacctcttatatgcgctttcaggtgccgcccaggttagtgcggcatggcgatgaggagcacttccgtcgcctctgcctcagcgccggcgtgcttcccgggcgcggcagcatgatcgagggaaacgccccggacgcggcggcctatgtacgcctccacctcggacatacgtcagaagaacttgaacgggcgctgcagcggcttcggagagcggaattaggctgggaataa

SEQ ID NO: 455240 - DNA, 720 bp, Serratia marcescens
atgcagtcaaacagattgtgctggcgcgccttgtcgtgttcctggccgcggctgaaccagtacagctgctgcggcaacaggccggccggacaggcgtcgacgcacagtccgcagcggatacaggactgttccggctcctgcggcgccatctcatcgacgctcggtgccagcagacagttgctgattttaacgatcggcacgttcagtgcgggcagggtgaagcccatcagcgggccgcccatcaccaccatctgttggctttgcggccggaagccggcgaatttcagcagatgttccaccggggtgccgatgcgcgcccacaggttgcccggctggctcagcgcctcaccggtcagcgtgaccacgcgttcgattaacggttcgccgtcgacgatggcgcgcttaatggcgaaggcggtgccgacgttctgcatcagcacgccgatggcggaagagtgtttgccgtgcggcacctctttgccggtcaggatcttggtcagctgtttggcgccgccggacgggtatttggtcgggatcacccgcagaccgatgcccggatgcgcgcgcagcgcctctttgagcgcggcgatggcctccggcttattgtcttcgatgccgatcagcgtcgttttgggctgcagcagatggcgcagaatatcggtgccctgcaaaatttcttccgcgcactcgcgcatcaggcggtcgtcggcggtgatatag

SEQ ID NO: 455241 - DNA, 672 bp, Serratia marcescens
atggcggcggcgacggcggccttacgcgggtcggtttcttcgactgcggctggcgcttcagctggcgcatcgtccgcctgctgggctgctgctttcttggccttggcgcgggcgatggcggcagcgacggcggctttacgcgggtcagtttcttcaactgcggctggcgtttcagctggcgcatcgtccgcctgctgggctgccgctttcttggccttggcgcgggcgatggcggcggccacggcggccttacgcgggtcagtttcttccgcagcggctggcgcttcagccggcgcgtcgtccgcctgctgggctgccactttcttggccttggcgcgggcgatggcggcagcgacggcggccttacgtgggtcagtttcttccgcagcaaccggggccggtgcttcagccggcgcgtcgtccgcctgctgggcggcttttttggcttttacccgcgccagcgcagcggccacggcggccttacgcggatcgtcagcctcggcggcgtcaaccgccggcgcatcaacctgctgttgcgctttacgctcccgcgcctgcgccttgcgcgcctcgcgggcggcgatggcggcgctgttatccggcgcggcgcctggctgcacctcgccaaccgcggcgtcgtttttgctgcgtacgcgcgccagcgccgcctga

SEQ ID NO: 455242 - DNA, 1113 bp, Serratia marcescens
gtggcgaccagcgacaaccagtggaataccgccggggcgctgagctcgctggcgcagcaggggccgtcgctcgggttgtacaacgcgctgctgatgctgaacgcggccgaggcgcgggatgcgtttaaccagctgtccggcgagcagtatgcgtcggtgcaggcgagcctgcagcagagcggcacgctggtaggcagcgtggtgaaccagcatatgcagacgatgttcgacggcgacagcctgacggtgccgccgctggcgatgagcctggtgcagagtccggagcgcgagcgcaacggggcctggggtcagatgttcggcagctggacgcgcagcaagggcgacggcaacgtcggcaagctggacagcaacaccggcggtttcctggtgggggcagaccgagagctgagcgacggggtgcgggcgggtgcgttcgcgggctacagccgcacgcgttttgacgtcgacagccgttcgtcgtcaggccacagcaacaactaccatctggggctgtatggtgcagggcagcgcgacgcgctggcgctgcgcggcggtgtgggctacagctggcaccggatagagagcgagcgcaacgtgggcttcggcggctatcgcgaccgtctgacgggagattacgacggcaatacgctgcaggcgtttacggcgctgggctaccggctgcgctatgaggcggcgagcgtggagccgttcgtcaacctaagctacgtgcgtctgcatacggatgcggtgcaggagcagggcggcgcggcggcgctgagcgtgaaggatgagacgatgaacaccttctactcgacgctggggctgcgcggcgcgacggatatcccggtatctggggttgacgtaacgctgcacggcaaactgggctggcagcatgcgtatggcgacacggacacttcggcgcggatggcgttcgccagcggcgacagcttcaccagcaagggtgcgccggtggacaaggacgtggcggtggtgggcgtcggtctcgatgtgccgctgacgcgttcaacacgggtcggggtgtcctatcaggggcagtatggctcgcagcagcaggccaactcggttaatgcacagctgacggtctcgttctga

SEQ ID NO: 455243 - DNA, 1749 bp, Serratia marcescens
atggagaaactattacaggcgctggcgccggttcacgccgcgccactgagcgccgaggacgccgcggaccagcgtcaggaggcggaacaggcctgcaaccgcgaacgtctgatgcagcaggacaacgacgccgccttcccggcggaaacggtcgcctggctaaaccggcagggcgcgcagttgctctatctgccggcgcagcatggcgggaaattgcgcggccttgagcaaatcacgcagctttggcgcgcgctggcgggcatcgatctcaccgttgccatcgggcacggaaaaaccttccttggcgccgtctgcgtctggctcggcggcacgccgcagcagatcgcgcagatccgccaggcgctgctggcccatgagccgctggcctggggcctgacggagcgcggccgcggcgccgatctgatggcgacgcaaaccacggcaacccgccaggcgtcaggctggcgtctgcagggagaaaagtggctgatcaataatgccacgcgcggccacattattaccgtgctggcgaacaccggcgacgctcccggcggtgcgcgcaatctaagcgtactactggtggatacgcgccggctgccgcccggctgctggcgtcacctcgacaaagtgaacacctatggcatccgcggcgccgatatcagcggccagcggtggcaggacgcccccctgccggcggaagcactggtcggcgaagccggccaggggcttgaactgacgctgcgcgcgctccagctcacccgcactgcctgctgcggcctgtcggtcggcgcgctggacgccggcatcaaactgacccttgaactggttcagcaacaccggctgtatggccggcggatgatagaactggatacggtgcaggcgctgctggctgaatcgacgaccgtcgcctggctgtcggaggtgaccgcctgggtcgccgcccgccatgccggttacctgccgcaggaaatgagcgtgatctccgccctggcgaaagcggcgatccccagcctggtcgctcagcagctcacgcggctcgaagagcagatgggcgcccggggatttgtcagcgacctgtatgccggcggcgcattccagaaattaatccgcgatcaccaaattgtgcccatcttcgacggcagcacgatagtgaaccgcgtcgccctggtgccgcaattgccgacgctgatcagacacttcaaaaaaggcacggcggatctcgccgcgctggaccagctggcgcagttggacgccccgcagccggaagcgctgccgctggcgtcgctgaccatcttttcccgcaacggctgttcactggtacaggccctgccggcgttgattgagcgcctgcagcaacggcatgccgaggccgcggaagagatggggctaaacgccctgctcggcgagcttctgcgcgtcagccggcaaaccgtcgacgagctggccaccgcgccgctggcctggccggcggttccacagccggtcctgcaggggctgcagcgctacgagtggctgtttatcgcagcctgttgtctgctgttctggctcaataaccccgcgcttcagcatgcgcctggccgccgccgccactggctgccgctgtgcctatacctgatcgcccgccatctcgatctggccgctggcccggaacaacacgcggcctggccgtcgttaaagcagtcgttcgccgagcatccgtgcggtgacgacgacacccttttatcgcagggagcgcaccatgaacgttga

SEQ ID NO: 455244 - DNA, 537 bp, Serratia marcescens
atgcaaagggaagaaggaaggctcagacttttgacgttgcgggaggtcgctttagcaaagactgtttttggtggttcaattgattatcccagagtgtgggttcattgtgacagttatctcccgtttggtttacagcgtagtggtacagcaatggcgccaaatggtgagctgtactttagaaaagagctatatatgccggattttgcggcactacatgtaacgacagaaataaaacatctctttattcatgaaatgatgcatgtatggcaacatcagagggggatgtgggtgaggactcgtggcttgctgagttgggccactagttattcttatatgctggatggaaagccaatgctgaaatactcattagaacaacaggctcagatagtggctgattattatgtattaaagacatacgggtttgatgagttggatattcagcgccggaaaccacgccctgtggttacctatagagggcggcccgatagaagaaccattgggggaaaataccgtgcaacgcttgcccgttttccataa

SEQ ID NO: 455245 - DNA, 912 bp, Serratia marcescens
atgatagtaagaaccaacaagaactggctcagcatgctgttcatctggaacggttcggtgctgcagtccatcatcccgcagctgctgtttatgacggcagtcagcctgctggcggtattcacccacggccgtatcttcggcgagaaaattccgctcaacaccgccccgtttaccctgttcggcctggcgctggccatcttcctggcattcagaaacaacgccagctacgcccgctttaacgaggcgcgctatctgtggggcaacctgctgaccgccgcgcgggcgctgacctcacaggtgcagtgctatacgccgcaggagacagataaaaaacggatgaccgatttgatgatcgcgtttgtgtatgcgctgaagcaccagctacgccagagcgacccgacggccgatctcgccccgttgctcggcgaacgcgccagcagacgcctgcagggaaaatgttataaaccgctggcgatcttaaatgaaatccggcataacgtcggcgaaatgcagagaaacaaacgcatcaccgatactcagcagtggatgatggacgcccagctgaaccagctggatttggtggtcggcggctgcgaacgcatcgtttccacgccgattcccttcgcctatggcgtactgctgcaccggacggtgtatgcctattgcgtgctgctgccgttcgggctggtggactccaccgagttttttaccccgctgctgtgcgtgtttatctcctacacgctgatcgcgctggaggcgattgcccatcaggtggccacgccctttggcctggcgcccaatgcgctggcgctggacgccatcacccgcaccattgagcgttcgatacttgaactgtgcgaccgcccgctgccgccggagctaaaaccgcagcgtgactatcagctgacctga

SEQ ID NO: 455246 - DNA, 1002 bp, Serratia marcescens
atgccgcgcggctgctgcggctttaatactacccacacgccggagggggcatacagcgctgccgacagtgcgcaaacggtctatcgctataatatgaccgagcatatgctgcagcagtacgcgctggacaaccagcgcgatattctggctgcggacatgggggataaagaggcagcgaaacgggttgtcgcacgccgcgaagctgcagcagccgttgccatagtgggcggtggcggcttggcgctgactgcgggaggttttaccctgccgggcgctgtcccggagatgttgctggcggcgcgactggcaattgccggctgtaaaactaatcctgcgctgtgcctcaatcaggcggggatctatgcggcagatattatcgcgccggatgctattataggtacaggtgccgttgctgccggtagtacgttgatcgtggggaaaacccaggatagcgtgaagaagctggcgcaacaggtggtgaaagtcaccgatgagtcctttaaaaataaggcatttaacacccaacctgtcgctgagtttatcaaaggagagtcgacggcagggagcggtctgtcgacgaaaaccgttgattatctgcgtgatattcaaaaaacaaatactgaccagttggtgagggtatttgatcccaaacaagcggagagtaagttaaatgtgtttgggaagcagtttgagcaggttttaggggatggtgggagcaataaacaagggaatgtgaagatattttctacagagggattgtctgataaggagatcatcagttacgcgcagtcgttgacaggaggggtaccgttgaaggaggtgcctacggcccctggacgtttttatgctcaattgaataatggtagtacagttaatttgagaaatgtgtcagaaagctctagtaaaacacaggctcgttggactattgatatcattggcaatgagcagctaaatgcattgcaggggaaagtgaagaaaagaacggaaataaagtttcgctga

SEQ ID NO: 455247 - DNA, 459 bp, Serratia marcescens
atgaagaatatgaccattggtttagatatggacataatccctggtaaatccataggtggtatatcattaggtgataatgttaatgatgttatcaaatctattggcgaaaaacatcccataagtaagtatgactttcaaaaccacacaggcaattactccttatataatatatttaacggtgcaatatcattcacctgcgatagtaacaatatcattgtaacgttatggtgcactcctccctaccaaggtagctttaataaaaagttatacccgggaattacagccttagaaatacggagaaggtctaaaaaacaagaaataataaaaggatatcttgttatagataaaaatttctccatttactatggaatgcctgatgaaattgatgacttcaattcattttcggaattagatgacgatactatatttaacgaattgtatgttggcaatttgaagtga

SEQ ID NO: 455248 - DNA, 507 bp, Serratia marcescens
atgaataacatacccggaaacatccatgttataatttctgggttatgttttataacatttgaagctagaaatcccacattattccctattgtattaacatgggtggttccactggggttgagttgcggtaattcactaaaacggttcaacaaaagaaaccgaataactagtcgccatgttgatttgccaactgggaaagaacctgaaaatgttgaggtacatttaaaaaataaaggttggaaagccacataccctcaaagtgcaatactacaaaagacacaacatgttgtttttgagaaaaccactaaatccggtgaggtatatcatcttgactacaacccttcaggtaagactcacaatggtgactactggaagataataaaacccaatgatcctgtagaatcggtctatggccgaattggacatggtaatttcgaacgatataacagaataaaaaaccctcctgtttatgttgatggagttttaatgaacccttggagttattaa

SEQ ID NO: 455249 - DNA, 132 bp, Serratia marcescens
atgcaaaacactcagaccaaccaaaaagctgataccgtctctagcaagaaacaagaggcaaccttcaccctgaatgtaaaaaagaaagcgaatcaggaagagcgccgcgcgcttggcgcactggttaagtaa

SEQ ID NO: 455250 - DNA, 987 bp, Serratia marcescens
atgagctatccctaccttaaatatttttctgcgctgcatgaacagccggccgccgttaaaattgtggcgaacgatgcggatatcaccatcgcaaccgccaacccgcggacgctgaaaaatctgctgctggatatggatggtgagaataccatcagcctgttggcggcaaagcatcgctatgatgagcaagatgttcatgcgctgtcctggcaattagccgatgccggcgtggccagggtggaaacagcgccggtggcgcagacgctggacccgcaagatctcgccaaagtgtgccgcacgctgtttccgcaatggaaaaagcaggtgtttacgctggatttttggcatgacctgacatcaggaaagttatccaagtcggcgtttgccggttggctgttggaaaacttttactttattgagggggcaaccaaacgtctttcattggtcactgcggcggcgaatgaaaataaaaagatacgggcgctgttttcccagcattttattgaagaatataaccatcacctgttttttatgaaggcgttaaagcgtctggggtttactaaaaaacaggtgttaaaccatcagccgctgccgagtacccaggcgattattactcatatgcgcgagtgcggccgccgggatgcgatttcttatgctgcctgctccgcatttcttgagtctaccggcggcgatcgcaaagatggcatggtgttttataacgcgcttatccagcactacgaccccgaaaatagcggcatcgtccagccgctgattgagcacgcttacctggatgaagagtacggccacaatgattggctggagaaggtgtgcgcctgtattccggctctggacagaacgcgggccgatgacgcgatcaagtcggcggcgatgctggtcgaaacgctgaggctctggacgcacgatatgcaggcgcactatagcgcagtccctttcgctgagatcctcaatccctctcgttaccgctga

SEQ ID NO: 455251 - DNA, 1047 bp, Serratia marcescens
atgaaccgccacgaatcttgtgaactgaacgctgattccttacccaaatgcctgccgtgcgccacgctgacggcgacgcaggaggaggcgacgctgcacgtcccgggcagcgattatctcttcgccggtgaaagcgccgggctgatccagtcggtgttcaaacggctgaacggaatgaacacggttgccgatctggcgcagtcctgcggcgttgcgccggcggcgctgatcgccgtgctcggctacctgcaggatgagtccgtactgattgatatgcagcgcgccggcccgctgaccggtgaacaactggtggcgcagattaaaaatgaggtggcgttttggcggcgacatattgacagccagccatgctggcagggcgtgcatgccgggcgctgtacggagcggcagatcctgggctggggcatcgagttttaccactatgtggatgccgccaatgagtatatggcgtacggcgtcgcctactgccgtgagtcaatcgatatccggcaaaaaattgcggcgcagtacgctgaggaagccgaccacggcgaaatatttttgcaggggctggcggaagacggcctgccggcggagcgggtggcgaatgcctatccgttgccgagcacccgggcattgattaattatctgaacgaagcggcaatggaaaactcgctggtttataccgcgatattttcactgatgcagtcagacggcgagaattttaacaaggaaggactcagcgactattactcgcaccttatttcgctctatccgtttgcccgcggcatgtttggcgcatttctgaaacacgcctccattgacgcccaactggggcaccagagctctctgtttgaaaacctgtatgccaataacgaaatcatttcatcccgtgacgtccagcgcacatttaccaccatccgtcagttggttaactactttattctctactacgaatatattttcgactattacggcgaggagagcgcgcaactgccgcgtcgtgcgccgcaggtcagcgactttatgtcagctgcgagccgggggtaa

SEQ ID NO: 455252 - DNA, 1299 bp, Serratia marcescens
atgccgacgatgcaggattgggcacagcgtgcgaaacaggtcattgcgggcggcacgacccacgatagctgggcggcggcctgtccgccggtttttgaacgcgccgagggcgcttacaaatgggatgccgcagggcggcagtacatcgacttctggatggggcacggcgcattaatcgtcgggcacgctcaccccgcggtgaatcaggcgctggcggcgcagctacaacgcggctcgcacctggccggcaaccatactctgctggtgcgctgggctgagaaggtggtgcaattggtgccgagcgcgcagcaggttcgcttctgcgcctccggtaccgaagcaacgctgctggcgatgaggctggcgcgcgcttatacccgccgcgccgggatggtgcgcatcgacgggcatttccatggctggcatgatgaggcgctcgccggggtgtttgcgggctggccgatcggcgcccatccgcaggcggcaggccatctgcaggtggtgccgccgtatgagccggagcaggttgacgcggcgctggctgccggtgaggtggcggcggtgattctggaaccgggcggcggcagcggcggtaccttgccctatgatgccgcttatctgcagcggctgcgcgatattacgcgtcgttacggcgtgctgctgatcttcgatgaggtgatgagcggctttcgctatgcgccgggcggggttcagcaactgtccggggtgacgccggatatcaccaccctgtcgaaagtgttgtgcggcggtttgcccggggcggccgtcgtcggcaaccaggacgttatggcctgctttgatcgcgggcatgccgacaaggttttgcataccggcaccttcaacggcaacccgctgtctgccgccgccgggctggcgacgctgacgctggccacagacgcgacgctgcaaacgacgctggagcgcaataccgcgctgtttgtcgaggccgtgaatgagcgggccgcgcgggccggcgtcgatatacgcctgttccaccagtcttccatcttccatattttgatcggtgcgctcgatgccggtgtggctatcgctccttccgaggatgccgtctggataacgcaaaaaaacgcggcgcagtatgacgcgttaaagcagcacttggcccagcagggcattgatatgcacaagtctcacggctggctgagcgccagtcatacacatacggtgctggaggcggcggcggagaaattcgccgcggcgttcgaccggttgcgcaaccagagcgggcgagcggccgagggagtacgccatgattga

SEQ ID NO: 455253 - DNA, 1476 bp, Serratia marcescens
atgattgagattgtcaattttatcaacggtgagcatgtgcgcgggacggagagcgaagggctgttttcgctcaatccggccaccgaggagcgtatcgctcacgtcactgtctcttcgccggcggatgtggacgccgccgtgcaggcggcgagggcggcttacgaccgcggtccgtggccgcgcctgtcggtggaggagcgggcgtattacctgcatgcgatcgccgatgcgctggaagataacctggcgctgttcgctcaatatgagtgtgaggataccggctttctggccaaaatgtgccgggacgggcatctgccgcgcgccgtagagcactttcgcttttttgccgaagaggggaagcgctttttcggcagcgccatacccgtcggagacgcctacttcaacctgacccacccggtgccgcttggcgtagcggcgattatcacgccgtggaacgggccgctggccgtctcctccattaacctggccgccgcgctgatcgcgggcaactgcgtggtgctcaaaccttcggaaatggcgccggtcaccatttcgttactggggcaaatctttgccgagatcggtctgccgcccggggtggtcaatatcgtccagggcgccggctcaccgaccggacaggctttgattcgccaccctgatattgacctggtctgttttatcggcggaacgcaggtcggcaaggcggtgttacgccatgccgccgatacggtgcggcgctcgctgctggaactgggggggaaatcgccgacggtagtgctggcggatgccgatcttgacgcggcgctggatggcgcgctggtctccgcattcagcagcaatggtcaggtctgtaccgcgggctcgcgcattatcgttgagcgcgccatcgccgaagagttcagccgccggtttatcgagagaacccggcagatacgcgtgggcgatccctttgatgcgcgcagcgagataggaccgatgatcagcgccggccaccgcgagcagatgctgcgggcgatcgacgaggcgcagcgtcagggcgcgcgactgcgtaccggcggcgcaatcccggcgtggtgcgagcgcggtttctacatcgaaccggcggtgtttaccgatgtgcatccccggagcgatttagcgcgccaagagatttttggcccggttatcggcatgttcaccgcagaggatgaagccgacgcattgcggctggcgaatgacacctgctttggtctggcggggtcagtatggagccgggatcagtcacgcgcgctggcgtttgccaaaaagatgcatgcgggcaacgtcggcgtcaatacgccttatatccgtgatatccgttgtccgttcggcggcttcaagcagagcggcatcggcgcggtcggagggcgctggagcctggagcactatacccaaacgcaaaccctgtgcgtcccgctgagcggatacgcgctgcccaaatacggcgttgagccatag

SEQ ID NO: 455254 - DNA, 924 bp, Serratia marcescens
atgagcgaaacaatcaataatactttcagtttaaccgaccatgacgtggcgcagtttgaacagaatggttttgtggtgctgcgttcgtttttgtctgccgggctgatcgcgcatattaacgaatcgataactgcgcacctgcggttattggatgagcgccagaccggctttaaacgcgtcggctatgatatttttgaacaggatccggcgatcggcgcgctgcttgccgacgcaggtttctcacggacgttaaccacgctggccaaccgcagtttgttctatacccaggggctgggatttcagattgagaaagagaagcacaccggctttccctggcacattggcacgcaaagtttcggctaccagcgcggggaagacttcggctgctccatgtgggtgccgctggtcaagattgataccgaacggcagggcggcggcatgagctatgtgccggagcatattatctccggcaagtttatgtacacggatatcgatcccgcgattgaccggatgatgcgcgagcttgccgaggcggaccgtgcgtcgctggatctggaggattacctcgaactgaggcacagcattctcaactcgccggcactcagcgccctgctggagtattacaagcataccgactccttcgcgccgggagacgtattgctgtttaataaacacgtcatccacgtgagcgaaccgctgctggagggggaaatcacctcgcgcaccgcgtttgtgatgcgctttgtcgacgttgacagccgttatgacgccacgcgcgcccgcggtctggatttccccatgacctatttcgggcatccgccgtcttccgatttccacgccaaagtcagcgagcaggacggggagttgattcgcgacagcaaactgtttccggacggccgccgccgtattctgaccaagtcgtaa

SEQ ID NO: 455255 - DNA, 1206 bp, Serratia marcescens
ttggaaaaagtggccgaatattccctatggaaaagcagtccgttccggatgctgtttaccggggcgctgttttgcaatctgggcggcaaagtctatgagctggcgctgccgctgctgatctatgacattacccgctcctcggagatgatggggtgggtgcgggcggttgagtttttgccgtatctcctgctggcggccgttatcggcgcctggatcgatcgggttgaccgccgcgtatggtcgcaatggatgatcgccgggcaggtggcgtgtttgctggccggctggctggcgattcagtggttgcctaatccgctgtgggttctgttcccctgcgcttttttaatgatggcgtttaatttcggctatctgaacgccaggatgggtatgctgaagcatattcttcccgcgccgctgcaaagcgccgccgcgtcgagcatgggctcgctcaacagtctgttccaggccgtcgggccgctgctgtccggcgtggttatcctgttctcttccgtgcatatcatctttctgtggattgccctgtgtttgtttatcgcctggtgttatctgataaaaatgccttatgaaaccgagcactttccgcctcatggttccatcgggcaggcgattgcgcaagggtggcggattctgcgcgccaaccggcccttgtatcatatggcgctcgccgtggcggtgctgaataccagctcaatggtcttttccctgcagtcgatttactacgcgaaaaatacgctggcgatgaatgcggctgaaatcggctatatggtgtctgcgggcggcgtgggcggactgcttggctcactgctgacggtgcggctgcgtaaccggttcggtctggggagggtgatgatcgtcacgacgatcgcccaggcgctgggctatctgtttattctggcgtcacatagcgtggcggcgctggtgctggcatttttctgggtcagcttttttgaagtgattaccgccgtgctggtgtatacctaccgtcaggaaagcgtcagtaccgagagcctgggcaaggtgatggggattaccggcacgctgtttaaaatcggcctgccgtttggtctcgccgcgtcaggttacatcgtggccggcttcggggtgggcgtgctgtttagcctctgcgccgcgctgcagatcgcgctgggggcgttgtgcgtctggagtccgctggcgaaggttccctga

SEQ ID NO: 455256 - DNA, 1140 bp, Serratia marcescens
gtgaataataaagattcaatgcgtattaactgcgtgcagtatttacgtggttttgccgcattgcttgtgattttttaccatctacggttcgacctgaacaatatatactcaataaaaaatatgggtgatattctttttgaaagcgctgcatttggtgtcgacctgttctttgtaatcagtggttttgttataatgtacgccactgagaaaaaagaaaacatgcaaagtgtgaaatacctattccgcagagtatttagaatatacccactacttatatcatgcattgttttttactttttatttatatcacagtctggtaactacgagctatttttccgttcactaatcccattaaacagcaactacagtgatgggtcgcctttctttggctacaatatgctaatgccggcatggactcttacttatgaaatagccttttatggtattttctgggtggcaatgatgctgtcacaccaatatcgcggcatcatatgcgccgcttttattatcctatgtgtattgggaatccaattacactttaacaactccgtttctctcagtggttacaataattttaactttatacctaacagcgtattgcactttcctgtaaccttcttatcctcacctatgtttatagatttcacctatggaatatttatattttatgtattaaaagtagataatggatttatccttaaaaacagagcgctggtcaccacgctatctattttactaatactatcatgctgttacatgctaatttcgaaaaaactctttggtcatggaccaaccacctggggaacgatcgccgctgctgtattgttttcatcactgttaattgagaaagcaaaatcactctttgattgcaagtcattatctttcctgggggatgtttcttactcgatgtatttaatgcaggcgatagtgcttgaatttatagcaaaacattcaatacaactacctaacgcactttcttctggcgcacctaagtttattacattaaccataattataatattagtctcttatctgacacatttaatgatagaaaaacctttcattaacctagggaagaaagtgatatataaaatcgaccctaccaaaaaaccaatacttacccctagccataaagcataa

SEQ ID NO: 455257 - DNA, 1542 bp, Serratia marcescens
atgaaactattaaataacaaaactcttctcctcctatttattctatggtccttactggttaacttctcctttggctatgcggttcgtcccggctatgcggttgcactggcgctgattctcattgttatggccaaattttcacctgttgccgccaagataaccctggccatcgtgaccgtcattgccgccgtttatctgcctgtcgccgtcaaatatggtcccccatcgctaaataccgtagcagccgcacgctataccagcctgtcagaaagcgctgaatttttaggcatgctgcctgccggcagcattattctgtcattcgtgctgtttctgatagcgatcctgtgtatgttcattgcaaaacaggcaaagcatatcaaaagccggctagccactatttatatcgctctgacggtagccgttatctccttcaacccggcccactcatatatcaaacatggcgatatcagtcaggcagatatcaagttttcaccttatcgttttgtttatgatatctaccgaccctataagataatcacccagcaggaaaaaataagcgcctcgttgctggcaacgcccgacacctggcagccgacactccagacgtcaccttatgacacctttattttagtgatcggagaaagcgtccggcgggattacatgaatgcatacggttttagtttgaataacacaccgtttatgagccaggccaatggcattctcttcgatcattatcattcggccagttttgctaccgtcccttccctcgtcgcctccttctacttggcgcaggatggccatgtagaatataacaatagctttattcgcctggcaaaaaaggccggatacaaaaccttctggctatcaaatcagggacgtttcggtctctatgacggccccgtggctgacgtcggcaaacaggccgatatcagccagtttgtcaaaaaaggcgactccaacgatcacaattactacccggataacgccttacttcccactattcaggatgcgctatccgaccgggcaccacagaaacttatcgtcattcatctgattggctcccatccggaatcctgtgcaagaacggacggacactatgatgaattttatatcagcaaggatatctcctgttatgtacagagcatcaaaaataccgacacgatgctccacgagatacaaaagatggcagatcgtggaaagaaccgctggtcgatgctctatttcgccgatcatggcctggggcaatttaacaaaggcgaagacgatgcctatatggaacacagcgatttgtacaagcagtcattcaatgtgccacttttcattaccagttatgatgcaagcgaacagcgccatatagcggaggaacgcagcggcctggactttctgaacctgtttgccgactggctcggcattcatgatgaaaagatcgccagccaatgtcggccattagccgatcggccatgcatcaaacaggtgaacgtgctgaataaagatttttctttaattactctggatagcctggatgatgatgatcccttatag

SEQ ID NO: 455258 - DNA, 1527 bp, Serratia marcescens
atggcagagaacatcaaaaatgaaatgatgacgggagagacgtatctacacagcttgcgcgacggccgtgagatatttatctatggcgagaaagtggacgacgtcaccacacatccggcatttcgcaacagcgcgtattctatgtcgcgtttgtatgatgcgctgcatcatcctgacacgcaaacgctgatgacggatatcgatcctgacggttaccgtacgcaccgctattttatgccgtcggcatcgggcgcggctttgctgcaggcgcgtgatgcgatcgcgcactggtcgcgtctgacctatggctttatggggcgcacgccggattataaagccggatttaccgccacgctgcgttccgatccggatatttacggcccttttcgcgataacgcgctgaactggtaccggaaaagcgccagtcaggtgttgtttctgaatcatgtgctggttaatccaccggtaggacgcgccaaagacattgcctccatgcgcgatatttacctgcacgttgaaaaagagaccgatgccggtatttacgtgtgcggggtaaaaatggtggccaccagcgcggcgatttccaatgccacttttgtcgcgcaaaacagcgccacccattatcagcagggtaaagaggaagactttgcgctgtgctttattctgccgatgaatgcgcagaacctgaaaattatgtgccggcgttcctttgaggccgcggcgctcagcccctttgatcacccgctctccagccggtttgatgaaaatgactcagtgctgatttttgacggggtgtttgtgccgtgggagaacgtactgatttaccgcgatattgaacgggcacgcagtttttattcggcctcgggattcctgaatcgctatccgctgcagtcgggaacgcgtctggcggtaaaaatggattttatctgcggcctgctttccaaagtattgaaatctaatggttccgatcagtttcgcggcgtacgggcacatttggctgatgtggtggccctgcgcaatctgatgtggtcgctgaccgaaaatctgtgcgcagcgccggagttgcggagtgatggatcggtggtgccgcgtctggaggccgccgcgaccgtcagatacttcggtacgcagatgatgtcgcagctgaagccggtatttaataccatcctgggtggttcgcccattatgcaactggccagctggcgagatttgacgaatgaagagattcggccattgattgactgttattaccagggaacggaaagctcagcccttgagcggcaaaaattaattaagctgctgtgggatgcgctgggaagtgagttcgccggacggcatgaattatatgaacataattatgctggtaatcatgagcaggttcgtcttgatatgctgaaacattgtgaaactgcgggggcaattaatcagtgtcatgatttagtagaacaatgtatggcggattatgacgaagccggttgggttaaaggcgattggtatttcgacccggccaataataataagatgtaa

SEQ ID NO: 455259 - DNA, 1056 bp, Serratia marcescens
atgctatattctggaaaatggaatagggatgcgcttgactatcgggcgctggttaatcaatggcatgtcgtggctcgctcggcagatgttaatactgaaagcccgaaagctattcgtttattaggcgaagatctggtgttatggcgtgatgccaataatgtggttcatgcctggaaagattattgcgggcaccgcggcgcccgtttatcgttaggctgcgttaagcagggccatattgagtgcccttatcatggctggcgttataacgccgacggcgagtgtacgtttgtgcctgcacatcctgacaaagcgacgccctcggccagacgcctggttttccgccatcatgcacaggagaaatacggttttatctgggcctgcctggacgagccgtcccgtccgctgccgccgtttcccgagtgggaaaaaacggctttccggaaagagtttgccgggccttaccattacaaggccaatgcgttgcgcgcgttagaaaactttatcgatgcttcccattttccttttgttcacgccaaccttaatggtctgcctgatgcgccggagccgataaaaaaatatgacgtcatccggaatgacagcggtgtgcattcgtcggaaatcagcgtattccaaccctatggcgaccaccgcggcattccggtgactgcccgctatctctattcggtatttaatccgaccaccgcctattttgagaaaaaaaccggcgacgtcgaacgtttctgcaccttttttaatgccacgcccgtcgatgaggatgagtgcgttatctggctgattgtggcgattaacttcggccatgagctgacgcgcgaacagattctggatcggcagaataaggtctttgaacaggatcgccatattgttgaatcgcagcggccggccagattaccgctggatcagcgccaggagatgcacgtcggcagcgacagaatggggttggaataccgtcgctggctacgagcgctgggggaaaagaaccgctcggatacctggcaggttacgctggccgcggagggcaacgccaatgatcggtga

SEQ ID NO: 455260 - DNA, 1356 bp, Serratia marcescens
atgatcggtgaagagaaactggcctggctgggccagcgcgagtccaatgcgcgtacctatgcacgtaatatcaaccgcattctggcgcggggagaactggcccgggtgtatgacagcgacggcagggagtatatcgattgcctggcctgcgccggcgcgttgccattggggcataaccatccgtttgtgcaggaaaaggccgtggcgtttttacgctccggtcagatgcagcaggcgttggatatcgccacgccggcgaagattcagtttgttgaacggctataccgcgtattgccggaggcgtttgcccgacaggccaaaattcagttttgcggaccgaccggcgcagacgccgttgaagcggccttaaaactgtttaaaaccgcgaccggccggcgcagcgtgctggtattcagcggcgcctaccacggtatgacccatggcactttgtccctgatgggaaatctggcgccaaagagacatatcagcggccagtccgccgaagtgcagttcttgccttatccctatgtttatcgcagcccctttggtgcggacgtcagcgcggaggatactgaacgcctgagcctggcctgcctggaaagtacgctggccgatccggaaagcggcgtcagcaagccggcaatggtgctgctggaggcggtgcagggggaagggggctgcattccggcgagcgccgcctggctgcgtcgggtgcgtgagattaccgaacgtcatgatgtgccgctggtgatcgatgaagtgcaaaccggcattggccgtacgggcgatatgtttgcgcatcaatttgccggcatcacgccggacgcgttagtgctttccaaagcgatcggcggcggttatccgctggcgctgctgttgtaccgggaatgttatgaccaatggcagccaggcgcgcatgccggcactttccgcggcaaccagattgccctggtctgcggcgcggcaacgctggagtttatcgaaagcgagcaggtgatggcgcaggtgtgtaaaaccggcgagcggttgaagcaggggctgcgggcgctgcagagtgagtttgactgcatgggcgatgtgcgcggacgcgggttgatgttgggggttgagctgatcaaccgcgatttggcgcccgacgccctcgggcatccgcaggctgacggtgaactggctaaacggctgaaacgctgttgtcttgaggcggggttgatcgttgaaaccggcgggcgcaacggcgcggttctgcgactgttgccgccgctgattatcagcgagcaggacgttgacgccatactccatggcctcagaaccgcgctgagcgcggcccttcatccacgcgctgccgtacagtgctga

SEQ ID NO: 455261 - DNA, 1311 bp, Serratia marcescens
atgacacaaaagatttatgacattctgggaatcgggttcggcccggccaatattgccctggcggcggcgcttgaagagttggcgccgcagttttcggtccattttctcgagcgtcgttctgcagccgcctggcagccgggaatgctgctgtcggggtcggatatccagaaccatccgctgcgcgatttggtcacgccgcgtaatccgaaaagccattactcgtttaccaactttctgtacgaaaatcagcggttgtatgcgcatcttaacctgccgctgcactacccgctgcgtctcgagtacgcccagtatattcagtgggtggctgcattcttcgccgaacaggtgaattatcagagcgaagcggcggcgatagagccggtacagcatccggacagcggcgagattgtccactatcgcgtgaccacgcagaacggcgaggcttatctggcgcgcagtatcgtgatggcgccggggcgtacgccgtttattcccgcgccgttcgacacgctgcgggacagccgggtagtgcatctgaaccagtatctgccggcgttggcgcaggcggcggaaggtaatgacgccctgcgggtggcggtagtgggcggcagccagagcgccgtggaactgttactgcatgccagcagtcagcatggcgtcagccgggtcgccggcttcacccgtaattttgctttccgccagaaagacaccagcccgttttccgatgaggtttattttccggagtttgtcgacacgttttatcacgccagcgcggaaaacaaggcgcgcctgcgccgggaactggtgcataccaactactccaccgcggatatcgacgtgctggatcagctgtacgtgcggcagtatgaaaaccggctgctgcagcgtgacacgctgcagatcctgacctgccatgagattgagtcctgccagccggcggcgggcggggtgcgcatcgagagtcgccattttgttgatggcagcaccttctccggtgaatttgatctggtggtgttggcgacggggttccttgatttaggcacggatgaacgtcaggagccgtgtccgcagctgcttaaaccgcttaatgcgttgcaggaggacggcgcgccgacgctgacgataggcaaagactaccgtctggagaacattgccggcggacggctggcgccggtttatctgaacgggctgtgtgaatcgacgcatggcatgggcgacgccggctcttttagcctgctggcgattcgcgcccaggcgatcgtcgagtcgttggctcagcgccttacgccgcgaggcgaggggggacaatga

SEQ ID NO: 455262 - DNA, 1272 bp, Serratia marcescens
atgatgcagaacgacgggctgcaggccctgttggctgcgccgtcctggtggcagctgcagtcgtctcagacggcggcgcctgccgccagcctgccggcggacagcgatctggtggtcgtgggcggcggtattaccggactttctgccgcgctcagcgcgctggagcacggtttttccgccaccctgctggaaagtgcggcgctggggagcggcgccagcggacgtaattccggctttgtggtgccggtgcccggccgacactcaccggctagcctgcggcggcatttgggctcactggcgcagccttatctcgcgcgtctggcgcagtcggcccggacgctgttggcgttccccggcgcacagggggagaacgccggctggatgttgccgtgcggcacggaggacaagccggatgcggaggcccgggcgcgcgactggacggcgtatggcatccaggccgattatctggacgctgagcaacttgccgaccgcctgggaacgagtcgctaccgctatgcgctcaattttcggcagggcgggcagttggatccgctggcgctggcgcagtcaatggcggcggcctgccgcaacctgggcggcggggttgttacgcattgtccggcgctcagttttcgccgcgcggagcgcggcggttaccgggttttgacgccgcagggggagatcgtcgcccggcggctgctggtggctggcaactgctatggcgagggaccctgccgaccgccgggggccgtcatgacgttaattctgggagtatttgccctgtctccggatgccgcagcccgctgtttaccgcagggcattccgttttccgacggttacaaggatatgtggtttttccggcggctggcgggcaaccggttgatgaccgggctgttcgccctgccggggcagagcggtacgacggattgtgaacggctgctgcgtcagcgcattcatcacacgttcggcgccgcgtccggcgcgctgctgcagatgtgggccgggcgtattggcctgacccgccatgccttgcctcaccttcattgtcctgatgaggcgctggcctactggcatggttgtaatggccgcgggctggcgttgtcgcatgcgctgggcagtaatttggccctgcggctgttacgcgatgaggcaccggttctgccggcgtcccgcgcctggccgcagccggcaggcgacgcgatgcgttggatggcgcagttgctggttgcacgcgaccggcgccggcgcacggtatctttggcaaaacattaa

SEQ ID NO: 455263 - DNA, 612 bp, Serratia marcescens
atgattgcaagctgtccgttccattatgccggttaccgcagtctggatgaggcgttgatcgcacgcgttattgatattttcccgctggcgctggtgacacgtcatggcgccacgggcgtgatcgccagccatcttccgctgtttcgctcggcagacaaaaccttgtttgggcatgccgatcggcataatccgctgctgggggacggtgagtcctttgaggctcacgtggtatttatggggccggcttcttatattccgcctgaagcctatgtgaatccgcagttgccgacctggaactatgtggcggtgcatatgacggcgcaggtggcgccgatcgtcgatgatgaggaaaactttgctattttgcagcagaccagtgaacgtcttggccgccggacggacagtagctttatggctgagcgcgacgatccgcgcgtggtgcgcaacctgccgggaatatgcggcctacggctgacgccgtcgcatgttgaagggcgttttaaactttcccaggataagccaccggaggatcgcgccgcggcgttagcgtggctgctgcgccagccggacccggaagccgcagcgctgctgcagaccttactggacagatga

SEQ ID NO: 455264 - DNA, 390 bp, Serratia marcescens
atgccgattgtcagaattgaggaaacaacgcgacgcgacgcgcggcagaaacaggccgtgattgccaccgtctttaacagtttgcgtcaggtgctgggtgtgagcgatgaagagttacaggcacgttatcagcagtatcagccggaggattttgtcgcaccgggcgggatggccgattatctgcatatcgagatcgttatgttcaagggccggacgctggcgagcaagaaaaaactctaccgccatctcgttgactctctggtgacgctgctcgatatctcacccgccgcgatcgttattctgctgcgggagtatgaggcggataactgggggatgcgtggcggcactgtggcgagcgagatagatttcggctatcgcatttccgtatag

SEQ ID NO: 455265 - DNA, 186 bp, Serratia marcescens
atgctgcactttcgccgttggtcccccggcgacccacggcttacggccggcggcctgtgctatagtgaaggcatctttggctgtctgcggttcggagtaaccgtggcaaaaattgagtttaaccctctcccgtggacggggatgcggtgcgagtttaatggctgttttgattcaacattttcgtaa

SEQ ID NO: 455266 - DNA, 903 bp, Serratia marcescens
gtggatctcgacaaaagaataacgatcaggaatctcaatgtattgatcccttccaggaaaagcacccgtctacgttggaaggagtatcaaatactctctctgctggtggccaattctcctgaactggtgacccgggcggaaattatagaaagcatctggaaaggcacctattgctctgattcgacgataaatcagacaattaaatcgattcgtcagaagataggcgacagcgatcacaccattatcagaactatccctcgcttaggctacaaggttgaaaatcgcgcaatatttaatttcctgagcgatgatagccatgatgaagaacctatttcaggctctgattacatttcttctgaggatattcaacaggaatcatctgaaagttttgtgccggaaagtgcttccgcgacgacggaaataagcgtcggacaagaaccggggatgaggcaggaaggaatagcgtcccggcgcgccttttggcagcggcagccgtttaaagcaccgcagaagcggccagggcgtttttccatgctgattacccgcggcgtcaaatgggtatccgtgctgacgctatgtgcggttatcgccaatgtctttttttatctgggggggcaaacgcattcttccggcagggggaatcgcctgcacaacccggctcgggtgatgctgaccttaacggtgggcaatgccgacaatcccgatgcgccggtgtcgcactcgctgttgtgcatgtatcagggagacaagtcgctgcaggtgacgattgagtgcatcgatcccaaaaagggtgtgtttcagcagcaataccgcgacgacgaaataaaggaccgcggcgaaattaagcttactttgccggaacatttgatgaacgcatttatccctcaagaaagggagaattag

SEQ ID NO: 455267 - DNA, 549 bp, Serratia marcescens
atggataaaaaatttgcccccagccagattgtttttcattggctggtgctggttttagttgtcgttgcctatgcggcgatggaattaaaaggtctggctccacgcggcagcagcgcccgcacaaatatggccatcgtccactacaccgccggatttagcgtgttgattgctatgctgtgcagggtcggcctcaaattcaaccatcgcgaccctgcaatcctgccaccgccgccgcgctggcaaaccatcgccgccaaagccgtgcatggcgtgctgtatctgatgtttatctccctgccgttactcggcgtgttatcgctgtatgtcggccagattcactggtcctttttttcactcaacatgccggtcagcagcatccgcaaccctgagctgcaacggagcttaaaaaatattcacgagtttattgccaacagcggctactttattatcggtttgcacgccgccgctgcgctgctccatcattacgtcatgcgagacaatacgctgttaaggatgctgccgtgcaccaaggtacataaacctgactag

SEQ ID NO: 455268 - DNA, 240 bp, Serratia marcescens
atgtcaaacaccgtaactaataaattacttgaaacgtatatctttcgcagtgataaaccctctcgtgtgaaatacgagatctatggaaatgatgttgaattaacagcagcgataaccatttatcgtgaggagccatttggtattcatacttacagtgcgattactttaaatgcatccaaagatcatccagaatatgcgcttgaagaagtcagaaaacatttcgaaaaaacttacgcttaa

SEQ ID NO: 455269 - DNA, 354 bp, Serratia marcescens
atgaaaaagttgttagctattgctttaggggcactgctcctgtctgggtgtaccgttcgtgttgctgatatgactgtcggtagcaccaaaaactacaatcttaacgcagcaaaatttgagaagggacaacgcgtgacgggtgaggataaagcacctatcgttatcttccctctcggcattccaagcgtaaaaaccgcaatggatcgcgctattgaaaaagacaagtgtgcagttggtctgagcgatgtggttatctatcagcttaaccacgcgttcttgttcggtacttacgggtaccgtgtagaaggtacgcaaattcttgacaggtcacaaaccgattgcgagaagcgctaa

SEQ ID NO: 455270 - DNA, 1023 bp, Serratia marcescens
atgagtcgaggatgttttaatttcataccatcaaatcctgtttattcagaatcagataagttatggtgggtagagcttataaataccgattgtttttggtatgacatgatcataaatccacctgaagaaattaataccaataagattattaagaattaccttaacctgatggaaaaacacttaaatgaacattgtgaaaaaagatttatttatttcttaggtgcaaggaaaaaggttaggttttctacaaagagaaaattaaaatatacaccacttacaaaatatttaacattgtatgttttggttgggcaggaggagaagaagcacaagataaagttctcattctacgaaaacacggataaaggtccaaaaaagataacgcctgaagtaaaagttactgagaagtacatatatataaaaactagtgagaaagatacaaacgtattatctgttcatgattttttgaaagaaaactttataggcttgggaatagatacagagattcactatgtaggatatacccatcaacctcaaagaagaccaatagatctaattcatcgtggactttcaaaaatgctgtatagcgtttcgaatggcgataatgatttttttgttttctttaatatatttaaccctcgcgccatttctcataataatgattataatgtgagttttaatgtatctaattcactaatggatgaagtggaagttgataaagagggccgaattattgaaaattgttttataaggtattttgatacaaaaatacaagatgatgataaagaaagtaaacgaccagatcttaataagatgtttattgaccttgtaaaaaacaagaaaataaaaaacattgcagtgagtcttcagtatgaaaatactaatgagtattatcgtttttactccagaactgttgaaccgaagagcgaccatttcttcacaattaattttttagaggataaaatccttcttgatagggacaaaaatatggcagaacatctgcaatttattctgggcaatacatga

SEQ ID NO: 455271 - DNA, 2058 bp, Serratia marcescens
atgccgcagtcgtttgaaggtttcattacgcatgacgatattactgagatagccgaatctgaaaagcttattctacaggatgatattcgtatttcaattctgaaagctatgcactctattgatgtacaagcttgcccaggaagtggaaaaacaacattgattgctactaagctcattcttcttgctaaaaagtggaactctccacaccgagggatatgtgtcctgtctcataccaatgtggctaaagatgagatcattagccgccttcaatgctcaacatcaaaagttgcacagcgtttactgaaatatcctcattttattggaaccattcaagattttgtacaccgctttttagccttaccctatatcagatctcgtggtactcaagatatcacggtagacaatgatatatacgctaaacaagctattaaattgctcgaattagctcaattttcttggtttaaagggacattaaatggattaggtaatactgtagaacaagaggctttcttcagaggtacatttcgatatatttctcagaatggtgaagaaattaatcttgataaaaaacccagaatgtggagtcaagataataatcttcagagggctaaacgcgacctcagtcgattaaaaaactatctggatgaaagaggagtgtttctttttcgtgatatgtatacacacgccgataaagcatgcacaaacaatcctaaattagcagaagtcattcgagcaaggtttccttttgttttaattgatgaaatgcaggatacacaaaaattccaagatgagcttataagtaaagtcttcctgaataattcatcaatcattgttcagcgctttggcgatccagatcaatctatttttaataacattggaacagaagagcctaatcaaagttttaacggtaagctacgggaccagatggattatgtaattcatacatctcatcgctttgatggagttctatctaaaaaaatctgcaagttaagtttcaatggtattccattagaaacggagttagcagaagaaaatttgttagagagagcacaagcccatactactcgtgatagattttccgatactgttatcattttcaatgacgatacttgcgaagaagtcattgagcattttgctataattgtttcaaatcagttttctgtagaatacaaacaaaataaaaaatttacggtaaaagttgttggtgcagtcggagctaaaatagcccacaatgaagcacagtttagaataggccattattggcctgattttgacaaaaccaaatcaaaaagtcatttcaaagaaacttgttttatagaagctgttcgccggtgccaagaaaattcaactatcgatttggcagataattataaactcttacttacgtgtattcttaagcttatgcgaatgagcaataagatggatgaaaatgagaaatatttttccagtacaacattacgagaatatttaatcaaaataggaaactggactcgctttcgtaaagggttattttatttgctcaccgagactaaagtgacaaaacaacaacattgggaaattgcctcccgtacattaatttccttgctaaagttagaaagtatccccgccgaggcaacagattatatggcatttcatgaagatacaaatccagatgaagctagacaggctgaacacgcaagctcactgacccccttgaaagataacactctaatccatgaggatggctttcatattgagctatcaacaatacatgctgttaaaggcgaaacccatgatgcaacgctcgtcattgagacaaaaaaccacacgttcgatctacaaactatgttgccatatttgactggagagctacccaacgtagagcatcccaatgccagcctaccagataaaccaaattcacgtagggcattcaaacccaataaagtttttatgcggcagttttatgtcgcaatgagtcgtccgaaacatttactatgtctagcccttcactctgatcgaatatctagtgaacaaattcagttgcttcagcagcgtggttggcaagtagacatcatctaa

SEQ ID NO: 455272 - DNA, 1983 bp, Serratia marcescens
ttgtatttatcacatattgaaatatcaaattttaggctgttccaacatttaagcttgaagttaaatcgaggccttaatgtattggttggcgagaatgactcaggtaaaactgcattgattgatgcaattcggtatacgctaggcacaaaatccaatgaccgtgcttatcttacagagcaagattttcacaacaactctgatgatttaaaaataaaactaaaattttctggagtagacctccatgcacatcgctttgtcgaacatatttctcacgaagaatatgaagatgataacggtgaaaagaaaaaccgttccgtcctttacgttcagctacaagctcaaattacaggattagaaaaaagaggctatccctatataaagaccgtattacgttcaggtatcgatggaaacggtttagccattgagtctgagataagagactttctagcttcaacgtatcttaaaccactaagagatgctgaggtggaactttctagtggtagagcctctcgtttatctcaaatattgagctcctcaaaagacattatagaaggaatggagagcattcttactatcatcgctaaggcaaatgatgagcttcttactgatgatgctgccctaaaaaaatcggctgaaaacattcagcgaaaatatcttcatgagcttatttttgagaaagacaaatcaaaacttggtgcatttattgatattgcaggcattaaagaagaagacctatctaacctaccaaaacacatccaaaagcgccatttacgcactttattagagggattaacgctctccctgaccaatgatcaacgaacacatggactcggttacctcaaccttctttttatgggggcagaattactactcttggaacaagaagcaaacaacgaatttcctttacttctcgtagaggagcccgaagcacaccttcaccctcagctgcaaatgaaactccttcagttcataaatagaacaactaaaaccgagaaaaaacctgatggagtgcagtgtattctgacaactcatagtcctaacatagcctctaaagcggaccctgctgaaatcatcatgctatctgaagggggagcttggccgcttgctgttggtgaaacagaacttgctaaagatgattaccaatttttaagaaaatttttagattcaactaaagcgaatgtcttttttgctaaagcagtcctacttgtggaaggtgatggtgagaatattctgttacctgaattggcaaggttgttggggcgccctttagaaaattatggcgtatctatcgtcaaatatgacaatagcggctcatggaagcgttttgccaagttattcttaagatccggccaagatgggaacccaaatgcatggcatccgacaaaaatatgcgtacttagggatcttgatctttggccagattgtgctgaagaaaaagatgacggcagtaacccatacggatttaaaaaagagaatagcagaaatcaagtctattggcgaagaaattaccccgacgaccagcagagaaaaactgaacatatcgatcaattaaataaacaaaatgttgtagtcaaaatatcggatgactggactttcgagtactgtctggctaaatacggtctttttagtgagtgctatgaagctactattggctcctatgtaggaatcgataatatcgttggcgatgatgataccaaagcgacattcattcttagccaagtttcaaaaacagactttgcctataaactgtctagcattcttcaaaagcaacaagaccaaaaagttgatgacatcatagcttctcttagtgttgaggatgccaataacagcgatatttctaagtcggcccaaacacaggcaaaaaacgagtttgcaatcgaactcaaacagaggcttccaaactatctaattgaagctattcaatatgtaacagagccaattgaagaaggtattgaagaggtgcagcatgccgcagtcgtttga

SEQ ID NO: 455273 - DNA, 159 bp, Serratia marcescens
atggttgtgtgcattgagggcttggctatttcagcttttcattctttcggcgcctggggggatatcaaggaggataggttaaatgaatgggatatttatttatatagcgccaggtttatcaattctatcattactttctttttcactgcacaaccgtaa

SEQ ID NO: 455274 - DNA, 459 bp, Serratia marcescens
atgacaatgcctgagttggtaagtaaaactgcggaacagcaatcttttgttaaccaggagcctaattataagctctatacggttaaaggtgtcgccattgctacgcttttcggtacgcccctggccggtggctatttgatggcgaggaattacaaactgctggggaataaaagttatgccagacgggctgtattttactctgtgctaacgattattgcctctcttctcattggcatgctgcttcctgagcaaacgccatcagtggttgtttctgtaccggtcttaattgcgatggtgcaagcgatgaagtacctgcaagggccaagcctggctgttcaccaacagaacggcggggaatttgcgtcttgctggaaggcatttggtatttcacttctgtttatggtagcaattcttgcgctgtttgtggttggcgtgatgattcttgaccctgagatttaa

SEQ ID NO: 455275 - DNA, 531 bp, Serratia marcescens
atgaaattatcacacgtctcgctggccgctctgatggccgctgctactctgtctttcggcgcaaacgctgctgcttacgaaggtaactccggtaaagttactttccacggccaggttgtagattccccatgtaacctggctccaggccaggacggtatggacgttaaggttgatttcggtcagctgtctcagtctcagctgaacgacggcgtgaaaacccctgggccttttgctatcaaactgcagaactgcggtctgggagaagcagagaacaagaaatctgttgaaattaccttcaacagccctgaccaaatctccggcaaaaacctgctgaaaaccaacggcatggctactggtctgggcatcagtatcgaaaccgttaccttcggtactgctttgcctctcgttggtctggccgatggcgacaacaccctgtctttcaccgcgtttgctcagaaagcagaccctgccgccgacgttaccccgggtgacttcagcgcaacgaccaacttcctgattagctacaagtaa

SEQ ID NO: 455276 - DNA, 1107 bp, Serratia marcescens
atgcaaaataaaaacatctatgtgacgcagccctatttgccggacttgaaagagtttattccttacatggaaagtatttgggacaataaaatactgactaacggtgggccgatgcatgagcgtcttgaaaaagaattatgcaattacctgggggtgaatgaggtagcgttatttaataacggaacgatcgctctcctgacggcgctgcaggcgttaagaatcaccggtgaagtgattactacaccctactcatttgtcgccacggcacactcgctgttgtggaacggtataaagcctatttttgttgatattgatcccgttacgctaaatatggatccggatagcattgaggcggcgatcactccacaaaccacggccattatgccggtgcactgctacggcaatccttgcgatgtggataagattcaacggatagcggataattataatcttcgggtgatttatgatgccgcacacgcctttggcgttaatgatgcggggggcagcgtgttgcgtcacggtgacctgagcactatcagcttccatgcgacaaaagtgttcaatacgtttgaaggtggcgcaattatctgcccggataaaaagaccaagacccggattaataatctgaagaactttggcattgttgatgagactaccgttgttgctccgggaatcaacggaaagatgagtgagattaacgccgcatttgggctgctgcagcttaagcatgttgatagcgcgattgccagaagaaaagagatcgatatgtattaccgggaggcgttagccggggttgacggtattactcttattgcaccgactggacagctgcgcgccaattactcatattttcctattttgattgaagacgatttcagaatggatcgtgaagcactctatgccttcctgaaagcgcgggatattttctctcgccgttattttttcccgttgatcagtgagttcccgatgtatcgaggaatgccgtcatcggccaaagagaatttgccggtggcgaataacgtggccagacgtgtgttatgtcttcctatttatccagacttaagtcatagcgatcagacgcgaatcatctcattaatcaaggggtaa

SEQ ID NO: 455277 - DNA, 1182 bp, Serratia marcescens
atggagcgggtgagcggtatggaaaatcagcgtaaaatcgtccatctgtgtcctgacgataagtttattgataatgctatcaggatgtttgaggacgcgttcccgcaagagaatattgtctgcgtttatacaaaagggcgtccggctaactatgtcaaaaacggcatagactatcacgttggcgtgaaggacgtcctgttaggcattaataatggtgtgatgaaccatgccaggatcgtggtggttcactcgctgagtagcgcatggtatcggactcttgagcgcctggccaaaaatgtccccattatatggttgggctggggggcggattactatgatattatttcccctcattgcgggatgctgctcgataaaaccgctgagcttgaaggcagaatacgggcaggaaaaaataaaacgattaaggcgtatattcagctgttgtttaattcgatgtaccgcaaggtcaaggtcatcgagcgtataaattattttgtcccggtgatacctaacgagtacgccacgttaaaatcagcgaggaagtggagggcatttcctgctcaggctgattggaactacagccctaccggccaggaactggcggattatgtcaaggctcatggcgtggcagaagaaatggggcgcgatatcctgcttggcaatagtgccaccagttctaataatcatattgaagcatttgatattattgaatgttttaatttttccgggcgaaagttggtggtgccgctaagctacggggatgcgcagtatggacgtgaaataaagcatattggtgaggcgcgctttgatgagggttttgatgcgctgattgactatatgcccattgatacttacatgaaaaagatagcgcgatgcgggtttgtcgttatgaaccacgtgcggcaacaggccgttggtaatattatcattatgctttatatgggggctaaagtatttctgagagccgaaaatccgacgtatcgctatttcaaatcgatcggcttgaccctgttttctgtacaggacatggcaacagatccctctcattttgatacgcggcttacgtcagaagaggtcataaaaaaccgtataattctcgacaggttatggtcaaatcacgctttgcttgaaaaaacaaagatattgatagcaacggctgccggctcaggggcgatacggtga

SEQ ID NO: 455278 - DNA, 1407 bp, Serratia marcescens
gtgaacgctaaaaaaatctctgcatttgctgtgggtcccgtaggcgcggcgctgcttggcgttatcacactgccattgatgacctggctgtattctacggaggatataggacgaatcggcatactcaatattgccatatcatttgtcgtgctgctgtttggtttagggttggatcaagcctatgtcaggcagtaccatgaggaaacggtgaagcccgcgttgctaaaactatctctgcttcctgggctgctgcttttgttggcgatcttcattcttttattttttaccccgttaagcttgtcttccgttctctttgatcttcatgaccctgcggttggcacgctctgtgcgttgatactgctggcgtgttttgtctctcgctttttatcactggttttgcgcatgcaggaacgcgggggggcctactctctcagccagctgctgccgaagttaatgatattgatggttatcggctacttttcgctggcgtatcaccagcatgactttattcagctgatgctggccaataccgttggatactgcagcgtcttattgattttactctggtcgaccaggcatgactggctgccggcgatcaaagaaaggtttgattacggcaagttgctggggatgctgaagtttgggtttcctctgattttaggcagcctggcattttggggaataaccgccatggatcgcgttttcctcagggcattttcgacttttgaacaactggcggtatttaccgttgccgccagtttctccagcgcggcaagtattgtacagagcgtgttttctaccgtttgggcgccgatggtttataaaattgccgatgataaagcgcagggggttaacctggtaaataccgtctctaaatatatgctgatggtcgttgtcacttttttctgtcttggcgggcttttctcctgggttgtggattggtttttgccggaaaactatcgggaagttaaatatattgttatcgcctgcctggggtttccgctgctatataccctgtctgaggtgaccgtcgtcggcatcggcatcagtcgcagaacggtgtattcaatgctggcctcgttattggccctgctggccaacttaggggtcaatgcatatatggtgcccaggtttggcgcggctggcgctgctgtcagtacgtgttttaccttctggttatttttaatcctccggaccgagttttctatcattagctggaatacattccccagaatggagatgtacctgtttagcggattgtgcgtggtgggcgcgtctctgggcgcgctgtttggcgatgccatacgcagcgagttgattggctactggctgttgttgctggttttattcatggtcagaaattggcgtcttatggtgactatggtgaaaaaataccacctgatttaa

SEQ ID NO: 455279 - DNA, 507 bp, Serratia marcescens
atggacgtaagcataaaaatgaagagtcagacttataatattgtcgctaccaggaagtttgaattttatcacgagctttatattgagagcatgctggcgaaattctacgaaagggtatacttcgtcgtcattacgttgcagcttattttaggcatcgcgatcattttcattggccatcagtcgggagtggccggtgttttgttgcttgccttggtcacagtgatgatggccgtcaatccacagaggagatcgctgaaggcgagacgccgagaagcgcagtatgtcgatatgatcgccctgatagacacatacagtgatgatgagctaagtgcccatatttgtgcgattacccggggcaacgcctgtgggcgggggctggttgaaaaagctgcctatctgcaggtcgcccactacttcggggctacggagcttgccgctgacgttaagaggcagcttggttgcaccgataaactggttgcgtcactcgccggcgggcttcctttatag

SEQ ID NO: 455280 - DNA, 417 bp, Serratia marcescens
ttgcagataatctcgcgtaatcgtcatgccatcatgatcatgctgtatttggcccggcatccgggacgggcggcatcaaccacggagatcggcgccgagctcgggatctccgtgtcctatctggaacagttattcaccgtgctgcggcgcgacgggctggtgcgcagcgtccgcgggccgggcggcggctatctgctggttaagccggccgatgaaatcaccgtggcggagctgtttgtgcctttccgcaaagacgccgacgtcaagcatgagctgtccgcagccagtgcggaatttgtcgcgctgtgggcgcagttctgccagcaggccaaccagtttttcagcacgctgaccctggcgcagattgccggcgtcgcggcgccggctggccggctgccgcatcctgccggcggctag

SEQ ID NO: 455281 - DNA, 822 bp, Serratia marcescens
atgccaaacaacctgcaaaactcagagcatcagcaaatcaccgccgtcgtcgctctcctcacccgccagctcggccgcaacctgctggcgatccatctgtacggctccgccgtggagagcggactgcgtccctacagcgatctcgatctgctggtgacgctgcgcgcgccgctggataacgcgcagcgggcgagcctgatgccggcgctgctggcgctgtccgcgccgcccggcgcagcagacggcaaacggccgctggaagtcaccatgctggtgtatccgcagctggtgccgtggcgctacccgccggtcagagaactgcagttcggcgagtggctgcgcgaggatattagcgcggggatttatgaaccggcacaacaggatgcggatatcgccattctgctgaccaaggcgcgtcacgccagcgtggcgctggtcggcgatgaggcggcacggctgtatccccccgtaccgccgcacgacctgcggcgcaccttgcaggatacgctggtgctgtggcaggaaacggcggacctgctgggcgacgagcgcaatatcatcctgacgctggcgcgcatctggtacagcgtggtccataacgagattaccggcaaggaagaagctgcggcctggctgctgccgcagctgcccgccgaacatgccgccacgctgcaggcggcgcggcaggagtatctggggctggtgacgcaggactgggcggcagtcatgccggcggtcgaagattttgtccgctacgccaaggcgcagattagcgcgcggctcgacagacaagcggacggttcagcatcaccgccctactga

SEQ ID NO: 455282 - DNA, 438 bp, Serratia marcescens
atgacatggctgccaaaagcggtttgtttttttgtgatgaacatcatggccatagcgctatgcccggcttctttggcggcatcattggtgtcctcccagcctgtcatgaccactagcggtaataatcagttgcagtgttataactgtggcggcagcggcaaaaatgtcgtggttaaagggggcggggacgtcaggcagtaccaatttttaattgacacgccttattatacctttttggcgagtaagaatgatgtggcttgcccttacacagcatgggctgttatcaataaaatacagtctgctccgcgtgccggtcggtttgacgtagggtgttatccggtcaaggattttcgcgccgtttatgaccggcaaacaacgcggtttatcgttgaatttctcagcggtgtgactgaaatcatcgaatttgataatgagtaa

SEQ ID NO: 455283 - DNA, 1179 bp, Serratia marcescens
atgtcgatgaatcaggatcacacaccgggtcggcatccgatccgtaccggcctgcgggcgctggcggccgcgtccctgttgctgcacggcctgatgccggcagacgccgcggcggcgccggtaacccggcagtacaccgtggcgttcggcacccaggcgctgacggcgccgctgcgggtgagcgacagcgtaccgctgatctcgcgcatggtgacgctgccggcggtgaactgcgcctcctgcagcgatgcgtccgcgacctacacctatgacgaggtgtgggaggtggaccgcggggtgctggatcccggcctgtcgcaggcggtgagcggcgccggcgcccggcagcgcgcctgggtgtttcagagcagcacgatgggggagtcgtcggggatcgcggtgatgatccgccagcaggatccgagccaggggcgcgactgtgaagtggtgaccggcgggccgggcgagtaccagtgccgcagcctcggtaaaaacggtaccaagacgccggcggtgccggtcgaggtggggctgatggtggtgaacgcctcggtgacgccgggcgggctggcgacgctgaaccggccgtttctgacccgggtggtgacgttccgtctgggggagcgggtgatggcggagtttcgcgacgcgatcggcgtcagcgccagcaccaccatggcgtcctgcaacgtcagcgccggcgcgctggtgtttaacctgccggcccgcagcctgattgccggcggcccggccagcgtcagcagccggatcgccggcgcaccgccggcggacagcgtggagcggacgctgaacctcagctgcgtgggcaatacccggctggatatccgctttacgccgctgaccggcacgctggacggcgaccgtatcctgcaggcgcagtccgcacagggcacgcccggacggatggggttccagctgtggtaccgctccagcgagtggcccggcggcgacggcgcgtggcgtctggcgcagtgggacggcgccagtgaaacctcgctgctgaacggtgcggcgctgcggcggccgcggccggcgggggcgccggatatcgccctgaagttccgcgccggctatgcctggccgacggggacggccgtcagtgaggcggacgcggggccggtgacggccagagggttgtataccctcagttaccagtaa

SEQ ID NO: 455284 - DNA, 597 bp, Serratia marcescens
atggacatgctgttaacaagccaaacgggcagcaatagccgggagcaaccggttatttttcccctgtacggtcgcgaccgctactatatttacgcgcttaatgcgctgctgacgacgttatttattgaagagccggcgctggaaaagtgggtgccggatatttggctgattgccgaggtcagggatatattttgctgtatcgaccgcctgcgggaaaattcagacagcgtggtcattggcgacgcgcgtcattaccggctgctgtgcggtattcccggtctgcgctgggtgtgttttgttgacgcctcgctggcggtggatgaaatgaaacaatgctttaaagccattcttcgccgccggccttattgttcccggctgggggagcatcgcctgagtgatgttacggcgttttccgccagaacgcggaaaatcatcgggctgctgctgcagggcttttcgccgcatgtcgtcgcccgggagtgcgacattcaggcgaagaccgtcagcctgtataaaagaagcgtgatgcagcggcttaatgtgaacagcacgcaggagctggtgatcaaaagcgcgttgatgaaagcgcagtggtag

SEQ ID NO: 455285 - DNA, 1245 bp, Serratia marcescens
atgctcacgcctcaacataatatcctgctgattgacgacgacagcgacgtactcgatgcctacagccagctgctgacgcaggccggccaccgggtttatgcctgcggcgatccgcgcatcgcgcaggatctggtgaacgaagagtgggccggcatcgtgctgagcgacgtgtgcatgccgcactgttcagggatcgagctgatgcgtatcctgctaacacgcgatccccatctgccggtattgctggttaccggccatggcgatgtgccgatggcggtagaggcggtaaaaaacggcgcgtgggactttttgcaaaaaccgatcgatccggaacagttgttgacgttgatcgacaaagcgctggccgaacgtcaggcgcgggtagtccgtcgccaatggcagcgggaacagttggcggataacctgatcggccgcagcgcgtgggtgacccagatgcggcaaacgctccagcagctggcagaaaccgatatcgcggtctatttccacggcgaacgaggatccgggcgcacgctggccgcctgctatctgcatcgccttggcccgcgcagcgcgcagccgattgtctttggcgatattatggaaggtcaggacgcgccattaaaccagtggatggcgcaggcgcagggcggcatgctggttctacgcaatatggagtttttgacgccggcgcagcagtgcctgctggcacatcagcaggaacaggacgtcccgccgtttcgtctggtgggcatcggccagcagccgctgctcaccatgaccggcggtagccgcatcatcgccgatttatattactgttttgccatgacccagctgttttgcccgccgttatcgcagcggccggacgatatcgaaccgctgttccgccactacctgcaacaggcctgccgacggcttaatcaaccgttccctgaactgccggcggatctgggcaaaaagctgctcaagcgccactggccgaacaacgtgcgtgaattagccaatagcgccaagctgtttgccgtcggcgtgatgccgcaggccgatatccccggcccgttgaagccccccgccgagcccacgcctcttgatcagcgggtcgaagattatgaacgtcaaattattgccgaggcgctgaacattcatcagggcaaaattaacgacgtggcgcaatatctgcagatcccgcgtaaaaagctgtatctgcgcatgaaaaagtttggcctgaataaacaccattaccgctag

SEQ ID NO: 455286 - DNA, 2013 bp, Serratia marcescens
atgaagttgccggccttgattaaaaacctgaacatcagcgccagcctgcgcggcgcattctttaccggcgcgctgctgacgctggtggtcagcggcgtcagcctgtactcctggcatgagcaaagctcgcaaatccgctatgcgctgaatgactacttcccgcgcatccagacctcatttctgatcgaaaacaacctgaataccctggtcgatcagctcaacgaatttctgctggcggcgaacaccagcgcacgcctgcagctacgcagccagatcctgcagcacctgaacgatatcgacgccatcagccaacgcctcgacgcccccgagcggcagcagatcaaacagacgctcagcgacagccggcagctgctcgcccggctcgatcgttcgctgtacaacatgtttatcgcgcgtgaaaaggtgaatgaaatcaccgcccgaattaactggctgcatgacgatttcagcgcggaaatgaattcgctggtacaggactttagctggcaacagggtgcgctgctggaccagatggaagagaagccgcgggcaaccctgcaccggctacaggagaatctgcgttcggttcagggcgaacagcaacaggtctacacgctggcgcgcatcgaaaaccagatcgtgggcgatctgcgcgatcggctggccgacgtacaagcgaacgccgaaggcaacggcaatattgccggccacatccgctatctgagctacctgaaaaaaaccgccgaggaaaacatgcgcccgctggagggccaccccagcaccgtgaccctgcggcaaaccattgatgaacttcttgataccggtatggccgacaacaaaatgccggcggccattgacgaatatctgcgggcgcaaaaaacgctgcagcaggtcacgcaggccaaagacagcacgctggcgcgctttcgcgcccagttggacacccagctccgagacagccataacaaaatgcagatttttaatcagcgtctggagcataccatgcggctcagcggcggtctgattctggtcgccaccctgctggcgctgatgctggcctacctgctgaaccactatttcatccgttcgcgcctggtcaaacgcttcaccctgctcaatcaggcggtggtgcatatccggctgggcgacgttaatgcggcgatcccggtctacggcgaggatgagctggggcgcatcgccaaactgctgcgccatacgctgagccagttgaatcagcagcgtcgacagctggaactggagatcgccgaaagaaaatcggtcgaaacccacctgcgttccacgcaggacgagctggtgcagaccgccaagctggcggtggtcggccagacgatgaccacgctggcgcacgaaattaaccagccgctcaacgcgctgtcgatgtatctctacagcgcgcgcaccgccatcaaccacggtcagacggaaaacgccggccagacgctgatcaaagccgcgggcttaattagccgcatcgacgccattatccgcagcctgcgccaattcgcccgccgttcggaagccgacgcccctgccgatgaagttagcctgcgccacgcctttcttgccgcctgggatctgctggcgctgcgccaccagccgctgggcggtaggttgacgctgccggacggcgcgccgtcggtgctgggggatgaggtgcggatacagcaggtgctggtcaacctgttgaccaacgcgctggatgcgacgcaggatgccccgcgcattcaggtgacatgggagccggtcgccgagggctggcaggtgacgatcgccgataacggcggcggctggccgctggcgctggccgattccctgctcaaaccgtttattaccagcaaacaggtcggcctggggatcggcctgtcgatcagcgcctcgctgatggcgcagatgggcgggcatctgcgcctggcctccaccctgacccagaatgcctgcgttgtcttacaattcttagccacggacgtaaaccatgctcacgcctcaacataa

SEQ ID NO: 455287 - DNA, 1257 bp, Serratia marcescens
atggtaatgcggtcacgtaaacatcaggttaaattaattacagcactgtttttaatgtttacctctttcagtttcgctcaggtgaaaaaaaatgaactggtgatcgccaccaccttctcgccggacgccaccgcctatattattagtcgctggcaaacgcagccgcagtccgtcattatccgcacgcttaaccgtaccagcgcatcgctcgagcaattactggacgccgcaggcggggaaaatatcgatctggtgctgacttcctccccgatgttgctgcagcacctgcaagaacaccaccgactggcggcctatcccgatgcaccgccgcagtcgcaacgcctggtgccggaatccatccgcggcaccgcggtcgccgtagcgatctccggctttggcctgttgatcaatcagggcaacctgaatgaacgccatttgccgctgccggccaactgggacgatctgattcagggacgctatcaggggaccgtgctgatgagcagcccttcgcgctctgacaccaaccatttgatggtcgagtcgctgctgcagcagtcgggttggcagcacggctgggagaccatcctgagcctggcggggaacctggtcaccatttccagccgcagcttcggcgtggcggataaaattaaaagtggtttagggtcggtcggcccggtgatcgacaactacgccaacctgctgctcgacgatcccaatctgacgttccgctatttcccgcattcggccgcttcgccgacctatgtggcgctgattaacaacacccagtctccggcgcaggcccgccgctttatccagtttctgctcagtccggaaggacagttggcgctgtcggataccgataccggaaaatattcaatcattcccagccgggacggcagcgcgcgcgcccggcaacagcagcggctgctgagcgcgccgccgctcaactaccggctgatcctgcagcgccagcgtctggtgcagaaactgttcgataccgccatcagcttccgcctgccgcagctcaaggacgcctggcgcgcgctgcacagtgccgaaacgcgccttaagcgcccgctgccggaggtgcgcgccctgctgaccgccctgccggtcagcgagcagcaaagcaccgatgcgcactacctagcgcgctgggagaataaggcgcaggctgaacagttgatgatggagtggcagctgttttttcaggaacaccagcggcaggcgatcgataagctggagaatctgaaatga

SEQ ID NO: 455288 - DNA, 1392 bp, Serratia marcescens
atgctttcattgttaaaacccaaggttgcgtcgacaaccatcccaccgcagcaggtagagtctacgtacaaacgctatcggctccaggcgctgctgagcgtatttctcggttatctggcgtattacattgtgcgtaataactttacgctgtcgacgccctatctgaaagagcagcttgatctgagcgccacgcagatcggtatgctcagtagttgcatgctgattgcctacggcatcagcaaaggcgtgatgagcagtctggcggataaggccagcccgaaggtgtttatggcgtgcggcctggtgctgtgcgcgctggtgaatgtcgggctgggttttagcagcgcgttctggatctttgtggtgttggtggtgatcaacggcttgttccagggcatgggcgtcgggccgtcatttatcaccatcgccaactggttcccgcggcgcgagcgcggccgcgtcggggcattctggaatatttcgcataacgtcggcggcgggattgtcgcgcctatcgtcggcacggcttttgcgctgttgggtacgcagcattggcagaccgccagctacctggttcccgcggcagtggcggtactctttgcagcggtggtgctgatactgggcaaggggtcaccgcgcagcgaaggattgccgccgctggatgagatgatgccggaagagaaggtgatcctgcataccggcaaggtggagcaggcgccggaaaacatgaacgctttccagatcttctgcacctatgtgctgaaaaataaacatgcctggtatgtctcgatggtggacgtctttgtctatatggtgcgttttggcatgattagctggctgccgatttacctgctgtcggtgaaacatttttccaaagagcagatgagcgtcgcgtttctgtttttcgaatgggcggccattccttcgacgctgctggccggctggctgtctgacaaactgttcaaaggccgccgcatgccgctggcgatgatctgtatgacgctgatcttcttctgcctgatcggttactggaaaagcgattcgttgtttatggtgacggtgttcgccgccgttgtcggctgcctgatttatgtgccgcagttcctggcgtcggtacagaccatggagattgttcccagctttgccgtgggttccgccgtcggcctgcgtggttttatgagctatattttcggcgcctcgctgggcaccagcctgtttggcgtgatggtggataagatgggctggcacggcggcttttacctgctgatgggcggggtggtctgctgtattctgttctgctatctgtcgcatcgcggcgcgctggaactggagcgcaaacgtcaggaagaggccggacagcgcgcgctgcagccggcgcaggcgcacgcgtaa

SEQ ID NO: 455289 - DNA, 513 bp, Serratia marcescens
atggatattcgtaatgaggttgataacggtggtcaggtggcaaaagtgatgtttcttgtcctgtttgttgctctgttgccattttttttcataattggtatttacgttcaagatccaacatctaccatgttgaataacgttgcctctattacccgtcacctgcctgcaatttattcatttaaaagtcctttattaagcaaggtgatggatgtttatgtgaaaacatcaccatttgttgcttttgttttgtttttgattacaaacaaaaaacttaggttaaaaaaagataagtcaaaatggtatttgttaagactttatcttttgttctcttttttttacatggtattgatttatagcttcttgcttactaataaagagttaactaactcggcccgggtacttaacctcatgtctacaaatgacattttcttgtcattcttttatattagcctgtactgtgttattttttttgtttacttatttatatctttggttttttatcggtacgtttag

SEQ ID NO: 455290 - DNA, 1176 bp, Serratia marcescens
atgttttttaatacaaacacaaagtttaagctgcttgcaccacgcaatgaggacagcatgacagtttcgggttcaagcggtcgcccaggcccaacaggacccagtggaaatgctgggggaaatggagggagttcttcgtctggcggaaaacgttcttcacggctccaaattgtcggtgagtcacgagccaaagctctaggtataaacccgcaacatattcttttttattatattgatgaagatcgaaacatcatggccgtcactcaaggtttcgttatggtcgatgatgatatacatcctgccagaaccaatttgggtccggcacctgcggatttactcaatgacagcggtaacagcggtactaaaagttatagtaatattacagaacaatatggtggtgatatttctgattctcgcatcactacattgcataaaatcattagggataatgctttctgggctaatcactcagactcgggcgtaagaataaccaacgcacgacaagcaactcttggagccaaatttgagctagctaagattgatttagtccgtaaaatcatagaagagcaaaatttaaaaaaagacgagaaagaggcattaacaaaagccagtgaactgctcgctgacatggggggtaaaatcggcgatgttattggtgaaaaatacaaatcaatgtcaaaggaaatcgccgaaaacgttagaaactttcaaggaaaaaccattcgcagccataccgatgccatggcatccctaaataaaatcctggccaacccaggaatgaaaataaaaaaaggtgacagtgaggcgctgagtaatgcgtggaaactcctgaatgccaacgatatggcaaacaagcttgggaatctaagtagggcgttcaaagtcgctgatgtagcaataaaggttgataaagttcgaaagaagagcatagagggatatgaaacagggaactgggctcccctaatgctagaggtggaatcctgggttctgagtggtatggcggcaagtctggctatcgcattgtttggcgccatcattggtgcaatgtctctccccggcctggcaataacagctttaaatatatttggaatcataggaataagctacttagcttcgtttattgatgcaggaatggccgataggataaataaagaaataattcgccaagtgaattaa

SEQ ID NO: 455291 - DNA, 846 bp, Serratia marcescens
atgactaatgagttaaaacatgaaattgcgcaggttaacggcataagactgcactatgtacggggcggaacaggagagccggtgctgttagttcacggctggccgcagacctggtatgagtggcgccaggttatcccccggctgatcgccgcaggccatgaagtgatcgccgtcgatatgcgcggttcgggggattcagacaaaccggcaacgggctacgacagcaatacggttgccggggatctgcatgcgttagtcacccaccttggttttgagcgcatccgggtcgtcgcacatgataacggcgcgcgcgtggcctatgcgtatgcggccaactatagacatcaggtaaaaagtctggtgttcctggaaagcaaaattctggggattgaaagcgaagatgacgctgaaaaagagtactggcattttggctttcatcaggccccggatttggcgcagcagctggtgagcgggcgcgaacgtgaatacctgagctactttttcaccacctatgcttatgacccccgcgccatcaccgcagcggaccttgatgagtttgtcaggtgctattcagccgcgggcggcctgcgggccggcttcgagttttataaggcgtttcccgaatcagcccgccagagccgggaactggcggtccgcaagctcgatattccggttatggcctggggcgggtcgcactgtatgggcggaatctgtttgcgcagcatgcagcaggtcgcccatcacgttgagggcggagtgataccggaatgcgggcactggatagccgaagaaaaacccgagtttattgccacggagatcattaatttccacaggaagcacccctag

SEQ ID NO: 455292 - DNA, 594 bp, Serratia marcescens
atgaagattcagtttattacaggtaacgcagtcaagttcaaagatgccgcgcactatttctctgctgctggaattgagctgaagcagaccaatatggccgttcctgaaattcaggccgactgcgctaatgaggtctgcagagctaaggctaactatgtgtcagaacgcatctgtgggccattttttgtcgaggacagcagctttcatattccttcactactgaattttccaggcatttacgcccgctatgttttagagactctcgggaccgaaggcattctgagagcaatgaccggcatagataaacgtgattgctatttcaagagctgcattgttttctgcgatggagcgaaccgctttcataaattttcctttatcaggaacgggttatttatcacagagcatgccggtaaaagcatcaccggctggtcagaactctggaggatcattggcgtcgcagggctgggtaagcatgtcagcgaagcgtctcccgaacagagagcagcgcttgagagcgagtggagccaggaaaatacctttacccggctcattgaatacattagaggaaaatacggtgaaaaagagcatttatga

SEQ ID NO: 455293 - DNA, 792 bp, Serratia marcescens
atggagcgcggcgccggcgtttttgactttcccattgtcctgaacttcggaaccgtcatcgctatgcttgcggcaggctgccttaaaagaaaaccggctcgtcaggctgcgtgcggcagaaagccctacgcgtggatgatttgcacggccctgacgttagttttcgttccctactgcattctgtatctttctctaagacagatgagccctgcggaaacttcgctgctgacgagtcttacccccgtgttctcgatgattttagggctggccctgaggcagatgaagttgcggctcttgtctgcctcggcgcttgcatcaggcgttatcggtgtctcgctgctgattcttccgcaactggacatcggagccgggagctccccgccgttttattatttcctgatgctgcttgttcctctttcgtatgccgcaagtggatatttcctgaaggcggcatttaattccggcgccacctatacgcaactgctgctcgtgaccaacctcatttccggatgtctatttctgatattaaacaaaggtatacctgccaatattcacctggatagtgctggccttgttttaacaggtattgcattcaacataggcgcaatagcgctaatgatgtttatatcaggccgtaccacgccgttttcactgagcttttcaaatcacgcaacgctggtcttttccttcgtcatgacggctattttttttaatcagagtttcagcaccgtcatgttcgtgtcggccctgctgatcgtcttaagttcaattctgacccaggtaaaaaaatga

SEQ ID NO: 455294 - DNA, 390 bp, Serratia marcescens
atgggcaagcttacgctgggagcggtggctgaagggggacaggttattggcgttacctgtccgcaggtgcgcgcctctgagcctacaccggagggtgatatgcaaatcattgaggctggttcgctagggttaagaaaaacgatcatgattgagaacgccgatgaatttcttattcttcccggcggattcggaaccctggacgaaacctgtgaggtcatcacgcaaaaacagcttgggctgattagtcagtctgtcagctttatcaatattgatggatactgggataatttctttgagtttatcatgactgctgagcgggaaaagatgatcattaccgcaggacgggataccttcaggaagtaccgatcacttgatgagtatttttcctga

SEQ ID NO: 455295 - DNA, 1074 bp, Serratia marcescens
atgaaaaaaatcttaccccccattggcataagccacacgacccacagaatagaagacctgtatcaggaaaaactcagggataaaggtccgctggtttttcatccggcagctcagccaaacagctatccacattttggtacggttacctcactgatcagcacgtttgctctcgcaaaaaaacttaaaaccacctctggtacagattccagagtacttttctgggagctagaaaatgcgccctgcgatacctatgaagataacgggtccgtttattaccggacactggggaaatctcccagtgcggagcacggggtaaaatctgagaagcacctttctgaattccgtaaacttcttaatatattctctgaaatatccggcataccgtataaaacctggagctattacgagtttcagtcaataccgcaggtcagacaaatcattcttgacctgattgacagggaacatgagcttggagccctgctttgcccctctgagaaacgattcaaagttcgttttgcctgcccgatctgccactttgctgaaaagcgcggtggccgttttgccgggctgaacgctgaccgtggcaggatatatcagtgccagtgtcccgcccatggcagttatgcaggcgtgttgtcggttaataacagcgaccttttcgacatcaatacgcccgtcagggcccttgcccgcgaaatttattacatccgtaagatgaaaaatgcgggcggtcagaacatgatgagtgacggcgctgactgggttcagtatgcaacgctgaatatggaagctttactgcgctgcggcattcctgtagaggatcatccgctgcggtttttctcaccagtgatccttgatgagtatggcgcaaagctcgccaagtcagctcaggttggttctgaccgttataagcaccttgccagatataatgtcgactctacctgccttgagcgcaccttcggcgacgatatttaccttcgcctctgggatgaagtgtcgggttggctggatcaccctcgtaaggtgttcagaaactataccgtaaaatattttgaagaactcctggagcagtaa

SEQ ID NO: 455296 - DNA, 723 bp, Serratia marcescens
ttggaattcagaaaaaatgatttcaatgaaatttataatgaacctacgccgcataattatatctcgcaactctccaggctcaagtaccgtaagcacgactttgtttttgacccgctgctacggcacgtagaccgctaccttagcacgcgggaaagatgcaaaatcatcgatgtggcatgcagttacggttttaacggcaggatagtcaagcacaggcttccatatggtcactgggaaaataaacctacggaatcagatggttccgcctgcagcgtcgttggcattgatatctcagacaaggctttagcatatgcgttaagagagaaatatatagatcatcgcatatgccagaatcttgaggaagatgaacttacgccggaaaattacaatatcctttcaggggccgatctggtcttagcttccggagctttcagctacgtgggcgtaagaacactgcggagaatatattccaatccggaaaacaaagcagattttatcggttggccaacatgcagcttcgacaaaagggagttaattgaatttcttaaagataatttcaaaattgttgaagtgtatccgaatgtattccctatgcgcctttttgcttcatttgatgagagagaatcatatctcgataatatgaaaattcataacccggaatttctggggaaatctcatgatgttttatgcgttttccaggtaaaagcatccgggagaatatga

SEQ ID NO: 455297 - DNA, 219 bp, Serratia marcescens
atgacggcattaacttttccctgtacggtgttcgaaacccagaaacggatggatgactatggcgcggcggatatgcgcagcggtgacctgacgtccgggcagttaaagacgcagtttcgtttgacggacgtttccaccagagtagacccctatacgctaaggccgcctttggcggctggtcgtcaatgttcaggccgccggctgcgggtgcgccggtag

SEQ ID NO: 455298 - DNA, 1014 bp, Serratia marcescens
atggcacggaaaatcgcccccggttattgtgtggtcgaacagccaggatcactcgcattgcaagcgggattgctgtttaaccgccgcaacacagacgcagcccgttatttcatgcaactaaacgcagacacgaattgggctaaaccgggacagatattgatcatcgctgatccagaaaccacgatgactggtcagatgcttcgttcacttcgactggcaaagcagcgagtcaatgatggtcttgtaggcgtcagcacggatgaagctagtttttttcagcgtaactacggaatgattgccggcttgacgttcgctggagataaaatatttggtgctgtgggtgatgctggggaaaaatatttcagagctattgagcacacgctaaaaagaattgaggcaacttatcagaaccagtaccggactcagggaacgcttattggtcagcagttttttgtcgaaagacgtcgtcttttttctgagctgaaagatttggttaataaaccaattataaaatctgtggcaagacactcgataaaattcaagccttatgaagacatgaagcgtgcactaaatctttccagtcgttctattgttcacgaatggtctacagtcggcattggtgctattcctgggtatgctacctacacgtcaaatgctgcaaaagcagcccgttttcttaaaactggtggatatattggcatcgcattttcatttacaggtgcaacgaataacgtgatcgagtcatgttccactggtagagaaaatgaatgtggaaagtctgcatttaaagaatatactaaatttacagcaagcacagcatcaggcattggtggtggattagtcggggctagtattggtggcgctgtttgtgtagggttaggtatagtaacagccccagcagctggggctggtggatttgcatgtgccgcgatcggctcaattgctggtggatacattgctagcacaagtacagaatcgatcattgatataatctacgattacatcggactatga

SEQ ID NO: 455299 - DNA, 1230 bp, Serratia marcescens
atggtgttctctatttacttcctgtttttgatacccaagataaacttaatatctgtgggggggtttaatgccgggttgcggatcgatgatgctattatcgcgatttggttgttgatttttctactgattgtcgtagaaaagaaaataacattcacaagaaaaatagatttcacttattacatgttcttgctgaatatgtttgtcgggacgatattgtcttcggttatctatcagcaggggaccattattttcccattcagatttcttgagtatttcacattttttataatgggtgtgtatatcgcaaaaaaagaaatcaacattagtacgttaatgcagtgcgtgttctatatgaatgttatcgtcgcactcctccagtttgcaggtatcctcgggggatttagcgtgaccgggtatcggccgaatgtttctgcacgagtcattggtttgaccagtggtccttgggagctgggtgtgatactgaattttattacatgttacttctttgccagttcggctaaagcccattataaatattttatatttgtgctcggcctgctagtgattcttctgtctggttcaagaatgtcatttgttgcacaggtagtgctgttgatggtctatatgttcaatcatgccaatgccgtcagcattatccgccgggttcttattgttacgccattcgtttttttgacgttgatttatttttcagactccgtcgttgctgagcgatctgagaaattgtttaatatggacaacatcatatctttaccggattattatagaaatacagagcttgtgaaaggagatcccgactggacaacgtcaggcatgcttgacgggaatgatgtagatgccagttgggctatacgttccattaagtggatgtatgcattgaagttattcctttcaaaccccatgttcatattgttcggagtaggtgcggggacgtttgggatcgcgcttgatggtggctggttacgtttatttgccgagtgcggtgtggttggtgctttactcttcatttccttcttgcgacgatgtaaacgtaggtcaaaagtgatgcagtattgttttatcgttttctctatcaatatgattatgatcgatgtgtacatgtcgtataaaataatggccatgctgttatttttggccggctatatgacgacgatagatcgcttgggtcttccttttcctgagcctaaaaaattaaagataagaaaaaaatag

SEQ ID NO: 455300 - DNA, 159 bp, Serratia marcescens
atgagctacaacaaaaaagtttggttagccgtgctgttgctgtgcgccctgttttggaccgcgctcatcggcttggcctgcacgcggtatgactaccagcatcggccagtccattctgcagaacaaaagtgcaacgcggccagccatccgcagcgataa

SEQ ID NO: 455301 - DNA, 1218 bp, Serratia marcescens
atgaggcatttaccgaaagaagtctgggttctcacgctttgccaggtgttgttcaccgccggaatttcggtggatctgaccatcaccagcctcgcgggacaatcgctcaccgctcaccccgatctggccaccgttcccttcgcattgctgaccgtcgggggggccctggccatgccggttctgggctggcacttccgcacctacggaagacgcagtgcgctcatcgccggcagtatcaccggtttaagcggagcgctgatctcgacctcctccgtatggatgcatagcttctggggtctctgtctgggatgcctgctcgtcggggccttccaggcctcggcccaattctaccggctggcggccggtgacctggttacgcacgagtccaaacagcatgcggtgtcgctggtattagccggcggcgttatcgccgcgttctttggaccggcgctggccgtctggggagcggccttatggcctacctcactctatgccggctcttatctgatcgtgggtttactcacgctgttctgcgtcgtcttgttaagcgtgggttaccgcactgacgcgctccccgcgccgtccagcatgcccgcagaaaaaccgctgcgtgcgtacggtgcgcttaaacaaccgacgtatctggtcgccaccctgaatggcgtactgatcacgagcgtcatgatgctgctgatgagcgccgcgccgctggcgatcgtacagactggcaagacaatggccgatggagcggccgtgatgcaatggcatctggtcggcatgtatgccccttctctcattgctggcttcacgttccgcaaactgggggccggcgccagtctggtcattggcattattctgacgctgctggcagtgctggtgggtatgcatgatgcacaccatctttcatcctactattgggcgcttgccttgctcggggtcggctggaatatcaactttgtcaccagttccattcttctgtctcatggtgacaatttacacctgcgccgctcggcccaaaccgccagtgaaacgctacgctatttcttttcctctgtcgcctcactggctgccgccgccgccctggggtatgcgggatggcgcgggctcaatatcgccatgcttcccctattactgataggcattgtttcctgtggctggtggtttattgtcaccaaggcaaaatccggacagggcagtaatcagcccgattataaatag

SEQ ID NO: 455302 - DNA, 690 bp, Serratia marcescens
atgacgacagaaaaactgcaaatcggcatgctgctctttccgggggtgacgcaattggatctcaccggacctgcagaagtgttctctgccagccgacgctgtgatgtccacttaatctggaaggcgctccagccggtagacacgggagccggttggtccatcaacgcaacccggacctttaccaccacgccgccgctggatgtgatctgcattcccggcggtaccggtcagatcgcgctgatggacgatgacgaaacgcttgacttcatccggcagcaagccggtcatgcttccctcatcacatcggtatgcaccggttctttggtgttgggggcggccgggctgctcaagggttaccacgcaaccagccattggatgtcactgccgcaactgcagttattgggggccattcccgtcagggagcgcgtcgtgcgcgatcgcaaccgtatcaccggggccggcatcacctccggtatagacttcgcgctgaacgttctgcaaaccctgctgggtgcggagattgcacaggacgtccaactgggtattgagtatgaccccagcccgccctattccttcaactcgctggcaacgcccgaacggcttgcccagctgactcaatatgctgagcagaggcaagccctgcgtctggagtccacccgcagggctgctgcacgcctggaggaacaatga

SEQ ID NO: 455303 - DNA, 750 bp, Serratia marcescens
atggatacaacaatactgttttccgacgtagcgaccgcttattccacgtatcgccccgcctatcccaaggcggtatttcgtgtactgcaatcgttggtgcccaccccggccactgccaccgacatcgccgccggtaccgggatattttcacgtggtctgcaggagagcggctataacgtaacggccgttgagccaaacgcagccatgcgcgccgagttggtaaaaaccagctctccggccccctttaccgttatggcaggtacggccgaggccagcggaattgccgcgcactcaaccgacctcattaccatcgcccaggcattccactggattgaccccgaggcagcacgcgccgagttccaacggattggcacagccacatgcctaaccgcagtagtatggaattcccgcaatttcaccaagagcgccttcatgcgtgattacaaagccctgcttgacgattttgcgccatcatacaagtcgatgaaaaaccactggtctaatcttgatgagcgggttaaagcgttctttccgacaagatacgattaccacaacgcagcaaatgttatccccatcaatgaaaacgaaatgatcgggaatctgttgtccctctcctatgctcctgctccagcaacgccagagcaggaacgcttcatccggcaggccagaaacgttttcgccaaacatcagcaggatgggaaagtcctcttcgatctcaccacgcatctttataccggcaacctttcctga

SEQ ID NO: 455304 - DNA, 1332 bp, Serratia marcescens
atgcctagcgcacctcttctttggcaaaaactacagacagcatcctatatccacccggctccggtgatggctaactatattgtctcccaagacgggacagcattgttccatcaacgccttaaaaatcagataacaaccgcagccaaacgctttgcgaagacggctgcccgcagtctggatgcgctatccggctcagagatttacaaagagttaaattcaccggcggggcgacgcgccgccttgatctgcgaactatttcgtaacgcccattatatttccaacagcggcagccttgacacgacaacgttacagtaccgcttgatggaaaccttgtccggcgaccagcaattggtcttcgaacttggctggggccaggccaagcgtgatgcgggccaactgcggactctcggcgccagtgcggaccttgccgaactgttggcgattgccagactgattgccgtcgtaaaggcgatcaggcttctgactgaacgtagcgccaagttgcgcattattaccggaggccaacgtttccgcctggccttgtttatccgcccggagatggattcggcctataacctgaaaaggcaggcatttgcccgatggctgtcacccgatgctgaaattgaatttgataccatccagagctactggtcacccgaagaaattaaggccaggctagatgctgacgaaagtcatggaacgccaccgaacctgaccgatgaagacttccgctttgcttttttcgctattgactggtacggcgtgctagaacaggggaatgcccatggcatgcatcttccctcttccgtgacagaagaactcaaaacgcagccgcacgcggtaaaaacagatttcctgcgttcggtcatcgccctcaccgccaacccggccattgatatcaggacggtaaatccgccgctgccgcatgaactgttacaggtgaccagcgattggttttgcgaagttgcacgcatctcagcagatttatacctccgcctgggccgaattacgccaagggtcccccgggaaagcgcccacagtgaccgccctgttctgctcaccatcattgaaaaggcagaacgtgccgatattccctgcatccaactgctgggacgacagtgtggaaaaacgctgccacaacacctgaccgcttgcctacaggccgaagggagcatctccttcgggccgttatatctgcttgaagacgccgtcgcatcattccacattcctgaactttccgatgcgccgctaggcgtgactacgctccctcaaacggacgtaatcaaagggttatcccgcattcatctttttgatgatcttgaactttcctga

SEQ ID NO: 455305 - DNA, 1452 bp, Serratia marcescens
ttggaagcgatagacttcagattctctggaaatataacgcctattaccaatggtcaccgcgccctcgccatttccagtgacataaaaaattcactatatacggaaagtgaatttagaaagaaatcctcaaaggtttctaccgagtttattttcgaaaaagtagttccctcattgatcaacgccatggagcaaaatgttgcacaccgtcttacggctgcggccgtcagggctggtcataacgtgtctctctatggcgtggataaagctggcgccagcgagatcgcaaccgagatattatttgacgcaaagctgaccaaatgcatagaaaaaaacgtaaacagatccgctgtgcatcaaaaaataaaatatttaaagagtagcaatcaacccttattaatcggcctgccgttattttcccgcaaaccggtttcgccaataaaaaacagggggcacctcccggatattggcgacattcactctattatgcgctgtgcagaaatcgccaagttactttcctgggtccatgattatgacattcatctcagcatatttgctgatggcttcaaatatcaacgtgcctgtgggacccctgacgcgatgatctcggattatcaggcaagcctgcgtttttgggcagcaaagctgggtatagataaatatataaaaataattaattatgaagatgcggtaagtcatacattaggcccggagcagacaaggtttcgtgatgaagtttttttaaatacttatcatcagctgcatgcaaataccgctcccttgttcaaccctgactcacttcacaacagcctgcgtgacatcgaggctaacgtccctcatggctgcgagttacgctatatctttttctctatcgccagcagtgttttctaccagaccggcgatctgggaaatcgcatcatccgccgctgcgatcttgcccaaagcacctttgccaaatttttggcagaactgcacggtgaactacagggcaatacatccaggttcacatcaaaccgcgacgtcattgcctcactgattttcgaagcatgggacgcggccctgaaatatgtggcgatctcactgactgacagaaaacttgatgtctggcgtcaattacaacccgaaggcataaaactgaccattcatggtaagcccggtgaaattcagattaggccaacaaactcaaaattacccaccatgacggcacaacacgctgttggtggcctggcgccgacaaaagcaggcgtaaaagtaacctgcgagtatcggatagaacgcgaggcggcaaaagagatacctgtcctgttggagaatgcgccgagccatcataaatcagggggctacgttccctctctcatgagaaagatgatcggctcagaacagccgttctgttatgtacctgagaacgttgacaatattcataaacttttatccggaaattataccgatgcctag

SEQ ID NO: 455306 - DNA, 882 bp, Serratia marcescens
atgagttcttgcggcgttgcggtgactgcggttccgtggttgcccatggattacgataccttggtgatcgtcggcgggcctggcgcgagtgctattgcggaatgtgcctcggtcataaattatgtccgacgcgcttctgtgcaggttcgccgtctggccagcgtatgctccggagcgtttgtgctggccaaaaccggcgtattgaatgggcgtcgggcgacgacccactggaatcgggctgcggagttggccagaaactaccctaaaatcaaagtggagcctgattatatctatatttgtgacggtaaaatatggacatctgccgggatcactgcgggtattgacctgactctggctctgattggggaagatcttggccatgtcgttgcttcacaggtcgctcagcaattagtggtctatttccggcgacccggcgggtattcacagaaatccagcctgctgacggccgagccgtttaatgaggtattcactgagttgatggggtggattcgggagcatattgccgaggtgatcaccgtggagcgcctggcgtgtcgggttgccatgagtccaaggaatttttcaaggatcttcagaagggaaataggggtaacgccggcaaaggccattgagcagatacgtttggaagtagccagagagcgggtggaacaaggccgggacagcttcgagcagattgccgccaacgtggggtttaagtcggctgacagaatgcgcgatgcatttttgcggatactccgcgaatctcctcaaagcattcgtcatcgtgcgcatctttatcatgaatggaaaaaatcttttgaaggcaaacggcccggcgctgaacattcccatttgcagcgcggcggcgcggtggctgattga

SEQ ID NO: 455307 - DNA, 345 bp, Serratia marcescens
atgaaaccatacactatgctttatagcgaatctttcgaactaaataagccatcaatttctcataaaacaaactccaccgtaaaaacctttaccacagaaccggatgatgatgattatctcaacacttggactacacatacaagagttatagaaaatcaagatgaggactacagtttttccctcaaccaccaggaaagacaagagcaaatacctaataaaaaacaatattatatggatacacttttcactgaaaccattgagaataacgatgatgattttatattattcggaacatttgtaacaaatgtcgttgaatcaggtgatgatgatttttattttagctaa

SEQ ID NO: 455308 - DNA, 693 bp, Serratia marcescens
gtgtatttattaacttttaaaaaaaattcagaacgtattttagataaatctaacttccgattttttgcgagcataaactatgatatagtcagttctaggatatcagcagaaaaaattgaagagtatgtcatggcatatagccaacatatggaatcaatcctacctaaaagaaggaaggagcaggaagatttcttaaagcaacgtctatccgaaaacaatgatagtttatctaatctccaaagtaaaataacacattatacaactatcacacttgctcttatgggggcattgggttatctacaaaccatgctaccatcttcaagtacaaatattacaataaaacttttgtcctattatttattttttatattaatcgtagacgtgattaatctatttctttttctaagaaaaggaatgatggtgaataactttattcaatcaagctttaagtcattaaaacttgattgcagtcattattccttgacgaaggctatatatcgtgactggatcgcaagaaaagatgatgtccgttattttgcaggcatagttaaaaatgctgagaaatacttatacagagcgattttagtaggaatcatactgtacatatcctccatctcactgcaatatcatagcaatgaaaaatcaaataaaacaatattcacaccgccaagcatgtttttagttgcaaattaa

SEQ ID NO: 455309 - DNA, 3273 bp, Serratia marcescens
atgaatatcatgttggtggcgcagtgcagcaaacgggcgctggtggaaacgcggcgtattctcgaccagtttgccgaacgccgtggcgatcgaacatggcaaacggcaatcacgctggaaggcttgaacacgttgcgccggctgctgcgcaaaactgcgcggcgcaacacggcggtggcctgccactggatcaaaagcgccaaccagaccgaactgctgtggattgtcggcaaccagcgctgttttaaccatcagggcgcggtgccgaccaacgtcacgcagcgcgatattttacgccgccaggacgaagacctgtggcgcagcgcggagtgcatcagcctgctggccgccatcgccggcctgtttcacgactttggcaaggccaacgccctgttccagcaggggctgcgcggccaggccaaaggttatcagccctaccggcacgagtgggtgtcgctgcggctgttttgcgcctgggtgggggggcgcgacgatcgggagtggctggcggcgctggcaaatatcagtgagcatgatgaaaaaacgatgctcaatagcctgaaaaaagactctgtcggtgagtttgttaatccgtttatctccctgtcgcctcaggctactgtcgtagcctggctaatcgtttcccatcaccgattgcctgtttatccgaaagataaaaaaagggcagtaaatccacctaagttagatgaaacagcaaactggttaactcaacagttggttgctgagtggaactctactaacaactgggttactggatggaccgcagaagagcgtcgtgctacatggcattttccttatggtacaccgatgcgcagtgcaatatggcggggtaaggcacgcaagtttgctctgcgtgccctacaacagccggcattgaaccagttcggtatgttagagcaacggttcaccagccatatggcgcgtttggtgctgatgcttgcggatcactattattcttctcaggcacccaccctcggttggcaagatgctgattatcatgcgtatgcaaatactgatggcaatattggaatgccaaaacagctgaaacagcaattggatgagcattgtgttggtgtggggcaaaatgctttgctgttggggcgtagtctatcgcgtatccggactacattaccggcaattacgcagcacaaaaagtttaagcagcgcagcgaaaaagaaaaatttcgctggcaggatcgtgcttacgatctggcctgttcgatgcgtgaacggtcggtcaggcaaggcttttttggcgtcaacatggcttctacaggtcgcgggaaaacttttgctaacgccaggataatgtatggcttggcggatgaggcagttggttgtcgtttttctgttgcaatgggattacgcaccttaacgttgcaaactggcgatgcgcttaagaccatattaacgttggaagatgatgacctggcggtgctgattgggtctgctgctatacagcaactgtatcagcttgataatgatgtgcatgagtcaccgggaaacgggagtgcttcagcagaggcgctattttcggaacatcattatgtgagctatgacggtagtctggatgatggccgtttgagccgttggttgaagagtcgcgatggtagtaaaccgcataagctattgagtgctccggtattggtgacaaccattgaccatctgatcggtgcgacagaaggcatacgcggaggcaaacaaatagcaccaatgctgcgtctattaactgccgacctggtattggacgaaccggatgatttcgatattgctgatctgccggccttatgtcgtttggttaattgggcgggaatgcttggttcccgggtgttgctctcatctgctactttgccgccagcgttggttcaggcgttattcaatgcttataaaaccgggcgagctgattatcagcaagtgtgtggtttgcccgagaccccattaaatgtttgttgtgcctggtttgatgaaaatctggcagtacaacaagatgttatagacggcaaatcttttaaggctgtgcatgaagcgtttgtcgtacagcggatagagaaacttcaatatgagccgccattgcggcgtgggctcttggttgacgtgcaagtacaaccggccaaatctgtattggatagcgttgctgaaactatctttgtttccatgcatcagttgcattccgcccatagacaaacgcaccttacgggaaaaacagtttcattgggcttggtccgtatggcgaatatcggtcctttggtggcggtagcacggcgtctgatacgtatggcggcaccggaaaatacgcgtatccattactgtgtttatcatagccaacaccctttggcgatgcgttcgcatatagagcggcggttggatgagactcttaagcgtggttcagagaaggctctgtggcaaattgcagaaattagtcatgctttgcaaagctatcctgaacaacaccatctgtttgttgtgctagccagccctgtagctgaagtagggcgcgaccatgattacgattgggctattgccgagccaagttcgatgcgttcattgattcagctggcgggtcgtattcagcgccaccgggagatgcattgcaaattgcctaatctgtatgttttgcaaaagaacgtgaaagctttgaagaacacaccactagcttattgccatccaggttttgaatcccagcgctttgggttacagcttgttagtcatgacctgcacgaaatattgccatcattccaaaatcaaataattacagcatcactacgcataattgaatcgattcagcctagaccaagagacaatttggtggatttggaacacgcttgtctacgtaccgtattacaaggcagggctgaccttaaaaatgaatattttgccgcccgctggtggcgtgagcaggagacttggtgtggggaagcacagcggcgtagcccatttcgccaatcgtacgaagaggagcagcactatctatggatggaagatgagactgataaacccagctttaaatttccagacagtgtttccgatggatggaagtccagtgacttctgccatgttgaggtggattttgccaacggagtacaggcctgggttgggatggactatgttgccgtctatcaacagttagccgaacgattaaatatggagctaaaggatgtcagccagcagtttggggagatcacactgagggagaaaacggaggaacgttggcatttccatccattgttaggggtatttggcgcactcgaatga

SEQ ID NO: 455310 - DNA, 1362 bp, Serratia marcescens
atggcagataacggattaaccgctttgatcgtcgcgtatatcgccggacgtaaacaacttaagctagaggcgttggaaaaggaagtcgcgaaaaagttggcgggactgactgattccgaagagattgcgattgcacagcaaaaagcattagcacagcggcaagagctggaaaaaaactacttgccggccaactggttgactgatgcagctaaccgcgccggacaaatcagcctggtgacccatgcgctgaaatttacccacagcgacgccaaaggcagcagtattttctactcaggcgcacaggagagtcagactgattacctttccactacaacattgtctcagcctgcactggatgcggttggcaatgcagcaacgcttgatgtggcgaagttgctgcaattagagtatgcaggtgaatcgctgattgcctgcttgagtcgtggtgatacatcgtcgttggcagagttggcggaaaacccacaacagttagaactatgggcgcaaggattcaagcaggttctgagcaataaacaactctcatcccacgctttagccaagcagatttattttcccgttggtcagaatgagtaccatctgcttagcccgctgttttcttcctcgcttgctcaggcgatgcatcagcgcatcagtgacgcccgttttagcgatgtatctaaagcaagttatcaggcttttaaggctgggatgtggcatgcaaaaccacgcgtaatttaccctaaaacggcggtgctcaatatggggggcactaagccgcagaatatctcttatcttaatagtgtacgcggcgggcgagtttggttattgccttgcgctgctccggtatggctgagccaaaataaagcaccgcttaaccagaacactatttttcaaccgggtaaacaattttcggcgatggcaagagatgcggtgtggcagctgaagcagtatcttaaggaagttaatcacctaagtaataatgaaaaaatacggaaacaacgtgaagtttacgttgatgacgttatcgatattttgttcagttatgtcgcaggtatccaaaaccggcaggattggcaatgctggagcatggaagatgaatgccagttatctcgtgctcagcaattatggcttgatccttggcgaatgaagtatgacgacgattttcgctttgagcgcgaaggtggagattggaaaaaagagatcgccatagattttggtgtttggctcaatcatcagttaaaaactgaagagatgaagttcggtgaagttgagcgtcggcaatggtcaacagagagactatttaagcagcgcctgcgcgagtttgaagcggaatttaaaggagacttcgcatggaaactttaa

SEQ ID NO: 455311 - DNA, 924 bp, Serratia marcescens
atggaaactttaatcgtattacgccatgtgaaggttgaaaatgccaatgctattgccgggttgacttatggttttcctgcgattacccatttcctaggctatgctcacgctttatcccgtaaattacagcgaagccatggtttaacgttaggaagctgcggtgtcatttgtcatcagcaacagctacatgcctattcttctgggcgtgattattgttttgcactaacgcgtaatccgttaacgaaagaggcgaaaacggcggctttcaatgaagaaggacggatgcatctgacggtttcgctgctaattgaatgccatggcactatcgttaatggtgacgaaggtgctaaagcgttagaaaagcaccttgccgatctttgtccaacgctgcgccttgctggaggagtgattactgacatcgctgctgtcaaggtgataggtgcacctgagcaaccagaggatttacgcaaattaatgcggcgtttactgccaggatttgctttacttgatcgttccgaactattagccaaccattatcaagctttacgcgagaataatccacatgccgagctactggatgcctggttggattttgccgcactgaaatatcaggcgatggatgagcaaaatcccaaatgggagcgacaaccgaagccggcaacaggctatttggtgcctatccaaacgggttatcgtgcgatttcaccgttatatctgccgggagaagttaacaaaacgcgtgacccctctacaccgtttcgcttcgcagaacccctgtacggtatcggtgaatggcgtagtctgcatcgtatcaccgatctcaatcagttgttatggcaataccattatcagggtgatgattatctttgccgcagtacgataacgaatatcaccgatgtttttgaatataatgaagaatattaa

SEQ ID NO: 455312 - DNA, 705 bp, Serratia marcescens
atgagtaaaagagaggatttgatagatattaaagatgtatcgaccgctcaatatggtcttgtctattctgaaattcttggttggcttgatcttggtcatgccgctggtacggacatccgtaaggttatcgaacaaatggatgttggtgagaggaaaccagaaccctactatgaagtcatgtattttcagtcaatgtataaatttggccatagtttaggtattggagtgcacacgcgctggcgtataaaaaagggctgtgatcaagcctcaagacatagtattgtccttgccatgatgatgcgtaccgcattacgctttgaaaatcttcaggcatcactcccgttcagttgggtaacagacagcggttttagcgctgaagacttggtatcggatcttctcggtttttaccgtgtgatcagaccgatgaactacttccctttacttcgtttaattagccggcaggaagcgcttaaacgctgggatcattatggcccaatcggtaattataaaaataaactattccgaccaatgctttttccagacccggttaagaacaaaagtgctaagccaaaatatggagaattaccgccatttatgaagtcaatcgtccctttttgtaatttccagggggatacagtaaaaattgttgtcgatcatggtcgacatatgaattttggcgatcttccacagaggatatttaggtga

SEQ ID NO: 455313 - DNA, 465 bp, Serratia marcescens
atgatcgtcggtaatctgcacgatctgcagctgcccggtttgccggccagcctgcagcgcatcctgaatcagcccgcccacagcctgccggcgctgctggccgctgcggacggccggctggagggcgaaggctggttctgtcatatcggcgcggcgcaaaccgccccgtcagcgagccgccacacggaatatcaccggcagtatctggatattcaggtggtgctggagggggaggaaatcattcatttttctccccggcgttcgacgggcggcagcgagaaaaaaccggatctgtttattgtgccgcagccggagttgccgcatcgtctgcacctgcggcagggggattttgccgtgttttatcccggtgagtcgcatcaggcgctgtgcgcggtcggatcgccggcgcgggtgcgcaaagcggtgtttaaagtcgctcttcatctgctggaggctgaagtatga

SEQ ID NO: 455314 - DNA, 1278 bp, Serratia marcescens
atggcgaagtataaggcgtatccggagtataaggattctggggttgagtggctggggaaaatacctgaacattggattgtttgtcgattaaaacatctagcaaccataaaaaatggtcaggattataaatctgttcaggtagaagatggttatcctgttatgggatctggtgggccgttcacttttgcatctaaatatatgtatgataaaccatctgtattgcttgggcgcaaagggactatagacaaaccgttatacataaatgagccgttctggactgttgatacaatgtattacactgaattagaagaaggtgtagatgcaaagtatttgtattatcttgcactgacgattcagttttctcgctattcaacaaataccgcattgcctagtatgacgcaggagaatttgagtaactataaattcgcagtctctaagattgagtcagttcgtactaaaattactgagttcttaaaccatgaaacagcaaaaatcgataatcttatcgagaagcaacaacaactgattgaactgctgaaagaaaaacgtcaggcagtgattagccatgccgttaccaaagggctaaaccctgatgtgccgatgaaagattctggtgttgagtggctggggggattgcccagccattggcaagcactaccgactaaacgtctttttagacttgttgcagaaccagctgaaataaataatgactacgagcttttatccgtttatacagctatcggtgttgcccctagaaaagatttggaacctaagggtaataaagcatcaactactgatggatattggaaggttagacagggtgatattatcgttaataaattgcttgcctggatgggagctgtgggcttttctaattacgatggggtgactagccctgcgtatgatattttaagaaaagtgaaggacataaaccccaagttctatcattatctcttcagactagagttgacacagcgagaattcaaacggtggtctaggggtattatggaaatgagacttcgcctttattttgaagagttaggaaggatcatcatgcctgtaccacccagacaagagcaggatgtgattgttgaagagattgaaaaaatagaacatcaatattctcaacttgaaactattgcttctcatcaaattgctcttctccaagaacgccgcaccgcccttatctctgccgccgtcacaggaaaaatcgatgtccgcgactgggttgcgccagatatgcaggctgttgaggagtcacaggaggccaccgcatga

SEQ ID NO: 455315 - DNA, 3516 bp, Serratia marcescens
atggacaggaatactcaggggttcacgtcatattggcgtaactccttagctgatgctgagtctggaaaaggggcattcgagcgtaaagatgcggtcaaattcactcgttggttggacacaactacgggacggttggatgaggaaattgtccgcgcgttttttgacggtgaaggcgatgcagtgaagacggtcgaggtaatgttacgaccgcaagtctggtttcgttcgctaagacatggtaaagagcggaaggcgggggcgcctggtattgttactccgttggtgacttccgcactcttgaatcgcgaaggtttgttattccctactgcacctgccactatccctcgcgatctgctcgaaccgctcccagctggcacgttttctattgggggaatggctcaatacgacaaatacaaaaccacacataactcagccgtctttgttgtagatgatgagcaacaatgcgattcggaagatgatgagcagcgggctaagcgttatgaagctcatctgcagcagtgggaaaagtacctgtctgagatcggtaacctcatgagtaatgttgccggaaagtgggccgacacccatgtgcaatatgaatccgcgggatatggttacgtcatcaaagcgaaccagatcagtggggccagccttcatatccttcccatgtatgatcacttactgatgtgcaagaaagaggtcccgctgctggagaggtttgcctcaacgaaaaggccgcccgtggaatcccttcttgctgccaataaaaagttcagtgagcggttgggacattctggtgatgagtttccgttggcaacggcgcagcgggacgccttaacccatcatctcacccagcagccgggcgatatccttgcggtcaatggccctccgggcaccggaaaaacgactttagtgctctctattattgccaccgagtgggcaaaggccgcccttgagaaaaccgaaccgccggttgtgattgctacctcgaccaataatcaggcagtgaccaacatcattgaagcgttcggtaaagatttttcccaggggactggcgtcatggccgggcgttggttgccggagcttaaaagttatggcgcttattttccatcctcgacccataaagctgatgcagagaagaaataccagacggaaagcttttttgaccgtgttgaatctatggcgttcgttgaagacgcggaggtttattatctggagaaggcgaaggcggctttcccgtccgaagaatgtccttcccccgagcgggtggtggatttactacataggcgcttaagcaaacagtttgctcagttgagtcagattgagcagacatggagcagcctgcaaagtattcggcaggaacggcgcgcgattagcgaagatattgctcaatatattcagaaaaaaaatatgttggtgcacgacagtgaaaatgacatcacactgttaacacaaggcaaaaaacagtggcagcaatatcgtgcgggagagtcgatggtatactccttcttctcctggatccctattgttcgtaccaagcgtaactatcagataaaccttttcctggatactacgtttggtacaagaatggctatgttccagggggagctaccagaagacattgacgcatatatcgacgggcttattgctcaggcgcgaaaagaacaggaaaatcaccagcagcaaatcgatattgctcgagatatttcccaacgagaaaacgaggctgcccgacgctggcatgacttggctttttctttgggatattcgggggaagaggaactgagcttggccgatgccgacgagcttgctgatacacagatccgtttcccagcattcctgttagcgacccattactgggaagggcgctggttgatggatatggccgcgatcgatgatcttcaaaaagagaaaggccgtaatggagcgaaaagcgttaaggcccgttggctgcgcagaatgaagctcaccccttgtgtagtgatgacctgttatatgttacctcgccatctggccatccgggagcatgttggtgggaagatatttgatgatagctatttatataattttgctgatttgcttatcgtcgatgaagcgggacaggtgctccctgaagttgctgcagcttcctttgcattggcgaagaaagcgttagtgataggtgatactgaacaaatcccccccatctggaacagcttacctggcattgatataggtaatatggtggaggaaaacatcctccccggaggggctcaggaagagttgatggatgcttatgcgttagtgtgtgattcaggtaaaagtgcagcatcaggtagcgttatgaagattgcccagtttaactcgcgctatcagtacgatacggatttagcacgagggatgtatctgtatgaacaccgccgttgtttcgataacatcattggttactgtaacacgctctgttatcacggcaagttgcaaccaaagcgaggtgttgaaaagggaacgctttttccagcaatgggatatctgcatattgatggtaaatgtatacaggcaaacagcgggagtcgctacaacgactttgaggctgagacaatagcagcatggttggctgcgcataaagaggcaatagagcgtcattacgataaacttttacatgaagttgtggggattgttacgccattttcggcacaggtgaatgcgatcaaacgttcattacaaaagttgggtattaattgctctaacaaggaaggtgcgttgactgtcggaactgtacattctctgcaaggggctgagagagcactcgttctcttttcccctgtctattctaagcacgaggatggtggatttattgataaagacagcagtatgctgaacgtcgcagtttcacgtgctaaagacagcttcctggtctttggcgatatggatttatttgaggtccagccgaaatcttcacctagagggttattggcaaaatatttgtttgcttctgaatgtaatattttgcagttcgagtacaaggagcgtaaagatttaagcgctacgcaaacacagatttatgctctgcacggtgttgaacagcatgatgcgtttctgaaccagacttttgatgctattgggaagagtattaccattgtttctccttggttgacttggcaaaaattggaacaaacaggttttttgacctcaatgattcaagcccgttcgcgtggtattgatatcaccgtggtaacggacagaaatttcaatatcgatcatgctgattacggaaaacgtaaggagaaggaacagcgtcttctccttgcgctagggaaactgaacgagatgggcgtaaccacaaaactagtcaaacgtgttcacagtaaaatagttattggtgatgaggggctactctgtgtcggttcatttaactggtttagtgctgcacgagaagaaaagtatcagcggtacgatacgtcgatggtgtactgtggcgacagcttaaaaggtgaaataaaaacgatttataccagtttagaacggcgccaattgtag

SEQ ID NO: 455316 - DNA, 1365 bp, Serratia marcescens
atgaaaaagacacttaaacctactctcggcaccctgcagctgtggggaattgccgtcgggctggtgatttccggcgagtatttcggctggagttacggctggggaacggcaggcacgctgggctttctggtcaccaccttatttattgccctgatgtatacctgctttatttttagctttaccgaactgaccaccgcgatcccgcaagccggcggcccctttgcctatagccgccgtgcatttggcgataccggcggcctgattgccggtatcgccacgctggtggagtttgtgttcgctccgccggccatcgccatggcgattggcgcttacctgaatgtccagtacccggagctgaaccccaaactggtcgcggtcagcgcctatctgatctttatgggactgaatattgtcggcgtcagcatcgccgccaccttcgaactgctggtcacgctgctggcggtcattgaattactggtctttatgggggtggtcgcgcccggcttcagcctggctaactttgtcgcccacggctgggccggcagcgacagtttctctacggcgtccatatccggtatttttgccgcgatcccttacgctatctggtttttcctcgcgatcgagggggcggcaatggccgccgaagaggccaaggacccgcgccggaccatccccagagcctatatcagcggcatcatcacgctggttgttctggcagtgggcgtgatggtgctggccggcggcgccggcgactggcgcaccctgtctgatattaacgatccgctgccgcaggcgatgaaaatgctggtcggcagcgattcccgctggatgcacatgctggtgtggatcggcctgtttggcctgatcgccagcttccacggcattatcatgggctattcccgccagttctatgcgctggcccgctccggttatctgccccctgcgctggctaagctgtcgcgttttcacaccccgcaccgggcgatacttgccggcggcgtcattggcattgcggccatcttctccgatggcatcagcctgcagggcatgagcctgaccgccgcgatgatcaccatggcggtgttcggcgccatcgtgatgtacatcatgagcatgctgagcctgttcaaactgcgccgcagtgaacccggcctactccgcagctacatagcccccggctacccgttagtccccgcgatcgccctgtgctgcgccgtcgtttgtctggccgccatgctgtggtttaacccgcagattggcgcgctattcctggcgtttatggttgcgggctatctctattttctgaccacgcatgcccggagaaacgcgcttgcccgcactccggttgccgcaaccaacgaataa

SEQ ID NO: 455317 - DNA, 534 bp, Serratia marcescens
atggaaaatggacatgtaaacaaggaaggttcactgcggcgtctgactttaggtgaaatagctctagcaaaaaccgtttttggcattgcgattgcctatcacaaagtttggatacattgtgatagctatttaccctttggattacaaaagcctaacgtcgcgatggcacctaatggcgagatttattttagaaagcacctctataaagaagatttttccacaaggccaccagatgaacaatatgtattcattcatgaaatggctcatgtttggcaataccaaaaaggcatgtgggttagggcgagaggtttctttagttgggcggttagttataattataagctaaataaatctagactcggtgattacccgatggaacaacaggcatctatcattgcagatttcttttatataaaaaactatgggttgggaaaatttcatggtttttatggtaggtgttacataggacgtatagataagagtatcctacccatatataagtcaatgatgcatcatgcaggattatccgtatga

SEQ ID NO: 455318 - DNA, 327 bp, Serratia marcescens
atgcgggccaaagtgctgacggtcgcgaataaggtgtgcatgatggtgcaaccgaaaggggacgagcaaattgtgacggtgagtatccgtgaagtcggagacgatcgtcatggcttggaaaaatatgacctgaatcttcccgcctcagcgaataagtgcgttcctacgtttgactacccgtttaaggtgggcaaggcctacggtttctcggcgatcctggagtcgccggccaaacttaaacgaggtgttcaacccgcagcgcgcatctatggcgtcagcttcagcctgtgggaaaataacggccagctggaggccaacgagttgtag

SEQ ID NO: 455319 - DNA, 123 bp, Serratia marcescens
atgacggtaaagatcgaagcggattgcctgatcctgacgacggagcagcaacagacggctaaaacaaaaagccggaaggatcgggaatatctttccggcttttttattatattttatctatag

SEQ ID NO: 455320 - DNA, 1173 bp, Serratia marcescens
atgcaacgcaaactgacgctgacgctggcgaccgtaatgatgatgtttccccagctggcggaaacgatttacagcccggcgctgacgcatatcgccgccgggttctgggtgagtgcggaaatggcggcgcaaaccctgtcatgttatttctttgcctttgccgtcggcgtggtggtgtggggatatttgtgcgacctgatcggccgtcgccccacgatgctggccgggctgacgctgtatctgctggcgtcactggcggcgctgttcagcgccagcttcagcatgctgctggcggcgcgtatcgtcgcggcctttggcgcggcggtaggttcggtcggcacccagaccgtcatccgcgaccgtttcgacggcggacagctggcgcgggtgttctcgctgatggggattgccatggcgctcagcccggcaatcggcgtactgagcggctcgctgttgacgtactaccgcggctatcagggcgtattcggcgcgctggcgctgctggcggcggcgctgttggcctatgcgacctggcggctgccggaaacccggccgccgcaggtggcgcaacgtgcgtttttcgccacgctggggcgcatggtgcaggatgccgatatctggcgcagcgcgctgctggtggcgctgttcaatctctgcatgttcagttattaccagctggcgccgttccgctttgcggcgctggcgctaccggcgcagtggttcggctacagcggcttggtattggcggcgggagcgggcgtcggcgcggcatgcaataagcggctgttggccgccggctggcgctttgacgcgctgctgatgttggcgtgcgcgctgtcgctgggcggcggcgtgctggtatggctgctggaggcgacgcgcggcttcgcgctgccgatgctgctggtggtgatggcgtacggcatcgccattcccaatattctggcgcgcgcgctgcgtcactataaggcgtgcatgggcaccgccggcgcgctgttcggcctgatgtattacctgatgctgggggcggggctggcgctgaccgggctgatgcagcggcccggcgcggtgcttacgctgagcagcctgtgcgcgctggggctggcgtggcggccgtggtcggcgggcaggaagcagggcgagggggcgcctcgccctgaacggtgcgattaa

SEQ ID NO: 455321 - DNA, 339 bp, Serratia marcescens
atgtccgccgaactccccgtacaggcgcagtttgtcgcctataatgcccacgatattgaagcgtttatggcctgcttctcagacgattttaagggataccggatgcccaccgaatccccttccaccgttggcaaacccgcactgcgggaattctatatcaacaaccgcttcaataatccgcagcttaaggcgcagctgattacacgcacggtgctcggaaacaaagtgtttgatcacgaaatgatttatggcctgtcgcctgaaccgcaggaaagcgtagccgttttcgaggttgaaaacggcctgattaaaacggcgtggttctatttcccctcatag

SEQ ID NO: 455322 - DNA, 852 bp, Serratia marcescens
atgttacgcatcgacgcccatcagcattactggcgctaccggcccgccgattacccgtggattgacgacggtatggcggtgctgcaacgcgactacggcccggcgcagctgcggccgtggctgcgccggcaccggctggacggcgcgctggtggtgcaggcgcgacagagcgaacgggagaccgactggctgctggcactggcgccgcagcttggcggcgtatgcggcgtggtcggctggctggatatcgcctcgccgcatctggcgcagcggctggagccgcgccatccgctgctgcgcggcgtgcgccatctggtgcaggacgaggcggctccgggcggctggctggaacggccggcggtgaaccggggtatgcgcctgctgcagcggcagggctatgtctacgacctgctggtgacgcaccgccatctggccgacgcggcgcgctttgccgcccgccatgatgaccattggctggtgctggaccatctgggcaagccggatattgccgccggcgcgcggcactgggcgcggcagatcgcgccgttggcggcgatgccgcacgtggcgtgcaagctgtccggcctgattaccgaagcgccgggcggccgctggcaggcggcgcagctgctgccgtttttcgaggctgctctggcggcgttcggcccgcagcggctgatgttcggttccgactggccggtgtgcctgctggcgggcgactacccgcaggtttaccggctgtgtgagcaggcgctggccgccctgagtccgtcgcagcaggcggcgatctggggcggcaccgcctgccgggtttacggtttaacggagtctgacgatggatctgtatcttga

SEQ ID NO: 455323 - DNA, 777 bp, Serratia marcescens
atgaagaagcaaaggataagtaagatgagtttaagtgatctcatggttttatttgttttttcttggggtgtggggtgtggctacagtgaagcgagggaaagttggtatgtagtagataactatacagggactatcgggaaatacccagtacatttatctattcaatcatatgcatttggtagtgacgttaatattgaaggcagttattattacgatcatcataattcaccgatagtgttgtttggaaaggaaaaggatggtgatattgtattgtgtgagatatttagcaaggaagattttgaaaagtatatcgtgtctggtgataaatacaacgctacagaatgtccttttagaataacaaaatatggtcaggttttgaaaggtgagtggaaaaataaaaatgtcaaattagatattgtactctctaaattttcctccatgaatgaatctaatataacgagtaaaaatggtgagctagatgtaccattttgggggcagacagacaagcatagtttcattggggtttatgagaaagataaagatggggtagtgatcaataaaataaaagtcataagcaaagagaatggtcatgtagttcagattataaatattcaagataaacgttgtgattttggattccacatgacaccaatttatcaaaacatggaaaggtttagtaattcttcaatattattaaattgcaatagtacaaattcagaaatcgaaattgagtatgtttttgtaaatgggaagtatgtaaaaaaggatgccgaataa

SEQ ID NO: 455324 - DNA, 2358 bp, Serratia marcescens
atgaaaacctgtttcccttcccgtaagaaaaacggagagaactacgccacgctggatgaaatgatggctctgatcggccaggaaccccatggctcctggctggcgggcaccaataacatgtggcatggcgggatccatatctcggagatatcagccccgggttctgtccttaaaccgaacatggcggagacagcggttccgctgcagtgcatggcggacggtgaggtggtggcctggcgtctgaacaaggattaccagaggagcacctatctcgatcagcccgtgcaatatacgacgacgtttgtgctggtgaagtcaacctgcctgccggataagagcaaggagcaaacgcagctggatttttattcgctctatatggggctggcgccgctgtctgcgtttgagaaacgcaaatgcatggttgcccaaaaagaggtgactaaaagggaagttggcaagtacgaaagcagccgacaatcaggggataccccccatgcgcctaaggctataggacggctcccaaagggagcgcggctccttatcctggaagagacagagttcctgaataagcctgtttcgccgaagacgcgtccgggcacgaccgagctacagccgtttgggttggcacaggcgtttgacaagaacggcaagctgacagaggaaaagttctgggtcactctgctgccgggatatatgacggaggagggtgagcagtatgcacacctgccgttctggatgcagaaagcggttgaacagggcatctttgatgccgtgacgaaacccgcgacagcgctgaaaatcagcgcgggtgatgccatcggttttctgggtgaagacatcgccccgatgggcaaggcaaaaaccagccgcagcacgtatgcccatatcgaggtgctcagtgccgacagccgcatgccggcgtttcttgataatccgggaaaggtgacggcgggacgcaaatacattcgtgtccatccgactgcgaaactttacacgctctccggcagcacgtttagcaatacgggcaatccggtcgaaaaggataggcatatcatcctgccggtggataaatgcaacccgaagaagagcggcggcaagagctggtatcaggtcgggcagagctactggctgagccaggatgacgtggatctgatcgatcagtacaacctgaaggaactggggttcacggcgctggcggaagaaaccacgcctgatatgtcggcctcgctgcaagagggctggatgaagtccgggctcgggcggcttgccgagcaggtgaggcccgaacgcggtatccgggagcagcagatgtcgtccttttataaagggatgctcgagaagatggataccgacaaggacgggcaactgtcggagagagagctgtttgccgcgctgcagcatccggaaatgggtgttcgcgacatcgttgcccggatgattgtaaagcatcaaagcgagtggtttggcggcagcagccatcaaaaatggacggcgtttttccagaactacgataccttgcgcatcggctttgtgaagaagtggctggacgatatggagtggatgagccaggtggagccgtttagttcgggtcaggcggtatggcatatgcatccggtggtgtttttggatgctatcggggtaacaagccagatccgcattacagttgatatgctgtacaaagtatttgaagggttacgttctccagctaaaaaagaatttttgcaacaattcgctgatgaaataaataataatgtggaaaattacaaactagatactcttcaacgtgttaatcatttctttgctcaagtgagagaggaaatgggagggactgccagtcctatagaagggctaaactatagcgaagagggcttgaaagtgaatttcaaatactttagaaaacacccggatgaagcaaggaaatattcctataagaaaaccggagacaagataacaacccgcgctgatgaaactgcaattgctaatcgtgtatatgcaaaccggctcgggaatgggaatgtggcatccggtgatggtagtaagtatcgtgggagaggcggagtacatctgacaggtaaagtaaactataaaggtttttctagttattataaaaaacaatggggtgatggtgttgattttattgaaaaaccttatttgctagagaggcctgtttactgtgtccgagctgctgtatatttttggcttcgtgaaaacttgtatgcaatagcagatgtcggtagtgctggcgcgattgtagataagataacggctaaggtaaatctacatacagatagttatgaaaaaagacgcaagcattttgaaaatataatgaataaaaaaatgtttgtggagggtttttaa

SEQ ID NO: 455325 - DNA, 816 bp, Serratia marcescens
atgttcaaaaaaatggttttattaacgtcagttgttgtgttttctggttcggtaaatgccgggttatttgattctaacgatttcaaatgtggcaggaatgatactgttaaagcgcttactgattatataaaaaacgatgcttcgggtatgttgcaaagtgactatcttacaaaatcaagtttttattatgataaacctgtttcagtttatcagagtatactggacagcatggaagtgacaattgcaaatgtatcaacatctggtaaaggtagtcatgatctaaattgcagcgcaactatttcaataaaaatcccgaaagacacgctggatgtggtaaataaaattcctaattacttacattatatcactggcggatatggaaagataaataataatggcgtaatttggaatgacgttgcctatagtgcaaaacttgctgataataataaggatgttatttttagcaacttcagcaggactgatgcttctgctgctttattcaatatgagcgtgctcgctgtaaacaaagaacagattattagtgctctctcgcagaatgcgctgagttcagcacggtctgcttatgtaaacgccgatcgtgagttgaatgctgtatggaaggaattacccgactcagcacggaattcactgaaaaaagagcaagtggtctgggttaataataaagtggctaaatgtggaaagcttccagatggcgagtcagagaaagataatgtacagcggtgggttgatatttatcagtgtcagacaaaaatgactaatgaaaggatcgcctatttaactggtaatgataactaa

SEQ ID NO: 455326 - DNA, 1764 bp, Serratia marcescens
atgattcactctcccgacctctatcagcagatccgccatacgctaaaacagctaagcaaaaccgaacctttccaaagaaatatcagtggattaacacgatctgcgcagatcgatcacctgtatacgctgatgcaacaggtcaccactgcagtacctctgagcgggcgcgacatacttgacgatatgcgtaaactgctgaccgtgatggagtcgccgtgtataacggccaactttggtctgtctcccttgcttgccagccactataacctgtgcctgggaaccattatggcgctggcggacccttcttctaccgccatacggcaatatatcgccgaacttgaagcggtcagcagtaaaggactctatatggtcaccgagatcgatgtcggtaacaacgccatgagcctgcaaaccgaagcccattatgacagtcaggcccggcaatttatcatcaatacgccaacgccgggcgcctgtaaatttatgccctacctctctgcgcaacaacccaaattggctatcgtaatggcacggctgtttatagaggcgcgggattgcggcattcacccgttcattgtgcgctgccgcgaccataaaggtcggttgctgccggggattcagactagtgatatcgaagatgtggatatttattctgtttcttacgtcgatcacagtatcaccgcctttcatcaggtaagggttccgcaccacgcttttcttggcggcaggctgcatcaggtgacgcccgatggcaaattcatcacccgcgcaacgtcacaccgagaaacattctttcattcgctgtgccggattgaatggggaaaaatcgtgttaaccgccgcgctgatttctccgttaaaaatggccgtcgccagcaccgtacactatcagacacaccgcaagctcaatacccgagaaaaagaaattaacgtcgccgatatcctgatcaacaaaactgaagcggcagatgcctacgtcaccgccgcggcctccatcgcactgtatgaaaaccgaaaagaatattgccttaacaacgcgctggatgcctcacagctacagtttcatgccagcatcgtcaaaagtatggtggttgaactttcccgcgaggcaatcagaaaatgtctgatgcgcaccggcgtgcacggtaaactgattcgcaaccgcatcacactcgcgatgatggtgaacgaccacaccgcaaccgcagaaggcgacagcctgccggtgctgatgaacatcgccaaacggctgctgaaaccatcgtcagtgacgcaaacagccgaagagcccccctacccgcggctttccgcccggcatatcatggcgctactgcagacaaaggaacatgcgttgagggacaggctcgctaccctaatggccaccgcacaagatgcaaaccacgcctggaatgaacattccgatctggcctatcaactggcctggacgcacggtgtgcgcgccgcgcttgacgcgctggcgccgcagccggacatacaggccgcctttgcgttaagccaactgctcaaaaatgccgtgtggtttatcacccaacaggtcctcatacccgaggagtttggcgaagccgaggagaagctgcgccacttattagtcgatatcttcgaacggcgcgccgtcaacgccgctgaagagtgggatattgccgacttactggcgcagaccgagatcggcgcaacagatatgggcgaatactggctgcaacacacccggctagaaccgcgcttcacgccaacctccctgcgctga

SEQ ID NO: 455327 - DNA, 1755 bp, Serratia marcescens
atggctaagcaaaaattggtcagttatgaagatgcaattcgtcggggcgggtatattcccgttggctattttaaaaatggctttactctggagtctgccaatcaggtgctctatttggaaagcacccggggatacgtggtatggcggggcgccttgccgaaagtggtcgcgccggcaacaacgccggaagcgacaggggggtttgcccccgacgcctgggtagatattagcggcgtagcctcatccgccaagctgaataatatggtgctggtggaggatttttatcacctggtgaccgcagagggcgactggacgccggcggcgcaggcggcgttggcttatgccatcaataacgatcttaataaagtgtggtcgttccagcagctggcgtttaaatcaccgctgattattgataactggactagcggcctggaaatgcgttttgccgcgctggaagcgcatgaacatttcccaacctatacggactggaaaaatgctacgccgctgattgtgattggcaaagagggcggctcaatggttggccttgagatccatatcggttatatcaatggcaagacacgcgccaacggtgtttctatccgcgggaaaggatgcggcggttcacgcattcatatcggcaaggcgattaactgtaatattgtttatgactgcagccagcaaacacatgcgtcggcctccaactttattaccggggattattggtatcaaggtaatatgggcgcttatttagccagaggaccgtctggcgattaccccattgccgaagggcataaactctctgtcgggtttattacgcaaatgcgttatggcggttcgctgtggcgcaatggttcgcaatatagtcagatctccggcgatgcggatttcaacgggcgcttcctgtctgaggtgacgttatccagccggtcatttaccgggctggcgcgcggtgcggagattagcaatggcacggcgacgggcgaggttctggctttttatgtgcaaacggccggcgtttataaggtacttatcattgaaaaaaatgacgtttccgctggcaaaagttctttcgccacgggggatacattaacgtccggttcatggcgcagcgctatttccgcagtgcgtaccgcgcagcagggagaaaatttctactttgatattatcctggacttttatggcgcgccttttgcccggctcgatgttgactgtggttatgtcggcggtctggttggccattcgctgtatagctgcaccctcaattataagaactcgtacagcgtcgcgaccaattcagtgaacggcgcacagtggctgcattctggtacgacgttaacgttgcgggatagctatctcaataagaatctgtttgattgcacctcgacgtttatcgcgccgggcgggaatttatatctgcgcacccatcgggcctacggcacggactttgccgccacttttgcgccgggtcaggcgcgcaccatttgtacctttaaatatatcggtatcaacagtgcgccgggggtaaaagatatctatgaagtccaggtgtttggaccgaccaatttaagcggcgtttgttcaagctttaaggtggcggtgtcgtcggcaggcttggagatttttgacagcacgatcaaagacagcgccagattaaaacttatctatggcgacgacaaggatgcgccgctggtgctgaaggcgcagcaggattcgccgcataccttccccctctattttacctttacgcgcaaataa

SEQ ID NO: 455328 - DNA, 1020 bp, Serratia marcescens
atgctgatcgatctccgcagcgataccgttacgcagcccacggccgccatgcgtcaggcgatggccagcgccgaagtgggcgacgacgtttacggcgatgaccctacggtcaacgcgctacaaaacgaagcggcgcgcctggccggcaaagaggcggcgctgtttttacccagcggcacccaggccaatctggtggcgctgctcagccactgccagcgcggtgacgaatatctcgtcggccagcaggcgcacaactacaaatatgaagccggcggcgcggcggtgctgggcggcattcagccgcagccgatcgaggccgacgacgacggcacgctgccgctggataaggtcgccgccgccatcaaacccgacgatattcactttgcccgcagccggctgctcagcctggagaacaccatcagcggcaaagtgctgccgctcgcctatctggaacaggcgtggcagttcagccgcgagcggcggctggcgctgcatatcgacggcgcgcgcattttcaacgccgcggtggcgctcaatgtgccgctgcacaagatcgtgcaatactgcgacaccttcaccatttgcctgtccaaagggctgggtgcgccggtgggatcgttgctgtgcggcagcgccgaatttattcagcgcgccaaccgctggcgcaaaatgaccggcggcggcctgcgtcaggccggcattctggcagcggccggccgctatgcgttagaacaccacgtcgcccggctacaggaggaccatgacaacgcccgctggctggaacagcagctgcgcgacatcgggctgacgattgccgaagcgggcgcccagaccaacatgttgtacatccggcagtctgccgaacaggcggcgcagctcggcccgtggatgcgcgaacgcggcgtgctgatcggcagcgggccgctgacgcgcctggtcacccacctcgacgtcagccgacgggatctgcagcaggtggtcgagctgtggcgcgagttcctgcagcggcacggcggctga

SEQ ID NO: 455329 - DNA, 702 bp, Serratia marcescens
atgacggtttccatgttgcagcagattaagggccggctggtggtctcgtgccaggcgctggagggtgagcctctgcacagcgattatattatggcgcgtatggcggtagcggcggaggtcggcggggcggcggggatccgcgccaatagcgcagaggacgtgaaggcgattatgcgcgcggtgacgctgccggtgatcggcattatcaagcgcgattatgccgacagcgcggtctatatcacgccaaccctggcggaagtcgatgagctgatgagcgtggggccgcagatgattgcgctggacgccaccgcctattcgcgcccgggcggcgttgcgctggcggagctggtggcggccatccgcgccaaatacccgcagctgttgctgatggcggatatcgccacgctggcggaggcgatatccgccgatgagctggggtttgactgcattggcaccacgctgcacggctataccgccgaaactcgcgggcagacgctggcgcaggaggatttccgttttctgcgtcaggtgctggccgcggtgaagcggccggtgatcgccgagggcaatgtggccacgcccgacatggccgcccgctgcctgacgctgggagcgcacgcggtggtagtcggcggtgcgatcacccgccctcagcagatcacccggcgctttgtgcaggcgatcggggaggcggccggctga

SEQ ID NO: 455330 - DNA, 1557 bp, Serratia marcescens
atgtcaggcaccggggagtcatcgtccagcggctggtttgagaaggcccagctgtttggtaaatcatttatgctgccgatcgccgtgctgcccgcggccgggctgctgctgggcatcggcggcgcgctgtcgaacccgaacagcgtggcggcctatccatttcttaacgtcggctggctgcagggggtgttcaccgtgatgagcagcgccggcgcgatcgtttttgccaacctggcgctgctgttcgccgtcggcgtagcggtgggcatcgcccgtacggataagggcaccgccgggctggcggcgctgatcgcctatctggtgatgaacgccaccatcaacgcgctgctcaagatcgatggcacgctggcggcggagaatcccggcgccgtcgggcagggcatgattctggggatccagacgctagaaaccggcgtgttcggcggcgtggtgatcggcctggtgaccggctacctgcacgggcgctaccacaagatcgcgctgccgcagtttctggggttcttcggcggttcccgctttattccgattatcagttcgctggcggcgatgggggtcggcgcgttgatgacggtggtgtggccgcacgttcagcaggcgatcgcggcgctgggcgcgctggtggacgctacgggctatctgggcacctttatctacgggtttgtgctgcgcatgctcggcccctttgggctgcaccatatcttctacctgccgttctggaccacggcgctcggcggcagcgagatggtgcaggggcagctggtggaaggcacccagcgcattttcttcgcccaactggccgatccgtccacccaacagttttatctgggaaccgcgcgctttatgtccggtcgctttattaccatgatgttcggcctgctcggcgcctgtctggcgctgtaccacaccgccaaaccgcagcaccgccggcgggtgggcgggctgctgctgtcggcggcgctgacctcgttcctgaccggtatcaccgagccgattgaattctctttcctgtttattgcgcctgcgctgtatgtggtgcatgcggtgttcgacggcctggcctttatggcggcgcatatgctgcacatcaccatcgggcagacgttctccggcgggtttatcgactttatgctgttcggcgtgttacagggcgatgccaaaacccactggctgcgggtgccgctggtcggcattccctggttcctgctgtattacgtcaccttccgttttctgatcgtccgtttcaatttcaaaacgccgggccgcggcgatgacgaggtggccgaaaccgcgcagccggcgtcggcgcgcgcgcagcaaattctggccgcgctgggcggcaaggacaacgttgtccagcttgactgctgcgccacgcggctgcgcgtcacgctgcaggacagccggcgggttgatgaggcggcgctgaaagccagcggcgcgcgggcggtgatcgtgcgcggtaaaggcgtgcaggtgatttacggcccgcacgtcaccatcattaaaaacgacgtagaggagttattggacgtatga

SEQ ID NO: 455331 - DNA, 825 bp, Serratia marcescens
atgaatagcggaaatttgttgttgcggctgcggcaggaattggcaggttacagcccgacgctgcaaaaactcggcacttatgtcatcgaacaccccagcgaggtgctctacttcacgattaccgaactggcgcgtgaaagcggcgccagcgaagccagcattacgcggctgtgccgccacgtcggctgcaagggctataccgagtttaaaatggccttggcgctgtgcgtacagcaaggagcggcggcggccgacccggcgcgcagcggcagtgaaacgctggtggaagagagcgtccaggcgctgcgtgataccggcgcactgctcgaccggcaggcgctgcagcaggcggcgcaggcgctgcatcaggcccgcacgctgcagatttacggcgtggcggccagcgctatcatcggcgattttctgcagtataagctgctgcgcgccggtaagccggcgcagctgttcagcgatatgcaccgcgcggccatgaacgccgcctcattaatggccggcgacgtggcgatcgccatctccagttccggctcgaccaaggatgtgctgcatgcggtcagccaggcccggcagcatcacgcgcaggtgattgtcatcagcaacacccagcgcagcccgctggccaaattagcggacgtgctgctggtggcggccagacccgaagggccgctgaacgccggcgcgctgccggccaaggtcggcgcgatgctgctggtggaactgctggtggcggaactgacgcagcttgacccggcttatgggcagtcggttcaggacaccgccagcgccaccctgccgctgctgctatag

SEQ ID NO: 455332 - DNA, 1314 bp, Serratia marcescens
atgctgggcactgttaaagtctacatcggcggcaatcttaattggctaattctgttattactccttggcgttgctacggtaacctcattgacaagtacccagagttctctcaaggaattacttagcacacgattaagcatcctgaaacactataaatggatgctgggtggttgggtgctgtttatcgcaggtatctttatcgctgccttaatgaacgacggtacaggcttatacaccgtagtaaaatacctgctgttcgttatcgtcctcttgtcactgctgctgatctcaccgttgacgccagctctgctggaaaaggcgttgaatgtttcgctgatcgtttccctgctcccgctgttggttttcgccgtgttgcgacagaccgactatttgctggtactcggcgatggccgtatggggtggttagccagctggccgggcgttatctggaaagccggcgcttatgcatggcctttcattgcctggcgttgtctgaagaacaccagctggcgcaacctgttattagccttctgcgcaattttgattatggcgctcgacggcagccgtacatccatgctttggatggcgctggtctggtgcgcgctggcagtggttgccctgttcgccaaaatccctggcaaaggcattaaaggccatatcgcccttctgcttatcaccctcttttctttcaccgtgctgcagccaacgctggtgggttgggtatggggcaaatatgactcgctgatcgttgaattaatgaccgagaagaaggacgttaatgaaccggcatccaacgatacatcagagagtaacgacagtacggccgaaatcatcatggataaccttggtgatacggtaaaaaaagcactctcgacgccaaaagaggatgctacggcggatcgtctgatcaaaggcgataacgcgacccgtttggagatgattcaggccggttggcataaagcggttgtgactttcccgtggggcggaggctttggcgcaactcgggtggccgataatgatgtcaccagcgtgatacatatgacttatgtacagctcctggcggatgagggcgtgctttcctttatcggctacctgttgattattctggctccgctgtgtgccggcctaaaatttgtttttgcagctcgtgaaacatttatcgagcgctttgagctgatgctcgctcctctctcggtcctggccttgtttaccatgatgggatgtttccacccgttaagtaacgagctgacagaatggggtatcgtactggtcgcgatgacgctggttatgactcatgtcacgcatcgcaagtaa

SEQ ID NO: 455333 - DNA, 1191 bp, Serratia marcescens
atgctggcgcaaatcgggggattgtttattcccctgattgagctgcccgtgttggcgcgggcgcttggccaacaaagctatggccaggtgctctatgccttgggcatcgccttgaccgcctccgtgtttgttgagttcggtttcaatttcagcgcagcgcgcagcctggtaaaaataaaggatcaaccgcggcaaatcgcgcaactggtgaccaatgtactcactgccaagctgtttctcagcctggtggtgagtatcgctgtcgccctgctgatgttttctggcgttggggccaccgctataccttcgcactggctactgtggatctctcttttcatcctggccttcggcttcacgcctctctggtattatgtcggcattgaaaggcttatcttcccggcactgctcgacctggctttacgcagcaccgggctcctgctcaccgtcatactggttgccgccccacaacatgcgcagcgcgtgttaaccattcaggcaaccgttgggatcattaatacattagtaccgacgctattaatgatccgcaagacgggccttgctccggtgagcttatcgggagcaaagcaggttataaaggaaagctgggaacttttcctttataaaggtgcgcaaagcatcatggggtcgatagcctctaccttgctgggattgttaggcggcgcgcgcgccgtcggtgcttttgtaccggcagaaaaactcgtgcgggctgccagcggcctggcggcaccggtgctgaacgccgcgttcccccatctggtaaaggtacagtcggattccaaacatgcggccaagagaattgttggtctgacccttttggctttggcggccatgacgcttatttttgccttactgaccgtctggctggctccttgggtagtgaatatcgtctttggtccgggctatcaggatgccattgaactgttaagaattctggtgtggattgtcccgctacgaatctgcagtatggcgctcgccatcctctggtttatcccaataggcaaggagcgtgttgcaagtcgagtcatgatggtgaatatcatgatgatctgcctgctggccttcctgttagttccgacgctcggcgggctgggaatgacgattgcgttcctgagtgcagaaatcactatgttcgtgctgctgatgatattttttataaataaaaataaatag

SEQ ID NO: 455334 - DNA, 894 bp, Serratia marcescens
ttgagtcagtttaacctgagcgtagtcataacaacttataaccgtccggagcttgtccaacgtgcggtagcgtctgtcgctcagcagcgtcgcgacgacttcaacattgaaatcatcgttgttgatgatgcatcaccgtgccctcttcccaaatttatggaaacggacgttgtcacctaccgcatgccggtgaatggcggcccggggccggcacgcatgcagggactcaacctggcacactctacctgggtcttaatgcttgatgatgacgatacgctagagccggatgcggtttcccatttgatgtcccacttgaccgatcctgagttgcagcagtacccggttatgcaatttgctcgcacaaacggcaaactttccggcgatgaccgcgtcattactttcgatgactatctgagcggaagcatcaccggagacttcgcaccgatctttaatcggcgtgtttttctgcagacaatgctgagttatccaaacaaccgggccggcggggaacatattctctggtggaaactggcgatggattacggcatcccgaccttctctaaaattttggttacgctctatgatgatgcccaggagcggctaacccacttctcttcacaaatcaagaaagccgctgaccatcagcagctcgcagaaatcacgctggccgaatttggcgctcagttacagaccgcctacccaacggagtatcaacgagtatgtctggccagaatcacctacagcatgctcaataaccagtgtcgttccgcacgcagctacttaacaacggcgccgctgggagagaaaatgaaatcggcgctctggttagtcagctggcttccgcagccgttgattaaaaagctatttttgttttaccgccaacggcaaggatga

SEQ ID NO: 455335 - DNA, 1083 bp, Serratia marcescens
atgcgtatagattacgtgattaccggtctggatatcggcggcgcagaatttcaggttgtcgccctgctcgagcgtttggttcagcgcgggcaccaggtcaggctgatttcgatgacgccgccgcgcgcatttacagaacgcctggaatcagccggcattcccgtacattcattggatatgacctccggattacaactgccgcaggcgctttggcggctgaaaaaaatgctgcgccagtcaccgccggatatcctgcacggccatatggtgcatgccaatatcatcgcgcgtttagcacgtttattcattcccgggctgcacgttatcagcactgcccataacacacgagagggcggtaagctgcgcgactgggcctatcggctgaccaaccctctcagcaggctgaataccaccatcagtgcagcggcaactcgccgctttactgaggaaaaagttttcccgcgtcacaatacccaaaccatttttaacggtattgatacggaaaaatttcatgctgatgatgcgccccacacgccggcaaaaccgttccgctggctggccgttggcagattaatggaacaaaaagattaccccaccatgctgacggcgtttagtctgttgcccgacagccggttactgattgcgggacaagggcctttattacctcaattgcaagagcaggttagccagttaggtttggaaaaccgcgtagaatttttgggggtgcgtcatgatatcgacgagttgtaccggcaggtcgacgggtttgtcctgtcttccgagtgggaaggctacggactggtcgttgccgaagccatggcgtcgcaacttcccgtggttgtaacggacagcggcggacctggggaaattgttggcagcgatggttccgcaggtctccttgttcctattaaagatccccaggcgctggcaaatgctttagcaatgattgaagcaatgccgccagccagccgctatgatatgggttgcagggcgagaaaaaagattcaggaaaacttctctctcaaccagatagtgacccagtgggaaaacatttacacagaattaaacaaaaaaaataaataa

SEQ ID NO: 455336 - DNA, 129 bp, Serratia marcescens
atggcaaggtttcgggaaggaaaaattttaaaaataaagatttacacactgagggagggttttaaaggtaaagtggtgaataaaaaaacactttccatatgttttatctgggaaaagaataaaaaatag

SEQ ID NO: 455337 - DNA, 834 bp, Serratia marcescens
atgtcgcagaaatgtttggtggtgatcgtcacctacaacagccaaaaacatattcagtgggtgctggacgggttagagtcatcacaaaatgacatcgtcgttagaattattgattcaggttcaacgaacagcgattatctggatgcaatacagagtaagcaccggttggatgtggtgaaaaccaacaatgtgggttttgtggccggtaacaaccaggccatgttcgatgccgcctcttatgactgggtactgctgcttaatcctgatgcccatattgaagggacaaacctggatcgcctgttatcctttgccgcgacaaaagagcaggaaaaggtgggattattttccgtgcccttgatccgttttaatatcgatgagaaaaagccgctgccaatttttgactccgtagggattacctgcagtccggttggacgctggtatgacatcgatgccaaccagccggtatcgacgctggataaacaacctacggcggttgacgcggtgtgcggcgcatttatgctgttgcgcgtgccggctttgctgcagtgccgtgataagcagggcaaggttggttttgaaagctcctactacatgtataaagaagatattgaactgtctctgcgtttgaagcggcagggatggggcgtgtctgtttataacgatgtgacggcgtatcactgccgcggatggaacggcgaacgtaaggatgtgccttattgggcgcgttggcattcggccattaatgatgttgacgtcgcctggcgttataaatggcgggcgttgccgtatgcattgaccaagcttgcctgggtcaaatttgttgagaaaaaataa

SEQ ID NO: 455338 - DNA, 246 bp, Serratia marcescens
atgaggaagttgtcgtccatacgcacaggcaactttaggatcgttaaagacctgcgtaatctcatccaggaaccctggctgcgggatcgcatcttgggtgagaaaaattataacatcggcacgatcaatattattttcaacggcctgatttctggttccgccatgattgaaatctttagaatcaatagacagcgtttcaaaatcatgctgttttgcaatagccagcgtatcatccttgctgcctga

SEQ ID NO: 455339 - DNA, 267 bp, Serratia marcescens
atgacctcacttagtattgatgaacccggtaacgaagaaagcatattcaacaaaatttatgatgctggcggcgtagcagtttcagctgataaatgtataccaacatacaactatccgtttaaagccggccatacttacactctttccatcaccctgcgttcgcaagataaaaagagaaagggcatcgtgccggcagcacgcttatacggcgtcagcttcaccttaacgggtaaggatgaagagctggttataagctctatcaattaa

SEQ ID NO: 455340 - DNA, 627 bp, Serratia marcescens
atggccttgtatcaaaataccgtcggcagcaacctgtatgtgtggtcaagcaatcggggcgcatccagcgccaaagagtgcattattaccgcccatggcgcatcgcgccttatcggtaatggcttgtcaggtctggatgttgagctggtttattacactccgcatgggaagagtctggatgacccgacgctgcaaaaactgattatcggcgcggtgacgccggtggaacggatcaagaccaaagaaaagatttctcatgactacatgttgggaaaatattccaacagtcaggccagcgggggacggcagcataattcgaacggcgaaagctatgagagcattgccgggctgcctgatacgcttgctgcaaaggggaaacatattacggattcgctggcaacgttcgggaacattagcgccaagtccccggagctacaaagaaaaatcgcagagctggagctggaggcgaggcagtatagccaatatgcgccgcatgatgtgatcaccattcgcaatcgcggtcaccgcacgctgtttaacccggtgacgctgtctgaagtgatcagaacattgcagcattatggttacaactactccgttttccactgttccttctgccgtaactga

SEQ ID NO: 455341 - DNA, 291 bp, Serratia marcescens
atgagaaaatgcacatttttaagcatcgtcgccgcaatgcccgcttttggcggcactgcattcgatacctttcctatcgggctcggcgatccgaccgaaacggtcttgttggtgccgcgggaagaacgggagaaaaccgccacagccggtgacgactaccgctgtttttatcagggagagaaattttctctcggcgccacgctggacggcaaaacccatcggctgatggagatagaatccggtaaactgatgtcgaaagtcagcgtgccacagtgggtaaagggcaagtaa

SEQ ID NO: 455342 - DNA, 399 bp, Serratia marcescens
atgaaacggattttattggtgggtgggattttgctattggtgggatgccctcgcggagattacgtatcacctgaataccctgcccatgttgcgttgagagagcaagtcctttgcatcaccgtcaccccagagaaggatgagcaagtacaaagtatattgatcggtaagagcggaagccacaaggctgaagcattcaaatattttgaatccacctataaggtagcatccggtgagtgtgtggatatgcttggttatcgttttcagcatgatgagtcatataaggtctcgataaatctaaactcctcagagaagcggacacagggtatccatccctcaagccgtacttttgttgctatcttcaccgtggcagaaaataacggccgcctcgtggtgtattaa

SEQ ID NO: 455343 - DNA, 144 bp, Serratia marcescens
atgacgaactctgtattggaattgattctaacttttttatttatcgtggtgttcgccggtattaccggcttggctatcctcgccaataaactcgagtcctcaaaaaataagacgccacgttacgaacaaagaaactacgattaa

SEQ ID NO: 455344 - DNA, 354 bp, Serratia marcescens
atgaaacgctatttattgccgatagttgtcgtactatcactcgcaggttgtgaccagtcaccgaggtttgatggctccagcaagggagcgctgttgtattcaggtgaaaagattgccgcttcattgtctgatgagaagaaagcggagttgaatcaggctggatctgatatatcgaggtatgcccatgttgttgctagcgtgagcatcggtccaggacctgaagcagaacgggaagcggaaaacataatcctgaagattgtggatggtaaaacagcagatgaagtgattgccgagtccaaaaggttgaaagagaaaaccgagcagaagatagcggaagccacttcaaagcactga

SEQ ID NO: 455345 - DNA, 516 bp, Serratia marcescens
atggagcgatttacacaagccatcagggaatctgtcagatcggaaaactggttttcagcgttgtttatgtccttggctatgccggatatctgcgctcaggtggagagcccatctcaaagaggtgatagaacaaatggtaggaagtacaaggattggtataacaagtatctgagggataaatatgtttttgatgatacagagggatttctcgcggatagttgctggagttttcgttgtgcttgtctccatcgaggaatgagcgcagaggaacgcggtctaattaatgaatttgcttttaggcccccgctcaatgctcccggattagaggttgaatgcgcaatgtatcaacacaaagggaaactatcgatacaaatcgatatctttgctgaggatgtttgcttggccgtagagaggtggcgccaagatgtagcagggcggcatgatgtcgaacaaaggataaaagatcttattcatatagatgatgcccaaaacgaaggcatagttacatatgattaa

SEQ ID NO: 455346 - DNA, 264 bp, Serratia marcescens
atgcgattaaaaacgatgactgcgcccgccgcgatgctcctggtgctgttcttgacctcctgcgcggaacgggtgccggatccgccggaaccgatagttcgacttcctcctgaatcagtgttcaaaccttgcgaacagccgcagctttccggcagcacttggggagatatcggcgcccactccttagcgctgcaaacggctctatcaatctgtgccggccaggtggcgacgctcaacaaatggaggcaaaccatgctgaaataa

SEQ ID NO: 455347 - DNA, 894 bp, Serratia marcescens
atgagcgataatgatagtgctgataagaaaatagataatgataaagatactcaaatggaagtgggtaatgctaattctgatggggttttagatgatgattatttttcaataattaaaaaacgactttcaaaatcattttctgataatagtgatggcgattttggtgtaattaatagaggtatacatgttagtggggcgccaaatagaaacaaaagtttatatagtacagtgagttccgtcggtaatgttgtaggaggggagcgtgtctctataaatgacaaaggaatgaatagtgcggattttatttctcaacaaatttcagagttgaatgtaaaacacgcagatatatatgttactctaaacgaagttagagggtgggtggctgagtcgaagatacagagtgatacaattcaaaggcaaatggatggaattactgataagaatgtgcgagtctctactgaattagaagcgctgaaggaagtaacgaaaaatacgaaatcggagtttgacgatcaagttgaacaatttaaaagtgacatagtggcgtcaagaaattccgtattaggcatgatagcattgtttgcatctttcttttcatttatatcggtatcaataagtatattttctaagtcgatgcctttgtcactgtctatatcaattgttttggttctgtggatttgcctggtgagttttttatatatatttatggtatctttaaattctggagtgagtttttttacaaaaaaatctttttttgagcattttgttgttgttgcgatttctttggttttcgcaatgacagtaccttacgttattatagataaggtttttaaagtggagcctgttcactattttaataatgacgggacttctaataagggcaataaaacttag

SEQ ID NO: 455348 - DNA, 696 bp, Serratia marcescens
atgcaaaacatttcatttcaccaagcattagtacatgagtatccaatagattttgaatttgatggtttctcatataagcttaaagaggcttttaaaagatatgatataactttagtgagtaacttttcatttggaagtggaaataatgggctgccaccggagttacctagaatacaactcaatgatgaaaatggccattatactatatcaatgtcattaagaaaggttgattttaaggttgattgttcaaccttcagtttttcattttgtaagttcaaagatctagccaaggaaattttgaatgttttaaatgagctaggtgcgagtccatttaggcgcagtgtggctacatcaattattttccctatgaatgaaccagtcccatacattagaagaaatcttttaaatagaagtaattatttttttgatagtccgttaactgtcagttactcattaagcatgacagatgccgtagagtacgagaagggacatgctttgataagggttaccagtgtttctgatgcctatagaccgaaggatgatggtgataatgaacggtttgtccatgtatatcgggagcttaataactttccttcagaaggaacgggaaatgttatttccttcgaaaagtttatggatgtaggggctgataatttttcagaaaatgccataaagtccgttctgaatatggagtga

SEQ ID NO: 455349 - DNA, 738 bp, Serratia marcescens
atgatggcttcgcaaactgacgtgatggcgcgcctgatggcgcttaagccggcgcatgtaaaaccgctgttcagcacggtggaaggctggaagaagtttcaggctgaagaagccatgaagtctaaccagcaactgactgaccggaacaggcaggcacggatggaaaaaatcattgggcggtcaggtatccagccaatgcaccagaaatgctcgttcagcaactacagcgttgaatgcccagagcagcaggcggcgctggatgcagccaaaggatttgtggcttcgttcggcaaaagccatggtggcttcgtattttcagggaattgcggcactgggaagaatcacttggccagcgccatcgcgaagaacctgatcaagcgtggccactcggcaatggttatgaccgtatctgagctgttcgaaaaccaccgagccacgttcagcaaggacagccctgtgaaagaggctggtttgctccgtgatctctgcaatatcgacctgttggtgttggatgaagttgggctgcagaaaggctccgagtacgaaatcaatctgctgaccaatatcgttgatcgtcgccagctgcagctgaagcccacgggcatgctgaccaataaaaacttcgatgaaatggtggcaatgatcggcgagcgaatcatggaccgtcaaactgatggcggcatttgggtgccattcacatggcccagcatgcgtggtcgtaaggggatgaaatcatga

SEQ ID NO: 455350 - DNA, 909 bp, Serratia marcescens
atgagtacgaaactgaccgcatacgtgtgggatggctgcgcggcggcagggatgaaattatcaatggtggccattatggcgcgcctggcagacttctcatcagatgaggggctgtgctggccgtcagtgaagacgatcgcccgtcagattggcgcaagcgaaagcacagtgagtgcatctttggcaaagctggaaaaagagggttggataactcgtcagcaacgcagaaaaggcaaccgtaacacgtcaagcatgacacagctgaacgttgaaaagctgcaagccgcggcaaactctcaccctccaaaatctgaggtgtcaaaatctgatgcatcaaaattcgatgcatcaaaatctgacacatcaaaatttgacccatcagaatccaagaaaaaagggcgttttgaccctccagaatctggatacgatccgtcagtaaattcaaaacaagatccatcaggtaaaaacactctttgtcagcctgctgtgcaggccgaccccgaagtgttgatcaccgaccaggcgaaggacgttttaaaacacctgaatctggtgaccggttcccgctatcagacctcgaaaagctcactggagaacatccgtgcacggttacgtgatgggttcactgtcgagcaactcacgctaaccgtcgattacatgacggcgaagtggggcaacgacctggcgatgtcggattacctgcgcccaaccacgctatttggaccaaccaagtttcccggataccagcagtcaagcactgcatgggacaagaagggccggccagcctgcatcaatggcaaatggcagaccagcacgaatcaccgagtaaccccagccactggcgcgataccgccgggtttcagcaatggcttaccagcaggagatgatcatgatggcttcgcaaactga

SEQ ID NO: 455351 - DNA, 1017 bp, Serratia marcescens
atgtctggtagtgataaattggactataaaattgaagtgtaccaaagagggtcctctttaattgacgtcagaattcacaaggaaacacaagatatttgggttacagaaaagcagatcgccaagttgtttgagcttacaccccaagctatttctcatcacatatctaatatttacaatgaaggtgagcttgatcgaaattcaaccaccaaaaatcttttggtagttcaaaatgaaggaagtcgggctgtttccagaacaataacccattacagcattgacgtagtgaactttgtgggatttagggttagtgccaaacgggcagtcgagtttagacagtgggcgtcagatattgtcaaatcctatctccgcgatggattcgttatcaacgaaaaagccctgcgagactcgccccagaaagtaaacgaacttgcagccaagatccgcgctctacgatctgaagagatccatgtttacgacaaagtaaaagaatgtttcaaagaaagtgcctctgactataataaagactcgcaagaagtcagatctttttatgcaaaaatgcaggataagtttcattacgccattacagggatggttggggcgaaattggttcttgaccgtgcaaaccatgaagacgataacatgggcttaaactccttcaaaggagtatcccccacacttgcagaagctaaggtcggcaagaattatctaaaagaaaacgagctatatagaatgcacctactttctgaacaattcttattgcatgctgaatccactgctcttcagggtaagaaaatgacgatgcgatcacttaatgagcacattgataagcttctggtattcaacgagtacgcattgctcacagagtatcctgatggctacataaaagatgcagcagtggaacatgcaactactcaacaccgattgttcaaaagaaaaaaaatgattcaggctgctggatacatttatgatccagaatcagatgccatgggtgattttgactttctcttcgaaaagtaa

SEQ ID NO: 455352 - DNA, 129 bp, Serratia marcescens
atgactaacgacgaactgaaacacgttatcgcgcagttactacaagacgcacagcgcattcagcaacttgagccgaacgccggcactgcagctcgtattgccgaagcgaaaaaggcgttgaccaactaa

SEQ ID NO: 455353 - DNA, 399 bp, Serratia marcescens
atgaacgtatacgaaatggaaggatttctgcacggtaagtgcatgcctcgcgacattttagttaacgaaagcactgcggagtatctggtcaggaaattaaacgaagcgaacacggttaaggctcagcgggatgcgctggctgttggtaacagcatgtaccgcgaagcgatcaggactgctcgccggctaattaacgttgatgaaatgggagatgctgacgtcgtactggcgaaagcagaacgcagcattagcagcaatgccgccgcagtgcgcgaaatcgaggcgcaagccgttgaagatgcagtgaagcaagttctcagcgtggacacggtcgcatctactgctttgatttctcatctgctgcgtgcctatgccaccgggctgcgggaggggaaatga

SEQ ID NO: 455354 - DNA, 285 bp, Serratia marcescens
atgattctcaagttcacgcctaccgacaacaacatgctggatgctatatcgagcgactacagcctggattggaatggcaatttcagcgttgctacatggcgcattcgcaatttcgtcaaacaggcttacccatgccaccacgtgacaactaaagccatccgcgatcatctgcggggaatgactatgcgtgggttattactctcaagaaatgaacacggcaacaacatcatatggacgctggtagttatcggtgacctgcgggagggtgtgcgcaatggggactga

SEQ ID NO: 455355 - DNA, 201 bp, Serratia marcescens
atggggactgaacttaagccgtgcccgttctgcggcgccacagatccggaaattactgctgatttttatgactattttttcgtcatttgcggttgtggcgcacgcggcccgggtggcaaggaatcagacaatttatcggcaatgaataacgccgaggcagcatggaaccgccggcacagccaggaggtagagcgtgactga

SEQ ID NO: 455356 - DNA, 516 bp, Serratia marcescens
gtgactgataaaccagcgcttacacatagcgagctgtgcctgatagccgaacggttcctgcggaacaacggctttaaagttgctttccatgatcggtttgtggctgccatttctaccggcgaacagccggatgcaatcggcttccgaaacctcgcttcatgcttgattgaggcaaagtgctcgcgtggtgacttcttcgcagaccggaaaaaacggttccgcattcagccagaaattggcatgggtgattggcgcttcttcatctgcgaaccggggttaattcgcgtcgatgagttgccagagggctgggggttgctgaacgtcaaaggcggtcgcgtttataaagttcacggctggccgagcaataccgtttggtattcgcagaaaccattccaggcaaacaagcaagcagaatgcgactacatgtacagcgcactccgcaggatggagatacgagggcacttgtcagaagtttacgacggtttcccgaaacagcaggaggcccagcatggctaa

SEQ ID NO: 455357 - DNA, 294 bp, Serratia marcescens
atggctaagcgtaagagcaaccgccaggcgcggagaattctacaagtcagcatttgggcgtatgacggcgcatatcgtctgagcaaccgcaagcgtgaattctcggatgaagaaggcgatcgacgagttgttagcaagccatcacgccggcagcgccgagcagaacgcatcgtcgaagaggcgcgaatcgagcgacactactggatgaatgttaatgctggcatgaacgatagcgagtcgtatgcagctgcggtaaaaacggttaagggcgaggcccaggagaaagcacagtga

SEQ ID NO: 455358 - DNA, 303 bp, Serratia marcescens
gtgagcatgaacacagcagaagttaagcagtatatgcaagagaacgacgaaagcgcctggctcgtcctgatgtctgaaatgcctaccgccgagcgccggtttaatcgtcttgcgacggggctggcgaagttgctgaaagatgtgcaagagcatttccccgatgcgtgttactacacggccagcggcggcttcaatctgatgattggtgacactcactcagggcggaacggatgctcaccaaaccaggaactagcagcgctgtcggcatctcacaagctcaccattgcagatggagatttctga

SEQ ID NO: 455359 - DNA, 672 bp, Serratia marcescens
atgaataagcaagcggaagagctggcgcagcgccttgctacctgcgcaaaagaagacacctatccggtcctatcgcctgctgattgtggtgcgttgatagaggcgctggaagcatctgagcaaacactggaacgtgagcgcgaaaaatcccgtcgggttatgtctgagaaccatcagcatacaatgcgcatcgcgcggcttgaacatgcggagcaaaggctctgcgctgcaaatgtgtcgcttgatgcccgggcggaattggcggagcgggaaaacgcggaactggagcagaggctggcgctggttcgcgagcaacgcgacaacgaactgcgcacgaatgctgaactggaaaagcagctggccgcgcgggagacggtgcctgtgaacgtgaccgacgtgaccgacggcatggccctcgactttcatcatgcactgactgacggcagtattggcaacgacgagttggaggaaataaaaaccggtttgcgggctgctctatgcaatgtccccgccccgccagcgccagcagtgccgcctggctacaaactggtgccggtaataccgacgtttgagatggtgcaagcagcgcgcaagtatcacggaggtgataattatctgccggctagtttgtatcgcgcgatgctggcagcagcgccggaggtgggccagtga

SEQ ID NO: 455360 - DNA, 1482 bp, Serratia marcescens
atgtctgataattttgacgagtcgcagcttggtttttatacggcagagcagtttggtgccgttggtgatggtacgaatgacgattacgcggcaattcaaagcatgttagaccatgtccctgctggcgcaaccattatgttggatggaacgaaaacgtattacaacgcttttactacagcgggaataaacggatcatggaaaataacgaaacccgtgacgctgtatggtaatggtgcattattgacccgtaaaaagacgcagacatcagcggacaatcaatcagctatttttatgctcaacagagtcgacggtgttaaaatttttgatgtggtgattaacggtggcaaccccattgggctgccggtaaatagtacgggtgcgattgtaagtgcaaaaaaaacgtcactatgccaagctatcgattatgggatttatattatcagttcatccaatgttatcattacaggtaaaattgaacaatgtgcgttcccggtatgggtaaaatcatcaaacgccgttcgtttttcaggtagcgtaaattatgctggccaggtcgtccctaatataacggcttcagatcttgcatatggggcaggcattaaattatcggactcatacaacttcgatataaatgttgatggtaaaggcaatgcaaacgcgactgtcgaggttgaacctgcaagttttaacggcaatattgtctgccggagctgggagaacatatccagtggaatgacgattaccgacagcaggaatattaccttcaaatcctatgcatttaactcgaacacagggttgcaaatcatccagactgccagtaatgatgcggaaaggcacacccgtagtattgtgggggatgcggtgaatgaaggtggttcatgggggacgcttatcagccagcgtgctggcgcaacgcagaagctgacaggagtgacgcttcgtgtacagagctatcagtgtaaaacctatggcctttatttatttaatagatcatcaatagaaatgcgcaatatctctatcgattatagtggtgtggatacggcaggtgaaacatatttaacctcaggtaacgatgtcattattaccggtgatgtcagagtagatcttaagatgaaaacagcagggtgctataacggtctggtgatcaatggtcagcaaagcgcagaatttcctccgcgtgttgtcggtgatttccgtgaggcacgtttcatcccaggttatgtcttgggtaaatcgtcaatggttgatttatcaggatcaatcacaaagaatgattatatgttaaccagttcggctgttaatacaaagattgccaagatccttcctggcggaagtatcgggccatactccgggcttactattgatactagtcatttatatgttcgtgatattcctgattctgctggagtaaatcatgaggtttatgctgagcaacggccagagggagttgctgggcaatataatcttatgattaaaaaataa

SEQ ID NO: 455361 - DNA, 144 bp, Serratia marcescens
atgtattgcgccctggctggttttggcgcgcaaattttttgccgccccgcgattgtaacattttcgtcacacttcctgattagtatgaagcccaactttgagcgcccggccactctggtgaccctggaccgcggcgtcagctaa

SEQ ID NO: 455362 - DNA, 1005 bp, Serratia marcescens
gtgaaacctaagattttagctttccttttttccattccgttcatttccctgaccagcaccagtgccttagccgcgaactctcccgattatgctgccatcgtgcaatcggcttatcagaaatttaaaaatgataatcgtggtaaagttgctgattatattcctgcattggcggcttacagtgataaaaattacggtatcgcgattgcaactatagatggcaaactctatacggcaggagatacacaaaaagaattcccactggaatcattaaccaaaatattttctctatctatcgcattaaatcaacatggcgctgacaacgtactgaataagttgggtgccaactcaaccggattaccctttaattccggccttgccatcgaactgcgtccagagcgcccggagaatccactggttaatgccggcgctattagtaccgtcagctttatcaatgcgaaaaacgccaatgatcgttggcaacagattatcgataacatgaacgcctatgccgatgctaaattgaacattaatctggacgtttatcattccgaatccttgaccaaccagcataaccaggcgctgagtcgcttgatgatgtctcatggccgcatgtacagtaacgtcgacgaagcactcgatatctataccaaacagtgttcggtgagcgccaccactgagcaactggccaaaatgggagcggtattggctaacgcagggaaatctcccttcactggcaagcagctactgcagcaacaatatgtacctaacgtgctggcagaaatggcgatcgcaggcctctatgacggctcaggtcaatggttatacaacgtgggtatcccagccaaaagcggcgttggcggcggtatggtcgcagtcgtccctggccaatatgccattgccgtctactcccctcccttggataaggccggcaatagtgtccgtgcacaggaagcgatcggctacgtcgcgcgcaccaccaaagctaacctttacggctctcactga

SEQ ID NO: 455363 - DNA, 546 bp, Serratia marcescens
atggtaaatataaaaaacttcaaattaggcgaaccaacgacgccagaacagttaatcttgcgcgaacaacataatgccatgtttctttatgccgaagatggtaccgagtggtatagctgccaaaaaaactttgccaaagatagtataaaatttgcttacgacaagcatggagttattcgcagtatagccgcaaacaaagatgtatctacattatggcctgccgatctcagcgtcgttgaagtcatggatactgaatataatcgccaagctgatatttccggcgaatggatatttaatggtgaaaaaataagcaagcgaatctatctgccacaagagtatcaagaaaaagccatgatggaacaggctgcacgtttagccactgccactaaagccatcgccccgctacaagacgccgtagagttaaatatagcgaatgaaaccgaaatcgctttattaactgattggaaaacataccgggttatgctgaatcgccttgatctcactgcagcccctaatattgactggccaccagagcctcacttgtaa

SEQ ID NO: 455364 - DNA, 1041 bp, Serratia marcescens
atgaataccaaatttattgccatattaaccaatcaaggtgcggccaagctggccaacgccaccgcgctgggaacccaattggagataacccagatggcggtcggtgacggcggcggcacgctgcccacccccaaccctgaacaaacggcgctggtggcggaaaagcgccgggccttactaaactccctcagcgttgatgccaataacagtgcgcaaatcatcgccgaacagataatccccgaaaatgaaggcggctggtggattcgtgaaattggcctgttcgataacgaggatacgttggtggccatcgccaactgcccggaaacctacaaaccccagttgcaagagggcagcggccgtacgcagaccatccgtatggcgctgattgtctccagcagcgatgccgtaacgttaaagatcgatcctgccgtcgttctggcgacgcgggcctatgtggatgatgaaattcaaaaacatgccaagacccgcaaccatcccgatgccagccttgcggataagggatttgtgcaactgagtaacgcaacagacagtaccgatgacaccttggcggcaacgccaaaagcgatcaaaacagtgaacgacgacgttgcaaaacgcctgctgagaacggatatgcccgtcggtattccactgccatggccaaccgatacgccgcctgcaggctggctcaaatgcaatggcgcgacattcaataaaacgaaatatccgctgctggctcaggcttatcccgcattgcagctgcctgacttacgtggggagtttattcggggctgggatgatggtcgcggcgtagataatggacgcaacttactctcgtcacaagcggcgacgagtatagcagtagcacttggggcgtttaatcagtaccacggtattgacacagatagtgctgagataggtgtatataacccttcttatgctgtttataaagcccagacaacacagacatcaacgggtacagcataccgagccgtacgcccgcgaaatatcgcatttaactatatcgtgagggccgcataa

SEQ ID NO: 455365 - DNA, 444 bp, Serratia marcescens
atgaatcagtataaagagcttagctctaagtggcgggagcgttttgattttttcgacagcgtcggcggtgatatcacttcccctgaataccggaagaaaattaaagagttaggcttcttcgaacgcatgaagtatatcatgaatttcttcgcctttttcttcggcattatctatatgtgcattctgggtctgtggaaaaaggggctggtgctgtttgttggtgcctgcgtgctgagctatatcgtcgcgatagtagagtatgtgaccggcggcaattttgagttagcctaccgtttcttggggattggctatagctgcctttgcgcctcggtggctaactacgcctattacctgaaggaaaaacgggggatccagggctggaatccgtttgaaggctttagcaagcgttcagcggcgaagattgccgcccgtcgtgaagggtaa

SEQ ID NO: 455366 - DNA, 369 bp, Serratia marcescens
gtgggagtttttatctttatcgctaaaggagcgcgcgatttttcccaggaaaccgccgtcaaggtcaagaataacgaattcgataatatggtccgcttcgcctttcggctgaccgggattaatcttctgctgctggttgggatttgtttcgccggtatcttgctgccggaagaggtggccgagtggatcgacctgacgatgctactgctggtggggattaacctgatcgccaatctggtggtgttctacctgtcgctggtcgggctgttcaaatccacgctaaagtggcgcgcggcgctggcattactgttctcgctggcgctgtttgcgctgtatctgttcatcgtcgcggccacgatagcgggataa

SEQ ID NO: 455367 - DNA, 225 bp, Serratia marcescens
atgaaacgcatgctcttgagcctcatagcctttgcggtgctgactattatcttgatgtttgtcctcggtgctgtcataccagatagcctgatccgttcactggcggaattatttgatatccacggtgcggagggggtcacaaacttactggccgatgtgaccctcatagcgtcagcggtattgtccttgctgatcgtctggctgattaaccgtagattaagatag

SEQ ID NO: 455368 - DNA, 1023 bp, Serratia marcescens
atgaaaaaaatatggaatttattaaatcttggtatcgcgcattctttattgttctatatggcagtgctcgttatcacgcctaagaaaatgccgctgtaccctattattgtttggtcaggcatgattatctttagcgggataatagtgcgtttttactggagtaaaacatcgggttatcaatctgccgctcaatttcgtaaagcgcataaaaaaacgtcgagggcggcattgtgttcgacatttatttttttactaacctgcatttcatttgaatttttcaactacataattattacaagcatattaattttctttactgtgttttcaattgtctatactattctatttcatatagaatcaattgataacaaagaaggaactttagccctaaaagtgaaagtagtagttaaatactcatgggtaattgtgtcattaatctcatactatctcgcgcgttcgttaatgtctaattcattggatgttccttttgacaaaactttaaataaactcatgacggtagttgtggctttgttttttatttttatcttttattatttgctttactttatccttattgcttttttatctatcgtgacgccacgaactaaatggccaaggagaaattctcattatgatataaactattcaatgtctttttttgtgccgttatttattattgggtatgtgtcgtatattgtgtttgatatgcaaacactttccgtcataaaattaggtttcgagttttccatgaagtacgatacgcgcgatactttcttttgtaataatagttatatgttgcttaacgagcatcctaatgctcattttatgtatatctctgaaggaagctatcgcgtattaataccgcataatgatgattttacaatttcacgcttaacctgtaaggctagtgagcctttttactctctggttagtgtgaaaaataaaaaagacctcatgttagctactttggaaaaacgaacagagactcttgcaagtgacttgaaggcgacaatgtatccgtga

SEQ ID NO: 455369 - DNA, 714 bp, Serratia marcescens
atggttctaaacatcttattatgctttaattatcacaaatcacatcgcatccacagaaaaaaattaagcacttcatacaattatttaaatacattaaaaagaggacctatgaacaacgacaaatattcttgctttgctgaattaaataaaaatgaacccgaagggagttttgacatcatctgtgaaacaaaaaaccgaagcagtatatatgcaattgtggctccacatggaggaaaaatagaagcaggcacaaaagaaatttctctagccatatctcgcgatgatttatctatatatatattcgaggcgaaaaagcgagaaaacaacatgacccttcatataacaagcgctaacttcgatgaaccaaaatgtgaagaattgttaaagaatgtagaaactgttttggctatacatggcgcaagagatcccgaagaagaacctaaagaaagagtctgggttggtggaagtcttcgtgaaagacttaaaatccacttgatggaaaaattgaaacctttaggaattttagttgaattcaactctaaattttcaggtaaagaaccgagcaatatctgcaatcgaggtattagccaacaagggatgcaacttgaactaacaaagtcactccgcgacaggctaaaaaacgataaaatacttctagaaaaattcagcaacgctgttcgaaccgcaatgaaactcacatatccaataaattaa

SEQ ID NO: 455370 - DNA, 1458 bp, Serratia marcescens
atgtcggcacctaacatcacgcacgccgagccgcgccgctgggcaatgttcgtcattttactggtcggggcatttttgccgccgctcgatttttttatcgtcaatgtggcgctgcccgccattcagggcgagctgggcacctcttcctctgctgaacagctggtcatttcatcctatgccgccgtgtatgcggtaacgttaattaccggcggccgtctgggcgatatttatggtcgcggcaagatgttcttcctcgggcttatcggttttgccgccgcctcgctgctgtgcggcttggcctggtctccgtgggtgctgattaccggccgcatgctgcagggcgccacggccgccattatggcgcctcaggcgctggcatccgtgcaggccattttccccgaagccgagaagccgttggcgctgagcctctatggcgcggtgtttggcctggcctcggtgatcggccaggtattgggcggcatcctgatttccgtagatctgttccatctgggctggcgggccattttcctcgttaacctgccggtggcgctgctggtcatcctgtttggcctgccgttgctgaaagaaacgcgggcgcagtccgcacagcggctggatcccggcggcatgctgttggcaacggcaacgctgagcgcgctgattgtgccgttgattgaaggccgtgaggcgggctggccctggtggacctggctgttattcctggcggttccgctgctggcctcgctgctatggcgttatgagcatcgccttagccggcaaggcggttcgccgctgctggatccggccgtattacgcacgccggggctgggccaggggctggctatcgttctgctgttttatgccatcgccgcgttctttcttttgttctcggtgtatctgcaaggcgcgctgcagatcaacgccctgagcgcgggcctgctttttctgccctttggcgtcggctatctgatcgggccgttgctgacgccctacctgcggcgttttgccggcaattacctgagcgccatcggcatgggatgcgagaccgcgggattagcgggcatggcatggctggtcaccgcgacgctgacgggcaggcctcccgccctgctgccgcttgcagcgctgctttttgtcaccggtcttggtcaggggctggcgatgccgacgctggtgcgcatggtgaccggccgcgttgcgcccgagttttcaggcatgattgccggcgtgaccagctcgacgctacaaatcagcaccgcgctgagcgtcgcggtgatcggcggcattttttacagcacgctgggtgacggcgacagcgcagccgctatcacccatgcctttgtcgtcgcgctgctggcgatggcgctgtgcctcgccacgggcgccgggctgagtatccggcttatccgccgctccgccggtttgccctccgccccggccaaccttgccctcaagtaa

SEQ ID NO: 455371 - DNA, 747 bp, Serratia marcescens
atgaacaaattaaaagacagagtcgccatcgtcaccggcgcctccaaaggcatcggcgcgggcattgcccgccggctggcggctgacggcgcgcaggtcatcgtcaattacgcctcagacaaaagcggagccgataaggtggttgccgatatcgacgccgccggtggccaggccgtggcggtagcggcggatgtcaccaaccaggcgcaggtcgaggcgttgatcggcgcggccatcgaacatttcggccggctggacattgtggtgaacaacgccggtatctatcagtttgcccggattgaagagagtaccgaagcgctctaccgccggcagttcgacatcaatgtgcttggcccgctgctggtggccggcgccgccgcgccgcaccttggcaagggcggcagcatcatcaatatcagttcgttcgtcacccgcgtctttattgccgagagcgccatctacagcggcgccaaaggcgcgattgacgccatcaccggcgtgctcgcgcgcgaactcggcccccggggcatccgcgttaacgcggtcaaccccggcctgatcgaaacggaaggcagccacagcgtcggggcgatgaactcggagttccagacgtggaatgaaagccagacgccgctcggccgcattggccaggtgcaggatgtcgccccgatcgtcgcctttctcgcctcggacgacgccggctgggtcacgggcgaggtgattctggcctccggcggcatgcgctga

SEQ ID NO: 455372 - DNA, 870 bp, Serratia marcescens
atggagtggggcgacgtccgggtatttcttgcggtaattcgtaacggttctttcggggaggcggcccgcagccttggcgtgagccatccgacggtggggcgccggataaaagcgctggaggatgaggcgcagcaggcgctgttccgccggacaagggacggactggtgctgacggacgccggcgacgccgtgctgaagctggcggaagcgatggaaaattctgcgctggcgatggagcggcgtctggcgggcaatcacgaacgtctcgaggggatattgcggatatcttccgcggagtggtttgccaactatgtactggcgcccgtcctgggtgagttggcgcgccgccatccggcgattgtgccggaagtcatcgccagctaccgtttgctcaacctgtcgcgccgtgatgccgacgtggcgtttcgcatcgtacccttcagcgaaccggatattgtccagcgccgcctgatgagcatgccttatgcgctgtatggcacgccggaaaccgcacatatcgcgcagcacgatccggcggctgcggggctgattctgatgaatacggcacagtcccatttttctgacgtcgcctggctgctcgacaggttcccgcagtcacggcgtgtcttcaccagcaccagccgggccgttcaggcgcagatgtgccggcggggaatggggattgccgtgctgccgcagccgcttggcgacgccatcgacggattgcagcgcattggcacgccggagccgccgccgtccaaagatatctgggtggggtatcactacgatctccggcatatggatcgcctgcgagccatgctggatatcgctgatgcgttgctggcggatcccgcgccggcggcgccgtga

SEQ ID NO: 455373 - DNA, 912 bp, Serratia marcescens
atgacacacaccgcagaattcctcatctttggcgctaccgggcagcaaggtggcgcagtggcccgcgcgttacggcgggccggacgtcaagtccgtgctttcgtacgggatccgcatagcgaaatgtccagggcgctgacgacagaaggtatcacgctcgccatcggcgacttgttcgaccgcccctccattgaccgtgcaatggcgggtatccagggcgtatttagcgttcagaccagttctccggcaggcgagataagcgacgagcaggaggttatacagggaaaatccattgccgatagcgccctggcggcgggtgtccgccatctcgtctactcttcgtccggggcggcaggaaaaggccctaccggcatggggcattttgacagtaaatcaaaaattgaagattaccttcgcgccttgccgctctccacgaccgtcacacgtccggcaagctttatggaaatgatgctgctgcccggcatgggacttaacagcggcaactttttcttctttatgcaacgccatcaggcgatgcagatgattgcgctgcaagacctggggcgcattaatgcccaaatcctgtgtgatcctgaacgttatcgggagcagacgctggaactggccggccaggcgttgaccggtgaagacttgcagcgtgctttctcagatgccgccggccatcctgttcattatcaccgctttcctgacgagctgttggcgcagaacacttttcttcgccagctcacggcgttggtagacaatggcattgtcgcaggctcggcggatataccggcgctcgaacaggagttcggtatgatgatgacgctggagcaatggctggccgggcccgccaagcagagctttaacgcggcgcttaacgctccacaggccaatctcgtcctgcgatag

SEQ ID NO: 455374 - DNA, 285 bp, Serratia marcescens
atgcgctttagcgccatccgacgcggtattcctgacatttcgcagcgtatgttgaccctgaccctgcgtaatctcgaaagggatggcctggttgtccggtattattaccccgagcttccaccacgggtggaatatcaactcactgaccgaggccggtcgatgctggaaccgctggcgggatttaccgactggatcagggatacctggcaggatattgaggcatcccggaaagccttcgatgattcagagggcaagggggttgctgtgcccatggcccgctcgtaa

SEQ ID NO: 455375 - DNA, 381 bp, Serratia marcescens
atgtcagcacagttaacaatactcacgcaatcgggtctggtaaaagagcgattgcatacccttctgctctggggtattgccgaagatctttctcagcctgagcagcatgatgcgatggtcttattttcagccctggagatgggcagtaaagatgaggtcgttgctagcctgaataatgaatatcgtcagcatttagaacaaacgttggtggcggtgtttatcgaagggcaacgaagcggtgagctaaataataaagcatcagccgtcgaaatggcgagaggctttatggcaggctattacggtttacgtgtactgaataaaaacatttcagatagaaaaatcctcgaagatgttgtcgctggtctgttaatcaatttataa

SEQ ID NO: 455376 - DNA, 1155 bp, Serratia marcescens
atgccattagtcgtatatgttttagggttggccattttttcattaggtacagcagagttaatggtggcgggtatgatgaccacgctatcggaagcatttggtgtcactgtcggcgaagtcgggcatttgatttcatattatgcattcggtgtaatgctaggtggcccggtattaacctacgcttttcttaaatttaaagcaccctatagctcaacgttattatggctgttagggttatatgttatcgctcaaggattaagcgtctttgtctctgattacaatgtgttagttgctattcgaatcgtgacaggtattttgtgtgcagggtgtttaagtctttcactcgcgacaagtatggttcttgtctctgtagaaaatcgtcctcgagctgcttcgatagtaatagcaggttttatggtatctaatgtctttggtgtgcctatcgcgacaatcattgaccagcactggggctggaaaatgagtttcgggctggtcgcggtcctggttttcatatgcctgttagcattaatacgcttattaccacatatgagcggcggcagtgctatcaaaatggctgaagagattcaggcatttaaaaataaagcctattggaaagcctgtgcaaccagctgtttgattttgggcgcaagttttgcggcattcagttattttgttcccgtgctgactgatgtcagtgaatttacaatgcagacggttcccttcattctgatgctttatgggctggccaatatcatcggaaatatggtcacgggacgtcttgcatatcgccatagtttagctgttatggttatcggtttaacaatattgagtatttctttgctcggcatggcactatttgttcaatatcaggttattgctattctggcggtcatactcatcggtttatcaggcgtgccaatgaatccggcaatgatggcaagaattgtcagcgtggcacatccgggcccaatggttaatgccgttcatacttccgttattaatattggattaggtggcggttcttatttaggtggaatggcaatttcatcagggttaggtttacgttcagctttatggattggaatggtattagcggttctggctttattatccgtattaccttatgtccgtcgcagtaagcaaggttggagttaa

SEQ ID NO: 455377 - DNA, 771 bp, Serratia marcescens
atgaaatacagaattaatggacagattctttttgatacggacagcggcagtctgggattggcgggttttccggaagaatccctggctatttctaacccgtcaaagcggctattgctgttacttattgctcaccacggcgagcaggtcagccgcgaactgatattccgcaaggtgtgggatgattacggcatggtgtccagtaataataaccttaaccaatgcgtaagcaaattacggcgggtgttaaaaacgttgggtattgatgacgaggttattattaccgtacccaaagtcggctttatgctggcgcataatattacgttggaggcagacgagacggtcatcacgtcgccgcagagcgtagcggtcgagcagggtgaagtccgagccgtgccccggcgcgccgccgggcggcggttgcgttgcggcgtggcgctgggtgtgttgctgctgctggtaatctgcgtcggtatctggctgatttatcgtaacagcgcggtcagacaggagcgtttaattggcgaggtgaataactgcaaggtctttttatcagcgccgcgcgccgcgatgcatggcaacgcgcaacaggttaacgatatgctggcgtatattaacgcccatccgcagcagtgccgcaatgacgagtatttactgctgctcagcagtaatcaggtgggcacctacattaaaggcgtttcccggctgtttattttaaaatgccgggtggcgcgtgaataccgcgttgaagtttgccacagtcaaaaagagtag

SEQ ID NO: 455378 - DNA, 2493 bp, Serratia marcescens
atgaaacagtgggtgccaaaagcattgggttgcaagctctctgtgacgatcgtggtttcggcctgtattgctccggccggcgcggcggagccgcaggaaaatcaacagccgctgtatcagtttaacgatggctttatcgtcggcagcaaggaaaaggtcgacctgacgcgctttagcaccgtggcgatcagcgaaggcacctattctgtcgatgtctataccaacgacgagtggcgcgggcgctatgacctgcagatcacccgcgataagcagtccaaactgggcgtctgctacaccgccagcatgctgtcgcagttcggcgtggcggtggagaagctcaacgaggcgctgagcaaagacccgaagttttgcggccgcctgagcgagtggcgtcaggacgacaacctgaaagacagctttaatcagtcttcgctacgtctggatctgtcggtgccgcagatctatgaaaaccgcatgtacaaaggttacgtcgcgccggagttctgggatgaaggtatcccggcgctgaacctggcctataccgccaactactacaacaaccatgtttccgccgcgcagggctcggatgactccagcgcttacctgggcatcaatgcgggcttctcctacgacggctggctgctgaaacatatcggcaacctgaactggcagcagcagcggggcggtgcgcgttggaactccaaccagacctacctgcagcggccgatcccgcagatgaagtcgatctttaccggcggccagttctttaccaacggcgagttcttcgacagcgtcgggctgcgcggggtgaacctggcgaccgacgacaacatgttcccggacggcatgcgctcctatgcgccggaaatccgcggcgtggcgcagagcaacgccctggtcaccgtgcgccagagcggcaatatcatttatcagacctcggtgccgcccgggccgtttaacatcaacgatgtctatccgtccggctatggcaacgatctggaagtgacgatcaaagaggccgacggctccgagcagaagttcaacgtgccttactcgtcggtaacgcagctgctgcgcccgggcatgatgcgctacaccttcgccgtcggtaaggccgacgccgacgatctgcgcaacaaaccggcgattgtgcagggcacctatcagtacggcgtgaataacctgttcaccggctacttcggcgtcagcggctttaacgactatcagtcggtgctgctgggcagcggtatcaataccggcatcggcgcgctgtcgctggatatgacgcagtcgcgcctgaagctgaaggatgaggataaaaccggccagagcttccgcctgagctttaaccgcatgttctccagcacgcagaccagcatcgtgctggcggcgtaccgttactccaccaaggattactacaacctgagcgatgcgctgtacaccatcgaccgggagaagagcggcaataaccgcgagatctggcgggagaagaacggcttcagctacaccgtcaaccaggatctgccggagggctggggcggcttctactttaccgggcgcatctccgactactggaaccgcagcggcaccgagaagcagtatcagctgagctacaacaacatgtggggccgcatgacctacaacctcggcgtgcagcgcgtctactcggccagtaacggcggcaacaataaagacgaccgtatttcactgaacttcagctatccgctgtacttcggcgaaaaccgccgggcgaacctgaattcgaacaccgtctttaacaactcgcgtttcggcaactcgcagctgggcctgaacggctccttcggggaagagaacaacctgagctacggcgtgaccacctcggtggcgcgcggcggcgaccacaacgtcggcctgaacggcagctatcgcgcgccttattcgacgctgtccgccagctacagccagggcgagggctaccgtcagagcggtctgggcgccagcggctcgctgattgcacacagcggcggggtgacgctgtcgccggaaaccggcaccaccatggcgctgatcgaagccaaagacgccaagggcgcgatgctgcccggctcgccgggtacccgggtggacggcaacggctatgcggtgctgccttacctgcggccgtaccgcatcaacgcggtggaaatcaacccgaaaggcagctcggaagacatcaactttgataagaccgtcgcgcaggtggtgccatatgagggcagcgtcgtgaaggtgaaattcaacaccaccgttgagaagaacctgacgctgcgcgtgaagcagagcaatggcgaaccgctgccgttcggcgcggatatcgtcgacgaaaacggtaaatatattggcgtggtcggccagggcagcacgctgtttatctcctcggacaccgcgaagcgggcggtgatcacctggagcaacggccagtgcgccatcgccctgagcccggcctcaactaaggatgcggtatgtcagtaa

SEQ ID NO: 455379 - DNA, 738 bp, Serratia marcescens
atgctgagaggtaaaagagccgttattacaggtggtggcgggggatttggtcaagcgctgtgcgtttggctggcgcgagagggggttgaagtagatttttgcgcgcggcgggtgaaagatattcaaaacaccagcagtatcatcgctgctgaaggcggtgttgcaaatgggtatatatgtgatttaacccagcctgaatccattgctcaattttcctcacggctgttaggcagagaaaaaccgatagacattttgatcctcaatgctgctcaatggctgtcagggacagtagacgaccagccggacacggaaatcatcaaaaccatcagttcaggcctgacaggttcaatcctgctaacgcaggcactgctgccaggattaaggcgctcagacagtgctgacatcgtttccattatatctgcatgcggtattccgaattttactgattcaattgctcaccccgctttttttgccagtaaacacggacttagcggctttacaactaaactgtcagagcaattgtctaaagaaaatatacgggtaaccgggttatatcccccggattttgaactcaccgggttagatgcgatggtcgacagccaatcccgcatgggggagcgtttaatgaatggacgctctgtctgggaaacgattcgttttgtgttatctcaaccgcgtagctgccatattggcaccatctactttcaaggccccactcgcgaagatttgatatcttag

SEQ ID NO: 455380 - DNA, 783 bp, Serratia marcescens
atgaacgcatttgatccgcaagccgaagagtcttcatccgtgatgggccgcagtctgcgccgccgtccgctgacgcgtaaaaaactgtcggagatggtggaggaagagctggagcagatgattcgccgcggggagtttgccgaaggagagtcgctgccctctgagcgcgagctgatggcgttttttgacgtcggccgtccgtcggtgcgtgaagcgctggccgcgctgaagcgtaagggcctggtgcagattaacaacggcgagcgcgcccgcgtctcgcgtccctcggcggataccattatcagcgagctgtccggcgtcgcgaaggatttcctttctcaccccggcggcatcgcccactttgaacagctgcgcctgttctttgagtccagcctggtgcgctatgcggcggagcacgcgacgccggagcaaatggcgcagctgacgcaggcgctggacatcaacagccggtcgctggatgacaatacgctgtttatccgctccgacgtcgagtttcaccgcgtgctggcggaaatccccggcaacccgatctttatggcgatccacgttgcgctgctcgactggctgattgcggcgcggccaaaggtgcccgagcaggagctgcatacgcacaataaccgcagctatcagcagcatattgcgatcgtcgaggcgatccgccagcgcgatcctgacgccgccgatcgcgcgctgcagacccaccttaacagcgtatccgcaacctggcacgccttcggcagcgacgcgccgccgcataagtaa

SEQ ID NO: 455381 - DNA, 909 bp, Serratia marcescens
atgacaaaagaattagcaggggtaatgccggcgttgctgacgccgttcgacaaccaacagcggctggatagcgaaagcctgcgccgtctggtgcggtttaacattgagcaggggattgacggcctgtatgtcggcggctctaccggcgaggcgtttgtccagagccaggcggaaagagagcaggtcctggaagtggtggcggaagaggcgcagggaaaggtgaagctaatcgcccacgtcggcgcgattagcacgcaggagagccaacagctggcaaacgccgcacagcgttacggctataacgccgtctccgccgttacgccgttctattacccgttcagttttgcggaacattgcgatcactaccgggcggtcattgatgcggccgaggggctgccgatggtggtttacaacattcccgcgttgagcggcgtcacgctgacgctggatcagatcgcaaccctggtcaccctgccgggcgtcagcgcgctgaagcaaacttccggcgacctctatcagatggaacagatccgtcgggcgcaccccgagctggtgttgtacaacggctatgacgagatcttcacttccggcctgatggcgggggccgacggcggcatcggcagcacctacaacattatgggctggcgctatacgggcatcgcacaggcgctgcagcggggcgatatcgccagcgcgcgccggctgcagacggcatgcaatacggttatcgatttgctgattaaaaccggcgtgttccgcgggttgaaaaccgttctgcactatatggacgtcgtttccgtgccgctatgccgcaagcctttcgcaccggttgatgagcgctacctgccggcgctggcggcgttggcgcaacagctgcagcaggagcgggagcagctcggcaacggatga

SEQ ID NO: 455382 - DNA, 1497 bp, Serratia marcescens
atgagcatctcaacccgcaacaccccgtggtaccgccacctcaaccgagcgcagtggcgggcgttctccgccgcctggctggggtatttactcgatggttttgattttgtactcatcgccctggtcctgaccgaaattcagggcgaattcggcctgacgacggttgaggcggccagtctgatttcagcggcgtttatctcgcgttggttcggcggcctgctgctgggcgcaatgggcgatcgctacgggcgtcgtctggcaatggtcaccagcatcgtgcttttttctctggggacgctggcctgcggatttgcgccgggttacgccaccatgtttgtcgcgcgtctggttatcgggatgggcatggcgggtgaatacggctccagcgccacctatgtgattgaaagctggccgaaacatttacgcaataaggccagcggctttctgatttccggcttctcggtcggcgcggtggtcgcggcgcaggcctacagcctggtggtgccgctctggggctggcgggcgctgttctttatcggcattttgcccatcgtcttcgcgctgtggctgcggaaaaatatccccgaggcggaagactggcaggagaagcatgcgggcaaagcgccggtgcgcaccatggtggatatactttaccgcggagagcaccgcgtcctgaatattatgatgacgctcgtcgctgcgctgtcgctgtggtactgctttgccggagagttgcgtacggccggcgtggtggcggcgctggggctgatatgcgccgcgatttttatcagttttatggtgcaaagcagcggcaggcgctggccgacgggcgtcatgctgatggtggtggtgctgtttgcatttctctattcatggccgattcaggcgctgttgccaacctacctgaaaaccgagctggcctatgatccgacgacggtggccaacgtgctgttcttcagcggttttggcgcggcggtgggctgctgcgtcggcggctttctcggcgactggctgggcacccgcaaagcctacgtgtatagcctgctggcttcgcagctgctgattattccggtgtttgcgattggcggcgcgaacgtatgggtgctggggctgctgctgttcttccagcagatgctggggcaggggatttccggcattttgcccaaactgatcggcggctatttcgataccgaccagcgggcggcggggctgggattcacctacaacgtcggcgcgctgggcggcgccctggcgccggtgctgggcgcgctgatcggccagcgtctggatctgggcaccgcgctggggtcgctctcctttgggctggcgtttgtggtgattgcgctgattggtctggatatgccgtcccgcgtacagcgctggctgcgtccggaagcgctgcgcacccacgatgctatcgacggccaaccgtttagcggcgcgttgctacggggcgcggagaaacggctggtcaagacaaagggcgcccggccgtga

SEQ ID NO: 455383 - DNA, 924 bp, Serratia marcescens
atggcgggcgtttggcgtgacataggagacgccccgttgccggaacaacgacagattaccacgctggcgatcgaccttggcggaacgaagctggccgccgccctggtggacgagcaattacagatccgccagcggtgcgagctgcccacgccggccagcgatcggccggatgcgttacgggccgcgctgcgggccttggtacagccgctggcggcggatgcgcagcgcgtcgccatcgcttcgacgggcattatccgcgacggcctgctgcaggcgatcaatccgcagaatctgggcggcctgctgcatttcccgctggtggcgacgctggaggcgttgacccggctgccgacgctggcgatcaacgatgcgcaggcggcggcgctggcggaatatgcgcggatgccggacggcggcgacatggtgtttattaccgtttccaccggcgtcggcggcggggtggtgtgccgcggggagctgctgaccggcgccggcggtctggcgggccatctggggcatacgctggcggatccgcacgggccgcgctgcggctgcgggcgtatcggctgcgtcgaagccattgcctccggccgcgcgatcgccgcggcggcgcagggcgatctggcggggtgcgatgccaaaaccattttcacccgggcggcggcgggccatccgcaggccgacgcgctgattcagcgctccgccgcggcgctggcgcgcatgattgcggatgtgaaagcgacgaccgactgccggcaggtggtagtcggcggcagcatcgggttggcgcaggggtatctggcacgggtgagggcatgtctgatgcagctgccgtcgccgtatcaggtgacactgacggcggcttattaccggcatgatgccggcctgctgggagccgcgctggcggcgcagcgccaggaataa

SEQ ID NO: 455384 - DNA, 177 bp, Serratia marcescens
atgaccccgaccgaggccggggtgcgcgaatattgcgccaacaccagggaaaacgtgaacctgcgtattggttttaagtttctgcttgcgcaggttgtagaaaattctgaagcctccgaggaggattcctatacatcatacagccaacaacataccaaatgtaagcgctcttgttag

SEQ ID NO: 455385 - DNA, 237 bp, Serratia marcescens
atggctacaagtattcgtttagacgacgacttcgttagcgatgttaaggtccatgcggaagcttcaagtcgaagcgtgccaaaacagattgagcactgggcgagaatcggccgtattgccgaagacaacccagatctgacataccgcttcatacttgaaattttgctggcgaaaagcgaggtcgaaaacaacaaggtatcgcgctatgtcagaagaacagaacgaaaaaaagattga

SEQ ID NO: 455386 - DNA, 330 bp, Serratia marcescens
atgtcagaagaacagaacgaaaaaaagattgaggtctatcagacccgccgtttcggcaaggctctggataaactccctgaagcgctacaggctatcgttgaagatgaaatcgatacgatcgttgcaaacccgaccattggtgagcaaaagagaggggatttatcattcctgcgcgtgcacaaatttcagctgaacaatcgcttaactctgctgggctatagctgggtagaagataagctggagctttacctattaagcgtggggcctcatgagaacttctaccagcagcaaaaacagcaccgtaaagcggacttaacgcttatcggatga

SEQ ID NO: 455387 - DNA, 480 bp, Serratia marcescens
atgtccataacgctgaccatcgatcaactaaaacaatcgggacgctatcaagaggccgtgacgcgggtgcagcaacagttgcaaaagcagccggcagatgccggcctgcagtatcagttggcctgtctgtatgacgtgcagggcatggagtcgcacgccgtcccctgctacctggcggcgttggccggcgatttgccgaaaagacagcgtcaagaagcctggctggggctgggcagcacttaccgggcgttgggccaatacgcacaatcactggacgcctttgaaaacggtttggcagaattcccgcaggccagagaactgaccctgttccgggccatgacgctgtacaatctgggcgaaagcaaacaggcggtggcggaactgctgctactgctggcagagaccacagccgacgccgatatcctgctttatcaacaggcaatccgccaatacgccgccgatctggatcgcataggttaa

SEQ ID NO: 455388 - DNA, 1221 bp, Serratia marcescens
atggaactgaaggattttgagctgaattatatcgagcagtggttgccggaagcctcggtgaagtataaggacggcagcccggcggtgaatcttgggctgattatcaccgtgttttttaaagacggtcatactcccgaagtccgccgtaagatggtggaatgtgtggatcgctactacgaggaatttaagccgcacttgaagaaaacactacccataaagaaatggacggcaataacagaaaaaaactacgcaaaaatgcggcaggagatactggactcttccccggaagaaatattcagttgggtacttagctcaggaattgaatcctacctggctcctgattacagcattcttattatgggtaaacggattttccataatgataatgatcgctcggtgattaaactggtattcccgttatctttgctgaaagagcctgatggcaaggaacattatcagtcctggctgatgtggctttgtaataccttcaacgttgaaagtggttatgccggattgtcctttattctgccttacgcgtttgagcgaatgttcccctacgaatatgctctggcccagcgcttccccggcgtaatggtagactctattggcactcttgaagggactggagcagctatcagcctgaaaggagcctgctggtataccattctgggtaatccatggctggaaaaaatcggcggtgcgaggacactggctcaccgtctggcgaaaacgccagaaatagagctgctgccctataacagcggcattatcctcaaggccggaacactgccgccagcactgggtgaaacggaaactgaagccctaccgccgttgctggtaaaagtaaaccagttgattaaatccatccggcaggatggccataacggactgcatttttactccgaacatgaaaatttccagtttgagcaagagtcctccatggcgtggtttgcccgcttcgataaagccagtgcggagctggataaggaagatgaaggcaaatcatttgagccggtgcgtatcacctgctggagcggcgtggttgctccgtttgccggacgctgggcgaccattgtcaacggtactatacagtacgctcaaatccgggtcgcacaggttatgcctgattttgaagacaagcatggcaataaacaccgtgcctgctggtcgctgctggagcgcgatgatggcggagacgtcttcgctataagatcggaataa

SEQ ID NO: 455389 - DNA, 798 bp, Serratia marcescens
ttgtcagcccacgtttcagatcccgctttactgcagctgcgctgtctgtcgctggccattggcgacaagccgctgctgtctgatatcagtttcaacctgcgtgcgggagagcggctggcgatcatcggccctaacggcagcggtaaaactacgctactgcgtctgttgaccggcgagttgcagccgacgtccggcgaagtgcggcttgccgggcggcccctgtcacagctgagtcgtatgcagcacgcccgcacggttgcgctgctggcgcaaaatgacagcgcccacccgtaccttaccgtcgctgaatatgtcgctttgggacggctgccgtatcggggagaggagagcgtgcggcaacaccggcagatcgtcgaacaggcgctgctggaaacccgtatgcaggcgctgaggcatcgccgttttgcgcagctttccggcggtgagcggcagcgggcggcgctggcgcgggttttcgcccaaacgccgcagctgctgctgctggatgaaccgaccaatcatcttgatccgctggcgcgcgccagcctgctgtcgtgggtgaaaaataagggtattgcggtaattgcggtgctgcatgatttaccgctggttgcgccgtttgccgatcgggtggcggtgattgagcgcggccgtctgctgcgctgcgacgtgccggagcgtgcgctggccgccgactgtatccgcgcggtattcggactggacagttttgtgatcccgcatccgcaaaccggccgaccattacatatttttgaagcgcctcagcggcgtgcggggtag

SEQ ID NO: 455390 - DNA, 1491 bp, Serratia marcescens
atgaatgaatttgtcaatgccgtcaacggcgtgatctggagcgaggcgctcatttatctctgcctcggcaccggcctgtatttttctttgcgtagccgatttttacaactgcgtcacctgaaggggatggtgcgcctgatcttccagggtaaagcgaatgccgccggggtctcttctttccaggcgctgtccatgacgctggccgggcgggtcggcaccggtaatatcgccggggtggcgaccgccatcaccttcggtggccccggggcgctgttctggatgtggacggtggcgtttctcggttccagctcggcctttgtggaatcgacgttagggcaggtttataaagagaagctggacggcgagtaccgcggcggcccggccttctatattgagaaaggcctgggcatgaagtggtacgcctggatttttgccatcgccaccatcttctcctgcggcgtgttattgccgggcgtgcaggccaactctatcggcgccagcctggaaatcgcgttcggcatcagcccgaacgtgacggcggcgcttatcgccatgctgctgggctttatcatctttggcggcgtgaagcgtatcgcgagctttgccagtaccgtggtgccgtttatggcgctgggttacatcatcgtggcctgtgtgatcgtggcgctcaatattgaccagctgccaggcatcattttgctggtctggaagagtgcgttcggccttgaggccggattcggtgcgattttagggctggctattatgtggggcgtgaagcgcggggtgtattccaacgaagctgcgcagggaaccggcccgcacgcgtcttccgccgccgccgtcagccacccggccaagcaggggctggtgcaggcgttctcagtgtatatcgacaccctgttcgtgtgctccgccaccggatttatgctgctgattaccggcctgtacaacgtccaggggccggacggggccgcaatttataccgggattgccggcgttgccgccggtcccggctatgtgcaaaccgcgatggaaagcatgatgcccggttttggcagctacttcgtcgccatcgcgctgttcttctttgccttcaccaccatcgtggcctactactacatcgctgaaaccaacgttgcgtatctcaaccgtaaaatacaccgcccatggcttaccctggtgctgaaaatcggcctgatggcctcggccgtctacggcacggtgaagacggcggacctggcgtgggggatgggcgatattggcgtggggctgatggcctggctgaacatcatcgctattttgctgctgcgcaagacggcgttcacctgcctgaaggactatgaaaagcaactggcggaaggcgtcgatcccgtcttccatcccgagaagcttggcatcgaacgggcagattactgggtgaacaaccgcgccgaggtaaaccagctgcgtgagtcgacaggaaagattgatgaaaatgcagggcctgcctag

SEQ ID NO: 455391 - DNA, 1398 bp, Serratia marcescens
atgcacgataaatacgatgtactggtgatcggcggcgggccgggaggctatgtcgccgccatccgcgccggacagctcgggctgcgtacggcgctggtggagaaacagcatttggggggcatctgcctgaactggggctgcatcccaaccaaggcgctgctgcacggcgccgaggtggcgcacagtatcgcccatgccgaccagctggggttcagcgtcggcgaggtgagtttcgatctgcaaaaactggtgcagttcagccgctcggtgtcgcaacagttgaccggcggggtcgagtacctgttgaagaagaatggcgtcacggtattggacggcgccgcccgcctgcgtggcaaggggcaggtgacggtggtcgatgccaaaggcggcgagagcgactaccgcgccgaccacgtgatcctggctaccggcgcgcgtccgcgcacgctaccggggattgagccggacggcgagcggatctggacctactttgaggcgctgcagccgccaaaattaccgaaatccctgttgatcatcggttccggcgccatcggcgttgaattcgccagcctttacaacgaccttggcagcacagtgacgctggtggagctggccgcacagatcttgccggttgaggacgccgaggtttcggcggcggtgcgtaaatcgttcgagcggcgcggtattcaggtgcatacccagacccaggtgacgcaggtgcagatcacggcggcaggcgtgcgctgcacgttgcagaacgccgctgccgggcaggtgctggaggccgagcatgtgctgctggcggccggcgttcagcctaacgttgaagggctcgggctggaggcgctgggggttgagctggatcgcggttttatcaagacggatgatgcttgccgcaccaacgtcttcggcctgtatgcgatcggcgacgtggccggcccgccgtgcctggcgcacaaggccagccatgaagggacgatctgcgtcgagatgctggccggcgtcgcaggcgtacaccggcttgaccgtggttatgtgcccggctgcacctatgcccggccgcaggtggccagcctgggtctgaccgaggcggcggcgcgtgccgccgggcggccgatcaaggtcggtaagttcgcctatcagggcaatggcaaggcgctggccagcgcggaggcagagggcttcgtcaagacgattttcgatgccgaaaccggcgagctgctgggggcgcatatggtgggcgcacaggtcaccgaacagatccagggcttcggtatcgcccatcatctggaggccacggacgagagcctgctgtcggcgatctttgcgcatccgacgctgtccgaggccatgcatgagtcgatcctcacggctgtcggccggccgttgcatcagtag

SEQ ID NO: 455392 - DNA, 1515 bp, Serratia marcescens
atgagtgatatcaagacgcttgaaatgcccaagtgggggctgtcgatggaagaaggctcgctcgcgcagtggtatatccgggagggcgacagtttcaccagggggcaggaaatctgcgagatcgagaccagcaaaatcgtcaacgtgcttgaggccccctttggcggcactctgcgccgggtgttagcccgccagggcgatactctgcaggtgggggcggtgctggcgctggtggccgaggccgcggttggcgatgccgaactggacgccttcgccgccagcctgacgacgacagcagcggctgcgccggtcgcatcgccttccgcatctccgcaggccgcgccggcggccgataagcctctgccggcagccgccgccccgtcgggcaacgcggcgcccgccacgggacagaccgaagtgccgggcggcctgcagggcagcaccgatgccgcgcaggtcaatgccacgccccgcgcgcggcgcctggccgccaaactggggatcgatttgagcaaggtgcgcggcagcggacgtgaagcacgtatctccgtggccgatctggagaacgccgtcgttgccgccgggggccgtatcgcatcggcgacgccgcccgcacgctcgggtaaagcgccgcgctcgcacgccgacgacagccaggtggcggccaccccgttggcgcgccgtctggccggcaaactggggatcaacctgcacgactgccgccgcagcggttcacgcgggcgggtcagccgcgaggatgtgcaggcggcggcgctgctgctcgacgggcagccgccggccgctcctgcgcaggaggcgccgccggcggcttttgaagcgctgccgatgtcgggcatgcgccgggcgatcgccagccgcctgcaggcctccaagcagcatgcgccgcattttcgtctgaccgccgatcttgatctggagcgcctgttggcgctgcgcaaggaaatcaacctgggcgcgcccggcgtcaaggtttcggttaacgacctgctggtcaaagcctgcgcgcaggcgctggtggcggtgccggatgtcaacgtacagtttgacgaggccagccagagcatccggcgctttgccgatgccgatatttcggtggccgttgcgctgccggccgggctgattacccccatcgtgcgcgccgccaaccgcaagtcgctcagcgagatttcacgcgacattcactctctggtgacccgggcgaaggccggtactctcaagcccgaagagttccagggcggcaccttcagcgtgtcaaatctgggcatgctcggcgtacgccagtttgacgccatcatcaacccgccccagggcgcgatcctggcgatcggcgccggcgagatgcgggcggtggcgcgtgacgggcagatcgtcgcacgccatcagctgacggtgtcgctgtcctgcgatcaccgggtgatcgacggggcgctgggcgcggcttttctccagcaactcaagctacgggttgaaacaccaagcctgatatttgtttag

SEQ ID NO: 455393 - DNA, 1020 bp, Serratia marcescens
atggctataaaaacctatcgtgaagcggtcaaggaagcgttggcccaggaaatggagcgtgacgagcgcgtggtgttgattggcgaagacctgcgtggcgggcatggcggcaatgcgccggaggaggcgaagatcgaggccttcggcggcgtgctgggcgtaaccaaagggctgtggacacagttcggctctgagcgcgtgatcgacacgccgattaccgagtcggcgatcgtcggcatggccgccggcgcggcggcgaccggtctgcggccggtggccgagctgatgtttatggactttttcggcgtcagccacgatgcgctgtacaaccaggccgccaagttccgctacatgtttggcggcaaggccaaggcgccgatggtgctgcgcggcatgatcggcgccggcttctcggcggcggcccagcattcgcagtcgccctacaatatcttcgccaccacgccgggcctgaaggtggtggtgccgtccacgccttatgacgttaagggcctgctgattcaggcgatacgcgacgacgacccggtggtgttctgcgaacacaaaatgctttacgacctcaagggcgaagtgccggaagaggcgtacgccatcccgctgggcgtggccaactacacccgcgaaggggaggacgtcaccatcatcgcgctgtcggcaatggtgcataaagccaaccaggtggccgacaaactggctaaagagggcatctcggtggaggtggtcgacccgcggacgatttccccgctggatgaggaagggatcctggagtcggtggtttccaccggccgcgtggtgatcgtcgatgaatcggcggcgcgcttcggctttgcccatgatgtcgcggcactgatcgcgtcccaggcgcaccattttctcaaagcgccgattgcgctggtcacgccgccgcacaccccggtgccgttctctcccgccctcgaaaaactgtggatccccagcgccgagcgtatcgaggccgcggttcgccaagtgctggaggattga

SEQ ID NO: 455394 - DNA, 963 bp, Serratia marcescens
atgatgctgagcaaacaggcttcgctgcaggcctaccgtaagatgcgcgagatcagaacattcgaggagcgtctgcatcaggaaaacaccagcggtgacattccgggcttcattcacctttataccggtgaggaagccattgcggtgggggtctgcgaaaacttgaccgatgccgatttcattggttctacgcaccgcgggcatggccactgcattgccaaaggctgcgatattcacggcatgatggccgagatttttggtaaggacagcggtttgtgccgcggcaagggcggctccatgcacattgccgatctgtcaaaaggcatgctgggcgcgaacgccatcgtcggcggcgctccgccgttggccatcggcgccgcgctgacggccaaaaccctgaagaccggcaacgtcggcgtgtccttcaccggcgacggcggctccaatcaggggctggtttttgaagccatcaacatggccgtggtgctgcaactgccggcggtatttattttcgagaataacggctacggcgaaggcaccgggcatgactacgccgtcggcggccgcgatatcgccaggcgtgcggccggcttcggcctgccggcggtgacggtggacggcaccgatttctttgccgtctatgctgccaccgcagaggcggtcaaacgcgcccgcgagggcggcggccccagcgtgatcgaggccaaggccttccgctggcacggccacttcgaaggcgacccggcgctgtaccgcgcagagggggaagtccagcgcctgcgtgaacagcacgacccgctgaagatcttcacggagcaggtcaaacagcagatcagcgcggaggagctggcggcgatcgacgcggacgttgaggcgctggtcgacgatgccgtgacgcaagcccgcgcggccgcctatccggctccggaagatctgctgaccgacgtctacgtttcctattga

SEQ ID NO: 455395 - DNA, 2757 bp, Serratia marcescens
atgaagcaatcggacgttacgggttcccaatctacatcgttggtctcggggcctttacggctgacgcgaggcttgccgctcatcctgacaaaattcgttccgccacgttcttccgcccagttgctgccgcgcccgcgcctgctcgagtgcctcgatcaagtacgcctgcggcgtctggccatcgtttgtgccggcgcgggcttcggcaaaaccacgctgctggcgcagtggcaccggcagttggtcgaccagggtgagcatgtcgcctggctcagccttgatgaggatgacgatgacgtctggcagttcatcccctatctgctgcatgcgctgcggccgctctacgccggttgggacgccgatttttggcagaacatcaaagaccacgcgccatcgagttcccagcagctgctggccgggctgattaaccagctgcacgcctgtccgcacgacctgtacctgatcatcgacgatttccatatgatcaataacgccggcgtgcatgaggcgctgagctatctgctgcggcatgcgcctgcggcgctgcatctgatcgtcggcagccggtttcacccgagcctgtcgctgcgccggctgcaggcccaggagcagctggtggaaattcacgatcgcgacctgcagttcacgctcgacgaaacccgcagctatttcagccagacggtcgccgtgccgctcagcaatcaggatgccctgcggctagtttccgcgaccgagggctggatcgccggcatgaagatcgcctcactgtcccctgagctgcgtgaagaccccgggcagctgatccacacgctgcgcgggggaacgcgctctatcgcccgctatctgcaggaggtggtgctcgacccgctgccggcggaagtgctcgacttcttgctgcagaccgcgttccttaaccggttaaatgccgagctgtgcaacgccgtcaccgggcgcgacgacagcgaagcgatgctggaatggattgagcggcacaacctgttcctgtcggctcttgacgagcagggctattggttccgctatcatcccctgctgcaggaaaccctgagcgcggcattgcgccaccgcgccgatatcaaccttaagcagctgcacgaacgcgccagtcattggtttgtcgaacggctgctgtgggcggaagcggtgcgccatgcgctggccgccggcaagccggtgcacagccccgggcaagatggcgcgagcgcccagtcgctggccgaagagggggatattgatacgctggtatcctggatgcggcacctgccggcgagcgtcgatccgtcgcgcattgacctgcaaaccaatctggcctgggcgctggcgcaccatttccgtttcgatgaatcgcgccagttactcgacagcctcgaccagatggtggcgagccaccgtgacgggatggcccgcagcgccaggatcaagctgcgggtggtgcgcgccatctgcgaggcctttgccgaaaacatccccgagagcctggccattgtcgaaccgctgctggcggaggtgccctgcggcgatacctgggtcgatggcctgatatgcaacattcttagctactgccacgtggttgatcagcgctataccgaggctctggcggtccagcgccacatgcccagcccggacaccccgctggacaatctgttcgtctcggtttaccgcgcctttatcatcgcccagtgccatcttcatcagggcgatctggagaacgccgagcggtatgccggcaatgcgctacgtcaggccgagcgctacaccggcccccactcgaccagcggcgctacgctcgcgccgctgctggcggaaatcgcctacgagcgccggagccttgagtcgctcgaccgcctgctggctgaccggcttgagctgatcgaccgcttcagcccgcccgacgcgctgagccgctgctacacctaccttgcgcgtcaggccatgcatggcggcatgccgcacgaggcagagcggctgctggaacacgcgcagcagctggcggtgtcccgcggctggcaacggttgcacgttctgctgctggccgagcaggtgagagtgcgtctgcagcatgcgggccgccccggcgcagaagcgctgcagcggcaactggaacagctggcgcgccataccgcgattgatgccgaacacccttgtcaacgcgcgatcgcccagcatgcggcactcagccgcagccgcctgctgttggccgccggccagacgtcgcaggcctgcaaactgctggccgaactggtgagtgcccaggaaaagcgacgcgactggctcaccgccgcgcgcctgcgggcgctctgggcggtcgccctgtggaagagcggtaaaaacgcggcggcctgcacgacgctgcaaccggtgctgcagctggccgaacacccgcatctgatgcacagctttcttgatgtcggcgacagcctgcaacctttgctaagccatctgcaggccgaccccgccggtagcccgcagggcgcgcagcttagcccggttaatcaggccgcgcagagcggcgaaccacggcagcagcacaaccatgacgtttcttcgggactcagtgagcgagagctccagatattacgcctgatcgccgagggccagacgaacaaggacatcgcccgctccctggctatttccgcccagaccgtgaagtggcacctgaaaaacgcctacgccaagctcaacgtcaacagccgcacccaggccatgagccgtgcgctggaaatgaatctgctggattaa

SEQ ID NO: 455396 - DNA, 273 bp, Serratia marcescens
atggggatcactgtacacgatatctgggctacgcatatcacgataaaatcattgcaggttgataacgaaaaatactgcgcgctggtgcactatcgagtgcaggaccactttggactggatgatgccgacatcagaaaggttaagtttaatcagtttcgcttcttccgtatctggtttgtacttcaacactataatctgtttggttttaagccgtttatgactaatatggaggcaacggtaaagatctccggaaggcgtgatgagaaaaattaa

SEQ ID NO: 455397 - DNA, 333 bp, Serratia marcescens
atggcattagtaaattgtccggaatgtggcaaagaaatcagtgggtcagcatttaaatgtccgtcatgtggacatcaggtaaggaaaccccagcgttcgatatttggcaagattgtgaagtgggtatttattctgttcaatattttcatgatctatagcgtgtttgccgggctaggcggtagtggcgaggtgattaacaacgcagcgacggatgctgaacgtgcaggtgctgccgttggtacgggcattggagtgatgatgctgggtacgctgtgggtgattggggatattatcattggtatgctggtattatttacgcgaccaaaagcgtaa

SEQ ID NO: 455398 - DNA, 1254 bp, Serratia marcescens
atgcttcgtaaattaagcaccgccaatctggctgccattgctttattgttcaccattatcgccgcatcaactagcttgaccgatagcacgattacgagaaatgcgttttatctggccgttttattcgcgacagccgcctttgccatcagcaagtcatgggtaatttcccgcgatgcagcgttggcctccatggctgtattctgtataggattaagccaagccgtttggctatggcgttttcccgcatccggcatgttagaaacgcataatgaatatctcaccagcgcgacacgtctgttatgcggcgccgtgctcatcatgatgcttggttcgttacatcaccaaataagtcataaagtaaaagtttttgccaagggactactgatcttcggtttcttttatacgtcgagtatcggactctacctgcacgcacaatcgcccgatattcggttgcaaattaatacggtatccacgataaccgcgtatatttacatgctacagtctttattaactgtatatgttatccataaaacatcatggcggtataaatacatagcgataaccattgttatcctattaagtctttgggtgattttcctgacagagacgcgtgcaaccctgttgagttacccactgtttttactgttttttttctgccgtcgccaccatctgacgctaaaaaccattttgctatccggtctgattgtcgtcgtcatggcaactgcggccagccatttattttcaacagcaacggcacggcttaccgatataatcaatgaaatcagtaactaccaaaaaggtaatggcgacacatcactaggctcgcgcatcagtatgtggaaagcaggaatacatacgatgctccaatctccaggcgggcagagcaccgatgtcaggtttgccaacgcaacccaatatatcgacagccatgaagggggaaatccggaagccctgcgcaacatcgcgtatcacctccataatgattttattgaggcgggctctctgcagggtattgcgggcataatcgcattagtatgctttttctcgcttgtgtatctggcccgcagacacatggatacgaacgctatgctgattttgcttatattgccaacgattcttattggtatggtggatacattattcatcgaccagcgttacgtcaccaacctgacgctgatgttggttatctatcttaccctacagccaacgccgcctagcctccctctctaccagagtaaagaaaaaaaggtctaa

SEQ ID NO: 455399 - DNA, 1185 bp, Serratia marcescens
atgataaaacttaaagaatttaacatttctcacttctggagtgagaagaacgttaaaattaaattcaacaaaaaattttccattattaccggtcataatggctcaggaaaatcaactgtcttggagtttttacacgacacattcagtttaatccatgatggaaaaccaatttctttacatacccattgggcatctgaagcaaaatttatagataggcgccttgtcaggaacttcagcttgggaagaaataaggttgaatcgaaagacacaaggcttaaaatccaagaaatagcaaaaaaaggaattggtgaaaaaattgataaaaactttgatgaaatattaaagttcatcaaagacaatctaaattcaaaaaacgaaaaagacaaccatctcgttcaaaaggaaagtggttcatctagtcctgataattactttttctatttgctatacaatcctaaaaacactgaatccaaacttcccagaaccataatgttcagggatgatcagttttattacaatgatagtgttgatgataaaaaaaatctcgaggagcttgatatattcatcaaagaaaacagtataaacaaaacactttacttgttgctaaatgaatttctatctcaagaatcaatgaacaaacaaaagcaaaaacattattcaaaagaagacttaaaaaatgaaataataaaagaattaaccaatacaaaacctaaggaagaaacacctaacactatcatcaaggatcactttatatccagccttgacgatattatagacaaaatttacaataattatcaacgtaacagctctactccttggggacaaaaattttttgaagccctggataaattcatcaccacaactaaccgaaccattactagagatgagaaaggattaatagcctttaaattacctaataacaaggtcgtgaaatggtataatttttccaggggtgagaagaccttagtaagcattttacttaatgttttccttaatagaaacaaagatattatttttattctagatgaaccagacctttctcttcatattgaatggcaagagcttttactaccaacattatcagaactggcctcaagacgtcagtttataatatctacacactcgccagccttaatcggaaatgtagatgagcagtatatcaatataaccgcagcaatggagtaa

SEQ ID NO: 455400 - DNA, 1041 bp, Serratia marcescens
atgagcaactccatgttaggttttaaattaaaatcttcatattatgagaatgctaataaattcatgcatcaagatgcacctcagtggatcgctgtatgggttgagtctgatgatgataagaaactatggtcaccattgctttgtgaaagatataaaaattttaaatttaaaatgaacgtggcatcattatttgatgcagcagatggtaaagtatctgacggatgttgcagaatattcagcctgataaaaaatggacatgttgaacttggtgaaaaatcaatcgcttgtttagatagtgactatagttacatctctggtaattttgattgcaatgagaagtcatggctaaattcaccatttgttttttatacttacgtgcactctaaagaaaacatttttattcaccctgatggtatagatgcaataataggaagggctttaggtgaagatattaatcaacatggcatagatctaacaaaattcattaatgaagtttccatttcattgtctggatatatatacaaattcatatcactctataaagctggagatacagaaggcttttctcattacatgagaaagttcaatgaactaactagagtcttttttaatggattaactatccccgaagatctctcagctgactatacagctcgtattgttaatattttcaagcaatatgatcaagagatagagtcatacatttcagaaaatctgaaaagtaaatcttatgatttaattaaagatagactagatgagatttctattaaagattcagacagtctaaacttcgtaagaggacatgatatatatccattgataatgcaagtttataaaaaaattgaaaatcacatattcaaaataaagagaggcagatactatgccaaacatatcgatgaagaaacaagaaagaaaaaactaagagaattagccaataaaagacccaatattgaggacttaatatgtacaagaagtgacacagcaacaatacctatatttagcagagtttttacccagctagatggtcttctttgcaagtaa

SEQ ID NO: 455401 - DNA, 381 bp, Serratia marcescens
atgaatattatctcagagtatgcatccatggctgtctggatagttgcaataattattgtttttgtttcttttaaaggagttaaagtaaataaagaaggacgggaggatataaaaaactggagtagccaaagtctatggaagggagacgtaacctccgctaagttggtctcatggaaacagctgcaggcaacacacaatattgattacttctactcgtttactgttgaaagcgagctggacggtagcttaaagcagtacagtgccgcaggagtggttaaagcttcggaggttggcaaattgcggaaagggttagtcgtgacgataaagcatcaaggcgtaccccctaagaaaatcgccgttattggcgttgattttgactga

SEQ ID NO: 455402 - DNA, 615 bp, Serratia marcescens
atggttaaaaattacgaggaagaatcatttaaagttatcagtcgattcattgcattacacttaaccccagaaagattaatgaagatcggggcttttgttgtttgttatggtcagtttgaaacaactttggagcgtgccttatggactctgagagagattgatgtaaaaggagttaggccctttaccgaaaaattgccatctgataaatggttcgagtatttgggaaatggtaatgataaacttagcaatgaatgtaatacagtcttaaatcttgcttctctcgctgctattgatttggctgattataggaatagtttggttcatggatatttattaccgctgggtgataagccttcattcatgagaaatccaagatggcatggtgaacttaggcataaaagaacaggcgatgcatatatcgaagagccactcctagatcttgctattatttctggatggacattatttagggttgttagtctaacagaaaaaatttttgaggatgaatcggcagaactctcaatagttatgttagaaaacgaagtaagagaggcacgaagctgtacaaatgagttacgccatctcagaagtttaatgaatgaagagaaatattag

SEQ ID NO: 455403 - DNA, 789 bp, Serratia marcescens
atggatggtgtttgtaagttatgtcttgaagaaaaagaacttcaggaatcacacagtatccctagaagtttctttaacaaagcaaaaggaaacggcggtcaagttatctctatgcaaaaaggaagggaaccaagaagagaaaatttagatcctaaagaaccaatgctatgttttgaatgcgaacaatttcttagtggtcaatacgagtcttatgggatcagattgctaagaaaccctcacaatattagaaagaactctgatcatattattattagcaacttcgattacaagcgcttttatctatttctattatcaatactttggagagcctctaatgctatggacctgcattattcttcggtggtagggaatcctgattttggggagatgatgaggcactgcattaaacataacattgttaggtttaataataagagtcaggttaaaattgataactttatcaagattagagtgctacggattgttgatagcactggcaatattcctgatcatgtcatcaaatcggtcctcacgaactttgcttttggtgagattgaaagtataaatggcattgggtggtattttatagctgaaggttttatctttcactatgtatgttatcctggtgaaaattactatgatgcccgcactacaagattgaactcacagcttacatctggaagtcatcagaaaatacaaaaagtagaggtatctaaagatagaatgttggcagaaatgtttaattatatgatcgaatgttcgaaaggctatcatcaacaaagagaataa

SEQ ID NO: 455404 - DNA, 201 bp, Serratia marcescens
atgaaaaaagtaactctgctggcagcggaatctgtgattggcggcaagtgtaaaaagaactgcactgacagttttgaatggattggtagcgatccagacaaggtgtgcacccttgtgcgttcctgtacggataaatacggtaagatacaccagacatctatcccagcagtcgacaaagatcagtgccgtgggcatggttaa

SEQ ID NO: 455405 - DNA, 534 bp, Serratia marcescens
atgaaggaactcaaattgaacgtgattaaaggtagcatcgcggcattactgaccgcagcgttggggatgagccagactgcaatggcggatacccagttaaatattaccggtactattaaggcttcaccgtgtaatgtggttaatgatactggtagcggcatctcggtaaacctgggtgataacatccaggcggcgacgttgggtaaggcggatacttttaccgagtggaaacctttccaactgattctggaagactgtccgacaactaccacatccgtaacggcgacctttagcggtacgccatcggatgaaaacgctgatatgtataaaaacaccggcgaagcgaaaaaagtgcaaattgatttgcaggatgccacgactagtaccgtgctgggcaacggtaaacccctgcagcaaactatcgtgaataatgccacgacttataacctgaaggctcgtgcctattccaaagatggtggcgcaacgccaggttctatcgtgggtacggtcatggttgcctttacctacgagtaa

SEQ ID NO: 455406 - DNA, 129 bp, Serratia marcescens
atgctgcgaaaagccatgccggatattgatgatattatttttattgccgggatgggagaatacatgcttttaattaacgcccagaataatagcgccttttcgcgttctgtttccctgcgtgaagcctga

SEQ ID NO: 455407 - DNA, 1929 bp, Serratia marcescens
atggcggtattgcaaacactgacgagccggtacgttcatctcggcgtcggaaaaaaactcaccctcggcttcttcctgatgctgctgctggcaatcatcatcgccgccaccggcatccactacctcacacagatcgactcccgcgcggaacgcatcagcttcagcaatcagttaaacgaccagatcaaccgggcccgctacaaccggctgatgtatctgcaggaataccagacggagttcctggacaaaagcacggccaatatcaaccaggtggataaactgctcgaccgcggcaacagcctgaactgggatccgcagagccgcaaggacctgaagcggctggatacgctgatcgatgaataccgcgcgcaggaacagaaattcgtcgacgcggtggccgccaaagacgcggtgcgccagagctggaatatgtcggagatccagcagcagctggcgcagacagagcggcagctcggcagcggcgcgctgcagctgccgttcctgcagctcaacagccatctgatgcaggtgcgctacggtgcacgcggcctgctgctgaaccgcaaccgcgcggccgaagcgccgctgctggcagccattgaagaggtgcgccgcaacgcgcaggcgctcaatcagcagctgtcggacagccaaaagccgctgctgcagccgctgctggccgagctggacgattatcagaaccgcgtcaaagcctttatgcccgcttacgaagctgaacgggccgcgggcgcagcgctggagaaaaccacctccgacatcggcacgctgtcgcgcgccttcctgctggatgaactgacgcagaccaataacgatatcaacagcgcgcagttcagcatggggctgaccacgctgatcgccattatcgccgggctgctggtgtcatggcggatgacgctgcaaatcacccggccgctgcacaacacgctggccatcgcccagcgcatcgccaccggcgatctgcgccgggtggaagtccccgaacgccgcgacgaactgggcaaactgctgcaggcgatggcgaccatgaaccagaacctgcgcgatatgattgaaaaaatccagcagggcgtcggccaggtttacaccgccgccggtgaaatctccgccggcaataccgatctctcctcgcgcaccgagcaacaggcggcggcggtggaggaaaccgccgccagcatggagcaactgaccgccacggtgaaacagaacgcggacaacgcccatcacgccaaccagctggcgtcggacgcctctgataccgcccagcagggcggcaagctggtgggcagcgtggttaccaccatgcgcgacatctccagcagttcgcaacgcattgccgaaattaccaccctgattaacggcattgccttccagaccaatattctggcgttgaatgccgccgtcgaggcggcgcgcgccggcgagcagggccgcggcttctcggtggtggccagcgaagtgcgcagcctggcgcagcgctgcgcgcaggcggccaaggagatcgaagggctgatcggcgagtcggtcaaccgcgtgcagagcggcacccggctggtggaggagaccggcagcaccatggagcagatcgtgcaggccgtcggccacgtgcgcgatatcatggcggagatcgcctccgcctctgacgagcagacgcgcggcatcgaccagatcggccacgcgatcgccgagatggatcagaccacgcagcaaaacgccgccctggtggaacagtccgccgccgccgccgactcgctggaagagcaggcggaaatcctgcagcaaagcgtggcggtgttccagctggcggacgcgccgtcccccggcgttacggcgaccgacgcgccaacgccgcgcccggccaagccggcggcccccgcccagaacgagcaggataactggaccaccttctaa

SEQ ID NO: 455408 - DNA, 1167 bp, Serratia marcescens
atgagcgcctatgattttgataaaaacatctcccgccaaggcaccttcagcgcgaaatggaattgtgaaaacctgaccgatgaccaggagattatttccctctcggtcgccgatatggatattgccctgcccgacacgatgattaatccattagttgagcacagtaaaaaaggcatttatggctataccttgctgagcgacaactggcatcaggtggtttcacaatggatgctgcgccactatcagtggcaggtgccgccggagcacgtcgtcttctgtccgcgggtcattcaggccgtctcgctgtatatccagaactttaccgcccccggcgacgccatcgtcagcctgacgccgtcctaccacccgatcgtgcaggcggtgaccctgaaccagcgccagctgctggaaagcaccttgcgctatcaggatggccgttacagcatcgactttgacgatctggaaaataaattcaaacgggcgagctgttttattttactgtcgccgcataacccgaccggcaccgtctggccgccggaaaccttaataaaaattgctgaattggccgaacggcatcaggtatttattatttccgacgacgtgcacgccgactttattttcagcgcccagcgacatcagattatctctaccttcagtcactatgtggcgcagcattcctttatttgcacctcgccggccaaaaccttcaatatggccggactggaagtggcaaatattattatcgctaatgataaacaccgggataaatttatccgctgcctggaggccgccggtattcataaccccggctattatgccgtccccgcctttctggccgcctatcagcacggcgatgcatggctggcgcagctcaaacgctacctggccgacaaccgcacgctgctgattgacacgttcagccgccatttccccgcctggcaggtaacccgcagcgacggcacctacatgctgtgggtcgattatcgcgccagcggcctggacgagcggcagctcaaaacctggttccgcacccgcgccggcgtggagaccagctggggctccgacttcggcgcggccggccggggtttcttcaggatcaatatcgccacgccgcgccgcctcctcagcgcggcgctgcagcgcatcgtcaggacttccccgttataa

SEQ ID NO: 455409 - DNA, 486 bp, Serratia marcescens
atgctgaccggcgtccgcacgcaagaaatgcactttgctacgtgggaggaaatcgattttgagcgtgctatttgggagctccacgccgaacggatgaaaatgcgacgtccgcatattgtgccgctctctactcaagtgattgagttgttcaaacagctacaaccgataaccggtcattacccttacattttcattgggcgaaacaatcgtaggaaaccaatcagtaaggaaagtgtgaatcaggtaatagagctgctggggtataaggggcgagctaccggtcacggtttcaggcatacgatgtctactattttgcatgagcaagggtttgactctgcctggatagagatgcagctcgcccacgtggacaagaacggcattcgtggcacttacaaccatgctcagtaccttgagaagcgtcgtgacatgttgcagtggtacgccgattttatcgcgggccttgctcgccagtctcacagccaataa

SEQ ID NO: 455410 - DNA, 1584 bp, Serratia marcescens
gtggaaaatattaatgcaaaaaccgtaagtttggcacagggtggcacggtacaagacgcggtaaaatatattacaccggaaatgtttggtgccgtgggtgacggaagtgctgatgattccgatgccatcatcgcagcgataaatcatgcgatcgatattgacgtaaatgcggtgcgcggtgatggtgtttatttgattcagaaaagcattccttgcaaaattggtgtcgggaccttaaaagacgataataaaaaaattatctctcgagggttcgacctttacttgaacattgttaaggttggtgacgagttcccagaggttccagaaaaatggtgggatgctgaaggggcattctacccgtcccatactggacctgtggataacctaagattacacgttaatgaattttatggtaatcaccgggcgactttttttaaatctcaaggcaaaggcgtatctacaagcctaatttcatgcgatgaaatggttgcatatattattggttttaaaaattacctggatccgacatttcagtcaggtatgaataagatcagagggcggttttggtctagtggttatattgcttgtctgatcggtgggtttggcaagggctatgggaatagtgaatgccataatatagatataaactggtgtgcaagtaatctgtatggcgggatttcgctgcaggaccgctcacagtacgccaacgttaccggtggcacatacgattttaacgcacagcatacgtcgatactgacccttgatgacatagaagttgacgatatgtatagcgttgagtttggtacggatatcaccagcggcaacaaaaagtcatatacattatcgagtctcatgcgtggatatgagggcgagtggcagctaaacgtcaaagaagatggtaatgtcacggatggacagtcaaaatttactgttggtgacgttattactgcgccaggattttcagcaaagatatccaaagtcacggtgcctagtaaaaaaacggcaatatatcccgatatcattatctgcaatagaaccggtgatttcagcaaggctcgggttgctgctgattatgtcggtggcatatatgggcacaatttgtttacatgtgatatctgggggccaagtgcatcacagaatccccgtaatatggcatatcgtggtcttgccgttagcggttcttcctctcatcttgaaatgtatgcaacgcaacacagcgtatcctcgccgttttgctcggtaacttctgaagaaattagaatgaataagagtatatccattcttggtactcataagttacaggggactagcgggaaggtatcagttgcaaacaatgtgttaacctgggcctttagtcttaatggcggaagtaataccccggtgtcgatgtggaaggtatacatatccggtgaggacgctaatatttatggtgagtttacaatgttgaactctaaaaccgaggctaaagttatcagtaaaaacatatcgcatatggatatcaggactgatggacataaggtgttgctgctgcaaagtacggggatagcccggactctttattataatgcgattcgcatgatgtaa

SEQ ID NO: 455411 - DNA, 360 bp, Serratia marcescens
atgaaaagtattccagcttcagtgatccagggcctggttgccgctaaaatcggtgaaaccgttgcgggcaactatgtaaagctgcaggagggatggagtgtcaacaacccgcaaaatcaagccgatggctctgttaagatgaatgtgttctattccgtattatttttcgatctggcagagcagaagtactattccagaatgcaggtaggtaaggtgttgtcaaaggaccagtatggccactatttggttgttcagcagccttttgattactccggatcggactttatgatagacgccctcgattcatggccggttaatgttccctatccaacgttccaggcggaaaggcctcgtggctga

SEQ ID NO: 455412 - DNA, 255 bp, Serratia marcescens
atgtcaaaactgagagttgattataactatatgattaagggtgataagaaagaaggttctttcgaagtagaggatagttgggaagctcttgatatctacgaggcaattgctgaagctgaaagcatagagattcctgtcatcgctcgatatcgtgacgaacctaggcagggagtggggcttacagacctttatgtagaggcatttgatcagtatggggttacggatatctccccgggtacaggaacccacatttaa

SEQ ID NO: 455413 - DNA, 624 bp, Serratia marcescens
atggaagatattgtcaacggccactgcccgccactgcagaggccgttttcctcagtggcacaccacgaggtcattcatcaggcaatggccgatatgaatacggtacttattgccagcgggttaatcattacggcagttcaacgtaccgatgaaagctggctgcatgacaatatgcaccagctcaaactaaactggcgtcatctcatggcacactttgacgaccgtgtcatgcgccatgctcatcaggcaggctttgatttcgcgttcaaacggcggacaacccccacactgccggccggaatttgcctgtgcgtctacgactctcacttcaatactcttgaaattaccgccctggaaaactttgtaaccgataacgtgcagcatccactccacggcaggatgtttaagtacgtgttatataccctctatttttatgcgctagggctgattacacactgcggttgcgatgagaaaacgctgcgaataatagtccgtcaggcgattaatccgcatacgcttcgctactatttatcccatgccggcttaaggcagatccccggcagtatggactgtgtcacacggtttagcacattggaggcctatattgaaaataacgcacgctga

SEQ ID NO: 455414 - DNA, 864 bp, Serratia marcescens
atgatgaaacggctttccttgttagcatttctattctccggcattagcatggcgaacctgccgacagatgcctggcggttgcgatacgatgaacgcggcctgccattgaccgatgtgcggatcgccgacagatttcatacgttaatgctcgacaccggtagcggggagggcgtgcacctttataaataccatttagagcagctcgtcgcgcatcccaatctggaggcgacccggcaaccgccccgtaggctggttgatgtgtttggggaggagaaccaggtttccgtctggaaaatcaagcgattgctgatttccaatattccttttaccgacgttgaggccgtgagtttttccccatggggtctaagcatggggggagaacagccggttaatgaagtcctggggctggggctttttcgcgaccggcgagtcttgatggactttcaaaacgatcggctacaggtgttggatcatttgcccgctgacgttggcaaatggtcagcctacccggtagagaagacgtcttcaggattgcgtattacggccttcgccggcaatacgcccgtacatttgattgtcgataccggcgccagccactccctgttgttctctgaccgtttgtctgccggtacgctgttttctggctgccgtgctattgagccagaggcagacaacttggactgtagggtcaccaacattaagcttaccgataataaagacagacttcgggacgatctggctatcgtaaccggcggagcaacgcctgaagagctggattttgatggtctgctggggatgagattgatgcgcggtcatcaggtgatcatcgatatgcctgaacgcatgctctatatcagtcgttag

SEQ ID NO: 455415 - DNA, 462 bp, Serratia marcescens
atggttaaaataaataataaagcaatatatataattcctctaataggctttttatttctgggtttgttttttttactccggcctgtgaatattgctgcagttcatactaatgataacttcagtgacgtcttggtgaccaatttcccgctaaccgacaaaggtaaaataaactggtggttggcgaataagaataagttaagtgaaaactatggtatacctaccccatctcctgattctgggcgtttttccattactttttgggattttagtgacggttataaaaagaaagaaaaatacgacaggctttgttttactgagatgaagacagatgtgaactgcattgaaaaagatgccgtacttattgtgagtaataaccgtgcgggaagcatatttttcactgtggacaatgggcgctatatgataaaagataatggtgacattgtgaaactgaaagggtggtaa

SEQ ID NO: 455416 - DNA, 840 bp, Serratia marcescens
atggctgcattacaattcccttgtgttatatttaaaactaaaaagataatggatgactatgctgcagacgatatgcagtatggggatttgtcagagtctcaactgaaaaataattttaacttgctagatgtttctgctagagctaatccttacacgctgactaaaatatcaccgtttacccactcccattcgatgtttcctatcatgcgtggggagggagaaaagttaaccaaacaggcatgtacaagaattctttttgatgagttccgttatctatcaagtatcttcgcactttatggtccttataaatacttgattgagaatatgataactcatatgcagaatggtaacggggtaccgttcagtagtctacatctaaatgctgcattgaaagaacaaatactttctgataagacagtgaatagcacgttattgagaattaaaggggctattgaggaaaatatagattgggaaagagggcattatcctgaagtggatagaaatgaaattttaaaggctatccataagggaaggttacctaagtttaacagatttcaggataactttaatggtatggggattactgtgcatgatgtttgggcagtgcatatcacaataaagcatttgaaaataaagggtgaacggtatcatgcgcaagtgcactataaggtacaggatcactttggattggatgacagtgatatcttaaagtcaaaattctataattttcgtttttttcgcatatggtttgtgttacaacgttatagtcaatttggttttaaaccgtttatgacgaatatggaagctacaatagatatcagcggggaacgtcatggttaa

SEQ ID NO: 455417 - DNA, 438 bp, Serratia marcescens
atggggggcgcgattattgacagcgcctgtgcgattgcggccggcgaacgcgatcaaacggtcgatatagggacggttcccgtcagtcagatcatcagtcaggggcagggtaacgccattccttttagcgtgcgcctcgttaactgttcgctggaaagatatgcctcaacgctgcccgactggcagtattttcggatcacctttgacggaccggcggaaggcaacgggtttggcctgcagggtgaagcgaaaggcctggccatccagattagtgatgaacaaggcaatgtggctgcgcccggcgtggcgatgcccaagaacgacattcacccagggaatatgcagctgaattattttgtcaagctggttgggaataaacaaaggctacgtaccggcgattatttttcgacgatcagatttaagctcgattattactga

SEQ ID NO: 455418 - DNA, 522 bp, Serratia marcescens
atgcatcgttattcaagccgcagccggagtatttggccggtgatggggatatttttgctggcgccggttttttcccccgctcaggcggcgacgggcggcagcggcggtacggaaataaaaatttttggcacgttggtggaaccgccgccgtgccagattaataacaaccaagtgatcgacgtgccgtttggcgaggtcggggtcaacagaatcgacggtaagaattatttacagcagatcaatgcgccgctggactgtaaaaccagcgaggtgaaatgggatctctggatggaggttcacggccaggcgacggcgtttgataaagccgccatccagagttccgttaccgatctggggattcatctgatgatggacggcaagccgctggaggtgaataagccggtgctgatttcgcccgccccaacgctgaaatttgaggccgtgccggtaaaaaaagcgggcgcggagctgcctgaaggggtgtttgacgcctctgccacgctgctggtggagtaccagtaa

SEQ ID NO: 455419 - DNA, 534 bp, Serratia marcescens
atgcgaaccgtcatttaccgtcagggcctggcgctgttgttaagcctgctgatccccggcgccgcgctgcaggccaaggagaatttgtatttccacggctcgctggtggccgagccctgcacgctggcgcctgaggatgcagagatcgaactcgactttggcaacgtggtagacaagtacctgtaccttaaccagcgcacggccggaaaaatgttcgccatccgtttgacgcagtgcgatatcaagctgggcagcctggcggatatcaccctgaaagggagtgaaagcggcgcgctgcccggcctgctgcagctggcgggcggcagcctggcaaaaggcgtggcgatcgggctggaatcaaccgaagggaagccgttgccgatcaacaaggtctaccgccaccaactgcatgacggcagcaatacctttaacctgatgggttacgtgcgggctgagcctgacgcgctgaagaaccatacgattacgctcggcagctttagcgcggcgctgacgctgatgattgattatccctga

SEQ ID NO: 455420 - DNA, 1017 bp, Serratia marcescens
atgaggataacggctttgttgctgggagcactgacggcgttagccgttcaggcggagccgaataatacctgctggtctgatccggttaatatcgcctcggtggacattgcgttggcgtctttctccagtaatcgggcgggcgcagaggcacggatgacatattcaaccaatccgcaacggttcagtgctatctgcaaccgaagcgccgcaggctttaccatgacgcattacgttgatatggggccgagtttgataccgtcggatatcaatcccggttattttaaattgagtaatgatattgatatcaggattgctagtgagagcatggattctccggggtataggtatttccctctggctcctccttactcattagaggcaaatggtaggccgcctgtcggacaaggcgttgtagtgaatgatttctatgtcgccgggagtggaataatagatttaagattaaggcgggatattattggcggggcgatcgtggtgccctccaataccgagttgttctccgcctaccggattatgaattctcggccttttgcaccacgtgccagtcgcccagtcgtccaggctcgcacgcgttctggcggacaggttataccggtggcgccggaatgttcgattaatcagggaaatacgatcagtgttaatttcggcgtactgcaaacgagccggatttccagtgaaagccgtagtgacgagttctatagcaaagatatttccttgaattttagttgtaataccagcctgacgcaggatattaaggtgcgtctggtggcagacagcgcagatttttctgccgaccttatccgttccgatcaccatgagttgggattcttgctgaagcataatgggagtttggttaaaccgatgggctcatttatcgcccggattgagaaaggggcggggagtgagagtatcgccttggtgcctgtaaaggatccgcatgtttcattgcagggcggtgagtttcacgcctcggcgacgttggtgattacgtcactttag

SEQ ID NO: 455421 - DNA, 1014 bp, Serratia marcescens
atgaaatggacggtattgctgaccctgttatttttctggttgcctgcccacgcggaaccagataatacctgctggggcgagccggtgaatacctcggtggtggacttgggtaatgctaaattccatggaaataaaaaaggaatgatatcagacgttatcaattactcggtaagaggtaagttaagcggtgtatgcaacaggagtgcaagtaatgctgataatatggcgtactatcgcgatcttggaccgacgttaatccactcccctgattctaacgggacagattattatattataaatgatgatcttgacatggttattatcagcggggggaattataattacttacccaggggggctggcgactggccgttcggtactgttgtcccccctattggtcaaggggtaaggattaatgatattgaaaatgttgccagtaccggacagatttatttaaaacttcgtcgggatgttattggcggggccgttgttattccgtctgatatcgtgttgttttcagtttatccggtgatcaggatgcatgacagcccgcctcgggcaagtaagccggtatttgaggcgcataccaaaacgggtgggcaggtgatccccgtggggcatgagtgttcgattaatcagggaaatacgattaatgttaatttcaatgttttacaaacggatctggttccaatttccagcagtggtcacagatatactaaagatatagcgttgcgctttggttgtaacagcagtctgaatcagaatgttttggttcagttggtggcggataccgctgaattttcatcggatctcatccgttctgataataatcaattagggtttgcgctgaaacatcatggtcagttagttcagccgatgagttcattcggtatccgccttttcaacgggaccggtagcgatgaaattaccctgacgccggtcaaggatcctgacgttgcgttaaccgccggtgcttttaacgcttcggcgacgctggttattacctctatttag

SEQ ID NO: 455422 - DNA, 1017 bp, Serratia marcescens
atgaagttgttaatcggtttgccattgatttttttatcctgctttgttttcgcggagcctgccgatacctgctggggtgagccggtcggcagcgccagcatcacgctcggcaagctgccatttaccagtaataaacagggtaagactgcaacggtcagtttttctgccaaaccggggtcatttacgggtttttgccattttagtgaggaaacgcgccttatcggtaatacaaccctactcggcagcggactcacacgttcaggcatcaatccaggctacttaaaattaacggatgatgtggatgtcaggattgaaataagacaaatcggcattccctttaactttggatccggtggggcaacaagtgttgttgacatattggataatttcgttcctctcccggccggagaacacgtcccggccaagggatttagcgtctcgacttatggtgagatgatttttaaattacgccgggacgttatcggcggtgcggtgattattcctggtgatattgaactgtactcggtgtatgccagcgtacgccgcccagatagggcgagtaagccggtataccgggtaaaaacacaatcatcctcgcaaattatagcgataccgccagaatgcagtattaatcagggaaaggccattgaggttaactttgacaacgtaaaaacaacctcaattcctgacgatattgctaaaagtgaaacgggctacgtcagggatgtggcgttgaactttagctgtaatagcagcctgacgcaggatattcaggtgcgattggtggccgacgccagcaacttttcgtcagcgttgatccgctcgaataaaccaaggttgggatttgtgatgaagcataatggtcaggtggttaaaccttggggatcgttccgatctcggctggaaggtggtaaaagcaatgaaaccattacgctggcgccggtcaaagctcctgaacttaccttacaaggcggcccgtttagcgcgtcggctacgttgattattatgtcgctgtaa

SEQ ID NO: 455423 - DNA, 1764 bp, Serratia marcescens
atggcgtcattgaaagtaacgcatcgttctaacgctgtgttgttatatcagcggctgccggcgctggttttgtgcctgtggtttgtcgttgtcatgcatatttatctgccaaacggcggcggtattggcctgaacctgccgctcaatgtgcttacctggatggcgatggccggagtggcgctggttatttggcaatgccggccaaaaaataaataccttacgacaacgctggccggccgattattttttatcggcgcggcgctgctgtttattccgctggcttatacgcagtcggggtggctggcgcaggccggctggcgtctggcggggctggcgggcggcctgctgttttacttcaccctgtcgcaataccgtatgccgctgcgttttcgtcgcctgcagctgcagatgatgctgtgcgcggtggcgctacaggcggcgctgacgttgtgccagctgttctggccgggattggcgcagacgtggatggagtatgtacccggcggtcggccctatggcattttccagcagccgaacgtgctgggcagctttatcgccatgggcgtggcactggcgctgatgctgtggctccagccgccgtttcgtctgtctggtcgggttgccgaacgctggcgcagccggctgttggccggattgctgctgctgttgccggcggtgttggtctgggtacagtcgcgcaccggctggctggcaggagtagcggctgcggtattcatgctgctggcgtattggcgcgccgcgccgcggcggtgtctggccgccgcattatttatgacgtcgggagcgggagcggcgttggtggtgctcaggttgggcctgttgacgggatggggactgagtcaggtcagccatgtggtctccaaccatgcgcgttacaccatgctgcgtgacacgctggcgatgattgctgaaaaaccgtggtcaggctggggatacggcggttttgagttcagttttcaacatttccgcgtgcatcaggcggtaccgaccgtggtgacggagattgcccgccatccgcataacgagctgctgctgtggtggatggaaggcggcgtggtcgccctggccggcgtcgggctattcatcgccggcggcatcattctgctgcgacaaaccctgcgtctggcgcagggcgagagacgacgggaagccatcgcgctgtttctcgtcctgctgccgctgctgctgcacagccagacggaataccccttttacctgtcgtttccgcactggatggcgtttttgacgctgctggcgatgctggagcggcgcgccatgccggtgatgcgtcgccggcgtttgtcgccgtgctggcgcatgccgctcagccggggcatacaggcgctggcgttggcgactctggtgatgatggtgggggcgttaagcggcggttatacgctgacgctggcggaaagggacggttttcggctgatggacgaagtggacgccatgtcctggttcagcgattgggcgtatcgcgaccgccgtcagtttgaccagcaaatgtcctccctgctgacgtttaaccagacgggtgatgaacggcgcctgcagcagtatgcatcctgggcggagcactatttgcagcgtcgcgttgacgccaacgtttacgccacgctgatccagattttgcagtaccagcaacaggacgtaccggcggaacagcaacgacgcgaggcggcgctgttgtttcctaaggacacgcgttttcagcctatgacatctgatgagggagcgttatga

SEQ ID NO: 455424 - DNA, 921 bp, Serratia marcescens
atgcgagccttcaccgctgacgtaaatatccgcggactttttcgcctcggcgggacgttcagaggccagcagatcgccaaccttcacctgcgccccgtccagcacgtccaacttgccggcgagcgacagccagtcgttgacctgccactcactgcctttaccgctgatcgtcgccatcggccggtgttgatagtcggcatcatccagaccgtagtcgatccttgcccgttcggtcaccaatttagccccgttctccacctgcaccgccgcctgcgactggcgttcagagccgataatcagctttttagcgctgaacgtaccgccgtctatcaaccattcgctggctttatcctgacccatactgaccgcgccggcataggagaccgactgggaaacgtggcgatcgccgtccagcgtcacatcaccgccgggggtaatttgtttaatcagcagatcgataaactgctggccgcgtttaaaggtcgcttccagaaaggccgaatccagcaccgcttcgctgaacatgccggcaatatctttttcggaggtgagtatgcggtaggtctgttcatcctgatagctggtgtagggatccagcatattcaccagcaccttcacgttgttgccgatcgtcgtctgaccgaccaccgccatggtatcgctgcggccgtcggcggcgatatccacgtcataaaacgcgccgtctttaaaggtcagatagctgttgatgtcgaacttgcccgtgctgccgtcgccgggagaaatatggccgccgccctcgataatcgtacgaccgatggtcgcatcgccgcccagcaccgcgccgggatcaacaaacagcgaagtggtaaaaccgatgccgcgtccaaatcccccgatggtgccgttgaggatcagcgtaccgccgcgctcaacgtataa

SEQ ID NO: 455425 - DNA, 852 bp, Serratia marcescens
atgaatgctcctgataaatataaagtatacgccattccgaaaagaaagcagggatatcgaataattgcccaaccatcgcgagagctaaaacattatcagcgtcagttgcaagattttattatattccctaaacataaatgcgcaatggcgtatcgcaaaggattgagtataaaaaataatgcattatctcatgtgaataattcgtatcttcttaagttagacttagagaatttttttaatagtattacacctgatcttttttggagtgtatggtcaagaacttggtctttaccatcaaaagaagaccaattgtttttagagaaattgattttttggcgttttcagggttctttaatattaagtgttggagctccaagttctccttcgatatcaaatttttgtatgtattattttgacaacgaagttgaagccatatgcacgaaaatgaaaataacttacactagatatgctgatgatcttactttttcatcgaacgtaaggaatatattgtttgaaattcctgtgttaattgaaaatatcttgaatgaacaattcaaaggtttgcttagacttaattcgagtaaaactatcttttcatccaaagcgcataatagacatgttactggcattacacttaacaataatggaaaaatttctttaggtagagatagaaaacgatatatcaagcataaggttcatttgtataccttgggtatgttagatgctacagaactcaatcacctaaagggtatgatcacatttgctagattcatagagcccgcgttctttaaatcgcttgaaacgaaatataactcgaatgtgatttttaggcttactcaggagaaaatatga

SEQ ID NO: 455426 - DNA, 231 bp, Serratia marcescens
atgataaatatccgcagcctgcggaggaagtgtgtggcgatatttatcaggagaaaacttacctttattcaggctatttttttcgcgcagactggcggcgcagcgggtaaatttccgctcggcggaaataataaaaaacccggcggatggccgggtgaaattcatcagtattcaacaacagacgtcgacatcgaggggatatcgccggggcagtgtaaccggcgactgtga

SEQ ID NO: 455427 - DNA, 1221 bp, Serratia marcescens
atgcgtttatatcatctggcgttaatacctctgctggtgattactgcctgtaatcaatcaacgagccccccttccagcgtactctcgaccgtaccctatcaacgacaggtggttgttgataactctcggttagaaatatctaaaagtgcgctggaatacaatatccataagattcagacgctgcttggggataaaacaacgctgtgcgctattttaaaaggtgatgcctatggtcacgatctctcgctggtcacgcctgtcatgattgaaaacaatgtctcctgcattggcgtttccagcaatcgggagttgaaaaccgtgcgtgaactcggctttaagggccgtttaatgcgggtgcgcagtgccaacgagcaggaaatgcgccaggctattgagtatgatacggaagagttggtaggcaatctggatatggcgaaacgcctggatgctttggccgcccagcaaggtaaaacgctgcgtatccacctggcgcttaattctggcggcatgtcacgtaacgggctggaggtcagtactcaggccggcctggatgaagcaaaaacgattgctcaattaccgcacctgaagattgtcggcattatgtcgcattatccgcaagaggatgcggcggcggtgcgccaagatcttgcccgtttcaaggtgcagtcccagcaggttctcgctgttaccggtctaaaacgcgatgaggtgatgcttcatgtcgccaataccttcgccaccctaaccgtaccggaatcctggcttgatatggtgcgcgttggcggcgtgttttatggcgacaccattgccagtaatgattataaacgcgtgatgacgtttaagtcctcggtggctgcggttaaccattatccaaaggggaatacggtgggttatgaccgtacttatacactcaagcgcgattcggtattggctaacattcctgtcggctacgccgatggttaccgccgggtattcagtaatgccggccatgtcctgattcatgggcagaaggtgccggtgttaggtaaaacctcaatgaataccattatggtggacgtaacggatgtgaaaggcgtggtctccggggatgaggttgtgctattcggcaagcaagcgggaacggaaattaccgctactgaggtcgaagatatcagcggcgcgctgttcaccgaaatgtcaattctctggggagccaccaatcagcgggtgctggtagattaa

SEQ ID NO: 455428 - DNA, 582 bp, Serratia marcescens
atgagtcatatccttttaatcaacgccggtaaaaaatttggtcactccaatggcgaactgaacaacaccctgaccgatgtcgccgcctcgtttctgcgcgacgccggccatgacgtccagctgaccgtcgtcgatcaaggttacgatatcgacgccgaagtgcaaaaatatctgtgggccgacgtggtgatctatcagatgcccggctggtggatgggtgaaccctggatcctgaaaaaatacatcgatgaagtgtttaccgccggccacggctcgctgtacgccagcgacggccgcacccgttcggacgccagcaaaaaatatggctccggcggcctgctgcagggtaaaaaacacatgctgagcctgacctggaacgcgccgctggaggcctttaccgaccccgatcagttcttccacggcatcggcgtggacggcgtttacctgcacttccataaggccaacgagttcctgggaatggaagcgctgccgacctttatctgcaacgacgtgattaaacaaccggatattcaaaacgatatcgcacgatatcgcgagcatctggcgaaaacatttgcttaa

SEQ ID NO: 455429 - DNA, 735 bp, Serratia marcescens
atgttattaattttgcgtgccgttttcgtcactctgttctgtattctggtgtgcattttcggttccatctactgtttgttcagcccgcgtaatccccgccacgttgcgacgttcggccacctgttcggccgcctgtcgacggtattcggcctgaaggttgagatccgcaaaccggccgatgcggcgcagtacggcaagtgcatctatatcgccaaccaccagaacaactacgatatggtgacggcgtccaatatcgtgcagccgcgcaccgtgacggtagggaaaaaaagtctggcgtggatcccgtttttcggccagctgtattggctgaccggcaatctgctgatagatcgggataaccgggccaaagcgcacggcaccatcgctcaggtggtggatcagattaagaaaaaagatatttccatctggatgttcccggaaggaacccgcagccgcggtcgcggcctgatgccgttcaagaccggcgcgttccatgcggcgattgccgccggcgtgccgatcgtgccgatttgcgtgtcgaacaccagcaataaaatcaatcttaaccgcctgaacaacggcgaagtgattgtcgagatgctggagccgatcgataccacccaatacggtaaggatcaggtgcgcgagctggcgacccgctgccgcgagctgatggcggagaaaatcgcccgcctagatgaagaagtcgcgcagcgcgaagccgccaaaaaataa

SEQ ID NO: 455430 - DNA, 1416 bp, Serratia marcescens
atgtcactcagtcgacgtcagttcattcaggcatcgggtctggcgctgtgcgcgggagccgtgccgctgagggctgaagcgagcggagcgcaaatcccgttaccggtccccccgctgttggagtctcgccgcggtcagccgctgtttttaaccctgcagcgcacgcactggccgtttatcgccaaccgcaaggcccccgcctggggcatcaacggcatgtatctcgggccgacggtgcgggtatacaacggcgacgacgttaaactgatttacagcaaccgcctggcggagccggtgtcgatgaccgtcagcggtctgcaggtgccgggcaccctggtgggcggcgcggcgcgactgatgtcgccgggggtggactggtcgccggtgctgcctattcgtcaggcggcggccacctgctggtatcacgccaatacgccggagcgcatggcgccgcaggtttacaacggcctggccggcatgtggctggtggaagatgaggtcagcaaatcgctgccgctgcctaaccactacggcgtggatgatttcccgctgatcgtgcaggacaagcggctggataactttggcacgccggagtacagcccgccgtcgcagggcggtttcgtcggcgatacgctgctggtgaacggcgtgcagaacccgtacgttgaggtgtcgcgcggctgggtgcggctgcgtttgctgaacgcctccaacgcgcgccgctatatgctgcagctgagcgacggccgtccgctgacggtgatcgccagcgatcagggctttctgcctgcgccggtggcggtgcagcagctctctctggcgccaggcgaacggcgtgaggtgctgatcgatatgtcgaaaggcgaggaagtgacgctgaacgccggcgaagcggcgggcattatggatcgcctgcgcggtctgtttgagccttccagcctgctggtgtccacccaggtgctgacgctgaaaccgaccggcctgctgccgctggtgacggataatctgccgatgcgtctgctggcggaccagctgttggacggcggcgtcagccgcacgcgggagttccgtctgggcgatgacgtggcggggattaacggtgcggtgcgcgatgtgaaccgcgtcgatctgcagacccagcaggacagctgggagcgctgggtgatccgcgccgatacgccgcagtcgttccatattgagggcgtgcagttcctggtgaaaagcgtgaacggcgcgcagccgatggttgaggaccgcggctggaaggataccgtttgggttgacggcgaggtggagctggtggtgcactttacccagccgtcctacgatcacttcccgttccagtattacagccagacgctggagctggccgaccgcggcagcgccgggcagtttgtggcgcagccagcaggttga

SEQ ID NO: 455431 - DNA, 723 bp, Serratia marcescens
atgtcaggcatattaaccggcgtcgccgccgcagaagggcacatcagagaccggctggaacgtgaactgcgtcatttccacggcgtaaaatatgcctacctgcaggttaataagcagcatgccgaaaagtggtttctgacctctaactatcccgagccatggctggggatttaccggaaacataattacccagcatgcgatcccgtggtgcaggcgggccgctctcaggtcgccccattctcctggcaggaaaccagcgtcaccgcgcaagccccgcattacgagcacattttcagccagtcgcaacgctacggcatcctgcacggctgtaccttcatacttcacgatcataccggccacgtcgcgctgctgtcgctcagtacgccggcagataaccaccatagcgtgcgacaactgctgcaccaccaccgacagcgtctgcagatgctgctgatcgatacccacagtatggccgtcaacgcgctagcggttccgccacctcccggcatcgcgctgtcgccgcgcgagaatgaaatcctttactgggccagcatggggaaaacctatcaggaaattgcccagatactgggaattaaaaccggcacggtgaagttccatatcggcaacgccgtgaggaagttcggcgtactcaatgccaaacacgcaatacggctggggattgaacagcggttaattgcgccgccgcagagcgtcagccaataa

SEQ ID NO: 455432 - DNA, 642 bp, Serratia marcescens
atgcgtaagcttaatagaatgcttgctaattcaccccaatgcttgggtaattattcttatctggtgaataaatggggtgatttaaccaaaaagcaaatggtctgggatgagttagataaatttcaagataagatttgtgtttattgcgaaagtgttgcggagaaaggtaatggtcacatcgagcatttcttccacaaggctgatgcacgattcactaatttaactttcgattggggtaatttatttggttgttgttcttcaaacttacattgtggtcattataaagatcaaattttaacaggtggggttaaaaggcaatatgacccttatgctttgattaaacccgaccaagaagatccagaagcttttttgcaattcctagaaagtgggaagataaaagccaaagacggtatcaatgatgcgatgaaagagagagcgtcaaaaacgatcactgctcttaatttggattgctctgcactaaattcttcgagagaaaatcaaattgataggtttaaaaaaagattgttagctttaacaaatattgatgatgaattacttttaactgaggaatataaccgaataaaaatagaagccatgagttcatttcatagaacggctttaaaacagtcactctcttggtga

SEQ ID NO: 455433 - DNA, 1236 bp, Serratia marcescens
gtgaattcagactcggaaagatttgcagagataaaatcgcaactatatttgagcccacattctttatgtgaggctgctctcaggaaaagttctaaaatttatacggaacatgcatttagccatattgagtcattagaggaattaggtgagctttatagggttttatcgagctcaagaaatgatagaggaaatgaaaatatcactcttcctgtttttctgtactattctgtagacagaaataatattaaagctaatagaacttttgacgaaggaagtatttccgtttcaacggaaagattttcttcatatgataaaaaatcattagatggcccatctgatttttctggattcttggaatggtttatactcattgataatcttgcagatagtaatttgaaaagtagtattgaagcttcagataaaagaatttcaagtttaaaaaatgctggagcctgtgaaaaggaacatgatttacatggtctttatatcaatgaattagccgagcaccaaaaactatctcaagctttagagaataaaaaggtttatttaagaaagattgatctcattaagagtgtcatcaaaaacgcaattcctggatttaaagatatctatgttgataaaaaaacaggccgagcggaagttatgattgcaattgatgatgagagaattaacatcacacaaacatctcaaggacagcaagtcttggtttcactcatcactgatatagctcgacgtattttaactttgaatcctaatttagataatccattggattcttacggtattgtagtgatagatgaaattgaacttcatttacatccaaaatggcagcaaaatgttgttaatgccttactaaaatcttttaaaaacgttcaattcgttataacgactcacagcccacaagtattatctacggttgataagaagaatataagaatgtttgttaaaaatgatcaagggaaaatgagatctgtctctcctactttccaaacaaaaggtgttaaaagtgcggatgtgatggcccgtataatgggtgctgattcaatccctgatgtcaaagaagcaagagatgttgatgaattttctcaattgttatctgaaggtaaaaaagatgatgcgctttctcttttagatgagttaaagcttcattttggagaagagcatcctgttattcttgattgtgaaaactctataaaaatttatgaattaaaagaaaggattaggaataagggctag

SEQ ID NO: 455434 - DNA, 141 bp, Serratia marcescens
atgataaatgcccaatccatgaaggtgttcaattgcagctatcaacttattgataatggttattttttcctcctgcgccactttcacagtatcaaaaaaatctccagtgcatttgtcagtaacaagaaagaggctagatga

SEQ ID NO: 455435 - DNA, 507 bp, Serratia marcescens; identical to SEQ ID NO: 455248

SEQ ID NO: 455436 - DNA, 459 bp, Serratia marcescens; identical to SEQ ID NO: 455247

SEQ ID NO: 455437 - DNA, 228 bp, Serratia marcescens
atgctttcatacaccgggttgcccgccgccagcgcatccgccgccgccgccaccgagcgctcgttctgcgtcgtcgccacgctggcgaacgcggtatcgttacgcgccacgtcggccgtcagctggctgccctgcgtcgacagcgtggcgtccaggaacggcgagctggtcgtcgcgccgtcaaactgcccgctgatgccctgctgcgcctgcagaatgtcatactga

SEQ ID NO: 455438 - DNA, 645 bp, Serratia marcescens
gtgttgtcgttagttggattagcagtgcttattctcgggttcatattaagatttaatccactattggtagttgcggctgctggggttagtgctggcatagcttatggatcgtccatagttgacatcattagttcggtaggtaaatcattttcaaacagcaggtacatggggttcatttggctctcactgcctttaatctgcctcttagaaaagcagggattaagaatggcagtgaaaaattttgcgactaaaatgaggttcgcaaaagcaggtaagattctggcttcatatctattcattagacagttatctactgcaataggtctatcatctcttggcggacaagctcaaatggtaaggccaatacttgtacctatgatcgagtctgtttctagtaaagagggaaagaaattagatgacagagcgagagacaatttacgcgcaaaagctgcatcggtagataatgttgctgctttttttggcgagtgtttatttgttgggatgccttctattttactcattaaaagctttttgggaaattacggtatatacatggatcctatagcaatcattgtttggggtttgcctacagctattgttgctttaatagttcatggctatagaatgattttattagacaaatag

SEQ ID NO: 455439 - DNA, 189 bp, Serratia marcescens
atgattgacccacgtacaccttccggcaagctgaccctccgctaccgtggtctccctacacgtcacctcatgaccctccttggtatcgacccagaagacaccgaccatccctactacacgcgggaccagttgataggacttctggtcgataagggtctcaatgaccagcggaagaacaacgctagttaa

SEQ ID NO: 455440 - DNA, 492 bp, Serratia marcescens
atgagtaataaacaattatcgaccaaccaaatcgcctacctgagccgcgctatgtctgacggtaagggcctcatcgaaatcggtgagttggctcggggtcttgggaaacgaccagacaacgttaagcgtaaactggagaaagcattcagtgctgaacagcttctcaaaatgaggacctgtaaaaccgtgactgttaataatggtgcttctcagacaatctctacctacatgctcgactataagaccgcaggcgctctcgctatgtcgtatgacctgcaattaggcatcgaggtcttaaccatccttgaggattccttgagcaccatccaagcgatgaccatcgaagctgccaaagataactccgctggcgtcctgaaagccgctgctagtttccgtgagcggcaccgtgagcgcttggagttccgtccgggtgcctctgagaatgaggaccgcagcgtggcccttaaacgccttggacgtaaggggctgtaa

SEQ ID NO: 455441 - DNA, 504 bp, Serratia marcescens
atgccaatcgccatcaactgctacaccgagtccgacaacaaagaatttttctccgagcaacacaccaccgccaacttccgacaacttccgccccccatctacgacagacctgtagccaagacagggcgtcctcctcgcgtggtcgacaaccgaaaagtccgagcttggttgctggaaaccgggtgtctatcttataagcaactggtggaggaatacccatggtgctgcgatgtgatgtccgggatgtctagacttgacgcaggcggacgcggtggacttccggtttcaaagtctttcttgttcgctgcactactgagcaccgatgccgtattcagtcaaaacaccgagtccgcctatcagcacatcacaggccggacaccttcaccgcgatacatgaggcacgtcaactcagtgctacaatccaccagcgaaatgatgctaaaggttttggctgacaggaaagactttgagtggtgggactacaacgacaaagccttggcgtga

SEQ ID NO: 455442 - DNA, 666 bp, Serratia marcescens
atgcactcggtagactccaagatgcaactcaatgaactgaaggtcaacaaactgtccttctttggtgtggagcttgatgtcatcactggtcatcctgactatgagctgctatttgtagcctcacaggtggctaaggctgctggccttgggtcatcgacggtgcgcatgtacaccaagcgcaataagcctgagggcatcaggtatgaggattgcgtcacaaatagtgacatactggacggtaatggaaagcgtcttcgttccaccacttggctattcagcgaggcatcaacatatcagatgctgcttagagggaccgcaccccaatcagaaccattcagacgctggatagcggaggaggtattgccgtccatccgtaagtctggcacctacgacatcgccaagtcacagacacctgagggacttcagtttgccgatgagctgggagccttaagggcagcacttcaggccaccacggcccggttagagagcttggaggcgactattagtctcctacctcagcagctacaagaagccatcaagactacaggtggaccagtgagcaacgaaccatcaccatacgacggccagcacaagcgtgcagtctggcagacgtgggaccggaagtcttaccttgaggctggctgtgactttgagttgatactttaa

SEQ ID NO: 455443 - DNA, 1293 bp, Serratia marcescens
atgcagcgctatgaccatctttcttcagtcgttaaggccttcctattagataaggacgatatcaccgtggaggagcttagagagtacctgaggtccatggctgagcagttcctgactgatagcgaccctcaaggctattggaacggtgtggacgtggacctcataggggatactcaggcacagctgcgggaggtcgttgcaactcgtcacctgaccattgagcagcatagacacgtagcggaggctctgagtctgctggataaggtgaaggacaagagccgaggtgatgcctctggtctgctggagttcatcagtgatgacgataaaagcaccgattcaggtgatgctgtgggcaatctgaaagatgggcaagcctctagtcctacagaagccacgagagcaccactgaccttgagtcacctcgcaagtctttaccttgctgaacactctgtccagctgaaagcatcaaccttgaagataacgacatccgtttacaagaacctttcggacgctgctggtgagcttgaccttcggacccatacacgggctgaccttgtgcagctgcgtgaggtcttggccgaggaccgccgtaagtccacagttaacggaatgctgaccaagctgtctagcctgttgtcttgggccagattgaacggacacatagacaacgattactcgcagaagctgaagtttgctaaaggggctgagagccaacgtaaggcgtttagtcctgaacaggtgcaatctcttgtagatggggctaaaggtcgctctatcgcctctctggtcgctctggcagctattactggagcgagacgcggtgagctgttgcaactggatgtagaagacatcaagacggaagatggaaccggtattgtttatatcgacatcaacgaagacggcgaaggtaaaagccttaagaataaattcagtagacgcggggtcccgctaactgatggggcctacgggttcgacttgaagtccttccttgagggcctgccagagtcaggacgggtatttgctgacctgaacgagagaacattgctcaaggtgtttaggagactccagcaggagactgaaggctgtgacggtgaagggttggttctccatagcttccgtcactccatggctacggccttgaggtctgcctcagtgtctctggagacatcacaagcaatacttggtcacagctcccagtccatcaccttcgacctgtacgggagagccgggagggagagacttaagacactggccgaggggctgaagaaggcgctactagagaatgaggtctga

SEQ ID NO: 455444 - DNA, 447 bp, Serratia marcescens
gtgaatcacgatccctggcatttatccggccagattattcgctactcctattccgccaaagggccaagcggtgcggacaactcaacgatcctgatgggcggcaatggcctgacgccctcttatctgatcccggcacaggccacaacggcatcacttaacctggctcgcgatgtggcgctggactgggggccggtacaaaagctacggttttacaatgactacagcgtgctgtggaaagatgcaaacggcggttcagactcgaaaatgaacacccttggagtacaagttttcgccctgccggtgatgctgtgggtcgatctgacctgggcgcaaaacgtcaacccgtggggcggtgcagaaaatgccaccggctggaccagcacacaatctgccggcagcaacaaatggtattttcgcaccaacatcaatatcggttattacttctga

SEQ ID NO: 455445 - DNA, 1143 bp, Serratia marcescens
atgcttactgctccaggtgtttatatcgaagaagttgatggattatcactgtccgtttcatcatcagcgacggccgttccggtttttgctctctccgaggcaaaagatcacccctggtgggaaaccacacaacagccactgcgtattaattcattctccgagttggtttcattagcaaagactgacggtgccagcatgtttggtaacgagggtgaatggagccggccgctagctccggccctgcgtgcttattttgcaaacggcggaggctattgctatctctgcccgtatgatcaactggctgatgctgtgccgcagatgaacgatgtcaccctggttgtccagggcggggaacccgcagctacggcggcaattcaacagatttgcacgcccggcagcatgttgttcggactgctggatggtcccaaagaggaaacgctggaaagtgcataccccgaaatgaccccctcagactgcaccgcgatttattacccgtggctgggagcggattggcacctcactgatcgtgatgggacgccgattgaccagcaagacattcatttagtcgcacctagtgcggtggtggccggactgatgtgcaaaaccgatctccagataggggtatggaaagcgccgtccaatgtccctatcagtgccgggttgagtccggtggtcaaaattgggggtgcgatgcaggcgctgtacaccagtccggataaaactacgttatccgtaaacatgatccgcagttttccggggcacggtacgctggtttcgggggcgagaacgatgggcgtttctgggagtaactggggctatatcagcgtacggcgtacttgcgacatggttgaacgtgatatcggcagggcactggagtccgtattgtttgaacctaacggcccggcgacctgggaagtcgtacgcgcgttcatcgataactatctgtttaatctctggcggcaaggtgcgctttatggtgagaccccaaatagcgcttactttatccacattggcgaaaatatcactatggcacaggcagacatcgtgagcggtatcttaagggtgcgtattgggctggcagtggttagacctgccgagtatatgattctggaattcacccaacaggtcgcgaacggtaattga

SEQ ID NO: 455446 - DNA, 450 bp, Serratia marcescens
atgtcagacgaagcagattttattgcatcaaattatcctgttcccggatttcggtttgtggtcaatatcggcggagaggttattcgctgcagctcggtcagcgggctggaccagcagtttgaaaccgcggagtatcgagatggtatgggtgggctattccgcatgaccacccgagcacagcttccttcaataatcctgtcacaagcggttttccctgggcagtgcaaactgtatggatggctgcacaattactctgcaaatactgtggagaaaaaagatattgccattagtttaaccgatgagtctggcaaagtgttgtatgtgacctggaatgtttttaacgcctttccaatcgggattagcggaccaagcctggatgaatccagtaatgaattcgcagcaaaacaaatcacgtttactgccgatcgcattagcgtggtctgtcactga

SEQ ID NO: 455447 - DNA, 513 bp, Serratia marcescens
atgcgggaaatcgttgtggagccatacgatgaaaaatggcctgctatgtttaacgctaaaaattttctgctacaagcattgcttggtgacgtggttaggaagattcatcatattggcagtacgtcagtgcctggcctttcagcaaagccagtgattgatatacttctggaagttgccgatatcaaccaactggataaatgcaactctgcaatggtcgacgccggatacgtttctcgcggtgaaaacggcattgcaggacgccggtacttcattaagggaggggatcagcgtagccatcaagtgcatgcgttttcagtaggggacattcagatactaaaacatctttctttccgcgattatctgaggaaaaacagtgatattgcaagtgattacgctgagataaagcgtacagcagcattgctatgtaagaatgatgcacatcgttatagcgcattaaaaacgaactttatagagcatcatctgcaacgtgctctgattgatctggaacgatag

SEQ ID NO: 455448 - DNA, 840 bp, Serratia marcescens
atgcacaacaccacatatacgcaatgggtaagaaaaaccttgccggccctgacgatcggcgcgttggcgcagggcggacaggcggcacagccgcaggaagagcttgccagccttacttgcttaaagttgtatgctactcgagctaaacgtccgctgtaccagaagcggaaattcataattttgattctcacgccatggacacttcagctatattgcaaactcttctatcgggagcagtcacatagcaggctgaaagattttaacaatgaattgtgtttaaaaatgacagatacaaaaacattaatggctcaagaagttgaagaataccttcttgatatgtggtgggggactattaaatcttcacatgaaaaaaacagaaaaccgattacgttagaatacgatgaagcgctggctgtttatgcatatacaaattgccagccgccattttttgaagatattaatggtgctctacgatgtggaaaacatcattacttggtcgacctcattgactctgcattggaaaaacttcctgtccattctgaaagcgtgacctatcgatgggcaagcattggtaatgatctgcagcttcttctgtccggtggcgtaatgaccaatctggcatatacaagcacaaacctacaaactcgccgttatgaaggaactgattttgataccgattcaatgcgtatatttatgcatttaggtagagacatttctttgtattctgatgataacagcccaggtcttcaagaggcccttatcccaagaggcgcacgctttcgtttactggatcaaaatgtggttgaagaatttatgtacgatttaatgcaaatagcttaa

SEQ ID NO: 455449 - DNA, 159 bp, Serratia marcescens
atgaataccttcataaaaatcttggttcgtcttggcgcagctatcgctgcggtatcccttctgttaggaaaattcagctgggatgagccaatgttcatcacaaattttttaatgctgctcatttgggttcatgcggaatgggactggagaaaaaaatag

SEQ ID NO: 455450 - DNA, 777 bp, Serratia marcescens
atggctttaaattttcacgacaaatatgcaaatgtcatcacttctcctcgcctcggtaaggctccaccagtaactggcggtctgcaggtttttaacttggatggtgagacagctggtattaatcagtggataaaaggtgccggtagcgagattattggcgaaccagagcaagtttctcggtttagcacacattactctgtatttaacagcatcctaacctctttgccggattcacctgaagcaacatttatttctgtcttgcgagtgtgggcgagtgggaatgggacaaacagcacgatcgccggcatttatcctaacaccgggcagactgcgagaggttttgggattgggatgttgtcgtctggcagcctatttgcgtccgcatcatcatatgatggaacagaagctggagccacttctaacatcttggctacgctgccagcgatagataatattccgaccacctgggacagcggtgtgtggcgctgcgtggccgggaaagtatggatggaagacaaccgagtaaacgtcaaaattatggatctgtctactggcgtatcggctcaaaaaacatctgtcgaaaactacgttcgtgatatgcgtaatggcgacgcaagaatttcgatcgggcagggacgtggtggcggtcaagatatgaaaggcgataaagagatggcagcgacgatgatttacaacgctgcactatctgacgatatgatcatgaaaacatatgtatcgttgaaaggttacttcagcaagagaggtattaatttctaa

SEQ ID NO: 455451 - DNA, 1953 bp, Serratia marcescens
atgacgacctttaacaccggaaacaaacttggatctacagatccccgtgatctgtatgacaacgcagaaaacttcgatggagcgatgaacggaaccgggaagacatggactgaccggtttggcaatgaaagacatgcaatggcatcgatagatgggatcattgcatcacttgacacggcaagttttacatttccggataaaaacgctggattagaggctacaagtgttggccaatacttccgtgttcctcatgacggtgggtttatctactatcggcatggtagtgacggtagcgctgtggaggtggccgaactgcttgggaaggaggctcttgacaaacagttggaactgctgactgcagatgaaaggcctgacgttcttgcgactttctctggtgaggatatgaatgtaggcctcatgtttacagctggtggtgatggagtatcaatgttaaccaatgaaatgagtattactccggcgcttgttgaaaactcgactttctttatcgccactggaacccctgattacccactgcttttcaccgatgctgactttaatattattttcggcgtagacgctgaattgaacgttttgaacagcgtatcatcttcggccgtcgatcctgtggccactctcgattcctatgctaactcattagctgctggcgaatcggtgcctacaatgacgttccccgccatcgctgatagacagctgaacattataatcgtttacgggcagtcaaattcggttggggcagatactgcatatgcgcttacgacaacgcctatgtttgggaatctgatgctcggtcagtctgtgcgtggtagtaactattcaagcggttcgacagactatacatatggcccagtggggggaagcaacacgctatatccgcttgtcgaggtcgtccagagcaccacgtggggcgaaacaggtattgctgcaatggtcaatacgctaaaaatgctgcacaacaggcagatgcggatggaaaatgatgaaaatcggctgttcgctggcggtagtgccggggtgtcaggcgcaacgatcgaaaagctaagtccagcggccgggaagtcgtgggggcgttttacatcaatgctgtccgggttcaaagaagctgctgatgctgcaggctactctgtcggttcttgtggcattgtgtatattggcaacgaagctgataacgcaaagacctatgactactattatgatgcgctcggtagcttaagagcggatatggttgacgctgttaaaacgacgttcgggcagaacactacagctcaccttgtgctcacgcagtatggtggccagtttgcgtatgatccgacgaatcaggcaagtgcccgggctattgtagatttctgtgacaataacgcggatgtgtcatttgcgggctgtcatcaccaatacccggggccgggcgcccacatagcaagcaacagctaccgttggcagttctccacaattggcaaagttcttcagcgcgcgatgaatggtacgaagcagccaacgtttcgcatcgtgaaagtacagcacacgggcaataaggtttatgttgcgatgaaggtgccggtaccaccaatcacgttccgcaccgcgtataaccgctgggtggcgacaaactacgacgacaaaggatttactgtcactgatagccttgggagtctatctggtgatgatcttgctgttgagatttccgcgccaaatgttctcactatcacatgctctcgaacccttattggggaggttcgcgtcactctcggcgaccaggaaacgcatgcgggcatacataatatcgcagatagtgacccttcagtttccccatactcatgggagtatcttgctggcacagcgatgcctgagcaagaaaacatcccggatctgaacaataaaccataccaattatacaactggtgcgcgcgcgactcgattatctcggaggaaatctaa

SEQ ID NO: 455452 - DNA, 2967 bp, Serratia marcescens
atgcgtcatccgatcgttgttgaagtgaatcataaagccatccctgcagcagaatggccgctttgctacgttaagccagacgacgatgtccgtatctatccagttccgtatggtactggattggaaatcgcggtgtgggcagctgtagcagtcgctgtggcatcggcagcttactcattgatcatgatgtcgcagttaagtaaagacggcatgtcttcgacggcaaacggggattcacttgatctgacgccggcaaaggcgaactcggcaaagttgggggatccgatacgagaagtgttagggcggactcgagtttttcctgattaccttgtgcagccagtcagccgttttgacaaggaaaacccgcagatctataggacagaaatgttcctgtgcattggtgtcggcaatttcgttatcaaccagtcatcgataaaaattggcaataccccagtaggaagctttggtgatgatgtcagttttacgatatacccgccgggagcggatgtcagcgctgatcgtcgtactgaaaattggtattcatcaacagaggttggcggaacaacgtcaggaactgccggccttgatctggcatcaaccgggcctgattcggtaagcatcaccgccgatgctatcagcgtttccggcaacagcctgacagtcgtcggcggaacgactgatgataatggcgatgcggtgatccccgactcctgggttgttggtactgaccttactattcaggttccagatacctataccgtggcaatagagggcggccgcaacgttatttatggtgattttgcggagctaaaaccttctgttggccagtccgtctctgttacgtggaatgccaccaagctggacttgttcatttctgcccatgagccgggcaagcctgcaataccgggcgagggggggaatgccgccagtattaccgcatctgcggcgccaacgacttatgacttcagcactacgccattgtcctttacgttgacttgggggggggcgagttacgtaatctcgttatcggcaaactatgtgaccatgtcaggcttgactgatgaaattgcagatcagctttctggttctggcctagatgtcgttgccgtagataccaagattgttatcagagagaaagaaagcccattcagcggtaacagcattggatataccgttttgccggaggtgctcttcggcagtgatccagcagttgttgccggcacagcatcaacgggaggaacgccggcagtcagcgagcatatcgcgctagcgtggggaagtgccggtggtgatccatttgttgggatccctacggggctacaacgtattgccattggtctaaagggttaccatttccgtattacggagattgatggtctgacgctaagcgttgaacgtctgatagaaaattcagatggttcgaaaaccgttgatagtggatggccaggatttacaagccgaacgttactcgattccacggttaccggccttaatgataaatatgactggatggggcctttcttatgctgcccagacagcgagaaaaccagtgaaattgaactgaacttcgtctacccgcagggactttgcgatgtaggaagtaaggacggcgctatacactggcatgacattgaaatgacggttcagtaccggttatccagttctgaagaatggacaagcgtcaagctaaagcacggtaacaatactgttaatgaggtcggttataccgaaacaatcacgttcccgaccgccggtaattatgaagtgcgcatgaaacgtgatacgccagtctggggagggacgacgcgagagtctgtgcaatggcagtcgatgagatcgaagctatcggaacgcccgacaagctaccgagatgttactactatcgcgttaacgatccgcaccggtaaccgactggcttcccaatctgaccggcgagtgaatatggtggctactcgcctctatgatggccatacatcgaggagtatcagcggcgccatatttcacgtattgaaaagtttgggatataccgatgaccagatcgattaccagaccataaatacgctggaaagcacatattggacgccccgtggagaaacatttgattgggcggccggcgctgactcaaccagtgctctggaggttttgcagaagatagcaactgcagggatgggctattttcttctcagtgatggtttggcatccgtgggtcgtgaaggtgtaaaaaactggtcaggggtaatcagcccacaggaacaaacagaggaactgcagactagttttaaggcactttcccaagatgatttcgacggggttgatgtcacttacgttaatgggacgacctgggcggaagaaactatccaatgcaggttttccgataaccctacagcgttaaaagtagagagctataagctggatggcgtcagtgatcccgacaacgcatatcgcatcggcatgcgtcgcttaatgaaatatcggtaccagcgacttaaccattcgacgagcacggaaatggatgcgttgtgctacaactatggcgaccggattgtgctgactgatgacattcctggaagccagacaatcagttgcctgatcgtcgaagaacagcatgatgaaagcactgtgaccatgcatgtcagtgagaagcttgattggtcgtttgataacccccgttgcatcatacggttccaggatggatctgcatcacctctgctggtggtttcacgcattgacgattacacgctttcagtagacaacacggatgatgttcgtcttgaagagtggattatggatgatccatcaatagagccacccaggattattttctgctcttcaagccgtgttggctacgatgcgatctttgaatcgatagagccgaactcggacggaacaagccagataaaagccctgcaatacacccccataatctaccagtatgacgactccacatggccaggaaacgtccagtag

SEQ ID NO: 455453 - DNA, 609 bp, Serratia marcescens
atgaagcagcagatcggtaaaactgaccgcatcattattgagattggccggcagatcgtcggcggtaagtatgttcctggtgcagcgctgccgtcagaagcggagctgtgtgaagagtttgctacttcgcgcaatatcatccgcgaagtgttacgggcgttaatggccaaacggctggtggagatgaagcgataccgcggtgccttcgtcaccctgcgtaatcagtggaactacctggataccgatgtcctgaactgggcgctggagcaggattatgatccgcgcctgattgcggcaatgagcgaggtacgcaacctggtggagccgaccatcgcccgctgggcggcggagcgtgccacgtccagcgagttggcggtgttggcgtcggtgcataacccggtattgcaacagctcagtgtggcgataagttcactgcagcgcgcagtgtttgagcgtacttatatgccggatgaggacaatatgccgcgcacgctgcgtgagcatcaggatctgtatgacgcgatacgtcatcaggatgcggatgcggcagagcgcgctgcgctgacgatgatcgccagttcgacaaaaaggttaaaggacatgctatga

SEQ ID NO: 455454 - DNA, 525 bp, Serratia marcescens
atgaataacgatctgtactcctcaaccatcaataaaatgaatgtcaggatcattccttttattatggttctgtatttaattgcttatatcgatcgatctaatatttcggtggcggcgttacagatgaatgccgatttggccatgacggccgaaatgtacggtattgccgccggtatattttatatttcctatattatatttgaagttccgagcaatgttatcctgacccgtgttggcgcaaaactctggattgcgcggattatggtcacctggggcgttatcgcggccggcatgagcctggtgcaaacgccgatgcagctgtacatcatgcgtttcctgctgggcgtcgccgaagccggctttactcccggcattatttattatctctcctgttggtatccgcgcagcgagcgtgcacgcgctatgtccctgttttatatcggcgatcggcgcggcgctggcttcggtgatcggtttgcccctttccggctctattctcaatctgcacggttttttcggtattga

SEQ ID NO: 455455 - DNA, 1347 bp, Serratia marcescens
atgagatctaatctaatttattctctttccgaaattgcagaaatttatgatggccctcatgcaacacccaaaaaattagaggaaggcgacgctattttcttaagcatttcttccatcgaggatggaagattaaacttggaaaagtcatccttcatttccgaagatgattttgttaaatggacgcgtagagtaactccgcaggcaggagatgttgttttttcctatgaaacaaaaattggcgaggcatcaattattcctgagggattacgttgctgtttaggcagacgcatgggattactgagggccaaacaagataaggtgttacctcagtatctactatatgcttatctatctccagcatttcaggaggtgattagagaaaaaactatccacggtagtactactgatcgcatttcaattaaggagatgccttcattcaacattcaaatacccgacataaccacacaaaaaaaagtaattcaggttttaaattcaattgacagtaaattatataaaaacactgaaataaaccaaacattagaaaaaatatcacaagccctattcaaaagctggtttgtcgattttgaaccggttaaagccaaaattgcggtgctggaagcaggtggttcacaggaagaggctacgcttgccgccatgacggctatttctgggaaaaatgcggattccctagtcgtttttgaacgtgagcagccggaaaaatatgctgagcttaaggctacggcagagttatttccttctgcaatgcaagcaagtgaattgggagcagtaccggtcgggtggagttcgcaacgactatcaaacatagcaacgcttcattatgggaaagcattaaaaaaaacagaacgtattgatgggccatatcctgtttatggttctggggggattacgggttatcacaacagctaccttgtcgaagggcctagtattatcgttggcagaaaaggctcaattggtactgtttattgggaggatggggagtttcatccaattgacactgtctattatgtgactaaaaaagaaggcattccattaagttatttgtactatttaataaaaacattgaatctgcccagcatgaacaccgacgctgcagttcctgggctaaatagagataatgtttatcgtcttgaggtattgcaaccaactcaatctatcttgaatagattcgacaataacatatcagccatcaggaatgggattcaaaaaaataatactacaatagtatcattggttgatttacgcgacaccctgctccccaaactcctttccggcgaaattactctcccggaggccgaagcatcagtaaaggacgctgaacatgtttaa

SEQ ID NO: 455456 - DNA, 10146 bp, Serratia marcescens
atgaataaacattgctatcgcctgatttttagccgcacccacggggagctgcgggtggtttccgaactggcgcgcagctgcagcgccgagcccggccagagccgcggcgggcatgcgccgcgcctgtgggtgacggtgcgccgggcggtgtggctgctggggctggcattgttcaccggcccggcctgggcgggcggcatcgtggccgatggcccggcggggcagcgccctgaggtgatcgccacccagaacggactgccgcaggtcaatatcaccgcgcccaaccaggccggggtgtcgcataacaaataccaacagttcgacgtcgatcggcagggtgcgattctcaataactcggcgacgatgacctcaacccaactggggggcatgatccagggcaacccgaacctgaaccccaacggcgcgccggcgcgggtgatcctgaacgaagtcaacagcaataaccccagccagctgcgcggcttcctggaagtggccggcggccgggcgcaggtgatcgtcgccaacccggcggggatcgtctgtaacggctgcggcaccatcaacgccgggcgcatgacgctgaccaccggcaaaccgcagctgaacgccgacggcagtctgggcggttatcaggtggagcgcggcatggtgcgcatcgagggcggcggcctgaatggtgacgcccggcatgacactgaatatgtcgatattctggcgcgcgcggtggaagtgaacgccggcgtatgggccaaacaggggctgaaggtggtggccggacgcaaccgcgtcagcgccgacggcaacacggcgacgccgctggctgccgacgataaaaaaccggaactggcgatcgatatgggccagatgggcggcatgtacagcggctatatccagatgatcggcaccgaagcgggcgtcggcgtgcgcaatcagggcggccatctgcaggcgggcaaaacgctgaccgtcagcagcgaaggcaaactgagctggcagccggcgcagcaggaggcggtcactcaggccggcggcgatatccagctggccgcccgcgacgacattgactaccacggcaagctgcacagcggcggcacgctctcggtgcagagccgtgacggcgagctgcgccagtccggcacgctggcggcggccggcgacgtgcggcttaacgccgcgcgcggcatccgcagcagcggcaacctgctggccggcagcgatattaacagccagctggtgcgcgaggcggatctgactctggccagccagggcgaggtgcaggcaagcggtcaattactgagtaagaaaacgctgaaggtcagcggccggcaggccgatctcagccaggcgacgctcagcgcgcgccgtgcggaagtcagcgctacggcaggcggcgtggcgctgcggcaggccactgtggacagccgggaactggcgctcagcgcgacgggcgatatcgacgcgcagcaggcgcgcatcaaggccgggcgctgggacgtcagcggcaacagcctgttcggccagggcgcgatctggtcgcagagcggcgacggcgacagccgttttgcgctgaacggcctgtttgacaacagcgacggcagcatcgaggcccgacggctgcagctggatgcggcgtctctgaataatcagcgcgggcgtctggtggtgctggatgacgcagctcagcgctggcagatcggtgggttgctggataaccgcagcggcgtattgggcggcaacggcagtctgacgctgacggcgggtgaactgcataaccaggccggcgtggtgcagagccagtcggtgctggatcttacctcggcggcggggatcgacaacgatcgcggtcagctgctggccggccggcagctgatgttgaacgccggcggtgcgctgagcaaccgcgacggcgatatcaacgctgcaggggtgaggctgacgacgcacagcctgaacaacgcgcagggccggctggtcagccagagtgggctgcagctaacggcacacgaagggctggacaaccggcaggggctgctggaagcgggcgatgaattaacggttaacagcgcgggcgactgggataaccgcgacggtcgcgctaccggcggaaaacgggcgaccgttaccgcccgccagatcaataacgacggcggcaggctgcagtccggcggcgcgctgacgctcaacagcgccggcaacgtcagcaaccagggcgggctgttaacggcgcagcaggggctgagctggcagggcgctgcaggcagccggctgaacaacgacggcggcaaggtgctcagcgacggcgatctgtcactgcagggcggcagcctgagcaaccggcagcagggactgatgcagagccgacaggcgctgacgctgggcctggacggcggctgggataaccgggacggcacgctgcttggcggcgggatgacgcgggtgcgcgccggcagcctgctgaacgccggcggcgcggtgcagtcgctggacgcgctggatatgcagtttacccgccagctggataacggcaacggcaagattttcagtcagctgtcgcagaccctgcgggcggaagatctgctgaaccatcagggctggatgggcagccagggcggctggtccgccgtcgcccggcgttttgacaaccgggacggcagcgtacagagccagcaggatgcgcagctggcgagcgccgggctggacaatcagggcggcagcatccagtcggccggggcgctggcgctgcatatcggccaggatgtggataaccgcggcggtaagctcagcgcgcaggggcagctggcgctgcgcggcgcgaacgcgggcgaggccgccggcacgctgcacaacgcggcgggccaactgctggccggtgacgcgctcagcgtggcggcgcagagcctggacaaccggcagggcggcctgctttacagccagcgggcgatgcggctgaacctgaacggcgcgctggataaccgccgggggcggctgcagagcggggagcagctacagctcgacgcgcagtcgctgctcaatgaaggcggcacgctggatggccagcagcaggtggcattgcggatcctggggctgctggacaatacccgcggcgcgatcagaagcaacggcgcgcagcaggttagcgcgcagcaggtcgagaaccgcgaaggtgtattcagcagccgtggctcgctggcgctgagcgccgggcggctggataacctgaacggcacgctgattggtcagggcgacggcgactaccgtatcgacctgctgaataaccagcagggcaagatccatagcggtcaggcgctgacgctgcgcggccagcagttgaacaaccagggcgggcagctggtttccaccggcgcccaacggctggaggtggtgcagatcgataaccgcggcggcgccgttaccagccaggatcggctgtcgctgcagagcagcggcctgaacaaccgcgacggcggcctgctgatgggcacgatgcacaccgaggtgagcgcgcagacgctggataacggcggcggccgcctgcaaagcgccggttcgctgacgctgtcgctgcttgattcgctgaacaaccagcaggggcgcgtactggccaacggcgcgctggcgattaacggcgaacagcgcgccgtctccgtcctgaagctgctgaaccagggcgggctgatccagagcggcgccacgctggcggtggacgccggcacgctggacaaccagggcggcacgctgctgagccagcaggcgctgacgctgtcgctgcagcaggattacacccagcgcgccggcgatacgctcagcagcaacgaagcgttgacgctgacgctggccggcggcctgaccaacctgacagagtggctgctgccgggcagcctgaccgtcaacagcacgtctatcaccaacctgggttcgctggtggggaaaacgctgcggctgacgaccggcgcgttgctgaacaaggggcggctggaagccgatagcatgacggtcgacgccgacacgctggataacctggcgacggtgatgggcgatgacatcacgctgcgcggcaaaaccatcgacaaccacgggcgcgatgcggtgatcgccgccaccgagcggctgcagctgcaggccggcgaacgcctgagcaaccgcgacggcagcctgatctacagcgccggcagcctgcatctgggcagcggcgatctgatcgagaaccgggcgagcaacatcgaggcggacggtgacgtgacggtggaggccaagcggctggacaacctgcgcgaagggctggagattgagcgcgaggcggaaagcagcgactacaagtggcaccgttacaactactactggcgctcttacgactcaccggttaaccccgataaagagcccatggcgccgaccacgcagaatctgacgttccgcgatgacgcggcggcggcaaacaacccgtacggcaccctgttggcgattgacccggcgggcaagcgtgcgcaggtacgggtaaaaagcgcgaagggagagatgctggacctctgggtgaactacctggcgctgaagcagaacgacgacggcggctacgccatgaccttctacgagacgcgcggcttccggcagaactatgtgccgacgccgtaccacaatacggtgtggcgcgagcacgatcgcgggcgtctggagcagtgggatccggaaaagcatctcgatatcgtcaatgcgccttttgtcaccgattacaacaacttccgcgagcgcaccaccaccggcacggtcacgcgcgaccggctggtttccgccggcatcggcgggcagatcctggcgggcggcaatatggtgctgcgtatcgccagccagctgttgaacgacgccagcaccatcgccgccaacggcaacctgacgattgacggcgacggcaaggtgatcaaccgcggctattcggtcaatgagcggcgtcaggaatatatcgtcgatcactatgacaaggatacccaccactggtacccgacgtttaaccgcgacgagaccacggcgctgaccaccattgacggcattatcagcggcaacggcagcgtcgccattcgcggcgccagcattgagaacaccacggtcaaccaggcgcagatcggcagcgtggaggcggcgcagaaggcggcggaggccgaacgcgcggagctggagcgcaatccgctggcggtaacggttgacggcgtggagtggcagtccggcgatacgcagctgatccccggcggccggccgttaacgccgggcgaattggcgttgaccgacaagcagcatctgggtgacgtggcgacctcaatcccggacaacggcctgttccgccagcatttggaagcggacagcccgtatctggtagtgaccgacgagcgtttcaccagccgcagcaaatttatcagcagcgactatatgctgcagcgggtgggctacgacccggcgcaggtgcataagcgcctgggtgacggcttctatgagcagcgcctggtgcgcgagcagatgctgaagctgaccggccggccgtcggtgcgcggcgaagacgcgatggcgcagtaccagcgcctgatgaacaacggcatcaaggtggcgcaggacttccaactggtgccgggcgtggcgctgcgtcctgaacagattgcggcgctgacgcaggatatcgtctggctggtgagtgagacggtgcagaccgccaatggcccgcagacggtatgggtgccgaaggtttatctggccaataacacgctgcgcctgaacggcgacggcgcgctgatcgccggcggcgagctgcagctgtcggcggacagcatccacaacgccggcaacctgtttgccgatcaggcgctgaccatcgacgccggccagtttatgcatcagagcggcgatatccgcgccgaccgcatcaacgtgcaggcggacagcctgaccatgagcaccaacctgcaggacgcgctgcgccaggcgtcgatgagcgccaatgacatcagcctgagcggcggcgatatccgtctgcagggggcgaagctggacgcgacgcacaacctgagcctgagcgcgcacaacaacctggagatcggcgccgccagaagcagccacacggcggatctgcaggtgatttccggcgcgatgggcaaccgcaccagcggcgggctggaagaagccggctcgcggatggcgcaggtcagcggcgagtggcagcaggcgctgggcagcacgctcagcgccggcaacaacctgacgctgaaggccgggcaggatattacgctgcagggcagccaggccaaggccggcggccagctcggtgtacaagcgggcggcgacgttaagctgctggcggagagcaccaccaaccgcaccaacctgaaggccgacagccgcacctcgtcggtgaacaacagccgtgaggaagagcgtctgctgctcagcaccctgagcggcgaccagggcgtgacgctgacggcgggcaacaacctgctggcggagggcgcgcaggttgacagccaggagggacgcatcggcctgagcgggcagaacgtgaccatcaaagaggcgcggcagcaggttaacgaccgcgacagcgagaacaaacgggtcggcaagaccaagagccggcgcgaggaagagagttcgcgcagcgaggcgctgggcagcaccttcagcggccagaacggcgtgacggtggtggcgcgcgacggggatgtgacggtcaccggcagcacgctgcacagcgacgacggggcgatcgctctgcaggcgaaaaatgacgtcatgctcaacagcgccaccgaaagcgaggcgacgtactcggaagagcgctccgagaagaaaggcttcctgaagaagcagagcagccgcacggtgaaaaacgaccgggtgacgcgcgagaagggcagcctgctgagtggcgacagcgtcagcatcagcgccggcaacgatctgacggtgagcggctcggcggttgtcgcagaccatgacgtcaacctgcaggcgggcaacaacgtcgatatttccgccgccaccgagaccgacgcgcactacttgctggaagagaagaaaaagaaagggctgctgagcggcggcgggctgggattcaccatcggcagccagtccagccggcatcagattgacgagaagggcaccacccagagccagagcgtcagcacggtgggcagcaatcagggcaacgtgaacattacggcgggcaagcagctgcatatcggcggcgccgatctggtggccggcaaggatatgacgcttagcggcgacagcgtgcagatcgacccgggctacgaccagcgcacccgcacggaaaccttcgagaccaaacagagcggcctgagcgtggcgctgtcgggcgcggtgggcagcgcgctgaataccgcggtgagcaccgcccagcaggcgcgcaaagagagcagcggccggctgcaggcgctgcagggcaccaaggcggcgctgtccggcgtacaggcgatgcaggccgggcggatggatgcggcgaagggtgacgatccgtcgaacaataattcggtggggatcagcctgtcttacggcagccagtcttccaagtccgtgcagcacagcggacagagcaccgcgcagggcagcagcctgacggcgggcgacaacctgacaatccgcgccaaagagggcgacgtcaacgtgacgggcagccagctgcaggcgggcaaggacgtcagtctggaagcggcgcgggatgtgaacctggtatcggcgaagaacaccgagttcctgaccggtaaaaatagcagcaagggcggcagcgtcggtctgggacttggcgtaggctccggcggcgcgggcctgagcgtttccgccagcgtgaacaagggcaaaggttcggagagcggcaacggcacaacgcacggcgaaaccacggtcaatgcgggccagcgggtcaatatcagcagcggacgcgacaccacgctgaagggcgcgcaggtgagcggcgagcaggtgagcgcggacgtcgggcgcaacctgtcgctgacctcggagcgggacagcgaccgttacgatgccaagcagcagagcggcagcgccggtggcagcttcacctttggttcgatgaacgcatcggcgggtgtcagcgccagccgcgacaaactgcacagcaactacgacagcgtgcaggagcagacgggtatttttgccggcaagggcggttttgacgtcaaggtgggtgagcatacgcagctggaaggcgcggtgataggcagtacggcgacggcggacaagaaccggctggagacgggaactctgggctttaaggatatccacaatcaggcggactttaagaccgaacaccagagcgtgagtgtgagcagcagcggcagcgtcggcggccagttcctgggtaacgtggcgaacaacctgctggtgggcgcgaaccacgaagggcatgccagttcgacgacgcagtcggcggtgagcgagggcgcgatagttatccgcgaccagggcaagcagcagcaggatgttaacgcgctgagccgcgacgtggagcacgccaatcaggcgctaagcccgatatttgacaaggagaaggagcagaaccggctgaaggaagcacagctgataggggagataggcagtcaactgacgaatattgtggagacggaaggggcgatagcggcgaccaaagaagccagggagaaacagaaagacccggctgcattagcagcggctaaggaaaaactggagaaagaaggcaagccgacgacggcggaagcgatccagaaacaggcctatgaaacggcgtacaatcaggcgctgaatgactccgggtttggtacgggcggcaaggtacagcgtgcgatgcaggcggcgacggcggtgatccaggggctggccggcggagacctgacgaaggcgatagcgggcggttcagcgccgtatattgcgaatatcatcggcagcagtggcctggatgatgcaggcaaggtactggcgcacgccgcagtgaatgccgcgttggcggcggcgcagggcaataatgcgctggttggtgcaggcggtgcggccacgggtgagcttatcgggatgatcgcggtcaatgcgtacggcaagccggtaagtgaactgagtgagacagaaaaacagacggtgtcggcactggccacgctggcgtcaggcctggcgggaggattgattggaggcagcacagctgatacgttggcaggagcgcagtctggtaagacgacggtagagaataactatctgagcagcacggagaagagccgtcagacggagctgaaccacaagcagaacctgacgccgcaggagcagaaagagaaagacatgctgaaccgcaaggatgcggaaaccagtaaggcgctggttgatgcctgtatgagtggcagcgctgcggcctgtagcgccgcccggcaggatgcgctggagaagcagggcacttatcagaatctgggttaccagaatcagaaggaagcgcaggaaggttatcagcagatacagcagttgctgaatggcaccagtccggaagcgaagcagacgcaggagctgtttaacggaatggtggcggcttatatgcgcaccggtatgagtgaagatgcggctaaatctgcggtgggctaccagcttagtgcgatgtatatcatcggagggatcgcgggtatcggggccggtaaagcggttgatgaaggattaacaccgggagtgaaaccatcgacgccgtcgacgaagcccggagccggtggtactcaggcagaaagtaagccatcaagtggagcagagaacgctgcgacatacccgaaactgaaagacgacttggtacaacagaatctggctaatatagcgaagcaggatccgaggctggcggcagcggttcagggcgataacggcaaactgaattatggcgttggttccggcaccagagctgaagctgatcgattaggccaaatctgggttggtgatggtgcaaaaccgaccagtgatggaacaggcctaatgagtgctgatggaacgcgtgtgtatcgctaccctgctccgaagaaaaatagcccacatgcaacaacaggtgttcaagctaactttgaaacttttaaaataaaccctgctacaggtgacaaagttaaggtcggcaacggacacttaaatatacaatag

SEQ ID NO: 455457 - DNA, 291 bp, Serratia marcescens
gtgtcggaaaagacggaactggagatagcgaagcagaaactccagaacagcaaagatccggcagagcgtgaaaaagcacagcagaaaatcaatgaactgcgcgaaaaggatatcgccagtgacaaggaagtgattgatgcgtgtagcaatggcaatgccgggagtgcggcgtgtgcgagtgcaagactgaaagttattgaagctaaagaagggtatgagggcctcggtaactacacaaaaatacccaaggagatatgccagaaggtcaggatgcagttaaaggtctgttga

SEQ ID NO: 455458 - DNA, 672 bp, Serratia marcescens
atgccagaaggtcaggatgcagttaaaggtctgttgaccgcctggggtgagttcttcggggtaccagttagtacgttgacctcgaatgaggcgatgacgccggagaaagcggctcaaatagtagccagcggtgtgccaactagtgaagcaaaattaatacaatatgctgtggctaaagcttttctagcagtggccaagagccaaccggaaggaacgacactggtcagtacacctgatggcataagctttagaattgatcagccaaaacatttatcaacagccgatggatttacgcaaaaaagtgggatatcaggtgggcataatgcagatgcattttatgatgcagctaagcaatacaatgtgaaaattgtgagcgagaaacctacgagtgttaaaggtattacagaggttgaatatttaatacctactaaggatagagcgggcaatctaacagggaactacaaacctaatcctgaaactaaaaccgtatatgacccaaaggtatatcccgataaagtaatgctagaccttggtcaacaggcagcgatggtaggttataaggatgctatagcaaaagggcagcaggcatatgacgctacggctggcggtgtaacatttagggtctatcttgataaaaaaacaggtagagtcactaactttcatccacaatag

SEQ ID NO: 455459 - DNA, 600 bp, Serratia marcescens
atgaaaaatttaatggttttggtgttggcattgggaattaccggtaccgcaagtgctgagtctctcccggagagtttgctgagctgcgacagcaactttttcagcaagatatatagccagaaagcgacatttaaaaatgttgtgccactaaatactgataaagcgggtcatgcctggtttgttcctaaagaaggaagtgaaatcgtgtggtttgctcattctatcccagcaggacagttaacgctttcaggttactggcagcaaaatagcgatctggatgagatgggtaaatattacttttgggggctgattattgatgaatctccggaagcagtgatggcggcgctttcagatgctaactggaaaaaatctgctgatggtttttttgctaatccgatgattaaaccatcgggatcccaagaatggctaagtaatacgggggtggcaagtggcatagcgccagctaaagacagcgtagaaaaactagcgatactggacgtttataacggtaaatctcgattactttgttctatacaggggagtgttaccggagcggacttgttgtccttgcgccctgacctggcgggagagaaccaatga

SEQ ID NO: 455460 - DNA, 507 bp, Serratia marcescens
atgaaaccactagtattgtgcgctaccctagtattactgaccggatgtaaccgtcagagtaaagtgcaggttcctgaaattggtccacaccctgctggactggtgaaactattagagtctgatactggtggtacgtatgctgatatgcgcagtgtttccagctatcaaggaaatactcatttacggcgtttctttcttattaataactacattgggccaagtcgtataaaagataatcctccagtatatattgccagctcaacggtcatcaatgttgtgaactgtgatactcggcaaagagcacaatttgaacgcatatatttttctcagtactgggggaggggtaatgttgtagcaaagcgggattctattggtcagtgggaaacctttcctgaagagtcattgcttggtattattgccagtaatgtttgtgatattgatgcagctcgtttgaagccagaactccctagagatagaagtttaccgttactcagtgacttgaattaa

SEQ ID NO: 455461 - DNA, 504 bp, Serratia marcescens
atggaatctaaaatctgtattaactgcgacagtccagcgcaaaaagattctgattactgtgttgaatgtgaagagaaagagttaagtaaaataggcggttttctttatattcctgccataggtatagttatctcaatttttacgttcctattttcttcatacaatactgtgatggtgcttgcctctagttatagtttcattggtagtttaaaaacacttgtgtactttgaggtgatctctttatttttattgtttttgctaagtttttatactgccgtgttgttttttaagaaaaacaaaaacacaccgagatactatattttattactgttggcaggactaatgtatgcggtgattgatacgttatggtcctatcacggccataatatagaattaactaaagatgattattcccgtatattccgcaccctggtctcatgttgtatctgggtgccttattttatagtttctgtcagagtaaaaagaacgtttattagaggttag

SEQ ID NO: 455462 - DNA, 528 bp, Serratia marcescens
atgtgtagaaaattaagtttactcagtgtgttaatggcatcagtattggtaactggttgtacgtttagctttagatcggcgccagaggaatatacaggttcagatgcatcacggataagaatacaggattcagggactactgttatacgggaatatagcctggaaggtgagtgctacaagaaaacggcggaaaaacgtctaacatctgcattagcgatcatggggttgcctacaacaggtagaaaagaaataccagggatgaaaccatctaatgatattaaagggatgttggtaaaggaatacagcataaaacctaatcagaggttaacaataacccgttattataaagaaaaccatacatatggttcttttgagcatgagttttctgaaaggttcttaccgcaacctaatcatgattacgatataatcattggtaattattcaattacgattaaagacctctcatcttctgatgataaaacgactacttgggatggtgagttgtgtaagacgggtttattcggttag

SEQ ID NO: 455463 - DNA, 2238 bp, Serratia marcescens
atgattatcagcccaccattattgaaaagcaaaacagaaccagagacagacaacgcctggattgcgagagtcatgaaggaagacggcgggagagaatttccggttaacgcggccggttcctggcatggtggcatacatatccgtcatacggatgatggaaccgggagagccgagagcatcagggcgatagctgatggcatcgtggtttcgtttcgtaaggcgtctggggatataaagagggattcggccccattgaatatgaatgccgataaggcgaaaagcaaaggcagtgatgatggctatatactgctaaaacacgagacagagattggtagcggcgacagcagcaaggttgctttttactctttgtatatgcatctgaagtcactgacatcgaaagtcaaaggtggtgaaaagatttatcgtaaagatgcgctgggtacatccggtatggtcgatggcgtgaacgccttccactttcagatattctgcgatgatgacaatatggccaagctggttggccgtaccacacgggagttggatatcacaagggatggccgaacggatgcggtatacggggatatccatttttatctgcctgctgggacgaagttctaccgtaatgcgcccgtgaacaatacgtcatcgacgacgggtctggcagaggtacacacttcctgcatgccgctgtatgtcagtatgacgctggagaagggaaactgcacgatggtcactcgtcagcaggagcctggcgcagagggggtattcacagccgttggcgcaccgctgattaacgccgatggcaaggattacgaatataacctttataaaacagccatgagactctatacgcagagccccagcgccggttttgaactgctgcgttttggtcggattatcaatacggaacatgagactctggtgccggaggatgctccgctttggcgaacggttaattttccgggtggaaagggcatggtcaacctggcggtgccggagattaaaaagttcagcgatgcggattttccacactggacggggtggcaagccgtcgatgacgatcaggacagcaacagccagtgcaactcagctcgcattaaaaaatggcaggaagcgggtgtgtatgatgcactgaagaaccgtttgatctgccattttccgctggaatgggaaaaaagcacgatagatacacgtttttcctggctgagaacgaatgccgacgctccgatgagcgaagaggattatactaagtttaagttacatgcagaggcattgtgttttaacaccggtgacttagggaaaaagagagtgtggcattttaaccctacggagtttatagggtactttaggaaatgtggttggttaagttctaacgagctcaagcagattattcctcgttatattattcggccttctgggagtcgtaattactgggagccagtatcactcaaaaagaattcagcatctgtttttaaagtgcatcatcagatgattaataaagcaacgcgtaagtattgtattaatacaccattgcggttggcaagttttttggggaatgcagttcaggaaacaacatggttgagtgtgacaagagaggggtatgtttattctgataaggatgagaacgggaagagatacacatataatatttggtattacccttggtatggaagaggttttttgcaattaaccaaccctgataatttttataattatttcacatatcgagggaggcgatttaataattctgtgagacgcggattggttaatgcttatcgtagactacaaagagataaatcattaagactcaaggaaagaaagataactaacagaatactatatgataatcaacaccccggtttgacagatgaggtcattgcctggcggaatgaggttgagtcggggcgttatgcgccagcggacagcgccggtttttactggtcgttcacagatatggcaagatatgctgatagtgctcatatcattgaacgacagtctgtgatgacaaatcgtggctctaagacctattatagaagcccggcattttggcaagcgagtgcaacggtgaacttaccgggagctattgggagggatgactatcgaggaattaatggttttgttgaaaggtgctgtgtctatagtagtgcgatttccgtcttaacagaaatgaaatatccagatggtcgaggtgatttcatcttggattcacctgagggtatggagttgaggaggttataa

SEQ ID NO: 455464 - DNA, 435 bp, Serratia marcescens
atgaaggagtttccacttaaacgaagaattggaatgttcttttttatagtgtttatttatgttcccttgatttttggtggggcaatgctttcattctttacgcttaaagaataccttgaattcccttctgagatctctttctcatccttttttgtttatgggttctctgctgtatttattttgtcacctgtcgtatttgtttcttttttttctatttttctggggcgtatggcccctatacaaatacaaaagcgtttaactaagtatatgttgttagccttcattgtcactattattttacaggtcggttttaaaatttattattcgatggctctggaatttaaagggtatattacttgtcctggcaccccgagctcctggttccctggaatggcgacaaaatatattctgccaccgtcaaaatgtgaatattga

SEQ ID NO: 455465 - DNA, 135 bp, Serratia marcescens
atgactataaaaatagcgttgttattatgttgtctgtttttgatgttgttcattatgactatcattatgagctactccgtaaagggtaatggagttctatccaactggacgccaggaattcaattcaccacgtaa

SEQ ID NO: 455466 - DNA, 597 bp, Serratia marcescens
atgacaatcacaactgagcgctgtaacgagatttacgaaaacccggagcagtgcagttactccgaaatacaagagattgccgcgatgctgggtgagcgcctggccagtcgtgaggcggttgcgggcgagcgtggagcgtcgctgcagctgcgtggtttaatcaggcaaaaacacgcaaagtggtcagaagaaactttcgggaatgttggcccggtaggcccactgaagcacctgtctaaagaagcgctggaagctgctgcggaacctgacgaccttagcgaatgggcagacatacagtttttaatgtgggacgcccaacgccgtgcgggaatcagcgatgctgaaattactgccgcgatggaagaaaaactgaaggttaacatggcgcgccagtggccggagccgaaagacggagaaccacggttacacatcaccgccccgccagcgccagcagtgccggatgagtgcccggcagaaattcgcgatctgatggcgtcgcattctgacgcactcttcaacgatgacgacgcacagcagatatggaacgcctgccgcgccgcgatgctcgcagcagcgccgaaggtgaagggtggctga

SEQ ID NO: 455467 - DNA, 201 bp, Serratia marcescens
atggagtatgtggccggttttatctgtgcggtgggcattgcgatttgtggggctggcggtatcgctataacgatgctgatagttgcctgggttctagaccacgcggcgcgccatatgtggcaaaaactgattgatgtgcatgggctgacgaggctgaaacgcgcagcggaaatcatcaggcaaggtaagggggaagcatga

SEQ ID NO: 455468 - DNA, 735 bp, Serratia marcescens
atgatcaagcgatacacaccagactgctctattcacatgacgcatgaaatggcattcatgcgagaggcagacggcggcgagtatgtgaagtattcagaccaccagcagctgctggatgcggtggttgctgagcgtgatgcggtggttgttgagaatgcaggctttaagcatgcgctttccgtcattttggaacatgtggatgtaactgacaaagggcaagccggagtggtggcgatgattgcagaactggagaaatctcagcagcgcatcgcggaactggagtccaagctggctacgccggtgcggttgcctgatgagtttgcccggctcggtgaaaacttacgtacacaggacaatcgcgttacatccgaaccgatgttctgcgtgtatcagaagcgagaaatagttactcatgctgactacgaccatgatcgaattgtgtggattgatgatgatggtgttgaagcaaatgagcgacagagaatgcgcctcgagctgcttcatgatagttgtcgtgaagtcccggataaatggagcaggattgcagtgaaagagattgatgaattcgtaacctgctgcttcacagagcaaggatgtaaagactatttggcatgcaatggacacaacttgagactgccatttatctacgttaaaagcggcttcaggaatgctgaatatatcgctattcgtaactggcttatgactactggcttcaaggtcgagggggatgcgtga

SEQ ID NO: 455469 - DNA, 807 bp, Serratia marcescens
atgagcgatatgcgtcagctgtactcgtttattgcgctggccgaagagatgcacttcgggcgcgcggcggccaatgtgcacattgcccagccggcgctgagccagcacatcaagctgctggagcagcgtctggggctgcggctgtttgaacgcgatcgccgccacgtggcgctgacgccggaagggcgcgtgttgctggagaaagcgcgcgatacgataggtcgctatgaagggctgctgcagaccgccgccagcctgcgcagcggcgccgacggcgcgatccggctgggatatgtcggatcggcaatttacgatccggcactgatgacgctgatgcgcgactaccgtcaggcgcggccgggcatcgagctggcgatggaggagcatgatgtgaaccgccagcttaccctgctgcagaacggcgatcttgatgcggcgctggtgcgtacgccggtgccgcagttgcccgggctggtttatcagcaggtggtgcaacggacgttgatcgcggtgctgccaaaggatcatgcgctgagtggatgcggaacgctgtcgctgcggcagctgtcgcaggcgccgtttttgatccagaacgatccgccgggtatcgggctggcctggtcggtactggacgcctgccggcgcgccggctttacgccgcacccgctgaaggccacgcgtgatgtggcggtgaccatcgggctggtggcgctggggatgggcgtggcgctggcctatcggcagaacactcagcaggcggcggtgaaggactttgcccgctttgtccggcagcgcgccgcgcactga

SEQ ID NO: 455470 - DNA, 612 bp, Serratia marcescens
gtgaataaaataaatgaaatcgagattaagttcgaagaatttagacaaaaacaaaaagaaaagcatgatgagttattagcatccgccattgggcgcactattaaccacaagtactcccatgagcacttaattcctttttttccatatgaaaatgaagttttcgggttggagaaagggacagaaattaacgaacccaacgaaattgataaagatatagaaaggaattcattcgacaaagaaaaccgactaatcatgacagagagagtgttatccggcaatagggtaaccagcagggatttcttttcatataacaatgagtacattgaacgaatttcattccaaaagattggctcttaccgcctaaagtcaatatccagatattatcagggagatgaaaaatattttttcaatgttggtaacaaagggaggtcttgttggaccttcaattacagaagtaacattttatgcgatatagacatttcagaacaagaaaaagactctgagaacattcaaagtagacgtgtattttttaggtacaaagataaatcccttgtcgaaatatctaatgtatatgaaaatggaacatcacaggttgtttattctagaaaataa

SEQ ID NO: 455471 - DNA, 483 bp, Serratia marcescens
atgagtgatgcaaatacacaatcggttgatttactcatatctcatagtcaaatactcgtacgttcaaaagaatttgatgaaaaattaagtcactgggggaaaggtaacatttcccaaggtgctattttgcatatggattacataattttcgatccattacctgaagattcctttggagctaacgtatatctaaaattatccaaaaaatttataaaagatgaaaactctcagcgctgtattgttgcccctttctttgtgaccgataaagacaagcttgaagtcgcttctgcatcagaaaagttcaaaataacattgaacctcgaaaatactctttactctgtttattacgaagtatgcgaaggggatgagatatattataacttcactttcatccctgcatctgaagaaatagcccctcaatatttaattgatgacccttgggggggagtaaaaaacaaaaaattaaacatcggtgtattctaa

SEQ ID NO: 455472 - DNA, 2127 bp, Serratia marcescens
atgcttctgaataaggtagagagtgggaatccatatgctattcaaattgcgggtgaattagaaaaacttctcggtaaaaaaattcagatgttgaatgatgataaacattcgtcaaatgatgttctggatgaaaagattgtattgaacatatcagattatccaccggatagtttcgatgaactcatcgttgatctaaaaggaaattatagcactcataaatttttagtgtcttggtataaatactggtgtgatcagggaaaagaaaatgaattgctgcatatacttacttcacgtatttcgacatttactgatcgatttgatgataaacgatatttgctagatcttcttttttcaagctcttttaaattagaaggtaagagtagagcctttaaaattttggtggcagcccatagatcaatggggggatggtcggattggtatgagcgtgaagaaaatagcattaaccgacttaagatagttgcggaacagtacccacaaaaaattgaggaatttataaagctcacaacattacaacctgacgactggaacgacaaatttggtaaactgatcataccaaatgacaaactggtttttttactttctcatagcggcagaaaagaagaagctcttaagctcacattacagatggtaaaaagtttagaagatagcgtccggaatcttcaacttacaaaacctatttgggattggcacagaaatgactctcttgaggaagcattacttaaatctttagtttcaagacttaagctgccaattccttcaattaaaatctgggtaatggagcagctttcacaacttttaatagctcagaagcctaaagtaggggatctattaaaaagagacttagctagtagaaaacaagaatcagaatgtgttgaagtacttagcgttttctttatcgcaaaatctaaaggatatgtttgtgataatgaaattgggaaatttattaaagcaaggtcctctctatccgacttaatgatcacggaacttgtatcaaatgcaaattatttcggggaatacgcttctcaattcaatccatttattgttttagatggtgataataatcgctttgaatattatcagggtaatcacgtccctttattgtataattcattactagacgagcaagagaaaaaaacaggtgtgccatttacgggctattaccaatccgaatggaatcggacattcgaatatcagccttcaaaagtaacaagtattgattactttttaagtggtgataggcaaaggtctaccgggcaattttacacacaggcgagccatcgtggtcgttctgcttatctacgcacattagaagtggctaagaactttttcggtatgcccaatgattatgctcagaatctgtctgtacctgcattacctatcgagcctgcttatctaggtattgtacctaaaaggccgacatggataccagaatggaaagcaggagatcttataactaaacaaaatttaattaaatttgttgaagaattattgatgaattttgatacggaagatgattgtttagacctgttggcaatttcattccctattaaattagatgaaaatagatgggtcgatttaactatagtcaaagcgcttgctaagtttaatagcacagcggaaattaaagttaaagagcgtattggttgtatatcaattggtaaccttctgaacaataagttattatatgaactctatggaaatgtaaactacgaaggcactgtactggcagtaactccatttccgttaacgagatatggacattggcattctgatcttgaaaccagaggtatctatattccaatgtgtactgttgatggtaagaaaactatcggttattccgctaatggattattttgttatgatgttgataacgctaggattggtttttcatctttctggtataactattggcaacctatccatccaaagggaattaactcactttgtggttcttatacagctgttattagggaaaatattgaaaaatggataaacacagcgattatatcccagaagagtttttatgcatgcaaggccgtagtgctcacatccgatagtgattacaaagagtatgaccaacaagtgatagagttcgatgtgctttga

SEQ ID NO: 455473 - DNA, 1965 bp, Serratia marcescens
atgacagattcaattataccaaatgtcgtaattggtatgccatcacaattattcactttggcccgttcttttaaagcggcagcgaacggaaaaatctacatcggcgaaatcgacaaagacccgacaatccccgaaaaccaaattcaggtctatctcgaaaatgaggacggaactcacgttcctgttgcgcaacctctgctgattaactccggcggttacccggtatatgacgggcagatcgcgaagttcgttaccgtgaaaggccactcgatggctatttacgatgcctataacgcacagcagttctactatcctaacgtgcttaaatatgacccggatcagctgcgtcccatcgttgagaaatttattgaagatattgaggggccgggcggggctggaattgtggggttggagcagggcggtaaagttcaggatgccttgcgatacatcaccccggaaatgtttggggcaaagggggatgggtcggtggatgattctgacgccattatcgacgcgatgaattacgctaacacagccgaggtgggtctatgtgcggtacgaggtgacggcatttatcgtatcgataagggaattccgtgcaagaacggatacctttccgttccaggtagcaccgctcgtcgatttggttttagcctttatctgaatgtcgtccttgtaggagacgggttcccgacccttccagagaaatggtgggatgcggaggcggcgttctatccatctgggagcggttccgtagagaattttaatcttcacgtcaatcagttccatggtggtggcaaagcgactttcttcaaaatagtcggcaatggtatgtctaccagcacgatctcttgcgatgaaatgcgcgggcacattattgggttccgtaactatctagacccagttgctcagtccgggatgaacaagatccgtggtaaaaactggcaaactggctatattgccgttcttgttggtgggcgtggggccggtagaggaaacagtgagtgccacaacatcgatattacttggtgcgctacacaccggtatggcgctatccatctgcaagaccgcagtcagtacgccaacgtgaataacggaacctacgactataacggtaaatacacctcaatacttaccttgacggatgtaaagcagaatggaaattatagcgtagaattcggatttgaagttaccggtgcaggcaagaagtcttatgccctatcaagcgccatgcgcggatatgagggtaaatggcagctcatggtaacagaagatagcgatgttactgacggcgcgtcaaaatgggcggttggcgatgtaatttccacatcatcaggattctctgccaaaatagaggaaattacggtagctagcacaaaaacggctatctacccggatatcatcattagtaacagaactggtgattttgcaaaagttcatatcgcagccgattatgttggcggtgtttacgggcacaacctgttcacttgtgatatttgggcgccaagttctacccagaaccctcgtaatatgtcttaccgtggacttgcaatcagcggcgcagccacgcaattgcaaatgtatagcactcagcacagtgtaacagcaccgtttctcgcagttactgaagatgccatttcagcccgcaaagatttagaacttttctccaccagaaaactgcgcggcaccaccggaaccgtaactgtaaataacaattctccggtatgggctttctcgcttcagggcggctctaactcaccaatatctatatggaaaatatacctatcgtcaacagttaatgatatctacggagaatacattctagctaacgatacaaacaatgctcgggtgctaaacaaaatatctgggtatacagatatcactaccgatgggcacaagatactaatcaatcaaacatctggatcaccgcgagcgataagctacaacgcgatacgccttatgtga

SEQ ID NO: 455474 - DNA, 504 bp, Serratia marcescens
atgggaaataaaccgcatgaggttttgacgcgtgaacgattagttgatgttttggattacaactcagaaaatggagtcttcacctggaaaaagaaacttagtgccagaggatctgttgggaagtcggcaggtacgacttcatatggatacacagcaattaatattgacggagttcggtatttcgcccaccgccttgcttggctttatgttttcggttcatggccagaaaaggaaattgaccacatcgatagaaacagaaaaaataatgcaatttcaaaccttagagatgtaagtagaattgttaacgccctcaatactggtaacagaaccgactcatcgtctggcgtgaaaggagttacgttctgcaaagatagaaatcaatggcaagcacagataagcctttcaggtaaaaacatcacccttggcaggtatcagtcgattgatgaggccgccattgcatataaatccgctaacatggttgctgactatctgctaaacaactga

SEQ ID NO: 455475 - DNA, 252 bp, Serratia marcescens
atgggaagagaagaccctcaatttaaccttaggcttccacatgaactaaaagagaaggtcaagagcagagccaaggcgaacggccgatcacttaactcagagattacgctgataatagaggaggcgctggcgcaaccgccgaagttaaccggatttcgagacgatgcagaacgcctggcgcacgatcacgcagagcagttcaaaaaggtggtgatcgacactctaacaaagatgtatcggaatgacgaataa

SEQ ID NO: 455476 - DNA, 1788 bp, Serratia marcescens
atgaaagttaccgctaacgggaagacgtttacgtttccagatgggacaagcacggaggatgtcggatctgcaatcgatgaatattttgcagggcaaactgcggcaacccaacaaggaacacctcaacaaccatcagcgcaaccccagcaagcagcgcagccgacgatgctagacaatgccgagcaggcggcgcgtggtttgattaacatcccgtttgatgcactgcaaggcggcgcaagtcttattaatgctatcagccaagggttgggcggccccaaggttctggatgatgtttaccgaccggtagacaggccgacagacccttacgcgcaagctggtgaggcgattggggggtatttaactcctggcattggcatggccggaaatatggcacttggttcactggcggaagccagtaaccaagaaggcgacttcgcgcagaatgctgcaactaacgcagccgttaaccttggtgcgcaaggtgttctttccgccgccgcaaaagggatcggtcgtggtattactgcggtgcgtggtgaaatggctccagaagcgcggcaggcggtagagttcgcggagagaaataacgccccgctgctgacaacggatgtcgccccgcctggaacctttgccgggagttctgcgcaggctctcggagagaaagtaccggtaaccggcacgggagctgttcgcagaggtcagcaagaggcccgaaataggcttgtgcaaaactatgtgcagcagttcgatgcggcagctcctgaagagattgttagcagcctacagcggcaaaccaataaggtgaagcaggcagcagggcagagactcacccaggttaatgatgcaatgcaaactgcaggggagattgatccagttcgtgcagttgcctccatagacaaagagattgccggactatcccggcttggttcggcttctgattcgcagacaataagcaaactgcagacatacagagatgaactaagcaagggtgcagacttcgggctactgagggatttgcgtactcaattccgacaagacgttaaaggtgatagggctgcatggccgaaccaatcgcaggcagcagttaaccgcgtgtattcagctcttacggatgatattaacagggctgtatccgataatcttggaactaaggcggcgtaccgttataagcaggcaaacgcggtatacgccaatgaggccaaactcgttaacaatacgcggcttaagaacgtattgcagaaaggtgatctaacgccggaggttgtcaacaatctgctgtttagtagtaagccaagcgaggtgaggcaattgtatcgctcgcttgatgcgcgcggtagaaatgcggcgcggtcttctgtcattggtaaagcctacgagaagtctggcggtagtcctgataagttcttgaatgaggttaataggctgtcgtcgcagacgggaatcatttttaagggttcggaaaggcaatacctgaacgggctgacaaaatatctcgaccagactagaagggcatcacgcgcaggggtggtaacaccgacaggtcaggaacttttccagatagctgtccctgcgggggtagcgtcagatgtgatcggcactggaggggtggctaccggcgcagcacttagttatggtgcgcttgcgagagcttatgaaagcaaagcattcaggaatgctatgctaaagctgtccaacaccaaggctggaacgccggcctatgagcgcgtgctggatcaggcagcaattgctgcgcgtccactggtggccaatcagatcacgcagcggtag

SEQ ID NO: 455477 - DNA, 1473 bp, Serratia marcescens
atggctacgtggaaccagaatataaattccggcgggttcctcgccggtttcggtacaaacaacgataacgccccccaggcaagcgatgccaatgcaacgttgagtatgatccgcgacaacaacgaccgtgagcggtcaggtcagaacaatgtgggcctgcaactcatgcaggggctgcaaggtctgtctggaatctatcagcagcaacagcaagcggagagacaacaggcgtttcagcaggattacgccaatgcctacgcatcaggcgaccgtggagctatgcgaaacctagccaagcaatatcccgagcagttcgaggctgtgcgaaacggcatgcagttcgttgatgatgaccagcgtaacaccgtcggcagcctggcggcgtctgccagactggcagcacaaagtccagaggccatggggcagtggctgaagtcaaatgcaggggaactagctcgcataggtgcgaatccatcacaggtagcccaaatgtaccagcagaatcctgcaggatttggtgagtttgtagatcaccttggaatggctgcgcttggtccggataagtatttcgatgttcaggacaagatgacaggtcgagacatccagcggcgcgggcaggatgtcaccatgagggggcaggatatctcagcagcaacggctcggcgcgggcaggatattacaatgcgcggacaagatattagcgcgcaaaactctatgcgtagtgctggcggagctgtcccttcatcggttcgagagttccagtatttcaacagtctttctcctgaacagcagaaaacgtatttacgggttcgcggtcgacctgatgccggcggtggtgccaatgtcgttcaattagcagatggtcgtacggttagcgtggccgggaagctgcatggctcgggggctaatgctttctatgaaggcacagatgatgctggaaatatggtccgcgttcctgcaagcgctatcgcagctccagccacatcagcggccaacgcgcaaaactacgcgatgaaaaaagacatcgactctgttgttaattccgatttgagcaagctggacttcatgaccggcgttactggcggagcagggaatccagccgttggcgctgatgttcgtagccgactccccgggaacaaagagcaacgccagctttacaacgccactcgacgcattcagggtcgcatgcaaaaccaaggcgttgccgctgcccgagatatgggggcgagcgggataaacactgttgctgaagctaagatgtattttcaaggcatgccacaggttgactattccagcccggaatcaatgcagcaatcgctccgtgatatccaagaatataccaacaactacaaccaacagtatcaggttaacgttggcggaaatcggcgatcaccttccgtatctgcgcctcaacaggcacagccttccggggtccatacatctaaatctggcatacagttcacggtggaataa

SEQ ID NO: 455478 - DNA, 681 bp, Serratia marcescens
atgctaattctgactgagcagtttaaaaacaaattgcagcccatgcatggactgatgaaagggggtggcgacggaggtgctggcgctcaggctgatgccacccggcaagctacagaactgcagcgagaaatgtggcagacgaacatgcagaaccttgcaccgttcacgccgcttgccgaacagtatgtgaagcaactgcagggactttcttcactagagggccagcagaacgcactcagcggatattacaactccggtcagtttaaagacctcgccaaccaagcgcgttatcagcaattggcggcatctgaagccaccggcggtctgggttccaccgccactagtaatggcctggcgactatcgccccgatgcttggtcaaaactggctcaccggccagatgaacaactaccagaacctagcaaacatcggcttaggagcgctgcagggtcaggcaagtgccggccagtcctacgcgaacaacactggtcagttactgcagcagcaggcggggttagcggctgccaatgctaacaagccttctgcggtcggtggcttcatgagtggggcgcttggtggtgccgcatcgggggcgatgatgggttctgttgttcctggaattggcacggctgcaggggcaattggcggcggaatcatcggcggccttggttcattattctaa

SEQ ID NO: 455479 - DNA, 471 bp, Serratia marcescens
atggaaataaagctcatagacaacccggtgcggctccaggagttcctgaacgaccgcagcaatacggggaacatcgtcgatactggcgggagttattacatcaagcctgacgcggtttacctcggcatttatgagggaactgtcctagctggcgttcatgaagtgcgtaacttctggcatagcgttgttgaaacccatccgatttatgacgccgggttccgagggcggtacgtcattgacggacacatgcttttcctgcactggttgctggataacagcacattcacaaacatcgtcacgatggttcccgatacgacccgctacggcgcagttgctgcccttgcggtaggcgcgtcacgcatagggcatcttgatgatgcgtacatcagtagcggaaagccggtcggcgtgacgctataccaactcacgcgcaagcgctgcgaggagattataaatgctaattctgactga

SEQ ID NO: 455480 - DNA, 825 bp, Serratia marcescens
atggcagatgatgggttgaaagacccaataactatccaggcaacccgcattgacgcaacactcctccctaaaatcttctcgcagccgtatctgctatacgtaatccaacaaggtaccgacctaggcaacgtcgctggcaaagcgaacgaggccggtcagggagcgtgggatgcgcagaagaagaacgacgaacaggatttagtcctcgccaaccatgaaagccgaatcactgccaacgaagcgaagctggttaaccacgagcaacgcatcaccgctgcagaggcgacgctggtcaaccatgaaggccgaatctctgcagcggaaactgaactgacagaccatgaatcgcgcattacgtccaatgaggcggaactggcagaccacgagcagagaatctctcaaggcgcgacggatatttccggcctgaagagcagaatgtccaccgccgagagcgacatcgataccctggaagctaactcggtatcgaaagcggtatctactagtcaatcagtgcaggcatccggcggatcgttccttgtcggcaatgtcaccacgcctaccacggataaattgcaggtcggcggcagcgttaacgcggtgtcgtacaaagtttccgggttgcaagttgttggcgctcgccgtacggggtggacggcatcaacgggtacggcgtggctcggagcgtttaactctgacactgagtttccggtgggtgctacttattcacaggatgaggtgcaggccatggcggccgcgctactctctgcgcgccggagaatccgagcgcttgaagacgcaatgaggggccacgggctgattaactga

SEQ ID NO: 455481 - DNA, 1428 bp, Serratia marcescens
atgccgataacgagtcttccgctggctaaggggttggggaaagattaccgcaatgcggattacgtcgatttgctaccggttaatatgctggctacgccgaaagaggtgctgaatgcatcggggtatctgaggtcattccccggcctggctaaaaagtccgatgtggacggcgtgtcacgcggcgtcgaattcaacacggtgcagaatctggcttatcgtgttgcaggtagcaagctgtacaagggcgactctgagcggggaagtgttgctggcgatgaacgggttagcatggctcacagctctaccagtcaggcggtggcggcaaacggattcatgaccatcttccgctacgacggcacagaaaaggtactggataactggccgacgaacgtaggagggactgagtacgcgcagtatgaaattggcagtgctcgtgatatctgccgggcgcgcggtcgatatgtttgggtgaaggacggaacacagacattcggcgttacagaccttgaggatgagtcacacccagaccgcttccgcccgttctataccgcagagagccagcctgatggcattatagggtgtggagtgtggcgcgattttgtcgtgatgttcggcagcagtacgattgagtatttctcgctgactggcgcgaccgatacagccgcggctatctacgttgctcaaccatcactgatggtcagcaagggcattgccggcacgtactgcaaaaccgaatttggcgactcgttcgcattcatcagccaccagtctaccggtgctccatccatctatgtgattaacagcgggcaggcgtcatctatcgctacgtcaacagttgagaaggcgttgcgtggttacactgctgaggaactggcaaccggtgtgcttgagaccatccggtttgacagtcacgagctgctcattgtccaccttccgcgacacgtgttgtgctacgacgcagcagccagcaacaacggaccgcagtggtgcatactgaaaacaggccttttcgatgatatgcaccgggctatcgactacatgttcgaaggcaaccagattactgtcggtgacaaaagcgaaccggtggtcggaaccctacaattcgactcgtctgcacagtatgacaagcaagcggagcatctgttatttacgcccatgttcaaggcggataatgcccgcgtgttcgatttcgaactagaggcggcaaccggcgttgctcagtacgctgagcgactatttgtatccgctaccgcagacggttctaactatggccgcgagcagatgatcgaatctaacgcgccgtttgcgtatgacaagcgcgtactgtggcgccgtatcggtcggattcgtaaaaacattggcttcaaagtgcgcgttataactcgatcgccagttaccttgagcgactgctcagtaaggattgaatga

SEQ ID NO: 455482 - DNA, 510 bp, Serratia marcescens
atgaacctgaccacaaaaggcgatctggtgctcgccgcgctgcgcaaaattggcgtcgcatcaaacgccacgctgaccgatgtcgagccgcaatctgtcgaggatggcgttaacgacctagagatgatgatggctgaatggcgagaagacccatcggtcggtatcgatgttggataccaattcgcagcagaaggcgagccagcgatggatggcgacgaccacggccttaaaacggcacacctcagcgctgtctatcacaacctggcgctgcgcatcgctcctgattatgaggtagaaccgtccgcaaaggttgtttccacggcgcgttacggcaaagagttgctggttaagtcttcagctccatcgcgagctaagaaggcatatcgcgaggctggctaccctaaccgcatgcctatcggctccggcaaccgcatcccaacatacaacggccaccactacttccacagaaggaataaagacgatgccgataacgagtcttccgctggctaa

SEQ ID NO: 455483 - DNA, 186 bp, Serratia marcescens
atgtcccagatgatttacaaaccgggcggtgacacgctggtgtgggggatgaaagcccacgtaaaagtggttgaggccggcgaactggaaacgcacatggcggaaggatgggtagatcatccgtcgaaactgttcgaaccagagccagcgaagaagtcgcgcaaaggcaaatccaacgacgaataa

SEQ ID NO: 455484 - DNA, 909 bp, Serratia marcescens
atgagcgataccaccgaaattcaggcaactgaagaacaagacctgcccgtaacacagcatcaggatgttgctgagcaacaacagccatcacctgaaaatgttgatcaggggcaggatgacggttttgatattgtcctgaacgacgatgagaaacagaaacaagacccggcaaccaacgcagagtttgcccgccgccgtattgagcgcaagcgtcaacgtgagcttgagcagcagatggaggcggtaaaacgaggcgagttgccagacgacctgcgtgtatctcccgaaatgccatcgcaaccggatatcaatgaatatctgtctgatgatggccttgccaagtacgactacgaccaaaaccgagcgatggcagctttcaatgcagcaaacactgattggctgatgaaagtgcaggatgctcgtagcaatgcagtagcagagcagggcaagaagacgcaggaatacacgcagcgatctgctcagtatgtcgcggccgctcagaaacactatgacgcggcagagaaactaaacatcccggactatcaggataaagaagatgcgttcatgtcagttgtgcctgcacctgtggcgcaagacatcatgctcctattccctgaaaaatccgcagcgctgatgtatcacctcggcgcaaaccccgagaaggctcgtgaactgctgtcgatggacggccagcgagcactaatcgagatgacccgactgtctgagcgtttaactctcaaaccacgcggtaagcaagtctctgcagctccggctgcggacgaaccaatcaccagccaagttactgcagcaaacagagacgccctgcagaagcagatggaaaaagctgctaatgccggcgataccgaaacttaccgcaagctgaaacagcaacttaaaggattccgataa

SEQ ID NO: 455485 - DNA, 2097 bp, Serratia marcescens
atgacaaacactgacaagcagcaggagaggctgcgcgccatcctgtgctcattcgaccgggattggatgtctagcgatgaggcccgcacagaggcaacgaacgacttattctttagccgcgtatcccaatgggatgactggttatcagattacaccacgctgcagtatcgcggtcagttcgatgttgtacgcccaatcgttcgtaagctcgtcgctgagatgcgaaaaaacccgattgacgttctgtatcggccaaaggacaacgcagaccccaacgctgctgaaacgctcatggggatgtatcgcacggacatgcggcacaacacggcaaagacggcagttaacgttgctgtgcgtgagatgcttgaggccggctatggcgcgtggcgattggtaaccgagtacgaagaccaagaccctaccagcaacaaccagataatccgtcgcatccccattcacgaggctgcatcgcatgttatctgggattgcaactcaaagcagatggataaaagtgacgccaggcacgtcaccgtaatccagcccatgagcactgacgggtggaaagcgtttgcagaagagcacggcctagaccctgatgaataccccgactttcagcagcctgatgtcacatggctgttcccgtggctgacaaaagatgttgtttacgttggcgaatactacgaagtcgaggagaagaaagagaaagtctttatctatctcgacccgttaacaggggagccagtcagttactaccagaaagaaatcgctgatgtaatcgatgagctggccgagcgtggcatgcagaaagttgcagagcgcagagtcactcgcagacgtgtgtacaagtcgatcatcactagcacatgcattctgaaaaaccgcgaactgatagctggtgagcacctccctattgtgccggcatatggcgagtggggattcgctggagacaaagaggtatacgagggtgtcgtccgcctgaccaaagacggccagcgcctgcgcaacatgatcatgagcttcaacgccgacacggtagctaggactccgaagaagaagccattcttctaccctgagcaaatcgccggctatgagttcatgtattcgggcgaggatgactacccgtattatctgctgaaccgcaccgatgaaacgagcggagacctgccgatacagccgctggcgtatatggagaaccctgagatttctcaggcgaatgcatacatgctcgaagcggccacaaatgcagtaaaagaggtcgccgatatcggtgtcgatagcgaagcggcaaacggcaatgtggcgttcgacacggttaatcagctgaacatgcgagcagacctgagcacgtatgtgtttcaggataacctcgcaactgctatgcgtcgtgatggtgagatttacgccgccatggcgaatgacatctacgacgtatctcgcacggtcacgatgacgctggaggacggcagcgagaaagaggtgcagctgctcgagcaggtcgttgactatcagagcggcagggtagtaacgctgaacgatatccgtggccgctatgaggcgtacaccgatgttggtccgtcattccagagcatgaaggagcagaaccgcgcagagattggcgagttgctgcagaaagttcctcctgaacatccagtttggaacgttcttctgctgcagttcctgtcactgctcgacggtaaaggcatcgagatcactcgcgactatgccactaagcaacttgtcgtgcagggactcaagaagccggaaaccgaagaagaacagcagtggctggctgaggccatgcaggctcaggcacagcagcaagaccctaatatgctactcgctctggcgcagatggttgcggctcaggccgaagccgagaaagcgcagaacgaaacagcacaaacccagattaaagcattcaccgcgcaacagcaggcgcaagagtcacaagctaacaccgtctacaaactggcgcaggccaggaacatagacggcaaggcagtgatggaggcgatcaggctgctgcacgaggtctctaacgagcaacaaaaacaaatcccttccggcgctactgccgagaatcctcaaaccatgtga

SEQ ID NO: 455486 - DNA, 1500 bp, Serratia marcescens
gtggtggaagaagcgatccttgacgagctgacagaggatgagcagatagagttgctcgaacttctggaagaggaagaaacataccgcagcactcacctactgtacgaattcaccccttacacaaagcaacgtgaatttatcgatgccgggcatgattaccccgagcgctgctttatggctggtaaccagcttgggaaatcgtttaccggcggggcagaggtggcatttcacctgacggggcgctacccaggtacaaaaggttatccgagcgacggcaaatacggcggagaatggactggcaagcgcttctatgagccggttgttttctgggttggcggtgaaaccaacgagacggtaacaaagaccactcaacgaattttgtgcggtcgaattgaagaaaacggcgaccccggctacggctcaatcccgaaagaggacatcattagttggaagaagtcacccttcttcccgaaccttgtcgatcacctgcttgttagacaccacactgccgatggcgttgaagatggcatgtctatctgctacttcaaaccgtactcacagggccgagcaaggtggcagggcgacaccattcatggcgtatggttcgatgaagagccaccacacagcatctacggagaggggctaacccgaactaacaaatacgggcaattctctatcctgacgttcacgccactcatggggatgtctgatgtcgtaaccaagttcctgaagaaccccagcaagtcacaaaaggtggtcaacatgaccatctacgacgcagaccactacaccgaagagcagaaagagcaaattatcgcctcttatcctgagcatgagcgtgaagctcgggccaaaggcatacccacgatgggtagcggtcgaatattccagatacctgaagaaaccatcaagtgccagccgttcgaatgcccagaccacttctatgtcatcgacgggcaggactttggctggaatcacccgcaggctcacattcagctgtggtgggataaagacgaggatgttttctatctggcccgcgtctggaaaaaatcagagaacactgcagtccaggcatggggggcggttaagtcgtgggctaaaaaaatacccgtggcgtggcctcatgatggacaccagcacgaaaaaggcggtggcgtgcaattaaaaactcaatacgcagatgccggattcatgatgctgggtgagcatgccacgttcgcggaaggcggtaactcggtggagtcgggtattagcgagcttcgcgacctgatgcttgaggggcggctcagggtatttaatacctgcgaacctttcttcgaagagtttcggctataccatcgcgatgaaaacgggaagattgtcaagactagcgacgacgtgctcgacgcaatgcgctacgcatacatgatgcggagattcgcaaaattgatgcgtgacatcaggaagccaaaagagcgaagcgctccagcaccacttagaccaatccctagaggcagataa

SEQ ID NO: 455487 - DNA, 243 bp, Serratia marcescens
atggcaattaccgaaatgaccgacctgcagcagcttcacctggagattttccggatggtgcagaatgataccgctgcggcggaaaaggccattacctttatcggtggtgaccagctgaaatatgagctgttcaaggacggctacacccgcgcccaaggcgaaaccggcgttgtggctcgcgctgataaggcgatccgaaccgcagaggaagctttggatttgttccagactgcagcacagtga

SEQ ID NO: 455488 - DNA, 210 bp, Serratia marcescens
atgactactatcaacgcaacttacatcagcaaagaccagaactggaacgacggcactaccatctactggttcgatgttaatggtgaaacttacggcgtggtacatggcggcgaaagctggaattcaagcgttgttgactgcgacggtgctccatcagatcactacacagttgaccagttcaacgtcaccgaggagatgatcgcagaataa

SEQ ID NO: 455489 - DNA, 180 bp, Serratia marcescens
atgtcactgcaagactacatagccgcctactttggcggcaataaatccgcatttgctcgccatatggacgtgaacccgcagcaagttaccaaatggattaatgatggctggattgtatttaatcgccaactattcagcccgcgtcgagatattccagacattatcgaagcccctctatga

SEQ ID NO: 455490 - DNA, 408 bp, Serratia marcescens
atgctcaacgtaataagctttatccgaaacaacgccgggttaatcatcgctggcctgttctgccttgcgttatggggactgaatgtccgcaatagccagctgacagcaacaaacgaacgcttagaaagcctggtgttcgagaaagacaagcaggtcaatcagctgcatgccaagaacgatggcctggccgatgcattgcaaggtctaacatcggcggttcgcaagcagaacgaagtcatggcatctgttagcgagcaaaaggcgataaccgatcggcaaaacagggcgctgcaaaatgacatccaacgatacctatcggctgacaagtgttctttgcagcccgttcctcctgctgctgctaaccggctgcgcgaaaacgcagacagaatacgaggcagtaaagactga

SEQ ID NO: 455491 - DNA, 645 bp, Serratia marcescens
atgctgacagctaaacaatttcagcaggccactggagttggcgattatcttcgtgatgtctgggtcggccatatcaatgccgcgatgaacaaatacggcattaacacaccgattaggcaggctcactttatttcccaggtcgggcacgagtctggtggcttctccaccatccaagaaaacctgaattactccgtatctgcgctgacgaatcttttcggcaagcgaatgaatccagaagacgcgagccggctaggtaggcagccaggtgagaaagttgttccgaaggagcgccaagcgcagatcggcaatctgatttacgcaaaccgaaatggcaatggcgacgttaactccggagatggatatcgttaccgagggcgcggccttattcaggtgaccggtaaggcaaattacgctgcgctggtgaaccagctaggtgtggacattgttgctgacccagacctgctgacaggatatgcgctggcagccgaatcagctgcagcatggtggaaaaatcacgggctgaacgaaatcgccgatcgggatgatgttgtgcgcatcacccggatcatcaacggcggtcaaaacgggctagatgacaggaaatcccgcttaatcaaagctaaggggattttatgctcaacgtaa

SEQ ID NO: 455492 - DNA, 216 bp, Serratia marcescens
atggaggttttcacaagcatcccggcagccattgaggaggccagatacctgagaactgtcaccagtcatcatcactgcgtcacgcagaaacgagacgggacaatgcgtgtcaggcaggtggcaagcatgagcaaagagagactgctcaggaagatgtactgcacacagagcgacaaattcacgcgtagcacaatcaagacagagggcatcctatga

SEQ ID NO: 455493 - DNA, 333 bp, Serratia marcescens
atgcaggacgacgaacagattgatgatttccgggtgaggagagaggcgcaggtgaagggcggagaactgcgggtaaaggtcacagaactgggggggcaaatgacacaagcagagcaatacatgagtgcgctggtcagtctcgagttggcgtcgaagctggcacagaaagacgggcggaagattaacgcagctattcgcggttgctgtgcggcgctaaagcaacgcatcactgacgctaaggtgctgtcgatcatcggtggattggcaaagcaacctttccccgatggtgcactgaaaatgctgcgtcggcaactggatgaaatggtgggctaa

SEQ ID NO: 455494 - DNA, 171 bp, Serratia marcescens
atggcaatgaaatgcgctgactgtagacaggagctgatggaagacgaaacgtatgtctacgaagcatgcgaccgccgtcaccagcagcacgccgacgaagtgtgcggcactgagtttgaagtcattgatatggtaaggcgggaagatggcgaaccttcggaaagaggctag

SEQ ID NO: 455495 - DNA, 240 bp, Serratia marcescens
atggccgataacgtaaatcatcccacccactacacacaggcgggcatcgaatgtatcgacgcactggctgcggcaacatcagggaaatctggcattgaagccgtctgcgtggcaaatgcaatcaagtatctgtggcgctatgagctgaagaacggcatggaagacgtgaagaaggcccgctggtacatcgaccgcctgattagcgaaatggagaaatctaatggcaatgaaatgcgctga

SEQ ID NO: 455496 - DNA, 177 bp, Serratia marcescens
atggaattcatgaaaggttggctgattggcacatgggtttatagcttcatatccgtaggggcaacattcgacagaagcaaagacgtcgcctatgaatcgttcgtttgtattttggcgatgattatgaagtggtggtttattggatggattccctatctgatatggaaattaatgtga

SEQ ID NO: 455497 - DNA, 477 bp, Serratia marcescens
atgaaagaactagaccaattcacagcagatcggctgcgggcatttatcgataatccgctggagaacggatttactcgctacgaacagatggcgttggcttacgtagctttagctgcaaagacggcggaaccgattgtcgttgaattgccagctgcgtacatggggtgtcacggtgatgcaatcggccctagtgattttgacgatgcaaacgagatgcacgccatcgcaaaaacagagaagtggacaccgctgtatctatccccggcagcgcgagtcaactatccggaaatcccggatggttgggtatcgtgcaatgagcgcttgccggatacccatggaaattattggggatggtggagcgaaagcaagcgtcaggggacggtgtggtttatcaaaagtgaccttcaagcacaattccaaagcagcgaaataacccactggattccactgccacccccaccaaagcaggaggagtga

SEQ ID NO: 455498 - DNA, 282 bp, Serratia marcescens
atggataagcaacacgaagatagccgccgacagttcgaggaatggtttaacgatgaaatggtgctgcacatcagcgcatccaatgagacggttgtgcgattgatgtggaaagcatggcaagccagccgcgcggcgattgtcgttgagttgccagaggggatgacgacccgtgaggcgcttgatttgggtttcatgggagattacgcagccggagttgacaacggaatagaagagactgccaaggtcatccgctctatcggcctatcgattaaaggggagtag

SEQ ID NO: 455499 - DNA, 189 bp, Serratia marcescens
atggataacccaattttaatgacgattattgcggcaatgatgttgccagcatggttagtgattatgtcgttttgcttatggcagaacggtttcaaaattctaggatggaagatggttctgcgcatgatctgcgtattacctgttcttctgtggttatgtgcagctttcagttcactttatggagcataa

SEQ ID NO: 455500 - DNA, 267 bp, Serratia marcescens
atgacagctaaaagcgtgaatgttcaagcttacttggaaaaggaaaagttgcttgatgaaatcatcaccattcaggatgaacatatcgtaatcgccatccctggtaatgacttcgaccagacttatgacatcccattgaataacttaaaaaatggtgatgacttggtttcatggattttccaactgacagaaaagaactgggttgaccgcgacatcttgcgtcgattcattaaggttgccagcttgaaagcaggcgtaaccctttaa

SEQ ID NO: 455501 - DNA, 1380 bp, Serratia marcescens
gtgattaaccaagatatcgaagccagcgttatcggtggcctgttgctgggaggtctgactccgacagcgaacgacgtgttggccacgctaagcccggaagcatttgggattaaattttatcaggacacgtaccgggttattcaggcccaggcaaaaacacggaacctcattgatccgatgatggttgccgagtccatgggggaaaatcgctttgcggatgtgatggaaacttgccgaaagtgcccaagcgcagcgaacctgaagggatatgcaggaatcgtttctgactactacgaacgtcgccaagtgctagcactgattgacgacatgaaagaccaaattacaacggcaagtgtcgaaaactccggccgagctatggacgagttggcaagtcgattatccaaggttagaaagccaaaggcagagattcgaccgacgcacattagcgaagttctagatgcatacgccgttcaactggaagaccgactgaaaaatggtaacgagtcagacacgctgaaaactggaatcgatgaacttgaccgcattaccggcggcatgaacccggaagacttggtcatcgtcgccgctcgccctggtatgggcaaaaccgaattttcactgaaggttgcagaaggtgtcgctagcgccaaattaccgggcagcaatcagaaacgtggtgttcttattttctccatggaaatgagttcgctgcaagttgccgagcgctcgatagccggggcagggaacatgtctgtaagcgtgttaagaaatccggcaaaaatggacgatgaaggttggggaagagtgtcaacaagcatcggcagactttgcaatcttgatgtatgggttgtcgatgcatctaagttgaccgtggagcaaatccgcgctgtggcagctcgtcacaaagaggatcacccgacgctatccctgatccttgtcgattatttaggcctgattgagaagccaaaagcagaccgtaacgaccttgctatcgcccatatctccggaagcctgaaagcaatggccaaggatttgcgaacaacggttatgtcacttagccagctatctagggacgttgagaagagaccaaacaagcgccctgtgaattccgacctgcgagactccggcagcattgagcaggatgctgactcgatcatcatgctttaccgtgaagctgtgtatgatgagaattcccccgcagcaccatatgcagaaattatcgtcacaaaaaatcggtttggctctctaggcacggtctaccaaagcttcgttaatgggcacttcatggattgcgaccaagatgaagcgaaagggaagagttcgatgcaaggtcaatcagagccaagacaaaggaagtacaaaaaaggagcagacgtatga

SEQ ID NO: 455502 - DNA, 1113 bp, Serratia marcescens
atgggcgtcgttagacagttatctgattacaggccgccgatggaggtcgtggagcaacgcgtggcagacttagacgacggttataccagaatcgccaatgagcttctcgaggcgatcatgtcatctgacttcacatcacgtcagattaagctcctattggcggtggtaaggaaaacctacggatttgggaaaaaatacgattggataagcggggaacaattatccgaacttactggcatgccgagaacccgttgtagttctaccaagaccgagctgatgaacatgaatgttctttccaccgatggacgaaagtttggaatcaataaaaatattcatgagtgggtttcaatgaagcccgctaggcgcagggaatatggggctactaagaacaagtctgggcatatttacgtaatggcagtgagcagtgaggggccagtgaaaatcggatttacatcccgaagtgatgactctcgactaaaagagatcaacgccactcattactttggccatgacaagaaagcaacatgttttttcatgagcgatttcaatatttatgctggttctatagagccttacattcatgagcttctatctgaacggatgattaaaggcgagacctttaacatgacaacggatgaagctactgggtttgtaactcacgtatgtaacacattcaggccgggggtgacagtaagtgttacaccgtgggggaatgaggatttacaccgtgagggacacacaaaagaaactatacaaaagaaaaaagaaaatacccccaaccccctaacggaggttggtgcggaatgcgttaaaccaacgagacgaaagccggttcgcctcaactacgaggaatacctcgacgcctacaacgaaatcgtaggagacaggctaccacacgctgtagaggccaatgcagagcggcagcgtaagctaagaaaactgattgagtctctcgctaccaaaaacgttgatgggttccgggcatacgtcaaagcgttcatgtccgctgcaaggccattccattttggcgataacgatcgtgaatgggtggcgacattcgactacctgctgagaccaaaagtattaacggcaatcagggagggaacgctgtga

SEQ ID NO: 455503 - DNA, 339 bp, Serratia marcescens
atggaacagacaaaaacacgcaaaagcacggcaatcgaatttatcagccggcacttgatttcaaccgcacaccaggcgctgagcagcacacgacagaccgtcgttgcaaagctgcttaacgtagctgactcaacaattctccgcaggacagaaaaatacccagagattatggaaactctcgccgcgagtggcgtagaggattttgtcatgcgcggggagaaaaagttaccgcttgatcagtaccggtacttgatgactgtagcgatggagttcgcgaagtatcagctggaaatcacaaatgaaaaagccgggcagtgcgctaacactttcccggcctga

SEQ ID NO: 455504 - DNA, 186 bp, Serratia marcescens
atgctgaaagaagcagcgaccgaacacttcggctcccagcatgctatcgcacttgctttaggggtcagcgattctgctgtttcgcaatggaaagagatcattccagagaaggcagcattgaagctgagcatcctgaccaagggaaagctgaagtacctagcggaattctataagaaagccgcataa

SEQ ID NO: 455505 - DNA, 498 bp, Serratia marcescens
atgtctctagctgcggcgctgggttgctctccgtcacatttgctgtatggcgaagtgaatgatgggaatgtgagttatgttgctccctacaagccagggaagcgatatccagtgattagttcagtacaagcgggcgcatgggccgaagcggtagaggtttataccctgtcagatattgatttgtggcttgactctgatgctcacatacagggcagcgcattttggctgcgtgtagagggggagtcgatgactgcaccatcaggacttagtgttccagagggtacgtacgttctctttgacacagggcgcgaggcggtaagcggcaatcttgtggtggctaaaaagtcggatgagaacgaggctacattcaaaaagctgatcatcgatggtaatcagaagtacctgaaaggtctgaacccgcaatggccgctttcgcctatcaatggcaactgcaagatcatcggcgtggcagtagagaccaagatgaggctggtttaa

SEQ ID NO: 455506 - DNA, 282 bp, Serratia marcescens
atgttagaagcaagagttgctaagctggaaacggaagtaagttacatcaggcgtgacgtcgatgagatgaaggcagatgttaaatctattgataggagcatggccacagtactagagcgactagacgcgatcaaagaatcgttaaatggcaagccatcgtctgatgcggttgataaaaaaatagccaatttgaggctggcaatccttcttggggtcccatccatcatcgcagttggcaccggaatttttaaaaccgtaatgtatttattgacaactaaataa

SEQ ID NO: 455507 - DNA, 177 bp, Serratia marcescens
atggatatggaaatggcgcacgatgctatgtgcaaagtgatcggcgaggcagtgattcagctccgggctgatggcagggaagtgacggcagactcaatcatcgcgatgatgaccaggctgcagaacggtgagttcgatatggcggtggagtttgctgtggatctgctgcgggagtag

SEQ ID NO: 455508 - DNA, 258 bp, Serratia marcescens
atgacaacaatcatcgttaagccagcgaaagagaacagccgttcacgtcgctatcgccagcgtggcgaactgatggcacagcgccgcgaagatgcggaactggcacggaagattagtaaagcatgggcgaagttaacgcacgtagagcgccctaccaagaaagaagaatacgcaggttcatgctgcttgccagaggttgcgatttaccgcgcaggtcatcgttcatcacgaaaagaggcaacgcacatcattaagtga

SEQ ID NO: 455509 - DNA, 471 bp, Serratia marcescens
atgaaaaagtttgaactagtagccgaaatgacaaaggagattttcggcaggaaactgttccgcattcgcgctcttatctcattcggtgatgtagaaaagggcgaaattggcggttgggttgagaaagaagaatcgctagatcatgacggcaatgcgtgggtgttcggcaatgcgcaggtgtccggcgatgcgcgggtgtccggcgatgcgtgggtgtccggcgatgcgcaggtgttcggcaatgcgcaggtgttcggcaatgcggactggatcactattggccctataggctcagaaaatggatatctcaccgcatttaagcaaaaggacggatcggtcatggttcgccgcggatgttttagtggaacgatttcagaattcgagaaaaaggttaattcacggcatggcgataatgttcacggtcagatttaccgaagcctaatcgaagtgattaagttgaggctgtcatga

SEQ ID NO: 455510 - DNA, 258 bp, Serratia marcescens
atgagcatgaaaattgatattcgaaaatgcaacccatacggaaaagtaaagtggcgagaagtttgcgtcacccacgacggagcatcaataaagttcgacgtgtctgatggtgaggatttcaaatcattctgcaatacgttgctagatgcggcgtcatgcgaaatggaaaccgatgacattatcgaatacctgacagaccaagggtatgtggatgaaatcatagaaagatatgaatcatcgaagtcaagcgccgcctaa

SEQ ID NO: 455511 - DNA, 141 bp, Serratia marcescens
atgatgtacgtcatcgcgggcggcgtcagcatgggcgctgctcagttaaacgaatcactactcgaaattatcactcgccggatgcgctgcattggccgctggctgaaagacacgctcaaccaaaaaggagacccgctatga

SEQ ID NO: 455512 - DNA, 207 bp, Serratia marcescens
atgaatatcgaaatcacctgctctcgtatcagtacgatgccagggcaacgaatcggagagcaccgagccaacatcattaacgccacgattgaagcgcctgacgaagatgcgcagcgagaaatgctgtcgctggtagatgagtcggtgctgatggcatggatggctgagcgtggactgatagtcaccgaaagaaaggaggttgcgtga

SEQ ID NO: 455513 - DNA, 873 bp, Serratia marcescens
atgaaatttgagaaagcaactcgtaaaaagtcaaagctgcggctggcacttaccgggccgagtggttcaggaaaaacatacagcgccctgctggtagccaaagggattggcggaaaaatagcttttatcgacacggaaaaagggagtgcatcactgtactcggatatcactgagttcgacgtcttagagctcgatcctcccttctctcccgaacgcttcattgaggcaataaaatcagcagaagatgccggatacgagacgttaattatcgacagtatcacccacgaatggggcggagtcggtggttgtcttgagctggtagataccattgcgaaaacgaagtttaggggtaactcatggtctgcgtggagtgagatgaacccgcgccacagactgttcctagatgcaattctgcgctctccgatgcacatcatagcgaccatgcgcagtaaaacagagacagcacaggttgaggagcatggacgcaagaaggtcgcaaaactaggaatgaaggccgagcagcgcgatggtgtcgaatacgaatttacgacagttctggatattaaccacgaaacgcactatgcgatcgccagcaaggacagaacaaagctgttctccaactcagaccccaaagctctatctgaggagaccggcaagatgctcctgtcatggcttgaatctggcgttaacccgcacgatgaggcgttgaagcacttcactgaagttgccagcgcatcagaaacaaccgacgagttaaaggttgcgtttgaagaagcttggcgaaccctgcgcgggactgagcaacaagcgacagccaagtgtgtttatgacactagaaaatcggagttagagggcaatgagaacgccgcatga

SEQ ID NO: 455514 - DNA, 393 bp, Serratia marcescens
atgaccaagatgacttatgacgaaatggccgaacagctggctgcggtggttgctgagaatgtggagctgaaagctgcaatgcaccctgagttgatacctgatgaagtgctggttgtatttggcgacacggcaaagtatggccacgactcatgtgatgcaggaagttggtcatgggtagaaaatgaggaagaagtaatcaaatccgttttgggagcaatgtctaagcctgaaaccccggcaactgacaccgcagtgcgcgaaatcgaggcgcggggcgtggagaagtttgcggcacattttcagagtggtgagaaatactcacgggttgctgagttcgcacgcgaatacgccgcagagctgcgggagcacagccaggaggtggggcgtgggtaa

SEQ ID NO: 455515 - DNA, 225 bp, Serratia marcescens
gtgagcaagataaagacgatgggtgccagcccgctgagcggcagcattttctacggcacgctggacacagagaaaaaccgttgggttggtcagagaactgacgtcaccgaaatggctcgtcgcgcggttgctgagcatctttaccagacaggcgacagccacacctactacaccaaagacggccgcgagctggttctgagcgttgaaattaaggagcatgactga

SEQ ID NO: 455516 - DNA, 567 bp, Serratia marcescens
atgaataagcaactggaagagctgagcaagccggtggggtatgactatcagatagcgggtgcatgtattgcagatggacataatgaaaagggtaaatgggttgactgggataataagttaactcgctattgtccgcctgagtggatgattgaagaggggaaagtgacagagctcaaacccctctactcgcaagagtacgtcaatgcgttacagcagcgcatcgcggagctggagcatgagcgcgaagaatcccggcgggttatgtctgataatcagcagcaggcggactacatcgtacggcttgaacgtgagaataaaagactatttgacgcaaatgtgtcgatctgtgaacgggctgaatcagcagaaaagcgcatcgcggagctggaagccaagctggctacgccggtgcggttgccggaacttgctgcctgcccgctgaagtacgtgggtagcccagagtgggcggccgctgaagccaacaacaaagcccttgcaaaattcgctgcggtgctgcgcgagcagggattcatggtggatgccttcaggattgagggggaagcatga

SEQ ID NO: 455517 - DNA, 501 bp, Serratia marcescens
atgacaatcacaactgaagcgttggaagaaatcaaagagcaaaaagatttccatgcgctactgagacacatgcgggaagtagcgaaggctaagccacaaactcctaaagagataagcgccttggatttcaaaatttggcagtatgcagggcagaaaaccgtaactgctctgataaatcacattgactcacttgagtctcaactgctggctgcgcgggaggcggttaaaccgtcgtactggatttacgaatacacactgtctgacgcaatcgcaataacgcgagatttgtcgcgcgcggaaggctggcaaaatgaggggctggcggtgacgccattgttcaccgccccgccagctccagcagtgccggatgagtgcccggcagaaattcgcgatctgatggcgtcgcattctgacgcactcttcaacgatgacgacgcacagcagatatggagcgcctgccgcgccgcgatgctggcagcagcgccgggggtgagtgattga

SEQ ID NO: 455518 - DNA, 186 bp, Serratia marcescens
atgatcggattgcacgaaatccgcttcggtgcgttcagttgctatgtcgtagctgatagcaaagaagcggcagaaatgaacgttgaggggatagtcgaggcaataaagacggggcagccatgtgaggctaccgattgcacccttgagggatttggcaaggctgatattggagggttaatgcaatga

SEQ ID NO: 455519 - DNA, 198 bp, Serratia marcescens
atggacactgcaacagagaacgctctcgcatctatcgctaagacagttatcacagagttcaaatccccttctaacacactttcataccgcgaattactcgataagcactcacagaaaattgcaccaatgctgccggctaaaccgccggcttggctgcagctgaactatgtgtgtcatcgggtttatgcaggaaaataa

SEQ ID NO: 455520 - DNA, 1155 bp, Serratia marcescens
atgtcattattccgccgtggagaaatctggtacggcagttacacgtcgccgagcggcaaaagaattaaagagtctcttgggacaaaggacagacgccaagcgcaggagttgcacgacaagagaaaggcagagctttggagaatagacaagctgggagattttccagatgtcacgtttgaagaagcctgcctgcgctggctggaagaaaaggcacacaagaaatcactcgatgcagacaagggccggatcggattctggctcatgcatttcgaaggggttttactaaaggatatcagtgaggcaaagatttatgccgctgtcagcaggatgacaaatcgaaaagcagaggaacgatggaagcaacgcgccgcatcaacgcaaaagaagggagtcgacattggcctgtataagccagcgccggtatcaacatcaacgaaagccaagcacttggcgttgatgaaggctctgatgcgcgcagctgaaagggattggaagtggatagagaaatcgccagttatcaaagttccacaggaaagaaataagcgggtgcggtggctcgaacctgcagaggctcaacggctgattgatgaatgccctgagccgctcaaatcaagtgtggagtttgctctggcgacagggctcaggcgttcaaacatcgtcgatctaaagtggcagcagattgacatgcagaggaaagtggcatggatatatcccgaggaaagcaagtcaggcagagcaattggcattgcactaaatgacaccgcctgcgccgttctaaagcgtcagattggaaggcatcacaattgggttttcgtccacaccgaagccgtcaagcgaagcgatgggacgaaaacacagggtacaagaaaaatgcgtgtcgattctaacactgcgtggcgagcggcgttaaaaagagcgggcatagaagacttcaggttccatgaccttcgacacacatgggcgagctggctgattcaggctggagtgccgttatcagctctacaagaaatgggaggatgggaaagcatcgaaatggtgcagcgttatgcgcacctggcaccaaaccacctgaccgagcacgcgagacaaatagactcgatttttggcgatcgtgtcccaaatatgtcccacggcgaagttaagaagttgggttaa

SEQ ID NO: 455521 - DNA, 255 bp, Serratia marcescens
gtggatattcaacgctacctgcaacacatcgcctttgacgccacgccgcgtgtggatctggacacgctgcaacgcctgcaccacggccatatgctggcggtgccgtttgaaaatctgagtattatttaccatcagggcatcgacctgcgcgaacaggcgctgttcgacaaggtgatcaaccgccggcgcggcggcttctgctatgaactgaaccggctgttcgcgcgttgctgcggcagctcggttttacggtga

SEQ ID NO: 455522 - DNA, 1083 bp, Serratia marcescens
atgaccaacctcaaacataacctcgatgagctgcagcaaatagcaaaagaacgcacagtcaaaacgcaaactatcgaatatgatctggaaactttagtaaaaaaaataaaaagaaacatcataacgcttaatcctgagtatcaacgaaaacaccgttgggatgatgaaacatcatcaagactaattgaaagtcttatacttaatataccgataccttttatctacatctcccaagatattgatgttgatgaagaaatagattctgagtcatcacgtttctcggtcattgatggacagcagcgtcttactgcaatttataatttctttgagaataaatatcaactgcaaggtttagaagttcttgacaagctcaatggggcattccataaagatttacctccatttttaatgaggcgcctcgaagaaagaagcatcagatgtttgcgaattgactctacgcttgacccacaagtgaagtatgacatctttgaaagactgaactctggatcggtaaagttggagtcacaagaactgcgcaatgcaacatgcagagggccatttaaagacctcgtaaaaggattgtcaaaaaataagcacttcatattggcatgtaaattaacacctgatagttcccgcgttaaaaaaatggaagatgaagagcttgtactgcgtttcttcgccataaactaccttgatagctatagggattataaagggaagttcaaaaatttcctgactagtaagatgaattcatttaacaatctacctataaaacagttagaggaaatggaaaggttgtttaatgatacttttgaagctattagtaaatctaatatagattatcctttcactaagtatcgggcaaaagccgatggctttgaaaaaatgtctgattttaattctgcggtgtatgattcaattacacacctctttattgaaagtttgagaaaaggaacagttgttacgtccgaaaaaattatcgaaatgttttcagatccggatttttttgcagcatgtgaaggtagtgtaaatgatgttgttaaactgaacacaaggattaataaggcaaaggaaacagcataa

SEQ ID NO: 455523 - DNA, 786 bp, Serratia marcescens
atggctacattcattgcggattatcttgataccgttgatcttcagtggagagaagttgatattttagtcgatgaagcggttcgtgttcaggagtcaaatgaatatttatataatgctctttgtcgctcgattacagttttgattgttgctcatatggaagggtttgttaaaggtgcagtcaaaaacattattagcgattacgcatccataaaattcaaagagttaccaatatcgattaaaagaacttactgtaaaaaatatttagggtttgatgaaaaagcgttttccggatatcaaaatgcaatccagtgcctaatggatgatttagagaaaacagatgacttcaaaatttctcctgaaccatttatatcggataggaatagaaatccaaagccagatgtcattggtaatgtagcgtcaaggtttggggttggagatatttttaaaaacctacacgattcaaggtttgataagattttttcgatgacatccccacaaattaaaaatgttcttgaagttatctctactttaaccaagcgaaaagtttgtgatttcccttatagagtaaggaaaaatgcttactatacaagtccggcatcatatcgtgggcgaagtttatggcagacttttttagatgatttaaatcacaagcgtcataaaatagcccatggcaatgactttgcgaacgctacggatattaactcacttattgatcttaaagataaagttagaatacttcagtactcatttttattaattatttgttctgagttatgtaattcataa

SEQ ID NO: 455524 - DNA, 723 bp, Serratia marcescens
atgaacatgtgcgcagtgttgcagaaaaaaatgtcagatggatggactataaaagagatcgtctcttccagttatgaaggacacaatcactactattatctcggtaagagagcaccagttgtgaaggtcggagaagaaaaaataattaagcagtacgccggttatactcttatcgaaaaggatttacgtagcgttcttgtgtggttaaatgaaatagagaaaataaatccagaaccttttgctcgacaaagagatcctcagcagatggatttaataaagggctattttgtagcagctttaactttttatggtaaatgcttcaccgcaagcaagggacgaggaataaaatatgataggagtaacgtccctgaagagtatagggataagcatgacatcattatgagaatgcgacacaattttacagcacatagtggtgtcggttttgaaagcgtaaaagtaagtcttgtacttcatcctgatattaattcaaacatgaagcctacacttttcacagaattaaggcagcctgactaccataaagagttgattaaagaaatgataattatagttaaagctcttcaagagcaatcgattaataagagaagtgctttaagtgataggtttcttaatgaagttgttcggccaaaaggaaaattatattggtatcaaaaaggcacttatgatgacttcaatccccaggttacctcaccagttaatggatag

SEQ ID NO: 455525 - DNA, 1068 bp, Serratia marcescens
atgagtgacatcaagataaatagggagtctcttgaagaggcattaaaactaagcgaagatatactaagtgatattgaatctggcgtttctctaggcacctgcgccttgagggcaagtagattagcaagattgcttcaggattttgattttcagagaatatttttctatgagaatagtggttacccttctggacctaatggaataactccagaagtatgggctctttgtaaaaaagctgaacgagttaaatccatatttgaaaaaattgatgggaaaaataaagaagttgagagagcatcaactaaatccataagtgctactttattaaacttggatgcattaaatgaaagtttaaaagttgcatatgaccccaacatatcattaacttcagcaaatcccaatcagtttgttgggctagggaattctggtaatggcttagaacgacaaaacttgaggaaaagtataaaaacagagtctgacttcatcagcgaaagattagcttttatttataattacgtgtcaactaaaaattatgaacttaaattttcaagcatttcatctgatattttttctcgcacgcgagcgcatgtggattcttccgttgggcatttaatccctggggcggttcagaaattttcgtctgtctatgataatcttgcatcagataactcagaggattggtctaatgcagtccatagctgtagacgaattttacaagatttagcagatgctatattcccagctcgtgacaatttagttatagaaaaacctggaggtaaaagcaagcttataaagcttgggaaagacaactatatcaacagaattatagcatatgttgagtcccaatctgattcagaacgattcactgatattgtaggatcaaatcttggatttttaggtgaccgtttggatgcaatttttaaagcggcacaaaagggatctcatgatatcatatcttctcataaagaagctgacagatatgttatttatacatatctagttataggagacgttttatcgttggttgaagataagaaaagcactgcctcaactatatcttctggttaa

SEQ ID NO: 455526 - DNA, 1746 bp, Serratia marcescens
atgttgaaagctatcaaggagctgctggtcggtactcgtgaagtacctgccagggcaaaatcatcagcatcttcaccgcctgctgggccggcagggtattttatgccgcagtcctccacgcagctgctggacatgcccgcccgtaaacagtgcctacagcagctgtgggaaaacagctcactgccaaaggatttgtacgagcagttttatctgcagccactgcatcacctggtgacgctgatgcagcggctgccggcaactaggcaaggtgagtatgccagcgaaggaggcctggtcgatatcacgctgcagacgacgacatttgccgttcgcctggccaaggggcatatgttgccgccaggcgccgcaccagaagatcagtcggcgcaaaatattctgtggaacgcagtagtgttttacgcagcgctctggcgttacctgccgcaactcgtgctgttcgaaggtgagctacagactgggcgcacgtggttagccgggttgaccgttcctgccgaaccttaccgttttcggttcaaaccggtggttcctgagcctgttatcacggcaagccaaagcgggttaatagcgtgtaggttgttgccggcggaggcggtcaactggctgtctaccctgccggctgccgcgcaggcagtgatgctgatagcttcacgtcagcccagttccctgccggtgatcgatgagatagtccaggaggctgtcaagctggcgcgcggtgatgccattggcatggcggcgccagcggtcgttactgctccatcctcttctatacccgtgccggcagagacatcgccagatcctgttggtgcatctgctgcgcaggttgtgttggagagcagtgtacctggtgcagcagtccaaagtgctgtgacgggagaacctgctgccactaacgaccaggaaaatggtgctgacactgtagctgcagtcagctcggaagaagccatggctgttccatcgggggatgtactgctgagctccgcgttggatgcccccgtcaatgatttacccctggccgaaatggttgttgcacccgaacctgctgttgaggttgaggaggatatgcaggcgctgctttcgctgatgaatgtcagtgtattggagccggctgcttcagagcccgttgaaaaaggtgacgcctctcagaatgaggtacctccatcagaagggagtcagctgctggcaactgatattagcactgaaattgagggagctgatgagccagtgccttctccatcagaatcaattgtcgaaacgcctcctcttgaaaagccagacgatcaaccccttgttcgacctgatttcagccatcagggatctgaacagatagcgataagtcagcggcaacaagagatggaaaatgcagacgatgagttttggaagtggttggccacagggcttcaagagcagcgcatcagcgtcaatcatcctgagtccagggcgcatatggtcagcggttttgttttcctttgtgttccagagatttttcacttgtatatcaaagagtgtggtaaggagcgttccgagcggaacgctattcagaaggcgtttgaaaaacaggggaggcacagagtacgtaaagggcagcgattttttattggtcatttgtaccaggagcctgccggatgcggttcgtaccggcgtatcaatggctacctggtgaaagccaatagtttatatggggggaaacatgtacctgaggatagccagttattggtgatcccgtag

SEQ ID NO: 455527 - DNA, 621 bp, Serratia marcescens
atgatcctctttgacgaaaataatttatcccctgtgcgccgcagaaccttggaaaggctgactactgctgctttaaaactctataaagagaacaagtttcctaccgcagatgagatcactcgggaagccgaatacgccaaagtcacgctgaaaacctacttctcgacacacagtgaattcgttgagtacgtcgtcaaaaaggttatcggttctgttgaaaagcctgcgatgggagatgacgctgaggagaatatcgcccgattgttgagttggggttatggtgaactatactcccatgaaggcttaatgcgcgatgcaatgcggattgcacaacatcgctggcaaacctgtcccccccctgaaaaactagaaaaagatgatccactgctgaaaaaaagcaaccgtcgagaggctctctcagaagccttagcaccgttagagtcacagcttccagcggaaaaggtgaaaaggttggttatgctgatgtccgtgctctacggcacggaagcgatgaccgtgctcaaagatacctttggcctagaacagcaagaaatcatcgaattgacgacttggggggcacatttgatgttacgccaagtaatggctcaggaagttaaataa

SEQ ID NO: 455528 - DNA, 972 bp, Serratia marcescens
atgaacagggaaaatcagcagcggctacaatgggtaaaactctatgaaacatccggtgatgcggggttcgtatgccgtcgctgtggcatttctcgacccacattgcgtaaatggtggcgcagatatttggctcagggcatcgctggtctggaaagccacagccgtcgccctaaacactcaccatcaacaaaaaccggcgctggcgaagtcgctctgattttggagttacgtacccagcgaaatctgggggcaagacggattcaaagcgagttaaaacgacttcattcaatctcactggcaatggccacaatccataaagtcctttgccagaatcaggttaaacctgttgttaaattccggcgtaaagctgatttcattcgttacgaatgccctgttcccgatgatcgggttcagatggatacctgtaaaattggtcccggcttatatcagtatacgtctgttgatgattgcactcgctacagagtactgaggctctattctcgtcgcacggctgcaaacacactggatttcattgattgtgttattgaagaaatgcctttcccgatacagcgctttcagacagaccggggaagagagttttttgccgttaaggtgcaggaaagactgaaagaatacggcatcaagtttcgtccaaataaaccagcatcacctcatcttaatggcaaagttgaacgctcccaaaagacagacaaagctgagttttacgctacagtagctctctctactgataacctggaggagtggctggcagaatggctgcattactataactgggaacgtcctcatagcgctcacaacggtaaaactccgatggagcgctactttgaacttgctgagaaaacgccatactctgatgccgttcacgcaaactatcagcccaatgaggagcatatacaggaacagaattacaagcttgaacttgagctgagaaaattgaaacgatgtctatga

SEQ ID NO: 455529 - DNA, 519 bp, Serratia marcescens
atgtactactttgcatatggatctaatatgtcaacttctcggttacaagaaagagtaccaagtgcagaggcccttggatgttttgcgcttgccggacacgacttaaggttccataagtctagcaaggatggctctggaaaatgcgacgcatatttaaccaaaaacactgacaacatcatatacggtgtcttgttcaaaattgacccaaaggaaaagccagcgttagataaagctgaagggcttggatatggttacaatcaaaaagaaatgactgttacagcttctgatggatctttagtaactgcaacaacctatgttgcaacgaaaatagacaataatctaaaaccttattcatggtatgtaaatcatgtattagttggtgcgagagatgccttacttccagaacaatacattcaagaaaagatagcatcaattgaggcaatcgaagatagcgataaagaaagagatatgaagcaacgtgccatatatggtgaaataaagtgcttgaataaaaattaa

SEQ ID NO: 455530 - DNA, 450 bp, Serratia marcescens
atgattatgactaaaaacgaagaacttaagaaaaaggtggccttacataaagcaaaggcttttttgagaaaaattaatggcatcagtgacgttgaggtcattgatagtgaagtgttggattcagaggtatatcgtgctaaacaaaaagaaattttcagctatgatagtgactttgagccaaaatctgatttttccttagataattctaataatgccattgttcaatggcaatcagattgtctaaagtgtattgcgggcaagagcttattttttgaagttaatgatttttattttgtaaggttaatagtatcagatgtatgtggctttttgaaaagcctttatcttgaaaatggaaatagggatctagtgttgtttattgaatcgtcatcgcagatgttcgctttcaatgaaggtgagtatgtgatttatttttatgatgaattaatataa

SEQ ID NO: 455531 - DNA, 939 bp, Serratia marcescens
atgcaaagtacttcagagagtaatcgtagagttcctgctcatttctccggacatgagaccttccccctacgtcaaatgtggttaaaaaaggttgtagatcaatcaactaaacatggtctattacctaaatcggtctttactaataaagatgctatagcaacttttggtgtaggtaaaaatatggtgagctcaatccgccattgggctctggcttgtgggatcattgaagatgcaacaacaaaagaatttgttttaacaaagttagcctcatcgatcctgagcgataacggatttgacccctatgctgaacatccatcaacagcatggttaattcattggcatcttgccggtaaatgtttacgttcaaccacttggtattggctcttcaatcatgtgacgatgcccgcttttacgcgtaaggatttagagggtgtattagctaactatgctcaagagattgttcctgaacaccgtctttctcctgcaacattagagcgggatttggaagtatgtctccgtagctatgccccacgctcttcgggtggttcccctgaagattatgctgagcccttactcggtgaaataggtcttttacaggaaatacacaaagggcagtatgcttttcgccgtgggccaaaagcatcgttacacaaagggatattcgcttttgcattaatggacttttggcaacagaaggctgatggtttgagtgccttagcttttgaaaatattatttataccgagggttctccagggagagtatttaaactcgatgaagaatcggttgcgcaatatttgatcgagttgtctgagtttacagagggcgtgttggcttggactgactcggcagggttaaggcagatacacaaaaaagtgttgacagaaacagagcaagagaattttaaagaaaaaatgattaggtgggcatatgacgaataa

SEQ ID NO: 455532 - DNA, 963 bp, Serratia marcescens
gtggtactgacgacggtgctggtctgggccggtagtggtgatgccgtggccgaaccgttgccgatcagcccggaagaactgcgcccgacgctgcgtgataatgcacgcgatctgaaaaatctctatcaggaattgtctattatcggcacgacgcccggcatcagcgcggcgaatttccgtctgacccatgacacttccgatccgctggagattgactcctacaaaatatcgccgacccatgcttttgatattggcgtcgacggcttcagaccgtatatcgaaggcacgttcggttatgtcaaaagcgatcagacactggcgtttggcgacgatgacggggtgtccgatcgcctgagcctggacaccagaaccctgtcggccatggggggcgccggggtcgagtttgatatcgtcccaggcacgattctgcgcccgatgatgctgtttggctattcacgcacctcaaatgacacctcctccagcggctcgctaggcgatttgctccatgaagcggggcgtggactggcttttgattttaaaatcaatagcctgctgtacggcggcgcggtggaaatagaacagaatcatcgttgggaaaatgatgtgaagctgacggccaatctgcgttacaactatctggttgatgacagttatcgcgccagcgacccggagttggaagggcgcaatgatttcagcgtgatgaccgccgcgacagagttaaatggcccgacatacctgtcgctgttcggtcagccgctgcgttggattggttttgtcaccggcacctatatgccggagataaaagacaatatcggttttgactactttgtcgaaatcggcggcggtatagaaattgtcgacagcggcgtcatacccggtattggcggcgtcagcctgcgcggctccggccttgtgggggacggggttgaaggctggagccttgggctggccgccgagttttga

SEQ ID NO: 455533 - DNA, 1005 bp, Serratia marcescens
atgcgattttttattttattgctggggatgtttgcagtaattggtgcccatgcggagccggataatacctgttggggcgatccggtgactatcgccatcgtggatatagcttccgcaccttttacgagtaataaaaaaggtgcggagtcaacaatgaaatataaaactaatccaaactattttggtgggtattgtaatcgcagtgtgccatataccgtaatgactcattatgttgatatggggccgacacttataccttcagatattaacccagggtattttaaactcaatgatgatattgacgttcttttgggtagtctaggcgcgggaacaaaatactatcctttggaaccatctgatggattacttggtggtggcccaagcagttttggggaaaatatttttgtcagagcattcgttgtggccggtactggaatagtaaaattaaaattaaggcgggatattattggcggagctatcgtggtgccgccagatactgaacttttttcagcctaccgggttatgaatcaggaaccttacccgccacgccccagcaggccgttggttcaggcgcgtaccaaagggagcggacagataataccggtggcgccggagtgttcgattaatcaggggaacaccattgaagctaacttccatacgttacaaacggatttggttcccagccgcagcgatgatgagggctaccacaaagatattgcattgcactttagctgtaatattagcctgacgcaggatattcaggtgcagctggtggcggacagcgcggacttttcctcagatcttatccgctctgataatcatcagctggggtttgcgctaaaacatcatggggttttggtcaggccaatggagtcattttctgcccggcttgaaaacggggtggataatgagaatattaccctgtcgccggtaaaagacgcttttaatgaactgaagggcggtgggtttaacgcttcggcgacgctggtgattttgtctatttga

SEQ ID NO: 455534 - DNA, 1734 bp, Serratia marcescens
atgggacgtatcaataccaaaaatattgacctgggttctgcattgctccagcaggggaaaactgctgtaggtacggataagtcagagaaggttgagcttgttcaattgacctctgaaatcccgatggtgctgactctggatgacgtcagtcctttcccggataacccaagaacctcccggaacccgcggtatgaagaaatcaaggcttcagtgcgggcgcgtggcctggatacggtgcctaaaatcaccgcagatcctgagcgtcctgagctgggtttcttctttagtgacggagggaatacccgccttcaaattttggcggaactgtggcaggaaacgggagctgaaaagtttttccgtatctcctgcatgtttaaaccgtggccaggccggctttcgtgtttgattggtcacctggctgagaatgaagttcgaggtgaactgagttttatagaaaaggcttttgggatcaaaagggcacgggagttttttgaagagagcctgggtaaaaaagtctctttgcgagaactttctaacctgctgggacaagaaggctacccggtacataactctaatatcagccggatggaagatactatccaatatttgtatccccatatgccgaacctgcttaaatcgggcttgggacgacctcaaatacaacatttattgtcgttacgcgttaatgcctataaaacatgggataacttttcctcagacaatgcggccgttcaagattttgagggcgtcttcggggccgtttgtgcacattttgatgaccctgaggcatattctcttgagatgtttagggatgaattgatcggtgcattggttaaagctctcccacacccctctctgaattatgaccgctggctccttgagctggatccaaaggagcagaatcgccggcagcagcttggtgaagtgcacctgcaaggcgtgcctaattttgccgttcagccaatggttggatcacccgttgatggcagtggcgaaattgatagcggtgcagccattccgtcatcttcctctgatgcatctgtgccgggtacgtcgggtttgacgctgagcagcgcactggatgaacaggatggtgcagaggactcatccgatgccgagcctatttcctccggatctccgcgcattgaaacccagcatgacctgtatggagcgccgccggttctgtccggagatgttgacgaacagccctcaccaggcacgtccggaacagagactgcaggggcaggacaaccagcgcaacccgcgcaacacgcgcctgtagcaccggaagtaaccccgaacgaagagagttcggaagtcgcctttgctgaggaagggcttgaacccgtggtttctgtctgggccattccggccctgcaggatgacattgaacacctgcagggcatggcttatcgcctggccttcgaactggccgaacaagccggctgcgaaactgagcttaaagccgacaaggcaacgctgactgcggcagggtactgcctggccacacagcagtcatccccattcactgcattacttctctcactgaccgggccgaccccggccaatgaaccctgctcattaagcgaggcgttgattggtgctgctgatagcgccggcttcccgctgcttgatgatgtccatgccgtcaagtttctgcgccttgttcgcgttctacgccggctgcgtgaactgcagcgtgatgttgacactgatactggggaggacgcatga

SEQ ID NO: 455535 - DNA, 726 bp, Serratia marcescens
atgagcgattcacaacgacaagcgcggctggtgaaactggtccgcaaactcctcgaactggcccagagcaacagtaatgcccatgaagcagggttggcattggcacgcgcccagaagctgatggcgaaatacggtatcaccgagctcgaggcgaacatttcctccattaagcaggcgccgactcaggccgcgccgtctcagtcctggaacaaaattccggagtggatgacccggctgacctggactgtcgctcacgcgtttggctgtcgcccttacttttcttccctcgaaacccggagcggattactgcgccgcaacgtcattttctacggctttagtgagcgcccggcggttgctgcctatgcctttgatgtgctgagtcgccagctcaaggacgcgacggctgcttacctgaaaactcaggataagcgcctgaaaatggcgacgcgtcgggcgcgtgccgagcagttccgtgcgggttgggtcgagggcgttcgccgaattgtcgaggttttcagcgtgtcggagcatgagcaggcgctgatgtccgcctggtcggagcagcaggggatgaccacgctgaagagtcgttcggtgaaacggtgtcgcggtgatttcatagcgcgtagccagggttatctggctggacaaaatgctcgtctgcatcacggggttgacggttgtggacctgcaggtattggctacagcgccggggaggaaaaatga

SEQ ID NO: 455536 - DNA, 726 bp, Serratia marcescens
atggccgaaacatcgaaaggtacgcaacccactccagcgaaagcaggggctctcaaatctacccttaccgttgaattgcacacgttatatgcaatccgcttgtgggaagggcgtcggagcctgtctgctgaccctgaaacaaccggtaagcgtcgccctgacatttatagtatgccccgttttattcagcgggcggggcaaatcaacgcggcctcggctgaaaacaatccctatgctgatgctgcaatggttgccctggaaaacgccctgaacaaaggcatggagttgctgcagtcggcggtcgttgaactggataaaacccttgccaatattccagcccaaatttccttatcagaagtctcatctgtatctccactgaatattggtgtatttagtcgcactccggtggggtaccgctgtgtattcctgttggttgggtatgatcaactggcaatgaaagcctttcaggcctggcattacgggcttatctcgcgttcagaacgcgacactttacttgaccgtggagggcattggatccggcgcgtttacggtgtggtgcaacattaccgccatgtaaacgtgagtcgtgaagatattcggttaggcacaccggcagcccaggatgcgattgctcgttttggggagcctgatgccgatattctgaatggcgcaaagcgctcttcgttttcccctccgctgcgtaaagtagaaggagagcaggcatga

SEQ ID NO: 455537 - DNA, 585 bp, Serratia marcescens
atgaataccttattactaaaatcactacgctcttctgtggttatttgtctgctgagtggtttgacactcccattactgagtggatgcacgagctccgagattgccgattggaaccagaaaatcagcgatgcagcacattccattgccagtggttcgggggcgaactcaggttccggtgatatgccctggatgacgaaggccggtgctaccggcccacgtcaggacgtgcagcatacctatacgcttccggttgatgttgataccgctgctgcacgactgaaaagccactatcagtttatctccacggatgagctggaaagtctccgcaagcgcgatcaatacggtgactggagtgccggcgctattgatgaagcacggccggaatgggcagcgcaaaagggcagttactacaagatgggccaggagtggaaagataacgaccgcctgatgttggaggtcgttaagtccggcaccggcagtcggttgaaggtcacctacagctcaccggacagcactcacctgaccgatgcctatctgcgccgtctgatggaccagctgcagcaggttgccaaaggtcagagctga

SEQ ID NO: 455538 - DNA, 2037 bp, Serratia marcescens
atgcaactttacctttgcgaaaaaccgtctcaaggaaaagacattggcgccgttcttggtgcgaaccaacgcaagcagggttatctgaccggggccggtgtaattgttacctgggcaattggtcacctgctggaacaagctcagcccgagacctacggcgaacagtatggcagcccgtggcgagagtcggtgctgcccattgtcccgacacagtggaaaatggaagtcaaaaaggatacggctgatcagtttgccgttatccgtggcctcctgaagcaagtcgactcggttgtgatcgcgacagacgccgaccgggaaggcgaggtgatagcgcgcgagctgctggagtattgccagtttaccgggccggttgaacggctgtggctatcggcgctggatgaaaccagcattcggcaggctctggccaacaagttgccgggcagcaagaccgcgccgctctatgaagcagggttagcccgtgcacgcgcggactggatgaccggcatgaacctgacccggctttatacgttgaaggcacgggaacaaggctatggtgaggtgttgtcaattggccgtgttcagacgccggcgctggcgctggtcgtcaatcgcgaccgtgaaattgccaacttcgtctcaaagccctactggcaggtgcaggctacgctgcaaaaggacggtatcagtttcctggtcaactgggtgccggcggccaattactgtgatgaagaaaagcgctgtattcaccagaacgttgcgcaggcggttgtgcagctctgccagcaaaccgggcaagcggtggtgctggatgtcggtaccgaacgcaagaaggagtcggcgccactggcgtttgatctcggttcactgcagctggcctgctcgcgaaaatgggggatgggcgctaaccaggtactgagcattgcccagtcactgtacgagacccacaaggcaacgacctatccgcgtactgactgcggttatctccccacttcaatgcaggctgaaatcccggatgtgcttaatgccattacccggacagatccgacacaaggtgcggtgattgcttcgctggataccggatttgtctcccgtatctggaatgacaaaaaaatcacggcgcaccacggcattattcccaccaagcaggcatttgacctgagcaaactgtcagctgatgaactcaaggtctatcaactgatacgtcagcactacctggcgcagttcctgccgctgcatgaggtggatgtcacggaagcgacgttcaatgtcggtggccaactgttccgcacgcgtggcaaagtcgaagtgattgttggctggaaagcactgtttcagcgggaagagcgtaacgagaaagaacagccggatgagtcggaagatgcacgtctgccggccctggaaaaagggcaaccttgcactgtagccggtgctgaacttaaaacgttgcagaccaagccgccgagtcattttactgatggcacgttgatagctgcaatgaagaacgcggaggcgtttgtcagtgatccgcagttgaagaaagtgctcaaagagaacgcaggattggggacagaagcgacccgggccggtatcctggaaacgttgtttaaacggggttatctggagaggaaggggaaatttttgctgtcgacgccgatcgccggcgagctgattgatgccttgccgacggcactgacgaacccgggcatgacagcgctctgggagcaggcgctggatgaaatcgcccagggtaaaatgacgctcgggacgtttatggaacgtcaggcacagtgggcgacacatctggtcgacaaaggaaagacacaagcggtcaaattcaccgcgccgccatctcctccctgcccattatgcagcggtaccatgcgccggcgcaccggtaagaaggggggcggtgcattctggggctgcagcaagtacccagaatgccaggggatcatcaatatcgacggcaaaggcggtaagggtaagcgttataaaggaaaatcggcggctaaaaataaaacaaccagatcagagtaa

SEQ ID NO: 455539 - DNA, 804 bp, Serratia marcescens
atgacataccgttcctggggttcgggtatggtgtcgccaaggcagccatctattcgctctaactcaaatgctgcacataacctggttatgtgcagttttttttcatctcagccaccctggccggcagctgcttcacgttgcctgtgccagcggcacctctttacattcccttcaaggcgttcatcatggcgaacaacgctcagtgatgaaggtatcggctataaggacatcattatgaaagcagtaatccgtagtgagcagtacccgacccctctggggtatggtgagactgagcagcaggcaagaagagccgcggcagaggctgaggcttttcgtcaaggggctgcagcgaccgaagcctggcattatgccggacaaccggcattttcaggcggtttggtcgtggatatggatgaacgtctttgggcggcattcctcaaatccccccagtgcgttcctcgtacaaagctctgtgacgcgtttggtcagttaacgcttgttctggataatggtattcctggagccaatgtcgtgcctgtatctgcaggtaaggtgtcaatcaatggtcgtcaatacacttatgatgccagtcaggccgactatgccggtcgtccagacgcattgtgcgttaacgtctatctggagggtgttgcggtaaaacaccgattcattgatgatatcgacgatatggacgcggggaacattctctttactgcgaagcgattaattgcggaaaacgaaggccagattgcgcagtatgctgtggagcaggaacttggtcttggttttaatgacgacgagtag

SEQ ID NO: 455540 - DNA, 306 bp, Serratia marcescens
atgatgctgtcattcacttcatttaaggcatcagccagagaacccgcatgggcacgcacaggcagggcttgggtttatgctgacaagtatcgcctgaccaatataggttcaccggacagacccaaatggtctgttggatcagggaactttttcagaagcaagcaggatgcggaatggtttgcctatcgactttactgccgggattaccggcagattcaccccgaagcggtcacccgtgattatggtttggctacgccaatttttattgaatacgacgatgatgactacgactgggaggacagatga

SEQ ID NO: 455541 - DNA, 330 bp, Serratia marcescens
atgaaagcagtgaaggtcaaggttgacgagagctttttcctgttcccggacgggtttgacttcccgttcccggactatgtcatcgaacatcttccgatgatccgtgcctatatcaaggccggacaggaaatggttcacgcgatggtcaattacggcaaggaagatacctctgaaatccagaagcgcctgacgttgttaaaggcggagcttgctgaatttcgggcgagaaccggtgtcatcggtgtgccgtttgatatgcgagatgttaacctgttcgttatcgatcgcggcattgacgtgactgcagagattgacctgacagaacgatga

SEQ ID NO: 455542 - DNA, 168 bp, Serratia marcescens
atgaccaataagcaactggaagacctgaaagaacaactgccggcagcgctggcgacgtggcaacagtccaagggccggaggagcactgtcggatggttgcacgccgccaaccctgaagttatcggtgccttgctggctcagctcgatggggactctgatgatgattga

SEQ ID NO: 455543 - DNA, 600 bp, Serratia marcescens
atgatgattgaacagatgaaggcgctgaaagctgctgcactggcagcaacccaggacgtgtggatttcagtggatgaagactggagtgatggcgaccaggcggaaattaccacagagaatcggatcgatggttgtgtcatcgccattgcgcaggtcagtggcggaggctcagagtccgagctggacgaaccatttagatctgagcagcaggccaatgctcgctacatcgcggcggtaaatcctcctgccattttagctctggtgaatgagctggaagcgtcatatcggcgtgaggagaactatcggaagaagtgggtcgatgaattggccaacctgcaagaggctggcaagcgcattgccgagttggagtctcaactgcagtcagggttcacgtccgaagcattggcacaggaagagcgggcggaaaatgccgaacaacgtattgccgaattggaagcacgtctaccgatgccggtacagctgccggaggtgagattcatcaaagtcagtgggaaggccgtcgcgatcatgtctgccgaacgggtcaaagagcagttagccgccgccagggtccatgttgaacaggaaggggggggatga

SEQ ID NO: 455544 - DNA, 558 bp, Serratia marcescens
atgtttcatcagtctaattatgttgttgtgactatccgctttctgtcagcggtgctcagggttttgttggtctggccaggtgtgatcctggcggtttttggcttcatgttttttatcgcaacgctcggtgatgatggcgggcataaggaagcttcccgcctggcggacactgcgcagggataccgtgctgcgcccgccggaatgatgatggtacgtctgtgtccacacgcggatgatcctgtatcggaggcggtaccggtaccagaacgggactgtaaacttcatccgaagacctttgctgacgttgccaggcaagagcggcgcatcattctctggatcgggagtgtgcttatcgcctttggcctgttggttgaactgttttatttgttgtatcgccgccgccagatgagcctgaatgctgtgtacggaagcctcaatgcaagaggtgagtatcgtgctgtgacctacctcggtgctgccaatactgatgagcgtcgtcgttcttcatcacgtgatggcggactatccgggaataacaaggaaggtcgcaatgagtaa

SEQ ID NO: 455545 - DNA, 1101 bp, Serratia marcescens
atgttcgatgttgacgatactgcacccgatactcccgacccccgtgaactcagtcaggatgtgcaggcgctgatcaacaatggtctggattttctggataaagcccgtgaagagttggaggcttcgaagccgaagttctccgtcgtcagtttctggactgcggtcgagattttactgaaagttccgctggcgcacgaacactggtcgttggtctgcagcccgaaaaagccaataaaaaagcaggcttacctagccggtgattttcagtcggtgacctacgaagaaacccgtgaaaggcttaaggacgtacttgaaagacccctagatagagaaacggacagtgcttttgataaggtcagaaagcaccgcaaccgcgtagttcatttctaccaccccactttcaccgaggctgaacaacgtcaaatactcaaagaacaagctgacgcctggtttgccctgaaccggttattaagggatgaatggaaagttatcttcggtgtcaaacataattggaagctggctttcggtgaaactcgtctgattaggggaaacgaattttatgccgaggtgcggtttaaacaggttaagcctgaactcgagcagctctctgaaaagaatattcaaatcggtaactgcaatgagtgccatcagcatgcgacggtaacagggactgaaacgaccggtaatgaaaaccgtaagcttgaagttacgcggtgtaaggtttgcaccagtgctgtaaggcaaattaccctggtttgtccagactgcgaaatacctcaattgctacctgagggagatggtgattttgaatgcgaacactgcgactacacttcggataggtataaactgctggatgaggagttgttccacagtgtggatgaacagctactctccgtatttcctgctggatgtaccaattgcatgactcctgaaagcgtatgtaaatttggagacggctatctttgcactcagtgtttcatctattacaccgagcttcatgtatgtggttgttgcggtcacctgagcgatagcgttcctgaactgagccatatccgaggatgtgaattttgtgatggtgaccaacgttattttgatgactga

SEQ ID NO: 455546 - DNA, 405 bp, Serratia marcescens
atgaaaatcagcacgttgctgacgttgttccctctgctgatgccggcatcggtgcttgccggcacggtactctataccgattcccatcatcctccgagcaacatcgatgcgtcggtatccgtgatttatcttgacggccccgagcagctgcagaagcaactgttcggcgaactgtcgtcaaaccctgatgaagctcagcgccaggcgcaggccgtactgaaatccccgcaatggcaggcgaaggagcagcagctggccacggtctaccgtgcagtggtgcacgcctgggagctgggcgtcaaaaaagtgccggcggtggtgtttgatgacaccgacgtggtgtacggcactgcagatgtagctcaggcagtgtcattgcgcgctcaggcgcagggagggcagtaa

SEQ ID NO: 455547 - DNA, 1008 bp, Serratia marcescens
atgcaacaccagcttcctgatacatcgcttcccggccagtcccgcctgaacctcaaatccctcggcatggccatgatgctgtcagtagccagcgtgccggcagccaacgccgcgctgaacagcgcgcagattgttgccagtgccgtgtcgcaagcctgtatcagctggcgtgtcagcggtatctgttactggctgttctgcggcctgcacggctgtacggtgcggacttcggtcaaagtcacacatttcattccggaagcggtggtctcgacctacaacagtcagggtggtaatccctggcgtgagatgtcgatggtcagtcaggcctccggcggcctggaaagcagcattaccggcgcgctgagcggtgtctctgccggcggcggtaataacgagctgaaaacccccggtcagcgcaagaccaacctgcatttcaagtacgctgatgccattggccacccggcgacgtccatcattggcggcagtatccccgggtattcctgccgcagtgccgccatgccgttcgtgccgtatttcctcagcacgctcgacagcctggcgtggcgtaccggtatgcccgaatccctctatccggaagccctggtacctggccaacgcgagattggcagccaggccggcgccaacatgtgggggaacgtctacccccggtcggggttcgtgacccaggttgatgacgacaaggccggcgccgtcgtggcgcagcgggtggctgacatcattacccgttctggtcagcctcacgtctaccagccattggtgggccagcgttcggaagggtactggccgccgggcgccgttcaggagaataccggcacccgcaaccacaaatggcagcgtctttcaccgcagttgagccagtcctgtgcggtcttcccggacggagaccatccgccggcggcagatgccaacgccgcctttgccttgtggcaaccctacagctgctgccagcgccgcgggcagcgtttcctctacagcacggatttctga

SEQ ID NO: 455548 - DNA, 1485 bp, Serratia marcescens
atgaataacacgatgcatacatttttacagggacggcgcagtctgctgtctctgctgattgccggcagcctggcgttggcaggcacaatgagtgcgcacgctgatgacaatgacgacaacggtacgctgtttggcgtttcgctgccgcaggtcaatgacagcaatgtcgggtacgggaaaagcgccagcggcgcggtgtccgacaagctgttctactcgctgggcggccgttcggtgatttcgcagccggcgacacgcggcaatatgcagcggctgggcatgaacctgggctggagctcggacctgatgtgcggcaacttcgacctgaaaacgacgatcggcaaccagcttaacggtgtcaccgacgggttcaagaacctgatgagtgatgttattcagggcgccaccggtgcggtggccagcctgccggcgatggccatccagcgcgccaacccggggctgtatgaaatgctgaccaacggggtactgcagggcggtgttgccttcgacaaggcacagctcaactgtcagaacctttccaaacggatgatggacatggcggataccggtgcctggagccaggcggccgcgatggaagaggccaaaagcctggtcaatagcagcggcggcgatgccgtccgctcgatgaatgcgacggagaaagtgaccggccagtccgggcagacctggatcggcgggcagaaacgcggcggctctggccaaccggccatcaagccgacccatgacctggcggctgccggctacaacatgatgaatgcgctgcctgtcaccagtacctccggcgtgtccggcagcagctgcacaggcggcgcctgcgccaaatatgccagcagcgaggaggccgccgctgcggtggtgaaggtcctgggcgacacgtcattgcgcacctgtaaggacgcgtcgcaatgcaccagtggcgaaggcgatgagcagccgggcagcaccgtggccggcaccggttttgctccgatgcttgaggaggccaccaaagccaacaatgagcagctggccaaactggttaatggcgctgaaaaaccgacggcagcgaacctggccaagctcaaatccggcagcctggcggtgaccgccggcgttgtgcgtgcactgcagcgtgacccggacaatgctgccctggtcgggcgtctcgccagcgagctggcgatggccgataccatcgagacggccttcctgatgcgccgcatgatcaccaccgggatgtccgaaccgaatgcggcggcacagaaggtggcgatgcaagaaggtgatcgccgcatcgaagcgctcgatcgggaaatcacggcactgaaaaacgagatggagatgaaacgggagatttcccgcaatgcagtgctgaccattatcgatcgcgagaacaaccgcgctgaaaccaacccgcagcgtcagtccgcagacagcccggataccaagtttaatcagctggccgtaccggaaactgaccagtga

SEQ ID NO: 455549 - DNA, 1524 bp, Serratia marcescens
atgatgaccaacagctacctggagtatttcctgacgttgctcggctggatcgtgaacaacggcctgtgggagctgctggtcagcaccgggctgtttgtgctgccgctgctgttcaaggttgtcggcatctggctgaaagtccgggaggagggggaggacgaaggtaacaaggggatgctgtcgctgccgcgcatcgagaacctgctctatggtgccttctttgtgatgcttgcctgctgcctgccgctgatgaacgtcagcctggacaccatcaagtatgacagcagccgggcgagtacctgcggcacctggacgccgaagaagccggatgaaaccgggtacgccagcatgatgtcgagcatgaatggccagacagcaaaagtgccagtgtggtggctggtcgtccataagctgtcgaaggggattacgtctgcggctgtggccagcattccctgccggccagacctgcgtcaggtgcgttttgaggtccagcacagccgggtcaataacccggcgctggcgaaggagctgcaggacttcaccaacgactgctacgcgctggcattgtacacctggcagaaccgtgaccaggggcagacaacggacaaggcgacgttgcgtgatatcgaatggctgggctcgaaaaccttcctgaatggcgggtactacaacaacctgcagtcgaagacgccacgtgcgagcttcccatggaatgaatcacgggatagcggccgaccgaacaccggccggggtgggtacccgacatgcagcgaatggtggtcggcggccgacaccggcctggaagcccgggtggtgaagcaggttgatccgggtgtgatgctgcggatgtccgccgcgctcaagatgatgggcgagaacaacgccgactacaaggaggcggtggtgcgtcgcctggtcagcccggataacctgacggtttcccagggggggcgcgcttatgccggctatggcggcaatgcggacttcactgggagcaacacggtgacacgtatggcctcactcggcggcaccgccctggggagcctggcggccttcccggcctttgatgcaatgcgccaggccttgccgatggtgcaggcggtcctgctgatggcggtgtatatcatggtgccacttatcctggcttttgcggcctatgagtacaaaacggtgatcactatgacgttcgtggtgttcgcgctgaacttcctgacgttctggtgggagctggcgcgctggctggacagctgggtgttggaggcactttacagttcagactcgcacagtcgctggaacgtggccggtttccagaacagctctgacgacttaatcatgaacctggtgatgggaactatgttcatcgtattaccagcagtatggctaggtgcgctgtcatgggctggagtaagcgtagggaatgctttaagttcagctcatcaacaaggaacagctaaaactgaaagtgcaggaggtaagttaggagaggctggagcaaattacgtggggaataaggctatgaaataa

SEQ ID NO: 455550 - DNA, 204 bp, Serratia marcescens
atgttaaaaatgattttcgcctcacttgccaccttattaagccttggcctcgcgatcctaggcatcattaacctaaacaaaccacttgaaagcgacatatatcagtcctttgtcagtctgcctgaggttagttatatgtttattcttgtcggcctcattggtgtcttgttggggggcaaggagatcagaactattctaaggtaa

SEQ ID NO: 455551 - DNA, 1065 bp, Serratia marcescens
atgttgggtaaagcgggaaacgctatgaaaaaacgcctttttgtcatcacattgacagtggttacactggctattctattttgggtaatcaaagtgtttgatgagtcgccgcgcactgatgatgcctatgtgtatgcagacactatcaaggttgcaccccaagtcaatggccttattatagatatgccgattacggagaaccaactggtaaaaaaaggtcagatacttttccgcattgatccgcgcccgtatcaggatacgctgaaccgtactactgcaagtctggcacagctggaacaacagatcattttgacacagcgtaatgttgacgcgcaggggtacaatgcccgagctgctgagaaacgcgttgatgcagctaaggcggcggctgaccaagatgccaatacattgcgtcgtctagaggcactaagacctcaaaactatgtatcaaaagagtctctggatcaggctcgagcagctcagcgtgcttccgctgcgcaacttcagtctgcaaaactgcaagcacagcaggctaatgcagctatcagcagtgtggccgcattggtcgctcagcgtgacgtccttaaagcggatatatctaccgccgaatttaatcttggacataccactgttaccgcaccatttgatggtcgtattacttcgttaacgacgactgctgggcaatacgccagtattggtcaaccggtctttaccctgattgatagcgacacctggtatgtcgtggctaacttccgtgaatccgaactaaagaatattcgtgacaatgctaaagttgatgtttatttgatgagtaataccagtaaaagctttaatggtgtggtggattctatcggctatggtgtttatcccgatgatggtgggtctactcagtctggtttgccgaatgtatcacgtagtattaactgggtgcgtgtagctcagcgtttccctgtacgtatccgtatcttggaccctgaagctaacctgttccgaatggggacatcggccgtggttaatattcgttctaatgatattctttctcaccaagacggtaacgaattatga

SEQ ID NO: 455552 - DNA, 2109 bp, Serratia marcescens
atgagtgagttggccgcatcgggtgtaaagccaagttccttgttccgctttcttcagcaagaattacgtgttttccctggtcgttacaatgcgatgctgcgttattcgctcgcatcggtcgtcgtcattgttatttcgatggcattgaatatcccacagctagcgtattctttattggttgtgttttttgctacgcaacaaaatatcgtattaacacgaatgattttcccagtatttattattcttaatacgttggctgttgggtgtgccatcctgatgctgaagtttaccatcgactatccgatgcttcggttgatttctgctgctattatattgcttgtgttgctgtatcgaatgcggctgtcaaaaaaatggagttttttatattttggcgtcgctattaccatcacctatgtgcaaagcttcgttgatttgagctctgatggtgaaatgttattgcgtaattgtatgtggacttgggttgcgggttgttatgcgactttggttgcacatattgttaatacgttattcctacctgttgagccagtaaggcaactgaagcgggagatgacgaggatattgagctctgtaagttgctccctagatgccgttgttgttggaaagccggtggcaataactagcttggaagagatccaggatagtgtattgacactacataacttcctgaagttttcggtgatgcgtgatagtcgttatcgtgaaaacgaggacaaacatttggctgaggttgcttccgttgaacgtctttactctgcttcacgtgatttgcaccatctagctgccactgctttaacggatgacgttgttcagtattgtcatcggttgtcagaagagtgtcgttcttttcttcatagtatcgagcaggatgcaacctataacctggaaaggttacagctagagcagagcaaggctatgccactttgtctgcaagagatgtacagtgccctgtgtagcatatcgttgctgattgagcatgaaactcagtcagcgcccacggtgagtggtaatgctcccggagtgagtgactctgaaactggattatcgtatgactatgttaagttcggtattaaaacactgttatctgtagctatctgctatatattttatacaagtgtccaatggccaggcatccatacatcgatgctgacctgcattatcgttgctttacctggtgtcggtgcatcagtacaaaaaagtttgttgcgaattggtgggtgtttggttggcagtgcattggctttattttgcacagtgtttatcttgcctcatatagattcaattactggtctactattaatggtcattccggtaatatccctgagtagttgggtggctgccggttctgagcgtagcagttatgcagggattcaaatcttgtttgcttttgcgcttgctatgtttacaggttttgcacctaatcccgaactttcagaaattcgtgatcggctaattggtatcctattgggaattatggtggcaacaccgatacactgtttcatttggccagaaaccgaagggaaaacgctacgtcgctccttggcagaggtgttcttctatctatccgaaaggatgagtcatttagcgaagagcaaaacaaagcaagctagtggatgggcaaaacttgatgcttcgcagaaattgctggcacaggtagcattggaaccgaattggcgcagtaatgataatgagcaactgacgcttgactgccaggtattattggggaaattacgtgagttgcacgtcgctctttatcgactagaaaatgaatatgcgctgtttgtcttagaaaaccagacaaatgaattcttagtgcagatagagcgtttaatgcaggatctcgcagctgagatgaaagcctatgctgaaggattacagaatgaacccgttatttcaatgactattcgagatagtttactgcgggatacagacagcatgtgtgaacgtatagaaacgacacctaatgatatgttgagttcggataatagaaggttgctgatgagcatccatgaggtcgtttctatatgctattctattcctgcgtggccagaagataatcaacttatattacccgaagagaaactgtcatga

SEQ ID NO: 455553 - DNA, 540 bp, Serratia marcescens
atgaagagagaagtgattaaacgcaatgcagatgaaactagagaaaaattactaattgcggcgaagactattctttctgaggaaggatacatatccttcagtgaaaataaaatctgtgaattagttggtgttactcgaggagccttaaggcatcatttccctgcagggcgttatgaccttattaaagagttggcacagcgattcttactgcaggttccgaccagtaatacttccgatgtcaaagataggattgttgagttaatcacatatatgaatcaacaccctattcaaaatccattggccttgattatggaaatttggttggctacttttgcagatgaacgattagcggactccgttaaagatgtatttgagcaacgttatcgggtttttttcaatcttgactcgttggatgaattccctgagcatcttgtaccatatcggtttatgttctggggagccattttatcactgcatcaacagaataaaggagagcgcaaattacaaacagtgctcgattttattaattctcatgtatag

SEQ ID NO: 455554 - DNA, 144 bp, Serratia marcescens
atggtcaccggattactcaagtttttggcgcaagggatggggatgggttaccagtcaagttggaaaagaaagatactgtataccaacgtgtttctttgtttggaggaaataacgtttcagtctatagattgctcgaaattttga

SEQ ID NO: 455555 - DNA, 834 bp, Serratia marcescens
atggaaaggcgcgattttatcgtaaagtcagtattagcaactgctacccttgcggcaacttactgttcacagggaatatcttcaactaccatggcctcccctaactctggacgtgaaaataaaaaggctcctaacgcgaaaaccattgccttcgtactttttccgaatatgactccgttagatatcgttggacctgtcactgtgctccaaaactatgatttcaacgttgagtacgtctaccatgataaaaatccagtaccgacagaaataaactccctatcattgatgcctacagctactttttcggagttaaactcagtcgatatcctttgtgtgacaggcactcgcaatccttttaatgctatcgctgataaaaaaatgctggattggatcaatacagttggtaaacgtgcagagtacgtcactagcgtatgtactggtggtcttattattgcagccgctggtttgcttgatggctataaggcttcaactcactggagctttcaagacacattgactgcattaggtgcaatcccttcagatgaacgcgttactattgatcggaacagaataacaggtggtggggtgacggccggcattgattttggcctgtatttactttccttattaaaaggaaaaactactgctgagttaatgcagctatttgtccaatatgctccccatccgccattcaactctggcaccccacaactggctggccaaaaattaactgagcaagcgaaagaaatcacagcaacttatctgaccaaagaaactcctaactataaagaaactctgattgaggcaattgattataaaaaaatttatctataa

SEQ ID NO: 455556 - DNA, 750 bp, Serratia marcescens
gtgattgaaggcgacctgtccagttacttcgacaccgtacatcatcgactgctgatgaaggccgtacgccggaggatcagcgatgcacgtttcatgactctgctatggaaaaccatcccggcgggacatatcgatgtcggtctctttcttgaagacagtctgaaactcaggctgaacatggacaagaccaggatcacccatgtcaatgacggctttatctttctgggtcaccggatcatccgcaaacgcggtcgttacggtaatatgcgggtggtatcgactattccgaaggagaaagccagaaacttcgccgcatcgctgacagcactgttatcaggcaactacagtgaaagcaaagtcgatatggctgaacaactcaaccgaaaactgaaaggctggaccgcgttctatcagttcgttgattttaaggccaaaaccttcagttatatcgaccgtgtggtgttctggaaactggctcactggctggccagtaaataccgtacaggtatcgcatccctgatgaggtggtggtgcaaatcaccgaaaccggggcagagcaaaacgtgggttttatttggtaaaaccaaccacggtaatctcagcggtgaaatcctgtaccggctggtagggcaaggcaagaagctgttccgctggcgtcttcctgaaagtaacccctatctgaggacggaagcgagaaacacatacacatcgcgctacactgaagtggcaatggcgttcgccagcgtttaa

SEQ ID NO: 455557 - DNA, 492 bp, Serratia marcescens
ttgataatcagcgaaatgcaacgcaagcttgccacatgggcagccaccgatccgtcccgacggattgaatggctgctgcgtctgataacacaaccagaatggctagctgaagccgcgcggatcacgctttcatcaaagggggcgcatacccccggcgttgatggtgtgaacaaagcaaagctacaggccagactggctgctgagctgcaaatcctcagggatgaactagtctccggtcactaccagcccttgcccgccagacgggtttacatccctaaaagcaacggcaaactgcgaccactgggtatccccgcgctgcgtgatcgtattgttcaacgggcaatgctgatggcgatggagccaatatgggagagtaattttcatacactttcgtatggcttccggcctgaacgcagtgtccaccacacgatccgcacggtgaaattacagctcaccgaccgtgggggaaacacggggacgctgggtgattga

SEQ ID NO: 455558 - DNA, 2067 bp, Serratia marcescens
atgaaaaaacacgattttgtgcgtactccgctcgcttctctggtgcttattgcactgctggctaataccacagtagctaaagaacagcacaactatatgcaaatgcaggatgactccgtcatgatcgtcactgcaccggcctcttctccactggaggttgttacttcacccaaaacgccacgacagcctataccggccagcgatggctctgactatctgaaaaccattccaggattctcgcaaattcgtaatggtggcactaacggtgatcctgtttttcgcggcatgttcggctcgcggcttcgcctgttaacaaataacggtgagatgcaaggagcatgccctgcccgaatggatgcgccaagctcctacatatctccagagagttttgatctcctgacactgataaaagggcccgaaaccgtgctctgggggccaggtaattccgcagggactattcgttttgcgcgggagcagccacgttttgatgaaccagacattcaaggaacggccagcttgcttgccgcatccaacaaccgctgggatgaaaatgccgatatcagccttggtagtgaagacggatatttacgtttgacgggtaacaaatcacgttccaacgactacaaggatggcaatagcgatcgtgttccatcgaaatgggataagtggaacggggatgtggcgctgggctggacaccggataaagatacgttactggagctgaccgctggaaaaggcgacggtgaggctcgttatgccgggcgcagtatggatggggcacagtttaaacgtgaaagcctcggcgttcgttttgagaaatctaacattggtgacgtgtttgataagtttgaggccaatgtctattacaattacgccaaccacattatggacaactattctctgcgctcgccggacagcagcatgtcgggaggaatctctggtggaggtatgaactcttcaatggattcgtctatggatgcgggttcttcaatgaacatggcgatgccaatggccatggaactcgacagacgcaccgttggtggacggatgatggggacctggaactggtctgactttgagctgcgcagtggcgcagatacccagtcgaatacgcaccgcagcaaaggtgaggacggatggatgaaagacgcacgcttccacaattatggtcttttcagtgaacttacctggaatgctacggatctcagtaaaatagttagcggtgcgcgtcttgatcgggttctagtcgacaaattcacggatgtcggttcctctgtgcgtactgagacgctcccctcaggttttatccgagtcgaatataatatgtctgagatgccggtaatgttttatacaggtatcggttatacagaacgtttccctgactactgggagcttttttctccgacttatggaccagacggctcaacagatgcttttaataaagtcaaaacggaaaaaacaacccagattgatattggcgcacaatacaaaggccagcgtctggaaagctgggtatcggcctacatcggccgtgtaaacgatttcatccttttccattacgatccgaataatgcatatatcagtaaggtggataacgtgaacgccacgattatgggtggcgaagcaggcctgagctatcaactgagtgagagctggaaaacggatgccagcctggcatactcaaggggaaaaaatacaggtgaccatcagccgttaccgcagctcccacctctggaagcacgactgggtctgacatgggagagcggtgactggagcagcacaagtctgctacgcctggtcagcagtcagcatcgtattgccattaataaaggcaatgtcgtcggcaaagattttgacagcagtccggggtttgccattttctctgctaacaccgcttataaagtaaacaaccatattaaagttagtgcaggtgttgataacctgttcgacaaagcctacagcgagcacctgaatctgtcaggcaacagcagcttcggctattcctctaatacatcagtaaacgaaccaggaagaacgttctggggtaagattaacgtcactttctga

SEQ ID NO: 455559 - DNA, 153 bp, Serratia marcescens
atgaagatattatttatgttggaattggttatcaaaacggggtcgatattaacaaagcaagagttcgtgattatactattccctctgctaataatgagttttctgagggtgacggcgctgaaatattttataaatttattacagaatgcgtga

SEQ ID NO: 455560 - DNA, 192 bp, Serratia marcescens
atgtttgaccctgataaataccgttcagttacctggctgaagggcggtcgtacttttcctaatctcgactgctttggcatcgttaatgaaatcaggcgtgacctggggctcactgtttggcctgatttttccggtatcactaaggatggtaatggtgtaagcatccctgcaaaacgaaccattcacttttag

SEQ ID NO: 455561 - DNA, 897 bp, Serratia marcescens
atgaatgaacgtgaattatctctgataaaggccatcagcgaggaatttggggcggtaattaagtctatgcgtcaggagtttacgagtgaattatccgctcaacagctggcgtttgaagagaaaattacccaactcaccctatctatcgcagaactgaaagaggcggctcccgatattgagatgcggatcggtgaggtcgttggccggatggaaattcccgcggcaccggaactgccggacattaaatcaatggtggatgaggctgttaccgcggcgatgcctccgccggcacaggatggacagagcgtcaccgttgacgatgtacggccgatgctcgaagagctggtgagcactgctgttgcagaaattctggtaccggtggcgccggagctgccggacataaagtcgatggtggatgaagctgttatcgcggcggttcctccgcctgcgcgcgatggtgaagatggtcgcgatgccctgcagattgaaatattgccagacattgacgcggaaaagagctatccgcgcggaacctatgccactcataacggcgggctttggcggtcatttgaaaagaccgccggcatgcgtgggtgggaatgcctggtggatggcattactacagttgatattgagcaggatgagcatcgccactttactgtaactgttgaaagatcctcaggcgccagcacaagtaagtctttcgatgttcccgttatgatttaccgcggggtgtttaagtccggtgctgattatcgcccaggagacacagtaacctggggtggatcattgtggcattgcgacgaaactacatctgataaacctggggaaactggctccaaagggtggacattatcagtgaagcgaggccgtaatgcgtccgctggcgggagataa

SEQ ID NO: 455562 - DNA, 576 bp, Serratia marcescens
atggaagcagataaaatctcaattgagatgctgacggcggcgaaagattcagcaacgtgggcattttggtcaatgattggaacttgggttgccggggtggcaaccttcagtgctgtgttcgcttcactttacctatctcagaagaaaccgacgtcacacttgactggtaaagttactataaagagagtctatgaccatatttacgaggggcatgctgttgtttttagcgtagtgaacctttcacttcatccggttgtcctttcccgtatcgaatggtcattcgggaagaagcaaagaataatccagatggtgggagaaggaggcactaatcacttaccggtaaaaatcgagcatggtgaggtagcaaaatatcgaattttacttaaaaagggtaaagagcattttgcgaacagatttgctagcaggctagaaaacaaactctctcgtgttgataaattaaagtgttgggcagttttgtcaacagggaaaaagtaccaaattattgttgatagccgtatgaaagatatgttagcagactcgataaataaaaatcgcattgacgatggaagctcataa

SEQ ID NO: 455563 - DNA, 366 bp, Serratia marcescens
atgagcgacaaagaacttgagcaggagatccaggccaaaggcaaaaccgcgccacgcgtgacgcctgatcacattgaaagcatcatcaccagtgaacattacttcactgctggtgatggttatgcaggtgctgcagcattaggcgttaatgagggcggtattatttgcgccccagagcctctggatctgctcaccttctgcgtcttggtgctgcgaaatggcttcaccgtcacaggtgaaagtgcctgtgccagcccggagaacttcgacgcggagatcggccgcaatgctgctcgcgagaatgccgttagcaaaatctgggcgctggaaggatatttactgaaacagcggctgcaccaaggttaa

SEQ ID NO: 455564 - DNA, 519 bp, Serratia marcescens
atgaacaagtttgcaagattacttttaacagcaagctctatcgcaccggtttgtataactctgatatttatagggttcgccaaaaatgtgcattggttgatttattcatctgcaactatttgcattctaagctttatctcgtgtgtgttttttatacaatacgcaaagaaataccttgtcgaattaagtaagaatatcgactccatatcccctgctaacaaggaggtcaccaactacttcctgagctatttattcccattacttgggactgactctatctcgtcagattggaaatatgctgtgtttttttatatatcactacttttttatattagtttttctgagaactacaattttaaccccctcctttccttgattggatataaattttatgaagcggaagatgacaccggagttggttttgttcttatatcaaaagaggtaattacagatgtaaaaagaaaaaatttcaaagtggtaaaactaaccgattacacttacctacacattaataggtga

SEQ ID NO: 455565 - DNA, 873 bp, Serratia marcescens
atgcctttatttgcagtaatggaaaaaaacacagcgactcgaatcgttaggatcgaaactgataaggatgctgatgaaaaaataaccagacttttcaaggagcagtatgaatacttcgagactcattacgaagattctattgaatactgtgcaggttacaccccgagttataatgagtgtcattttttggatggctttgttgaggctgatgacctaactgatgcagtaaaaagaagtaccgccattacgacgtgggatcctacagttattcctatcgataatattaaagcattattcgttggggtagacttccctaacgatcataagaaaatagccctacaatccttcaataggggccaaattctagatgtgagcaaatcactatggcttagtaaaagtgctttcaaaatgtcaacatctatcggattcaatgtggatgagaagcttgttgcaacgattagaggaaataaaataaaatttaaaagccttcaaaaactaagggggattttcgatatggatcgatatttctctgaagcaacagatgctgacattaaagccttcagtcaacatgacaagttcaagacggaagacggttttgatatgagtattattgcagatacggttatcagaacaaaaataactctaatcaacagttcaggagtcctaaataatgaaactagcttgttaaaaaaagccgctgaggatgttgggttcgaattgaaaacttacaatgacaatggaatagagaaaattctcatcccaagcacaaagaaagaagttaaattattgctgacctttttagatgaagacattttcattgctgccattagcaaaataagattcaagtccaattcaaaaagaccaatgaaataa

SEQ ID NO: 455566 - DNA, 138 bp, Serratia marcescens
atgttttatatccccttgtacgcagctttaatgccactaatttattgggttttgaagatcggctacgcatattacgttgtcaaacgctacaagttgattcctagttcagaatttttccataggaataacgatggctag

SEQ ID NO: 455567 - DNA, 765 bp, Serratia marcescens
atgaccgtaacacgccgttggactcgggaagaattactactcgcttttaccctgtacagtcagatcccctttggaaaactgcactccaaaaaccccgacatcattcattatgccgaactgatcgggcgtacgccgtcagcactggcgatgaagttggttaacctcgccagtttggatccattcatcactgaatctggccgaagtggcctaaaaggcgcatctaatgccgatcgtgaattatggcaagagatgcgccaggatcccgaagcgttcaatcaacaatgccaacacgctacagcacacttagaaagaccaaacacaacgcctgctgatacaggcatcaaagattttaccggtaatgaacgtatctcaatggtcaaaacacgcattgaccagaacctattccgtaagaacgtactggcagtttatgagtaccgctgttgccttacgggacttgaagaaccgagtctgctgattgccagccatattcgcccttggaaagatgcggttgagcatcgactcaatcccaacaacggtctttgcctctccagcctacatgacaaagcctttgaccgcggttttatcacctttaacgaacacctagaattggttttatcaccacaaattagaaaactgcaaagtaccgcctatcgagataattttgaaaaatatgagggtcaagcaattcgtattcccatcaattccccaccggatgaggaacatatggcataccatcgaaaaagtattttccttggcaacgcgtaa

SEQ ID NO: 455568 - DNA, 375 bp, Serratia marcescens
atgcaaagaaccttacctgtagctggcgtgctatctttgctgactggctgtcccggccctgcggacagagctgtaccccgtatccccgcctccgtcgttgtgaaggacaacagcatttgcccactgtcgcccatgcgggctggcgagcagataaccgcgctgcaactctacagtgatgcgggcgataagctgattaaactgctgaatgatgcccctgtctatgtcccgcaaggcgagtgtctgcctacgtttggctatgcatttcttcccgggaaaaagtacgtcgtcgcctatgacgtggcggtcttggagcagccggcatcgcatgtgatcatcgccgggttttctgtgtcttctgacaacacactgctctga

SEQ ID NO: 455569 - DNA, 2043 bp, Serratia marcescens
gtgcgcggccagataacctgcgccgtcgacccggccggcatcgagacacgctatcagtacgaccgcttcggccgtctcaccgcgctggtcaaccccaacaacgagcgctggcagtttgactacgacgccggccaccgcctgctggcccagagcgactttgccggccgccgcaggcagtaccgttacaacccgctgggacaggtcagcgccataaccgagtacccgctggcgcaggacggcgacgcggcgcagccgctccacacccgtctgagctatgacgcgctgggccgcctgaccgccaaagagaccgccgacagccgcaccgaataccgctaccaggcgcgcacgctggaggtacggcgtaccccgctggcgctgtggcagcgggcgcaggcgtgcggcgagcagcccgactggccggagacgctgcgctttagccgcgacgccgccggcaacctgtgtgccgaagagaaccacagcggactctggcagcacagccatgacccgctcggcaacctgagcgccacccacatgcccgacggcagcaccctctcccagctgcgctacggcagtggccacctgctgcagaccgcactgcagaccgccggccagcggctcgatatcgccggctggcagcgcgacaagctgcaccgggaagtgacctgcaccctcggcgaagtcacccaggagacccgttacgacagcgtcggacgcatcaccctgcgccgcgccagcagcgaacgcagccacccgctggtgttcgaacgccgctaccagtgggaccgtcaggacctggtggtgcagcagaagctgattgagaacgacaacctcaccgacgggccgcagttccagcagcgccgcttcggctatgacgcccgcgggcagctgacccacagtatcctgccgcagcgcgaggagcgtttttactacgaccccgccggcaaccgcagcgacggcccggccgtcaccgtctggcgcaacctgctccagcgcctgaacggccaccgctggggctatgacggcttcggccggctcagctggcgccgtgacggcaacaccggcgtcgagcagcgttttcagtacgacgccgagcaccgcctgaccgccgtcactttcgacggcgacagccgctaccagcgtgccgaataccgttacgacgcgctggggcgccgtacccggaaaaccctctacccgcaccacggcgagccgcagactaccctgttccactggaacggcctgcagatggtcggcgagcacagtcccgaccagccgcagcgcagcacccagtatctgtacaaggaagacagctacgagccgctggcccgcgtcgaccgccacggcgacagcagcgaggtgtactggtaccacagcgaactcaacggcctgccggagcgcatgaccgacgcgcagggtaaagtcgtctggcacggccgcttctccgcctggggctccaccgacgccgagagcggcaccctcgccacggcgcagaatctgcgctatcagggccagtacctggacagggaaaccgggcttcactacaatctgttccgctactacgatccgaactgcggtaggtttacccagtcagatccgatcgggctggcaggcggggaaaatacctacgcgtatactccggatccgattagctgggtggatccgttggggttgatgagttgctctactgatgcagcccttctgcgtagaaatatggttcaagatggggaagttacccctggttttaaaaatgcggcacatcacattattatgtctaattccaaagactatagaatggtcgctcttcgaaaaaaaatggatgaattcgatttacattttaatgaatcttataatggtgtgtttttaccaaccagttcaaaggaaaaagccatagctaaagtggccagccctgcgcatagtaaaatccatactaatatttacaagcaaaatatctatgagcgtttaattaattcaaaaaatgctgatgaatttgttgatggattagaggatatcagaaaattgattctgagtggtgattttaaatactga

SEQ ID NO: 455570 - DNA, 612 bp, Serratia marcescens; identical to SEQ ID NO: 455470

SEQ ID NO: 455571 - DNA, 189 bp, Serratia marcescens
ttgtactggtaccacagcgaactcaacggcctgccggagcgtatgaccgacgcgcagggcaaggtggtctggcacggactcttccccgcctggggcgccaccgacgccgaaagcggcaccctcgccacggcgcagaatctgcgctatcagggccagtacctagacagggacaaatcagccaacggctga

SEQ ID NO: 455572 - DNA, 483 bp, Serratia marcescens; identical to SEQ ID NO: 455471

SEQ ID NO: 455573 - DNA, 684 bp, Serratia marcescens; identical to SEQ ID NO: 444391

SEQ ID NO: 455574 - DNA, 858 bp, Serratia marcescens
atgtgtgaaaataaaactgttagcgtatatatatcaacatgcaatcgtcatgaaaaactaaagcgtgcagtggactcagtgctgcaacagtcataccctcatattgaggtcttgatctgtgatgatgcatcaacagacgctacacaggaatatgcaacaagtcttgccatgtctgataagcgagtacgctatctcagaaatgagcagaataaaggagcttgcgctgcaaggaacctgggaattttttctgctacaggcaagtttattaccggcttggatgacgatgacgagtttactattgaccgtattcaatattttgttgataactgggacgatcgttactcttttctttgtgccaactttacaaatgtattcagcgatggggacagccactattacaataatgaaaacaatgtagtatttggttttggcgccatgttgtttgataatgttgcctctaatcaggtgttcactctgacctccaggctacaggatattggtggctttgatgttaacgttaggcgtttgcaggattgggatacctggttacggctatcacacgcttttggtgaatttgttcgtttgcctcgcagcacgtatcgcatgcatcatgatcataataaagacgcggctcgagtatcaaagagttactctttcctgaaagcatttgaggaaattgggaaaagaaacccggtaatctatggtgggaagaacctctctaagctaacgtatcttattgccttttatagacgtgaacttagctttacccaggcatgtcattggttattcattactaaatcgcccaaaaatatggccaggtattttgcgcaattcttccttaaaagggagttggattag

SEQ ID NO: 455575 - DNA, 840 bp, Serratia marcescens
atggctgaacgacatgttttaggattgtcaggaggtaaggatagcgctgcgctggcagtgtatatgcgtgacgcctatccccatctcgatatagattatttttttactgatacaggtgaagagctacctgaagtgtatgaattcctcgggcgacttgagggctacttaggcaagccaataattcgtctaaatccgcgtcgagattttagattctggctgaagcaatacaaccattttctacctagtcctcagactcgatggtgtaccagacagctaaaactattgccatttgaagaatggattaggccttggctagctgccggggatgacgtgacatcatatgttgcaatacgagcggatgaagattatcgggagggatatacctcaagatcttctaacttacatataaagctacctttccgcgaagctggtatagataaaccaggtgttattgatatcctggcatcatcagggcttggttatccaaaatattatgaatggcgttcgcgcagtggatgtactttttgctttttccagcaaaaaatagaatgggccagattgaaagaaaggcaccctgaagcatttgaagcagccaaagctcttgagaaagattcccttgagcacggctcaccatttacgtggtctaaaggtgagtcattatctgagttagagaaaccagaaagaattgcccaaataaaaaatgattatgagttaagattgagaagagaaagaaaacgtcgattggttaatccattacgacctaatgatgtttgtatcgatattgatgacttattttatgaggatgaaggtggtggggcctgtaatatctgtcataaataa

SEQ ID NO: 455576 - DNA, 1248 bp, Serratia marcescens
gtgaaggtgggggttgattcggagaaagtagataaagcatttgagctattggcgcgtgccggtgttgatagtttacggagtacggagtcagcctggcaccgtatcgctgataaacagggaaatccaactaacttcaaagatctcgactatcagctaaaagaagctaaaaagtacggaatgagtcatttgtttgttatcggatacccgccagcaaaattcacggtggcaaataataaactttctgctgttgctcctcgctatacggctgcttatcaaaattacctcgccgtccttttaaaacgtttccaaggctatgatgttaagtatctggaactaggcaatgaagtcgatgctccaaaagtatggtgggttaactctacgcctgccatgtatgttaacgaaatgcgcatgctaaaaaatgcaacgaataaatattatcctgctgccaagaccgttgctttttctgctacttattcaaggacgccagggaagggaggcccagctggcggacgtaatttcattgaaaaaagttttgctctcggtattgataagtatactgacgcttactccattcatcatttttcattcgcggggcagggaaaccttccagcttatatgcaagcaatgatgaataaatataacgccggaagtaaaccattactggataccgaacagctggatacagggattgctgataaaaccaagtcaaatccgtatgatataatcaaactatttgctcgtgcgttcttctatcacgatatgaagagaatggattattatcttgcacgggatgtctactttggcaggaagctctatagcatggggctgtttgatcttgagtggcgtccaaagttgcgtttgttggcctatgcgatggctgctgacgcaatgaaagggaaaaaactggtgtatatggctaatcctgcaaaagatgtggaggcctatgttcttacctcgaataaaggaaacggtaaaaaatacaccattctcatgtggaaaaattcggttaacaatggcaaggtttctcctgtgatggttccgggtatcaaaggtagcgtagatatagagaaatggaacctggatgttgaaagtaagagcgatatctcaaaaggtatccctcttgacggccgtccaatcgctatctataccaatgagaaaccagattggcaacctgcggataaatctgtttttaagaaaaatggccctgcggtacaggctagtcattctccaatgccgaatgatgactga

SEQ ID NO: 455577 - DNA, 837 bp, Serratia marcescens
atgagtaataagtgtcttgttattgtcgtgacatataatagtgaaaaacatattcagtggtgtgtcagtgggttagataacatcgagagtgaggtggaaattcgcattgtggattctggttcaaagaatccgaattatttagactctgtggtgtcaacaaataagatcagtgtaattaaagaagaaaatattggatttgtcgccggcaataatcgggctctttatgatattgatgaatttgactgggtactattcttaaatccagatgcacgtattgataaagagtcgatggaaaaactattgacctttgctacgcagtctccgcagcatgagtctacagggatgtttaccgtaccattagtacggtacgatatagctaacatgaaatcgctaaacgtttttgattctgtaggacttggctgtaactactatggccgctggtatgacattaaggcgaatgaaccggtagtgacgttgagcgaggagtttacttctgttgaaggcatttgcggcgcttttatgcttacgaggacatcggctctaaaaaagtgcttggattctaccggtggtatgggatttgagcgttcctattatatgtataaagaggatgttgaaatctctcaacgctttataaggtcggggtgggacttgattgtttacaatgcttgtactgcctatcattgccgagggtggaattcttcacggaaagctgttccttattgggcgcgatggcattcggcagttaacgatgtagatgttgcaaggaagtataagtggcgtgcattacctatggcattaggcaagctggtttgggttaaatattttgaaaaaaaatag

SEQ ID NO: 455578 - DNA, 585 bp, Serratia marcescens
atgaaagttattacggtgttaaactccgactttgataacctatgttttcagcttgctgacaaaatcaattctggttattcgccagacttaattgttggtgtggcaaccggcggtgaatttgttgctaaaaaaatcgctgaacgcttgaatgttccaacattaataattaaacgccagcgtggcgccacaaaatacaagactaagtttaaaatatcaaagttgcttcctttacttcctgagtttattaacaataaactcagagtctttgaggtaaagtataatgagtgggtattcaacaaaaaaggtcgagttgttaactctggtaaagttattttcaaagaaggtgatgctgagcagttaaaaaaaagtaaaaatattattttagttgatgattcagttgacagcggtggtacttttgtcgattgtattaacttcttgaataatcattgtaaacaagaaacggttatcaaaacagctgcattgaatgtgacattctcagatccggtagtaaaacctgatttttgcatgtatgaagaaattctgctgcgttgtccgtgggcaaatgatgtggctgtgaaaaaatga

SEQ ID NO: 455579 - DNA, 612 bp, Serratia marcescens
atgaaatatattgcctatgacctcgatggaactttaattaaatttaacacattcaaagtctgggttatcttatcgtttatactttccttgatttttttcagaatacccttcctgaagaaatttatcgggctggtaaagtcaaggaagcaaggcgatttggaccgactcgggtttaaaatttctttgctagcactccaggttaactctactttttggagtaaagtaggcagtgtgtatggggggtgtctggcaaagtattttcttcgaaaagatttgctggcattgcacaaaagtgcagaacgttgccttgcaacggctgcgccggatatatatgccattccattttctaaaaagttggggctatttaagactgttatatgttctcattttgtttccgatagtggtgattatatcgagactttgaatgaggagaaaaaaaatgcagtgttgaatgatttctcttcccatccggatattttatttaccgaccattatgatgatctgccattgattcagatgtgtaagttctcttatttggtttcacctgataaatcgtcaaaagaaaagttcatcagggtattatccgtagatgcttataaaataattgattga

SEQ ID NO: 455580 - DNA, 378 bp, Serratia marcescens
atggagccactgcagctggtcgccctgcggcagcgtcagcgcctgcaggttggacaaggcatcccactggtactgcaactcgccgttaacgccctgctcgctcagcaggttgccggccctgtcgtaacgcagctgtacgctgtccggctcgatacccaattcactgccggcagcggtcggcgtgcgcgtcaggcggttcatacggccggccgcatcgtactgatagtgccattcggcgctgtcgttggcacgccaggtcagttggccggcgtcgtcataacggaattggtgcagccgcggggacggctgtggctccacgtccggcgacgcaacttcccggtattcggtaagttgcccgtcaagcccatagcgatataa

SEQ ID NO: 455581 - DNA, 888 bp, Serratia marcescens
atgagagcacctcctcttcaggcattgcgcacctttgttgaaatcggacatcgcggcagcgtccaggcagcagcgcaggcgctacatgttacgcccggtgctatcagccaacagctgcgctcgctggaagaacggcttggcgtcgtactacttgagcgcaaccgcctgggaatgcgtttgacggaggccggtgccagcatccacccgcggctcagtgacgcatttgcgcaaattgatcggtcgctagaagagttgaaaacacgtgaaagccctcagtgcctgaccatcagcacggtggccgcgtttgccgcctcttggctggttccacgcctgggaaattttcagcagcgtcaccccggtattgaagtccgagtagaagccacggcaaacctggtggatttacgccgcgatcgcgtcgatattgccctacgccacgggttgggtgattatccaggtttggccgtcactccgttgatgtcgcccgtgctggtgccggtggcctccccccatctgctcaccgctgaccagacgctgagcgaacctgcagattgcctgaattatcctctgttgcataacagtgatcgcaccgactggtcgctctggttaagtgcgcacggtgtggctacagatcctcgagccgaccgtggcaatgtgtttgaagatgactttctgctcatccgtgcggcagaggcaggacaaggcctggcactggtgccggcagcctatgcgcagatagagatcgccgccggtcgcctggtacaaatactggataaaccctggcccgcgagatttgcctactacatcgtataccagcccgatgccgcccttcgtcccgaggtacgcgcctttatcgcgtggctgttaaccgaggcggtcgctgtcccctga

SEQ ID NO: 455582 - DNA, 624 bp, Serratia marcescens
atgttgaatctctatactgacagttcacctaacggctttaaggcaacgatcgctcttgaagaactggcgctgccttatcgtctacaccatgtgcgtatcgaggctggtgagcatcgtcagccggattttttggccttgaacccgtatgcccgcatccccgtcctgactgacgatgagactggtgtggtactgttcgagtcggcggctattttgctgtaccttgccgataaaaccggccggctgatgccggatgatatcaaggggcgttgggaggcgatcaagtggttgcaatttcacgcttcaagcgtggggccgatcgtcgggcagcgtgtacacttcgagttatttgccgctgaacgtattccggccgcgattgagcgttatcgtagcctgacggaggatgctttcgcggtacttgaccgcagattggccgcaaacagctatctggctggtgatgcctattccattgccgatattgctcattttggttggatgcacatcgcccgcatcatccggtttgacttcagtcgctatcgtcacctgtacgcctggttccagcggatagcggagcgccctgctgtccaaaagggaattaccttgcctgcgccagcaacgggagcgtaa

SEQ ID NO: 455583 - DNA, 138 bp, Serratia marcescens
atggctgatgataaacgtcttaatctgctggaaaaaatagctatcgtgatgtttgcggcattggttgcctattttgcgctaacgcttggtctgtcgctctcgggtctggaacattcgtggccctatccgatgagataa

SEQ ID NO: 455584 - DNA, 1461 bp, Serratia marcescens
atgcatgacactcaatttcaatcactattgcctgatgtcccagcacattttatcggcggtcaatggcatgccttcgaatccgttcgtgactcactcaacccggcaacggaagaggtaatcgggcaagtggcagagggtgatagcagtactgctaccatagccgtggaaaatgcccaccaagcgcagaaagattgggctgctctgagtatttccgcacgcgccaactatcttcaggatgttatggtgcaagtaaaggataatgctgaagccctagctcgcctgctggtcaccgaacagggaaagccgatcaaggaagcccgtgatgaggtcagtatggccttaaccatgctgcgctactacgctggctttggttttcgccagaccggtagcttgatggctgctaactatcagcaacgcagcacgataattcgtgacgaacctgttggtgttgtggttgcaataattccttggaactttcctttggcgatgtttgttcgtaagttagcgccggcgttggtagctggcaataccattgttatcaaaccaagtgaaaacacctccttaattgctttagcaatggctacgctatgccagcgggcaaacctgccagccggtgtggtcaacgttgtgaccggccagggcaggacggtcggtgatgcgttggttcgtcacccacagacaaacttggtaactatgactggctcgactcgtgccggccgtgaaatcctggctgctgccgtgggaaacattttgcctgtgtcgttagagctgggaggaaaggcgccatttatcgtgatggcagatgctgatgttgagcgcgcagcccaggctgcgctggcttctcgtatgtacaactgtggccaggcgtgtatttctaatgagcgtacatatgtgcataccagcatctatccaaaatttatggaagcgctgctcaaggctgcaagtcaactgacaatcggtgaccctcacgacgagtcaacagatataggcccgaaagtcagtgcggcagagcgcgataatgtgttaaagcatatcgccaaggcacaggagcaaggtgcgaaggtggcatactctggcacgccctctgacttgacaggcaaaggtttctgggtcccaccaacaatccttacagatttgcccgcggacgctgaaatattccaaagcgaggtatttggccctgttttgccagtgattgagttcacgacgttggagcaggttgtagaatgggccaaccgaagtgaatatggattgagcgcctatgtttacactcgagacctgagtaccgccatgcagctaactgacgcactggaaagtggcgaggtgtacatcaaccgtacggggccagaagaaattaatggttaccacgcaggttggaaaagttcaggtctaggtggagacgacggtgagcatgggtatcgaacctatgtgagaaccaaaataatttatcttgactacagctga

SEQ ID NO: 455585 - DNA, 855 bp, Serratia marcescens
atgcaactatcccaattacgtgcgttctgcgcggtcgtttctacaggctctatcacagctgcggccaaggtactcaatcgtgtgccgtccggcgtgacgatccgaatccagcaacttgaagatgatctgcaatgccagttattcgtgcgagaaaaaaaacgcctcacgctgtctcccgccgggagacagttgctggagtatgcacctcaactcattgaacaggctgataaactgcgttctcttatgcgtaatgagcaggcgcagggatgcttgacgattggcgcgattgatctggggttgattgcgttcatgccgacccttattggccgtttccgggagcgctatcgcggggtcaatatggatatacgctgcgaaccatcggagagactggttgaacaagtgctcgacggtacactagacattgccttgaccgacggcccggtacagtcgccttcacttgaaagtgactacgcgttttccgatcaattagtactgattacggagaaaaaccatcccatcgtcaccaatgcaagtgagttatgttgccaggaagtctatggattcagacaaaactgttcatatcggctgcggcttgatagttggttgctgaaaactcctcaggcacatttgaaggtggttgaaatggagtcttatcatacgatgttctcgtgtgtcagcgcaggagtcggggccgcctggatacctcagactgtactcgacgggttgccaggacgtgactcggtaaaggtgcatacactgggcccgtcggctcaaagcgatctctactttatctggcgcaaaggccacttgaccgataatgccaagcggattttacaactgcatcatgtgggatga

SEQ ID NO: 455586 - DNA, 492 bp, Serratia marcescens
atgaaaattgagatatgtcaggcatcagacattcctgaactagcgagagtttttgtcgaaatggagtcgtattactttggcaatgaagctgctagctatgatgaaatgatctcttacctgactcatagggttttttctgcttattctggcgtgaccatccttggtgcatggaaaaacgggacactcgtcggatttgctacgttcacagtgatgtttcctgctcccaaatgctccggtcaggtgtatatgaaagatctcttcacatctgcagaggtaagaggccaggggatcggtaaatcgctcatgggatttatagcggcgtttgcaattgaacacggttgcatgagatttgattggacggctgaaactaccaacccgaaagcagccgagttttacttgtctcttggggcgtctctgatcgaagaaaagcagtacttccgcttggagcatcagaatttagcgacgtttgctatgcagaactcacaatcatga

SEQ ID NO: 455587 - DNA, 885 bp, Serratia marcescens
atgcaaattaatctctttgaagctattagaatttttatcgaaattgtcgagtcaggtagcctcacgcaggcggcggagaatctgcaaatccatcgtcctgctgttaccaaagctctgcaacaactcgagcaacacagcggtattcgattaatgcagcgcacgacacggcgaattaacctgacgccagaaggggaagaattttatcgccgcagtaaacccttactggcccagacggatgatctactggagtcgtttgcagtcgaccgtgttttgcgtgggcagttgcgcgtggatatgccaatcgcttttgcggctttactcgtcgtgccaaatttgcccgatttttaccgtgagcatcctgatattgaaatcatactgagctgctcagatcgccgcagggatatgctgcgcgatggcctggactgcgtgctgcgagtaggggaactcgatgatggtgaatacgtcgcccggaagatgggctccattaaaatgacgacgtgcgccagctcggcttatcttgcagaacatggtacaccagaaacattggaggagttgcgccagcatcaggtcgtcaattggattaacaacagcagtaggcaaattatgccgtggacgtttcagacaccagagggcacagaagaaattagcctttccggtaagcttgtactggataactccgaagcctatatagcagcaggtctggcagggctgggaatattacaggggatgaatgtttttttacaaccttacctcaacagtggccgtctggtagaagtactgacagactatcccgtaccacctcgtcagctgtcacttctttatccgcaccgccatctctcccgtaaggtaaaagtatttgccgagtggttagagaggttattgtaa

SEQ ID NO: 455588 - DNA, 978 bp, Serratia marcescens
atgcaaaataaccgtatctgccaaattttgggcatagaaaaggctgtcattcaggggccattatcatggttgaccgatgcccgtttagtcgccgctgtcagcaatgccggaggactgggtgtgctgggcccaaacgcaggattaacgccagaaaccgcagtttctacgccacatgaaacggccgaaaaaatgcgtgaagaaattcgtaaaaccaaagcgctaacagaaaaacattttggcgtcaatctgataccgacacctgaaaacgacatatggactccgccaatcttacaggtgataaaagaagaagcggtgaaagtggtggtttatacaggctatggcgaaggtgctgtgatccccgcattgtttgacgaactgaaagacgcgggcatcaagattatctatcgcgatatcaaccccacccctgaaaacacccgcctcgccgaagccgccggggcagatattattgtcgccaccggttttgacgaaggcggaaccttgccaggcaaggcgctgggaacattttcaatcgttccactgattgccgatgccgtgcaaaatgtcccggtactggccgccggaggtatcaccgataaccgttccgccagagcagcccacgcccttggggcaaacggggttttcgccggttccatttttatcagtaccgaagaaagccgtgtaccgcagtcagtgaaagacaaaatcatcaattctcacggactcgatatgctgcttttccgcaccatgcccgattactatcgttcattgcccggtaagctggcagaaaaactggtgcaaatggataaagcgggggccagtaacgaagagcttggaaaaaccatgggcgggttacgcggtttgcgtatagggatgctagaagggaacaccgatgaaggctatatatcgctggggactggcatcggcagtattcgggatattaaaaccgttgctcaagtggttgatgcattagcaatataa

SEQ ID NO: 455589 - DNA, 741 bp, Serratia marcescens
atgaatcgtttaattgagattggctttatcaaggtaggatcttggcagatcgtagatggaagtttaaagtatcatctcgatgacagattcttagatgttaaaaacaacctgtatgcatttgtttgtgatggtgaagtaaagtacgttggtaaaaccactcgtttactacgcaataggatgtaccactattcacgccctggatcttcccaatctacaaatattaaaaataacgctaacattatcgagatgctgtctaataatgttgccgttgatatcttcgtacttccagattcgggactgatacactacgggaaatttcacttgaatcttgctgctggtcttgaggattcaatcattagtgtcatcagtcctgaatggaatggaattcagaggaaaatactgaagagtgatgaagtaatatcaactgaagctgaaattatcacacatagccgtactaaaaaattcactttcaatatgacagatacgtactggcgtagagggttcttcaatgtgccggcagtgagttctcaatactttggtaaggacggagaaaacattaagattgttcttcgtgatggcgtctcctccatcactgcaatgattaaccgaactgccaatcagtctggttcaccccgcataatggggggaggggagttgagacagtattttcaatgcaattacacaattggtgatattgcacctttcgagttgatcacacaaaacatgatgaagctaaaatga

SEQ ID NO: 455590 - DNA, 972 bp, Serratia marcescens
atggaacatattttacagggcatgacgccgcgctgcgtcggtcgctatctgatagacctgccggcaggtttcaccaccgggccgggtaacgtgatggcgtttatcaataaatcaccggtcagttataagcgaatgtaccgcccggcgtttgaacaaaagatacggttgcgggaagcggcattaaaacagaaacaggcgcttgatcctctggatatgccatttcttaagcaggtgtactctctgccggcgggtatggagggcgtaatattcgaaagaaacaacagtcgctctgtaccggatgttcgacgcgtacttgaggcatatctatataccaatggcgttgcggtaaaaattgaaatggcggcagataacgggcaggcggaacgttatgctgagcgtagagaactttaccccgcaatttatagcaacacggtgccgcaaaagctggcggagctaaccgcgttgctgaagaggatatcgggtaaaacggagacggacatgccggttggcgcgggtttatgcctgccggaggtgtttattgcggatgggcaaggtaaacaacgggaacactatagcgtggtttataaatcaccggattacccggcagtaaaatttaattttgacagtgataatttcactaattctgaagactcgttacttgaacgcagtgcagagatgagggcgctactcaaagaggcggaagggcgaaccttggcgcatggccgccgggaattgaatggtctgtacgcagagcagtggctggcgaaaggcaatatcgcagcacgtggtgagacaggtttgcgttttgtgatgaatattcatgaaaaaacggccggcccgacaacgccgcggctgacgatcagctttatgcagcgggggctggagggggacggcctgctgtcggaaaatgaagcggtgggcgcatggcaggcaatcaccgaaacgttaagaatgcgcccgcgggcgtattga

SEQ ID NO: 455591 - DNA, 1089 bp, Serratia marcescens
atgaatctgaaaaaaacgtttgtcgttgtcgccatagtggcggccggttttgccggctggcgctggtacagttatctgcccccgcagataaccctaaccgctgaggagcgcaccaacatggaacatattttacagggcatgacgccgcgctgcgtcgggcgctatttgatagatctgcctgcaggtttcactaccgggccaggtaacgtgatggcgtttattaataaatcgccggtcagttataagcgaatgtaccgcccggcgtttgaacagaagatacggttgcgggaagcggcattaaggcaggaacaggcgttaaaccctctggatatgccatttcttaagcaggtatacgctctgccggcgggtatggagggaataatatttgaaagaaatgacagtaagtcccgtccagattctgcgcgtattcttgaggcccatttgtataccaacggtgttgctgtagaagttgagtttaaagcaagaaatggactgtcttcacgatacgatgaagacagaaaggacgttcccgaaatttatggcaacacggtgacgcaaaagctggcggagctaaccgcgttgctgaagaggatatcgggtaaaacggagacggacataccggttggcgcgggtttatgcctgccggaggtgtttattgcggatggtcaaggtaagcagggagagtcaattgagatagcgtatgagtcaaaaaactatcccgccctgttatttgcctttgacaccgataatatcagccgtccggaaagcacgttgttggataggagtggcatgatgaaacgcaaaatcaaagaatctgaagggtacaccattgccagcggcaggcgtgagttgaacggtctgtatgcagaacagtggctggccgccggcaagacaggcgaaggagaagagaaaggtttgcgttttgcggtgaacatccatgagaaaacggccggcccgacaacgccgcggctgtcggtcagctttatgcagcgggggctggagggagatggccggctgtcggaaaatgaagcggtgggcgcatggcaggcaatcaccgaaacgttaagaatgcgtccgggagcatattga

SEQ ID NO: 455592 - DNA, 1590 bp, Serratia marcescens
atgagtgataacggtgatgtaataaaaatagagcctactttcgatcaggcgggcaatgctaactatcagcttattagtacagagaaaggctgtaacgttgagcagcagtgtgtggtttatcctgagcacgttattccggttatttttgttccgggtgtaatggggagtaatttaaaaagtaataaagatgatggtgagagtatatggcgcctggatagtaaaacgaaggttgcgggggattggtttggcgtcaatgccatggtcagaaaaatgttattagatccggaacaaacgcaagttgatgatgatggattggttgtcgataaagatgaaccttttttactcaagaaccggcgcgagcgtggctggggcagtgtagggtataccagctatgcttcctttctcgactggctgcagaatagtttgaatgattttaacgagtaccagcgcggtgagcgttatcgcttgctggagtcggtgatggaaacggaaacgggtgacgtaaccctgagtaaggatgaagtggacttaagctaccgctatatttatccggtatttgccgtcggttataactggctgcggtcaaatgcggactctgcggaatacctgggagaaaagattgacggaatcatcaaattttatcagacaaagggaagaaagtgtgaaaaggtcatactcattactcactccatgggcgggctggtggcccgtcactatacccagaatctggggggagaaaaaaaagtgctgggcgtggtgcatggcgtaatgccagcgttgggcgcggcggccacctaccgcagaatgaaagccggcacggaaaattcagggggagcagagggatgggtcgcggctcaagtgttggggggcgatgccaaaatgatgacggcggtgctgtcgcagtctccggggccgttacagttgttgcccgggcgtgagtatggccgtcactggctgaaaattatcgacggggataatacctacgcttacccgcaggccgatccgtttgaggagatttatctgcagcgtgataaatggtgggggctatgcgataagcaatttattaatccggagagaagtcatactcagcaggaatggaatagtgactgggagtctttttcaataattattgattcatttgttatgacttttattgacggtgtgtctggtaaatatcatcccaatacctatgccttttacagcgcggatagcgcgtttgcctcctatggggaggtgtgctggcaggcaaaaacgccacggcttgacggatggctgaaccgtcatcgctccagagatgccagacagggtcgagtggtggatagcactgagcgctttgacaaacggacgatatccagtcccttgtccggcagcggctgggccaaaggtatacaacagacctaccagattttgccggccgcagaagccggggatggtacggtgccggcccgctccggccgcatcgccgggcacttggtgcaggcgcgctatcaggtgtccgtggggcatgagccggcttatcaaagtccgctggcgcagcagtttaccctgcgggcgctggtgaaaatcatgcagcagacggctcaccgttaa

SEQ ID NO: 455593 - DNA, 975 bp, Serratia marcescens
atgaagacgtttatgcagggagtgtcaacccgctgcgtgggacgctatctgatagatataccgggatcgttttccgtagaagaagggaatgctctggcttttgttaatgatgcgccgataaaaaccaaacgaatttatcgcccggcctttgagcaaaaaattcgcctcagagaagagaaactgagaagtgagaagacggttaacccacgggatatgccctatttaaagcagatatattccctgccggaggggatggaaggggttatctttgagagaaatagaagcatttcattaccagattcttctagggttttagaagctcatttttatattaacggagtggccgttgaggtcgagttgagagccaggaatgggttgtcttcccggtatgatgatgagcgaaaaaatatcccggaaatttatggtaacacagttccagagaaagttgctgagctgacctggttgctgaaaagaatttcgggtagaaaagatacagagattccacatcaggctggtctttgtttgccggatatctttattgcagatgggagagggaaagagaaggaaagcattgatttgggatacacgtcacctgaatatcctgaattgatgtttgattttttgacggataattttaatagctcagataccttaatgttagaaagaagtgttgaaatggaacgggatataaaaaaactggaaggaaggacaatccagaaaggaaaacgggaactgaatgatatttacaccgaggaatggttggtggcgggaaaaacggatagtgatgaaaaaatattgcgttttgtcctccatgccaacgaaaaaaaatcaggttcagagactccctggatgtacatgagttttttacaacgtggttttagcggtagtaaccagttatcagaaaatgaggcggtaagcgtctgggaacaaataacaggtactttgaggatccgtcctggtgcatttgggagataa

SEQ ID NO: 455594 - DNA, 1611 bp, Serratia marcescens
atgagtgataacggtgatgtaataaaaatagagcctactttcgatcgggcgggcaatgcgatctatcagcttgtcactacagagaaaggttgtaacgttgagcagcaatgtgtggtttatcccaagcgtgttatacccgtcatatttattccgggtgtaatgggaagcaatctgaaaggcaaaagaaaaggaaagagtatagatatctggaatttggatagccctggcaggattgttggttcttggtttggtgttgacgctaacatcagaaaacagaagctaaatccaaaagaaacagaagtggatcttagtggaaaggttgatgagagagatgagccttttttgctgcaagaccgtcgaggacgtggttgggggagtgtagcctataccagctatgctcctttcctcgactggctgcagaatagtttgaatgattttgacgagtaccagcgcggtgagcgttatcgcttactggagtcggtgatggaaacggaaacgggtgacgtaaccctgagtaaggatgaaatagacttaagctatcgctatatttatccggtgtttgccgtcggttataactggctgcagtcaaatgcggactcagcggaatacctgggagagcagattgacggaatcatcaatttttatcaattaaagggcaaacagtgcgagaaggtaattcttatcacccattctatgggggggctggttgcccgtcactatactcagaatctgggaggggaaaaaaaagtgctgggcgtagtgcacggcgtaatgccagcattgggcgcggcggccacctaccgcagaatgaaagcaggtaccgaatatccagaagggagtcttgagggatgggcgacctctcaggtactggggggagatgctgaagcgatgacggcagtattatcacaggcaccagggccgttgcagttattgccggggaaggggtacggcacccgttggctgaaagtaatggacggacagcatgttaatttttatcccaaggaggagccttataatgaaatctatctccaaagagaggtatggtggaggttatgtgaggagcagtttattaatccgggcggcgcgctcagtaaatctgaattggacaaggagtggttttattatgctgagatgcttagcgaggatgtaagaacattcattgagggactatcaggtaaataccatattaatagctatgcattttacagtgcagaaccgttatttccgtcgtatggggaggtttgttggaaatccaaaacgccattgattgagcagtggataaataaagggcgaggcagaagcacagaagcgggacgggctctggatattacggaaaagggtagtcaccgtagtgtatccaccccgctgaagggagaaggctgggcgcagggggtgtaccagagttggcgtctgctgcctccacaggaggccggggatggtactgtacctgtccgttcagggagaatttccggacattatttacgggcgcgttatcggatttcagtgcagcatgaacccgcttatcaaaatacactggcacagcagtttacactgcgtgcactgatcaaaattatccaggaagtacagcacaccacactggcttatttatga

SEQ ID NO: 455595 - DNA, 642 bp, Serratia marcescens
atggaaaatgaaaaaacgcttcattttgaaagcatgggtgacaactgtgagttcggcttttatctgcgcagtaaaggtattgaaaatggcagtttgtttcgctggtcactcatcaaagatcatcaagatcttctcaacctgatttccagtaactttgaaggtttttatcagttaaataacctccagcctacctggagaaacatgttggttgataaagccaatggcgtgatatttcatactgagctttatagccaagaaattaatggacactgggagtttgaagagaatgatgaaaaaagaaaggaaatatatttagcagagaaagaaaaaattgattatttagtcaaaaaattcaaaaactctctgaaggaaggaaacagaattttcgtcatcaagaaaaataacaatgaaattgacatgtcggttattgaaaggttgtcagcagcacttgagcaatatggaaaagcaaaaatattagtcgtatttcaaagtaacgaaagtgataaactaggaaagattgagtatgtaaatgataacatactaatttcctatattgatcgatttgccgaatatagccaagctgatgacatatccgttgaaggatgggataagataattagcaatgttatgaaagaactataa

SEQ ID NO: 455596 - DNA, 2202 bp, Serratia marcescens
atgaaaaaaattcttatagtcactccagacatagaaggcccgatccgtaatggtggcattggtacggcctttacttctttggctataaacatggcaaagtcgggttttgatatcgaggtactttatacctgcggtgactactcagagtccgctgacagagatatggcacattggatctcggtgtatgaggagcacggcgtaaagttaacggtgctcccaatgttgacagatgtaaatatcgatgcaccatattttagaagaaaaagttataccgtttaccactggctgaaagatagcagcagagtacgttatgatgttgtgataagttgtgaatggcaggcagatttgtattatacattgctggctaaggaacaggggcttttcttctctgatacaaagttcattatcaatacgcatagttctactctctgggctgatgaggggaattatcagcttccctacgaccaaaatcacatggaactctatttcatggaacaaaaggtcgttgaaatggctgatgaggttattagcccttcacaatatttacttgattggatgcgggataaaaagtgggcactgcccgctgagagtcatgttattcttaactgcgaaccgttttctattaattctgtcaatgactcagccatacctaagccccccaagaaaatggcagagggaattgaattagttttctttggtcgtttggaaacccgtaaaggattagatatttttcttcgtgctttacataatttgaaaaacgatgagttagctaaaatctctgcggttacatttatggggaaaggggttgtaagtgaaggctttaactctattgaacatattcgaaccaaaacggattcgttgactttaaacgttaatattattacagattatgaccgtacccaggccgacacttatatagcaagggacaacgtgttggttgtgattccatctttggtggagaactcaccttatacggtttatgaaagtttgataggcggcattaatttcattgcttcttcagtaggggggataaaagagcttatccctgctgagcagcattcaaaaataatattcgaaccaacaccgagctcattatatcagaagatcacttttagaattgataaccttcaggtaaaaactcaattagtacagaatgttgaagctattgaagctacctgggttgaaaaattcaaagagtcatttgagccttgtcgtgttaataatgatgaaaaccaggagccattagttagtgtatgtctggttcatcatgatcgaagccatttgttgcagcaggccatcgcatctttaaaagcacaaacgtattctaactttgaagtaattcttgttgatgatggcagtgttaaagaagagtctcgtcagtatcttgatctattgcataaagactttgctgataagggatggaaaattataaaaagctccaataattacttgggggctgcgcgcaatttggccgcaagatctgcatctggtgaatatctggtcttcatggatgatgacaatgtggcgaagccgcatgagctagaaacgtttgtacgtgcggcaattaattctggtagtgatcttcttacaacgccaagtgatttgatttatggcgatgagttcccatctccgttccgcaaaatgaaagattgctggttgccgctgggtgcagatctgaatgtcgccagctttgccaactgttttggcgatgcgaatgcaatgatcagaaaaagcgttttcgaaagcgtgggtggatttaccgaggactacggtattgggcatgaagactgggagctgttctgccgggttgcgttggctggtcataaaatacagttgatacctgaggcgttattctggtatcgcgtggcaaatacggggatgctaatcagcggtaataaaggtagaaataacttccgtagctatcgcccattcatgtctccagacaatcgtattcagtatactatggggttgataccttcttatattgaaaagattaatcgtttggagcgtgatctggccttctatcgtagtaaccccgctaccgagatcggtgttctcaatgaaaaaattgattatcttatctctcagcaacgtgatggttgggctcacgaccggtttaatgtgctttttgctgcggtgaataagaaaggaatattatatcggttcagcagaaaattagttaatactcttcggggtaaatag

SEQ ID NO: 455597 - DNA, 807 bp, Serratia marcescens
atgccccatacaagcggaaaccagttcacctcaatgctgcgagagctttacaaaaaatataactttatctataaagccaaccctggaaatgcaggagatggagttattgcagccgcaacatatgactatctggaagctaatggtttcgtttattctccgttcagcgcctcggcaacctatagccccgagaaagatgttttgcttttcgggggcggcggtaatttaatcgaagggtattacgctgaaggacgtgactttatcaagaaccaccttggtaccttcgcgaaggttattatatttccctcaactattttcggctataccgaattcttcaaagaaaatataaaacacctttttgtctgctgccgcgaaaaaacctcatacgatcgcttactgaaactgggttatatccctggcgaatcacttctcctaacacaggatatggcattttatctagataaggaaaaatatattagcgaagtaattcctaccaaaggaacggcatcttgttatcgtaccgactcagagtcattaacaaaattacaacgagaaaataatcatgatatctctttaacatggaatggcgattattgggataatgccaacctggcgagaaactcaacgcgttcactcatcagttttttacaagaatataaagccgtcaataccgaccggttgcatgttgcaattttaggttcattattgggtatggaagtgaacttttacccgaattcatattacaaaaatgaatccgtttacgatcactccttaatgaattactacccgaatacctatttcataaaataa

SEQ ID NO: 455598 - DNA, 543 bp, Serratia marcescens
atgttaacaacgatgagaggtgcattcagaagactaactctgggggagaacactatggcgcgctctatatataaaaacgctatcaattacgaccttgttaaggttcacaatgctgaatacttccccttcggattacagaataaggaaacagctgttacacccaatggtgagctttattggcctgagaggcattttaaggaagattattctttagaaacaacgctatatcagtggtggtttatgcatgaaatggctcatgtgtggcagtaccaaatgggcatgaatgtacgattacgtggtgtaatgagctgggcagtatcttataaatattcattgcctgattataactcattagctgattatggaatggaggcgcaggctagtataattgcggactattttatcctttctcgttacgggagagaaaaatggtttgcagtgaagttaatgcagggcattatcggtcccgatttgaaaagccgttatgagcatgtgttgaaaaggtttctgcgtgacccgtctgacaggaagaacctaaaatga

SEQ ID NO: 455599 - DNA, 687 bp, Serratia marcescens
atgtttgacaaccctgccactcggaaaaaaatgcgcaggacagataagaagcagcgtagaagactttcgcttgaagactatctcaaaattaggaactccgcagatgcttggatgcgtacagcaatggatattgcactacaaacagcacaggcaagactagaggtttccagaattttgtactctgtaaaacaaccggaggaaggtatttgcggatgtaaatggttcactgaaccccaggatggtatctatggcatcctatacattcaccgtcaaaaagtgaaagacaaagaagcctcccatgtagctataccaataggtaaaaaattacgggagatcatagaaaatagccgggataatattgcaagtccatacgttgttcatcgtctgccagaaaagagaagcaacgggctcagcaaagaagtgaggcacccaacgcaggtagcaccagattatcttagcagggcgttttctgcgctacgtgatcaggttggagttgcccaagctctacctatggaacaaagacctacattccatgaaatacgcgctctagccgcccatttattcgaacgacaaggcatcgatcctcaagctcgtatggcgcatagcgatgcaaaatctacgaaagtatatacacagaatcatgttgaatgggtaagcgttccacatgctgaaataaaggtaggatag

SEQ ID NO: 455600 - DNA, 219 bp, Serratia marcescens
atggctaaagaagtcaaactgatgaaatctagccagtgggcatcaagagaatttgaaaaaggctctataccgacctgcaaaacagtaaagcgctgggttcagaacggcgttatcaaaggcaggataatcgatcagtctgtatgggtcttttcgtctgagcgaatgggcgttgcttcttcagtaaacgaccatgttaatgctttgatagaggataactga

SEQ ID NO: 455601 - DNA, 687 bp, Serratia marcescens
atgacaatcacaactgagcagctgacggcgcgcgccacggcgctgggtctggatttcttcatcgaagaccgttccgggattcccgttaagcagtggattccggaatcaaacgggtgtaccccggcgacagatgacgaggtcgcgatgtgggaactgctggccgcgcgggaggcggtgcctgttgcttggacagatgaagatgaactgagagatgcaagaaaggggtattcagggtatctgtttgctattgatggggaggcaaataaattcgctgacccacgccgcaagataatgctgttcaccgtcccgccagcgccagcagtgaccagcgagctgttggaggctatggaagaggtcatccgcatttctgatcgcgaccatgacgcctggaaccgtgcaaaagaggccattgcaacataccgtgatccagtactgcaccaacatgtaagcatcagttacaggttgaactctccggccattccggatggttgggcaatggttcctactccaccaacacagaaaatgatcatccatggttttgagtcaaatgttatggaggagcttatcgatgcggtgaacgaagcaaagggctggccatatggctgcaaagagagcgctgaattagtaactggaattttcaatgcgatggttgccgttacacctgaaactacgggggtagaacagtga

SEQ ID NO: 455602 - DNA, 378 bp, Serratia marcescens
atgaccaggccaactactgcgcaactaaacgctgcttatgaccagtttaatttttggtacgacaaagccaaaaaactggatgaagaattagcgaaagcagaagaacgcatcgcagagctggaagccaaaacatcaatgactatgggtgttggcgatggcaacggaaccctgtttgtgcatggggattacgattccatcaaagcggtacagcgtattgttctggaaaacgaagagctacgcgccaagctggctacgccggtgcggttgccgaagacaaacggctactggaatgaggaagaaaaagcgtttgaggatgcaattacgctggctaaacgtgctgtgtggaaagctgggtttaaggtcgagggggatgcgtga

SEQ ID NO: 455603 - DNA, 372 bp, Serratia marcescens
atgaataagcagttggaaaagttggcgcacgcatgccccgcaaaatcgtttaaagagtttatcggaaaatctagaacgcaagccatcttatgcgccgacactggcgcggagattgtcggctggggtgggttcgactcatcagcattggaacagcagagccagcgtaaagcgctagccagatatatcgctgccgccgatccgaaaactgttctcgccctgctggcagagctggagaaatcgcagcgtgccaataactacgcgccagcaattttgcgccggtttgccgaagagaaacagaaacgcggtgaagtagcggcagcgaccgcctttaactacgcggcttcagcactgcaaaaggagttgtcgaaatga

SEQ ID NO: 455604 - DNA, 207 bp, Serratia marcescens
gtgaacctaactatcaaacaaatttgcgacatctgctcactgatgggcatcaactacgaacaacctgattccaaccaactggaaactgaggtttggatcggggaaggaactatcgcgggagaaaaaggcgagccggattaccacggtctgattgctcacgatgccgaatatcctgaagaaggcgctatcgccctggagcgtgactaa

SEQ ID NO: 455605 - DNA, 708 bp, Serratia marcescens
gtgttcatggataccggcgcagaacatccaaaaacctacgacttcattcgtgacttagtccatcactggggaattgacttggtatgcctgcgagtcgtgattaacccggagcttggaaaagggaacacctatcgcgttgtcagcctggacgagattggccctgaccttgagccatggcgcgccatgctgcggaagtacggaacaccctacgtcggcggagagttctgtactgaccgcatgaagctggggccatttaaaaagtactgcgatgggcgctttggccgcgggcagtacaaaacgtggatcggtatccgtgccgatgaacccaaacggttaagcggtaagccgccgacccattatctggccgaaataagccagtttggaaagcaagacgttatcgactggtggagtcagcagccctttgatctgcagatcccagaacaccttggcaattgcgtcttctgtatcaaaaagtcgattcagaaaatagctctcgccgcaaaggacgagcctgaattagccaaagagttctgggaagcactgacgacaaaggatgtgaggtcaatgccgagccgcaatggcaccgatttggtcatgtaccgcggcaaaaattcgttcaaaggaatcattcagatattttccggcgatacccgtaatgagctggctgctcgtatgccaagccagagaaagcaggagaaattactgtga

SEQ ID NO: 455606 - DNA, 5397 bp, Serratia marcescens
atggagaagctctgggggcatccatcgttaccggtcaatacccggctgtcgcggctgtacgttgcgctggcggcggcgctggcgctggccggcacggtcggcacggcctatgcggacgatttcagcatagaaaacggcgaaaagcgggtggaggaattaggtactgccggattcgctctggtcagcggcaagggcagcgagtggcgggtgagtgatgaactgaattttttcaacgggctggatgtgttagatggcggtaagattatcgccggtaagttgtattcatatttaggggggctggatagccgggaatcccaagaaatctatatcagcggtacggggtcgcagatacaggttaccggtgaacaattggttgatgttctcgctttagccgaccatggacgtttcaccaatgagagtaagcaattgtatgtgggcgggctgctggtgattggcagtcgcggtactttcgacggtcattcaaggtctgatgaaaatgttgaggggaaagagtggacgatgccgacattaggcgcagcgcaggcgcctggcgatcttgatcctgacattgaggtcgacaccggcacctatacgcagggaatgtggcgctccattatctttaaccataccgcagatggttaccgctttgtgaatgccatcatcggcgacggggcaatagcgaatgttgccggaaatacggagttaaccggcgatcttagtcgttataacgggcacattttcgccaaagacggcaagctgacggttaataccgatatcggcacggaagatgacctgctgatcagaacgcagcatctctatgccgaagatggcgggacgttgatccttaacggcacgatagggagatttgcgcgcaatatcggtttttcaacctcgctgtttgttgagtccggcggcgtactgggcggcaatgcgaccatcggccgcacggtggtggagcgtgacggacatttttcccccggcgacggcggcatcggcaagtttgatatcaacagctatctgacctttaacgacggcgcgctctatgatgtggatatcgccgcggacggccgcagcgacagtacggcggtattgggccagaccaccatcggcaaggacgtcaaggttcaggtcaatgcccttgacccgcatgccagctatcaggatggacaaacttaccgcatcctcacctctgaaaaggatatcgccggcacgttcagcgccgcggtgctggactcggcgtttttagacgcaacgcttgagcacggcaagcagtttatcgatctgattattaagcagctccagcccgtcggcgatgcgattcttgatggcagccggcatatctcccagtcggtctcctacggcggtacggtcagcgtcgggcagaatcaggtcagcgatttactgattgacggcggcaccttcagcgccaaaaacctggtggtcggctccgagagccagccgcaggcgacggtgcgggtggagaacggcgcccacctggtcaccgatgatgccacggtgaactacggcccggacgataccgactaccgatacggcccgaaagtggccgtcgccggtaacggcagcgaatggcagattgccaaccggctggcgctggccggcaagctggacgtgctggacggcgcgcaggtgacggctggcgagctggcggtggccgaccggccctggaacggcacaaaaagttcggatatttacgtcagcggtgaaggctcacgcctgcattcccgggggcgcagcgatattgatgtcctgtcattagctgacaatggccgtttcagcaacgacggcggcaggctggcgctgaaaacggcgctgattatcggtagccgtggttattttgacggtcatgtgcctgcagatgatgataacagttggacgccgcctatgctgggtggggcgcaagcgcccggcatccttgatccgggcatcgcgatgacggcgccgaccattatctttaaccataccgcggatgattatgcattcggcaataccctcaccggcagcggtgtaatggctaatgtcgccggtcagacgatattgacgggcgatctcggcaattactttggcgatgtgttcgtcaaagagggtaagctgaccatcaataccgatctgggcactaatcctgattatcagctgttaaaagagcataaactgcgcgttgaggacggcggaacgctgatccttaatggcaccatgggaatgtttgcccgtaatgtcggcttttcgacctcactgtttgttgagcccggcggcgtactgggcggcgatgcgaccattggccgcacggtggtggaaaacggcggccatctctcccccggcgacggcggtatcggcaagtttgatatcaacagttatctgacctttaacgacggcgcattatatgatgtggatattgccgcggacggccgcagcgacagcacggcggtgttaggtcagaccactatcggcaaaaacgtcaaggtacaggtcaatgcccttgacccgaacgtcagctatcaggacgggcaaacctaccgcatactcacttctgaaaaggatatcgccggcacgttcagcgccgcagtgctggactcggcgtttttagacgcaacgcttgagcacggcaagcagtttgtcgatctgatcgtgaagcagctcgggcccatcggcgatgcgctgcttgacggtagccggcatatttcccattcggtttcctatggcggtacggccagcgtcgggcaggataaggtcagtcatttactgattgacggcggcaccttcagcgccaaaaaactggtggtcggctccgagagccagccgcaggcgacggtgcgggtggaaaatggcgcccggctggtcaccggcgatgccacggtgagctacggcccgaacaataccgactaccgatacagcccgaaagtggccattgccggtaaagacagtgcatggcaggtaggcaaccaattggcgctggccggggagctggacgtgctggatggcgcgcaggtgaccgccggcgaattggtggtggccgaccatccttgggacagtaaaaaaacgtcagagatttatatcagcggtgacggggcgcacctgcactctcggggattcagcggagtgggcgtgctgtcattagccaacaatggccgtttcagcaacgacggcagtaaactagcgctgaatacggcgctgattatcggcagccgcggctattttgacggttattcacctacggatgtcaatggtcatgagatctggacgctgccggcgttgggtgaggcgcaggcgccaggcatcctggacccgaacattgtggtggataccttaacctacaatatgggtatgcagcgctccatcatctttaatcacactgcaagcgattaccaatttgccaataccgtcaacggcgacggcacgatggttaatgtggccggtcagacgacgctgagcggcgatcttaccggatacaatgggtatattttcgtgaagggcggcaagttgacggttaacggcgacatggcgaccaatattagtttttacccgaggtaccaggagctgcgtgtggaagatggcggtacgctgattctcaacggcaccgtgggtgcatttatcgagcaatcgctgggcaatccgggtttttccagttcgctgtttgttgaatccggcggcgttctgggcggcaatgcgaccattggccgtacggtggtggaacgtggcggccatctttcccccggcgacggcgacatcggtaaactgaccgtcaggagctacctgaccttcaaggacggcgcgttctacgacgtagatattgccgcggacggccgcagcgatacggtggggatgcagggtgaaacgactattggcaaggacgttaaagtgctggttaacgcactcgatccgcatagcagctatcaggatggacaaacctatcgcattttaacttctggcgacggtattaaaggcatgttcagcgaagcggtactggactcggcctttttagagacggcgctgacgcgcgaccggcaaaacgtcgatctgaccatccggcagaaagacaccggcggtggtgacgacggccataccggcggcggtgatgacggcgataccggcggtggtgacgacggcgataccggcggtggtgacgacggcgataccggcggtggtgacgacggccataccggcggcggtgatgacggccataccggtggcggtgatggaggcaataccggcggcggtgacgacggcgatatcggtggtaacccgaacgcaccgggtatcttccagacggtggcgaccagcgacaaccagtggaacaccgccggtgcgctgagctcgctggcgcagcaggggccgtcgctcggcctgtacaactcgctgctgatgttgaatgcggggcaggcgcgcgaggcgtttaaccagctgtccggtgaacagtatgcgtcggtgcagtcgagcctgcagcagagcggcacgctggtaggcagcgtggtgaaccagcatatgcagacgatgttcgacggcgacagcctgacggtgccgccgctggcgatgagtctggtgcagggtccggagcgcgagcgcaacggggcctggggacagatgttcggcagctggacgcgcagcaagggcgacggcaacgtcggcaagctggacagcaacaccggcggtttcctggtgggtgcagaccgagagctgagcgacggggtgcgcgccggcgcctacgcgggctacagccgtacccatttcgacgttgacagccgtgcgtcgtcgggccacagcaacaactaccacctgggtctgtatggcgcggggcagcgggatgcgctggcgctgcgcggcggcctgggctacagctggcaccggattgagagcgagcgcaacgtcggcttcggcggctatagcgaccggctgaagggggattacgacggtaatacgctgcaggcgtttacggagctgggctaccggctgcgctatgagtcatcgagcgtggagccgttcgtcaacctgagctacgtgcgtctgcatacggatgcggtgcaggagcagggcggcgcggcggcgttgagcgtgcaggatgagacgatgaacactttctactcgacgctgggcctgcgtggtgcgacggatatcccggtctcgggcgttgacgtcacgctgcacggcaatctgggctggcagcacgcctacggcgacacggacacttcggcgcggatggcgttcgccaccggcgacagctttgccaccaagggtgcgccggtggataaggacgtggcggtggtgggcgtcggtctggacgtgccgctgacgcgttcgacgcgtgtcggggtgtcctatcagggacagtacggctcgcagctgcaggccaactcggtcaatgcacagctgacggtctccttctaa

SEQ ID NO: 455607 - DNA, 675 bp, Serratia marcescens
atgcggctgaccgacgtacagggcgagctggtgtggtcggaacaatgcggggtctggggtgagccgggggtggtgcatgcagaccgggtggccaacccgttgcgcttccaggggcagtactttgatgtggaaacggggctgcactataaccgctaccgctactacgatccgcagaccgggagctatatcagtcaggatccgatagggctggcggggggactgaatttatatcagtatgcgcctaatccgctgacatggatcgatccactggggctgagttgtggtagtacgactgagtcagtattcagggttcaggggggaattccaccgaatgctagccgtaacagaataactttgaatgctgctaacagtcctaaaattcagcgtggaacattaaatatcagccttggagatagttcccatgcccaacattttcttgatataagaggtggtggcgcgcaagtagttagtttcaaagtaccaaagtggatggcggatttcatcgaggagagcgctataccacaggctggttatcgtactaatccactgaaccaagggggattggcgccaaaacgagttgatccgacaacgcctggcagatcttatgaattgcctccgatatgggcggagtggctggaagaggttgctatacctggttccggggcgattaaatag

SEQ ID NO: 455608 - DNA, 1113 bp, Serratia marcescens
atgaaaaaattccttcttccctggctgatcccactgacgctgctgttgctggcggcaggatactatatccacaactatgtgacgtttgtacatacgcccccggcgttaacggacaaggagaaacgtatggtcgataccctgtttgctaccaccaaaacccagtgcgtggggcgctatgtgtttgaggttcccggcagctttgaaaacaccttgatggatcgtgctcagattaatgaggtgcgtatcagcagtaaacggctctaccgtccggcgtttcttcagcgtattcgtctgcgggagcaggcattgcagaatgggcatacggtcaacccaaaaagtcagccgtttttaaaacaagtgatccggctgagtgataactcggtgatctttgaccgcaatgagaatgcgagcgtgccggggtttggccgcattttggaggggcatctatacgttgacggggtggcgtttattctcactcaggaaatcaccgattactccgacccgcgttatgccaaagagcgtgcgttttatttgcgtgatgaggttggcagacccgactggatggcgaacaacaagcctcaaaagctggctgagctacaggatttaatgtctcgtctgagcgggcgaaaagacgatgaaataccgactttgccgggaacctgcattgcggaaggatttatccgcgacgggagggggcagccgaaggaagatattacctttgtttatccacagggttcagagttttcttttgttgtctggagtaataatgccttgaaagaaagtacaagcatgttggaacggagcaatgaaatccagtcttatttgactcaaattaatgcaaggaccctacgtaaggggaaaacaaaaatcgccggttttgatgccagcgaatggctggccactgctccgtcagaaagattacccagtaatccgtctgcacagttattgtttactgctgtagctaatgagaaaacggcggatttcagacatcccaatcttgacctgacattaaacaatgatgtcctgctcccacagtcttacagcgatgctgaactggtggaaatatgggatcgtatcactcgttcttttcgtatcaggagtggtgcgttttaa

SEQ ID NO: 455609 - DNA, 1530 bp, Serratia marcescens
atggatgacaacgaaaatcgtgcttatcatcggcccatctgggatgacaacgggaaattccattacagtctcactcctcagaggaaagaaaaaaactacgtggcggtttgtcttgtgccgccagaaaaagtgatcccagtgattttcattcctggagtcatggggtcaaaccttaaaaatcaaaagagtgaagtctggcaatttagcgcttcgtcacttagaaagtggccatttgctagcccggagaaaaggaaatttctacttgatccgaagaccactacggttgatgacagcggagagattgtgaatgacggggcggatggcaaaaaatttccctcccggcgtgcccgcggatggggaagtgcgttttacaaaagctacggagaagcgctcgaccggctgcaatacctgctcggtgatgacgatatcctgatggataattatttcagggaagcgcagcagcaaaccgcgcggcagcgttttaccggcgtcagaatcggtgacgagccggtggaacaggtactgacggaagaagaagtggcgcatggacaccgatttttatttccgctgcacgtttttggttataactggctgcagtccaatgctgactcggcggcgttgctgggaacgtatatcaacaaggtgttggggaattaccgcggccgtctggcggtgaacaaggtcattctgatcacccactcgatggggggattggttgcccggcattactcggaaaacctgaacggacaggaaaatattctgggggtggtacatggtgtgatgccagatctgggttcgccgacggcgtaccgccgtatgaaaaccggtgaacgcggcattatcggtatgattatcggtaataatgcagaaaagttgatgccggtgctggcgcagtctcccggtccgttgcagttattgccgggcaaagcctatggtcagggctggctgaaaatcgagggcagcacgacccgaatgtctctgccggtggatgacccgtatgaggagatttatctggacaaaacggcgtggtggcggctgtgtgaacaggatttgctgctggataataccgaggatgagtggaaccaatatgaaacaagggtaagtagaagggtccatgatttcattgaaggattgaatggcaaatatcacccgcagacctggctgttttacggtgccagtgcggacaatccgtccgatgcgttcttgaagtgggaagagcggcttcatccgcgggtgagggaggcgcagagagctaggcaagattccgcagagcctcttgagctgcctccattaagaacttttacgctgaactcctcggggactcccggtgatggcactgtgccggtcacggcgatccggacctcatccccccgtattcggggcgtactggcgaccaatgttgaccatgaaggagcctttgctgttgaccccgtcgatcgttcccgttcggtttacagtgacctgtccgacgcgctgctgttcacggtgcgagcggtggtgaaaatcgtgcagcaggtgccagccccatga

SEQ ID NO: 455610 - DNA, 9897 bp, Serratia marcescens
atgaataaacattgctatcgcctgatttttagccgcacccacggggagctgcgggtggtttccgaactggcgcgcagctgcagcgccgagcccggccagagccgcggcgggcatgcgccgcgcctgtgggtgacggtgcgccgggcggtgtggctgctggggctggcattgttcaccggcccggcctgggcgggcggcatcgtggccgatggcccggcggggcagcgccctgaggtgatcgccacccagaacgggctgccgcaggtcaatatcaccgcgcccaaccaggccggggtgtcgcataacaaataccaacagttcgacgtcgatcggcagggtgcgattctcaataactcggcgacgatgacctcaacccaactggggggcatgatccagggcaacccgaacctgaaccccaacggcgcgccggcgcgggtgatcctgaacgaagtcaacagcaataaccccagccagctgcgcggcttcctggaagtggccggcggccgggcgcaggtgatcgtcgccaacccggcggggatcgtctgtaacggctgcggcaccatcaacgccgggcgcatgacgctgaccaccggcaaaccgcagctgaacgccgacggcagtctgggcggttatcaggtggagcgcggcatggtgcgcatcgagggcggcggcctgaatggtgacgcccggcatgacactgaatatgtcgatattctggcgcgcgcggtggaagtgaacgccggcgtatgggccaaacaggggctgaaggtagtggccggacgcaaccgcgtcagcgccgacggcaacacggcgacgccgctggctgccgacgataaaaaaccggaactggcgatcgatatgggccagatgggcggcatgtacagcggctatatccagatgatcggcaccgaagcgggcgtcggcgtgcgcaatcagggcggccatctgcaggcgggcaaaacgctgaccgtcagcagcgaaggcaaactgagctggcagccggcaaaacaggaggcggtcacccaggccggcggcgatatccaactggccgcccgcgacgacattgactaccacggcaagctgcacagcggcggcacgctctcggtgcagagccgtgacggcgagctgcgccagtccggcacgctggcggcggccggcgacgtgcggcttaacgccgcgcgcggcatccgcagcagcggcaacctgctggccggcagcgatattaacagccagctggtgcgcgaggcggatctgacgctggccagccagggcgaggtgcaggcaagcggtcaattactgagtaagaaaacgctgaaggtcagcggccggcaggccgatctcagccaggcgacgctcagcgcgcgccgtgcggaagtcagcgctacggcaggcggcgtggcgctgcggcaggccactgtggacagccgggaactggcgctcagcgcgacgggcgatatcgacgcgcagcaggcgcgcatcaaggccgggcgctgggacgtcagcggcaacagcctgttcggccagggcgcgatctggtcgcagagcggcgacggcgacagccgtttcgcgctgaacggcctgtttgacaacagcgacggcagcattgaggcccggggactgcagctggataccgcctctctgaacaaccagcgcgggcgtctggtggcgttggatgacgcagctcagcgctggcagatcggcgggttgctggataaccgcagcggcgtattgggcggcaacggcagcctgacgctgacggcgggtgaactgcataaccaggccggcgtggtgcagagccagtcggcgctggatcttacctcggcggcggggatcgacaacgatcgcggtcagctgctggccggccggcagctgatgttgaacgccggcggtgcgctgagcaaccgcgacggcgatatcaacgctgcaggggtgaggctgacgacgcacagcctgaacaacgcgcagggccggctggtcagccagagtgggctgcagctaacggcacacgaagggctggacaaccggcaggggctgctggaagcgggcgaagaattaacggttaacagcgcgggcgactgggataaccgcggcggtcgcgctaccggcggaaaacgggcgaccgttaccgcccgccagatcaataacgacggcggcaggctgcagtccggcggcgcgctgacgctcaacagcgccggcaacgtcagcaaccagggcgggctgttaacggcgcagcaggggctgagctggcagggcgctgcaggcagccggctgaacaacgacggcggcaaggtgctcagcgacggcgatctgtcactgcagggcggcagcctgagcaaccggcagcagggactgatgcagagccgacaggcgctgacgctgggtctggacggcggctgggataaccgggacggcacgctgcttggcggcgggatgacgcgggtgcgcgccggcagcctgctgaacgccggcggcgcggtgcagtcgctggacgcgctggatatgcagtttacccgccagctggataacggcgacggcaagattttcagcaagctgtcacagaccctgcgggcggaagagctgctgaaccatcagggctggatgggcagccagggcggctggtccgccgtcgcccggcgttttgacaaccggggcggcagcgtccaaagccagcaggatgcgcagctggcgagcgccgggctggacaatcagggcggcagcatccagtcggccggggcgctggcgctgcatatcggccaggatgtggataaccgcggcggtaagctcagcgcgcaggggcagctggcgctgcgcggcgcaaacgcgggcgacgccgtcggcacgctgcacaacgcggcgggtcagctgctggccggcgatgcgctcagcgtggcggcgcagagcctggacaaccagcagggcggcctgctttacagccagcgggcgatgcggctgaacctgaacggcgcgctggataaccgccgggggcggctgcagagcggggagcagctacagctcgacgcgcagtcgctgcttaacgagggcggcacgctggatggccagcagcaggtggcattgcggatcctggggctgctggacaatacccgcggcgcgatcagaagcaacggcgcgcagcaggttagcgcgcagcaggtcgagaaccgcgaaggtgtattcagcagccgtggctcgctggcgctgagcgccgggcggctggataacctgaacggcacgctgattggtcagggcgacggcgactaccgtatcgacctgctgaataaccagcagggcaagatccacagcggtcaggcgctgacgctgcgcggccagcagttgaacaaccagggcgggcagctggtttccaccggcgcccaacggctggaggtggtgcagatcgataaccgcggcggcgccgttaccagccaggatcggctgtcgctgcagagcagcggcctgaacaaccgcgacggcggcctgctgatgggcacgacgcataccgacgtaagcgcgcagacgctggataacggcggcggccgcctgcaaagcgccggttcgctgacgctgtcgctgctggatacgctgaacaaccagcaggggcgcatagtggccaacggcgcgctggcaattaacggccagcagcgcgccgtctccgtcctgaagctgctgaaccagggcgggctgatccagagcggcgccacgctggcggtggacgccggcacgctggacaaccagggcggcacgctgctgagccagcaggcgctgacgctgtcgctgcagcaggattacacccagcgcgccggcgatacgctcagcagcaacgaagcgctgacgctgacgctggccggcggcctgaccaacctgacagagtggctgctgccgggcagcctgaccgtcaacagcacgcatatcactaacctgggttcgctggtggggaaaacgctgcggctgacgaccggcgcgctattgaacaaggggcggctggaagccgacagcatggcggtcgacgccgacacgctggataacctggcgacggtgatgggcgatgacatcacgctgcgcggcaaaaccatcgacaaccacgggcgcgatgcggtgatcgccgccaccgagcggctgcagctgcaggccggcgaacgcctgagcaaccgcgacggcagcctgatctacagcgccggcagcctgcatctgggcagcggcgatctgatcgagaaccgggcgagcaacatcgaggcggacggtgacgtgacggtggaggccaagcggctggacaacctgcgcgaagggctggagattgagcgcgaggcggaaagcagtgactacaagtggcaccgttacaactactactggcgctcttacgactcaccggttaaccccgataaagagcccatggcgccgaccacgcagaatctgacgttccgcgatgacgcggcggcggcaaacaacccgtacggcaccctgttggcgattgacccggcgggcaagcgtgcgcaggtgcgggtaaaaagcgcgaagggagagatgctggagctctgggtgaactacctggcgctgaagcagaacgacgacggcggctacgccatgaccttctacgagacgcgcggcttccggcagaactacgtgccgacgccgtaccacaatacggtgtggcgcgagcacgatcgcgggcgtctggagcagtgggatccggagaagcatctcgatatcgtcaacgcgccttttgtcaccgattacaacaacttccgcgagcgcaccgccaccggcacggtcacgcgcgaccggctggtttccgccggcatcggcgggcagatcctggcgggcggcaacatggtgctgcgcatcgccagccagctgctgaatgacgccagcaccatcgccgccaacggcaatctgacgattgacggcgacggcaaggtgatcaaccgcggctattcggtcaatgagcggcgtcaggaatatatcgtcgatcactatgacaaggatacgcaccactggtacccgacgtttaaccgcgacgagaccacggcgctgaccaccattgacggcattatcagcggcaacggcagcgtcgccattcgcggcgccagcattgagaacaccacggtcaaccaggcgcagatcggcagcgtggaggcggcgcagaaggcggcggaggccgaacgcgcggagctggagcgcaatccgctggcggtaacggttgacggcgtggagtggcagtccggcgatacgcagctgatccccggcggccggccgttaacgccgggcgaattggcgttgaccgacaagcagcatctgggtgacgtggcgacctcaatcccggacaacggcctgttccgccagcatctggaagcggacagcccgtatctggtagtgaccgacgagcgtttcaccagccgcagcaaatttatcagcagcgactatatgctgcagcgggtgggctacgacccggcgcaggtgcataagcgcctgggcgacggcttctatgagcagcgcctggtgcgcgagcagatgctgaagctgaccggccggccgtcggtgcgcggcgaagacgcgatggcgcagtaccagcgcctgatgaacaacggcatcaaggtggcgcaggacttccagctggtgccgggcgtggcgctgcgtcctgaacagattgcggcgctgacgcaggatatcgtctggctggtgagtgagacggtgcagaccgccaatggcccgcagacggtatgggtgccgaaggtttatctggccaataacacgctgcgcctgaacggcgacggcgcgctgatcgccggcggcgagctgcagctgtcggcggacagcatccacaacgccggcaatctgtttgccgacaaagcgctgaccatcgacgccggccagtttatgcatcagagcggcgatatccgcgccgacagcatcaacgtgcaggcggacagcctgaccatgagcaccaacctgcaggatgcgctgcgtcaggcgtcgatgagcgccaatgacatcagcctgagcggcggcgatatccgcctgcagggggcgaagctggacgcgacgcacaacctgagcctgagcgcgcgcaacaatctggagatcggcgccgccagaagcagccacacggcggatctgcaggtgatttccggcgcgatgggcaaccgcaccagcggcgggatggaagaggccggctcgcggatggcgcaggtcagcggcgagtggcagcaggcgctgggcagcacgctcagcgccggcaacaacctgacgctgaaggccgggcaggatattacgctgcagggcagccaggccaaggccggcggccagctcggtgtacaagcgggcggcgacgttaagctgctggcggagagcaccaccaaccgcaccaacctgaaggccgacagccgcacctcgtcggtgaacaacagccgtgaggaagagcgcctgctgctcagcaccctgagcggcgaccagggcgtgacgctgacggcgggtaacaacctgctggcggagggcgcgcaggttgacagccaggagggacgcatcggcctgagcgggcagaacgtgaccatcaaagaggcgcggcagcaggttaacgaccgcgacagcgagaacaaacgggtcggcaagaccaagagccggcgcgaggaagagagttcgcgcagcgacgcgctgggcagcaccttcagcggccagaacggcgtgacggtggtggcgcgcgacggggacgtgacggtcaccggcagcacgctgcacagcgacgacggggcgatcgccctgcaggcgaaaaatgacgtcatgctcaacagcgccaccgaaagcgaggcgacgtactcggaagagcgctccgagaagaaaggcttcctgaagaagcagagcagccgcacggtgaaaaacgaccgggtgacgcgcgagaagggcagcctgctgagcggcgacagcgtcagcatcagcgccggcaacgatctgacggtgagcggctcggcggttgtcgcagaccatgacgtcaacctgcaggcgggcaacaacgtcgatatttccgccgccaccgagaccgacgcgcactacctgctggaagagaagaaaaagaaagggctgctgagcggcggcgggctgggcttcaccatcggcagccagtccagccggcatcagattgacgagaagggcaccacccagagccagagcgtcagcacggtgggcagcaatcagggcaacgtgaacatcacggcgggcaagcagctgcatatcggcggcgtcgatctggtggccggcaaggatatgaccctgagcggcgacagcgtgcagatcgacccgggctatgaccagcgcacccgtacggaaaccttcgagaccaaacagagcgggctgagcgtggcgctgtcgggcgcggtgggcagcgcgctgaataccgcggtgagcaccgcccagcaggcgcgcaaggagagcagcggccggctgcaggcgctgcagggcaccaaggcggcgctgtccggcgtacaggcgatgcaggccgggcggatggatgcggcgaagggtgacgatccgtcgaacaataattcggtggggatcagcctgtcttacggcagccagtcttccaagtccgtgcagcacagcgggcagagctccgcgcagggcagcagcctgacggcgggcgacaacctgaccatccgcgccagagagggcgacgtcaacgtgacgggcagccagctgcaggcgggcaaggacgtcagtctggaggcggcgcgggatgtgaacctggtatcggcgaagaacaccgagttcctgaccggtaaaaacagcagcaagggcggcagcgttggtctgggacttggcgtaggctccggcggcgcgggcctgagcgtttccgccagcgtgaacaagggcaaaggttcggagagcggcaacggcacaacgcacggcgaaaccacggtcaatgcgggccagcgggtcaatatcagcagcggacgcgacaccacgctgaagggcgcgcaggtgagcggcgagcaggtgagcgcggacgtcggtcgcaacctgtcgctgacctcggagcgggacagcgaccgttacgatgccaagcagcagagcggcagcgccggtggcagcttcacctttggttcgatgaacgcatcggcgggtgtcagcgccagccgcgacaaactgcacagcaactacgacagcgtgcaggagcagacgggtatttttgccggcaagggcggttttgacgtcaaggtgggtgagcatacgcagctggaaggcgcggtgataggcagtacggcgacggcggacaagaaccggctggagacgggaacgctgggctttaaggatatccacaatcaggcggactttaagaccgagcaccagagcgtgagtgtgagcagcagcggcagcgtcggcggccagttcctgggtaacgtggcgaacaacttgctggtgggcgcgaaccacgaagggcatgccagttcgacgacgcagtcggcggtgagcgagggcgcgatagttatccgcgaccagggcaagcagcagcaggatgttaacgcgctgagccgcgacgtggagcacgccaatcaggcgctaagcccgatatttgacaaggagaaggagcagaaccggctgaaggaagcacagctgataggggagataggcagtcaactgacgaatattgtggagacggaaggggcgatagcggcgaccaaagaagccagggagaaacagaaagacccggctgcattagcagcggctaaggaaaaactggagaaagaaggcaagccgacgacggcggaagcgattcagaagcaggcctatgaaacggcgtacaatcaggcgctgaatgactctggttttggtacgggcggcaaggtacagcgtgcgatgcaggcggcgacggcggtgatccaggggctggccggcggagacctgacgaaggcgatagcgggcggttcagcgccgtatattgcgaatatcatcggcagcagtggcctggatgatgcaggcaaggtactggcgcacgccgcagtgaatgccgcgttggcggcggcgcagggcaataatgcgctggttggtgcaggcggtgcggccacgggtgagcttatcgggatgatagcggtcaatgcgtacggcaagccggtaagtgaactgagtgagacagaaaaacagacggtgtcggcactggccacgctggcgtcaggcctggcgggaggattgatcggtggcagcacagctgatacggtggtgggtgcgcagtctggtaagacgacggtggagaataatgcgctgagtccgaacgacttcggtaagggcatggcggattacggtcaatccgttgcttcttatgcgcaatatgctcaggacaagaatctaccgccagagcaggtgcaggccgatctggcccaaatggtgaaaggtgatctgccggaaagtgcggatatcattaaagccattttgagcaataaccctggctcagataccatcatggcgctgctgacagcggaagaagcgaaggattacgcgctggcactgttgacgtcgatccccgcagaaaaagcattagcactggttggtaaaactgcgaatgttctgaccaataaccagctgatcaaagcagcggagaagatctcgacggcgaaaccggggaaacaatttactgctccacgggatctgaatgaacaaatagtttggaagcaggtgcaggaaaatccggcagcaggtgaaaaactgattggtatgaataatgatcctcgttttcctgcaagtgcaggattccaaaaaatgcaggtagtccagaaaaatgctaagggagaagcaatcaccattcattatcagtacaattccaccactggcaaagcctacgatatgaaaattgataccccacagagggttagcactaatccggcagatgtaatcgaaaatattaaagggcagattaaatga

SEQ ID NO: 455611 - DNA, 714 bp, Serratia marcescens
atgctgggtacgctggcggcaggacttgcgggcgggctgtcgacgggcgatactgcaggtggggtgacggcggcacagaccgggaagaatgcggttgagaataacttgctggcggttcccgtgccggttccgccgccggtggcagcgccgaatacgtccatcaatggtgcagacggaaatgaagcctgggatgctgacgatggcagctatgatccaagcaagtctcgtgaagagaatgcgcggcaaccgaatgtggcgcaggatctgacggatgaagagaaagccgagctgggtggagcaggatctggaactccgggcggtcatgggccggaagatgaagagaattctcgggatcagcaatcacagtcagagaatgcttctcagctagaagagaaattatcttgggactcttggcaaaattacccgaaacaaacggttaatgggcgtcaatatgctcaaataggcgatcgtctttattcccaacatgcagttgacagaatgcagccatctggattgggctcaccggctgggacaactggaccgggaagaaacattactcccaatatggttgaacatacaattaaaaccggaaagcctgaaacaagtatatcgaatggtgttacgaggacggtttattggagtggtgatgttggtgtggttactgaaagtaagggtaatgtaatagtcactattcttcgcaggagtgggcaatga

SEQ ID NO: 455612 - DNA, 267 bp, Serratia marcescens
atgagtgaatggctttatcccgatataatagaaaaactaaggttatcttgcgctgaatttttagacggaaaattatcagtggctgaaatacaatcggagatctataacgcagaaaacgggattactgcgctagatgaaaaatggttacgtcagatgctatttaatgcggaaaatgagatagagcttttaacattcactgttgacgatgaacaattggtaaagtctgttacgcccattgttcaaaacattattggctcgatctcataa

SEQ ID NO: 455613 - DNA, 624 bp, Serratia marcescens
gtgagcaccgcccagcagacgcgcaaagagagcagcggccggctgcaggcgctgcagggcaccaaggcggcgctgtccggcgtacaggcgatgcaggccgggcggatgggtgcggcgaagggtgacgatccgtcgaacaataattcggtggggatcagcctgtcttacggaagccagtcttccaagtccgtgcagcacagcggacagagcagcgcgcagggtagcagcctgacggcgggcgataacctgaccatccgcgccaaaaagggtgacgtcaacgtgacgggcagccagctgcaggcgggcaaggacgtcagtctggaagcggcgcgggatgtgaacctggtgtcggcgaagaacaacgagttcctgaccggtaaaaacagcagcaagagggcagcgtcagccagtgcgttacccttgtcgcgacatcaaaaaaccaccggcggtacagtttgccggctcaacgtcgccgcccgctgcaaggcgtgccgatcgccttgctcgttttcggtttttcccccggagaaagtgcgcagcgccagcattttgccgactttttcgccgtcaacggcaaacagctgctcggcctgggtgcccatatgcgttttggaggtgacataa

SEQ ID NO: 455614 - DNA, 1170 bp, Serratia marcescens
atgcctttatttttaataaatatagagttagccttttacttttcggcatctttattttttatgtttatttcgtttttgtctgcaacatgccggtcaatatcacttgataggatcaatgcctttttagtggccatcatgatggttcttttttatggtctgcgaacggagggaacatcagacataaaaatgtaccttgatttctttgacagaatgagtgactttgaagacttcccgtggagttatgggttttacataatcgccaaaacaataaaattaataaatccttctcatgagttctacattttcttcacgtcattgttttttgtttgtgcagttttaatatgcacatttaagtacttaaaaaatgaaccgtacaaatcactattaatgctttctttttttaatggctggtacatgttagacttggcaacaaacaccataaggcaaggtatggcgctcccatttgtcatgctttctttttacttcttaatccacaaaaaaagatctctttttttaacattcgcagcattaggaataagtatacactggggtgcattgacccctctgtgttttggtgttttttcctattgtatagctaaaagaaggcttctgcttaagtctatcacaatagctgtcctccttttttatacgagttcttatttcataaacctcgacattgcccgagtcctagtagagaaaacacccatcgacactctccaaaatttttttgtcggtgtaaacctgaaaagcaaggcctatgcgtaccttaactcagaaataatcggcgctcaattttatcaactaccgattattacacgactaaaatatacgacagagtcattcatcccactggttgtaaatgccatatttttccttacccgtaaaaaagacgatccgtttttttatcagaataaattatatctccccgtgtatacgctcttcttgctacttaccgcatatggagtgagcattatatctatggtgtggttcttcaggaacttctactggggaccaatgctctcaatgatcagcctgatgatgattatttcttactataaaagatcaaaaaaccataatgcatacgtatttattctcacatcgtgtgtcctgattgtaggcttgctcgcaaattggccatcagcacttctacagatgtcataccccgcatag

SEQ ID NO: 455615 - DNA, 1272 bp, Serratia marcescens
atggtggatttaatggtaagtgagcagcagtcgggtatggtggggaaaggcgtgcctgcggggtttaagctgactgaggtgggggttattcctgaggattgggaagtaaagaccatcaatgagatagctaaagtttactcaggtggaacgccaaatagaaaaatagcgcaatattgggacggtgatatcccatgggttactacaacgctaattgatggcaatgacatctctgatgtagatgagtatataacctataacgggttaaaaaactcatcagccaaatggtgtgaaaaaaacacgctattaatggctatgtatggtcagggaaaaacccgaggtaaagtcggtgttttacgcattaaagccaccattaatcaggcatgcgctgcaatttcattatatgaaaaaacatcagttaagtatttattccactatctgaatagtaaatatgtagaaatacgtgagctcagtaactctggcggacaagaaaaccttagtggaacaataatcaagaatctccctattccttatccatcagataaagagcgattaattatcgcggacacgctatccgatattgatacattcatccttgctcaggaaagattactcgcaaaaaaacaggccatcaaaacagccaccatgcaacaactgcttacgggtaaaacccgtttgccgcagtttgcgttgcgggatgatgggactactaagggatacaaaaagagtgagttggggggtattcctgaggattggatagtatctacttttggttcagtcatgaaaattcgacatggaaaaaaccagaagcacgtcgaatgtcttgatggagaatacccaatctatgctacgggtggtcaaatagggaaagccaatgcatttatctataacaaaccatctgtattaattgggcgtaaaggtactattgataaaccacgatatacagataagccattctggacggtcgatacattattttactcagaaatatcagagtcagcagatgcgcaatttatttattataaattctgcgtgattgactggatgcaatacaatgaagcttcgggcgtacccagcttaaacgctggcacaattgaaagtattcaaacggtgttaacatccattgaagaacaaaccgccattgccaccatcctctccgatatggacaaggaaattcagaccctacagcagcgtctggacaagacttgccagcttaaacaggggatgatgcaggaactgttaacaggaaaaactcggctcatagaaaggaactag

SEQ ID NO: 455616 - DNA, 195 bp, Serratia marcescens
atgagctatcaggcttcatcggcgatccatctgccggccgagatggcgcagcagtgtcgcttcgagctgttcacgcccacaccggacgcctcgctgcaggcgtatgcgttgtcgctggataaaaacgattcgccgggagaggacctgcagcttggccaacaattcgcccaacggattactttacaatgtcactaa

SEQ ID NO: 455617 - DNA, 660 bp, Serratia marcescens
atgacccaagttttcattatcggcggcgcaggccatgtcggccttcgtctgagtaaattgctttcagataaaggacataccgtccgcgccctataccgccaatccggacaggagaccttaatacgtcaacagggtgctgaaccggtcaacggaagtctgaccgaacttgatacgaccacgctggcgacacatctgacgggcagtaaggtggtggtttttaccgccggcgccggcggcaaaggcggccaggaaatgacgaatgcggtagacggcgaggggctgaaaacggccgtggcggccgcccagcaggccggcgtatcacgctttctgctggtttccgcatttccggaggctctgcgcggacaggcagtttctgacacgttcgaaaactatatgcgcgtcaaaaaaatggccgatgtggagctggcgcaaagcgagctggactgggtgatattacggcctggtacactgcgggacgaccccggcaccggtcttgtccgtgcagggctggccattccttacggcgaggtgccccgcgatgacgtggctgctacgctggccgagattattgaacagcccgacatcagtcgcaccatcattgagctgaccgcaggtaaggttccggtcagagatgccctactgaagatggcggttcggtaa

SEQ ID NO: 455618 - DNA, 387 bp, Serratia marcescens
atgagtaaaaacataaaagtcgtgtccaccgctgattatcaggccgtcacggatacggcaggcagatacgttgaaggattgcgaagcggcagtgccgaaacggtggctgaagcatttcataaagatgccgtgatgtatggctttactaacggcagcctgctgggcggcccggttgaaaacctgtacgaatttgtccgcgaaaacggcagcgcgccggatatcgcgaccaggttggatgtgctcgctattacgcctaccaccgcggttgtgcgggtagatatggagaatgatgccatcggtgcggattataatgactacctgaccctgataaaaattgacgggcgctggcaggtcatcgccaaagtctatcatcagtttgaaggttga

SEQ ID NO: 455619 - DNA, 633 bp, Serratia marcescens
atgaagagccgtgatttacccgaagctgtggaaaagcctaaaggccggccacggagttttgatcgtgataaggccctgctgaaagccctggatctcttttggcgcaaggggtatgagccggcatcagtagccgagctttgcgctgcgatggaaattaatcccccgagtctttatgcagcctttggtaacaaggctaagcttttcttggaagccgtgagttactacgaacgggtgtactggaaaaagacctgggatcgtctggaacagacggtggacatcactcaggccattgatacattcttcagtgaagcggcagatatcttgttgtcaccttctgcgccgtgtggctgcatggttgtgctggcggccattaatgtctcggcagaatcgaaagaggtcgtcagcgcagtcagcgttctcaggcaggaaggtaaggatctgtttaacaagcgattggtcagagcggttcaggaaggacagctacctgaggggacaaatactgctgttctggctacggtgctgaatacattactcgaggggatgtcgattgaggcgaaggacggcgccacgcctgagagcctgcagatgatcggccagcatgccatcaggctgttgcccccgctcggaaagtga

SEQ ID NO: 455620 - DNA, 561 bp, Serratia marcescens
atgcgtcagcaccttattgaggtggcaagaacgattatcactcacaaaggttacagtgccgttgggattgccgaaattgttaaagctgccggtgtgcctaaaggctcgttttactactattttgcctctaaagaagcgtttgccgaggcgttgctggaacactatttcagtcactatctccatcaggtagacaaacagctgagtggtgttgagtctggcagggaacgtctgttacgttacttttcgttctggaagacaacgcagggcgcggatctgcctgagagcaaatgccttgtcgtaaagctgggggctgaagtctgcgatcagtacgacagcatgcgacacgttatggcgaaaggcacgcaggaaatcgtgcaaagaattgcgcactgtattcgtgaggggcaggcagacagttccgtgtcagcggtttctgatgccgatgaactggcagaagagctttatcagctctggttgggggcctccctgatggcaaaaattcatacccctgataaggcattcgataaagcgatgaatgcaaccacgcggctgctcgggtag

SEQ ID NO: 455621 - DNA, 744 bp, Serratia marcescens
atgaatcatctgcaaaataaaacggctatcatcaccggcgcgtcatcggggatcggcgcggctactgctcaggagcttgcccgtcacggtgtgaatatcgttgcggtcgcactggatcaggagggtcttgataagttagttgaaggcatcaaagcggagggcggtaaggctgaaggtctgctaacggacgttacccgccttgaggatagccaggcgttggtgaaatatgccgctgatacttacggttcggtagatattctgattaataacgccggtctgatgctgttctcccgctggagcgatgtggtgtgggaagactggaacaaaatggtggacgtcaatatcaagggatatctgaacaccattgcagccgttttaccgggcatgctcgaaaagaatgatgggcaaatcctgaacatggcgtctgttgcggggcatcaggttgacgccggcgcgggggtttacagcgcgaccaaatttttcgttcatgccataacagaatcgatgcgtaaggatctgggggttaatcggggtatacgcgtaaacacgataagtcctggcgtaatcaataccggctgggcggataaggtgagcgatccggaaggccggaaagtggctcaggagctgaccaaaattgccatcagcccacaagatgtggctagtgccgtggtttatgctcttaaccagccgaaaaatgtcactgttaacgatctgattatttcccccactcaacagaactggtag

SEQ ID NO: 455622 - DNA, 1476 bp, Serratia marcescens
atgagactgatttttctatcatttgagaacatgtccccggatgactttcctaggatacttagtccttcgatggctcattatgagctggaccgcgattacctgtttggcggggctgccgggatgtctatatgcagccagtatcgcgttgtccgtaatacccagtcgggcatcggtgtcacgggatataaagaagacactaccatgaagcgtatcgtattcgatgacctcaatcatggtgagttggtggcgattggtgaaggggggggcacttggtcgccgtctaaacaggtcttctacgttgatgaggaggggcggttacgacgttatcctggtagttatctgccgattctatatcccgttgaacgggtgatatcgcgctatgagacgatggtgaaacgctatggtcatcgtgccagaccaacgatcttgccaccgaatcagaatataacccgtaagccgccgctgcagcaggctatagcaacagcggccgcagccgttgtcgctacagcgaaagcaatgcggccgatgaccaaggcggaacgttggcaagagcggcagtccctgattgcgcgaggaaatcgcagtatttacccggacgcacgtatcgctgcgcaacggctggctcagaacaacgtggcggtagaaaaagcgaagttagccgagaatgtttataagacgacaaatcccttggtggaaactcctggtgtgcctgagggatggaaagatattagcaacgatgatattgcattagacaaaattggattgagcaaagatatgctctatgacgatgagggttcccctggttttttagcccgtgtctaccagccggacgaaaatgtatttggtaaggcaatgaatccgacagtggtatttagggggtcacgcgcgccagagtttcctgaaggaataggtaatgctacaaaaaatgtattactcaaaagagatttatcagggattaaaaatgtcaatgactgggataataatggctcgcaaggtttgggattttattcagactattaccaaaaagcagtaaatataggtaagggaattaaaggggatgtcgatatttcggggcattcccttggtggcggcatggcatcagcagcatcgattgccagcggaaaatcagcttggacatttaatgcagcgggattgaactccggcacagtagaaaaatatggcggcacagccgtaggcagtgaaaaaaacatacaagcataccgtgttgaaggtgaacttttaacaaaagtacaagaggttgatttgtgggaagatgcgaaaagtgtttacttctatcctcaagccgtagtgcttaaggaagaggtatccatgctggcgcctgatgccgtgggtgtcaaacatactctaccgggcggtacgggctcattattggacaagcatggtatcgatcaggcaataaactgcatcgagtctgaaaaagacgatgatatagcgatcattcgggggagaatatga

SEQ ID NO: 455623 - DNA, 675 bp, Serratia marcescens
atggatttacaaccgcaggattattttgagggtacacagttggaaatcgctaaaactatttatgatggtgatgagcggagactcgacaaagtgttgccgacagtgagtgaagatgacctgaatcgtccggctaaggctgaaataacgttgctcttttgggcaataaataacgcaatttatgataatgctacaccagaaagactccagattatcacagacctaattaaggctggagcggatccattacaacccagacctgcgggaaaaagcagtccggttgaatttgttatgaaagctaacaaaggggtctggattcaagccatgctggaggctggtttatcgcctaatgcaagagataaagtaaataatcaacccattatatttaaaagtttacaagcacctaatacggaaacattaaaaacactgattaaatatggcgctaacgttaacatcaaaggacgcatgaatagaactccgctaataaattcattatataacagcaagatagagcatattgaggtgttattggataatggtgcggatccatcaatgaaagataattttggtgatagcttttcttcattgatttcggcagagatagaaaaaggcgataaggctaatacgtatataaaggaacttataaaaataaaagaaaaaatggatgctaaccattaa

SEQ ID NO: 455624 - DNA, 606 bp, Serratia marcescens
atgggagcgatggggttttatctgcggttgggggatgccacgacctgcggagggagaatactgacaggggatgaaacgctaagctggtatggcgttgccggggcacgagaaggtgatgccgtggcctgtggtaagcatccgggagtatataaaatactgggcggtacatctgacacttgggacgaaggttggcaggaacgctggatagtgtcagctcctgcccgtgttgtgcgcggtttataccgtctattcaactgctatttcaaagaagatacgtcggaagagcaagcggaggaggagcggttactgtcggtagcagctcttgccgtaaaggaaaaagagccggcaactaaagaaaaacgcctgacagaagagcaaaaccaaaacagagtctttgccaaatcccgcctgcgtgaggccgggaacacagacgcaggaacagaggacgaaccacaaagtaactttgcggcgatgagttttatcagtccagcccatcgcaacctgctcctgagccagaacaatacgcacaggccgcgaagaagaagagaacttcaccgcctccgccatcagaaccaccaaaagaaaaatcatggtttgataaaataa

SEQ ID NO: 455625 - DNA, 564 bp, Serratia marcescens
atgagtaataaaatttttggttatgttcgtgtatcagcgaaagaccaaaacactgaccgtcagacactagcgcttaccaactgcgatgaaattctaatagacaaagttagcggtaagaacgcagaccgcccagagctgaataaactccggggaatggttcgagccggggatactgtttatgttaagtcggtagaccgcttggcacgtaatacaaaggacttactcgagctgctggaggaattgaccacgaaaggcgttagcgtaacgttcattgataacagcatgacgtttgataataatccaaccagtaaattcatgatcactatgttgggtgctgttggtgaactggagcgcagttttatccgtcaaagacaaagtgaagggatcgccgcagccaaaaagcgcggagtgttcaagggacgccagaaagatgaggaactaagggagaaaatacacggatatattcgccgaggtacccacagcaacgacgagattattaaattggttggctgtggccgtgccaccttttaccgaattaaaaaggaactcgccaataaccgctaa

SEQ ID NO: 455626 - DNA, 786 bp, Serratia marcescens
atgttcgaagaaatggatttacctgaccagttcagtacagagccagccgatttaacgccagaacagcggcagtactggaagatgtttagtaacgggtggaaaccatcagctaacgatttacaggccgctggcattggtgagctgtacgggcgttacacatctgcgcaaacaggcgtaaaccagagcgcattacaggcggcagtggcagacaagctacgcgcagaggctgctatccgtaagttagcaatgcagaacccgaaccgtgttggcctgaaacagtcacaagtaacctctgccgtcaaagagtcgctggacgcctaccacacaggcacgcatcgccccagcatcgatattgttcgtagcctattacccggaaaggatgttaagccagtgatgagccgaccacagcaacgcagacgtttaaagaaagggttacgcgctaattcagaccaccccgcagttgttaccgcccaaaagcaaggaaatccaattcgaatggatgccgataccatcagttcggggctacagagcctccagaatgccgctatggttgtccgtaagctgaatgaccatgaacagcgcctcgccgcagaagaagcggccacagccgatttagcccgacgagttgccgaattggaatcgcgtttattggcggctgagacaggaacatcattggcagagcaggccgtcgcaatgcaggcgggaggtaagaagcaacaggagattgccaacgccctcggcgtgtcagtaaataccgttaagtcatggctccgccgcagtaaatga

SEQ ID NO: 455627 - DNA, 387 bp, Serratia marcescens
atgtccagcaacttcaattctttatttaaatcaaacagcggtatcgccgacagcctgaatcagcattaccggaaaggccaacaatccattatccgaaaaccggatcaaggcacccgccgtgctgttcgttcctctgcatcggcctttagctatcaggagcagcaaacgctgcacgacctcggaagccgtatgcgtggtgcgaacgcgaatcagcacgcgctgtatcaacgccagctagagcaattaattggtgatcgggagattaccggtgcagatgcccgtttaatcgccctgtacgccaagaccggctccgctgacggtaagacgggcactagtaccgccggggagtgggcgcaggtgctggacgctgtacgggacgcagagtaa

SEQ ID NO: 455628 - DNA, 966 bp, Serratia marcescens
atgaaggtacaatcacaaacgaaatcacggccagcaggctataacccgaccgtaacagttctggacgtcccgggcgtcactgccaaggaaccagcggaagcggtgcagccacaggataaagcacaccctgcccctgagacgatcgcagcgggccgtggctcggttcaggcagcctttgcgtactccggtactgtacaggcagccgaggcgattgcagagcttcctacactgctcaagccgatccgctacaccgatgacgagttatcttggcgataccgcagcagcacccgcacccgcgttgattcggggctgaaagacttaacccgcgattggcaggtgcactgcccggcagacctcgatgatttgctagggatggtggccgctgagctggtgaataaatacaaccatgcgaagcgtgacgggatacaaaccgcagatcgccaacgccgtaccgcagcagccgcgaagctggccgctgattaccaagtcgttgccaatggtcacatccagcggcatctgctgaacaagaaattcagcggagccgaagcgcaggaactgttgaacatggtggccgatggtaagacgcagtttgcccgacaaatggccggggatggcatcgatattccggctatccatgctgcgcttggtaccgattatcgcacggcggctgatgcgtgggcggagcaggcaactgcaagcggacactgctcattcagctacacgccgcttgaaaacccagaggctcccgtcagcgcaagcggcaccagtttcaacatgtctgtacagccgggcggcaaatggattctgagcgtgtggacggattcaggttggtacccggtgcaggcgtcaccagcagcccgtgctgcggcgttacatgagcgagcagagattgaccggatgcggaacattcaagcccgcatgaagccgtacatcggggaggttttcgctgatgaactccagtcttaa

SEQ ID NO: 455629 - DNA, 960 bp, Serratia marcescens
atggaaagaatgcaagttttgaaagacaatttgtctgttattgagaaggtggttcctcgcggtagcgaaattatttatctagactatccattgcatttgaacgtcggtgatttgttaatccttaaaggtgcagagcagttcttcaaggaaaacaactataaggtcatcacacgccactccgatcacaccagcatgaattttgtcgagaaaaccgattcaattcctgaacatgttgtcatcgtattgcatggcggcggcaactttggtgacctttacccggctcaccagcgattgcgtgaagccgttattaaaaaaaaatacaaaaacaatcaggtggtaattttaccacaaaccgtccactttaaagataaagctaacctgcttaaatccggtgcaatctttaaacagcatccaaatctgaccattttttgccgtgatactaacagcgaagaaattctgaaagagcatttttgcgataatgtcttcctctgcccggatatggcgcaatcgctgtggaacgttttcccacagcagaaaagcggtgatatcaaacaaaaggcgatgtggatgattcgccgcgatatcgaaaagacagatttgtctgcgctgggagcggaagccgatccgaataattttgtcgattggcacgatatctgtaccgatgccgaccgtcgttttatgaagtttatgcatctgtttgaaaaactgaaccggaagattccaggaaatttattcccgaccaacaatatgtggtatcaatataccgataagttggtggatcgcgttaaccagcgctttatgtcgcatgactcggtgattacttcacgtatgcacggccatatcttatgctgcctgctgaagatgaatactcagctgattgataattcctacggtaaaaattcaggctactacgaatcatggaccaaaggtgttcctggctgcgagttggttaaattatga

SEQ ID NO: 455630 - DNA, 1098 bp, Serratia marcescens
atggttacgataactatagttataactacgattctgaaaaataatcctctccgatataaagctggctatataaatatagccagctgttactccaagaaattaaatttactatccaagatttgtcgtctctattttatagggcgcattgcatgtcatgtactgcaatataataaagatcgggtgaacacgatgaaatatctaattgccattcccacatataatggggggaaggtgtggcaggaatccgctgacggaatatcggaattcaatctaaacaaggctatggtttatgtggtagattcaggtagtaaggatgacacgctggctatcgcagagcaacatggttttgaaacactctctattgattctaaagatttcaaccatggtgggactaggaatcaagcggttgaaaataatattgatcgtgccgatgttataatttttcttacccaagacgctattccgcagcagggcttcttggatgaaatcacgcaagtattcaacgatcctaaggttgcttgtgcctacggacgacagcttcctcacaaagatgctaatcctttggctaagcatgccaggatgtttaactatggtgcggaaggttatacctgcgaatttaaagataaagaaaagttgggcataaagaccgttttcacctctaactcttttgcagcataccgcacttcaatttttaaggagttaggtggctttccttcgaatacaattctttctgaggatatgtattttgcggcgaaggcagtgatggccggctataaagtgggctattgcgccggggcggaagtccgtcattcccataattatactccgattgaagagtttaaaaggtactttgatattggcgtgtttcattatgacgaatcctggatcagggacaagtttggcggggctggtggtgaagggatgcgttttattaaatcagagttatctttcttactaaaaaatcatccgttatggataccgagagcttgtgtacacaatttcctgaagatcgtggggtataagttggggatgaagtactccaaaattccacggaaatggctaccaaagttaagtatgcatagccgattctggaaataa

SEQ ID NO: 455631 - DNA, 159 bp, Serratia marcescens
atgcgtattgtctggggcgcatggcgggatgagagtgcctgccatgcgcgcatcggggaaccttacctcaatatcactggccttacgcgaagagatcgcatcgcgcactgcatgtttttcgtattaccgtcacaggaggatttaacacatgtcgagtag

SEQ ID NO: 455632 - DNA, 2139 bp, Serratia marcescens
atggcgctggagaactggttagttgagtacgttgaaaattgtggtaagaataatgaaatagattggatttttgattatgttcttcgctctagtaattcagtaatgcctacatctgttttatcttctgtggccacaggcttccctaataaagtaggtaaagccgcctttcctttacttaaaactgctgatttataccatttagatttgattcgaatgacacaagaaatgggtggaaatgagatgcatttctttggtcttaatagggatgcattgtcaaaaatatacctagaagagagaagagaagcagcacttcgaccatggagaaaagagtcattagaaaccttattaacaaggcttcagttcgtaaatgagctaagggatgatattttaaaaattgttgatgaactgaaaaatgaagctactgcaagtaatgaaaaaagccttcggtatatggtgcacagagtcgatacaaggacttgggaagtagttgaagacaaagaaaatgacagagtattgtttcaaagctcatcggagcttccggaagatttaaagctggatcaacaagaatttaatgaaaagcacgcaatggataacaccgtaactagtttaaacttatggggtaaaaaactattcgatgagcaattactagaagaaaaatacttctcttcatatcaggatgcgttaatagctactaagggattgctcagcgccctccaaaaaggtgaagttcacaactttgctgatatggcggttggcacaatcacaactgttgcagcggtttgtgttcgtgatgttcttttagaattgagctatgaagatataaagtggtgcttagaaatcatcctagaatcaatattcatacacgcagacaatatgaatgggacagctgcacatgataagactgattattacggctctggagcatgcgcatttgtcttacctaagttatttgatttagatctagattcagaacaaatagaatatttgaagtttgcgttagctacagcattaacgcatgagaacctgaacgttagtgcttgtgctgctaagggagtaagagagtttctttggtctagagacgctgaattagcatcccgttgtataggtggaatagttgagtatgccagattacgaagggaagatagtgaggtacgtaggttttatcatttacaaggtgctgaattgcaagccgcactcaaaaaatggaatgatcttttaacaacttttcgtaacgacttgattgagggaaagtttaagctttcagttaacgatatatctttggaaagccactgttcgtggtttattcatttaccaatgctaatggttccttactgtactaaggatgagatacaaattcagttggtcaataggttaatgagttttgtatttgatacggagtatcaaaaacatcgttcgagtgattatgaaaaaataaatcatgaaattaaaaagcagattcaagactgtctctctgaacatgttgtttcttcaagaaacaataacttcatgccctttaaagatctattggtattagggtgtacaaaagctcccggcttcatttattctttaacactctcctatcatgtcgctgtagaaaaagaaggtgattatgatgctatatgggcactttggtgcctgttagcaccagaagcacacaagatagctttgaatgatgttaatgatcgttatatcggtttacagaatgacctaaatcagctactgcgtggaatgatgtatgcggattgcccttggcaaggacatgagaatgaagagaaagatatgaagcgaggtgctaaatatttgctcggttttgctaggcaatctgcacataatagccatgtgtttgaagccttgtcttcattgatttataacttctacaacgtattcttcgaagaaggcattctgattttagctgagcattatagtgccaatcgacatattatcgagaagcaagtcaatacagcattatatatagaaatggtggttggaagatttttgcagatagaaaaccgcggaactctcagtagaagaatgtacgatatatgcctgcttctcttaacaggaattgtagaaactggttctgctagagcttattacttacgcgaagaattgattcgttctcgaaagatttcagcctag

SEQ ID NO: 455633 - DNA, 798 bp, Serratia marcescens
atgtctccggtgcagttagcggccatcctatctgataagacggtaaccgaagcggagacgttcagtaaccggctgctgggtggattgggtgtgctgcttggtgccgttgagatggttggagcaatggggttatgcattgcacctgaacctacaggactaacgaaggctggatgcgtagtcgtgggtgctcatagcctggatacggttcatagcgctgctcggaaaatgatttcaggccgggatacgcgttctgcaacataccaattagctgttaacgccgcccggcagttgggggcggatgaggatacggcactgaatattggttttaccgtcgatatcgctgtccctgttggattcgccgctgctattggcgcaacgcgggttgccgctatcaagactgggcgtgtcaaactgagccaacatgaatcactgacgggcagcaagcccggtggtcatactattgcaaaccacgtaggaaaaacggacaaagaactacttgctcgttttgaaagtaataaacgacttgctatgtcttcaacattcaaaaacttgaatgtggcggaaactgttattactcgtgcgctctatgccaacagggctacaattaagtcgatcttgggtggtggaaaaagaggtacacgtctcaccatcaactactcggcaggcaaggaaatcggacatggttttgctcgtggaagtactcgacgtattagcatgcgttccgtcagaatagtactcgatttacaagaatataatggcaagccatattatatcctcaccgcattcccaacaccgtag

SEQ ID NO: 455634 - DNA, 717 bp, Serratia marcescens
gtgaaactatatgagaacgttgtgattggcaatatcctttatggcttgggcgtttcgataggaggacggctcaaatccggttttattccgggatcggtcagtttgttacagcagaccccagaagataaggcgctaggtgatgtgctgctcgattttccaggcacactacgacttatcgagttcaaaacacaggagaataattccaaaaaggaattaacccgctacaggaaactatttccgataatacaaaaacatcaggaaatgttggatgtttcccgaaaaattcactggtacgtagaaactgcgatatctcccatggaaggcgttgaagcatttttctctccctaccttaatgtatttgaaacaaaaaaacctgagaaacagccagttgcactggaaaaattcatcaaattagtagcagatgatgttatttcgtctaggaacaatgaaagggatgaaaatgagaaaaattatctaaagcttgttcgctggtgtcagggagtaggagagacgggggctggcgcgttgattgtggtagtgggttctggcggtggtctggaatttgttgcgattgaggatctaatggcactaaacatgtcatatcaaaaatggatggcatatagaaaagaaaaggaattaaaaatggaaaagacactaaaaatagaaattgagaaaaaagagttgcagaagcaacgaggatggagctatgaaagataa

SEQ ID NO: 455635 - DNA, 588 bp, Serratia marcescens
atgaaagataaaatggataaaaacttgacagaccatgatgtccagttgttctttgatgcagctgaaaaactgcgggaagcagcagaacgtgatggtgaaaaatccagagaagcaaccgcggctttggcatcttttgttaacaaaatgacttttcatcttcataaattagaagataatgtcagccaaaagataaatagctcagcggaaacaaccgccagcagagctgcagaactgcttagtatcaaatttcagcatgcgaatgatgccgctaaaagagcaacagagcagtatcagaaagctgccaaaaatctcagtgttaggaactggctctatattctgggtgctaacattgcgttaatactgatttttacagcatccattataattttggtaccttcgctagatgatattcaacaacgtcgagcagaactatcaactcttaatgagcagattgaaagttcccacctaaaatgggccaactgcgggagaggtaaaaaatgttttcggacagatgaacgtgagaatggcggtgagccatatagaggcacacaagacggcagtacttggcgtgttccatggaaagattaa

SEQ ID NO: 455636 - DNA, 207 bp, Serratia marcescens
atgctccacgcggcagcaggcggtctggtttcgctgcttgctaatggcatcatcatttacgccatgacggccgcaccgatgggcgccgtctctgcgctgcgtgaaaccagcgtgctgtttgccgccgtattgggctatctgtttctcggcgaagcgttaacgctgaaaaaatgctggcgtgagcgctcattgtcgccggcacgctga

SEQ ID NO: 455637 - DNA, 165 bp, Serratia marcescens
atgcttcaaccgtttaaccaggtctttgtgccagtcttcaaacagtccatctactgtggtcagttgcttagggcgattgagttttctctcagcaataggatcatccccggtggcaacttttcttcgagtatcctcagcgaggctacgtacctcagacagagttag

SEQ ID NO: 455638 - DNA, 1590 bp, Serratia marcescens
atgtctttaggctcatcaacctccacatgcagcactacgactacaagtaattttaatgacgataacttggccgtctggctcaatagatgtctggtacaaaagcaccgagtggcatacgtcactgcggggtatctctgcaagttggttgatcttgatgaggtagggctcgcatttcaccttgctgatcctggaccgaaagcaaaagtaagtctgaaaaagctagtctcaaaatgcttgctctatagtctagatatggggcttgaagcctttctttctgcccagaccgctgacagttcttggacatttacgcctgtaaagagtaaggacgcagtggatattttcatcgctgcccgggatgggctactcggaagaactaaaggtcgggggcaagagatctcagagaaaacggcgcaaaaggtttgggctgatgcgggtgcaagatgcatgtttgaaggctgtgcgcatgatctgtcagagattgccttatggacccaggctgcccgagttggatatctggcacatatcgtcgcatcggacccagaggggcctaggggtagtcaggctgattcacaccgtcttgccaatgttgccgaaaacatcatgttgatgtgtgatgagcaccatcgtctgattgattcttttgcacctcaatattacaccgccgaaattctgaatgaaatgcgccggtctcaccgtgatattgtacgaaattatctggactcattagcgtttcagcgcacaaaagcggtgactttgcatgcaaatctcgcaaacgtgccgacctactttcacgactctgagctgattgaagccattgtggcgaccagacgagctatggaacctggtgttatccattatatgcgacgaaaatcacagcgagatgaccgtcatctacctgagttttggtaccaatatttgcgtgagcatgagcatcatattcgagagctcgttactggatttaattccagtagtggtttgagcaccgaaaaccttgccatcttccctttgcaccatatccctaccttggttttggccggtcgagtgatgggtgaagcgcaggctattcaagttttccagtacgacaggggccgcaagacctgggcgtgggactcaaaggctaaagctcatcccgcaggtacttttagagttagccctctgccgcagacgcgcgcagacgaagtttttataacacttgagttgtcggccagtcttgatgaggattcactgtcccctgaattcagaggcgaagtcgattccggcaaaatcccttggattcgcgtcactacctcagagacaggagctggctgtattgggtgtccagaggatcttgaacagttttcgcgagctgcgcgcgcagcaattgttcacgctcaagatgtgatgagagttgcaaaggtgcacctaatcgctatcagccctgccagtacggtgttccgttttggccagatgttgcaggcaggcaaccaccctgagtacgtggtttatgaccgcgcaggacgggactacaaatttgttcctgctctatctatcactggacatgatgtatcagccactcacggacagagttcagtcagtatttctcttcgataa

SEQ ID NO: 455639 - DNA, 276 bp, Serratia marcescens
ttgccaactgtaaaattcgttaagaacggcgctctattcattgtgtgtttcattgtcgcgttcgtgctctcaatgcacggcatgccgttgaatgctccaacgttagccattgtggattacgcttatcagaccttcggcaattccttagccggcaactatgaacaaggcgctgacccggtatcattcaccgcgatcctgatggctaacctgatctacgcgcttatccttttcgccatactaaaacgtatcggcaaaaccttcgcaaaaagagcataa

SEQ ID NO: 455640 - DNA, 531 bp, Serratia marcescens
atgcgcattatgcgaatgagctacgacgatctgagcaatggcggcggcgcagcaaaactacatgtatacggcgttggaacatacccagtgttcagcggtgacaagccttacacgaatgacccgaactgcgcttacaaagttaacagcgcgatccctgttggcaggtactggattgttgaccgcccagcaggcagctttaccaatcaggtcagggcatgggcatgggataaggtgtcaggcaatcgacacgatgaatggttcgggctattcagcgatcggacaatgagcgacagtgtttttgtgcacggcatatcacgcggaagttttcgtcttcacccggtacggccagacggcagcgggattagccagggatgcataacgttctttaagccgtcagatttccaagtcgtcaggcgggctattctggcaacaaagaaaaccgttatacgcaggggaaatctgacgctttcagtttacggccgcgtcgacgtcatgggggaaagcgactttgccaactgtaaaattcgttaa

SEQ ID NO: 455641 - DNA, 1668 bp, Serratia marcescens
atgaaacccataattacgctgaaaatcgggcctgacgaggtggaagtctcagcctatgaggtggtgatcgacctgaacgataccggccgtggatttatcacggcaaaaaccgatgcggaaaccaccggcgcgattgttcgtcttgatatcgggtataacacaggcgtgtttcgctggtttaccggctatgttgagcgcgaccagcaaacggggaatggattccgccgcctattcgtccgcgaaatgaccggcatctttgaaaaacgctggccgctatccctgcagcatccgacactgcgccaggtaacgcaggagctgaccgcaggcagtggcgtgcaatttgtgttaccagctgcggactatgtcgatcgcccgatcccgcattttgttcatagcggtacaggctggcagttgctgaactcactggggcgagcctttggcataccggattacatctggcagcagctgcctgatggcagcgtctggctgggagactggcgacactccaggtttgccaatctgccgattgagctgccggctgaatacgcggacgcgaccggcggcggcaactcggcaacacttccgcttatcccgtcggtacggccgggcgtgctgatgaacaaccggcgcattacccgcgttgccgtgaaagacggcgacatgaccatcacctggcaggcaggatccagcatcggcaacacgccggccaagccgccgtttcagcgccagcttgagcagctaaacccggagattgccgccggcctacacctgccaaagctggcacgggtggaaaactacgccgagccggcagcgctgggcgacattgccgacccgttccggccaaaatatgccgttggcgtgcagctgcttgacgagaacggcgacgccagcaagggaactccggcctatcctgcagtacagctaccggtgacaatgggcggggacgaatgcgggttcatgcagtacccaccgccgggcactctggttgagctggcgtttcaggatggccggcaggataaaccgttcatccgccaggtactgccgacaaacagcagcctgccagaaatcagcccgggcgagcagctgcagcagcagcgcgccggcgtgttccagcgcgtaaccgcgcctggtgactggcaccgggaaaccgaccaggagatcaaagagatttccgcgtcgcgcagcgtcgaagccgacaaagaaacccgccggctgattgaccgcgacatcaccgtccaggctgacgacagcaaaaccgtaatgggcaccgcacgcaccaccgcgggcgcagtgacgcacatcgcccgcggcgattacaccgtcggcaccggggccaacctgaagacggccgcccgcgccgctgatgagaaaatcgcccagggcaaaacggtggacattggcggagcactgacagaacggattgccggcgtacgtcaaagcgtatccgccgctctgcagctgcaggcggccaccacgtcgatcggcaatggcgccgtaaacatcctgaacctgctgaccgacacgcttgacctgatcgacgcgctggcgcagagcaccgccaaccatacgcacagcaacaccggcaccccgaccaacgccggcgagatagcgcgcgcatcaaccactgcggccaccctgaaaggcaaatacgggccgctgatcggctaa

SEQ ID NO: 455642 - DNA, 555 bp, Serratia marcescens
atgacaatcattatgctggcgctggatggcgaagccataccgctgaaggcgatcagagtgtcgccgaaaatgacgattgaaaccaaggacaaatccggccagtcatcgagcacgacccaatcagagaacggcatcaaggccaaagagctgaacgtttccggcctggtagatttcaagaacaaggcgctgctgtctcgtatttttgccctggcggaagccaaaggcagcggcggcgcagggaagcgttaccggattgcctgccccgtggcgcaggccatcaacatgcgcatggggatgttcactggcaacattgaggccatcgagcaagacgacaaattagcatggaaggtcagttttacgctgacagagcagatcagcaccgccgagaaatccaaagggcgtaaagccgccagcgcaccggcaggcagcaccaaaacccagggcgcaaccggcaccaccaccgccgcgaataacgaccaaccggagcaggaaaaagagctgaccgggtttgaaaaaatcctgaaaaaagttgacgacaaattgggggcgctatga

SEQ ID NO: 455643 - DNA, 702 bp, Serratia marcescens
atgtggcaacgcgtaaccctggcttttcctgacaatatggcggcgatcagctgctcactacttacggtcaacccgtggacgtacggggccggacaggtgacgccgtcggggaattacctcagcccggagaatgctgttaagcacctggcgggcaagttacgcaatgccggcggcgcgccgggcgtggtcgcctttctcatcaccggcacccagtcgggcaacttcctggaaaaaatgagtgacttcgctgccctgctgccgctgccagacctacagaagacggtgcgtaaggctacagccgccgctgaactggctgtcaccaaaatgcagttgccgggcattcagtctatcggtctgccggctgccgcgccgctgtcgctcagcaccacacgcgccgcgctgaatgcgcagcgtatcaatgaggccgcgcaggcggcgggggctggggtgtcatttgacgatatcaccaatgcgctcagcgctctggacgcagcggcgaaagaagcccaggaagcggccagcgccgcgctggaaaaactgaaaggagtgcgggttaatgcctggatgttctctgataccggccaccccgccggcatcgcaaacaacatgatgaacggcatccccgaacaggatgctattttcacgcttggcgcgctgttcgccggcgacgtcagcgagctgctgaggatggtaatgccatga

SEQ ID NO: 455644 - DNA, 567 bp, Serratia marcescens
atgagcaagaatttcgagttttccaccacgccgcgctgggtgtgggtttacaatttcgacgagaacaacgttttcaccggcaccttgaatttttacgtcgcgccgcataccggcctacccgcgaacagcaccacaacaaaatgcagcccgaaagacggccaggcgggagtatggaacggggaaaaatggcagtacgtggatgactaccgcggctcgacctattgggatgcctacggtcacaaaaatattgtgctcaacgtcgggccgctgccggacgattgtacgttcacgccgccgaacacgcagttcgacacctgggacggggaaaaatgggtcacggacgaagccaggttgcacgctgcgcaggttgaggccgcccgtgttgaattatcgcagcgagtcaacgacgccaatgcagcgctcgccccactccaagatgccgccgaattgcaggatgccactgatgaggaaaaagcggcgctgacagcgtggaaaaaataccgcctggcgttaagtcgcatcaatatcaatcaggctccagatattgactggccggagatcccataa

SEQ ID NO: 455645 - DNA, 1542 bp, Serratia marcescens
atgtcagccatcatcacacgaaaatacgaacaatgggccgcaagccagaccgcgcaaaaactgccggcacgccctgacacctttgtttttgcctatatccccgatcaggatccggaagcggaaatcagccgagacgagccaatgccggcacaggccaatatcgttcacacggctccggtgatgcagtacggcatgctgaacggtaacgccgtggtgttctcggttgtgctggacaccaccgtcggggattttaattacaactggatcgggctgcgcgaccaggacagtggcacgctatgcatgattgtccacacccgaacccagcgaaaaatcgcgaccagcggccaagcccagggcaacaccttaacgcgtaccctggctatggaattcgacggcgctgccggcacaacacagatcaacgtcaccgcccagacctggcaaatcgatttttctgcccgcctgagtggcattgacgaacgccagcgcctggcaaatatcgatgtttacggtgacggggcattctttggtgacgcgttcctggtcagccgcaacgctgggacataccaggcgacggccggcatcggctacgttggcggagtgcgcgccgacttgccggccaacgtgccgatcgacattggcagcacaccgacgcttgtctgggctgatgtcagcctgcaaggccaggtgaccagccgctgggaggctgccgtcacgctcaccgtggccgacgagctgcagaactacaccgacgcgcaagggttcacacactacgtcacgcagctggcgcgcatcaacgaagacggcagcgtcaccgatttacgccgcactggtgccattaatgaccgatatgtcaacaagtccggcgataccatgaccggcaagctgcatattcaaaatggattgcttgttgacgatgacgtaagtatcggtgggtcgctcggtgccaagatgttatccatcgcccaaacagcagaaatcgggacattaacggttcacgatgaagtttatgtcggcagcgcgccactgatgccagtgggtgcccctatcccctggccgttaagctcaccagcaccaggccatgcattcctgttaggccaaggatttgataaggcggcttatccgcgacttgcgcaagcctatccgtccggcgtgctgcctgacatgcggggcatgacgattaagggcaaaccggacggccgcgagccgctgacctttgaggccgacggcaacaaatatcacgggcatgggctggagattgacggcacagacctgggcaccaagcagacgaccgcaaacggtgcgtatcagttgaagatgcgctcgtatcgttccaacacctcattggatggcggtgaaagttcacgccacagtattgaccaagacaggggctttaccgattttggtctgatcgagcgcatccccgaccacgcgcacgatgtccccatcggctggcacggccacaacgggcgcgttaatccggacggtaacgcagaaacaacggttaaaaacattgcattcaactacattgtgaggcttgcataa

SEQ ID NO: 455646 - DNA, 603 bp, Serratia marcescens
atggataaacctgttattaccctgcccagctggatgagtaagggcgaagtcaaaaagctggccgccgcctgcgccgcgttctgggtgaaggtcaacgagtggatttcatttccgttgcagcaaaccgacccggaaacctgcacggttcagatcctgaacctgttggcgtaccagcgagatatagagcgtttcgaaaatgaaccgctgtggctctaccgcttgcgcgtgaaacatgcctttgtcaacgcgcatgacagcgggagtctgatcggattcgcccgcattttcgaccgtttaaaaattggcgaggtgcagcagctggagcgtcagcccggcattgactgggacgtaatcattattcgcgtcaatgacaaccagctggcggctaatgccacgctgatgaatgagatcatcaggaaatacggccgcacctgccggcgctatcgctttgaagtcctgaacgtggcaaacatcggcacccgtgccggtgggttcgacaacgatcatcagctgtttgtcggccgcattggtgttgacgccgccatcattaccgaaaaccgcgcttacatcatgaccgaaagcggcgagattttgacagtttaa

SEQ ID NO: 455647 - DNA, 1185 bp, Serratia marcescens
atgacaaacaaacccagtgtagattttgaagacgccctgcgcgccggcggcatgccaacaacggaagccgaggttaaagccgagtttcagaaggtggtcgacgacgaaggcctgatcaccaacacatcaccgatgtcgccattctggcggctgatcaccgctatcgtgaccaagccagtgatctggctgaaagatatcctagtgcataccatcatggcgaacatgtatctggcgaccgctgccggcacctacctggacttattcgcctgggcgctgaacctgacgcgcaaagacgccacctttacccaaggcgcgattacctttttcaagtctgattcgacattgttggtcactatccccgccggcaccgtgatccagaccgaacgcattgacgacaagatttaccgggtaatgacggttgctgaagtggttatttccgcaggaacggccagccaggctattgccgtcaaggctgaagccgccggcaccgcgtacaacctggctccgggatatttccgtattctgccgacagagatccccggcatcagccacgtcgagaacctggaaaactggttaacagcgccaggctccgatcaggagtctgacgacgaactacgcgaccgctgcaaaaaccaatataacctcgtcggctcgtatcacattgacgccgtttaccgcagcatgatcgccgccgttgccggcctcagtaccgaccgtgtttattttcagcacgacgcaccgcgcggccctggcacggcaaatgcttacctgctgctggataccggcgtacccgcggatgcgtttatcgatgccgtcaacgatcacattattgtgcagggctatcacggccacggtgatgacatgcgctgtttcgccatgccggagacgcaccacgacctgaccgtcaccgcctacatatacgcgacgctcaacctgacagaaggcgaacgggccgacttgcaaaaagacattgagaactttgtccgctgcgcgttccgagaaaatgccacgttcgacgtcaccaagacctggccgcatagcaggtttagcttctcgcgcctgggcgaagaaatgcacctggcgttctcggcgctggagtctattcgcttctcacaggatgacatcatcagcggcctatccataccgcgcctggcgtctctgaacgtggtgctaaccaatggataa

SEQ ID NO: 455648 - DNA, 333 bp, Serratia marcescens
atggctgacacaccgctgtatatcgacttactgatcaccgatcgcgatttcacactgaacgccggcaacgaaccggcgctatgtgctaaccgcgccagcatcgcccaggacatcaaacacgccatcatggaaagcggcttcgcgacgcagctgcttgccgagcgcagccctaccctgcgcgcagatatcatgatgcaaatctctatgctggttgaagatgatgtccgcatcatcccggccaccgtccagatcaccgaagaaaccagcggccgcctgttggttaacgctgacacttacgactttggcccactgggcaccgaggtagaactatga

SEQ ID NO: 455649 - DNA, 267 bp, Serratia marcescens
atgagcgacaaacacacgattgaactgaccgtaaacggcattgatctggtctttgagccgaacgtcaccgcgtttaataagttcatcaacgagatgagcctggataacaaggtcgcccccgcggtgaacttcctgcgccgtatcatcagtgcggacagcaaagccgcactggaagagatcatcgcgctgccgggtgcggcggtgaagctggcgggcaaggtgaacgagatttactcgccagatctggagattgaagtaaaaaactag

SEQ ID NO: 455650 - DNA, 387 bp, Serratia marcescens
atgaatctgtcgccgcccttcttgctggccgcgttgcttgccgcgttcagcggtggctggctggttgccggatggcaccaggacagccagcaactagttatcgagagagcggcaagcgccggcgcggagaaatcccgacggtataccgaacagatggcgggcgagtcggcccgcttactggaaagcaagttagcggagttgagcgccaatgaaacgcacacagagcgggtcatccgaacagaagtggttaagccggtattcagtaatgtgtgcgctactgatgattacgtccggctgttcaacgccgccaccggccgcgccgaacgtgccctatcaggcgaacctgttgacgcgctgcccgacaacgctacccaggctaaacagtaa

SEQ ID NO: 455651 - DNA, 279 bp, Serratia marcescens
atgctgacgctactgctgatcggcgcagtcatcgccctggcgaaaatgctggtcagcaatgaccccatcacgccgcgcctggttgccgggcgcgtgatcctggggtcggctgtgtcaatgattgccggcgcggcacttattcagttccccgacctgcccaacaccgcgattaacggtattggctgtgcgctggggatcctgggctatcaatttgtcgagggctggctgcgtcggcgcggcagcaagtggatgaaaggtgaaaacaatgacgctcagtga

SEQ ID NO: 455652 - DNA, 1125 bp, Serratia marcescens
atgacctggccgagtgttgaaattaaccagctgaaccaataccagggcgcaccgacagaaattgaacgcgttgtgctgttcgtcggcgtcggcacgaccaacgccgggacgctgcagccactgaacagcagcacaaatctggatacggtattgggtgacgctgacagcgtactgaaaagcaatattgccgccgcccgacgcaatgccggcagcaactggtttgcttacgtggcgattttggccgctgacgccgccgaaactgcggattgggtggctgcggtgctggacgcccaaaaaaccgcatcagtagaaggcgtggtgctgtgcatcgataccagcgataaagcggacattaacgccgcggtaacgctgcgcgctgacctggtcagcaagtacagccgctggtgctggacgatcgtgtccgttggcggcccgactgcagaagaaacctgggcgcagtacagcacacgactggcgacgctgcaaaatggcattgccggccccagcgtccagctggttccgcggctgtgggggaatgaaccgggcgtgctggccggccggctgtgtaaccgtgccgtgaccattgccgacagccctgcccgcgtgcgcaccggcgcactggttgacctgggcagtgacgacctgcctgtcgatagtgccggcatcgcgttggatctgtctgtactgcaggcgctgaacgcgaaccgctacagcgtgccgatgtggtacgccgactatgacggcgtttattggtctgacggcctgacgctggatgtcgaaggcggcgattatgtcgtgatcgagtatctgcgcaccgttgataaagccgcgcgccgcgtccgtctgctggcaatccccaaaattgccgaccgttcgctgaattcgtcggacagcagcatcgccgcgcaccagacctacttcagccggccactgcgggagatggcgatctcttcccaaattaacggcgtgcagttccctggcgaagtgaagccaccacgcgacggcgacgtcgtgatcacctggctgaacagcgtcaaggtgcaaattttcatcacagcccggccgtatgccagcccgaaagagattgcgatcggcatcctgctggacaccagcctgacggagtaa

SEQ ID NO: 455653 - DNA, 714 bp, Serratia marcescens
atggcgacaatcgttaacggcgaactgagcaaaagccagctgcgcgcactcaagcaggcactaagggatgtcgatttccccaaggccaagcggcaacggctgctatggcgtattgccaagcgcggcattatccccgcgtcaaagcgccacgcacgcaatcagcaagcgcccgacggcagcgcatgggcaccccgcaagcgcggacgccgcaaaatgctgcggcaactgccgaagctgctgaaagtgcgcgatatgccggaacgtgaagccgtcaggatttacctgcatggcggcaattacagcaacggcgcacgtcgtatgccagccggtgttatcggggccgtacaccagggcggcgcacagatcaccgtcaatgcggcgaactatcggaaccagcccagccaggaaggcaagacagctacacgccgccaggccaagcgcctgcgggatctggggttcaaagtgtggtggaacggcaaatgggtgaagccggcggtcagttacatcactgcagaaatgtccatgaaacaggccggctatctgattaaaaagctgagccgcaaagcccgcaaaaacacatggacgatcgacatcccaagccgtgtattcctcggcgtgagtgatgatgactttaacaggatcctggcccgccagctgcaaggcatcgggttcggctgggacatcaaagcacaggatatcaaggggaaactatga

SEQ ID NO: 455654 - DNA, 498 bp, Serratia marcescens
atgagccagttaagcgaactgacagcctttgttgataactgcttgccgccgcgggtgaaaatcaccgccagctggatggacaaccagaagctgatcccagcgatgaaaaacatcggcaaaggacagcgccgcatcagcattacgacttatgacggcgtgctggaatgggacaagttgccatatcgcgtgtttgacccggcgatattgcacgccctggtcgcagcctggctggaagagggagccaacgagctacgcagcgacttgaacctgtccgaaccagacatcgagatagaaccctacgacgaagagacggcgctgatcaccatcaccgtgccgctggttgacgaggtgttcatcgttccggacgaggacgggatcatcccattggacggccagaaatggagcgtcgtcaatgcgacttacgaccatgccgaacaggcggtcatttttggggcggatgttgaaggggcaccggtaaaagatggcgacaatcgttaa

SEQ ID NO: 455655 - DNA, 492 bp, Serratia marcescens
gtgagttcactcggatttagcggtaagagcctgagctatcaggacgtcgccatcgagcaagggccgggcagcttctggcctgatctgaacctgggcgagtttcagctgcagcgtaaagtcccgccgcagctgcagggagacacggcgatccaggcggtactgtccgcaattggcgacattaaccgccggctgaaagcgttcgaggctgacaaacgcgcggagggttaccagaaagccgctgacttgccaggcgcacgcgttgcgagtgaaaaccaaaccaccgcgcaatacaaaaaggccgtttacgcgatagcgaaagccgaccttctgggcgaagtgaccagccttagccggctgggcacaggtaacgcaccggaaggcaccagcagcgacgtcgccgaatcgttcgcccgtggtgcgctgctgaccgaagccagccaggcagtgcgcgccatcctcggtctgggccgtgcaacggtgtcactgtcatga

SEQ ID NO: 455656 - DNA, 804 bp, Serratia marcescens
atgagcctgtctcccggtctgcggcacaacgcccggattgccgccaagcaagcgttaagccaggggcaggcgctcagcgccaaccctgacagcctgcacatccagttgcgcgagctgcagcaggacgtcgaacggctccgcgcgctgccgacaatccgcgaccgggtagacatgaagcgccgcaagctgctgccgaagtggcggcccacggtggaaagctacctcagcagcggcgagcaatacactaacccggtgtttgggtactgcgtgatctggctgttcgacgtgggcgactttgaccaggcgctggcatgggcagacattgccatcgagcaacatcagcccacgccgggcaacgtaaaacgcaccctgtcggcctttgttgctgacacggtgctggcctgggccgagcaggaagccgaagccggccacagtgtagagccgtatttttcccgcgtgttcgagtgcgtgcgcgaaaagtggcggcttcacgaagagattaacgcgaagtggtttaagttcgccgccctgctgctgctgcgcgatagcaacggtcggccgctgccgtctgccattgaagacgccagcgttttgcaggcggctgacgccctactggcgcaggcatatgcctatcacccgcctgtcggggtgaaaacactacgcgaaaaaatagagatgcgcctgcgggcgctgaataaacgactgccgcacggcggagcgggcgcagcggagggcgacaccggcgaggtgtctagcgccgtggatgctggtcagcccgcttctttaactgggggtgaggtgtga

SEQ ID NO: 455657 - DNA, 879 bp, Serratia marcescens
atgccccgcccatcatcgcatttaatgacagactggatttgcattgccacggctggcgaaaccgttgacgggcgagagatcccagaagcctggttaactgaaatggccgaaacctatgacccggagttatacaccgcgctcatttggcctaaccacgaacgctactggggcaactccggcgaagtgttggcgctgcagaccggcaatgaagacggcatcacaaaactgtatgccaggctgtgccccagcgacgatctgatttacaccaaccgccgcggtcagttgctgttttcctctattgagccggagcctgatttccgcggcaccggcaaatgctacctggaaggactggcggttactgactcgccggccagcgtcggcaccacgcgtattcgtttcagtgctgataaagaaaaaaaatctgtctacggcgctccggtgccgcttgtcatcaatatggtcacagaacggccgggagataaagatatgtctggtgaaaaaaattggcgcacgctgtttggcatgaaagatcctgaaccaacgccagagccaacgcctgaacaaataccggagaataaaaataaattctctgacgaagctatcggcaaattggcggaagccgttgcgtcactggaaaatcaattcagccaaatgagcgcagacgttgaggcggctaaaaatttggcgagcgaagtcagcggtattaaatcgcaattttccgacattaaaaaactgttggattcggaagacgccaaacaactgtttagctctctgcctgatctgctgccgaagtttaaaaagctggatgaaacattcagcaaattgccagcggcaaaccccggcgaaaaagaaaactccgccgccgcgatgatcgtttaa

SEQ ID NO: 455658 - DNA, 1041 bp, Serratia marcescens
atgagcaaaaagaaaaagaaaccggcgcagactaacgcctattcggccggcgctggccttcctatccctggcgaccgcagcacgattttcatcgggccgccggaactggtgctgaccagtggcaccgactatcaggaaatctggtatgacgatagctatgactattggacaccgccgatcaaccgcctggcgctggcgcgattgcctaacgccaacgcgcagcacgatggggtgatctacgcccgaaaaaacatggtgatgtctgattacctgggcggcggcctgacgcgcgaccaactgggcggcctggtgtttgactggctgctgttcggtgatgcgccgctgctgaaagtgcgtaacgggtgggggcaggtcgttgccctggctccgctgccgtccatgtatttgcggcgccgcaaaacgggtgagtttgtcattttgcagaagggccagccgctgatttacccggagtctgaaatcatcttcctgaagcaatacgatccgcaacagcaagtttatggtttgcccgactatatcggcggcatcaatagcgcgctgctgaacagtgaagccacggtctttcgtcgccgttactacgccaacggcgcgcacgttggcggcattctctacaccaccgatcaaaacctgtccgacgagctggagcaggaaatcaagaagaagatcgaaagcaccaaggggctgggcaacttccgtaacatgtttattaacatccccggcggtgacaaagagggcgtgaaatttatccccgtgggggacatcagcgccaaagacgagtttagcaacgtgaaaaacatcagcgcgcaggacgtgttgacgtctcaccgcttcccggccggtctggccggcatcatcccccagaacaccgccggcctgggtgacccggacaaagcacgggaaacctaccgcaaagacgaagtgatccccgtccaacgcatgctcagtgaggccgttgccgctgatcccgaagtgccggcgcgcttacacatcaaattcgacctttcaacacctgcaggggaataa

SEQ ID NO: 455659 - DNA, 2748 bp, Serratia marcescens
atggctgaatcgctgccaaccaaacgtattagtgaattacccggcgcgccggcgctgaataacactgacatttttccgctttcacgcgtagtcagtgacgacgttttcgaaacgcaaagcgcatcgctgcgcatgctgtgcgacttcctgttccggcaatctggcccgatgcaactatcgcctgacgccatccttgatgtggtgaccgctaacggtgtgcggccgttcgttattcgtgaagaggacggcgcgacgctgtttgaaatggttgccaagctggtgaccggcgatgatggcctgaagtttggcggctcattgtttgataatcacgcccctgatggctgggtgtggctgatttataccgctaacggtgtcgttgttgccggcgcgaaagaagacggcagcaccgtagggctgggcggcagcagtggcgggcaagccggcggcattacgccgggcgataccgctgccggctatgatgacattcgcagctacaccggtgacgctaccgcacgcgatgttgtcggggcgcgcattggcgggcgttttgtcgtctatcccgacctgatggacgacgacgacggcggcggggtcctggtgggcactgacggccgacgttgggtacggcaaaatgactctgtgagttatgacatgttcggtgcaccgcggatcccagatgcgatttatgagcagtatgccgagctgtcgaagaacggcgaggaagctgcagcacagtcattgctggctgacatcgcaccagcggatgaggcgatcgctcgctgtcacgcctttgccaatcgctacggcctgcccgtggtgcagaacgcgggagcgtttctctgggtgggggcggaatggattgtccgcacgccgtgcaacctggccggctcaatcattgttacctgcaaccgcagcggcaccaacgaaacgcgctggggccgggttgacggtgtcgatgatggctcaccggaaccgatgtatatgtatcgcatccagggcaaaagccgcatcgattttactgctgacgagctggccgatctcaataccaactatgcgcagtacatcaaaaaaggcagcacatacctgccgatgccgaagctgtacccacatcgcggcggcctgtttggttacatctcttccgccgtggagctgtaccgcggcggcaatcaggtaaaccctcgcacacaggtaaagttccgcgatttttcgcgcattggccgcaatggcgcgctgtctgaccaactggtgaagaacacgcccgccggcacgatctcggaagcctggatccagccaaaagaaaacgcctggctcaccttcacgccgccggcgttctgcgaggccggcaacggccgcaagttcgtcaatattgagattgagcgctcaatggtaacggtgaatgatctggtgctgggcaactgggcgagcggtaacgttgaatcgcgcgtcgtggtcggtgcctacggcgtcagcgatattcggctgaacaatgccacagcggaatgcatgcccaataaagaagggggcgcttacgccatctgttttcgtaatagcattgaggcacacgtcaccggctattacgggttatatggctgggggttccaaggacaccacggcgtcaaacgcctgtttatcgatcgctccgtcatgaatcggttcgacttccattcattcggctacgacgtgaacatcagccgcacgctgttcaaaggcaagcaaatttacctgcagggcggtggcaagtacacgtttgacgacaacaccttcgttgtgactcagtattctgttgaccaagccagtggatcgctggaataccgccagggttacatgattgccatgcgtgaagactatgccggtgactgcgaatgtaatttaaccgtgcgtgaccaggtgatccgcttcgacagtaacatcgataaagcctgggctaagggggtgctgtcgtttgacgtggtactgatgaactccggcgacgcggtaaattatggtgttacgacgaaaacgccacacaccattaccggcgaaaatatcacgttcgacctggaaggctctcaggcgtcgctgccggataacttcgcgttcacgttctgccgggcgtaccgctcacgatacagcacctataaccgcacctatttgccgtcgctggtcagcattcgcggaatgaccgccatcaacgtgccggaagagaagaatgcggcaatggccgttttccgaatcggtgcagacctggcgagtaacccctacggcagccgccagaaactgcggccggacggtacaaacgcgcggatcatcggcgagaacgttatcagcgttatcaataacccagtgattgccgccaatgcctgcccgatggtgtacctaccaggaaaaaccacggactgggacaaaaccgtcgatggcacgacgtaccgccaaagcccttacgcgtgggtgccaaaggtgacgctgattaactgcgacccggtgatcatcaacgccgccggcgcgcgggcaacgttcgacattcacggcggattactggcgcgctacgacgtcggcgataccggtaaccgctgccgcatcactggggcggatatccagctttaccctgatgccactggcgcaacctacttcaccagcagcaatgtgcggaccgcaaattgtgactggttagaccctgcagccggggcgacctatgacggaacattggcaggcgtgggaaatgaaaaccgcggcacgccagaacactcacctaatattgaaggtaaataa

SEQ ID NO: 455660 - DNA, 747 bp, Serratia marcescens
atggccggtaatggcgttcgtttattcgcaaacaaaatcattcgctacaacgactggaaccggatgtatgtgccgatccagtccaaattacagacgttgtcaccgctgccggcgatcggcagccttgacctgctcaacccgctggacaacagcggcaacgggttcgaggttaaacagggcggggcgacaatcaactattggggcctgcactatgagagcggggcgaagccatcggccacgacgctcaccaagccaggtcagggcgcggtgtcgtttcttaccgcctttcgcttcgcatcgttgaaccgttacaccaatatcttcagctgtcgcaatgagaccgccggcgaggggcacggttttaacctgtactggagcggcgatctcctgatgggctttgcctacccgtccggcgaggtgcgcaatatcagcggtggtgacgtcgcacagccggagctgaataaatggtatgttgccgccggtacgtttgaccccgtcaaccgaaaagcaaacgttcagttcagcgagctggggctacggttcggcaatcttggcgataatattgccgccgatcagacgctcagcaccccgttacatatcggcggcgggccagaaggaaagaccacgtcgtctatgcatggcgatgtagccttcactgcggtctacgatggcgcgttctcggtagagcaacgcgcggcaatgattgacgtcgggctggaagtcctcgcagatcgagggctgcgctaa

SEQ ID NO: 455661 - DNA, 585 bp, Serratia marcescens
atgctgcgtaaaccgcccgcaccgcgctccatcggctgggatattgacccggaaaccgtcgaggcgttttgccagggaaacccggcttttctggatgaccaggcggagaacttaacgatcgacgttggcgacgccgtcgaattactgcaatccaccccgttcgaacggtacgggcgaacgcttatctatgtcgacccgccttatctgccgatgacccgcaccagtcgcgcacggtatcgccacgaatacacggttgccgaccatcaccgcctgatagacgcactgcggatggtgccggccaatgtgatgatctccggctatccgtcggcgctttatgacaaactgcttgccggctggcgcagtatccaatttcaggtgatgaccaggggcggccctcgcactgagcagctatggatgaatttttctgagggggcggcatacagtcacgcctttgccggtgagaactacatagaccgccagcgcataaagcgtaaggcagagaggtgggccaggaactacagcgcaatgccggcatcagagcaaaccgctatcttggccgccctgcttaaaacccatgagcaataa

SEQ ID NO: 455662 - DNA, 2346 bp, Serratia marcescens
atggctcccaccccgccgccgccctacacgggcagcggcgttgttgcgactgaatacgcatattcctggaacgccaagcgcgacgccgtgctgactgcgcgcggcgatgcgccggcatccttccagttgttcaacgtcaccgaccatactggtgagaatgcccgcgtccagctgtttgacattgccggccagttcactgtcgccgatccagcagccaagcgcctgcgccgtcgcctggcatccctgccgcagtacatccgccgatattacgccgcacgcctggacaagatagaaagcagcaagggcagaacagccggcaataagtggctgttaaatacatttgagcgccacgtcttaccccgtatcgatgcagtcaacgagcaataccagattgaccaggtgccgccggcgctgctcccattccgcgacgattttttccgcatcccttattacggcaaaaaagacctcaaacggctggccgcccgtctcgccgatctgatgtctgccgaatacatgagcctgttcaataaccagaacgaaacccacggcgatattgaacacgcgattatctacgcctacgggcggatcggttacctggtttctcacctgaatatgtcggcgccgggctgggcttattattgcgcctgcagcttaaccgcagaggacgccttgcgcgcctttgcgcgtctcgaatcaccggcatggtggttgcgccgtttgcgccgcctccatgaccagtggcgcgaacacctgatgattgccgctggctacgtcagcgataaggcgacgccatactgtagcgatccatgtctgaaggagtggcacgcacagaagaaagcaaaccgcgaattcatcaaagcgatggaacttgaagaccaggaaaccggggagcgcatttccctggtcgacaaagttgacggaagcgtcgctaacccggccgtgcgccggtgcgagttgatgaaccgcatgcgagggtttgaagacctggcgaaagtcgagggcttggccggcgagttttacacgctgaccgccccatcaaagtaccacgcgatgcgggccaagaccggccaccgcaacaacaaataccaaggggccagcccgcgggaaacgcagcgctatctctgcaaagtctggtcaaaagttcgcgccagctggaagcgtgccggcattcgcgtgttcgggttccgcgttaccgagccgcatcatgacgaaacaccccattggcatctgctgctatttctcaagccagaacgcgtcgagcaggctcgcgacatattcagacgctatgcgctgcaggtcgatggcgacgagccgggcgcggaggagtaccgcttcacggtaaaagcgatcgatgagaagttcggcagcgcaacgggctacatcgcgaaatacatcagcaagaatattgacggctacgcgcttgacgacgaactggacactgacacgggccagccgttaaaggacatcgccaagcgcgtaaacgcctgggcttctcgctggcgcatacgccagtttcagcagatcggtggcgcgccggtaacggtttatcgtgaactgcgccggctgcgcgaccgtgacctgtccttcctctaccctgagatctcgccagcgcataacgccgcagatgaaggggactgggccggatataccagcgcccagggcggcccgctggtcgagcgccgaaacatccgcgtgcgcatccgatacgacatcacagagaacggcaacgactacggcgacgacatcagcaaaatcgtcggcgtctactcgccctttgccggcgaagaggccgccattttcacccgcatgaacacctacaagattgtgcccattgtcgccgatccggggttggccgttgaccttcaggcggccccgccgcccctcggagttctgtcaataactgtacgcgaagcaccgcagacagcagacagacagggcagtaattccgttagcgcacctggagatatagacaaaaacagctgtgccagctggccgaaaatagatgactttgagcgcatgacgcgcaaagagcggcgggcgctgaatgaaaggttaatagcggaggcgaaaaaatcacgacgccggcacgcagctgcgccacaagaaccgaatatgcagacagagcgggaagtaaaaatcgccgactttgcctactcgatcgggctgcagctcagcggcatagaagtgcgaaaactggcaagcggtgctgatctggcgctggacggtcagcgctggcgagccggcggggatggaaccattagagaagcgcctgtcagctacgcggaaaaatgcagcgccattatgagccgggtgttcaacctgaaaaagcatcgatcacagtcatag

SEQ ID NO: 455663 - DNA, 810 bp, Serratia marcescens
atgatccgctcaccactgaaatgggccggcggcaaagccggcatcatcaacacgctgcgtaaacacctgcccgccggcaaacgcctggttgaaccgttcaccggttcggccacggtgtttatgaacaccgactatcaaaactatctgctcggcgacatcaacggcgatctgattaacatgttcaacacgataaagcgcaaccccggccgctttatcagctatgccgcggcgctgtttcgtgatgaaaataacccggtttcctattaccagctgcgggaagccttcaacaaaagcagtaacccattctatcgcgcagtgttgtttttatacctgaaccgccacggttataacggcatgtgtcggtataacagcgccggcggcttcaacgtgccatacggcaagtacaaagcgccctatcttccccaggctgagatccgggcgttcgcagaacgcgcagacaaagcgctgtttttatgcctcgactttgacgagtgcctagaaatggcaaacgccggcgacgtcatttattgcgatccgccctacgtgccgacgtctaaaaccgccgacttcaccaactaccacaccgcgggcttttccctggacgaccagcgccggcttgctgacgcactacgccgcgccgcccgcaggggttgccacgttgtcgcatccaacagcctgaccgacgaaacactggatatgtacagcgatttcaaaatcacccagatcaccgcgccgcgcgccatcagctgcaaagcaaccggccgccagcctgcgcgggaaatcatcgcaaccatgagggcgtcagcatga

SEQ ID NO: 455664 - DNA, 690 bp, Serratia marcescens
atggctaatccaaaaaaagcacagcaatgcatcaagaccgtggaaatcagcatcatcaacagcgccggtaaagacctacttgatgcgttgggtatgtcattccaacaccacgcagagaactgcccagatcacgttactcgcatcatggccgaattagaccatgctgcagaggcggccgcctgggagccgcgtgtctataacgccgttgttcgcgctaaacaaatcatccaatgccagcagaaatccatcaataattttaaggtcaagttccaacgcgccgaccagcatatacatgaactggaaacggaaaacgcgacgcagcgccggcgcatcgagcaccttgagcaatataaagccggcgtcatttccattgttaacgcctgtaacgaggcgcacccaagccccgtgccattctctgaagatgatttcctgcgcattgtcgatttaatcaagattgacgatatcccgttcggtgccgaaaacgcagatcaggacatcattgcagcacaggaacgcctgttgggggagcaagcgacactgttgcagcaggccaaagagaaagagcagaaattagagaagtgcctcgcgctggcgctcgctttcatgaaaggtgcttccgaggatatatcgttcattgactggctggaaaagacagccgacaacctgaacccaaaggagcggaataaatga

SEQ ID NO: 455665 - DNA, 171 bp, Serratia marcescens
atgcgccggggtttgctcatgcccaaaaaaggtaacgccatgctaacgacattcgccgtttacgcctcaattgccaccggggctatctggatcgctctgctggcctggctggcttttcgcctcaccaaagccagcaaagaattaccacctgaacaacacaactacgactaa

SEQ ID NO: 455666 - DNA, 309 bp, Serratia marcescens
atgacaatgacaactcagcaacgagaatccgttgggaaattccttgttaacgccaagcagctgcttgcccaggccaagcgcgtgaatgctacggccgttttctatgaccgactgacgcgcagtgagaaaaaagccgtttgcaccctcggtaataccgaaagccgtgcaacgttgaccgcaaggcacatcgatatgtcatttgaggaaatgagccgcagcgaacgccgggcggtgtttcgcggtatagaagccctcaagcgtctgagcgggcaaataccgatacacgtcaatatcggtgactgcgactaa

SEQ ID NO: 455667 - DNA, 270 bp, Serratia marcescens
atgaacgccccattctacgccgcggccaatcgcgtgatccgcatgtacgagatacgccagcagtcagcaagccgccgatgcccagcacattcacagtctgaaatcgaatgggccgccgatcggctcctcgatctggctatggccgcagggtatgccgccagcaaagaggccgttctattgcgcgacaccgcggagaactggaaacgctacggtaagcaacccgaatttttacccgaagtaatcgaagaggtatcaccatcatggaaatga

SEQ ID NO: 455668 - DNA, 354 bp, Serratia marcescens
atgtcagctacagcacaaagaaaggcaagcgaagttaatcgaagcaaattgcacggtgttagcgcccgtgtggctaaggcgaccacagtcactgaaagaatcgcgcaggaaatggcgctcgaatacatcactaagaacggcatcaagccacgcatgacgctgaaagaattcgctgatttcttcaatatgccgctggggcaagttcagagtgatgcccgcagaaactacttgccgcttatgccacgcatcgatccgaaccgtcgcgaactcatgcaggtaaacatggttgcgtattacgcaatgagcctcgccgcgagtaacggttgtctggaaaaagcggcggcattccaatga

SEQ ID NO: 455669 - DNA, 297 bp, Serratia marcescens
atgcagataggaaaaaaattaagagacattcgggagtctgaaggactgacgagggaggagtttgctgaaattacgggcatccctgtgccaacgatgaagcgctatgaaactgggcggataattaacgttggaagcgacactctcgccaaaatcactcaacatcctcgctttgagaagtacacgatgtggttaatgacaggaaaagcaatgccggaggtgggacagatctgtccggctctctcccctgatgggcaaaacagcatatccaacaaccaaaacggccagaaggttggttaa

SEQ ID NO: 455670 - DNA, 483 bp, Serratia marcescens
atgaaaaatacttttggtgattggaaaggggttttgtttgctggggtgatcttcgcaccgttcgctacacatgcgcaggccggacaagacatgaacatcaagacacaatgtaaaatggcaaaggccgaagttgatgaggtaggaacgctttttggttccttcatggaaccttggttgaaaggtgagcattccgagttgaagattgaccggaacgaatttactcagtcaagggtgaaaaacttcaacaaacagtacgccgctattcgctcaaagtattctgatagaggcaggggcgggcttgataaccctaggaatttagccggtgatatctccttgcggttccagttcattgtcaatgcgttccagatgtattcggttgacggtgataaagctaccttaaaatcatcctggaaactccaacacaaggaaatcactgatgattttgaaatcatcaaaaagctgtgcgcgagtaccggccgataa

SEQ ID NO: 455671 - DNA, 990 bp, Serratia marcescens
atgagtatcagcaaacttgactcaggacagtatctggttgatgtccgtcctcaggggcgtgatgggaagcgcatacgtaaaaaatttgagaccaaggcagaggccctgcagtacgaacgctgggtcatagctacccagcataataaggggtggcttgataagccaaaagaccgacggcctttttctgagctgatagaactttggtggctgcattatgggcagactttaaaagcagggcgctgcacgtatttggctttgcatgcatttgaccgttatatgaaacacccacgggccgatcagataactcatgaactgtttgcagattatcgggctgcacgtctgactgaaggcattagccccaggacgatcaacaatgcccagattcgtgttagtggggtttttacgaagctgaccgaactgggtaagtgtcatggcgataacccgatgaaaggtctgaagcgagcaaaaacgaagaactctgaaatggcgtttttaacgacacatcagatcactttgtttttacagcaggcacaccccgatgatctgttagggattcggcttgcgcttgctactggtgcgcgatttggcgaggtcataagtttacaggctgagcatgttgtaaaaaatcgcgtgacctatatcgatacaaagaatggcaaggatagaactgtcccaatatccagcagcctctaccgtgagatcaaaggggcaataacagaacgtcgtgttttccctcagttgcactatgagcgggtacgaaaccaattaaaaaagatgttcccggacttaccttatgggcaggccactcatgtatttcggcatacgttcggttctcattttatgatgaacggcgggaatatcttggccctgcagaagattctagggcacgcgaccattgaacaaactatgacctatgcgcatttcgcgccggactatctgctcgatgccgtcaggttcaatcctcttgagtacacagcaccaaatgagtga

SEQ ID NO: 455672 - DNA, 300 bp, Serratia marcescens
atgaaagaactaaccgctagtgaagttgagatcgtatctggggcaggaattatttcagatgcagtaggctttgcgggggatgtcataattgatgcagtgaaaattagtaatgacgctcttaatactagaacgatctcttcggttggccaggcattcaatgctgtaggacttgggggcatccacaatttggccgactctttagggtatgcggcttttaaaacggtggctggtgttggttcgctactgggtggagatgctagccgaatcgagtaccattacgagaaggaatggggggcctga

SEQ ID NO: 455673 - DNA, 366 bp, Serratia marcescens
atgagtaatgcgtttattataacaatggtaataatcgtgctggtgttcggcgttttccccatggcacggttcctctatacgaattttttaccatatttaaaagatgttttttctcaggatgcagttttaaaatatggtgtggctacagatgcggaaattgttaatacagttcaaacaagtagttgggatggtgggttccgatttaaaacaaaagacaatgagctcgttgaaagcacaataatgaagccattaacttttaaagagatcggatttcttaaggaaggctatatagccacgataaagtatgatcctgcaaagccgcataaaattgcgttgtatgataagccgttaattctcggggattaa

SEQ ID NO: 455674 - DNA, 786 bp, Serratia marcescens
gtgcagcgcgatgccgttggtgatggcgctcatgccgaactcgcgcacgccgtagtggatgtagttgcccgccgggtcttcgttcagcgccttggagccggaccacatggtcaggttgctcggcgccaggtcggcggagccgccgaggaattccggcagcagtttaccgtaggcttccagcgcgttctgcgacgccttgcggctggcgatgttggccgggttggcctgcagctgctcgacgtaggccttggcctgcgcctgccagtcggccggcagctcgccgctcatgcggcgggtgaactcggcggccagctccgggaaggcggcggcgtaggcggcgaacttgtcgttccaggccgcttcacgcgcctgaccggcttccttggcgtcccactgggcgtagatgtcctgcgggatttcaaacggcgggtagtgccagcccagctgctcgcgggtggcggccacttcggcatcgcccagcggcgcgccgtgggaatcgtgggtgccggccttgttcggcgagccgaagccgataacggtcttgcacatcagcagggacggcttgtcggtaaccttgcgggcttcctcaatcgccgccttgatggcgtcggcgtcgtggccgtccacgccgcgcaccacgtgccagccgtaggcttcgaaacgcttggcggtgtcgtcggtgaaccagccgtcgacgtggccgtcgatggagatgccgttgtcatcgtagaaggcggtcagcttgccgagcttgagggtgccggccagggagcagacttcgtgtga

SEQ ID NO: 455675 - DNA, 1101 bp, Serratia marcescens
atgcggataaggcatttatggcttgggttgctttgcggtgtgctggtattaggcattgcatactggttattcacccgaccgtgggcagtatcccctttgaccgcagaggaaaaacggatgacagacaaactttttgcgcagacgaaaccgcagtgtatagggcgttatatctttgaggtgcccgcttcatttaccaatattctggcagaccgggtacaggtgaatgatgtacgtattgccagtaaacaactgtatcgtccggcatttgaacaacgcattcggttgcgggaacaggagttgaaaagcagtcatactgtcgatcaggacgatcaaccttttctgaaaaaggtgtatcgggtaaatgatgatgcagtgatatttgaccgcaatgaaaatgaaagtgtaggtggttttaaccgtatattggaagggcatttttatcataatggtgtggcttttattgttacgactaagattagggatttatccgatgataaatatcaaaatcacagggatggctacttaagtggtggaatggatgaggcgtctctaaataataaggaaagaaaactgttagaaataaaaaacctatttttaagactaaatggaaggcctgatagcgaagtgcccacacaggcagggatttgcattcctaatgggtttatttctgatggtaatgttagagaaaaagaggaggttgctctactgtatgggcagggagacttttttctctctgttcgtagtgataatactcacccaaaagagagtagcttgctggagaggagcaatgaaataaatgcggtagctatcagagttggggcgcataccttgcagaaaggagcggttatacttccgggaattgatgcagaagagtggttattgaaagggaagcaggaggtttatcaaccggaatataaaaccgtagcctcttataaatttttgctttatggcaatgagaaaattgttgacaataaacatccattattttctgttcaattacacaactcgggatttgagaataaaaactatacggactcacagctggttgatatctgggagcgaataacccggacgttccgatatcgaccaaatgcgttctga

SEQ ID NO: 455676 - DNA, 603 bp, Serratia marcescens
atgataaacttaattccaatagggaaagttatatccttgattgctgtggtctatgcagttatatgctgtttgattttatggattttatgggttgcattcgataaaaatataactttttcctctgctatatcaattgcaacagggggctcactacttctcaatgcccttttattatcactgttttactttggttggcgccggctatggaaagctttgcctatattaaacgatctgctcttccctgatttaaatggaacctgggatatggttatccattgggaatggggagataaaaaaggtacatcacgagctaatgcaacgattaagcaatcctttcttaaaattggaatggatgttgaagctgaaggctcagactcacaaacgttagtggctaaacctaagaaggatgaagaaactgggagagcagtactctattatgtctttttaacaactcctaaacataaagcaaattttgacgaagaagctccgtatagaggaacggcaattctaaaactaagcctaaaaggtaaacgcatacttaatgggaactacttcacaagccgtaaaactgttggtcattacgagttgacacgtattgagtaa

SEQ ID NO: 455677 - DNA, 1308 bp, Serratia marcescens
atggagatggagcaggaaggtcttttcaggagagaagccgtttcacataatcgctctaaatggacaggtaaagcactgttaattgcggggatgccgatgtgggtcactgccgctatttctctgttttttatctctgtattagtcatttttgtcacatatggaacttatactcgtcgtataagtgttgggggcgaagttactacgctcccaaggacggtgagtatattcgctacccagcaaggattcatagctcgacgcttcgttactgttggagaacaagtaaaaaaagggcagcatctttatcaaattgatgtcagtagagtcacagactctggtactgtcagtacaaatactcgacaagctattgaaaaccagcttgctcaggtagataacattattactaaactggaacagaataagaagactaccttggacaatctacggtcacagattgaacaatataaattgtcgcatgagcagtcaaaaaaaatggttgagaattcacgtgatggcgttaattttatgcgtgaaacgatgaaaaactatagcgaataccgtaataaagggctgattaatagagaccaacttaacagccaagtttacctatattatcagcagcaaagcacgttccaaagtctttatagtcaaagtattcaggaagcattgcaaataacaaacttgaatagcgatctagtcacgagagcatccgactttgataatcaaatatcacaataccaatttcaaaaaaatgatcttctgcgccaactctctgaggctgaggcgagtggttcgatcattgtcaatgctcctactgatggtagagtcgaatccttaagcgtcactcccggtcaaatggttaatgccggagatagcttgacgcaattaatccccagcgaccatgctatatactatttagttttatggttgccaaacagtagcgtgccatacgtcaacagcggcgataatattaatattcgttatgatgcatttccgtttgaaaagtttggccagtttcctggggtaatagataacgtagcatatgttccagcttccaaccaagaaatgtcaacctacagcagttcgcctatgcgccaaagtggtgagattgtcgaatcatattacaaagtgctagttgccatagataacactcgatttggttatcaagggaaagtattaaatctttcaagtggaatgaaagcgcaagcaacgcttttcttggaaaaaaggccaatatatcaatggatgtttgcacctttttatgacatgaaaaatagtgtgtcggggccaattcgtgaaaaaaacctatga

SEQ ID NO: 455678 - DNA, 255 bp, Serratia marcescens
atgtttaagactgtagctctgttcgtcgtctgctttgtggtgtcgttccttgttctcaacaaggtcccactactcaaggaactggtggactcaaccgtcatcatgttgggcgactggatgaatgaggccggtatcgccaagactgacggagagcgagacccagcgtttctgcctgtagtcctcggttatttgctcatcaccgccgccctcctgatgtctgccatcaagtggagcatccgtaagttcaagcgctaa

SEQ ID NO: 455679 - DNA, 192 bp, Serratia marcescens
atgatcgacccacgtacaccttccggcaagttgcccctccgctaccgtggtctacctacacgccacctcatgaccctccttggtatcgacccagaagacaccgaacgtccctactacacgcgggaccagttgataggacttctggccgataagagtctgaatgaccagctgcggcaagccgttgaggcctag

SEQ ID NO: 455680 - DNA, 1761 bp, Serratia marcescens
atgcccacatctaaaaacatcacctatggtgaaattcctgaactgggcgccgactaccgtgtggccttccgcccctctgtagcactgtcgcaggccgaagactatccgggtttcaaaccggaaaccgtcatttatcctcaaggtagccaaataaaaaccaaagatgggcatccgcgaatgataataccggtagatattcagtgtgactacgatacggccattcaattacgggacggcacgataatctatgccgatattttccgcccagtgggtcaggagaactgcccggttattttgtcatggagtccttatggcaaacgaggcagttggatacacaatgatattttcgccaaccgcgttgacgtattatccgaatgggaagacggcctgaacaaatttgaaggtccagtgcccgcctattggtgccgtcacggttatgcggtggtgaacacggatgggcgcggcgtatttaaatctcagggaaatattcccttcttcgggttgcaggaggccgaagatgaatacgacgttatcgaatggtctgcggcgcaatcctggtcaaatggtaaggtaggtacctgcggcaacagctggtttgccatgtcgcagtggaacgtctgtcgcctgaatccgccgcatctggccgctatcgcgccgtgggagggcgcgttggatctgtaccgcgatgccatgttgagaggcggcatcggcgatcgggtattttttgaaggactgctgattcacctgttcggcgagcagctgaccgaagatatcatcgcgatggttgataaggcgccactgttcgacgagtactggcagaccaaagtccctgacgtctcggcggcgcgtattccggcctatattaccgcctcatggactaacgtcttgcataccggcggcaccctaacgggttggagtcgctatggctgtgcggaaaaatggctgcgtgttcataaccgacacgaatgggtagatttctttaacccggtcaacgtcgaggatttgcgacgctttttcgactattacctgaaaggtgaggaaaacggctggcgggccacgccgaaagtacgcctgacggtgctggatcccggccatgacgacatcctgtaccgcgccgaggaggactttccactgcagcgccaacaacttgaagccttctatctggacgccgccaccggcgggttcgcccgcacggcgccggttacggccgcctcgacacgctatacgcctgacaaggacggcacgctgttcacctatactttcaaacaggacgttgaaatcgccggttacatcaagctcaagctttggctgtcctcagaagggcatgatgatatggacgtcttcgcgtacatcaccaagcgcgataaagacggtaaggaactgtttaccgagccggtaaaaggccagttttttgtcggcccgaacggccgcctgcgcgtctcactgcgtaagctggatgcggccaagacgacggtcaaccagccgtaccaccgttttgactgcgtagaaaaactcaaaccgggcgaaattgtgcctgtggagatcgacttttggccctatgcgatgaaatggcacgtgggcgaaacgctggtgctgcgtctcaacggcgtcgatctgctgcgtcgtccagaatttccacagctgccgttgattgaaaccattaaccaggctgataagcaacggcatgtggtacataccggcgggaaattcgactcccacctgttactgccgctcactaacggccggattaacttcttctaa

SEQ ID NO: 455681 - DNA, 702 bp, Serratia marcescens
atgtcgcgcactcagcggttgttggacctgatgcagattttgcgatgtcaccgctatccgatcgccggacacgccttggctgagcagttaggcatcagtatgcgtactctgtatcgggatatcgccacgctgcagcagcagggggcggagattgtgggtgaggcgggtgtcggctatgtgctgcgccccggctttatgctgccgccgctgatgttttcgtcagcggaaattgaggcgctggtattgggcatgcgctgggtgacgcgccgcggcgacagccagctcgccgaggcggcgggcaacgcgctggcgaaaattgccgatgttttacctgcagcgctgcgcgatgacctggaggccaacacgctgctgatcggtccgacgtccgccgtggcggtgtctgatgaattgcgggtgcggctccgcgccatgatccgcagcgaatgtaaaatcaccgtggcatattgtgatgcgcagggcgcgagttcgcagcggacgctatggccgtttggtttggggtattttgagcagatacaggtgctgctggcctggtgtgaactgcgtcaggggttccgccattttcgtctggatcggatcagcgccatgtcctcgctggatgtgcactatccgcgcggacggcgggcgctgctgcaggcgtggcgcaaaagtgaaggtatcggcgacgctactgccagaaactga

SEQ ID NO: 455682 - DNA, 369 bp, Serratia marcescens
atgacgatgccgagcatgaccatgcttcatgttacccagcctgaacgaagcgccgcgttttatcagcgtctgctcggacagccgccggtagagctttccgccacctttgcgttatttgtcttaagcaacggcttcaagtttggcttatgggcggcggacggcgtagaacctgcgccgcaagccacgggcggcggcgcggagatctgcatctcctgcgagcagccgcagcaggttgacgcgctgtaccggcagtggcaggccttggggggtgttcattgccacacgccggcgcagatggactttggctatacctttgtcgccgaagatcccgatggccaccgcttgcgcgtttatcacctcaacgcgtag

SEQ ID NO: 455683 - DNA, 453 bp, Serratia marcescens
atgacgcattatatcaaagagagcgcgaacggccgtaggagatggtcggcccaggagcagattggttttgctgtcagttgtatgctttacaaccgtaattacagcctttatccggtgttgagtatccagtattggactgagtttgcgatacagcatgatcaaataaaatttctcttcgacacgcgtggtcatccattagcctatgtgacatgggcctgtctggaagaagataccgaagcgcgtttaattaacgatccggagtttcggttgcatcctgctgaatggaatgaaggtgacaggatttggatccttgatttttgttgtaagcctgggtttgggcgcgaggtgatcgcgcgctttatccagctccgtccctggggggacacgagagaggtgcgttggctaagtcgcaaaaagcgagtgttatgtttgccatcgtctatttctcggtga

SEQ ID NO: 455684 - DNA, 999 bp, Serratia marcescens
atgatgaaaaaactcacgcaacaatcgatgctggctgcgctgatgatggctgccgcaggcaacgcactcgccaccgcgccgacagagacggattatgcgacagcttttaatcacattaagcaggtggacgccggggtgctgaatgtcggctatgtggatattggcccacgcgacggcgaagtggtaatgctgttgcacggctggccgtatgacattcacagttacgcccaggtggcgccgcagctggcggaaaaaggctaccgcgtcattgtgccttatctgcgcggttatggcagcactcgctttctttctgccgcaacgccgcgcaacggccaaccgtcggcgatggctgaagacgtggtagcactgatggacacgctgggaattaagcaggcggtattcgccggcttcgactggggcgcccgcacggccgatatcgtggcggcgctgtggccggagcgtgtgaagtcactggtgtcggtcagtggttatttgataggcagccaagcgctcggcaaacagccgctgccgccgcaggcggagcaacagtggtggtatcaattctatttcgccactgaacgtgggcgtgaaggctatgccaaaaacacgcatgatttcgccagactcatttggcgtcaggcttctccgggctggcagttcagtgacgcaacgttcaaacaggcggcggcagcgctggataatcccgatcacgtggcaatcaccatcagcaattaccgttggcggttgggattggaaaaaggcgaaccccgctatgatacttatgagcaaaagctcgccacgctgccggtcattaccgtaccgaccatcaccatcgaaggtgataataacggcgcaccgcaccctgcgccggcaacataccggacgaaatttagcggtaagtaccagcatcgcacatttaccggtaatatcggtcacaacccgccggaagaagcaccaaacgattttatccaggcagtggtggatgccgccgccatgtaa

SEQ ID NO: 455685 - DNA, 549 bp, Serratia marcescens
gtgccggaagggtgccgggcatcggcgctggcagggctaacggttgcgcatccctgcgccccgcgtttacttcagtttaaagccgcgctcttccagcgtgctgcgcagatgctggcgtccgtccatatacgccatactggttgcagagctctgcacggcctgcttccaggtttttcctttcattccctgtgcgttgcggaacgccaggaacgtctcttcgtaatgctgcacgttctcgtaaagattcgcggcatcgtagcggttatggtgcgcgaccacctgttgcgccaggcgcgggcgaatactgcctgcgtctacggccgttacaatatgattttttatacattgggtgaatctatctgtggggcgtgtcagccatcggttgaaccgctgaccgtttcccaggcgttgatctccgcctgcattcgctgcagcttttctctcaccagcgttacggcatcgctgcccagcagcagcgctgtcggtggtgccgggttgtcaatcagctgcaaaatggcatcggccgccttgcgcggatcgccgggttga

SEQ ID NO: 455686 - DNA, 891 bp, Serratia marcescens
atgctccactggtctgtgcttttcttgagtatggctgcaggtaccgtcaacgctaaggatacggaatgtagcaatcctcataataactacatattaaaaaaacactttcaggttagcgggaggcagggcattaccaaggatggcgaacactattttgtatcaggtacaaaatcgatcgaaaaatatgataaaaatggaaaaatgattttagccaacaacaatccttttgaaaataaaagtgaggagcttaatcactttggcgatctatcctcaagtaatggtcttttgtatttaggtgctgagctcttcaaggatggaaaagcaagcaacttaaatatttctatttacgatactaaaactttggatctcgtaaaacacataccattagatacctcgtcaggacaagaagaaatatctgccatcgccgttgataacgacaataaatcattttgggcaacggcatggggagataatgagagtagccagtatatttatcaatattcaatgagtgacgggaggtttcttaatcgcattaagttaaaacctgcgatacaatttattcaagggattagttacagtaatggtgatttgtatgtaacggcagatgatggccgggcagacaataacgaagcagatagtttgtacaaggtaaatatcacacaggcgttgagccagacaggtgacaatgccatactacagtataaatttactgattttaaagatttcggggaaatagagggggttaatgttcaaaataatgagttgctggtgttaaataaccgaggcatgcacatcgtaaagggtatgcctataaaaccctatcccggttatcagaaggaaatcagcgaggtttatatttacgacataaatcaggtttgtgatacaaaataa

SEQ ID NO: 455687 - DNA, 1410 bp, Serratia marcescens
atgacgaaactattagcacacagaggtaccgtcagaaatagtgatggggagaaggtaaaagagcactccatggaatcatatagcgccgccatagatttcggcgccgactatgtggaggcggatctctttattacaaaagacggcatcgtaattaccagtcatgatgaccataattttgcaaacttaacctatgatgagataattaaaaaatatcctgatgtggcaaagttttcagacgttgtagacatggttaaggaaagaagtatcgagactggtcgggaggttggtataacctttgagataaagaaaggaaaaacagtcgaggccacacaacaggcggcaagtgcagccatcgatattttggtggaaaaggaattcaccgatccagacaagctttacatcaatagctttgatatgaaaaccttgaaatacattaacgatgaggtttataaaaaatatccggaaaaccccgagctgtccgatattcagttgataaaaatcgttcctgtgctgagtgcactttggagcggggcccgtgatatattcctctctgtggaaaaggcttatggcaatatcattaatacagaggacaaggacattgtcgatggctatgcctttccttcaaatatatcaaggataaaaccactcggggaaattcttgataagcaaggtaaagagatccatacctggacagcgcatgatggtgtcaaagaagcatattataacgacttgttagatagaggtgcagatgcaatttatgtcgatgacacacaagcggcaaggactgcgatagagaagtataatggcatggaagctgtagaatttggaaaaaaaggtgatgatgctatcagcgtgacggataaaacaacggtatacgccatgcaaggtaatgatgcaatcagtattaacggggataataacaaaatatatgccgacggcggtgatgatgtcattgttaatgtcggaaataatagttatataaacggcggtggcggtgacgaccgcatctactctgacggttcgggaaataccatttacggcggcgccggtaataatatcattcatttcagcgatgatgatacgatcatctacgataacaatgcccagagtaacgaccaggtcgtcggtggtggggcaatcaacattgaaggctatgacgttaatgagttatctttccttgaacaaaatgggaatttagtcattgaatttaatgatggaagcaacatcgtcgttcagaacggtgtggattccaatggacaagtcgcgaataaaatcacggtaggcggggaaacgctggacattgattcaatgcttacccctggtgaggggattagccctgcagaacttgcgcagctgacacagatagagattaacggctcaagtactttggacatggtgcaggaatactga

SEQ ID NO: 455688 - DNA, 5439 bp, Serratia marcescens
atgaaaataaccttagtaaaaactcttttttatttctttgcgtttctgctgactgccatcatgcctgggccagtttgggctcaagctttaccgccgcagattattgtcaccttcagtgcggatactcatacttttccagcagggtatgtattcctgctgaccgcattgggcattatcttggtcacactgcttgccgaacgtataggcaagttgcgcggcatcagcctgttcgcggttgtgtttgggctcgcgataatcattgcattgctggtgttacccaccaggcttgtcgatattgacacggcacgcacacagctcacgcagcggacgctggcgctggtgagtagccctgccatactgcaggtacaagagggccaaaacgacaatgtactggtacagaacaccactggccacaccatcattgtacaagatatccgtattgacaatgacagcgctaatcaatatagcctgacctccacccccgaaaccacgtgcacgctaggaattcgtctggaacacgaagcaagctgtgttatgcatatagcatattcatcagatgagggtcatggggggaacgacagcgtcatccacaatccacaaaccccggacgacttcataaaccgcgctaaggcagcggccgatggcgatgagcgtattcccctcagcacgcaaaaacagttggaggaagcgttcaggactcaacaggaaccggaagtcattgcccacaataatcgcctgcaccaaaacaacagacttgtgctgggtgctgtcgatcctgacccggcctggtacagaacaggcagcagcacagacttcattattggtgagccaggtgccagttatgatgttgatctcaataaaattgatttgcaaggaaacgatcttggcgctctgagtaaaaccgatcaggccaggctcaagtttgaagttcgcatccagaaggacgagactaccgttaattatgttccgtcccacacccacaaagactacatccgctgggacgataatacgcctggtcgtctgcacattcaggttccatcagacttgaaccagggacgccttctcattggtatccgccccctgtttaaagataaaggccagaccgcaatcgctgaacgctggagtacatccgtcgttgtcgaaatctggcccaggcaagtgggtgtccaaactatcagtcttaacagcatctactatccgacccgatacagcaaaggcattcagcctcgtgccggcagtgccttcagtcaggccgagataatagcgcatctgcgacaggcaataatcgattttcctgatgaaggaataatcaaacctctggtcgttatgggggccaacctgactatccatcagctcctcgatgcacgcatcccacgccctgaaggagggatctatccctacagtggtcgggtgctacgcgtcattgagggcagcaacgggcagcaactcgccatccttaactttgatctggcctccgtgtacagcctgctcgacgatgacccgctggtcaaagaaggcgtgatgcctgaatttgtaacctatcgtttggggtcagcgcagcgaataacagaggaacaaggcgaccccgaacttgagtactttgggcccgcagaacgtagtgaaataaaaactcaagcagttcaaggtgcgttgactggaaagagagcaagagagttacctattggtggtgaaggtattgatgctaattgtaagcatttagggaatattgtctttacacctacattggaaattgaaccaaaggttaatgttgctcttgaatacatgttgggcctggcaggaacgaaagcagattgcacccttgaagtcgatgtttctgacttacttttaaaaaaacttcctctgaaacgacttaagtcgctggttggtaccacgcttgaagctgctctgtatgttaaaattaagtctggtttgacagaggaaaccaatacaggagtagaagcttattttacggctgagggaaacgtcgatcttaacggaagttccgtgcccaactttgagataaaaagcatactggactctgccgatggaataaaaagtgaacctttgtcactggatgtttttttgggggggaatttaggcctcaaggtggatttaggactcgacccttttgaaaatgaaaacttcggcaacctatttcaattaggatcattacaagctgatgttggtgttgatatgggccttttcatgcgggatcgcaatgcggcagcaattcatcagggcaaaagtccatcaaaaacctctaccagcctcaaacctcatggcaatttgagcctttcagcagggttttcccaaattttgagctatctgggactaaccactacgtgggaaacaaaaaccaatgtcaacgcttttgacattactagtgaagcaaactatcgcataaaaaaagtagatgatagtggagcaggacagggctccgtgtcgtttgaagaactttctgttaatcgcggattagcgcttatttttccaagtcgtataaaggggtatgccactctggaaggaagttcggtctataacgatcccaccgaaaatgtaacctatgatctggatgaatgcgagtctcgaggtggcgctattaatacaccgctaattgcttgcacagggaaccatttctgtggcccggtggacacaaacgccagcttttgcaaaatagtctgggtttctccgatgatagcctgggcttacatggaagaagaggcaagcacaacaggcattattggtgttaatggcgcagcaccccttgatgtcaatgttagcggttcgccgttgcagccagaacaaaactcgttcttggtttctccttccagccctcagacgttcctggccaacgccacatgctcgcagcgcggtgtgacgagagggaagatccagatctcgacaggtggcaaggtcgtggatgagcagtccaacatgctgatttgccactgcaagccgggcacaaaggactgcgatcgcgtctggggcgacccttacatggtaaccgcagacggcatggcctatacctatttggcaacgggaaactacgttctgtcgcgtgtgcatgatgccagagaacagccagtgcatggttttgaagtccaggcaaacttcctgcctggcttcggcgcagcctggctttattcaactgccatgcaggttggagatgatgtggtggaactccgtcctgccattctgggacatggtacattcagtatcgggcttgaggttatggtcaatggtgaatatctgtatgcacccgctcaaaacggtacaggcggttcctggccgcaaacttctgagcgacgggtacaactgcctggtggcggcctgctctatgtagacgcgttcgttcagcagtattttacatacaagccgcgtagtctgaccgtcatctggcctgagaatggatcgtttgatgggtatgcggtcaatgtttcggtgctggatgggcaatttaccgcacctgaaccgtttatggagttacaatttacccgcccgcagaggtatgccgggcgcgaacgcggcctgctgggcaataacgacggcgatcccaacaatgattttatccgccgcaatggccagatcctggggcaggcaacgcctctgagctcaaccgcgctgtacgccctgtttgggggggattggctagtcaaaccccgtgagtgtctgtttgccagtggctgtaacactgagccgaattttgcaacacaacctgtggaacttacaccggaacaacgtgctgtaggcgaagtagcgtgtggcagattgactggtttttaccaacaggcttgcattaacgacgtggggttgaccggctcaactgaactggtcaaagactactacgccaatactgaagacctgaatgcgatggcggatcaactggtggcccccggtgtggatgtaccggtgtatacactgtcatctgttggtagtaaagagataggtttatcaggctatctcggcacaggattcaggcaggcctacaacgtcacgcactaccgtggcgggggccaattcctgttgacaatccggcccccacggggtgcttcggcctttttcagccaagatagtgttggtgctctgaaaaagagcttttccgcaacaggtagtctggatgcttcaattgatgtgcagtgtgatacccccgattcgctctggtcaaaatcaggcaccgattggccgtccgctggagccgtgcagctgcgggcgatagatcctttgtcggggttcgcgtcgcaattattgggtgaaaaatatctttcttgctttacggttaccggggataaaaacaggatggcagcgggttcgctccattcgcttattctggataataaagaccgaatatgggcctggggttttaatcgggatgggatgttgggtgacggtacgaatagagacaggacccgtcctattctgaccgatcttacgccgctgggtgatagtactgtggtctctgtttcgacaggcagtggtgcataccgttcgctggcaatcgacgaccaggggcgtttgtgggcctggggctataacttcgccggcgctttaggtgatggcactagtatcgatcgaaaccggcctgttctggttgatctttcgtcgcttggcagtagcaaggtaacggctgttgcgacaggtcgctatcataacctgatgcttgatgatctgagccgtttatgggcctggggccataatggtgacggtcagttgggggacggcacaagaacaaacgtagcctacccgcgccccatccaggtggatcttgagccccttgatggcagtacggtaaccggcgtttgggcaggtgacttccactcaataatactggacgatctgggccgtctgtgggcctgggggaaaaatcaatacggtgagttaggtgatggcacgaccacatatcaaacccgccctgttctggttgatctgctgccgctgaatggccgtaaggtcatgactgtttcagcaggcgaacaccatactgtggcgcttgatgagcagggaggtctgtgggcatggggtcttaatgatagcggaaggttaggtgacggttcgaccacggatcggcaccgtccggtgcaggtagatcttacaccattggatggccataaggttgtggctattgcgacaagtaacaggaacaacgtggcgcttgatgacctgggacgtttgtgggcctggggttataatggccttggccaactgggtgacggtacaaccacaaatcaacaccgtcccgtacaggttgatcttacgccgctgaatggtcgcaaggtcgtggctgtttctgcaggctcattttacttttttgtggtggatgatcgtggcgaactgtggacctggggggctaataattacggtcagttgggggatggcacgaagacgaggcgcttaaagccagtacgggtcgacatgagtgcaatgaacaacacaagcaggcagtaa

SEQ ID NO: 455689 - DNA, 1053 bp, Serratia marcescens
atgatcccgaactttgatactttcagcgcgcgctatctgcgggcggcgcgtatacctgtagtgttggtttccgcgttgctgacgtcttcgctgctgcgcaacgtgatcgatatcagcctgtgggagatgatagccgggctgggggcgatctgtctgtcgatcgtctggagcatgatgcgtgacggacgcggctactggatttacacggtctatacgctgcgggtttatgaacccccggaggagatagcacggcgtatcgatcatctgtcgctgaatggcgtatcgcggctgttttatcagccgcttggtgcctcgctggtgacgctgggcgtggtggtggcggtgagcctggcggcctggctgtgcgggcctcagtatcgctatctgttgattggtttgttgggcatggtgctgatgccggcggtgatgttatggcagttggatcgctccgtaccttttttaattcgtcaggcgctgatgatccatcaggataaaacgagctatacctccaggccgcagcggctccccggctgtctggcggaagacctgacgcttggcctgctgatcaatttcgccctggtgctgcccatcggccgtaaggccgagttcagtttggcaggcggctatggtaatccggcatttatcgttgcatttatgattctgttgacgatagtgatgttgtttatgtttttctttgccatccggccacgtcgctatgtcatcctgggggatatgctgattggcaatattgcggcgggtttcgctccctgcgcgccgtggccgctaaccgccagactggcgcgcccgtggcggctggttatctggctgatagcggtggcgctgtggagcgtggcgatctgcctgttgttccaggcattagcgttaccgcatggttttgtgccgttttatctgtgcagcctgctgcccatcgtgctgatttactgcgccgagcgttatcaggcactgtatgacaaccaccttgaggcgcaggaaatgcggcagcgctatgaaaccatcgcggcggccgccaatgccaaactcaataaagcgtaa

SEQ ID NO: 455690 - DNA, 984 bp, Serratia marcescens
atgcaggtatgcgaatcagttggtgatcgttttatggcgcccacgctggccgagggctggatggtgctgtttccaggacagggagcgccgacgataggcatgggcagcgacgtgtgtgatgtgtcaccaggcacccgcgcggtatgggattgcgccagcgatatttccggtatcgatgtgcgaaaactgtgtcaaaaagggccgatgacgcagctgacaaaaacgcggtatcaacagctggcggtcaccacggtcaatacggcgatgctgacgctgctgcgtgagcgccatgcgccgctggagaccggctatgccggtcatagcgccggcgaatacagtgcgctgtacgcggctggcgtgatgagtttggaaaccttgtttcgcgccatcagtcagcgggcagccattatgcagcagttggcggagcagcgtaaaggggcaatgtatgtggtgaaaccctatgactacgcgacgttgcgccggatgatcgacgagctgcagctgggcgatcggctgaatgtctgctgcgacaacggccgacagcagcaggtggtcggtggcgaggtcgctgcactgagaacattgctgactccactgacgcgtcagggcgtcaccaccatcaaactggcggttaacggtgcctggcatacgccgctgatggcggaaggcgtcacgcaaatgcgtgaagtattggctgcactgccgttctcctcgccggtctgcccgataattatgaaccgcagcggtcaggcggaatacgccgtagcgcagattaaggaaaacctagcgcatcacctgaccgataccgtccgttggcgcgacagtatggatttgtggtcacgcatgggctatcgccgttttctggagatcggcagcaaaaagatgctaagtcatctgttgcatgagcattatgccgcggaaaaagggcatgacattctgctttactctcagctacagcgcgatacgccgcagcaggcaggataa

SEQ ID NO: 455691 - DNA, 1401 bp, Serratia marcescens
atgaaccgtgctaaccggctgcccctcacggggttgatactgctggcctgcggcggcagcgcctggtcggcgacggagtgccggctgcagcgcggtttcgccggtgccgagggcgtaggggcgttgacgtccggttcgttatggaagtttgacgatccggcgtttcgcaacaacgctattgccaatctgtatctgacgtcggtggcgcgctgcactctcggtgatacgttgagtatcaaggggcagattagcggcacctatacgttgcaagcgcgccggcccggcgaactggaggataaacagcatcagggcatggcgctcatcaatgagctggtggccagtctggcattgcgcgaaaacgtttatctcgatctcggtaagcagcgtcataccagcggctatttgttctcacattcgccgttggatttgctgcgcaatttcagcggcgggttgcgcactgcacgggtgtacgccaccggcgacagctggcgcggattatatgacgaggggagttacggcgtcagcggcacactgtaccgcaaggaaggcacctatacgttggcggtgctgccgcggttgcggcgttttccgatgcggcgagaagccgcgtcggaatgggatgcgctgctgcgcaccaacagcagtgaacgctactacgccagctatacctctaccgggttgaataaattcaacccgacgatatcgctgctggcgggtcagcaaaaaacgctggcgttgggcagcagcggcaatctgaccgacaacctgattttcagcatagaaggcgccgtgtcccagggcgaaacctggcggcatttgggcagccgctacgcgcgaggcatgcgtgaagataatgagtaccaggaagaagcctaccggattaacggtaagggcatcgaaggggagatcggaatcggcttgcgctataccaccgccgaacaaacggaattcggcgtggaatactacggccaaagtcaggggtacagccgcaaagaatggcgcaataacactaacgccatcaaacacgtcaacggaggctacctcaacacgctggatccattctgggtgccgtttgtacgcgatgcggttcagcagtatgcgcgcttgatggcggcggaaaacacgaatgtcagccgcaacggtaatctgttcggcaaacattatctgacgttttacacccgtagcaacaaggaacgggtcggtgagatcgattggtctgtgtcaagtatggccaatctgattgattacagcacggtggttaatgtgcatctccgcgcgccgatgaaaaacaatattgaattgtacgctggcgctgtcgccagcatcggccgcagggacagcgaatttggcatctttggcgaaaaagggaacttgtatgcaggtatgcgaatcagttggtga

SEQ ID NO: 455692 - DNA, 669 bp, Serratia marcescens
atgattttctcaatgcttaaacgttacggtgtaactctgttgttcgccgtcggcgtcagtgctgccgccgatgacgggcgcatggctccggagggcgggcggctgcagacgattctggctgttcatgcccaggcgccaatcgctgacttaaaccgcgccaccgccagcctgaaagcgcagtttgtgcagcatccgggctacagcgtcggcaaaatgttctacggctacggacagctgtttatcgctacggattttttaaagaaaaagaactatctgcgcgctgcggaagcgtcaaagctgggatttttctacattgatgaggcagcggaaaccgatgaggacgactggcgtctgcgttttctgcgggcgcggatggatgcctttgtgccggccagcaacggccgctgcgtggtggcgataaaagataccgactacctgttacagaacgcgcaactgccggcatcgctgcggccgatggtgtcgctgatgtcggcccgcgctcaggagacctgtgagcagcgggaaaaagccgccgctgcctgggaggcgctgggcgaacagggggacgaggggcggcgtctgctggcgctgcgcaaccagccggcgccggcgtgggcgcctgcggaactgagcctggtgatccagccgttggcggaggcggcattatga

SEQ ID NO: 455693 - DNA, 735 bp, Serratia marcescens
gtgaagagatgcgccttatccatattgtttgttgcggtgccgctttgcgccacgccgttgcctgactatcaggcggtttatcacatcctgccgctgcgcggcgatacgccgatgggggagtaccgcgtcagtcaacgttggcagccggagagtaacagttatttgcaacaggccagcattcagtttcgttggcgggtgctgctgagcgcgcaccaataccgttaccgtgatgaggtgcgctatggcgctgacggcgggttcagctaccggatagaggaggacaacgacggtaagacgcgtcaggtcagcggaagctggcaacccggcgcacaggtgctgacgctgacggtgcgccgcgatcggcatcaggcgacgcagacggcggaaaaagcggcgtttgattttccgctgttcgccctgcgctttcctcaaccctgttcgccgcaacaggtagggacgtacagccgtcatcggttgctgatgccgatcgatggcgatgtggtgcagatagagagtcgccacgtcgatttcggcgacgtaacgctgcccggcgacagtacggtgacaaaggggctgtgccagattgccagcagcggcccgcgtcgcgatgcgaaccaccggtcctgggttaaccgggacggctatctggtgtacgaaatttctgccgattatcgcctgcggctggtgccggaggcatcccatttaccgtccaatgttcaggaaaaaggattatga

SEQ ID NO: 455694 - DNA, 390 bp, Serratia marcescens
atggctaaaggtaaatttagagtgaatctcggtgtcgatattatagaaatagatcgtgttgccatggcaataaaacgcagcggagataaattactgcaccgtcttttaactgataatgagcggggtgacctgggtaatgtcgcgcataactgcgagcgtgtcgcaggcttctgggcggccaaggaggccgcggtgaaagcgctgggaaccggcttccgtcttggcattgcctttcatgatattgaagtgcgccatgatcaattaggccggcctttttattttttttccggtgaattctcccgcctgatgaaagcgcgcggactgacaaaggctacgctgagtatttcacattgccgaacgcatgctattgccgcgacggcattcagttga

SEQ ID NO: 455695 - DNA, 1185 bp, Serratia marcescens
gtgacgaaaccttttttacgcagcggcaatctggataagctggtcgctctaggggaaaatggtcaacccatttacgcccaggcgcagtcaatccgtgaggcgctgcgcctcaaaaatcagcaggcaatcgcagactgtctggctatcccgcaattaaatgcccaacaagatcgcatcgactggtatgcgccgttcagcggtgatatccgcccctgggccgcggtcgacgaggatcaacgcagggcggcgctggcgaagctggacgcctgccgtgccgacgtcgaggcgctgagccggcaggctgccgccgcgccgcaagcggcgcagcagcgcttcggtattctgttgcgttatctgctgcgctttcctgatgcgcagcaggtttatttgatcgacggcaaaccggtgctgacgttctgggggtttagccgcgccgaacaaagcagcgacgatgacccgtttgcctgcctgcggtcggcggacattccgcccgtcgccgcgccggttatcgccgccgaaacggtgatcagcacgccgtccgagccgcaaaacagcctcccgccgccgcgtaccggccgcaaacgctggctgccgctgccgatcgtcgccgtggtcatgacgctggccgcgctgggctggcagtggcggcaacctcccgctgctgcgccgcaggccgccgcgcccaagcctgtgtccccggcaccgccggcgatccaccccataccgccgttgccgctggcaaaagcgacgctactgccaacgccgctcccggctcctactcccgctgcaccgccaggcgacggcaacgccctgagcatgcccgccgcctcggtgaaagccggctccacccgttttcttaacggcgagtggcgcgccgtaccggatatcaaaacgccgctgaccggccggctacccagcctgcattaccggctgcataacggcaaaggcggcgtcagcctgcgccaggcggataacgtgcgctgccaggttgctgtcgaaaccgggctgatgccgtccggcaatctggtgatcaacagccgcagcaaagcgcgctgcagcgacggttcccgttatcagataccggaaatcgtctgccaaccgcaggaagatcgccccgccgcgtgcagcggccgctacggcgccgatacgttctaccctatgaccatcacgcgcgagaaaaaatga

SEQ ID NO: 455696 - DNA, 2142 bp, Serratia marcescens
atgagtgatatttctttaccggcgcaacgcctgcacgacgttgcgcaacgggcgctcgactggctgcaggacgcacgccatgattctgcgcggctggcggcggaagcggagagcctggcgttgcgcctgcgccgctgtcggcgcgacgcacggcggctggccactgccgctgacgagcatttcagcctgggtatttacggcaatgcgctgcaggcaaaagccgcactgctgcgccaggtgggcgttaccccgctccccgtcaggcagccggcgctgacggtgcgctatcacccgacgacgctgccgacggcaaagcgcctgacgctactggaggaaagcgacctcgttgggctgctgtttttcgccgccggcgcgcacccgccggatcgccggcggctggcggcaggtttatccaccctgcgctgccagccccacgcgataccggcagaggacgttgacgaagatcggctgctgacgctgtgggagacactgagccactaccatccgcagctcgccgacgacccgttctggccggcggcgctagcgttggcgcccagcctgaatatcgagcagcgcgcggcgctgtttgctccgctgtggggtgagcggccggcgctcaccgccctgtatcgtcagctggcgcaccggctccaagagctcggcggccgccagtttacgctgacggaagatatcaacacgctgagcgcggtaatcgacggttcggcagcagcctggcttaagagcgagaacgaccgctacaccgtactgcaggcgcagacaccgcagcgctgttcacaggctgagctggcgctgctggcggccgaactgacgctcaccacaccgtcaggtgacggtatctttgatcatcccgtcgatctgctggatattcccggcgtttcgacagcatgtgagcaaacgctaacatccgccctgctgtctgcaaaacgccgctggctgttgcactactgcagcgagcgtagtcaacccactctgctgttggtcagcggcgcggcgaccgatcggcagacggtattgccggccgccaaagcgctcagccgttggcaacaagacagtctgtcggctccaaatgaggcaggcaaaccagacctgatctggctgctgaccccgcgcagcgctgcggcgcacgatcatgacgccgccgtgcagcgccatatcggcgaaccgggcgtccactgggggacgcttctggcgcaggatgaacacgataacccacgcctgctggcctatctaaccacggcggtcgataaacgcatcggtcagcagcggctgagctggcagttgctggcgctacgccaatttttgacggaaacggtgctgagcgactggctgccaacggcagacgacgatgaacgacggcaacagcagcaaatcgcccggcgtctgctgcagacgctacaggctcgcaccggggtgcatggcgagttgctgcaaaagctgctgccgcctcaggaagcgctgctgcatctctatcagcagccggcaccgtttaccgacggtgagccgttgagtatcggcattgcgctggatctgctggcgccggttacggacggcagcgatatttccccgccggcatcgcgttttgccgacgctgcgttccgcctgtggctggaacatttgcgccgtctggcggataaccgcgcgctgcagcagcagttggagatcgacagccgctgtcttgacctgctggccgatacgttgattaacgccgcctggcggctggggattgaccgtcaactgcacgacgcgctgatgagtgacagcggcaatgcccagcgtcaaacctcactggcgctcggcgtactcggcgattttgtcgcctggctgggtttccagcacggcttgccgcaacagcggccaaccagccgcatccatcaggggcagccgatctttacctccccgcacgaaccgtccggcgatccgacgccgccgcgtctgacccggctggcggctgcaccggtcaatcacgccgccttctatatttatgactggctggtgggattaaagacgttggcggtagacaacgtcggccatcgcgcagcgaccagcctgccggcacggcagcagcagcgtttggcgcagatcgtggcggcgctggatgatggcaaattggcgggggaataa

SEQ ID NO: 455697 - DNA, 144 bp, Serratia marcescens
atggattactctgatatagcagaacggatagctaaggtggtagtgtcaccggaaaccattaccgggttaacgcgtggcgctatgtcggtgcccatcgatctagggtatttggcgctgagtgttttcgataccggtaatcgttag

SEQ ID NO: 455698 - DNA, 840 bp, Serratia marcescens
atgccacagttttcccctttgccgcctgcgccgatcgatgtcatcagcattcagtcgcaggttatttacggcagcgtcggcaacggcattgcctaccgcaccttgttggccaagggactacaggtgctgcaggtgccgacggtgttgttcggctgtccgccctactatggcccgccgcacggcggcgtaatccctgacgactggttcggtggctttctcgatgatctgctggcgcgcggcgtggcccagcagacgcgcgcggtgattgtcggctatctgggtaatgcatgccaatgcaggctgttggcgaattggctgctgcgcgtcagagaactcaaccccgcggtgctgatcgtcattgacccggtaatgggcgattacggtgaaggggtttacgtcaatcagcaattggttgacagctaccgctcgccgtttctgcaactggccgacgggctgacccccaacggctttgagctggagcaaatctgcggcgaaacgctgaccagccgcgaacagaccgtgcgcgccgcgcgggcactgctcaatgatgtcacccgctgggtgctggtgaccagcgcgcctgaccgccaggccgatccgcagacgatcggcctactgtggatcaccgccgatgaggtcaaggccatcagccaccgcaaaattgacgccaaggtcaaaggcaccggcgatatgtttactgcattgctggtcagccacctgctggccggtgaatcaggggaaaacgccgtcggtcatgcaatagaagaagtgtgcgccgcattggcggaggccgcacattacggttggggagagattggccgtctgtcggcgccaacataa

SEQ ID NO: 455699 - DNA, 210 bp, Serratia marcescens
atgaaaaaaacattaactctggttgttgccgctgcaatgggcctgtccggcgtcgcgtttgccaccgatgccgccaccgcagccccggttaacaacccccacgtcaggcaccatcacgtggtgaaagcgaaaaaagctgccgaacagaaagcgcaggcggcgaaaaaaacgcacaaacacgccaaacagcagaaaaaagcggcgcactga

SEQ ID NO: 455700 - DNA, 3888 bp, Serratia marcescens
gtgaaatctccgctcgcggcattatcttcccaattgggcgagttgatgctccgtgatcaacagcgcctgcagcgccggctgcatggggcgcgcaaaatcaaaaattccgatgcgcagcaggcagtcgccgatgaaatcgccggcgatattgccgttgcgttgcagaaggtgcagtcgcgcgccgcgtcctgtccggccatccgctatccgcaggggctgccggtcagtcataagaagcaggcgattctggaggcgattcgcgaccatcaggtggtgatcgtcgccggtgaaaccggctcggggaaaaccactcagctgcctaaaatctgcctggagctggggcgcggggtgaaagggctgatcggtcatacccagccgcgccgtctggcggcgcgcaccgtcgccaaccgcattgccgatgagctggacacgccgctcggcggcagcgtcgggtataaggtgcgttttaacgatcaggttggcgaacagtcgttggtcaaactgatgaccgacggtattctgctggcggaaatccagcaggaccgcctgctgatgcagtacgacacgctgattattgatgaggcgcacgaacgcagcctgaacatcgactttattcttggctatctgcgcgagctgctgccgaagcgtccggatctgaaggtgatcattacctccgccaccatcgatccgcagcgtttctcgcgtcacttcaataatgcgccgatcattgaggtttccggccgcacctatccggtggaagtgcgctaccgtccggtggtggatgacgccgacgacggtgatcgcgaccagctgcaggccatctttgacgcggtggatgaactggggcgcgaagggccgggggatattctgatctttatgagcggtgaacgtgaaatccgcgataccgctgacgcgctgaacaagctgaacctgccgcataccgaggtgttgccgctgtatgcacggctgtcgaacagcgaacagaaccgggtattccagtcgcaccatggacgacgcatcgtgctggcgaccaacgtggcggaaacctccctgacggtaccggggatcaaatacgttatcgatcccggcaccgcgcgtattagccgctacagcttccgcaccaaagtgcaacgcctgccgatcgagccggtgtcccaggcgtcggccaaccagcgtaaagggcgctgcggccgcgtatcggaaggcatctgcatccgtctgtattcggagcaggatttcctgtcgcggccggagtttaccgacccggaaattctgcgcaccaacctggcgtcggtcattttgcagatgacctcgttggggctgggcgatatcgccgccttcccgtttgtggaagcaccggataagcgcaacgtgcaggatggcgtgcggctgctggaagagctgggcgcgattaacagcgcgccgaacggtcactatcagctgactgcgcgtggtcggcagttggcgcagttgccgatcgatccccgtctggcgcgcatggtgctggaagccagcaccagcggcagcgtgcgcgaagtgatgatcatcaccgcggcgctgtcgatccaggatccgcgtgagcggccgctggataaacagcaggcctccgacgagaagcaccgacgcttcgccgacaaggactccgacttcctgaccttcgtcaacctgtgggattatctgaaagagcagcagaagacgctctcttccagccagttccgccgcctgtgtcgcaccgatttcctcaactatctgcgggtgcgtgaatggcaggatatctacacccaactgcgccaggtggtgaaggagttggggctgccgattaacagcgagccatcggatttacgcagcgtacatacggcgctgttgacggggctgctgtcgcatatcgggcagaaagacacggataagcaggaatttaccggcgcgcgcaacgcgcgtttctccatcttccccggttccggcctgtttaaaaagccgccgaagtgggtgatggtggcggaactggtggaaaccagcaagctgtgggggcgcattgcggcgcgtattgagccggagtggattgagccgctggcgcggcatctggtgaaacagcactacagcgagccgcactggtctaaatcgcagggggcggtgatggccagcgaaaaggtaacgctgttcggcctgccgattgtggcggcgcgccaggtcaattacagcaatatcgatccgctgctgtgccgggaattgtttatccgccatgcgctggtggagggcgactggcagacgcggcatgcgttcttcagcgccaacctgaagctgcgggcagaagttgaagagctggaacacaaatcgcgccggcgcgatattctggtggacgacgaaacgctgttcagcttctacgatcgccgtataccggccgacatcgtctcggcgcgccactttgataactggtggaaacaggcggcgaaacagcagccggatctgctcaactttgagaaagcgatgctgatcaaagaaggggcgaataaaatcagcgcgctggattacccgaatttctggcatcaggataacctgaaactgcggctgagctatcagtttgagccgggcaccgacgccgacggcgtgacggtgcatattccgctgccgttgcttaatcaggttgaagaagccggtttcgagtggcagatcccgggaatccgccgtgaactggtgatcgccctgatcaaatcactgccgaagccggtgcggcgcaattttgtaccggcgccgaactatgctgaagccttcctgggacgggtgacgccgctggagatgccgctgttggatgcgctggagcgcgagctgcgccgcatgaccggagtgacggtgtcacgtgatgactggcagtgggaacaggtgcccgatcatctgaaaatgaccttccgtgtggtgggcgacaaacacaagaccctgcgcgaagggaaagacctggcggcgctgaagctgcagctgaaagagaaagtacaagaaacgctgtcggcggtggccgatgacgggctggagcagagcgatctgcatatctggagcttcggtgagctgccggcgttctacgagcaaaaacgcggcggctactcggtgaaggcttacccggcgctggtcgatgaaaaagacagcgtggcgattcgcctgtttgacagcgaacaggagcagcagcaggcgatgtggcaaggcacgcgccgtctgttgctgctgaatattccgtcgccgatcaaatatctgcatgaaaaactgccgaacaaggccaaactgggattgtacttcaacccgtacggcaaggtgctggatctgatcgacgactgcatctcctgcggtatcgacaagctgattgccgagtatggcggcccggtgtggcagcagcaggcgttcgccaagctgcaggagcgtatccgcgctgagctgaacgacaccgtggtggaggtggcgcagcaggtcgagcagatcctgaccgcggtgtttaacatcaacaagcgtctgaagggacgggtggacatgtcgctggcgttggcgctgtctgatattaaagcgcagttggccggtctggtgtaccgcggttttgtcaccaacaacggctggaagcgactgccggatacgctgcgttatctgcaggcgatcgaacgccgtctggaaaagctggcgatcgacccgcaccgcgaccgcgcccagatgctgcgggtggagcagattcagcaggcgtggcagcagtggctgcacaagctgccgccaaagcgtcgagaagaacccgaggtgaaggaggtgcgctggatgatcgaggagctgcgcgtcagcctgttcgcccagcagttgggtacgccgtatccggtgtctgacaaacgtattttgcagaccatcgagcagctgtcggtttaa

SEQ ID NO: 455701 - DNA, 3069 bp, Serratia marcescens
atgagcattcttaccttacagcaagacgtggcgctactctattacgccgctttaggaaaacacgccgatgaaagtgcactgttctattttgccaaacagctgagtaacggccactataacaccagccagttggtcagcgcgctgatcaactccgcggatggcgccaaacgctacgacggcctgagcaccgagcaaaaagtgcagtatatttatcagaacatcaccggtgcccagcccgacagcgccacactggacagcctggtgaagcaacaacttgccggcaaaacgttaggcaccctgaccaaccagattatcgatagcgtcaaaagcgccgacggtgaacacacgcaccagcagcatattcaggaagtcgtcaataacaccctgtatccttcatcgctggttgaggacggccaaatcgccgccgcgtccgacgttcaggggatctactacctgctgggcagcatgaccaatgccagagccgtcgactactggggcaaccaacttgcatccggtcaaaaaagtgcggtagagattgccaacctctttgtcgcggaaagaagttatatcaaccaactgagtaatgaggacttcgtcaagaccctgtatgccaatgcgttcggcacggcgatcagcgatggcgatctgcaaaaatacttgggcgggcttgacgacggaacgcaaactcacggcgacgtcatcatgcagatgatggccgacattcgtaacgataccggccaggacgccgccaaagaaaattttgccgcagccactcatgtttacgcaccgggtgaaatgcccgacgccaagtacgtcgaaaccgtgatgagcctgtacgtggccgttgccggttcgggcaccaatgccaccgcacttgataccttcagccgtctacttgccagcggtacctcaaaccaggatttgctaaaaaccctcgccaattcgcagcagttcagcggcgccagcaattaccagaaaatctattcgacactctacggcagcgagatgtccagcagcgtttcccaagcgttaatgctcaagaccgggaatgataaaatcgccgccagcgcattaattatcgatgcatttcgtaacggcgagtatccgctgggaggaacgcattggtcaatagatcaacagctgagtgattttaaccagcaactggccgatatttttggttaccagaagagtttcaacggcacctttaccctgtcagacgacggcaaactgatggcggaaaccaacagctacggtaaccatgcccttagtaatatcgaactggttgcgctctctgggatgacctccttgtcgatcaacgctgacaagaatgtcgagattcaagggctaaatgcggcgttgaaaaatgtcacacacgtcgtgctttccggcaagtatgccgccagcgaagccaccatcaagccatttgcaacagcacgttattatgttgagctgttactggataatgacgccctcgcccatcccgatgcatcaaacacacatatttacgataaggtgtccgtgctggacggtaccgaccttacccatgccactatccacctgaatacgggtcaaggcggtttgcactggcaaggcaatagcgttgacggcggtgccaaccacgtgagcaagacctttaccgctaaaggcagctacgatgaatcgagtatatcagcaaactttatcaccaaatccgtttatctgaccaccgatgaaaacggtgagagacacggtcaaatagtcagcaatatcgaccagtttacaaactacagcatcatcgatctgacccactacgtcggcaccggcgaaatttacctggacggtaaactggtagcgaccgaaggacgtaacgtgtttgattttggcctactcgataaaaatgcgacgatctttaatcccgattacgcgaagacttcctcgcttgagcaggatccatacaacaatgcctggcctaaggtcggccgtgacggcgccatgctttctgcctattcaggtgatttaacgctgcttaacgtcagcaaccgccattttaatattgatggcgatctgaccaaagacagtcatgtctctatccatacttcgaaccaagccgacgactcgttttcactgagtttcacggaaaaagccagcctgatccctgtgttcgatatggggagcttcagctttaactccgatcatttgcaaacgctgtcagtcgatatgggaagcaacgagacaacggcgcaaacccgtaccctgaagctggatagcggcgacaactctatctccgaattgatgctgtcaggctggacaacgtccctgctcaaaccgctgtacctcaacctgacggtaggcgccggctttagcgataacctgcaaaccatcacgggaagtgattattatgaccgtgattattttagcaatgtgagactgaatcttaatgcggaaatgggcggtaccggcggcggcagtttctataccaccctgaacggactggctaataaagagcagttcgccggtatcattgacgatcttgccggctatcagttaacggtgcaggacaccggtctgaccatcatggacgcgcatgttcagggcaacaccactattaataccgccaaaaatctgagctttgagcacagcagcattgataatctggtcacctttacgggtaatattttcaccgatatcaaggtaggcgatagcgctaatccatggatcttttctcctgccggtgacaaaacggccacgctgtacggcagcgccaccacagacagcgaactgaaggcggtattcagcgacctcaacgccagcgataacgcgcaagacctatttgcgcaggtgttggataaaatgtctgacggcgccagcaaggataatctggcggaagtcagcctggtgaaattggacaaggcggtgtatgtgattgtcgataacaaccacaaccaaagcttcgatgccgatgatattgttttctcgctcggcgatcgcgatccctatctagcagcggtaaacctgcactaccaggcgccaacagtcgaggccaacggcatcgcaaccgccagccacaccggcgaagtcatcgccgcctga

SEQ ID NO: 455702 - DNA, 300 bp, Serratia marcescens
atgttgaaatttattaccgcttcggcgtttactacgcttgataatggcctgtcccgccgtgagggacaattgagcgacggccgcgccgccgccgaagtccgctttgacgccggcgccttcggccagttgcaaaaacgcgataacgccttgcacgtccgggtgatcgacggcgaatttgaatttaccgtcggcagcgacattcttctgctgcaggccggcgaaaacgtggctgttccggcgcaggtgcccagcggctgcttctgtcttagcgccggtacgctgctggaaatcagcgcctga

SEQ ID NO: 455703 - DNA, 1155 bp, Serratia marcescens
ttgcctaatgaattctggattgctggtgcagggtcaggaaaaacccataaagtcattgaggatgccattggagtcataaaggcgggtggacgcgtattggtcgtcacctacaccatgaacaaccaggcagagctccgttctcgctttgtggaattatacggtaaacacagcgatgattttgttgtgaaaggcctgttttcattttacctggaagacttagtgagaccttatcaaacggccatgtttccagatcgaattacttctacaatgttcaccgagcataaccctcacctgataccaggtacgaggaaatggtatcccaatagaggggaaaaaattaatggggcgctgaatcctcttcattatctgacgccgtgcaaaaccaaagcttacactggactgctggctaagctggcaacaagaatctccgcttcaacaaagaatgcacccgctaatagattgaaagagatttatcagaggatctttttcgatgaggttcaggacttggttggatgggattttgacgttatcaaagcactcagtaaggcaatgcatgactctatttgctgtgtaggcgattttcgtcaaactatttacacgaccacgttcggccataaggcaccggaaacacctgagcaaaagattcaatacttcaaagacctcaattttagtccgttctcactggcgaaaaatcgcagatgtatccaggaaatctgcgatctctcggataccattcatcctggtatttatgagcaaacgcaatcagaggtgggagaagttcctgccgagatggcccatcactgcggtgcttttctcatcaaaccatctcaggtgaacgattatctcgatatgttcaaacctcaagttttgcgatggtcatcgcccatgggaaaaggctatttgccaccagaactcacctgtcacaccttcggctccagtaaaggtctcggttttgaccgcgtactgattatttcaccggagaaacatctcaagtatctaggtggcgacctcagcgtgttcgataaagataaaacggaggagtctagaaacaagctgtacgtggccattacccgagctcgttacagcctagcgtttgtcgttgaggaagagcatcttacaaatataaagctgccacattgggttagacctgtgtaa

SEQ ID NO: 455704 - DNA, 1659 bp, Serratia marcescens
gtgcacgttaaatcgattaagcttaccaatttcaagaaattcaaagatgaacattttgagttcaacgatgacgtaaatatctttgtaggtgataacaacgccggtaaaagtacgattctggaagccctggaaatcgtactgaattacaactatcggggccgctccttcaacaacgagtttacgccagatatttttaataaggatgcagtgcagctttttttggcttctgacaaatcggccacgcacctgcctgttttggcgatagaggcattcatcgagggagtaccagaataccgggggacaaataatttccttaaagccgatgctcaagggatcacggtgctggtgcgctttgatgacacgctcaaggacgtttacgccgactacttactgacaaacccacacattacgagtatcccgatcgaattctacaagctggaatggctggatttcggatggaatcctattaaagccgtagcgaagaaattcagggcgttatacatcgacccaactcgtatccaccccactctgggtaagaatcagtacatctcgactatactgaataccgctttaaagaaagaggaactggttaagctgaccctcaactatcgtgagaatcagcaggtttttaacaactcaggtgaggtcaggacagtcaacaccggtctggatacggaccacttgatcacagaaaagaaactgtccattgctgcaagcacgttacctgcgggctctattcagaccagcctgcaacttgaagtggatgatatccctttccagttcattggcaagggtgagcagagtaatgtgcagatcaagctcgcgattcagaacaagtcgaaggatatcgatttggtgatgatggaggagcccgaaaaccacctttctcacactaacctcaataagctggttcactacattgaaaatcagcggggcgacaaacaactcttccttaccactcacagctcgtatgtgctcaacaagctgagcattgataaaatctgcctggtccagtcgggatacaaacgtctgcataagcttgcccccacagtggtcaaaaccttaaagcgcttaccgggctatgacacattgcgcgtggcactgtctcacaaagtcatccttgtcgaggggccgtcagacgagttagtactcaagaagatttaccaccgcaagcacaaccgcctgcctgagcatgatggtattgatatcatcgtcgtgcgcggagtcgggtttgatacgttcatctccgtgggtatggaaattggtacccggataaacgtcctcagagataacgatggcgactatgatgaaaacgtcgtgaaagcgcgtgtcgattatgcggcctatcccaatatcaaacttatttcttctgccaaaaatgaggagttttcgcttgaacccgcgatgatatatgccaatgccaccgacttggttacgctggacgctttcgccaaagaggtgttatcaacaaagacgtttaacctctacgataaagtagtcgacttagataaacgacgcgactttttgatcgactggttccgaagtgtccagggaaacggtaagggcgcccgcaaggtcgattcagctatcaagttgttcgatggcaccctgaatttcaggtatccacctttcctcgatgaggtgttcgactttgcctaa

SEQ ID NO: 455705 - DNA, 150 bp, Serratia marcescens
atgagctgggccaagccagcccggcgcacgctgcagctgaacgtcaacaacgtggcggacaagcactatgtcgcctcctgcggcaatacctcggcctgcttctacggcagcggccgcagcgttatcgcctcggtggcttacagctggtaa

SEQ ID NO: 455706 - DNA, 600 bp, Serratia marcescens
atggcatggttgggatttatcagcgcacgggcgtgccggcactggcaggaggcatcgccgtttctgccggcgttcagcttttatgaaaaacaccattcggcgccaatcgacgcttcgccacaggccattattcgcgcggtacaggcgctggatatgcacgaggatccgcttatccgtcgcctgctggcgctgcgacaactgccggacaggctgcgccggcgcacgaagcccgtccgccccttcggctttgacagcttcaccccgctgcaccaggacagccacgagctctcgctcgggctggtcggccgtttctggcggccgacgctgacgctgccgaggccggaggacgccgagcagtttctgcactttgccgaccccgccgccgccaagctggtactgcgctttaaggtgttgaccgacccagccgggcaaacccgcctgcgcaccgaaacctttatctactgcccgacgccgcaggtgaaagcgcacttagcctgctactggctgctgatccgtccggccagcggctggatccggcgccgtaccctgagcgcggtccggcgtaagctggcggcaagaaactcatcgttccagccgtag

SEQ ID NO: 455707 - DNA, 753 bp, Serratia marcescens
atgaaaatccaatttgaaactgactttatcattcgccatgtattccagccggtctatacccttgatggacagctgttagcgttagaaattcaaagccgtttcaatagcctggacggcgatttggcgatgccggcggagattggcgttaatttgttgcaacctgcgcagaagatggccttattttatgaacagcttgatgtgatggaaacctatgcagattggtttattgagcatcaggtattattaagtataaatattgacgacatgctggcgagacgggtgctgcatgataatggattgcgccagcgcctgctgcggcaaccatttcttgtgattgaaatcggcgagagttttcctcaactgtcggccggaaaaaacaatgagactattctccggctcagcgagtattttacgctttggctggatgacttcggctccggccaggccacgttgacgccgttgtacgacggcttgtttacttacgtgaaaatagacaaacatttttactggcggctgttttcgcacccgggctccaatacggtgatggatgctctgctcaggaatatcaatttactttgtcagggaattatcgtcggcgggattgaggaaaaagcctattttacccatctggaccgcgccggtgttttgggggtgcaaggttttttatggccggcggttgacgttgaacggttggatagcctgcgcaaagtaccgccagaatttgccggcgccgattcgccggataatcaataa

SEQ ID NO: 455708 - DNA, 549 bp, Serratia marcescens
atgcacctattgaatggctcgcattcgcctagttatcatgataaaacacaggtggtcatttgtacgctacttaagaagaaatcactaattatgaaaaagatatatgaactaacaccccgtagggcgcttaagtattttcagcagcatgattcatactcgacactggagctgcccagttatgtcgatttttcttccttgcttgaggaaatcaattcctcgatagacaaaggtgcaatcagcttccaacccaacgccaagtcattgatggggaggaatataaattacgaagtattagtcagcaaagatggcttatacagctggcgacgaataacactcattaaccctctgtactacgtgtatttttgcaaacttatcacatccccatccaactggaatgctataaggaaaaagtttagagaatttgagtctaatgagattttcttatgctcgagcacgccagtcagcaaaacgaacacctcaaacatagcagcatctgttttaaactggtgggaagattttgatcaaaaaaagcctttcattagctcttaa

SEQ ID NO: 455709 - DNA, 1119 bp, Serratia marcescens
ttgatcaaaaaaagcctttcattagctcttaattatgagttcatgttcagcacagacatttcaaacttctacccttccatttacactcatagctttgagtgggtgtttatccccaaaaaagaggccaagaagaaagcaaataataataaccctgggcgattgattgacactaatatccagatgatgatgagtaaccagacaaatgggataccgctgggtagtacgttgatggatacttttgccgaattaattttaggggaaattgatttaaaactaagaagaaaaactgacgagctaaatatcacagactatagagtagttcgatacagagatgattaccggatattctcaaacagcaaagatgacttggataaaatatcaaagtgcttagttgaggtcttaggtgattttgggcttgatttgaattcaagaaaaacagaactacatgatgatatcattttccactcacttaaatcagccaagaaagaatacatcacagaaggatcattcaactccttgcaaaaaatgctgtatgcaatatatttattttcgtcaaagcatcaaaattcaaaaatcaccgttagatatttaaatgattttttaaggagattatttagaagaaaaaaaatcacaaacagagggcatcaactagatgcaatgcttggaattatttcaagcatcatggctaaaaacccaaccacctacccagtaggaatggctattttcgcaaaactcttaagtttcctttatgacgacgatggacttaaatttgacaaactgaaacaacttcaccataaactaagcaaacagccgaacactgaaatgttagacatttggtttcaacgagttcaagggaaggtacacgcacaatgggcaggtaattacaaaacagccctgtgcctacgcatagatgatgaacttaagggaaaaaaaacatttaccattgatggtctatgggatataaagtggattcctggtacagaaaaaaacccaaacaaacagaaaatattatcaatattgaaaaaaacaaaaattgtgaatttaggtgcattcgaagacatggataatgatattacaccggaagaggtgagtttattcgacaaggaacacagcgcttaa

SEQ ID NO: 455710 - DNA, 441 bp, Serratia marcescens
atgtttaaccactacccggcccactaccgctttgatgctgagaacgacagctggcacatcagctttcgtgatttcccggaatttcagaccgtctgctataaacgcgaggacgtcgagctggaggcgcaagacgcattgctgaccgccgtcgccattgagcttgatgaaggccgcgcagtaccgccgccttcatcatgcggcgcggcagaactgcatgtgccgctgccgctgttggcgcagctgaaaattgtgctgcacaacacgctgctggcacagcagatgccgaaagcattactggcgcgcaaactgggttttaacgccggtcagatgaaccgcctgttggatattgcctatgcttctaaagtcgaagcgctggaacaggcactatttttactgggctacgaaatccgggcctcggttcaccccagcgataagccgtaa

SEQ ID NO: 455711 - DNA, 336 bp, Serratia marcescens
atgcgtaatttattgagcgttgccgttttttctcttctgttgctatcccccgtcgtgcaggccgccgagccgccgatctcccatcatgctgccagcgaacacagcgcggcgatcactcatgctcagggcgtgctgaaagcctggaatccgcacaaggcgtcgatcgcccacccggcgattgaatccctcggttggccgccgatgaccatgaacttcctgcagccgcagccgcagccgccgttggcggaattgcccgcagagacgccgattgagttcagtttccgtcaggccgatggcggctaccagctgattaccctcagcgccagccagcagtaa

SEQ ID NO: 455712 - DNA, 426 bp, Serratia marcescens
atgaaaaaaatttatccgctggtcatcgccgtgttactcagcggttgtatgtttgaaaagcagcgtttttatacggcagaggtcgccttacaggggaagcatctctgtttctctctgccggcagagtacctggcgcctgacgtcaaggttaacctcgttagcatcgccatcgaccaacggcagggcaaccaaacgcgtgaggtctggcgcagaagcaccatgccgccgcagccagcggagtgggtgactgccgggcaatgtattccttattcctttagcgcttttgagagcgatgttccctatagcgtggcaatcagcactgtagaagggcaggacgccgacagcaaacgcatctggcaacgcagcttctcgctgaagatcgtcgagagcagcgttgcgcaggttatcaccggcgcggagccttga

SEQ ID NO: 455713 - DNA, 1269 bp, Serratia marcescens
gtggaacatatctcagccttgttgcggcagttgcgtcagcggctggcgcagctttccccggacggcagcggcttccggcagatttccctccccgtgagcgacgcgctcagcgacgatgtgctggcatggctggcggcgcaatcgactttcccgcaattttactggcgccaccgggatggagaggaagaggcggcggtgtgcggcgcgctgcggcagttcagtgatgtggccgccgcgcaggcgtttattgcggcgaaccctgcggcgcgcgtctgggggttaacggcgtttgacggcccgtcctacctgtttttacctcgcctgacgtggctgaggtgtgataatcgcacgagtgtgacgcttaacctgtttacggaagatgccgccgcgatggctgactggctggtgaccctggcgccggcgatcccgctcgcgccgctgcagactgaggttgcggcggtggagcactgtcccgatgccgccggttggatgcagatgctgcagcaggcgctgacggcgattgccgcagggcggctggagaaggtggtgctggcgcgcagcagccggcttacgctgacgcagccgctgtcagcccccgcgctgatggcggccagtcggcgggttaatcaccgctgctaccactttatgctgcgctttagcgcgcgttctgccttcctcggctccagcccggagcgactctacctgcgtgacgggcggcgtttgctgactgaggcgctggccggcacggtcgcgaacgctggcgatgaggtgcaggcgcgggagtgggcgcagtggctgctgaacgaccggaaaaaccagcatgaaaacctgctggtggttgacgatatctgccaacgtctgcagggcagcgtcagtgcgctggacgtgcagccgccggaagtgctgcgtctgcgtaaggtgcagcatctgcggcgctgcatcagcgggcaattgcaggcggcggacgatgcggactgcctgcggcgtctgcagccgacggcggcggtggccggcctgccgcgccaggcggcgcgggcatttatcgccgcccatgagccggtgtcgcgcggctggtacgccggctgtgccggctatctgtccgtaggacgctccgagttttgtgtcgcgctgcgctcctgccagattgacgacgatagcctgcagctgtatgccggtgccggtatcgtcagcggttcagacccggcgtcggagtggctggaggtggacaacaaggcggcgacgctgcgcagtttgctgcagccggagtag

SEQ ID NO: 455714 - DNA, 444 bp, Serratia marcescens
gtgaaactgtcaaagcactcaatacgcacgctggcctggctgggcctgtttgccatgctgatggtattcgccgggccgctcatctccgcacagctggcaaaaaactcgcagcataacagtgtgatggatatgagcatgccgatgggcgagcacctgatgatgatgcatcatcaaggcgacgtcgcccccgctgcgcagcaccacgccgccggtatgatggacgaaagcagcggcgatttttgcggttactgcagcctgttccaccataatccgccgatgcagattacgctgccgcccttcctccacgccccattattcgccggcacgcttagcgccgttattgttcccgctccgattatccgcaaattattcctgccttatcaaacgcgcgctccgccgaaaaatattaacgctaataatattaaatctacgtttatactttaa

SEQ ID NO: 455715 - DNA, 153 bp, Serratia marcescens
atgctacgttcaatcccgctactattagcgctgctgatgctggcggcctgctcttccggagaagggccaccgccggaagataacggcggaccgcccgtatcccactgcagcgacgcgcaatgcgcaccttccgttggcccgcaaacgtattaa

SEQ ID NO: 455716 - DNA, 462 bp, Serratia marcescens
atggatacggttgaagagttgggtgggaagtattttttcaacggaatgagcctcgacaaagataaacttctcctgtggctgattctcgatgagtttcagaaacagttcagcgggatggttgacttactggctattgcctcaatgttggtcagcctgcccgtgattcctgtaaaggggaagattggtaaggcatctggtaaaggtacatcaggaaccagcccattatctatagcctcacgtacgctaattcaacaaaggtttaagaaagctaaaaaaaccattacatgggccaagttaaggcgtggcgagtgggcttacaccacaagtattggtgcctatgttggccgctggcttccttggattggtgcagttctgacagcctatgatttagctatagtaacccgtaatgtcatccatcgttatgagcttatcgttgggaaaggggttgtcgggaatgaatga

SEQ ID NO: 455717 - DNA, 210 bp, Serratia marcescens
atgccacggaaaagccctaaccaactgtactgggaatctgttgaacgggatcagcttgctaatgaatacaacagattcttgcaggaaaatggatatgagaataccccacacaatgcaaatctgtttgttaataaaaaaggaatggtagggatgaaagctagggataccatcgaggcacttgcaggcgtgctcccaccattttacgattga

SEQ ID NO: 455718 - DNA, 1803 bp, Serratia marcescens
atgtccatgcgcgtttttgctgctctggtgctttctgcactgagtttagggttgcacgccgaacagcttaatgagagctatgcgttcgcattactcggcgcccccaaatactccaatgatttcagccactacgactacgtcaatccagcagcccccaagggcggtcatctccggctggcggtcatcggtggttttgacaacttcaaccgctatgccgaccgcggcatgccgggccaacgcaccggcgagctgtacgatccgctgttcaccacctcagacgatgagccggcaagttactacccgctgatcgccgagtcggcgcgttatccgcaggatatgcgctggatggagctgaatatcaatgcccttgcccgcttccaggacggcagcccgattaccgccgctgacgtggcgttcagcttcaataagtttatgcgcgaaggcgtaccgcagttccgggcttattaccgaggcattaccgtcaaggcgatctcccgcctgacggtgcgcattgagcaatccaggccgaatcgcgtgcagatgctcagcctgctcggcctgaaagtactgccgcagagcttctggcataaccataagctcagcgaaccactcagcacgccgccgctcggcagcgggccgtataaaatcagcgactaccgtatcggccactctattacctatcagcgcgtacgcaattactgggccgccggtctgccggttaaccgtggccgctttaatttcgatactatccgctacgattactacccggacgaacaggcggcgctgacggccttcaaggccggcgcctatgatttccgtaccgaaagttcgccccaaaactgggcaatccgataccaggacgagaatgtcacccgcggctatatcatcaaacacgatgaaaccaatcaggcggcgcaaaatacgcgctggctggccttcaatattcagcggccgcccttcgacgaccgtcgagtgcgcgaagccattacgctggctttcgacttcgacaagatgaacaaaacgctttactacaatacctaccagcgcgccgacagctattttcagaacacaccttatgccgccagaggttacccaaacgcggaagagctcgcgctgctggcaccgctgaagggtcaggtgccaccggaagtattcaccagcatttatcagccgccgcgctcgggcggcggcaacgatcggaaaaacctgctcaaggccgctcagttgctgaaggacgccggttgggaagagagaaaccagcggcgtgttaacgtcaaaagcggccagacgctggtgttcgaactgctgctgcccaacaacagcgcctttcaatacatacagccgttccggcacaacctgcagcagctgggcattaccctgcttctgcgtgaggtcgatactgcccagtacgcccaacgcctgcacaatcgcgattacgccatggccgcgatcgtttatcctgcgatggcgtatcccaacgccgatttaccgttctattggggcagcagtaagctcgacgccggctacaacgccgctggcgtcagcgatccggcggtcgatgcattgctcgcgcagatcgtgaaaaaccagaataatgaaaaagcgctgctgccgctcggccgcgcactggatcgggttttgacctggaaccgctatatgctgccgatgtggtactccagccacgttcgctacgccttctgggataagttctcctacccggcaattcgtccagccaacgacatcggcctggataactggtggtttgacgtgaataaagccgcacgcctgccagttcaggattaa

SEQ ID NO: 455719 - DNA, 1593 bp, Serratia marcescens
atggggttaaaaaaggcatttactcgccatatatcacatcgccggcgtagtctggttaaaagctgtctcgtggctctggtcttttttatccttttcagttcagcaacgctgtccctgatttatcaccaacgtgcgcaatttcaccacgaactcgcacaacgcacacaacggttcgccgttaattatttaaataccctgaccggcgtgatgcgcaatatactgccgctgactgaggaaagttgtcagacggcgctgccggatattggctaccgcgccgcgttcacccctgacgtgcgcacgtttctgctggtcaaaaacggcgtggcctattgctcatcggccaccggcgctatgagactcgatctgaagtccatctcgccggaaattaactggtatcagccactggatatgaaactgcagccgggtacgccgatgatcccggagcggccggcggtaatgatctggctgcgtaaacccggcagtcacgttgatggcattctggccacactggatattcatctgctgccctatttgctgcgtacacccgacaccaaaaactccggcgtcgccgttattatgggcacccgcgccttcaccaccttctccaccgaactgctcccgctgcaccgtttaccgtcctatcaggccgaccggttatctatccccggctatccgctggcgctgctattctataatcaaaagctcaccagcaacgatattcgcctgacgctgctggccggactggtgctgtccctgctgatcggcgtactgtgttattacgccatgctgctgcggctgagtcccgagcgcgcgctgatacgcggtatgaagcacaatgaattcttcgtggaatatcagccggtgtttcataccgccagcaatgccgtctccggcctggaggctttgttgcgctggcaacacccgacggaagggcgcatcccaccggatctgtttattccctatgcggagagcgaaaaccttattgtgccgctgacgcgccatctgttcaaactgatcgccgacgatgccgacaaactggctacagcgctatcgccgggcgccaaactgggcatcaatatcgcgccgtcgcacctgcgcgctccgagtttccatcaggatgtgctggagctattaacccagctgccgcagcacgactttacgctggtattcgaagtcaccgaacgcgatatgctggaagaagactgcgcgcagcaggaacttgactggctgcaccgacaaggatttgaaattgcgattgatgatttcggcactggccacagcgcgctgatctatctgcaacgctttaccatggactacctgaaaatagatcgtgggtttgttaataccatcggccgggaaaccgtcaccgcaccggtgctggatgcggtgctggcgctggcggataaactgaagatgcgtacggtggcggaaggggtagagaccgccgaacaagtcagtttcctgcaacagcgcggagtgagtttcatgcaggggtattactttagcaagccattgaaaattgatgattttgtgaatttctgtcagacccacgcggtctataattgcctgaccggcgaaaccaccggtccttaa

SEQ ID NO: 455720 - DNA, 312 bp, Serratia marcescens
atgagtacccataggtttgtcactgttttaggcgcattgtgtttatggatggcggccggcaatgtcggcgcgcttggcggcaccgtccgttttattggcgaagtggtggaaagcccttgtgagctgaatattacggcaacggcggcgcggacggaatgttatcgcaacgggcatcattatcaaagcctgcaatacaccctgccgaattttgatacgacacgcaaagaactgccgcagcatttaggcaccacagagattcactgggtggaccggcaacataaacttgccgtgattatggtggattatcgttaa

SEQ ID NO: 455721 - DNA, 423 bp, Serratia marcescens
atggcagtgttaacaggcgtcggggtaattatcgtcaacgcccagggtgaaatcttggtgggcaaacgctgcggtaaacacgcgccctactggtcaatccccggcggccacctggaggtcggcgaaagcttcgaatgcggcgcccagcgtgaggtggcggaagagactgggctgtctatcgcgccaccgcagtttgtcggcgtgtgcaataacctgcaaacctggcgcgaagaaggcaaacacaccgtttccatctgcatgctcgcggcacaccccggcggcgacgccatacggaaagaaccggataaatgcgccgaatggcgttggtgcctgccggaaacattgcctgaacctcactttgaggccagccgcatggcggtctacctctggcaacaccagcttagctatcatgcgccgcgctga

SEQ ID NO: 455722 - DNA, 162 bp, Serratia marcescens
gtgtttacaggcattttgcggttcagctgtgggggacaggccgaaccgcagcagacgaagcaacccggcgacagcgacgcgctgttggaaatcatgctggccaccagccagctgcatggttttgagttccatccttcgctgctgcgccattatgggaaataa

SEQ ID NO: 455723 - DNA, 1200 bp, Serratia marcescens
atgagaaagtttttgagcagtacggcaggcagtttatttatcatcaacggactaacagccttatcatacgcatttatattaccaataatgagcacatttttggttgaaggattaaaatcacaaccaacatttataaccttttatagcattggttttgccatctcgggcatactctttagtcagtggatggggggactagtagataaaggttacagcaataaaaaattgttcatcttttctttggtagctatttcgatgtcaggcatagcttttctactctgcgctaatgcctggcaagcattactgatagggattttcctgatggggccaggaaatgcctcgatccctttactgttatcaatgatacgccgatattctgtcaccgcagggaagaatgctacacgcttgaatagccaaatgcgttcaggcgtctcccttgtatggatcatcggcccagcgctggcctttatcgtaacggatatgtatggttttaaattcaactttattgcatccgcggtgttagcatgctgcgttattatttactcaacaatcatgctatctcctgcagacgtacaacctgctgcacataatgatagtatccagaaaaaaaactcaatacctatgagcgtttggctattaggtggtgtaatggtgttatccaatctggcgaataatctctatataacctcaatgccattatatgtcacacacgaagaaaaacttcctatgttcttcccagggttattacttggtcttaccgcattgctagaaatcccagtaatgctggttgcatccagcatgtctgaaaagaccgggaaatttaggatgatgctgatcggattcttttttgccatgatctattataccgctcttcagttcacccattctatgttcggcttcctattgctgcaaatattcaatgcgctgttttatggcatatttattggactaggtatcaccattattcaagaggcaataccggaaagaagcggcttttcatctgctttttattctaacgccatgcgtgtcggtatgatgagcggcacatcattggctgggattttagcacagctatatagctttaaagttgcattgattgcgccaatcatatcgattcttctgtcagccatattgctaacatgggtatcggccatgctgaaaccaacacaaaaaaatgtcagaatatccaatgagctataa

SEQ ID NO: 455724 - DNA, 597 bp, Serratia marcescens
atgaataatcccattatatcgttaacagtcaatcatcccctggcgggagtggtcagcatcgaaaaacaggacagcgctttgttattaagctatcaaggttccgaacagctcatcgagtggaatatccccgagccgttgattgctgtaggcagtgctgagggagagctaagctttaccttcttcatggctgataacgcgatattgaaaaagaaactttactttaacggtgatcgtttctggttctgtattccggatggcataagctattatttgaactgtgagataacgtcatttcccttccctttctttcaggccagggaggggacatccatcatgtttcaggccctcactgctacggttaacctgcaggtcgatatagagatgacatcaaaagatagctcggagaataataattactttaccgaatacacgctcagaagcggaaatttaaaaaagtcatgccgtctttatgctggcgatcacgtggtgataggagaatattggttctatcaaagtccacgtgctacatcatggccagtatttttaattagcaattgcgaactggagccacaacacgttggcctgcattgcccatag

SEQ ID NO: 455725 - DNA, 231 bp, Serratia marcescens
atgataagtaaagagaaattgttagaaatctggaaggatgccctacaggaaaatgaggtcgatctggataagaccctgtttgaccaaggtatggactccattaaagtcattgatatttcagaggccatattcaaactgaccggcattcgcctcgaatgggagaatttcaacatcacctcttcattcaatgaaacctatgaactgctgagcagtaagtacgcttcagcgtga

SEQ ID NO: 455726 - DNA, 969 bp, Serratia marcescens
atgaaagacatcactatgaacatcggcgccatcggctatgagcttggcgaacatcccgtcgcgcttgaggataacgttcgtttggccaatgagcgtaaaagccagctgtttttgcgtacgatgggtttcgctgagtatcagcgtaccgaccgaaccctcggcgaattgtcagaatgcgccattaagaaaacgctcagcaaggccaatattcctgctgaaaaagtcgatattgtggtctatgcctcaagtacatttggtgaccgtcatggcgacgttattgataaggatgtcgcacagtgtctgattaactgtgggctgcaggatgtttatccaatcggcgtctacctttctcaatgcaataacttcttcgccgcattggatatcaccgtacaatatctgaagaatgaggttgggaaaacagcgctactggtgtttgccgatcgtgtattagatgaggctacgcgctttaaaaacctagcgattaacagcgacgctgccgttgcctgcatagtttccagcgatactgagattgaacttgaatttgaagtttctggtatcagtaaaaaaaccaagttgacaactgatgacctcattgatccacacagtaatgcaatgaatcttgaggtacatgaaaattatctggcagggattcgtcatgttttcgacacggcattaagccaaagccgactgcatgcgcagcatttacagcagatcatctgccacaacttcagttatagcgcattaagacagatcgccaatgcgattagcgttgacgaaaaaatattctataaaagtaacatccctaagtttggtcacgcctatacctgtgacagcttgataaatcttgacagttatcatcaagagagaacaaatcccatagcatctccggaacatattgccgttataggtacaggcttatatttttggggaatggttgtattaacagtaagacaaaaggaagcaccatga

SEQ ID NO: 455727 - DNA, 1524 bp, Serratia marcescens
gtgagtgataggctgatacctgtattaagcatgatgacacatgctgaaaaacaaccaaataacatcgcactggccgatgacaatagtgaattaacctggtctgagctgaaaaattcagtgattaataccgcaaaatccatctcatcacagatcaatggggcaagcaaaaaacgcgtagccgttttctttgatggttcagcggaaatggtcattgccattttagcggtgcagctcgccggcggcgcctatatccctttggaacctaagattcctgatgctcgaatcgacgcaatatttgccgctgcctcaccgtctttgattttgacggacgataagaatctgcaaagctgcaccgccattgcctcccggcttaacgttcccctggcggtgattgatgccgattcaccccaacctctgacgcatcatctaggattcaccatcactccaggggaactgccgcagttaacgccggaaatgccggccgtggttttcttcacctccggctctaccggtaaaccgaaaggcgttgagctttgccacatcggttatcaacgctggtttgaaggcgtgcaagaattgatgtcggtaaagcccaacgatcgcgtcgccctaaccaccaaccatagcttcgacctttcattgggagaaattgtgcttgcccttgtatccggtgcggcgttgtatgttccctcccaatctaccgtaagggacccattctctctgctcccttggttagacaaacaccgcatcacgatttggcaatcggttccttcgttaatgaggcaaattcttcatttttatccgcagagcgacgcacttaattcgctgcgcataatgatgttttgtggagaaccgctagaggtatcgctcgttgccaaattcaaagcatcatttacccacacctcagctcagcctctaaacctttacggccctgtagaagcgtcagttcaggtttcctggtgctgggcctatgagtaccttaatagcgatctaaccgtcgttccgctaggtaaaccccttaagcacgcacatattacgctgcaagacttcggtgatgggacacaagagatacaagtcagcggtgaacacctggctttgcgctaccttgatgaagaaaaaacgcggcaggctttcattgagaatgatgcctcacgtcctcgttattaccgtaccggcgatattggacgtttaaatgacaacggtgacatcgagtaccagggtcgtgtcgacgatcaggtaaaaatcaatggttatcgcattgaactcagtgaaatagagagaagcatcgtcgagcattttggcgcccgggatgcctgtgtgctccccgtgttgaaaaatgaacgttatgaactggcggcttttgtggttaccgagcaacaagatcctaaggcattgcgacggaagttagcagaatacctgcctgtttatatgttaccgcggaacattttctttctcgacgctttgcctttaaccagcaatggtaagcgcgacaaggtgaagttaaaaatggattatctggtatga

SEQ ID NO: 455728 - DNA, 1041 bp, Serratia marcescens
atgagtcagcaagttcaggatgattgttttattcgttatcaaaccatgccatcgcaagacagtattaactgctttatggcaactcttgaatgttttgctcagcataatcaattgaccgatgatttatcgctcgcgcattttgagcatgagttttatcttaaaaatagtgaaagtaatgattttatttcggcgtattcaaagtttggaatagatactgcctgggcctgcgtggatagcctcgagatgatgaacgaccgagtggtcgagaggatcagggcgcggtgcggcgtggcgatttctttagagatggtttttgattgcgaagggttaatacagcgacttcacgccatgaatgatcatgctgtttgtatttttgacccattttatcttccaggaagtattaattttggtgtcaaacatactttaagtgtatgtattgttaacggttatgatccagagcagggcgtgtttggtttgattgagcgtaaaaatgggcaatcgtttgtatctctggatgcaatgcgggagagcacgaggcattttattcgctcgagagggtcttgccatatctttcacctggctaaggtaaagcgtgcggtctcacctgatgatattgatattagatcagacctggaaaggattataaagcatttctattctagagataatgatacaggtctgcaggcattgaaaagatttcccaagcgttatgcagagcttttagcgtttgaaagaccctttatcattccctgggctgagcgttgttttggtgaacgctatggtaatgctcgctttttgcaaaaactgctgaatgataagcatccgatggtcagcaaagagcatcatcgctgttgcgaactcattgagttatatcaggagttaggtggattatggcgatcttttgaagtgttccatatttattctgttacccataacaatcctactatcttacagcggaatatgccgctgttggaaaacattattaataatgaaaatcgttgtctgcaaaccttagagacgctgttgacatcactacgttga

SEQ ID NO: 455729 - DNA, 243 bp, Serratia marcescens
atgtatattgaagaaattaaagccattgctactgagaacttatctgaattaatcggttcaacgccattgggagatgaagataatctctatgatcttgggatgacgtctctgcaagcagtaacgcttatgatcgcgttagaagaaaagtttaatattagattcccgcatactgcattaaatgcggtgagttttgaatctgttaaaaatataaattcagttattgcgtcggtattacccaattaa

SEQ ID NO: 455730 - DNA, 1173 bp, Serratia marcescens
gtgaatttgacagggcaacagataaaaagaaatttagaacagtatcgggatgtttttctgaagttggccgatgaggcagagtctgcggggcagatgccggtagaactaaaaagcatcatggaagaatgcggcatttggcaatacctctatccgcaggaggctgggggcaactgtcgtgaagccgccgacttgattgacatctggcaggcgtgtgcggcaattgacggctcatttggttggttgactattgcttacgtattagcggcaagtcattgcgcgatttatctgcagccatctgcttatcagcaggttttcgccagcggtagccagccgattatcgctggacagtatcagcctaacggacggggtaggggggttgaaggcggctatctgctttcgggtaaatgggcatttggcagcggtattcatcatgcagattgggccgtagccggttttattccgcttgatggcgatagtgttgttaaaggtgatgatggcaaaccagaaattatgattgctgtcataccgcgggaagccattacgctctccggctgttgggatacgacagggctgcgtggtacgggcagcatcaattacagctgcgaagaactctttattcctcatgcattttgttatcgctttgaagctccggaagccgtgcgcggcggtgcgctgcaccgcattgggattacggaaatatctgctgtttctcacggcagttgggctttaggtatggcgcagcgggttgtcgatgaaatgacgtcgatggcgcggaaaaccctgagagcaaacgagagtttgccgctggctaaaaaggaaacgttcttgctggatttggcgcgagccgctgcaagagtgaaatcggctcgcgcttttttgacggccgcgactgaacaagctcagcatgaagtggcgcaatcatccagcattttgccgcaaacgcaaaaagaaatccgtttatcggccacctttgctaatgaggtttgcgcggaaattgctgaaatggcctatcgccagatggggacatcagcgattgcgcgacgcaacccgttagagagggtgcttcgggatatccaaaccggtagacagcatatgatgatcagtccgcaaagttatatttccgtggcgaaaacatggtttgaggtgggtagtgacaacgcacaaagcaggtaa

SEQ ID NO: 455731 - DNA, 2232 bp, Serratia marcescens
gtgacaacgcacaaagcaggtaaactggccgtaattggttatgctggagtttttccacaggctgactcgccagaagcattgtgggatcttctctgtgcggggcaggatgctttcacagagatccctgcggatcgttggccagtagcggacttctatagtgaagatcgctttgcccgtaacaagagcagttcaaaatggatggcgccgatagatctaccggcgcttaaacaaagcttttgggctaattttccggtggcggaacatgctacggttgatcctcagcagcttttgttattgcgtgaaaccgagcgcgcgctagcacacgcggggttatctgccgaggccttggtagggagacgcgtttccgtttctgttgggtgcatggacgttgataatttgcacagccaatgtatgagcgatctacctgttggtccaggcacagtcttcggtaactatcaggcactgttggctaaccgtatcagccaacattttggttttacgggcgaaagcaaagcaatcaatactgcatgcagcgcatcgtttatggcgctttcagacgcgcgttcccaattgacggcgagtcgagccgactatgctattgttgctgccgccaatcttaatttacacccgttgaaatattatgccttctcaaaggcaggtatgctctcgcgtactggccgctgcaggccttttgacattacggcagatggctatgtgccgggagactgcgttgctgcactgtgtgtgaccacgctagaaagggcggtaaaggagcgacataaaatacatgccgtgattgatggaatggcggggaatcacaatggtaaccgttcgttatcacccaccgctcccagcgttacggcgcaaatagaattactggaagcggcgctggaggatgcgcaagcgctagcgcaagatgtttcttatattgaagcccatggaaccggtacctcattgggcgatccgatagaaatcgaagcgctggcgcatgtctatggtcaacatccttgccatgtcggcagcatcaaaggtgtgattggtcatacggaagctgctgccggtctggctgccatgattaaaaccatgctgatgtttcgttttcagaccataccgggtaatcactggattacagcgctaaaccctttggtcgctgaacgtcttgaccagatccaggttacacaacaaggtcttgagtggaacgcgaagccaaagcgtattgtcggcattagctcttttggctcgggtggggcaaatggacatattattctgagcgagtggtgtccggaaacggccgagacagcgccgccattaaaagatggtttttatctgtgccaagactattgcccgccagtccatcagattatgcaatgggcggccgataagacctggcagcgttcagcacaggaagatcggttatatcgtacggcattccaggttcatcaggaacggttagagctgttggcaccgttgtctgatacgccgagattggcggcaagcaatgcgcttcgtgatattcaacgtttcaacttgctatgtagtccgcttgtcatcctggccgatgcggcatgtcgtgtgacggacgcttccgaactgctgtctgcactgcctaatggcagcttttatgtgacgtcaagtggtctgtcagccaaattacctgcaacttttcttcaagaattgagctgtctgaggccgctgctagcgggattagaacgtgaatggctcgaacgggctagtcagctggaacaccaccagtttacgtttaaattattagtcgccaagtggagaaaatatcttcccggtgacttgaatgatgtggcggaacggtgggtttatgcgatggcgtatagcgatctctacgataaatggtcgcttgtgcccaagacgataccggcctgtcttggcgtaattaagcggttattgaacgccaacatgctgaaagagcgagagattagcgagtggtttcatagtggtaaaccgcttatcaatcctgttttatctactctcggtcgagcgctggcggctggccaagcattaccggttgatatgtttgagtgcgaatccacaggagaaatagtgcattgcacgtggcctgaagatgatggggcggtgggattccaggcggaagatgaggcatttgacgtattaattgtcagatcctggctcaataaacagcatatggtgagaaccgaacgggaaaataatctctcaccgcaaatatatttctccgagtaa

SEQ ID NO: 455732 - DNA, 1554 bp, Serratia marcescens
atgactcatgcggtacagcactatcttaatgaatctgcaaaacttttccctaataaagttgctgtgagatgtcggactgatgaagttaatgaattcattacttatcaggagcttgataatttcactaatgcttttggtgcatatcttcaacggcttggagtagaaaaaggagacatggtcgccttttatatgcctaagtctgtttctgctattaaggcattgctctcgattgtcaagtcttcagctgcgtatattccactggactaccggacgccagagaaccgtttagcatctattttgaaggaaagcgatgctaagatcgtcattgtcaatcaatatagtgtcgatcgtgcagtcgaagtgtttggcagattggaccatcgaataaaaatcatcaatattgatgatttctcagcggacacgagtgttttgccggcattgagtgataatacaatttctgtcgatctggcctacgtattatttacgtcgggttcgacgggaacgcctaaaggtgtgatgattccacatggcgcgattgtcgattacattgactggtgtgtggagacctatgggttgaccgccgaagatcagattgccaatcatgcgccgctttattttgataattcgacattcgatatttataccgcactaaaaacgggagcaacgctgaatttagtgcctgaaagcgttaatatgatgatcccaagactggcggactggattcgggatgagtctatcagtatctttttctgcgtaccttctgttttatcgatgttacaacagacggggcgcctgcatgcagatatgttccctgaattaaaacaaattttgtgtgctggagaggtcttgccgataaatgtactaagaacctggatgaatcttttcccgcatatacaatttactaatatgtacgggcctacggagatcaccgtggactgctcttatcacattatcgataaaatccccggtccggaaaaaaaacatgtgcctatcggtcagcctagaggaaatatggaaatgtatattctcaccgatgaaggggagctaacccaacagcgaggtagtcgtggtgagctattggtgagagggcattccgtagcttatggttacttgggaaatcaagaaaaaaccaatgaaagctttattcaaaatcccaagcataataaatacagtgatattttatataaaaccggtgatttggcccttattggtgaggatggccttttctactattcgggacgtaaagatagccaaataaaacacctcggttatcgtatcgaattgggtgaaatagagagtaatgtgctgcgtttagcctttgttgaagaggcggttgctatctatcgaacctctggcgagaacttaggctcatttataggtatggcattgaaaacaaataaaaatattgagatgagaacattgcgtagcgctttggcgacggttcttcctaactatatgattccttctaagtttgttttcattacggattcatttccaagaacggcaaatgggaagtatgacaggaaggctatctcagagcttttctcatcctga

SEQ ID NO: 455733 - DNA, 1653 bp, Serratia marcescens
atgtcaggcaacgctttaaccaacggggttgatattaccccgactccgtcacagtatttattttctatctggaatggtttgtgtggaaatactgttgtttgcagtggtgtgacattggctactaggcaggatttttcagaggaaacatttttatccgcctggcggaactgggttcgtaccagctatgaattaaatattaatgtagactatcatagtgaacgagatgagccattaacgttaacattagatgagcgggatgtggacgaaagctgctttcggtatattgaaaatagtaatacatcaatgagtgacgtggtggctgacgaaatgcgcactctgctaaacacacagatgaacattggagagaaacacagccataacctattggtgatccgatttgaaaatggagaatatgccatattactggccgtagagcatatgtttgctgatggtcttggcgtggacgtattactgaatcgttatttgactcttattgactcgccggatgattcacctatttccgccaaggaaaggtatcttgaagacaaaatccacctgggcaaatatgctaattatcaagagtgcggtggtgaatttgcacgtaactatgcgaaagaggttttggctaaacgttttttctgggatcctgaagggcgggcattagctcatcgaaaggggaattatgcaacactgcaaaagagaatagcattccctgcactaaaaaatatcaaccgttaccttactacgcgtaaaatctctcttttttcttatttaaccgggacttttgtcgagagtttttttgcatcacagccgttacaaagcgagttgttattgcagataccgactcacggcaggaagtataatcaaaacagtttggataagcacattgtgggatgcttcgcacaggcttttttattacctgcgcgacgggatgagcatgatgcactgccggctgaacaacggttcagtcgcttgcaacgttatgttttggactgtatgggaagtgaaatagatcagttgacagcgcgaaggaatgcggcatctatcaagaaatccgcagtgcaaagtaagttaacggatgatgcatacgcactctccttgcgtaaaagtatgccgaccaatatttatttctcgttttatggcgcatcatcgctaccggttcagcataccagttttgatattggccgctactacctggcaacgaccaatttagccggtgcattggatgtgatggcgatacagtatggcgaatgtctggaaatatcgtttaactatgatgcactcttctttcaggaacagaccattgccggattggcggagtgttatgaacggctgctgctagacaccgtcgccccttctgtcggactcgttaatgaaaccacgagaacgccaacgccggacacccgtaataataaattactcattgatatcataaataaatatagcctggaaaccataagtgctcaggatctggattcacatttggaaatagatctgggacttgattcattgttaaaaacgcgcattctctctgaatttatggcgcggggaacatatggtgagcaggatatcaaccgggagcatttctactccgccgcaacattggcagaactgttagatactgttattcctgagaatggatatattcgctaa

SEQ ID NO: 455734 - DNA, 795 bp, Serratia marcescens
atgaaatactatgagatcaggtcggagggggacaaggttgtcattatgttatccggctatatgtttggcgtctggagcttgatgccgctggcccgttgttttactcaccagcaggtttatggtattgatggcattgcggatggtgaaaaccatgatgaggcttttgacgaatttaatgatagtttatcaggctttctgaacgacagagatatcgataaagttacacttatcggctattcgatggggggatttgctgcacagtattttgccagtagataccctgagtatatcgatacgctcatcttgttgggcagctgtcatccgcgcgatcatcaggacttttgctataaaagctcaactgaatttggcgattatctgtttacgttatccccagatgatatttacagaattactacgtggaacttgctgagtgtgccggcaagaaacgatatgggattgatggcggcgttaagggacgattttttgcgtgcgccccctgataaagcctgttgtatgaaccaactgcgcgctatggcgcagttgattgagcatcaatctcaatttagtccggatgttgattgtctctccttgtatgctcgccaagatgtggtgattaagccagagtccactctgaaatcccacggtaataaacagattgaattacagtctgttgagggcggacacctgtttgtgtatgagaagcctgtagaagtatacggtattataaatacctggttgacgcggcgtggcgcatcgctcgcgtgctctcatctgaatctctctctcagcggatag

SEQ ID NO: 455735 - DNA, 387 bp, Serratia marcescens
atgttctcctgtcagccacataacggtaaaaatacaggtgttggaaccgaaacgctgctggaatcggagcgttcctgggacggtgcattatattccgcctacccgcagggcaccccacagctttcagtgctgaagatcatccttacccccaacagcagcctggcctggcaccagcatccgatcccgaatgccgcctacgtgctgagcggcgtggtgacggtggagaagaaatccagcggggaaaaacgccaggtcaccgccggtgaggtactgcctgaaatggtggacagcccccatcgcggctataccggccaggagggggcggtgctgattgtgttttacgccggcgagaagggcatgccgctgtcggaggcggttgaaaaatag

SEQ ID NO: 455736 - DNA, 1272 bp, Serratia marcescens
atgtcaaaatggcattggctgcttagcctgctcactcgtaaactctggtttcgcgcatgtttattcgcgttgctggcggttatttcagcgttagtttccatcattgttaagccatttattcccgccagcatcggcggtatggtcggtgccgatgcagtagataatattctcaatattttggcctcaagtatgttggcggtgacgaccttttcgttgagtatcatggtgtcggcatacagttcagcgacgaccagcgtgacgccgcgcgcgacgcggctggtgatggaagacagcacgacgcaaaacgtattggcgacctttatcggctctttcctgttcagtctggtgggcatcgtggcgctgagtatgggcgcctatggggagcggggtcgcgtagtgttatttgtcgttacgctggtggtgattgcattaatcgttatcacgcttttacgctggatccagcatctttcattactggggcgtgtcggggaaacgacatcgcgggtggaagaggtggcgcgtaatgcgctggagaatcgcgttaacatcccttacatgggggggaaagcgtggttacctggtttgcagccgccttcgggggcgatggcgctctacccgacgcaaattggttatattcagcatgtcgacatgcagatgctgaatgatcgcttgcaagagattgaaggggagctctatttggcctgccaaaccggtgcctttgtgcacccgggacatcctgtggcctggatcgttgcggcggatctgaatatagagacagcccccctgttggctgccatcaccatcggtgcggagcgctcatttgatcaggatccccgttttggtctggccgtgttggccgaaatcgcttctcgggcgttatcgccggcggttaatgatcctggcacggcaattgatgttatcggccgcgcggtgagactgctggcggtatggggcagagaaaagccggagcctgacgaggtcatctaccgcaacgtgtgggtcaaacctatcatgacggctgacctgttcgacgatatttttaatccgattgcccgcgacggtgctgcgctgattgaagtgcaactccgtttgctcaaagggttacaggcgctctgtcagatgaatactgccattttttccactgatgcgcgtaggtatgtcgctatcatccagcaactggctgagcaacaaatggtatcgcaacaggatcttgagagactcaacgtttggatacggcagtcagatgtgaacgtcatcgaagcatcgcaataa

SEQ ID NO: 455737 - DNA, 1539 bp, Serratia marcescens
atgacgccaccgtcctcagagtcagcaaaatccagcacctcgccgttgctgtttcaggccgccgtattcgtggcgatcgtcgttgttacgctgatcgtgttgaacgtctggcaaagctggcatgcccgcaaactcgacctgcgcagcgccgataacagtgccgctaacctggcgcgctcgcttggacagcatgcgtatgacactttcaagcaggtggataacggtctgctggagctgaaagagcgcgcagaacaagacggcctgagccaaccgcagctgcggcgtctgcaaacggtgatgcatgcccaggtgaataactcgccgcaattgcacggcagttttatcttcgacgcacagggacgctgggtggtgacctcattcggccagaccggcgcccacgccaataacggcgaccgcgcctatttccaatatcaccaacaccataacgataaccatttttatatcggcaaagtgatccgcagtcgttctaccaacgatttggtgatccccatctcacgccggctcaataacccggacggcagcttcgccggcgtggtgctgtcgacgctgtatatcgattacttccgcaacttttacgatgatttcgcccttgaggggaatgatacgctcagcctgctgctaaccgatggcaccatcttataccgccgccccttcgccgcagaatctatcgggaaaaacatctcgctcggcgttctctttcgtcagattctgcctcactcaacgttcggcaacgccacgatggtgtcgccgcacgatgacgtggagcgcatctatggctattcacgggtgccgaactatccgctggtgatcactgccgggctatcgaaacacgacgtgctgaccgactggcgcaaagacaccgcgctgtttgccctcggcggcagcatactgctggcgatattgctggcgctgggtatggtgctgatccgacagatcaatcacagcctgcagaccgaagcggaactggtgcgcacccgcgatcagctgacgcagatgaatcagaccctggaggagctggcgctgctggacggcctgaccgggctggccaatcgccgccgcttcgatatggtgctggccgatcggattgaacacgccgtgcgcggtaagaacaacctggcgctactgatcctggatatcgactatttcaagcagtacaacgatatttacggtcacgtcgccggcgaccgctgcctgcagcaaatcggccggctgctgaaagagatgcctcatcgcgtcggcgatctgaccgcacgttacggcggcgaagagctgacaattatcctgccggatactgcattaccggccgcggttagctacgctgaacgtgtgctggaacaggtgcgccagttgcagatcccccatcggggcagcccacaggggtttattaccgtcagcatcggcgtcgccattcagccccccgacgatgccgacagcacgccggtcgcgctgatcaaacaggcggatgcggcgctctatcaggccaagaacaacggtaagaatcaggtctgtcacgcctga

SEQ ID NO: 455738 - DNA, 183 bp, Serratia marcescens
atgctcattacgctgctgaaactgtcggtctattacccgctgacgttgggggcgctggccgtgataatggcgatcgccgtacggcgttggcgatcgctctattggcggctggcgctgctgctgttgacgctgctgtttgtgttgttcgccatggcggcctacagctggcatcacacgcgctga

SEQ ID NO: 455739 - DNA, 186 bp, Serratia marcescens
atgtttgttaaaaaagatagtgaagatcgtgtaaaatcggcatgtggaagcgtatgtgagttgcacgcctgtgtgaaacacgcagccgatcgttcttgttgttatatcaaagacaacccgtgggctggggttggcgccggcgccgttgttggactggtggtcggtttccttttgggcaaaaagtaa

SEQ ID NO: 455740 - DNA, 738 bp, Serratia marcescens
gtgaggaataatctgtttggtcaatgcattggcgatgcgttacccgagtggcggcctgtcagcgagccagggatgcagacgctgtccgggcgtttttgccggctggagccgctggatatccagcgcgatgccgcggcgctgtttgaagcttaccagttggctaaggacgaccgcgactggacttaccttccctatgaacgtccgcaaacgccggatgagttcacccgttatctgcaaagccaggctcaggccggcgatcgaaaaaccatgacggtgatcgatcagcgcagtggcagtgcgcttggcacttgcgcttttatgcgtattgaccgggctaatggtgtggttgagctgggcatgatcaactggtcgccgcggatgcagcgccaggcgagcggcagcgaagcgatttttctaatgctgcgtcacgtctttgacgatctgaactatcgccgctgcgagtggaaatgcgaccaccttaacgcgccgtcgcgtgcggcggcgctgcgctttggcttcagctttgaaggcactttccgtcaggccgtggtggtcaaggggcgtaaccgcgattccgactggctgtcaatgctggaccatgaatggccgtcgcgtcgcgtagcatttgacgcctggcttgccgccgacaatatggccgacgatggccgacaaacgcagcgtctgcaagcatttgcttcgtggtatacggacaaccctgccgcagtcagttcgctgtaa

SEQ ID NO: 455741 - DNA, 138 bp, Serratia marcescens
atgactgatgataaacgtcttaatgtgttggagaaagtcgctattctgatgtttgcagcattgcttgcctatatcgtgttgacgttcggattatcgtttttcggtctggagcatccttggccgtatccaaagcgataa

SEQ ID NO: 455742 - DNA, 648 bp, Serratia marcescens
atgaaatatccactaagcgtacaagaagcgcgggtgatcggttgcctgctggaaaagcaggtgacgacgccggagcagtatccgctatcgctgaatgccattaccttggcctgtaatcagaaaactaaccgtgagccggtgatgacgctgagtgaaggtgaagtccaggaagtactggacgcgttggtgaaaaaacattttttacgtacgcaaagtgctgttggcaaccgggtggtgaaatatgagcagcgtttctgcaattctgaatttggcaggctgaaactcagcgctgccgagttggcgctggtcgccaccttactgctgcgcggcgctcagacgccgggcgaattgcgcacacgtgccgcgcggctgcatgacttccgtgacgttgccgaagtagagcaggtgctacagcaattggccgagcgggaagacgggccgtttgtccgtcgcctggcgcgtgaaccgggcaagcgcgaaagccgctttgtacatctgttcggcgctgaagcgctaccggctgccgccgcggccgaagatggacaggaggagatgttattaatccagcgcgtcgccgtgctggaacagcaggtagcggcgctgacgcagcaactgcagcaactgatggcggaggggcagcatgactaa

SEQ ID NO: 455743 - DNA, 213 bp, Serratia marcescens
atgttgaaacgtgagcaagatctcaacataaacttcgtaatcaaagctctccgtcctcacgccgggatcgtgatagatacgcattacgtgtataatgacataattattctgccctttatgcggccagttaatactaactggttgttagttaagatatttaaggtgattacaacatgggattcaaatgcggtatcgtcggcctgccaaacgtag

SEQ ID NO: 455744 - DNA, 468 bp, Serratia marcescens
atggctgataatatcgtgaaagacgttgctggcaccgtaggtgatctggtcgattctaccgttgacagcaccaccggcgctatcggcggtatcgttgatgctgtaacgtcaggcaaaggcggtctgtggaatacgatcagcagcgtagccgataccgttggcgatttcctgggcaacatagcaggctctctgctgggcctggtgggtgatgtcgccggcaccgtgggggatttggccggcaatgtgaccgatttggtcgatggcatactggataaaatcagcgacctgggcggcgacgtcggcaaagttgtcgatcatgtcaccgacggcgcaaccgatgcgactgacgcgctgatctccgcactggaacagactggtggcgatgttgccgctgctgctaccccagccgctgtagaagttaacggcgtgactgacgctgcagacgccgccgtacaccacgcagcgtaa

SEQ ID NO: 455745 - DNA, 417 bp, Serratia marcescens
atgaaacggagcttgccgctattgatggcggtgctgatgggcgcagcgtctgcggcgtcgggtgcggctttcgatttagaataccacccaccggaagccgccgatcagaaaccggccaatgcgtcgctgcctctccgttcggagccgcggcatcagatatggaatgcggagaaactggcgcaggacaatcagcgagcggaaagccgggaacaggcggaggcgttggcggattaccagcggcggcggcagcgcgagcttctttggcaggaacagcgtggtaggcgccatccgaacagtacgcggccggcagccagagactatccggtcacctgcatgccgccgggggatcgcggcagtctgaagtgggatgatgaaagacgcgaacagagcctgtgcgggcgcatcagctgggattaa

SEQ ID NO: 455746 - DNA, 627 bp, Serratia marcescens
atgttaggaaccgctcaagtcatcgcttatgttgcggcattgggtctggccgccgccgtgccggggccgggcatgaccgcgctggtcgcccgcagcgtcagtggcggcgctgtgacgggttttaccatgttgaccgggttgatactcggggatttaatctatctttctactgcggtatttggtctggcggttgtgatgcatacctacacttcactttttatcctgataaactgggctgccgcttgctatctgctatttctcgcctggcagttttggtgctatcaacctcagatggcggctattgatcagccggccacccgtcgtgagctaacctccgcatggttgtccgggttgacaataacgcttgggaaccccaaaaccatcgcattttatctggctattctgccgctggtgatctctttggatcgcgtaaccctgcaggtttgggggatgatgctggtgccgctcaccctgttggttctattggctgtcggcggcatctttattctgacggcaataaaaatacgccgtttcctggccagtgcgtcgtcacagcgcatactctttcgcaccacgggtatcattatggcgttggcggcggttggtatgggagtgaaatctttgtag

SEQ ID NO: 455747 - DNA, 489 bp, Serratia marcescens
atgaaaaatacaaaatcataccaatactccgcagcggttctgctactgttgttctccagctcatcccctgctttggctgacaaagggaagcgcgtgatgatacctgatgtaatcggacaactggttgagcaacagcaagacagattatgcatcacggaagactcccgcggatctagttcacgtgcaatggccaagtgcgccgacctgttgctggcagactcacaattgcggttggagcaccgagtggccacagtcaacaattatttggttgtttacgatcgggaaacgaaaggctatgaagacaacgggaaggagtacctggcagcgttcaataaatatttggcaacgtggcgtgagtatgtcagcgccaaatgcggttttctgtattttgaattcaaggatcctggcaaatatatagaaacgcatacctgccaggcagaggaaaactacctgctggaaacctcactgcgccgctttggctcaagttag

SEQ ID NO: 455748 - DNA, 297 bp, Serratia marcescens
atgggtcgttcatcatcacgccaatcacgcagccgtctgggacgccttcgcagcgcgatgcaggcgcaggcgcagtattggaaaatgtacgccgtcatgaaactgcgccgcctgcgcattccgacgccgttggtgctgctggccggcgccgtcatgagcttttttgtgctgggagtgatgatggtcagcgtcgtggcaattgatatcatcaccacgctgtttttactgtgcagaaaagtgctgggagtgggccgccatcagcgaggtaaacgcaccatgcccgccggcagccgctaa

SEQ ID NO: 455749 - DNA, 426 bp, Serratia marcescens
atgataactggactgaatcatctaactcttgccgttcgcgatgtcgaacgcagctttcgcttttatgtgcatacgctggggctaaaacccctggcacgctggcgacaaggggcctacctgaccgccggcgatctgtggctctgcctgtcactggacaacgcaacatccccctcagcggattacacccattatgccttcagcgtcccgcaggcagattttgcatcccgcgtcgcgcgtttacgccaggctgacgttcacgaatggaaaagtaaccgcagcgaaggcgagtcgttctattttctcgatcctgacggccaccggctggagctgcatgccggtgatctggccagccgtctagcggcctgtcggcggcatccctatcaggatatgacgttttttgaggatggtgagaaggctgatggttaa

SEQ ID NO: 455750 - DNA, 279 bp, Serratia marcescens
atgtttgatgcaggattttcttcgtcgctgctctcgctggggataacgctggtcgcgctgctgctgggattgtgggtgtggtttctggtaaaccgcgccagcgtgcgggccaacgagcagatccgtttattgcaggaaatcgccgagcagcaacagcaacaaacggcgttgctgaagcggatagcgcgccagtcgcgcggtgaaaccttgtctaccgcaggcgacgatgacgatatcgagccggcgatggcgtttaaggatgttatccccgagcgctaa

SEQ ID NO: 455751 - DNA, 1056 bp, Serratia marcescens
atgacggcgcacaatgttgctatcgtgattgaaaacatcgcgggaaaaggcggaaccgaacgcgtcgccagcggcctggctaacgcactggccgacagctacggcatgcgggtcacgctgttctctctcggcggcgaacgggcgtttttcccgttattgccgacggtgacgctgcgtctgatgggcggccggacgctctgttggccgtggcggctggcgtgggcgctgcgccgtgggcgctacgacaccatcattatcgtctcaatggggcggttatcggtggtgctgacgccgtatctgcgtttgctgtgccccgccagccggctgctcctcagcgaacacgtcagttttcagcagtatccgtggccgatgcgctggctgaaactgctgatttatggtctgagcgatcgggtgattttactgacgcaccaggatcggacgcggattggccgctggattcggcgggagaaatgtctggtgatcgaaaacgtttcgccgtttgcgccgtcgccgcccgacggcagtcagcggcgcaacgtcgcgctggccatcggccggcttaccgaacagaaaggctttgatcggctgattgacgcctggcggcagatcgcccggcaagcgccgtcctggcaactgtggatcgtcggcgacggtccggcgcggccggcgctgcagcggcagattgcgcaggcggggctggagcgccggatcatcttgctgccggcgacgcaggacgtggcgcactattaccgtcaggccagcctgtatctgatgacgtcgcgttatgagggactgccgatggtgctgatagaagcgcagagctttggcctgccgttggtggcttacgactgtcagaccgggccggcggaactgatcgtgtccggcgttaacggttatctggtgccggacggcgacggctcgcagttctgtgagcgggtactggcgctgatcgaggataacgcgctgcggcagcgctttgcgcaggcgtcatggcggcaggcgcagcgttttacgccggaacgtatttaccctttgtggcaacggattatcacgtga

SEQ ID NO: 455752 - DNA, 849 bp, Serratia marcescens
atgcttaatcgtttattgaaaggaatcgttcggcgtctgcccgatgctttgcatcatcaggtgaagtatgcgttgtattttaggcggtttccgcacctgaattgtccgagcggctataacgagaagctgatgagacgcaagatttatccgcgcggcatttacaccatgctgtcggataaatacaaagtgcgtgaatttatcgccgggctgtggggcgaggactatctgattgaactgtacgcgcacggtacggaactgaattacgacgtctttcgccgcctgccgcgccagttcgtgctcaaggccaaccacggcagcggctataaccggctggtgttcgacaaagagcaggtcagctacgccgagttatacgatcaatctcagcgctggatgcacgccaatttttatcagcaaagccgtgagcgccactaccgtgatattaccccctgcatcatggttgagcgattgctgctggaaaacggcgaagtgccgaacgacctcaaatttcactgcttcaaccgcgatggcgcgatccgcatttttatccaggtggattatcaacgcttcggtacgcaccggcgggatattttcgatgagcactggaaccggactgaaatacgcctggcgttgcccaatgccgaccaacctgccgcagcgccgtcgcagctggcggagatgctgcgcctggcgcgactgacggtgcagcatttttcctacctgcgggtcgatttttatcaggtgggcgaacggatctatttcggtgaactgacgtttacgcccggcgcgggtatggcccgcctgatgcccgagcgcgtggagcaggaatggggcagttattttaccgactaa

SEQ ID NO: 455753 - DNA, 1287 bp, Serratia marcescens
atgaaggcgattttgcacaatgcgttctggctgatgctggagcggatatcgctcagcctgtcgggtgtgttcgtctctgtctatgtggcgcgttatctggggccggcgcagttcggcgtgctgaactatctgctggcgaccgtagctgtcgtggtgccgctggcgcagttgggcgccgacagcgtgattttcaaccgcatcgcccgtcgccaggtcagcggcgtccggctgatgatggcatccgtacgtctgcggcggcgggtgtttgtagggctggcgctgccgctgtggctctggagctgttatcgccatccgacaccgcaaacctggatgagcgtgctgctgttggccagcgcctatttttccatacaggatgtatacaaaatttactacgatgcccggctgcaagcgaaacgcaatgcgttgatcaacaacctggcgttggcgctggcgattgcgctgcggctagtgctgattggcgctgcgctgccgctggcgtggtttgccgtgccgtatctgatcgccagcgccttgccttatctgacgcgccggtggctgtttcgccgtgaatcaccgtcgccggcgccatgcagcgcgcgcgcggtgcggcgctatgaacgccatctactgcgcgtcggtctgccactggccgccgccagtctgtcgatcgtcatctatacccgcatcgatcaaatcatgctcggctatctgctcgggacacaggcggtgggctggtacagtgcggccaccaccctggctcagagctggatctttattccgctggcgctggtgacgtcgctgatgccgggaattgcccgctgtgtagtcggcccggaacgggagtaccgcatccgtctgctgtgtctgctggcgctgctggcgtctctgccggcgttgctgatactgggcggctatgccgcaccgctggtgacgcggctgtacggtgacgcttttcagccggcagccgcggtcttggcgatatgcaccctgaccgcgctgttttcggtactgggaacggtcgcctaccgcagcatggtgctgcaggccggctatcgttttattgcgctgaagatgccgctggtggcggtggccaatgcgctgctgaacgccatgctgatcccgcgctacgggttgtccggcgcggcgtggtcgacgttgctggccgagtttctctccctgtttgtgctgaatgcatttttccgcagcggacagatcgtccgtctgcaactgacctgttattacgctctgccacgtttaatccgtacgctaaggaggcggcatgcttaa

SEQ ID NO: 455754 - DNA, 2184 bp, Serratia marcescens
atgatacagaatagtgcgcaacctgccgcggtggtcgatacggaggagaaactggagtgggatcgcctgctgggggcgttgtgggataaccgctggcgcctggtgttggcgaccgtactgtcgacgctgctgggggggggatacgcgttgctggcgacgcctgtctatgaggcaacggcgatggtgcaggtggagcagccaatgaccggcgcgtcgctattgcgtcagtcgctggataacgtcggcgaacagttttccgcgacacaggatgaaattgcgttggtcaactcacgttacgtgctgggaaaaaccgtggacactcagggattgacggtgcgcgtcagcgcagaggcttttccgctggtgggccaaggcattgcgcgcttgctcggcaaaccggccccgcagctgacgatcgctgaactggcggtgccggcggagatgctgggggaacccctaaccttaagcgtgcgcgagtctgggcgctttacgttaagtctggaggggcggacgctgctgagcgggcgggtgggcgagcggctgcagaacggcgcatggcgcctgcaggtgacggcgctgtccgccgcgccgggtgcaaccttcagcgtggtaaagctggcgcgtcaacaggcgattgaggatctgcgccgtcatttgaacatcgccctggcgggcaaagagagcggcattatgagcttcagactggagagcgaagatccgcagcgtgccaggcgggttctgcagagcattaccgaaaattacctgcagcagaatgtcgatcgtaaaaccgaagaggcccagcgcatgctggcttttctggcgcatcaattgccgcagactctgtcttcgctgaatcaggcggaaaatcgcttgaatctgttccgccagcagaatgagtcggtggatctgtcgctggaggccaaatcggtgctcgacacgctggtgcagctggaggcacagcttaatgaactgaccttcagggagtcggagatatccaaactgtatacccgcgcacacccggcgtaccgcgcgctgttggaaaagcgcgccacgctggagcaggagaaagtgcggttgggcaaacaggtgaagaacctgccgaaaacccagcaggaggtgctgcgcctgacgcgtgatgtacaggtcgaccagcaggtgtacatgcaactgatgaacaaacagcaggagctgaacatcagcaaggcgggcacggtggggaacatccgcattatcgatgcggcggagacggcgattaagccggtaaaaccgcagaaaatgctgatcgttatcctggcgttattgagcggcggaacggttgccgccgcagtgattttattacgcaatgcctttcaccggggcattgatgacagcggcggactggagcagcgcggcatcaacgtgtatgccacggtgcccctgtcgctatggcagacgaagcgcaaccgcagtcagcagctgctgctgacgcggggcggcgaacggctgccgatcctggcgctggaacagcctgaagacctggccgttgaagcattccgcagtctgcgcaccagtctacattttgctatgacggaggcgagcaacaatattctgatggtgtccggcgccagcccggccagcgggaaaagtttcaccagtattaatctggcggcggtattggcccaggccggacagcaggtattgctgatcgacggcgatatgcgcaagggatttctgcaccgttggctgagcaatgatgcgcaacgggggctatctgatgtgctggtcggtcgcctggagccgagcctgtcggtgcgcaccacgacggtgaccaatctggagtttgttccacgcgggcaggtgccgccgaatccttccgaactgttgatgcatccgcgctttacggagtttttgcgctgggcggggcagcgctatgacatagtgctgattgatacgccgccggtgctggcggtcactgatgcggcgattatcggtcatcatgcgggaacaacgctgctggtggtgcgatttgcggtcaacagtctcaaacaggttgaagccagccggcgtcgcctggaacaaaacggcgtctgcgtcaaaggcgccatcctgaacggcgtggtgaaaaagtccgttactgacgccggctattacagtttcgcctacccaagtttccgggaagagggcgaagcgacgccaagggtctag

SEQ ID NO: 455755 - DNA, 228 bp, Serratia marcescens
atgaatattgatttgccccgcctggcgttggcgataagaacggcgtttcatctgcagtcgtacgacgtggtgtatgccatcgcggcggcagtaacgcgctggaatcggctgattggccaatggatgccgaccattttcagttttaacgatctgaacggggccgtgttgcggctgcgctacggacaaagagtaacaggcaatgcaaggaacggcgatgatacagaatag

SEQ ID NO: 455756 - DNA, 1050 bp, Serratia marcescens
atgttgtatcgactcggagtgatatttttcttggcgctgctgttgatggtgatagccagaaagatggcggtgaaatgggcgctggttgataagcctaacgcccgtaaacagcatcaagggcatgtcccgctgtgcggcggcatcgcgatatatatggcaatggtgttgttttccttctggctaccggagggcgtaccgcacatggcgatctatctgttctgcgtaacggtattgctgttgctgggcgtgtttgatgaccgttttgatcttgcggtcgcgccgcggatgacggtacagggtgcgctggcgctggtgatgatgctggcggccggcatgcaactctcatctctagggcatctgtggggcgacgggccggtgcagcttggctatggcgccctgttagtgacgccgttggcggtatggggcgctatcaatgcttacaacatggttgacggtatcgacggtcagttgggcatgctctcctgtgtgactcttaccgggctggcgacgctgtttgctttgggtgggcgtctggcagcggcatggtggtgcctgagtctgatcgtcacgctggcggcctacctgctgtttaatctcggcgcactggggcgccgcaatcaaatgtttatgggcgatgccggcagtatggtgatgggatttaccgtgctgtggctgctgctgaccgcgacgcagggccaggacgcggtgatgcgtccggtcggcgcgctgtggctgatcgccatgccgctgatggatatggcaagcgtgatgctgcggcgtattgcccggcgtcagagtccgtttcgcgccggtcgcgatcatttgcatcacattttgatgcgccgcggcctcagtacccgtcaggcattgacggtgagcggatcgctggcgttgatgctggccgcctttggcctgctcggtgagctgttgggatggcgggaaaacctgatgctggcgctatttttactgtgcgccggcggttatttcctgctggggcgtgaacctcatcacacagggatggcggccggttcgccgaccgccgatcgttaa

SEQ ID NO: 455757 - DNA, 963 bp, Serratia marcescens
atggatgagcgcaaagtagctattatcggcggttctggttttattggtacgcggttgatcaatcgtctgcgttcgcgcagcgatctctcgctgcgcattattgataaaaatccgagtgaagcttaccccgaactttatcagtacggcgatattacgcagccgcaaaccttgtgggccgcgttaagcgagtgtgatgcggtgatcaatctggcggcggagcaccgggataacgtgcagcccgatgcgctttactatcaggtgaacgtggagggcgcgcgtcacttgtgccaacaggccacggcgcttggcatccgccagataatctttacctcttcggtcgccgtatatgggtttgttcagcaggaaaccggcgaagacggcgctttcgcaccgtttaatcattacggcaggtccaaactggaggcggaatatgtctatgaagcctggcgtaaggcggatcagcgaaacaggctgaccattatccggccgacggtggtatttggcgagggcaatcgcggcaatgtttataacctgctgcgccaaatagccagcggccggtttgtcatgatcggcaacgggaataatttcaagtccatggcttatgtggaaaatattgccgctaggctggaatatgcgctcgatcaacaggcggcttatcaggtctgcaattacgtcgataaaccggatttgaccatgaatcagctggtgaccacggtgtcggcttcgctgggcaaaacaaacaagacactacgtatcccttatgtcatcgggctgtgcggtgccggcgtgttggatctgatgagtaaaatcacccggcgtcaattccccatcagtcgtgttcgcgtgcggaaattttgcgccagaacgcaattcaagagcgatgtgcgcagtgattttattgcgccggtgcccttggatgtcgccattgccaaaaccatcaggcatgagtttcgttcgcgttga

SEQ ID NO: 455758 - DNA, 894 bp, Serratia marcescens
gtggatctcgataaaagaataacgattaggaatctcaatgtattgatcccttccaggaaaagcacccgcctacgttggaaggagtatcaaatactctctctgctggttgccaactctcctgaactggtgaccagagcggaaattatagaaactatatggaaaggtacttactgctctgattcgacgataaatcagaccattaaatccattcgtcagaagatcggtgatagcgatcataccattatcagaaccattcctcgtttaggctacaagattgaaaatcgcgcaatctttaattttttaagcgatgacagccatgatgaggacgctatttttgattcagggagcttgtccgttgctgatattcaacaggaattttctgaaattgaaaagaaagagaataatactgaagagactggaataaccaccgtagatgagtttgaacggagtcaagggaaaatagcacttcaacgttctccgctgccgacgtcattgggtgaaagaaaaaagaagcggagaggctatttttctccattgattacccgcagtatcaacgttgtctcggtactgacattattggcagttatcaccaacgtttccttttatctggggagtcaggcgcgcccgtccgtcgacaagacaagccccgtgcgtgtgatgctgaccctaaaactcagtaatgccgaccatcccgaccggccatcgtcgcactcgttgctgtgtatgtatcaaagagaacggtcattgcaggcgacgattgaatgcattgatcccaaaaagggacagtttcagcaacaatatcgtgatattgaaatcaaagagagcggcgaaattcagctcactctgccggacacgctgatgagcgcatttattgctcgcgaaagagacaattag

SEQ ID NO: 455759 - DNA, 129 bp, Serratia marcescens
atgaaaaatagcgccgacttgttatcggaacggcgcgcccgttctccggttgtgccccacttcgccgtcatcgcttttcaggaacctctgccgtatgagatcgttactggctccattatccatcgttaa

SEQ ID NO: 455760 - DNA, 1083 bp, Serratia marcescens
atggcacaagtaattaacaccaataccctgtcgctgatggcgcagaacaacctgaacaaatctcagtcttctctgggcaccgcgatcgagcgtctgtcttccggtctgcgtatcaacagcgcgaaggacgatgcagccggtcaggcgatctccaaccgcttcaccgccaacatcaaaggcctgactcaggcgtctcgtaacgctaacgacggtatctctctggcgcagacgacggaaggcgcgctgaacgaagtgaacgacaacctgcagaacattcgtcgtctgaccgtgcaggcacaaaatggctccaactctgaaagcgatctgaaatccatccaggatgaaatcactcagcgtctgtctgaaatcaaccgtatctcagagcaaactgacttcaacggtgtgaaagtactgagcaaagatcagtccctgaccatccaagttggcgcgaacgacggtgaaaccatcgacatcaacctgagcaaaatcgacgcttcaaccctgggactggacactttcgacgtgaccacgaaaagcgcgcgcgcaggttccaccgtggccaatggttcaacggtcaaactctccgtagatgatggcgcaggtggtaaagttgacaaagatgtgaaaatcgacacctctggcctgaccgcagcagcgggtgaaaccaagtctctggtttccggtaaggatgcggatggcaaggcggcttatttcgtacagaccaccgatgcaaacggcgccaaaacgtataaaaccgctacaattgatgacactggcaaagtgaccgaaggtaccggtgccgttgagatcgccgatccgctggcgaccctggataaagcgctgtctcaggttgataacctgcgttcttcactgggtgcggtacagaaccgtttcgattctgtgatcaacaacctgaacagcaccgttaacaacctgtccgcttcccagtcccgtattcaggatgccgactacgcgaccgaagtgtccaacatgagccgcgccaacatcctgcagcaggcgggcacttccgtgctggcgcaggcgaaccagtcgactcagaacgtcctgtccctgctgcgttaa

SEQ ID NO: 455761 - DNA, 369 bp, Serratia marcescens
atggaacgtcaacagcaactgttatccgcatatcagcatattgccgcccttagcgcacaaatgctcgcactggcccaaaaaggcgattgggatcgtctgttggagcttgagctgacctatgtcaccgcagtagaaaaaaccgcagagtattctgacgtgatggcgtcatccatcacgctgcaggaaatgttacgccataaactgcagcagattctggataatgaaacgcagttacgcaccttattgcagcagcgtctgacagaattacaagccttaatcgcccagtcgacgcaacaaaacgccgttaacgtcacctacgggcaatttcacgatcgcgccctgctgttaggggaaccgcagaaccaataa

SEQ ID NO: 455762 - DNA, 453 bp, Serratia marcescens
atgaaaatactatccatacgggaaaatccggatattgccgaagccgccattgcctattttcaatgtcagtgggctacgccggagacgatgatgatgtatcgcgacgccattctccatgccatcgacgcagaaaaccccctgccgcagtggtatctgctgatgcaacggcaagaaattatcggctgcgcgggactcatcaccaatgattttatcagccgtggcgagctttatccctggctatgcgcgctatttattgaagaacagcatcgtggccaaggctacgccacccgactgattcagcatatcgcagcacataccaaggcgctggggttcaaccaattgcatctttgcaccgatctggtcgggttttacgaaaagcagcacttcattgccaacggggtgggttatcatccatggggagaaagttcgcgtgtttatacgctgaaattataa

SEQ ID NO: 455763 - DNA, 705 bp, Serratia marcescens
atgtctgataacagcagaccgctcgcctggcagccgtggcagcttaacgatttagcgacaccgacgccgccggcggaggagataacgcgggaaagcgacgcgccggagacggaaccggttgatgaggcggaaaacgagcggcgacatctggcagcgctgcgcctgcaggcgcagcagcaaggccagcagcagggccatgccgaaggccggcagcaagggtaccaggaagggtttcagcagggccttgaggaaggacgccggcaaggtattgaacagagcgaacggcaacagcagccgctgaccgaacagtggcaaaagatggtcggcgaattccagcagacgctggatgcgctggacagcgtgatcgccgcgcgcctgatgcagctggcgctcaccgccgccaagcaggtgctcggccagccgccggtctgcgacggcaccgccctgctggcgcagatccagcaactgattcagcaagagccgatgttcagcggcaaaccgcaactgcgcgtgcaccccgatgactatccgcgcgtggagcagcaactcggcgtcacgctgagcctgcacggctggcgtctgctggccgacggcgaactgcatcccggcggctgcaaggtcagcgccgaagaaggcgacctcgacgccagcctggctacccgctggcatgaaatctgccgcctggcggcgccgggggagatatga

SEQ ID NO: 455764 - DNA, 1236 bp, Serratia marcescens
atgaacctcactcttttgtccggccttgcgccgactggcgacgccgccaccgacggtcttgcaccgatggcggataacgatgcgctgtcatcagcgtttgcacagctgctcagcgagcgttttcgccccgtcgggcgaggtgcggacgtgccgcaactgccgcaattgtcgcaattgtcgcaattgtcgcaactgccgcagtctctgactgccgacgccgagccggtgccaagcggttattcgctcagccggctgctaagcaccccggaactgttcgaaaaactggcgaaccgggtcgaacgcacgccagccgacgcgaaagtgccggatgggaatgatgatacggcgaaagccgcgttcggcaacgggtggcacaccccggacacgccggatgccgccgccctgcagacactgctggcgatgctcccggcaaacacggcgatgccgccggacgataagcctgcgccgccgttgacggaaaaaaccgataccggcgcgaaaccggcggcggccgcgtcattactcggtaccttgacccgcgacgccgtcccgtccaccgagccttcggcaacgtcagcgccgccgctgcaggcgccgacgctgccaaacggtgaaatggccgccgtggcgccgccggctaacaataccgatcgctttaccgttgagcgcacgccgctgaccgccgatagcgcatcaacgccgacgccgcagcatgccatgacgccggtcgcctccgcgtcgctgcccacaacgccgcagcccaccgccgcgctaacggccgcgccgccgcttaacgcccccctcggcagccctgagtggcagcaggcgttaagccagcaagtgctgatgttccaccgcagcggccagcacagcgccgaactgcgcctgcatccccaggaactggggtcactgcagattaccctgaagctggacgatcagcaggcgcagctgcacatcacctcggcgcacggccaggtacgcgctgcggcggaagcggccataccgcatctgcgccatgcgctggcggaaagcggcatcaatctgggacaaagcagcgtgggcggcgacgcatcgccgcaacaatcacaacagcagcaggcttcgcaagatcatcaccagccgtcatcctaccgcgagcagcacgacggcgcggagctgccggcagaaacgcttatcgctccgccagccctgcaggcgctggctcgggcggttgatggcgtcgatatcttcgcctga

SEQ ID NO: 455765 - DNA, 966 bp, Serratia marcescens
atgcgtatgagcaccagcatgatgtatcaacaaaatatgcagtcgctgaccgaccggcagtcgctatggatgacgtccggtcagcatttgtccagcggcacccgggtgttgacgccgtccgacgatccgctggcggcttcgcaggcggtgatgctgacgcaggcccagtcggaaaacagccagtatgcgctggcgcgtcagtttgctcagcaaaacctcaccatgtcggagaaggtggtcgccagcgcgggcgagagcatcaaggatataaaaagcctgttggtcgaggccggcaacggcgtactgagcgacaacgaccgcgcttcgctggccacccagttacaggggctgaaagcgcagttgctggggcaggcgaacagcgccgacggcaacggccgctatatgtttggcggtttcaaggacgaccagccgccgtttgtccaacaggacgacggcaaggtggtctatcagggcagcagccgggcgattgaacagaaggtcgacgccaaccgcaccatgaccgtcggctataccggtgacgccatttttatgtcgctgaccagtaatccgaaaccggagccggacggcagcgcgccggtgagcaacgtgttcgacagtatcgatctggcgctgaatgcgctcaagacgccgcagcaggatgccgacgacgcgacgcgtcagcagatacaggcggatttggacaaggcgcagcgcggcttggataactcttacaacaacgtccaggcgtatatttccaccatgggcacccaaatgcaggaagttgataccctggataatatcggaaaagtgcgcgatatgagcaaccaggcgcagatgagcgcgctggttgacgtggacgtcgtcgaggctatctcgtcttatttccagcagcaggccgcgttgcaggcctcttacaaaaccttcagcgatatgcagggcatgtcgctgtttcagatgaatcgttaa

SEQ ID NO: 455766 - DNA, 651 bp, Serratia marcescens
ttgcgattattcttcatcttgctggcgctgctgccggctctgccggcctacgccgacgacctcgccagccagatcgaccattttattcaggcgcaatttgccggcagcccggtgacggtcaacgtcaaggtgcgcacgccgcaggcgcaatggcccgcctgcgctgcgccgcagctggcgctgacgcaaagcgcccgcctttggggcgccgtcaccctgtctgtccgctgcggcgacgagcgtcgctttattcagacgcaggttgaagcgaccggccgctatctggcggccgcacgtgcgatccgcgccggccatacgctaacgccgtcagacgtgaaaaccgtccgcggacggctggatacgctgccgccgcgtgcactcaacgacgcgcgcaacgccctcggcgccgtcagcctgcgcaatatcggccgcggtcagccgttaaccgctccgatgctacgccgcccctggcgggtgaaagccggtcagccagtgcaagttcgggttcagggcgaagggtttgcgatcagcggcaacggcaaggcgatgaacaacgccgccaccgatgaaagcgttcgggtgcgtatgtcttccggacggattgtcagcggccaggtcgacgaagacggcagcattcgcattacgctgtaa

SEQ ID NO: 455767 - DNA, 312 bp, Serratia marcescens
atgagtatcgatcgcacccaacggctgcaggccattaccgccgtgcagccgcgcgacaccacggcggaaaaaccgcagaaagcgcgtaaaaatccccagccggaacacagccagaacggtacgcaggtcagactcagcgaggcacaggcacagctgatgcagcccggcagccaggatatagacatgaaccgggttgaggcaatcaaacaggcgattcgcaacggcgatctcaccatggataccggcaagatcgccgacgcactcctgcaggaaatgcaaaacgacagcccgttgacatccggaccacgctga

SEQ ID NO: 455768 - DNA, 435 bp, Serratia marcescens
atggaaagtctgacacggcatctggaaaaactcctggacacgctgagcgcgctggaaagcgtactggcggaagaacacgccctgttgtgcgccagccagttgccgggacctgcgctgcagcgggtcaccgatgccaaaagccaactgctggcgaccgtcaatcatctggaacagcagcggcagcagctggagaacgacagcggcccgcaagcgccctatgccggccacgacgcgctggcagcgcactggcggcatgtgcagcagcaaagccagcaattacgtgagaaaaatcagcataacggcctgctgctcagtcgtcatatcgaccacaacgctcaggcactggcggtgctgaacaaacagaataaaaccctgtacgggccggatgggcagtcgcgcggcggcagcctgctggggcgcaaaatcggcgtttaa

SEQ ID NO: 455769 - DNA, 123 bp, Serratia marcescens
atgacagatatctacctgtccaaaacgtttcaggcttttgccgcgcgtgaacgcatcagcgacgcctccgtgttcaaagccgccagatcaatacccttggtggggatatttcaagcggtttaa

SEQ ID NO: 455770 - DNA, 405 bp, Serratia marcescens
atgaggcgtctgtggccgtgcctgctgctgcttggcgcttcaagcgtacaggcggtttctggctcctggacggcggacgcgctgggggcgacgctgagccacggcggcatcagcgcgcagtcgtccgcgttgcggccgccgaatgttttgccgagcgataaggcgcgcatcgtcagcgtcagctggcgttatctgctgacatcgccgccgccggccggtttacaggtgcagctgtgtatccctgggcgttgcataccgctggcgggtgccagcggcacgacgcgggcattgcagggggaagcggcgtccagcgagctgcgtttcagctatttcgtacagacgcgcggcgcgttattcccgccgctgcgggtgctcagcaatcaggtgatcgtcaactaccagtaa

SEQ ID NO: 455771 - DNA, 1050 bp, Serratia marcescens
atgagtaaaatcagagtgttaagtgtagatgactccgccctgatgcggcagttgatgtgtgaaatcgtcaatagccatgaggatatggaaatggtggcgaccgcgccggatccgctggtggcgcgcgatctcatcaaaaaatttaatccgcaggtgctgacgttggacgtcgaaatgccgcgcatggacggactggaatttctggaaaagctgatgcgtctgcggccgatgccggtggtgatggtgtcgtcgctgaccggcaaaggctcagaaattaccctacgggcgctggagctgggggcgattgatttcgtcaccaagccgcagttgggcatccgcgaaggcatgctggcgtatagcgagctgattgccgaaaagatccgcaccgccgcccgcgcgcgtctgccgccgcgtacgcgcgccgctgcgccgccgatactcagccatgcgccgctgctcagcagtgaaaaactgatagccatcggtgcctccaccggcggcaccgaggcgattcgtcaggtgctgcagccgctgccggccaccagtccggcgttgctgattacgcaacatatgccgccgggatttacccgttcatttgcagaacggctgaacaagctgtgcctgatcaccgtgaaagaggcggaggacggcgagcgggtgctgccggggcacgcctatatcgcgccgggggatcgccatttggaactggcgcgcagtggggccaactatcaggtgaaactgcatgacgggcccccggttaaccggcaccggccggcggtagatgtgctgtttcgttccgtggccaggtgcgccgggcgcaatgcggtcggggtgatcctgaccggtatgggaaacgacggcgctgccggtatgttggagatgcatcgcgcaggcgcctataccctggcgcaggatgaggccagctgcgtggtgttcggcatgccgcgtgaggcgatcgccgccggtggcgtcagcgaagtggtggaactggatcggatgagccagcgcatgctggcgcaaattgctggcgggcaggcgttgcgtatctga

SEQ ID NO: 455772 - DNA, 1653 bp, Serratia marcescens
gtgtttaaccgagtccgtatttctatcagtctgtatatgctgatgtgctgtttttgtctgatgcaactgatcagcaccggtttatcgttcagcgctttccgcgccgacagccgaagttttgcggcgataacgcagggcagccagcagcgcgatatgctggctaagagctggagctcgctgctgcaggcgcgaaataccctgaaccgcgccggcacccgcgcggcgctgcaaatgccgcaggagcaggtaaacgccctgatagacgacgcccggcatttacttcaggccgccgagcgggacttcgttcagtttcagacgctcgcgcccaccggcgaacgcgaacgcagcctgacggcgcgctatcagcggctgcatgccgcgctgctggaactgatcggttttctggaaagccgcaatctgcaggcgtttatcaaccagcccacgcagcacatgcagacgcagtttgaggcggaattcacgcattatctgcaacagctgagcggcgcgataaggcaggagcagcaggtgaatcagcgggtttacgccctgggcggctggatgctggcgggggcagtgctgatgttgttcgtcgtcgccggttgcgcgatctggtggcagcaaaccgtgctgctgcggccgctgaaaactatgcgccgccactttgagcgtattgccgctggcgatctggcaacgccggtcgaagtaagcggcagcaatgaaatcagcgcattattcgccgggctgcggcagatgcagcagtcgctaaccaacaccgtcggcgcggtacaggacggaacggaagccatgttgatcgggctgcaggagattgcggaggggaataacgacctctcttcccgcaccgaacagcaggcagcctcgctggaagaaaccgccgccagcatggagcagctgacctcgacggtgaagcagaatgccgacaacgcgcggcaggccacacagctggcacgcgaggcatcgaccatcgccgccaaaggcggagaactcgccggtgaggtggttgacactatgcacgcgattgccggtagctcgcagaagatcggcacgattaccggtgttatcgacgacatcgcttttcagaccaatatcctggcgctgaacgcggcggtcgaagcggcgcgcgccggcgaacaggggcgtggtttcgctgtggtggccggtgaggtgcgtaatctggcgcagcgcagcgcgcaggcggcaaaagagattaaaggattgattgacgagtcggtggcgcgggtgcggcaggggtcgacgctggtggaacattccggcgacaccatgcaagacatcgtgcggtcggtgacgcgggttaccgacattatgggggaaatcgcctccgcgtccgatgagcagagccgcggcattgaacaggtgacgcaggcggtgacgcaaatggatcaggtgacgcagcagaacgcggcgctggtggaggaggctgcctctgccgccagcgggctggaagagcaggcgatcacattagcggacgcggtgtcgatatttcgtctggctgaggttaacgccggcggaccgcccgcgatttattcacagaggcaaaaggagacgccagattgtcaaacaacatcatgcagacatgtttcacgggtaagccgcgatgaagcccttactccatag

SEQ ID NO: 455773 - DNA, 1077 bp, Serratia marcescens
atgaagcagaatcacccggtcgtcctggttcgcaaacgcaaagcgcaccataacgcacatcacggtggttcctggaagatcgcctatgccgattttatgacggcgatgatggcgttcttcctggtgatgtggctgctggccatcgccagcccgcaggagttaacgcaaatcgccgagtatttccgtacgccgctaaaagtggcgctgactggcggcaataagagcagtgccgaaagcagcccgattcccggcggcggcgaagatcccacccggcaggaagggctggtgaaaaaacagacggaggtcgagcagcaggcggaagcgcgcaggttcaacaaactgcgcgaacggctggatcagctgattgaatccgatccgcgtctcagggcgctgcggccgcacctgttgattgacctgatggatgaagggctgcgtattcagattatcgacggcaagaatcggccgatgttcaaaaccggcagtgcgcaggtggagaagcatatgcgcgatattctgcgggcgattgcgccgatcctgaatgatttgcccaataagatcagcctgtcgggtcataccgacgatctgccgtatgccaccggcgagcgttactacagtaactgggagttgtctgccgatcgcgccaatgcatcacggcgagagctgatcgccggcggactggcggaaggaaaagtactgcgcgtggtgggcatggcggccaccatgaatctgaagcagcatggggcggatgattcgatgaaccggcgaatcacgattttggtgctgaataaacaaacgcagcaggggatcgaacatgaaaacgcggaaagcaaagccctcgacgtccgccagccgctggcgctgaagaagttggcgccgcagtctgccgaatcgaccgccgattcgaatgccgaattgtcggcgctggctccgaccactgcggacggagggggacagccggcagtgacaacgccaccgaccccggcacttgcaccggcgccgacgacggcaatcccgccggctccggcggcaggcccatcgactaacacacagcgtctcacagtagaggtgatcccgtga

SEQ ID NO: 455774 - DNA, 303 bp, Serratia marcescens
atgaaaatgaaatgttttattgatgaacgtggtcattgccgcgttaaaacagaaaaagaacaccagctcatatcttcatttttagaaggagatattcaaagtagtttatatggtgtcagcgaatatatttccgcatgtgaatccatcaacaatggtcatattcctgagtggaaaggaacaggcaatgctcatactattaccatcaggcaggatggcgtcgaaatttttaacgagtacacagaagagagcttaacgattccaacaatagaaaagttcaaaagctatctcgaaaagtggaaataa

SEQ ID NO: 455775 - DNA, 195 bp, Serratia marcescens
atgagcaaagtttactgggatcttacccatttcaatatatcaatagacagtaaatataatgatataaatgagttggaaaaagacataaaaaatctttttggaagtgataatttcagtgaaattgattcattggattggtttttaataaataaaaaaaacagatttcatttttactacttagtatcccatcaataa

SEQ ID NO: 455776 - DNA, 363 bp, Serratia marcescens
atggtgacatctgacacatcattgcttcgctacaagactcttatttttgatgatctttattttttactcgatgataaactttcatatcaaggtttctatttaaataatgcgatagcccatatcccatcattgacagagccacaaaggaaaaataatagactatttttagaatatataaaaagaatgtttgaattctgtacagaggagttttatgaagcaatggatgacgaggatggaaagtgcttgcaaaaactaaataacttagaaaaagaatgtctaaaaaaccagatctctgatgaaagactgatatatatagtagagtttataaagaatgttaaaaatacattttacgatatggattaa

SEQ ID NO: 455777 - DNA, 609 bp, Serratia marcescens
atgaacgtaaaaaacactctgataaatttatcatcacataatgaaaaactaaaaaaaatgataattaaccttcccacaaagagtactaaaacagaaaaaaagacgatagaaacactgacaaaagtggcttttttcgcatatgcaaacgacgatatagacacttccatggaaatatgtgatgagttatcaaaaataaaattcaataatgattacgactattggacttggatagagtactctttagcgttaagaggtgagctagcaattaaaaaacgattagagagcaaagaggaagagtccataggaaaaataaaagaagttttaaactctggtgaagggttacataagaaaataagattgaacgttcacgacagatttatgaatggtgaaggtgtaacgcttgatgaaattgaaaaaaacactccccctccaattgagtttagttatcgactaatttacttaatgaagctaataaaaataaaaacacttggtggctcatctttttttacagcagaaaaactaacccttgaaataaaacaaaacttagagaaaatgagagaactattaacaaatgatgaagatattctgaaatcctcactcaagatataa

SEQ ID NO: 455778 - DNA, 315 bp, Serratia marcescens
gtggctaagagaataaatcccaactttgcggtacagatattgggtgctgcgctgcggctggtcgggattgtgttcacccaccatctgcaggccgttccagtggaacagggtggtctgcggctcgccgtggtgcgggcagagggttttccgggtgcggcgtcccagcgcgtcgtaacggtattcggcacgctggtagcggctgtcgccgtcgaaggtgacggcgatcaggcgctgctcggtgttgtgttttttaaatatcttctattgcttcttttatttgatttaataggaattctccataattatcagcaataa

SEQ ID NO: 455779 - DNA, 498 bp, Serratia marcescens
atgttgaacgataaaaagaatttaattctatcacttatcaataatgaaacatccgcctctgaactgattgattcatacactgaaaaatatggaaagataaatatatgcgaggaactttacaatgctcaagctgaaaaagactcagatgcagtagatctttttttatattttggcgaaataataaactgcagatacggttgtatagacttattaaactgcctacttatagaaacttggcatagaaaacacgaagaacttgtcaggttgttggcaaagtataacagcgaaacaagtattaacagtctatttgaagtatctttattaaaacttgattatttagattatgatgaagatcatgttttggttaataaatgcatcagagttctagcaaatataagaacaacagaatctattgaaaaaataaaaaaattaagtcactcagaaaaagaagcgattagaaaaagtgcaaccaaacatctacgaaggataaggatgtaa

SEQ ID NO: 455780 - DNA, 1245 bp, Serratia marcescens
atgtcagaaatcgcttttgtacgtcggcaaccctcactgtggtggggggccatgatcatttgcggcaccgtggtcggtgccgggatgtttaccttaccggtggtaatggcgggcgcatggtacggctggtcaacgctgatcctcattatcagttgggggtgtatgctgctgaccggcctgatgtttcaacgcgtcagctatcattaccctattgatgccggctatgacaccatcacccgagatctgctcggcaacgcatgggcggctgttaacggattaagcctggtttttgtgttgggcgtgctaacctatgcctatatttccgccagcggtccggtttatcaacactcgctcaaccgcgccgggattgctgtttcctccgcgggtgcaaaggttgtgctgaccctgctcgtcgccgttgtggtttggctgggaaccagtgggattgggcgactaatgacggtgttgcttattgccaagatgatgctgatggtcctcttctttggcggtttgctaacaagcgctgacgttgatctgttgtttaccgcagcggaggaggaacaaccctattggccatatgcattgggcatcctgccgttttgcctggcttcgtttggttatcatggcaatatatcaggattgatcgggtattatgccggcgaccatcagcgtgtcagaaaagcgctgtttatcggcacaggtatggcgtttatcgtttacctgttctggataacgggaacgatggggaatttgccgcgcggaaccttcccggacattatccggcaagggggggatattgaggcgcttatgcaggcattaaaccaaacccttcataccgccaacctgtcattgattctttccctgttttcccatttcgccgttatctgctcatttcttggtgtttccgccggtttggtggattacatcgccgatcggctcaatattgccaaaacgccaaccggtcgtctgaaggccgtatgtctgacgtttctgccgccgctgagcgcctccttgtggatacctgacggctttgtcggtgccattggctatgcagggttatttgcgacgctctgggcggtgattgttcctggtttgctgttttatcagttaaaagtaaaatcattacccgccaacggcttctgtttgcgcgacacggtgatgctgacgataattgcgctgtttgctattggcaatatcgtttcatggttgcttaataaactacagctgctccccgtgtttaaataa

SEQ ID NO: 455781 - DNA, 1341 bp, Serratia marcescens
atggatacgaaacgtcaattatcattggctgaaagcgtggccaggaatctgcagcccggagggctgcaggaaaatcatcagtatcatctttcccgttatcaccagacttgcaccgacaacgcttttattgcatttgacgaatcggtgttgttaacggaaaagcgcgtaacccgccctgagagccagccgctgtttgggttgccgttttcctgtaaagacaatatcaatgcccgagggtttgcgacgacggcggcgaccaaaggcctggcagattatcggccggaaaatgacgccgccatcatcgcccggttaaaggatcttggtgctgtgctgtgcggcaagaacaatatgcatgagctgtcgtttggcgtgacgtcgttgaatggcgcctggggcgcggttaaaaatcccgtgcatcctggctacatcgccggcggcagcagcggcggcagtgcggcggcggttgccgcgggtgtcagcgcctttgccgttggcaccgatacgggaggatccgctcgtataccggcggcgttatgcggcatcagcggatttcgccccagcactgggcgttatccttgcgccgggatcgtgccggtttccggcaccaaggatacgccgggattaatcgcgccgaccattgaagatattgcgctgttggatgccgcgttaatgaatgaagcgcccattgtggcggtaaagcctgttcgactcggtctgcctgccgcatttatgtggcgcgaattggacaccaaggttcgtgcagcgtgcgaggcggcggtggcgcgtctggagcgtgctggcattgagattatccacgttgacgacacggcgatgggtgagttgaatcaatccattcagttcccggttcctttttatgagttttttgtcgattttccccgttttctgttggcagaagggctcgaacagcaattcaacggcatacttgaacagataagcgatcgggcggtcggccagattttgcagacgcagatccggcaaggtcacgtgtcttgggatgactatcaggctgggatactggctgttggccaactgcgtgctgtgtggcgggaaacattcgccaaccatgagattgacgcgatgatctatccgaccgtcagctgttcggttccccgaattgccgaggctgaggacgcggtggtgtttgagaagctggtgcgcaacaccgatatggcgagcagcgtcggcgcgcccagtctgaccctgccgatcggcctgaacggtcaactgtctgtcggtctgtctctcgacgggctgcccggtgaagaccgccggcttcttggccaggcgatggcggtttccgccatcctgctgcaggactga

SEQ ID NO: 455782 - DNA, 1695 bp, Serratia marcescens
atggtacataaaaacatcaacaccgcaccaacccgcgcttttccatatattgattcgctattcgattacggtacatttctttcccgggtgaaagcccagggcgccattggacaatttaccgctccctgcaacgagcgtgtggctatcgtcggtgccggccttagcggcctggtcgccgcgcgcgagttgctaaaagccggcgtgcgtgatgtcacgctgtttgaggccgaacctaaccgtcacggtggccggctattaagtcagcgatttgatgacaatatgcccgaatacattgcggaaatgggggcgatgcgttttccgccttccgaagtgggacttttccattatctggataattttaatattgataccgcttcggtattccccgatcccggcgtcgtggacactgaaattcattttcagggcgaggcattttcctggcaggcaggttctccgccgccagcattgtttcaccgtgtggaccgtggctggaagagctttttgcaagagggggttacgctggatggccaacggctggttgcgccaatggcaatgactcaggcgttgcgcgaagggcggctggcagatgccaaagaggcatggcaacgctatatcgatgtttttggcgatagctgtttctactcatccttggtcagaattttcaccagcgacaacccaccgggcggggagccgtgggagaaacccaatgattttgcattgtttggttcgcttggcatcggttctggcgggttccagccggtgttccgggccgcatttattgaaatcatgcgcttggtcgtcaatgcgttggaagaagatcagcgcctggtgcctgccggcattgcggctctgacggatcgcatgggcgatgaagtgctcgaagaccggccattgagcgatcgcattatctatcagaaagtgacccgcatctgtcagcaggacgaggggcgttttattctcggcactgatgatggcgcttctgccgagtttgaccgggtcattgttacggtttcaacgcgcgccatgcaggtttcattaaaactgtcacagcgaaatgaatggctggggacaggcgtctcgcgcgccattaatgaaactcaccttatcggttcttcgaagctgttcctccttacgcggaccaaattctggctgcaggaaaacctgccgcgcaccatcctgaccgatactctggcgaaagggatttattgcctggactatcagcctgaaaatcccgacgggcatggcgtcgttttgatcagctatacctgggaggatgactctcacaagttagtgacgttgagtgataagcgcgctcgtctcgatcgtttggttgatgagctgcgtcagaccgccccggagtttgcgaagcatttggtaccgttgaatgacgatgcaaaatatattcaggaatacgattggttaacggatgcgaatgccatgggggcgtttaagctcaattatccgggggatgaccgttattcggaaacgctgtttttccaattccagacggcagctgatacgcagaatgatccgggcttgtatcttgccggctgtagctgttcatttaccggcggatgggccgaaggggctatccagaccgggatcaacgcagcttgcgcggtggtgcatagcctgggtggcgcattgatggcggataatccgctgcacaatatgcatcgccattaccattattaa

SEQ ID NO: 455783 - DNA, 393 bp, Serratia marcescens
atgaaccgctattttcaggaagttttagatgcgcatgtattgatccgccgctggcttggtgatgccaacaccccggcagaagtctgcgaccacttattagcgcgtttcagcccagcatattccatggtgacgccaggaggcggtcagttggattacaccacgcttacgacgttcttccgtacgcaatgcggcgcgaaagcgggattggagatcgagattgaaaacatgcagctgatcgcggagagtgccaccggggcgacggtaacctatcaggaacggcagcagttgccgggccaggatgcaacgctgcggttttccaccgtcgtttttgaattgggcgcggataatcaggtgatttggcgccatttgcatgaaactgcgctgcctttgtaa

SEQ ID NO: 455784 - DNA, 1380 bp, Serratia marcescens
atgaattatcgggtgcgtgtcgccagcgtttatctgctgggattttttattgatttggtaaatatgtttatcgccaacgtcgcctatcctgatatcggccggcagcttgatgcgccggtcagtcaactggcgtgggtgagcaacggctatattctgggattaactctggttattcctctgagtagttggttggcaaaacgcatgggctcaaagcgcctgttcatactttcgctgattatttttattatcggcacctgcggtgtggccgccgccttcaatatagaacagctgattgcctggcgtgtggtgcaggggcttggcggcgggctgttgatcccagtcggccagacgatgacctactccctgtaccgcagccatgagcgggcaaaactctcttcggtcgtgatgttggtggcgttgatggcgccggcgctgtctccggctatcggtggcgcgctggtcgacaatgtcagctggcgctgggtctttttagccagcctgcctctggccgtgatcgcattaattctcgctgcctgctggctgaagcctgatgctcagccttcagccaccgaacggctggatttcagcggccttatcatggggtgcctggcgttgaccctgatcctgttaggactgaccaatatgggcgaagctggccacctgagtcagggggcggcattgctggccgtgggtctggtgctgatgggggggtatgtgcgtgcttcattacgcaaaacgcagccgctgcttaatctgcgtctgattcaggagccgatgctgcagaccgcgatgctgatttatcagctgattcccggcatttttaccggcgttagtctggttgcgatgctgtatttgcaggatcagttggggatgcacgccacgctggtgggggcaatgatgctaccttgggcgatggccgcgtttgccgctatctccctcacaggcaaaaagttcaataaggtcggaccgcgtccgctgtttattatcggctgtctggtgcaggggattggtattggattattaccgctgattggcagcgccgatgacgtgatgttgaccgccgccgcttatgcgctgatggggttcggcggcagcctgtgcagcagcaccgcgcagagttccgcatttattcaggtaaacgatgacgaactggcggatgccagcgcgttgtggaacattaatcgccagctcagtttctgctttggcgtgacgctcatcagcctgctgctcaacgtattactcaacatgtcaggcatatcgcagacgcaggcctaccatttgtgctttgcactggcggctgtcagcgccgttattcccgttttgctctgcctgcggatcgccaatcgcagagtcattcttacgcttaatcaggagaaatga

SEQ ID NO: 455785 - DNA, 915 bp, Serratia marcescens
atgttaaatatgcagcgcctggagatatttgtcgcggtggtggaagctggcagttttaccggcgcggcgcagacgctggggctgaccaaagcggtagtgagctttaacatcaagcagcttgaggaaaagttgggggtttctctgctcacccgcagcacccggcaagtcgccgtgacggacgccggcgagcggttttatctgcgctgcctgcaactgctgcaggatgcggaaaaaatcctcgacgatgtccgcagcgatcataccggcctacgcggcttgttgcgtattaccaccaccccggaatatggcgccagagtggtggtgccggtgctttcggcattcgccgcccagcatccacagttacgtattcagcacgtttcttcatcaaaaaatgacgacctgatatccggccgttttgatgtggcgatacgcctgggtcagttggcagattcgacacaccatgcaaagctgatggactggttcgatattttacccgtcgcctcaaaagattatttaacagcgcatcatggcactcccatcacggatctgaagcaattacagagcgcacgttggatcgcccatagccgtttggccacaccgttgagttggcaggttgtgacgccggccggcgacaacgtactgttcagagccgatgctccgccgaccatcatggctgatagcgcggcttcactgctggcatttacccgcagcggcgcgggcgtagcgctgttgcccgcctggctagtgcaggaggatatcgccaacggtggtttaatccagttgctgcctgactatcgctttcccagacaaggcatctatgcgctctatcccaatacccgccacgtcgccgaaaaagtccggacattcatcgattttctgcaggaacatatcgagcaatcaaacccaaaaccataa

SEQ ID NO: 455786 - DNA, 1179 bp, Serratia marcescens
atgagttcgctgatatcagacgttataaaatcaggtatcctttcacttgatgaaaccgggttgtcacagctgctggaagagataaaacagcgtgccttaaaaggtgagtttgatgagcaaagacaggtttccccggacatcatcgaacgtctgcgtcaggcgggactattccgttccctggtgccgaaacgcttcggcggtacggaatcaacacccgctgatttttgtcggttgattgaatgtattgccgaagcagacggctcaaccggctgggttgccagcttcggcatgagcccggtctacctgtctgcgttacccctcgacacgctgtccgagctgtacaatacggataaaggcgcagacctaatctttgccggcggcattttccccccccaaccggccttaaccattgacggcggcatgagattcagcggacgctggaagtattctagcggctgtcttggcgcggatattattggcgtcggtatcgaaccgacaagcgaaggcaaaaaagatctgcccagaatcgctgttctgccccgttcggcggtgaacatcgatcgtacctggaataccgtcggcctagcaggaaccggcagtcacgatctggtcgccgaagatgcttttgtgcctgaaaactggacatttatccgcggcggtaaatctaaccttgatgagcctcttttccgctatccttcactgtccttcgctacccaggtgctggccgtagttgctattggcatcgcccggcgggccattgatgaaatcagaggtttctcagaaaaaagcacctctgtgaccggtgccccgccggcttcacaacgacctggcgcaaaaatcgaaatcgccaaagcggaagccagcctgcaatcgctcagagcttatttttatggcgcaatcgacgacgcctgggtacacgtcttacgcggcgacgcggtgccgacagataaaatcaatatgctgcggctttcctgcacgcataccgtacgcgaggtggcaacgatctgccgtaatatgcagttgctgatgggtatgtcaggcattgtcaaaaacaacgccgttgcccgatgcgtcaatgattcactggtgattacgcagcacgcctttatgggagaaatgacctatttaaatgcaggttcaatgctttgcggccaggcaccttctcccggatatttataa

SEQ ID NO: 455787 - DNA, 513 bp, Serratia marcescens
atgattgatgtgagcgaattccgcaacggcatgtccatgctcggcggtgcggtatctgtcgtcaccacggcgtatgaagacgtaaagtacggtatgacagtttcagccgtttgcagcgtgaccgactccccgccaacattgctggtctgtattaataaaaatgcctggtcgcatgattactttaaagccagcggcataatctgcgttaacgtactgtcttctgcgcataaaacattgtccggccactttgctgacaaacgtatttccatggaagagcgcttcaacgctcactcatggagtctattgaaaaccggcgcgccggcgctggacgatgccctggtgaattttgactgtgaaattagcgcggtcaacccatgcggcagccacagcgtattctttgcagagataaaagcgatacgtattggcaagagtcagacggcactcatgtactttgacagaaaatatcacgacctacccatcgtgactgaaacagcgaaggtattaacggcatag

SEQ ID NO: 455788 - DNA, 477 bp, Serratia marcescens
atggtcaagataaaaaaatcggttgagaaataccatcctgccagctgcgaatttcagaaagaaaacttccccttttattggcttgccatgacgtcgcaccgctacaaccaggcgatggaaaaaatcttaaagaagcttgagctggatttaaatcgctaccgtatattattttcgttaaaggaggaaagccctattagcatcagcgagatcgccgcgcatgcattatgtaagctgcctacagcgacgaaaattatttatcgcatgaaggagtcaggtcttgtcgatgccaggccgatggaaaccgatggccgggtgacgctggtttccttaacgcccaaaggtgatgcgctgatccatgtaattgaagaagaaacggctgccctgtttgcacaaagtttttcaggcatgagtgaaagccaaatagtgaaggtgaattcactacttaaaacgatgtatcataatttgcccgagccgtaa

SEQ ID NO: 455789 - DNA, 180 bp, Serratia marcescens
atgaaaaggaatttgtccccgttgttatggcggcaggcgctgcctgctccgctgttcgctggtttattcttgacgctctctatgccgacgttcgtgacccgcggcgtaccgctgagcaagccggatgcgttccacacctcgggcgctaccgccggcttcaatgtcaatctggaaatctga

SEQ ID NO: 455790 - DNA, 3324 bp, Serratia marcescens
atgaaaagaatgttgattaacgcaactcaacaggaagagttgcgtgttgcccttgtagacggacagcggctgtacgatttggatatcgaaagcccaggccatgagcagaaaaaagcgaacatttacaaaggcaaaatcacccgtattgaaccaagtcttgaagcagcgtttgttgactacggcgcagaacgacatggtttcctccctcttaaagaaatcgcccgcgaatacttccccaacaactattcctcccatggccgccccaacatcaaagatgtgctgcgcgaaggccaggaagtgatcgttcaggttgataaagaagagcgcggcaacaagggcgccgccctgaccacctttatcagcttggccggcagttatctggtgctgatgccgaacaacccgcgcgccggcggcatctcccgccgcattgaaggcgatgaccgcaccgaactgaaagaagcgctctcttccctgcagctgcccgacggtatgggcctgatcgtccgcaccgccggcgtcggcaaatccgccgaagcgctgcagtgggacctgtcgttccgcctcaagcactgggaagcgatcaaaaaagccgccgaaggccgccctgcgccgttcctgatccaccaggaaagtaacgttatcgtgcgcgccttccgcgattacctgcgccctgacatcggcgaaatcctgatcgataacccgaaaattctcgatctggcgaaagagcacatcgccgcgctgggccgcccggacttcagcagcaaaattaaaatgtacagcggtgaaattccgttgttcagccactaccagattgagtcgcagatcgaatccgctttccagcgtgaagtgcgccttccttccggcggttccatcgtcatcgataccaccgaagcgctgaccgcgatcgatatcaactccgcccgtgctacccgcggcggcgatatcgaagaaaccgcgttcaacaccaacctggaagcggcggatgagattgcccgccagctgcgcctgcgtgacctcggcggcctgatcgttatcgactttattgatatgacgccggtgcgccaccagcgcgaagtcgagaaccgtctgcgtgatgcggtacgtcaggatcgcgcacgcattcagatcggccgcatctcgcgcttcggcctgctggaaatgtcccgtcagcgcctcagcccgtcgctgggcgagtccagtcaccacgtctgcccgcgctgtaacggcaccggcaccgtgcgcgacaacgaatcgctggcgctgtctatcctgcgtctgattgaagaagaagcactgaaggaaaacaccaaagaggtgcacgccatcgtgccggttcaggttgcttcctacctgctgaacgaaaaacgtgaatccgtcagcgccatcgaaaaacgtcaggccggggtaaaagccgtgatcgtgccgaacgatcagatgcaaacgccgcattactcggtactgcgcgtgcgcaaaggtgaagaaacgtcaaccctgagctatctgctgccgaagctgcatgaagaagaaatggcgcagccgctggaagaaattccgacggagcgtaagcgtccggaacagccagcgctggcgtccttctccctgggcaccgacgcgccgccgccggcggcagctgaagccgcaacggcgaaaaaaccggccgccagccagtctgcagcaccggctacttctgcggcaccgggcctgctcagccgattcttcaacggtctgaaatcactgtttgccggtgaagaaccgcagcctgttgcggaagagaagccggttgaaaccgcgaaaagcggcagcggcgacaaccgccgtcaggatcgtcgtaaccagcgccgtcaaggctctggccgtaaagaacgcggtgagcgcggcgagcgtagtgaacgcggcgagcgcaatgagcgcagcgaacgtaaagaacgtggcgagggccgtgagcgcgacaaccgtgaaggtcgtgaacgcgacaaccgcgaatctcgtgacgaacaacgccgcaatcgtcgcaatgccgcgcaaaacgccccagcgaccaacgatacgcagactgatgaagccgcgaaagcgcagcgcgaagagcaacagcagcagcgccgcgaacagcgcgctgagcgtcaacgccgtcgtcaggaagagaaacgccaggcacagcaagaagcgaagcagcaagaaaaggccgccgccgcgccggtagccgaagaagataaggaagagcgccaccagcagccggcccagcgtcgtcaacgccgccagctgtcacagaaggtgcgtgtcctgtcggcggaagaagaactgcagcgcgctgcggaagaacttctggcgccaaaagcaccggcggaaaccgctgaggaagctcaggcgcctgtggcagacaacagcgttaaactgctgccggaaaccgtagccagcaacggcgaagaagaaactcaggaaaaccgtaacggtgaaaacggcatgccgcgccgctcacgtcgttcaccgcgtcatctgcgcgtgagcggccagcgtcgtcgtcgttatcgcgatgagcgttacccgagccagtcgccgatgccgctgacggctgcgtttgcctctccggaaatggcgtcaggcaaagtgtgggtgggttaccctgtcacaacaacagcgcaagcggttgaagagactgaggtgaagcgccaacctgatgccatcgtcaagcagccggcagcggaaaccgccgccagcgtcgccgcaccggcaattaccgccgttcaggaagacgtgcaggctccagccgcagcagcggtcgtcgccagcgtcgaaccgacgggagaaagcctccccgttgccactccgcagcaggaagagatcgacgcgccgcagccggcagtcgctgaagcaccggccgaagcagccggctatgttcagcctgtcgctgaaaccgcaccgtctcggcctgaagagcaatccgtacctgccgccattgagccggcagccgacgaaaccgccgctgaagaaaaagcggtagcggcagagccggccgttgaggaaacgaccattgcggcgccagctgaagcggtcgtcaatgaacctgctgcacggccggcaaacgaagagacagcggccccccctgtgacagtcatcgcatctcagccggcagagacgcgttacaagcacatcgccagcgcaccgatgaccaaagcgcctgccccggcttatcagccggaagcgccgaagcacagcgactggcagcgcccggcctttaacttcgaaggcaaaggcagcgcaggcggtcactcggcggtcaatcaggccaccgctccggccaccaagccgcaaccggttaacgactaa

SEQ ID NO: 455791 - DNA, 1017 bp, Serratia marcescens
atgagagaaagttgggtggattatgccaagggcatcggtattattttcgttgtgttcgggcatgtgaatcgcggattgtacagtgccggcatttatttttccgatgccgcctatcaactgttagacagtgtcatctacagttttcatatgccattgttctttttcctttcgggcctattcttcacgacgtccctggctcaccgcgggaaaagaaaatttatcattaataagatagataccattgtctatccctacattatctggtctctactgcaaggcagtatcgaagtactcttatcccactacaccaacaacccggccagtttttccgatattttttcgttattcgcacacccacgcgcgcaattctggttcttgtatgcgctgttcatggtgttcgtcgttgcggcattgttgtatcacaaacaatatttctcactgatattacccatcttactgctcctgtctatcggtctatacctttatcagagcgcgatcggccatgcatttcacattgattacatcacccgctttatggtgtttttcctactgggcgcgctggccatccgttactcaaaaaccattgcctcgcttggcatccccgcgacaaccctgctagccgtattatttatcgcgctggaatggctgttccatggctatctgcagcttaactacactcagaccggcctcctatcgctgctgctggccgtcgccgcgatcgcgtttatcaccagcctttctgtgcaattgagtcatctcaactggcgctggctgcagcggctcggcgagttaagtatggtcatctatctgatgcatattctggcaggcagcggcttacgcatcatcctcagtaaaggattgcatatcgatagctggctggtacaggtgattgccggcacattgttcggcctgattgccccagtcatcgcctactatgtcattaagcgtctgcatctgaatttcctgctggaacgtccgcgtatcccctcaccctcacgcgccgcaccacgccactaa

SEQ ID NO: 455792 - DNA, 1191 bp, Serratia marcescens
atgatgtttgacttgaaaaatataaacaacagggaagcgtattttctctacttgagtgctgaggggaacgtctccaagcatgcggtcatgaattttgtcaataaggatgattatatccagggatattcggttacccgccgcggttatcgaacatttagaaaggatcggatcgtggcaatgtttgctaaccaagccgaactggaggcgttcgacctggcctctacatcgcatgataacgttcagcaaacacttatcccccgtagccaactctcgcaaaacggtagcctggaaatctgctttacagggtttaataaacaggaaaaggatgagctgactgcgcttgccgcttcgtctcggcttacggtgagaagcggcgtgacggctaagctgacgtttctatgctgtggcgcgaatgcaggttggcgcaagatcgaggaggcgaatgccaaaggggcgctggtgttgagcggggaccagttccggcattttatagcaaccggggaaattccctataaatcaatagaaattgacagtagtcatgctgagaataccgcgaccgacctcgaaaaactgcaggcgctcaaggaggggatggccacaacattcaatacgctcagatctttgccacgcagccatgtcttaatcgcacaatttgttgacggatatgcggttggctggcgctttgccgtgaaatccgtgtttaaggaagcgctagatatcaagcagactacggcggtttttgacggttataagtatgaaacctggacgcaagggaatcgttactcgtttcatcgcggtgatgcgttctacagcgataaactcggctacacggactggcctgcatttttaaacctcaggcatgccgctatcttgaaggtcaggtttgagtgttttgcggggtatgaaacggttgcgatatttgatggtattttttccggcggttttgttccggaaaatatcattactgaacccaagatcttcgagcggttgcccctgcgtattgagagccagtcttacgatccgggaacgctggtgattgatgtgctgcgtccaaccccggatcggttacgggttgagcgggtggaaaccttgtctttaacgcaggatgagtttgttgcactgttgcaaacgggatgttactggaaaaaggagaaagggtgtgtgccgacaagaatagatatcctggcgtag

SEQ ID NO: 455793 - DNA, 246 bp, Serratia marcescens
atgaagaagatcatgttgggtttattaaccgcagcaattatcggcacatcaggctttgccagcgctgcaaaattgggtagagcccccgctgtctcggcagtcaacgtccggctggcatatatcacctcaaatgcatcctttgtttactgccattatcaggtatataatatcaaaaccggttacattcataacacctatgatagaatgtatattgccagatcgtttacagggtgtcctaagcgttaa

SEQ ID NO: 455794 - DNA, 216 bp, Serratia marcescens
atgaccaagctttactattccctatgctgcaccgttttcatcatcggcatcggcatgtctattctcagcgtagagttccccagcagcgccgatagtggcgagatgccattagcttttggtgccggcctgtatatcgcatttatcggcattatcggctttgccgtaggcctgatagcaaaatgcctctcgatgatgataagaaagagaaacagatga

SEQ ID NO: 455795 - DNA, 630 bp, Serratia marcescens
atggggtcgcgcagcgtattttacgcccggagcaggcggccagttctcaaagtagatgttctgatgcttcatgcggcggctaagcatgttcatgcggaaatggatgcaacgtatggcagtcggcgcatgtgtattgagctgcgtgaacagggtattaacgtaggcctataccgtgtccgtcagataatgaagaccctgatgctggttgcgaagtgtcccggacgtcatcgctatccacgtggtggcaaaccggctgtagtggcggctaatctcttgaatagacagtttaatccagagacattaaatacctggtggtcaggtgatatcacctatcttcgcacagctcagggctggttatatctggccattgtcatggacttatgttcaagaaaaatagtgagtcgggccttctcggacaaaccggacagcgccctgactatccgggcattacggctggcggctaataaacgacggccgacaagcccagtggtgttccatagcgctcaaggcgctcagtatgccagcgcccagttccagtcctgccagcaggaacttgatgtgacgggcagtatgagccgcaagggtaactgtctggataatgccgttacggaaaggttttccgtagactga

SEQ ID NO: 455796 - DNA, 408 bp, Serratia marcescens
atgcctgagtgtagcagttttatacgtcggattcgcacgccatgctgcacagcaacgtttcgatgcgcgctggccgtcggttgtcacgtggtgtttaaagcgcacggcgccatatggccaccgcagagctggccgcagccgatcccggtgcttgccgagatgtcgagcatcaatccggagatcatgctgccgcaggcgctggcgcagcgcggacggcaaatcgcacagcagctggcggtgtcggtgattctgggaggcggccagttctgcgccaagccccgcttaatcctcggcgtgtgcagcccgatgtttgaacagtttatcaccgtgctgggccaacaaattgaggccagcgagccacagcccatgcttaatgccgccccctggcgcattatcatcgggggctga

SEQ ID NO: 455797 - DNA, 348 bp, Serratia marcescens
atgaaaaaccaatcattagcgttattgttgctggtcggcctgaccgcctgcagccagtcgtcaacgtcgtcggaagcgtccgcgccggccgtcgctaacagcgaaaccttgtacgtcaacagccgtctgatggactgcgtgggcgttgcgccgatgaaatgcatgcaggtgcgtcagtcgccggatgcgccgtgggaactgttttacacccagatcgagggttttacatttaccccaggctatcgttataaactgcaggtgaacgtcagcaaactggagaacgtcccggcggatgcgtcctctctgcgttatgtcttggtcaagcagctggaaaaaaccaaagcataa

SEQ ID NO: 455798 - DNA, 621 bp, Serratia marcescens
atgaccgaactgcttgccgtcgtcaccctgactttacttgccgttatcagccctggcccggattttgccatggtatcgcgcaacagtctgaccggctcacgcgcctcaggcctttactgtgcactgggcatcggcctcggcgtactgattcacgtgggatacacgctgattggcgtcggcctgctgattcagcgttcgctgtggctattcaccctgctgaaatttatcggcgccgcctacctgatttaccttggcgtgcagatgtatcgtcacgcggcaacatcctccgcgcccgcgcaaacgccggcgcaccctatcggtgagtggcacgcactgaaaaccggttttctgaccaatgtgctgaatcccaaaaccactattttcatcgtcagtctgtttatgcaggtggtgaatccgcagagctcgctggcggtgcagatcggctacggactatttatctctatgacgcatatgctgtggtttagctgcgtggcgctatttttttcctccccggccatcagcacgcgcttccagcacctacgccgcgtcatcgaccgactgttcggcggactgttgatcacatttggcgcattgctggcgctaagcaatctgaaccgctga

SEQ ID NO: 455799 - DNA, 279 bp, Serratia marcescens
ttgaccgaagtggctaataccgtatttacctcgcagtcgggggccgccgacatattcgcgagctggaagaagagctgggtatcgaaataccgctggcatcacgcaatgctgatatcggaaaaccatccgctgacgctggagcagttaagcgcccagccgctgattgcctaccggcaggggattaccggacgttcacgtctggatgcggcgtttaaggcggcgggtctgacgccggacattgccctcagcgcacaggattccgatgagattaaaacctag

SEQ ID NO: 455800 - DNA, 2277 bp, Serratia marcescens
atgacaacgcatttggcacattggctgcgccggttaaaccccggtagcgtctggacggcagccggggcgcggctgaatatggacggcataccgccgcagtggccggagtgtcagccggcggaacgtctggccgctgatcagcgtggtatttttttgtttacggagtcaccttttcccaggattacggatatgacggaatgtgaggttttagcattgttggatcaattcaccctggatgttaccgctaaagcgagggtaaagcagctcgatccggtattaggacgtgatgccgagctacggcagatcgttgatgtgctgtcccgccgccgtaaaaacaacccgattctggtcggcgagcccggcgtggggaaaagcgcgttggtggaggggttggcgcaacgtattgtggaaggcagtgtgccggacggcctgaaaaacatctgcatccgcaggttggatttggcgctgctacaggcgggactcagcgaccgcagcgcgttcgcgccgcggctgctgcaggtgattaatgcgatacgtcattcgccgacgccgatactgttgttgatcgacgaggtgcatacgccggtgggcgtcggagagtcggccggcagtgaggaactgctcaagatcttgaagccggcgctgatgctgggagagttgcgtctgattattacggccaaccggcaggagtatcagcagcatgtggaatgggatacggcactggggcactgcctgcaaagtgtcgatgtcgacgaaccggatgatgataccgcctgcctgatgctgcggggactcaaggaacgttatgcccagcatcacggcgtctatattcaggactcggcggtaaaggcggcggtgatctggtcacgccgttatctgtgcggtcgtcagttgccggataaggcggtggacctgctggatatcgccagcgccagggtgcggatgagtctggaggtcgaaccggctcctctgacgcagatccgcgccgagctggcggcgctggcgatggagcaacaggcgattgagcaggatgaggaacagaacgatgaggtcgatccggcgcggctggcggatatcagcgaccgctgcctgtggctgcagcagcggctggtgaggctgggactgcagctgcagcgggaacggtcgctggcgcggcagctgctggcggcccgccaggcggagcgcgcggatgaatgcgcggcgctgcaacagcgcttgacggcgctgcaggggtccgcccccctgctgtcgctggatgtggacgcgcgcatggtggcgacggtgatcgccgattggcaaggtattgcgttaagcagcctgttaaaagatgaacgcagctgtttgctgcagctggagcaacgcctgacggaacgggtgatcggccaggagttggcgatgggcgcgctggcgcagcgtttatataccgcctcaacgcaactgcgactggataatggcccgctgggcgcatttttactgctggggccggccggcgtgggcaaggcggccagcgcacgggcgttggccgagaatctgtttgcggatgacgcctcgctgctgacgattaatctggcggagtatcgggacgcgtgcgcggtgaagcatctgattggctggcacgccgaacaggcggcggaagaaggaacgttaaccgaagcgattcgcctgcggccctatagcgtcgtgctgctgaaggacgttgaaaaagcccacggcgaagtgctgcaactgctcagccgggtgtttgagcacggttcgctgcgcgacggccaggggcgagtgattgattttcatcatacggtgtttttgatgagcagcgatctgggctgcgaacaactgctgcagcggatgcaaatgcagcctgatgtgacggatgccgagctaaatgccgcgctgcagccggtgctgcgcgcacattttcagccggcactgctggcccatatgcaaacgctgatttatcgtccgctggacgccgatgccctgcggcggattgtcgccggccgactgcagcaggttatgcagcagctgcggcagcgttacgacttgcgctgcgttgtcgacgacagcctgagcgatatgctggtgtcggccggattgcaggcggatggcggcgtgcgccatatcgacagcgtgctgaatcagcagatcctgccgacggtttcctgccggctgttacagcggctggcggagcatcgcaagccgcagctgctgcagctggcttatgatgcacgcctgggcgtggtgctgaactttgacgtcggcgcaggttatcagtgttaa

SEQ ID NO: 455801 - DNA, 744 bp, Serratia marcescens
atgaatacctttacgcacctggccgatgcttacccggaatgctggctggggttactgatgctgtcgggctgggccgtcggcagcatgatgaaccgggtggcgctgcagctgccgcagatactggaacaccgctggcggcaagccgcgctgcggcagttgaatttacctgcggcggatgaagaggcggcgttatggcggtgtttgggcaaacgcaggcccggaagcgcctgctcaccggcggtgccggcatatgcgctgttatttatgctggcgggaatgcggctgccgccgggggggccgctattggcgctgttgctgttttgctcactagtactgacgctggcgatcattgatttcaatactatgctgttgccggatgtgctgacgctgcccctgctgtggctgggcctgttgtgcaatctgaacggctggtttgcaccgctggagcaggcggttatcggcgcggctgccggctatgcggcgctgtggttgttattttggctgttcaagctgggcagcggtaaagaagggctgggctacggtgactttaaactgacggcggcattgggcgcctggtgcggctggcaaagcctgccaaacctgctgttgctggcggcaggcggcggcctggcgtatatgctgctgcggcgtggccgcgtacagcacgcgctgccgtttggtccctggctggggttgagcggcgtaataaatctgctgttttttactgcgccaataaattattaa

SEQ ID NO: 455802 - DNA, 543 bp, Serratia marcescens
gtgttgcgtacaaatttgactaaaaccgctttgcttttgctgcccgtcatggccttcgccctgacagggtgcggcctgacccagagcgtcgctgacggcgccaaatcgaccgtgagatcggttttttataaaaaaataaaggtattgcatctggattttgtggcccgggaaatgttgaacaccgatgcgcgcgagagcagtcccgcatcacagccgctggtgattcgcatttatcagctgcgggatcgtaaggcctttgacacgctggtctatcagcaactgctgaaggaggatgaaacgctgctgaccggcgatctgcttgccagtcgtgaggtggtgctcaaaccgggcaatgccgccattctggatatgccgatggatgccgaggcgaaatttgtggccgccgtcgggctgtttcgccagccggatatggagaaaaacagctggcggctggtggtggcgcgcgaagcgttaaacccggatacggcacgcgttttagcggcggatggcaacagcctgacgctgttgccggagcgggagtaa

SEQ ID NO: 455803 - DNA, 363 bp, Serratia marcescens
atggacaaaaaatttttcaagtacgctgcgattggcgtactaaacaccgcaattcactgggcggtttttttcagtatgttaaaattcataggggctgatcaaactcttagcaattttgttgcattttgttgtgctgttaccttttctttttttgcaaatacggcattaacatttaaatcaacagtaaccacaaaacgttatgttatgtatgtcggatttatgggatttctgagcatacttgcgggcatgatcgctgatatgcgtgcaatgaacccgtggataacgcttatttctttttccgcaatcagtcttatttgcggatatatttattctaaacacatagtattcaaggataagaagtga

SEQ ID NO: 455804 - DNA, 942 bp, Serratia marcescens
gtgaaaatttctcttgttgttcctgttttcaatgaagaggacgccatacctattttctatacaagtgtcagggagtctaaagaactttctgattacgacatagaaattatctttatcaatgatggcagtaaagactcaacagaatcactcatcagagctttatctgtttcagatcctcttgtaaaagcgattagcttcacacgcaacttcggcaaagagcctgcattatttgcagggctagaggcttcatctggtgatgcagtcataccaatcgacgttgacttgcaagaccccatttgtgttatccctcagctgattgataaatggcagcaaggtgctgacatggtattggctaagcggactgacaggtcaagtgatagcaggttaaagagaaaatctgctgaatggttctataaatttcacaacaaaatcagctcacctaaaattgaagaaaatgtgggtgattttcgattaatgtcacgccaagttgttgagaatataaaacttctccccgagagaaatcttttcatgaaagggatattaagctgggtaggaggagatattgatatagtagaatacacgcgggaagaaaggattgccggatcgacaaaatttaatggatggaaactttggaacctcgcacttgaagggattacgtcattttcaacacttccgctgcggatatggacatatattggtgtttttattgcaaccatggcgttcctttatagtttctggatgatattcgatactttggtatttgggaattctgtgcgaggatatccttcagtttttgtttccattctattttttggtggcattcaacttatcggaattggcgtgcttggcgagtacattggacgtatatatctggaaagcaaagggcgaccaagatacattgttaaaaacaagatagactttggtgaaaatgatgaaaaataa

SEQ ID NO: 455805 - DNA, 1089 bp, Serratia marcescens
atgggcttttgggactttattagctggcgttatcttagttggtcttcaagaacaccgatagaagcagcgatatttttatttataaacaagataaaaacatgggttattctaaactccttcatcatcgcagcattaacaaccgctgtcgtaatgttgtgcaggccacactccgtacgacattacttcatcgctttatcagtgttttttttaggtttcatattgatgcctaatggcgcgcttactgaaggcgcatactggatgacgggttcttttaactatttatggccagttaccttttcggccttatttcttttttttattacaaagtcaatagctggatgtaatgggtatataatacccgcctcattcttcatgttccttagttcattttcagagcaggttgctgtagttaacatcctcctgattttgattttagcatttaatctgaagagcaacaaaattcgtatcctgctgtatccgacattatgtttactctctgttctggtatatatggttacttgcccaggaaattcagtccgctacgctcaggagttaaacacatggttcccaagctatgctgaattcgatctgcttggcaaggtaatgcttggccttaacattgtttactctcaatactttaattattcaataacaacaatattattaactttagcaatcgcagcacggtgcaatcgtcatgcaatgaagatagctctgtaccttatatcattaattatttttattgtgataatgcaaaacaggtatgattttattgagagtaaattactatcatccattattcgggcggaggagttgacactaacatcgtatctgtctatgcagtctattttaagatcgttcgttttgatagccttcataagcatatcttccctgggaatgttaatgatcaatacagaaaaaagagaaagaattaactcatttttattttatgtgataagcttcgccccaaccatggtattaatgctctcacctaccatctatgcatcaaatgataggattttctttgtttcatgtattatgcaggctgcgttagctgcgcgactcattacaggaaagataaagatttaa

SEQ ID NO: 455806 - DNA, 501 bp, Serratia marcescens
atggcgagtaaattaattcgttttagcgcggaagtgcttgatagcccattgaccgtctccgaattgggcggcggtttgtcgcctcttaccgtgctggcgccagcgccgctgcaggagcctggggagccagccgcgttttcaggcccggtcgacgtggatatcatgatggcgaaggtgtctgaatcgatattcagcgtggccggcagcagcgccgcggcaatccaggggcagatcgtgttcggtcaggcgtgtaaggcgctggtgggctattttagcggcgtgcatgcgccagccgacgcgacactctttgccacgtcacacccggatataggcattcgtctctcttacatcggcgagtcaatctccccggagcaggggcagcgtttcccgctggttggcgatatgctggtgtttgaagccatgctggtatcgttaaacgatcgggtcaggccggggccggttgaggcgcggattgaattccactacggcagcgacgagtag

SEQ ID NO: 455807 - DNA, 276 bp, Serratia marcescens
atgtttcaggattctcgtccgctgccgcagaaatgggtgatcgataacgtcggccttggtctgcgcggcccagcgctgcaggcgctgacggctgccggtctggcggagcgcataattctgattgaacagggacgcattggcctggatatggcgattgacctgccgcggccgcgccgcataggttcggccaaacgggccgaactggaagcgcaaatcctggagcgggcgctgtcgccggcaactactgcggaaccggggcgccaggcagcaaactga

SEQ ID NO: 455808 - DNA, 2250 bp, Serratia marcescens
atggccgccatggctctggtgctggggatggcaccgctgctgtttttaccgcagttgccggcgcgtatgctggtttgggggatagcactggcgatggtgctctgttggcggcaaacaacatcggcgtattgtcagtatgccgcttggctgctgtgcggatttgttttggcttgtagcagtgcgcagcagcttacgcggcagatctccgcgttaagcggcaagccgttgacgctgaccgtcagcgttgttagcgtggcgttggccaaccgtgagccgggaaaggtgagattccgtattgaacaggtgaatggccgttggctgtttccggcgttgtcattcagcgccaactggaaacatgccccttggtgcgccggacaacgttggcaacttaaagcgcgtttacgcccgatacacagccggttgaatcagggcggttttgacagtcagcgttgggcgatggcgcgtcgccagccattgagtggttatgtgcagtccgccacgttgcttgatgcgcagtgcggctggcgccagcgtattgtcagcgcggtacaacgacgcacggaagggacatccaatccgggaaccttgctggcgctggcgtttggcgaacgtgctctgctcagtcagacggaacgtaacttgcttttgaaaacgggcatcgcacatttaatggcgatttccggcctgcatatttcgctggcggccatggtggcgtggtgcctgctgcggctgctgcagcttgtgttaccggctggatggattggctatcgcttgcctctgatcggttgtgtgctggcggcgttgggatatgtctggctggcgggcgctcagccgccggcggtacgcgcgctgctggcgttgacgctctggacgttgatacgtttacgggggatctgctgcacttcctggcagatttggctgtggtgtgtttgtctgattttgttgagcgatccattggcgatattgtccgacagcttttggctgtcggtactggcggtggcggcgttgatcttctggtttgaatgggcggcactgcctttgcgtttccgcatcggctggcattgggcgccgctgcgttggctgcatatccagctcgggatgaccctgttgttgatgccgatgcagtttgggctgtttcacggcgtgacctggacatcgttgccggccaatctctgggcggtaccgattgtgtcgttgctcagcgtgcccttgattttgtttgccgtgatcagcggtgctggaaccttcgtcgccggctggttatggcactgggccgatctgtcgctgacgtgggcgatgtggccgctgccgtggctggaacagggatggctgcgtgtaggcagcgcgctgttgccgttcagtgttctgggctggttaagcgtggtcggctggcgtttgcgttgctggtcgacgtccccctgcggctgtattgccgtgttgctctgttgcctgacgtggcgggagcgtcagccggattaccgctggcgtgttgatatgctggacgtagggcatggcctggcggtggtaattgagcgtcgcggtaaggcggtgatctatgataccggcgatcgctggacaagcggcagcatggccgagcgggagattctgccttatctacattggcgcggtattgaggtggaaaaaattatcatcagccacagtcatctggaccatatgggcgggttggtggctttgcaacaggctttcccgtcagcggcggtgtattccccgctgtatggtgccggccatcatgcctgcgtacaaggacgccaatggcaatggcgcgggcttaactttcgtgtgctctggccacctcagccactgaactatgtgggcaatgatgattcctgcgcgattcgcgtcgatgatggcaggttcagcctgctattaaccggcgatctggagagccgaggagagtcggcgctgctgaagcagcgggcagaattgccgtctacgttactgcaggtgccacaccacggtagtaagacctcatccacgccgccatttttgcgggcggtggcgccagctgcggcgttagcttcggcttcccgctataatcagtggcgcctgcctgctgaaaagatcatcgggcgttaccgttcctatcgtattgcgtggtatgacacttcgcgctccgggcagctgagcgtgctatttttcgacaatgattggcaaattaaaggctttcgtgagcaattaatgccccgttggtatcatcagcggtttggagaaaggggggataatgagtaa

SEQ ID NO: 455809 - DNA, 414 bp, Serratia marcescens
atgccggaaagcgacattctgtcactcttcaccggttttaaaggtgacgagaggatacgccgtgaaatcggtttcactcatgagggaatgagctccaacctgcgcggaaaggtgcagagcgccttgctgataggcgatattgtggcgattgaaacccgtccgggcgtactggcgacgatagggccattttacgctgacacggaaggctatctgagaccgcaggggcggcaggaacccaactaccgggtggatgagataataaggcgctatgaggaggttgtgaagtcttatggcggacgtcgggcgcgaccgtcagttttcccggcgcaggtagcgcggcaaaaacctgcgttggaaccggatgagctgacgaagggggtaggggttcccaggaggcggcggctggttctatga

SEQ ID NO: 455810 - DNA, 876 bp, Serratia marcescens
atggataaagtcgccgcagtaatcgtctcataccatcctgaattggataacttgagaacattaatccaagagctaaaaaaccagaacgttcctagtatagtggtagataatggctcattggctcccgacgtcgtcctccaactgcaagaaatggcaaccgtggttcgtcttgctgacaaccaagggatcgccagtgcgcaaaatatcggtattaagcaggctgagttggtttaccaggctgaattaatcgtcttttttgaccaagacagccacattgacgatcatttcatcgccggtttgctgggcgattaccaccaggtttcagcctctaacaacatcgccgcaatcggcccagtatttaccgattcccgttatggcttctattatccattaattaaagtcaatcagtttggatggcgcagcaaaattaatccgcagcagcaaaaacatccgtttgaagtcagcatgatcatctcttcaggttcgctgatcccaatgagcgtgctcagagacatcggaatgatgaatgaaacactattcattgactatgttgacactgaatggtgcttacgcgcagtggcaaaaggctataaaatctatgccgctacgtcggccagaatgtcgcatgctatcggcgatagagccatcaagcttttggcatggcatattccaatgcattcggcgtttcgccgctactaccgtttacgcaacgggttatatctttgcaaaatgccgcatatccctctactggtaaaaatcagagagaatatatttaactgcctgcatcagacgctgttggtcttgactcaaccaaataaaaaaacacacttggcaacatggtaccgtgcatttaaagatgggatctgtttaaaatga

SEQ ID NO: 455811 - DNA, 858 bp, Serratia marcescens
atgagcgtagcgaaagaaaaaaaacagatcgttgcgtctgttgttttatataaacacagcaaagaagatatcctgcctacactgcgctcgctgttagcagagagtctgattgaaacgattgtactcgtcgacaacgccggatgtgactgggctaatcagttaaacgatccgcgtatcgcttacatcaagtcggatagaaacggtggttttggtcatggacataatcaagctatggcggctttcctggatgaatgcagatattttattatctgtaaccctgatattgaatttacgccaggtacggtaaaaaccctttttgactttgcagagcgcgaacagcaccgctttttagctccgcggatcgtttatccgaatggtgaagagcagcgagtctgccgtctgttacccacgccggcacatctgttcctgcgcaggtttgtaccacagttatcgcacattctagataaatcctatgagttacaggccgctgattatagcaaaaatttctttgccccagcgatctcgggctgttttatgtttattgaatccaaactgctcaagaagattgaaggctttgacccacgttacttcatgtatcttgaggatatcgacctctgtcgcaaagtcatgcgctatgagcagccgatattctgttctgaagccacggtgacgcatggttttaccaaaggttcatataagaactttaagttaatgcgttaccatattgcttcggctattagttactttaataaatggggatggtttttcgacccagaacgccgtaagctaaataaaaaatgcatccgcgaacttcctaaacaggaacactgccgagaggaaaaaaaagatggtaactaa

SEQ ID NO: 455812 - DNA, 1530 bp, Serratia marcescens
atggtaactaatgcatggagtcgctatgtcatcgcggctctagggcttgtaggtatcgccgggttcttagtattaccggtcaacggggtaagcaaaagctttgctattgctgctatcgttaactttttggtttttagttattacttcaagaatatatataatcctgcatccatatttatgagtatgtttttattcatgattggctgcagccaggcaaagctgacattgattgaacaagacagctttgcctatgcgacctggctcacgttgtttagcgtcatcctggtgttttatgccgttgtcgtggtctttatactgcgtcacggccgtattttacctaaagaaaaccagaagaaaaactatatagtctgcggtaaaaccatattttggtcgaatgttatttgcgtactggctgaaatcgccatctattattacgccatcaataaaatcggcagcatacctcttttcgatgacaatgcccgcgccaacatcatgccacaagtcattagcaactatctaatgacgctgatggtgcttcctacattctttattatcttcaacaccgtctacacagtgcaaacaaaaaagtacggttatttatttttcagtgcagcctatttaagcttactgattctgcttggcgggcgaatcaatattttcattcccgtaataaccagtcttttttatacgcttatccaatatcagttcgcgaaagagaacaaaaaatctgtcgccatcaccggcacggcgatcctggtcacggtggttgccttaatggtcaccatccctcttatccgcacgcagatttacgttcagcagcaccaagcgacatccgaggcctcagagagctcagagagctcagagagcaatgaggcatccgaagataatacgcccagcggcagcgattattacgcagccatttacgatacggtcaatacccacaaccttgatgaacatcagtcagaagaaaaagtcaagcagctgcgccaggagtttaagccaacgatgacgctgccgccgcagatgatgtcaatctgggtcaatctcagcacggaaatgcatgcgttcaacaaaatggtgatctattttgacgaacataatgatttcagagaagggcgcatgctgtttacaggcaccttccgttttatcagcaaatattttatgcctgatgaaaccctggatctggtcaaaatgggcgggtacgactggatcaacatcatgacctttatgcaaaaaccctatatggattttggcatgccgggcgtggcgggctttatgctactgtttacctcggttgggatgatgctttatcagcgtgttcaacagcgaagaacgatgaccaacatgctgctgtatagctatttctgcatggcgacattgtttatggtatttgataaccacttctactattcaaccgtggtggtcaacgtgcttctcttgctgctgtttaaagcctatatgaaagttgattggctgaaacatctcaagttcggcaaaaaaatgaacgccagcaaggctatgagtggatga

SEQ ID NO: 455813 - DNA, 843 bp, Serratia marcescens
atgagtaaatataatgcaattgtggtggttgtttataataaaaccattgctgaatcaacaacgattaatactctctcaaactatgatcttcaagatacgctactcgtcatccataataatggacctaaagagatcgatcacggtcatgacttcgataaattgaaagaaaagtttttggatatcaagctcgtcaacgacctttctaacagtccattgagcatactgtataataatttcattgcagagtatgcgggggcggaaaaatatgtcattcttgatgatgattcaactatcactgattcatttattcaggctctgcgtgacaacgattacgatttagagttacctaaaatagtatcacgtaccgataataagacttattacccaatttcagcaggaaaggttgtaacctcagcggggtatttaccgacacaggggacattttccatcggttctggcctgattatcagtcggagaaccatcgagatatttgatactcataaaattaagcctttcgacgaaaattttgcactttatggtgttgacgtcagtatctttagacgtatttataagttggatatgcaaggtgagaatttcaaaataagaacccagagccagcttttgcactcgctatcacgtaccgaaggtaaagaatcagcttttagagtaaaagaaaggttgatagatgtcgctatcagtactcgacgatatcccaccttaagaatgcatatccatttgttaaagaaattaatattaactgtactgaattgtaatttttcgggagcatctgcgctggttagtgcttatttttacggcaaacatccgagatgccggtatcggtaa

SEQ ID NO: 455814 - DNA, 1182 bp, Serratia marcescens
atggataatcgtctttctgataaacgccaagtcgtgttgtatggtgcatttgaccgatataattacggtgataatttaatgccgatcttattggagatgtatttaacgcaaaagcatccggataaggtaaaggatatagagtttgtcttctcatcaatcaaggattcagatcttactcattatgcatgtaagaaaactgtagcgatgaggagtttattgaatataaataatgattcaacggtgatcgtcgtcggtggggaagtcttgggcgctgatattggcgtattgtttacccacgtccaagaatcacctattgccgtcaaggctcttcgttttattcgacggctatctcctggtattttgaaagccatcgcaaaaaccaaatacgatgctgtatgggaatatccttatatccctaataaggacagctttaaaaataagattaaagttgtttataacacggtaggcgcagtacctaataatgctcaagccaaggttatccgtcaagctgattatatttccgccagggatcaaagaacgtatgatgcggtagaaaaaatctgtaagacgcatttggtgcctgattctgtcctgatgatgtcggcgctggttgacgatactttcttcgagcagcacgttcgccctgaattggtgcaaaaactgaagggcaagaaatttattacggtccaggcttgtccttataaggtaaaattcagcgcgcaagagttagccgatgaattgaaaaaggtgaaggaacaacatggcttggagagcatattgttacctattggctatgccagcgggcatgatgacattgattttctcgaaaaagtgaaggcctgttcttctgttgggccaatgatgctgggagagctgaacgtttgggagatcatgtatgtgattgccaagtccaacggtttttatggcaccagcttacatggtgtcattacggcgatgtccttcggtattccgcacttttgcattaatgatgatatcgaaaagttggtttcattcttgcgtacttggagcgtttctccctacagcacgcctctccaggtgcaacaaatttcctcatcaattccactgactacggaagtggaaaaagaaaatttggataaggcggtgaaaaaagctcagcaacttattttcagcagcattgatgaaattgcagcaatactctaa

SEQ ID NO: 455815 - DNA, 1317 bp, Serratia marcescens
atggggattgtggcgcgaatttcaaaaaacaattccattttaaatatgttatggctttcaggtgatagtatattaagaatgggactggggtttatcctaaacgtttggctggccagatatatggggccggaaaaatttggtatattcaactacgccatggcgatgattgctatttatgtatctgttgcttcgctaggaatgaatggcgttgtagtaagagaacttgtccgtgatccgcaatcatcggataaaatcatggggacatcttttcttttacaggtactgggaagtttactggcgtccctgctcgttgtgttaagcacgatgatgcttaggcccggagagtgggatattctattaataacgctggtgatggtcccctcaatactatttagatcaagcgatattatcaaatattggtttgaatcaatcatttctgccaaatatacggtgattgcgcaaaacgtagcatttttaaccagcgctggcataaagatgttaattatgctgatggggggatcttatgttgccattgcggcaacggtgagcctggaagcactgattgtcgcggttctgttggtctatctttaccggagtcgcacgaaggactatgcctggagcgttgaccgtcatgagattggtcgattactgtcgcaaagttggccgttaatcatctctggattggcgctgatgctgtatatgcgcgttgaccaaatcatgataggtaacatgattaacaataccgcagttgggatatattccgttgcggttaaaatgaccgaggtatggtattttttccctgttgcgattgtttcttcactttttcctaagatcatcaaagagaaagagattagtgaagatggttataacaaaaaaatgcagttcctttacgatctgctggtcactgctggtgtaggtttggcaatcgttgttactctactatcagattacattattggttggttttatggtgcacagtatgctgaggcatcacgacttataaaaatttatgcttgggtaagcgtgttttatttcctaagttcggccagtggccgttggtatataaatgaggggttgcaaaagtacgcgcttaatcgaaatgtgttagggcttgtaatgggaatattacttaactatttgcttattcctgtttatggcgctgaaggttctgcctatgcaacattaatcgcttatgcttgcgcggcttatatatttgatttaatgagtgccaaaacaaggattgcgttctggcaaaaaactcgcgcattatggataccaggtgcaattttaagaatgaaaaatactttatcaaggtaa

SEQ ID NO: 455816 - DNA, 510 bp, Serratia marcescens
atgaacgatgaaaaacagatatttattcttaaattagaagaggcattgcagaatataaaacattctagatactatgaaacggaaagagggtatcaaggtgaactgaatgcagagttaagaaaatttttacctgaattaggctgggacaatgctattgtggaacaagagtatcaaaaaagaatccacgagcataatattagaattaggccggacataataattcatgttccttttgagccaaaccagaataatactcgagaggacggtaattttgtcacctttgaattaaagttgggcaggaatttaaccgaaaatcaagcgttaaacgattatcagagtttagctttaatgtgtgaagagctttcatatccgtatgctgtttttatcgtaatcgatggtaatactacatatttcaacaaatataatggaccgcataaagaaaaaattttagcgtataaggtaaacattgttaatggcagtgttcattttgagagagagtatgctgtatag

SEQ ID NO: 455817 - DNA, 663 bp, Serratia marcescens
atgaaagggttatggctgttgttgctgatctggcctttatccgctggtgccatacatatcggcaccttgaccttcgccatggatcaggatcagaccttcgttgccaagcgcgtagtgaataacaacaaaagtgcccgcgtttatcaggtttccctacgtgccatcgatcggccgggggagaaagaggtgcgcagccgtccggctgacggcgaaatgctgtatgcgccgaaacagttaacgttgcaagccggccaggatgaatactataaatttttctatcacggtcccaaggataatcgggagcgttattatcggatttcatttcgcgaagtgcccgccggttatttcgaacgcgccaggcgcgggcagaacggcgcccggctggagccgatcgtggtgatggacgcgattctggtggtgcgcccgcgcaagctcaattttgactatcggttcgacaaaccgcggggaacgttgaccaatagcggcaatacctactttaaactgctgattaaaccgggttgccacagcgcggatgaagacggcagcagctactatttgcgaccaggcgatcggctaacggcaagcgggctgcggctgaagggacaaaaatttattatttataacgataaatttatcaatatcgatcgcagctgcgaacgctga

SEQ ID NO: 455818 - DNA, 1635 bp, Serratia marcescens
atgaaggctaatcacatactgttgatgtgggcgctggtgacggcaccgctgcaggcggcggtcaatgtcaccacctggtcggatgcgtcgccgatgacgtttgtttttgtggaaaacagcgcggacgataacttttttgtcaccccggccggggggttgaacccgcgcatgaccggtgccaataaatggaccgggctgaaatacggcggctccggcagcatctaccagcagagtttgggctatgtggataacggttacaataccggcctgacggccaattaccgttttgatatgtggctggaggatgcgccggttaacaatccgttccttggtctgcgctgcattaactggtacagcggttgcaatatggataccagcctgatcctgccgcaaatcacggataacaaggggttttatggtgtgaccgtcacgagcggcggggcaaaatggatgcatggcatgatgtcgccgagcttttatcaatacctgaagcagatggcgccgggcgatgcattaaccatgcagattaacacctgccagacggcggatgcttatgacgccacggcggggggacgctgccgggatcaggcccgaggcagctggtataaacgtaaggtcacgcatatcaaaggcgcccaccttcgatttgtcaataccaacgcggtatcggaagtgttcgtcaacagcgatggcgtgccgatcatcggtgaaggcaacgccgactgtaaaaaccagagcgtggggacgagaaccggcatcatgtgcaagatggtcagttataatctgcaaaccgccggcggcgtcagtaatacctcgatccatattttcccggagatcaaccatgccgcattaaaagcggcgacaaattctgctgatttgcagttcagccttgacggtaaccgttggaaaaacacctccggtacgctctcgtactacaccttcaacgatctgaagaccagcgatgccgtgtacgttttcttctccagtaatttcttcaaacagatggtaaagctgggtatttccgacagcggtacgcgcgacctgatcaatttccgctttcaaaacaccacgtcgccagagtccggctggtatgagttttcgacctctaaccagctgctgatcaaaccgcgcgatttcagcatcagcattatttctgacgattatgacaaccagccccatcgggaagggtatgtcggtcaggcggagccgccgctggtgtttaattacatcgtcaccaccagcgggaaaacctcggctgatgaagtgaaggtgacggcgaccgggccgacccaggcgatcggcggccggcattactgtattttttcttcaccggataatgcggtgcgggtgccttttccggcgcagttgagcattaccaccagcaccggcggacaacaggtgtttgacgccggctgtgacgggcagtggcacgatatgacccacgccttgtggagcagcacgccgtggaatgatatttccggtgatataggggtattgaataaaacccaggtgaaattcaccatcccgatgaatgatccgctgtcgttgaggacggtggagggcgagggctggttcggcgacgttagcgccgccggcgagatccatgttgaggcgacctggcgcaatatcaattaa

SEQ ID NO: 455819 - DNA, 2535 bp, Serratia marcescens
atgaaaaggacgttgaatgatatcgtggcgcgcggcgtgatagtcgcaggggcgatgattgttcctgccgtggtgttgcccgctcaggacgtgatggccgcaggactgaaccaaattgacggcgtgctgatcccacaggcattcggccaagcgttgcgcgagggaatgcgtatcccgctcttgctgcattttgagaaaaataaaggcgttaaggacgatcagcgtattggtcatgccctgttgtatctggatgaccaggggctaaaaatacgccagatcgtgctggaggataatgacggcggtgcgcggttgagcgatgacacgttcaggcacattgaagcgttaaagaatattgggtttgatccgcagcaacgtatcgcgctgaccgacagcgcctggctggcgctgaactttcgccagctcaatctgcaactggtggttaaggagtccgcactgggcacggtgctgcgggcgcgctcgagcgacattggcgtgtccagtgtcgatacgctaagcaatacgctggattacaacctgggcgtctatgactaccgggaaaagatgggcgaaggcaatacgtcgagttatctgacgctgaacagcgttacggcgctgcgtgaacaccacctggaagtgaatggttcgctgtacggcatcggcagcagcaacaggaatgccaccctgtataaggccatgtatgagcgtgattttgccgggcgacgcgttgcttttggcatgctggatacctggaacctgcaatcgttagggccggtcaccgcgttgaacgccagtaagatctatggcgtttcttacggtaaccgcgctgcttccaccgtgtttgataactcacagtccttgacgccgatcgtggtgtttttcccttcggccggcgaagtgcatttatcacgcgatggccggctgctcagcgtgcaagctttcaccatgggcaatcatgaggtcgacacccgcagcctgccttacggcatttacgatgtcgaggttgaggtggtggtgaacggcaaagcgatcgaccggcatcggcaacgtatcaataagctgttcagcccgaatcagggcgtcaatgccccgttgtcttggcaggtgtggggcgggatgatcgatatggataactggcggcgaaaagataatcatgagagcggggcgcaacgttcctatctggcgggggcatcggctaccggcaatttgcagcgcgtcaattgggcgctgtcaggttattcgtttgaccataactatcttggcgagagtcgtttcagcctaccggtaacggaatccattcagtttagcgtacagaatatggcggcgtcggatcgttcctggagcatggtgagcagcgtcagcgccaccttgccggggggctttagctcggtgtggctgaatcaggagaaaaccaagattggcaataagctgctgcaaaatgatgcgcataaccgggcgattggcggcactctcaattttggcgcgttgatgcccaaactgggcaccttatccgtcagctacaatgacgatatcaagaatgactctcgttattataacgttgatttttatcaaaatttatttaccggtcgctttggtacgctcagcgtacgcgcaggtatccaaggctacaataatgcgcgttcggattccgatcgcggtaaatatatcgccttcgacttctcattgccgatggggaattggttcagcgccggtatcgctaatcaaaatggctataccatggcgaaccttgccgcacgcaaggagctgcaagacgggccgattcgtacactgggcgccaacctgtcgcgggcgatttcgggtgataccgggagcgatcgcaagttaaacggcggtggttacgcgcgttttgagaccaagtattccacgggaacggttaacgtcaacagttcggcagacggctacctcaacactagcctgagcgctaacggcagcgtcggctggcaggggacaaatatcgcggcgagcggccgcaatgagggaaaggccggcattattttcaataccggcattaacagcgacggtctgttagccgcccgcgttgatggtcggatggtgaagctgagcggcgataaaaactatctgccgctgccggcatatggccagtatgacgtcgagctgatgaacaacaaaaattcggcggaaagcttcgatatcgtgaccaaacgcaagagtcgcctgacgctctatccaggcaacgtggcggtgatttctccggagattaaacagatggtgacggtgttcggccgcatcagggcggaggacgggacgttgctggctcatgccgatatcaagaaccatatcggtcgcacacgcaccgatgagaaggctgagtttgtgatggatgtagacaagacattcccggtgatcgattttgtccacggcggcaatcaggtctgtgaagtggatttggatttgagcaaggcgcgtggtgctgtctgggtgggggatgtggtctgccgcggcctgaaaacctatgccggcaatcggcaggcaggagagagaaaacatgaaggctaa

SEQ ID NO: 455820 - DNA, 669 bp, Serratia marcescens
atgaaaggactccacgttgttctcgttctgttattcggcctgagccgaaccgcgtttgccctggatgtcggggaaatcagcgcatttatgcacagcgacagcgcgcgcctgacaaaagaaattaaaaataccaccgacagcggtcgtttggtgaatatcaacattgaacgtatttccagccctctggagtcgggcaaagtcataccgatggcatcaaaagatgaaatgctgctttcgccggccagcgtgatgttgcctgccaatgcgcgcgaggttatccgtttttattacaacggtccgaacgatgaccaggaacgttattaccgtatcgtctggttagatcaggcattaagcgatgccggtcaaaatagcgccaggcgcaacgctgtggcgacaacctcagcgcgcatcggcaccattttggtggtggctccgcgccaggatcggttcaactaccaatttgtcaacggcaaaatcaaaaacaccggtaatgccactttcaaagtggtggcctacggcagttgcctggataagaaaaatacgcagggctgcaaagaaaactatttcgtgatgcccggcagagaaaaagcgttcagccgggtcgatgtcaatgaccggaaaggtcgagtggccctttggcacggtgagcaatttattccggtgaagtaa

SEQ ID NO: 455821 - DNA, 588 bp, Serratia marcescens
atgaaaaaaatgactctggcgctggccatcatttctgcattttctgccgtaaatatggctcaggccgccgatgtcaccgctcaggcgctggcaacctggtctgcaaccgcgaaaaaagataccagcagcaagctggtggtgacaccacttggcagcttgtctttccaatactctgaaggcatcaagggctttaacagccagaaaggattatttgatgtcactattgaaggcgacacgaccgcaactgcgttcaaactgacctccaagctggtctccaacacgctgacccagcttgatacctcaggctccacgctggatgtcggcgttaactataacggtgttgccgtgttgaaaacggctgaaaccaccatgatcgacagtgttaacggtatcttgggcggcaacctgagcgctctgacaaacggctataacgtcgctggccgcaccagcgcacaggatcagttcaccttcagcatcattagtgcaaccactgacggcaccaccgcagttaccgatttcagcacgctgcctgaagggatttggagcggtgatgtgagcgtggagtttaacgcgacctggaccatctaa

SEQ ID NO: 455822 - DNA, 648 bp, Serratia marcescens
atgaaaaataacaatcagggacgtcattttattttatatgatgcgatgccatgggtcggtatggggctggaggcttttttacgcccgctaggcgcggcgattcaaccggtggccaacctcagcgagttgaagtcggcgctgatgcggcagtccagacaaacggtgattatggaattgtatagcgcgcaggagtgcctctatgatggcctctattttatcctgcacgagaaggcgttttggccgggcgcggtctgggtagtgttgacagatatcgagaatcacagcgtgttacgtttattgtcatcgagatcggatatcgtactggtttccaaacgtgatggtttggccgcgattctggacgccatctctgcggcgcatcatgctgtgcgctatctcagcccgaccatccggcgcagtattgccggacagaccgagggcaggccgcagagaaacctgtccggctgcgaatggcgcgttctggccttaatggcggcgggcttctcggccaaaagcattgccacagccacctaccgttcctacaaaacggtaagcacacataaactgaacattatgcataaacttggtcttaaccaaagcggatttatccgtctgctgctctccctgcgtacccgcttgccgtgctgctga

SEQ ID NO: 455823 - DNA, 798 bp, Serratia marcescens
atgaaatatagaattaatggacagattctttttgacacggacagcggcagcctgggagtagatggatttccggaagaatccctacccatttcaaatccgtcaaagcgattgttgctgttacttattgaccaccatggcaagcaggtcagccgcgaggtgatctttcgcaaagtgtgggatgattatggcatggtatccagtaacaataatcttaatcaatgtgtgagcaaattacgtcgagtattaaaaacgttaggcattgatgaagaagtgattattaccgtacctaaagtggggtttatgctggcgcgcactattaccctggaagcagaagaagcgccatccggcatgccggcgacaccacagaacgaggaggaggcgcctgaatctgccggtgcctttgttgcgtcccggtgtaaaatcagaccgcgttttcgagcgggcatggtcgttggtacgctgatagtactggttatcagcgtcggtatttggctgatctaccgcggcaatacggtcagacaggaacaattcattggtgaggtgaatagctgtaaagtatttttatcgggaccgcgtgctgctatgaatgacaatgcggaaaaggtgaacgattttcttgcttatattcgcactaatccggaacaatgtcagggaggtgattatttactgttgctcaacagtaatcaggtaggctcttatattaaaggtgtttcccgactgtttattttgaaatgtcgggtggcgcgggaatatcgtgttgagatttgtcgcagcctcaaagacaggccgctgtcttag

SEQ ID NO: 455824 - DNA, 474 bp, Serratia marcescens
atgattttcaatagtttatttaatccccgttatgcacagggactgtcatcagatctggctgacattctgactcaagtacgtcagcaagatctgcctagcctgcctctgggacgccatgacattgacggcgatcgcatctttatggaagtgatcgaactgactaccgaacctgccgaacaaaaacgcgccgatctgcgctaccagtatctggaaatccagatactgctgagcggtgaggagcgcatcgactatggcctgccgggcagcgagatccactgtgaagcctatcagccgctgcaggattgccaacgggccgatattcgccgcccctggcagacgctgcatctgacggccggcatgtttgtcctgttcttcccgtttgaaccccataaaacgggctgccagttgcaaagtccgcagcgcatcaaaaaagcgatcgtcaacgtgcactatgaacagccctatgatttctaa

SEQ ID NO: 455825 - DNA, 1170 bp, Serratia marcescens
atgaaaattaacgtgaacaatacgggtatcaatgtacagctacaaggcagcggtgaacttgcgctggtatttttgcactattatggcggatcatcccgtacatgggagagcgtgaccggtcagttaccagaccgctaccgcacggttgccatcgatcatcgtggctggggcttgtcagacgctcccgaatccggatacaggattgaagaccttgcaagggatgctgaaggcgttatttcagcacttgagcttaaacgctacatactggttggtcattcaatgggagggaaagttgcccaattaatggcatcgcgccggcccgaagggcttgagggcctgattctcattgcaccctcaccaccttcccctatgctgctttcctcagaagaacgcgacagactatccagcgcatataacaaccgcgaatcagttgggtttgtcatcgacaatgtcctgacggcgcggccgctcagccccgcgcttcgagagcaggtcatcgaggacagtttaagagcgtcagccggggccaaagcgggttggcccggtgtcgcgatcagcgaagacatcacccgagaagtcgccttcattaatgttccggttagagtcatctccggagaactggaccgggtcgataccccggaaactttgcaaagagagttgctaccccgtattcctcacgcagcgatgtatattattcccggtacgggacacctttcaccgcttgaatcacccggtgagatcgccagttgcatatctgccttcgctgcatcgattgaaaagagtgccgcggtttatcgctcccctggtgaaaccatcgccgcctttgatgaagcatttaacgcgggaaaaattgataacttaatgtccgttttcagtaactgcgccaccatgaaaatgacggatggtgctgtcattgaaagtaatcctgaagcactacggatggctttaatcacgctcacagcatcacggccggttatcaggaaccagattcgtaccctcatctctgctggtgatctcgttctcgctctcattaattggtcgctgacgacgacttcagatgacggtactcaacgcgttgagcacggtatcgccacgcaggtcatggagcagggggcggacaagggctggcggatacgcatttcaaacccatcagggccagtaagtgattaa

SEQ ID NO: 455826 - DNA, 897 bp, Serratia marcescens
atggatagatttatcagcatgcagatttttatcgcggcagtggaagagggaagttttgcggcggctgcaagacgttttaagctttcggcggcaatggcaggaaaacatgtcagtgctattgaatccgatttaaatgcccggcttattcagcgttcaacacgccgtttaagcctgacggatgtggggcagcgatattatgaacgttgcaaagttattgttgaggctgtggaagatgcgaacagagaagcgagtgatgttcaggcaacaccgcgcgggttacttcgcattgctgcgccggtcgccttcggtgcaatgcatcttggtgcgatcgtgtcacgctatctggaacaatttccggaggtcagtctggatgttgtgcttgaggataaatacgcagacctgcttgaaagtcgaattgatgttgccatcagggttgggagtcttgacgatccgtcgctggttacccggcggctggcgccctgcaagatggttttgtgtgcatcaccagagtatctgaaaaaacacggcaccccagagacgccggaagatatttgccgcgcgccgcgtctggcgttcagccaggcggtttcagcgggagactggacactttacggccctgagggcagcttgcaccgtatcgaaagtgcatgccgaatcacatccaataatattcagttgcttctggaatccgccctggccggaacaggcatagcctatggtcccagttttgttttttgtgagcatataaaacaggacagactgattgagctgctgccagcgtacaagacaacggaacttaccattcaggcagtgtatcccagtgcgatccgcattcctttcaaggttcgcagctttgtagattttattgctgaagctttaagagatacacagctgtaa

SEQ ID NO: 455827 - DNA, 261 bp, Serratia marcescens
atgaaaatacgcatcacaagagcaatcggcctctgcaagttctcgtcacgttgggttaaggttatttgtttacggttaactaaaaatgatattgagcactccctcaacgttctgctggccaacattgatgaatctaaactctctccggaacaagtcaaagcgctaagagaatgtgttgacagaattaacctggcaaggggcaaggagatgcaggcgcgagcacttttgattaaggatgtttcgatgttggtttggcgatga

SEQ ID NO: 455828 - DNA, 588 bp, Serratia marcescens
atgattttagtttttgcaatgtttttgttctcccttaccatgtcgatttcgccagggccagtcaatatggtcattctatcatccggagcgagctatggatttagaagaactttcccattcgtctcaggtgctacaataggatttactctattacttatagtaattggttttggattctacactgtcattgagaaacattcacttttcttcaaatatctcaacgtagctggctcagcgtttataatatacgtaggctataagatagcctcatcacggcctgatttatcattaaaaaaatcagatgcgcctggtttcgctcagggttttttacttcaatggctcaacccaaaagcctggattgcatgtgcatctggagtcgtattgttttctgagccgtcaaataacacttccctaatagtctttataataatatattttttagtgtgctacctctcattagctgcatgggctgttcttggaaagaatatctcaacattacttaatagtatcggacgcacccgcgcctttaatttatgcatgggtggaatactgattaccactgccttctatatgcttctggcccaatga

SEQ ID NO: 455829 - DNA, 894 bp, Serratia marcescens
atgattgatgatattcgttacctgattgtttttgcgaaaatagtgcaagctggatcgatttcaggtggcgcagacgctttagggctcactaccgcaacagcaagcacgcatctttctaagctggaaagaaatctgggaagtgctttgctatacagaaatacgcgaaaattatctctgacccatgatggtgcaaatttgctcgaaactgctaactctatgttagaactctatgaaaagggatttatcgagtttaaacagcgttctatttcaacaagtaataagctgaatctgtccattcctgcagtttttataaatagtgattttactcgtcatcttgcaggatttataaaggaatacccggacgtttccctgaatatttcttattgcgacacgcgtaaagatataattgccgatagtattgatgttgcatttagaattggcgaactgccggacagcgccctcaaagcacggcatctttttgtattgccccgacacgttgttgcgtcaaagaaatttcttagcaattacccgcctgtcaaccatcctgatgacttagaaaaaatgccctggatcggtctgagcatgctgcagagtagtcaagagtttaggcacaaaaatggagaggttgctttcattaagtatacgccaacggtttacgttgataatgtcgaagctgcctacattctcgcaaaacatcaggttggaattgcggctcctccttgctatctcagcaaagaggatattaagagagaagacatgcagttggttctccctgactggtcattggaaccactaaaagtctatgcgatctggccttccaatatatctaccagcagcatcgcttacacgttaattaataagatttacaactcttttgaatccaagacattatga

SEQ ID NO: 455830 - DNA, 177 bp, Serratia marcescens
atgtctgctcttcgctcacagtggacttttagctctcatatcttgtccatacaatatcaggagctgaagttagtagatcgcatggagatgtctctcttccagatcgagaaagactgctttgtcggtggcgacaatgacctctatgggtcttcaggatatgttggtctgtcagactaa

SEQ ID NO: 455831 - DNA, 1953 bp, Serratia marcescens
atgcaaggtagcattattcaaaatatcgccaacaatcttttctttacaaaccccgacactctagaatatgaaatagatgaacatgaattttctttgttaaccaaagaggattcagatcattatcatttaaaagataataaattaattttttcatctcatgataaaatagactattacgccgcttgttatcatgcgtcaaaaatagacattggatgcatcaatgccaatgccaatgccaatgccaatgccaatgccaatgccaatgccaatgccataatagtatcaactgcttttaatttatgggaaaaatcttttcgtaaagacagaaaaatagcagggctatttctcagcttatatgaggatgattttgaaattttgcaattactgctcgaatctgaccgtgacccttatgatattacatctctagctgatcaatatataaaatatgcaaaaaacatagacacacacaaacttttcaaatttttcgccactatctataaagaaaaaaaacagtacacaggaatatactcatcattagatgaccgcctatctaaaattccaaacaaatgccaagagataatcaaaaattttcattacaatatacaaccagacaccattcaactttataacattgctttgctgtcactaaaaaaacaacactacacttcagctatcgatattttgatcgaggacatagaaaaaaacgacaatatactctcccctcaagccttatggattataggtagagttatagaaaaaagtgataataaatacagggaaagtgatatatttgaggtgataaataaaagtatctcctctcctgtttttcagatatctaactcggcagtgcaggctgccgttgatgctgtaggaaatatagatagaattagttctatcatccgtaatcttctcgaatcaaacaatcaggaaatgataaactcactttccgctaaattatctataacaaaaaacttaacttcccacgacgattttgagttttggttattcagtatttgcaatgctgcaatgaacaatgacactttgaacagttctattttccatatattttcacttctagctaaagatgaatcaactcatgacttattagttaattgtatatttataatgataagaaataattcaatatcagaggaagacaaaagaattgaaatatttctccatgaactaacgaaaaaaccgacccttaccaataagctatttacattagcattaattgacgaaaaccccagaaccgccggtttctctaagttggtagcaacatatctttttgtacaccgaagtgaacatatactagagtatgatcttagcattataaacaactttatcgagcaagattttattttattagcactaagaaccctagggtttatatcaaacgaaacccagttagtatcactgatactgtctttattacaagtaaagaaagcagaaaagagaacatatgttcttgtcaaggatgtcattataaatgaaatagcgatggactatcctggttatgtacaagatgaactaaaaatacgaaaatccaatatcaaaaacaagagaagtcatatactaaaactatatagctatatattggataccgtcgatggatacatatcctcttttaacaccctaccaagaataaaagaattagagccaccatcatcactttcacataatttcaaaaaagaaagagagaaggtatctatacgaaaaagcaaacttcaggaagaaaattcatttatatttcaaatggcatctaaaataacattaaaggcaggaattgcttcatttaactataatgatttcaatcaaaaaggttacagtgagccatcatatctacatgaatattccagtagttattccttacccagaagatatgttatggataatattggctatgagatccgcattgttcaacttaaatgttgtaaaaaggatatagtatga

SEQ ID NO: 455832 - DNA, 1701 bp, Serratia marcescens
atgaaagtattaatttcacaatatataaaaacattaaaagaaaggaatgagcttgaccgccttattcctaatttattagtttcaatgggtattgtccctttatttacaacacaaacaggaactcggcaatacggtgtagatattgcggcaataggtaaagatccagaagatggtataaaaaagatatttctttttgtgataaaacaaaaagatttaggtagggtagaatgggattcaggtataaactccataagacctagtttaaatgaagtttttgatgtttatatcaaaaatcatttattgcctgagcataaaaaactaccaaaaaaaatcatactatctacaagtggggatatgaaagaagagcttagccagagctggtctggttatattgatgatcataagtcttatgagtttgatttttggggagccgataaattagcaactcttatagaaaaaaacatgctcaatgagaatatttttagtgatgatgacaaaaatgatttaagaaaagcattatctctaatttgtgaaaacgattattcaaaagaggatttttatcgtttattacttcgaacacttcagcttgatattaaaggaaagaaaacttcagaaatgaaaaactcagaacttgaaaaatcaatccgaacttgttacctcgctacaaacatactcgcctattgggcaatacaagatggaaatactaaacaagcactctatgtatcagaacgatgcttactatgggtatggcaccgtataaacctcgaaaaaaaaccacaaaaatattaccctgctattgaagtcttatggcatagctatattaatatttccaatgagtatttctcaaaactccagccatatttcaatgagaagtatctcatttcctcatactctactgaaagtgcattaatcaacctgactatatttgagcaaatcggcatactttcaactattggaataaataattacatttcggctctacagagtaaaagtaaagatgagcagaatgtcagatttaacaatgcaactatcattgctgaaagcttatgcgcacttatcatcaacaatccagcgtcgggttcacctcgacttgatgaaaactcaatagacattacattaggtttcatattattaattcttttaggaaaacttgatagcgctgaagagtggcttaggagattaatcgtgaggctagattttgttttcaaagtcagaagaaatcatcctgtatcaacagactcccttgatgaccttatatgcttagattgtaataatgatgacacatatcttagagaaaaaacaacaaatacatcctggttagtacccactctaatgggattaactaccattctaaaaaaagaggatgggtatagtctattacttaaaggaataagagagtattatcctaagatgtgcgcacagttatggcaccctacaaacgatctttatcgccatctatattttcaccaagcacaacatagcataggcgaaacagaagccccaattacatttccggataacatgagtgattatcaagaaagaatgcatgagttgaaagaaatggatagatataatttcttcaaagaatcaagtgccgtaaaggctggtttagcatctttagattttatagcttatcgacatttcaggacaccagtccctccagctctttggtataacattcgaaagaaaaatactcattaa

SEQ ID NO: 455833 - DNA, 177 bp, Serratia marcescens
atgaggttctttctacatgtacttgtgaatttgatcacatcagtaggttttttggcctgtatctacttctttttccattttgatactgccacggatagactgatctacataggtgggacaatcgctgttgtatgtggtttggtctacattatgcctaaaccgaagcaaaaaaagtag

SEQ ID NO: 455834 - DNA, 273 bp, Serratia marcescens
atgacaaaatcagcatcaggcaaaaagcagtcccgcaaacagtacacacccgaatttcgccaagaaaccctcatgaacgtatcggcgtggccgctgctgcccgctaatctgcggggcaatatgagcgccaaaggctgttgttacgacaatgcatgtgcggaaagcttctttcactcgctgaaggtgggatgtatccacggagagggttttgccagccgggaaataatgcgaacagcggtgtttaattatatcgagtgcaattacaatcgatag

SEQ ID NO: 455835 - DNA, 495 bp, Serratia marcescens
atgaagctgcatgccggattctggctgatcacactgtgctttggcgcctattgggggctggcgctgttcacgcgcgaccgggcggcgctggtgctggcgattggcgccgtggccgcgctggcgctgaccccgcaggtgcggcgcaaatgggcagtgctggcggcgctggcgggcattgcgatggatgcattctggtgttacagcggcgtgttgcagtttagcggcagcaccggcgtgcccgtttggatgatggcgctgtggctcgccttcggctgctggtggtgctggctgatgcagctgatccgcgcctccgcctggccggccgccctattcggcgcggttgccgggccgctcagctatctgtgtagctggaagttaaaggcgatcacgccgctgatcgccccggaactgatgctgctggtgttatctattggctatgcgctctatcttcccatcattagtcgggcatttacccgccgcgtcaccaacgcctga

SEQ ID NO: 455836 - DNA, 654 bp, Serratia marcescens
atgcttgatgttatgctgctggctgcacaatgtgcgccagatatatcaccgcaaacgcttaccgctattgctaaggttgaatccaattataatccctatgcaattggcgttgttgatggctatttaaagcgacagccaaaaaataagcaagaggcgttggcaacggcgcggatgttacatcgggcagggtggaatttctcgatgggaattgcacaaattaatcttcataacctgcctaaatataatttaacctttgagaacgcgtttgagccatgcgaaaatttgcgcgccgccgcaggtatatttaatgaatgtcatcagcgtgccaccaggcagttctcttcgcaacgcgaggcattgctggctgcttactcttgttactacagcggtaattttagccgtggtttccaaggcgagggtaaaaatggccttagttatgttgacaagatattggccgcctcgtcgtccgctgccggccctctttttgcagacgatatggcgatccccgtcataccaatgcgttccggcgtcaaaaaagaggcgtcgcgccatgtggctgaggagacaggcggcaaacgccaggatgcgcgggttgcccgttatcctaccggtcgtgctgtgcaaggtgttaaggaattgcggggcgaagaataa

SEQ ID NO: 455837 - DNA, 1266 bp, Serratia marcescens
atgactaacatatttacaatattgaataaatcacggataagcttttctgttttgttattcggcgtgctgtttggcacatccgcttttgccggcgactcggtgattcctgccgtcgcgcctaaatctgcaggcaactttatgccgaccggaggggcgctggataccgggctggctatacgtaatggtgaggtctgggtatgggggtttcgtaatgccggtcatcaggggaacggcgttacccatatgtcttcgaaagagccgccggcaaaagtccaaatctttatcgacaagaatctcaaaattgtcgcgctggcggctggtgctcaccatattatcgccctggatgagaacggcgatgtctggggatggggacagagcgggtatggtgaaacaggctgcggaaatggttatgtcgcgacgccttgcaaagtgctgagtggcaaaaagattacgcaaattggtgctggtgagtatttctccggtgcgatgggagaagatggttcggtttacacctggggacatggtatttatggtcagcgtggtgatggtcttctgacgtctcacctaaaaaatcataagaatccgggaaccgtacataaagtcgatctcaaaggggaaaaggcgcgtttgctgggtgtcacctacgagagcacttatgtggtgactcagtcgggaaaaatccttggatggggtgataacgaagattgccaattggggccgatgaaatcattatcgatatgttctggccacgaatatgtgcgtcttccgcgtgagttttcgctcccgggcattaacggccacgatattgtttacattaacggcggtaacgcgtgggggatcgcgttgctgaaaaatggcgatgtctggggctgggggcgcggtgcgtcgattggccagaccacgaatggctcccttgcggccaagcataacagtgcgacgccacgttttattttaggcaatgtggctcagctgtattcccgttatgtcggttcggcggcgttgacccgtgcgggggaattttatacctggggacagacggcggggagcgcttttcaggatatttacggtcataagcccactctgcacacctcgccttatggcgctattgaaggttttggcggcggcaaggagcatctgtactactggacgtttgacggccgagcctatgcttacggctatggcgctttgtataaactgactcccgacagtacccaaaatattccctggccgggcaaagaaatgacctttttatacactgataattaa

SEQ ID NO: 455838 - DNA, 1869 bp, Serratia marcescens
atgaaatatctacgatcagtctgtacttcagaaagtggcgctgttgcggtcatatatgcgattattttccccgttctgctggccttcgtggcctttgcgctcgatggctctcttttgcttaaccgcaaggctcgcctggctgatgccgccagtgaagcgatactggcaatatccgcgatagacaatcggttagttaaccagagtgcggttgccgtcaataaaaacattgccgcagagtatatcaattactatttaccagaacaccgccggcaagcactgtcgttggcggtgtcgatggaagaccgcgtcgacgacagggggtacgtagactacagcctggtggcaacagcaacgttgccgacattattgcctttgaaggggatgggtttttccacctttggcaaaacggttgatgtttctaaccaaggtgacaacagcggcaatgcgcggaaatttattaccacgaatgcttccccggcggatattgtgtttgtggttgacttctccgataccatgaatacgccgtataccgatggtcatggtatggctacgacgcgtcttggtatgctgaaaaaggttgtccatgatgttattgaagggaacaaaaatacaaagtctcagttttctatcgttcctttcgatctcggggtgccgtttaaaatggagcatgcggtcaacgctgccctgccttataagcatgcgcgcaatgaagccgggggagagctgatcggctgttccgcattgtacgtaccgcgccagacgttctccgccgagcgtatcgattatgctttttgggcgaataaaaatatcattcaaaatgaatataatgatattaaaaatagcaggaacctcattttctataatctcgaccgcgctcgctatctttattatcgctttattgttggcaaagccttaaaggaggacattggcggcctggaaaggcgtgggtggtgtgagcaaaatagcgaatcaaacccaatgaccggtttttatgcgtttagctgtgaaaaggaggcggggcagagtattttttccgctgcaaaccgggcgaaaattgagacgcaatacaaccaggtggtggcattactggctaccctgcgtggcaaagcgtctctggagcgtgcttctatcgccaatagcttaaccattgactatgatcggacgctggcggatgacaatctgttcagcaatcacaatgtccaggaatttattcagccttgggcgccgaatatgtatgaatatcgcgcttttccaggcatgtgccagtcggcgacgcctttgcgcaccgtcagtcaggcgttaagccaacaacaggcggcggagcagatggggacgatgctggcgcaatcaaaagccaatacgtttttaattccgctcaccgacaacgacaaggcaaaaaatcgattgattgcggattttgcggctatgacggcaggcggcggtacagacagcagcagcggtttattacgcagcgtacccgttattgcacagggcacgaatcccaagaaagtgattattgtgatttccgatggggaagatgaagtcgatcccgcgattgtttccgccgaattgcattcgcgcggaatgtgcgacgtaattaagtctgggctgaaaagtgaacggctttacgctaagaaaaaaattgccgccattgctgagaaggtggaaatccattatgtgtcaattaatgatgatgaaacaaatgcggaaagaaccgccttctggggaaaatattgcgctaaaggtgacgatgaaactgatggcacacagtatgtgcatactgccactgactatgcatcgttaattactaccctgaagtcgatcgttggcgttgagactggctactatattcgaaacgaccaaaagtaa

SEQ ID NO: 455839 - DNA, 612 bp, Serratia marcescens
atgattaataaaaggaacgacgcactgaataaaattacgcactttgccagggatgaaaggggggctgttgcggttgagttcgcgattgttatgctttttttaatccttatcatgtatctggtcacggattttggtattaccattgctaaacagggaaagcttgagcgcaccagtcattcactcgcttccttggtgcgggaaagagaggcgctttatgcctcggacgaagaactgacgcaggaacaggtcgaccaattactttccgttgctcaagctctgctgatgcgcaccgacctcactttggttgtcgatgcactttatctgacggccgatgcactcaacccccgtaataatgatctggcgcgagtgagtaagtctctttcatttcaggctggcagtcgtcaatgccggcgttcattgctggcgacagatgtcaccgctttgaaaaaattaaccccttatgcgtccagttccggacgctgggtgccaatatatcgcgttagtatatgtattcctaatgaagccagcttatttaaaaaaatatctgggatatttagagatgatatattacccgatatcatttccagtgatgttgtcatttcaagaaattag

SEQ ID NO: 455840 - DNA, 510 bp, Serratia marcescens
atgtcagtttttcatggtttttttttcacaatcaaacagcgattccttcctgcgttcagaaacgagcgcggtgcggtggcggttgagatatccttggtatttattccttttatttttataatctttttgctgtttgagttatgccgaattatttatatttcttccgccttggatcttgctgttgccgaagcgagtcgttatgcggcgatatcaaccaataaagaggaggtatatcgtgatgtgtttcttttcaagttgcgaaaagatatcccgctattaccgctgttgacggatgataaaaatatctatgttgatgtgaaatactgctcaacgattgaagatattattttaaaccgttgtgactatgataggtcaaagaagtctctggctatctatcacatgggttatcattatgagttgttattttcaattattccgaaaaatgtcgtgcaatcttatttacaaagaatggtagtcttcgttcaagagtatcagcgggatgaaaaataa

SEQ ID NO: 455841 - DNA, 537 bp, Serratia marcescens
atggaacgattgagttggcatattaaagaggatcacatcgttgaagatttggttgcattgttaactattacgcctgaagagtgtcatttattacgtgatttgcaggcagatgcacagaatgcttcactgcggctggtcgatgaatattatgaacgtctcatgcagcatgaaatgaccagggagtttatcacggatttatctgtattaaaaaaaacgttagcccagtggtttgttaagctgttttgcggcgtttatgataaagagtatgcattagaacgtctgcgcatcggtatgacgcatgtgcgtattggtttacccgtacgttatccattagccatgtttgacatccttgaccgctacggtgttgaggtggctgaaaaaagagggcgtgaagcggtcgctgcttttaaaaaggttttagcgcttgatgtggcaacgttcacccaggcttacgataatacccagttaaatcatttgaaagagttggttggcggcagcgaaaagctcgccagacgcctgctcaccgatgattattga

SEQ ID NO: 455842 - DNA, 372 bp, Serratia marcescens
atgaacaagcagttgttgcaggacgttattgaaaagctaagtaatgatatacctgttaaaaatacgctcttggtatgctctaaagatggtgatttggtcgcgcaaaccgatcatggtattgaggtcgatttgctgcgggtagcggtacaggctgcggctgcgcttggcgtctcttcccatatgggcaatgccttgaatatcggtggtgattctgaaatcagcctgactggtgaggcaggccgtatttttattttcagaattacggattattattttttgacagtagtctgcccacatgaatgtaatattgcacttctcaatatcttaacaagtagaacaataaatttaattaacggaaaaggggttttataa

SEQ ID NO: 455843 - DNA, 561 bp, Serratia marcescens
atgcaatcgttccgagggcgaagattatgcggggtaactattttgaataatttattgaaggaaatgcttacggtaaagttatgtgcggctgacatgatatgtggccatatttccgtgagtcccgtgttagataacagggatgaacttatcgaagttcagcaattggaatatcataatttattgaccgaagtagaaaaagagttaacgcccgaactggtcggtatggagcatccagcccgcgatgcgcaatggtgtagtgctattgaactggttgccgcagatatggtgagtgaagccatctcactcaatcctgttctatatgaaagacagagtaagattcgtgaaagagtggtatatcacttcagtcagttggagaaatattttcctgcagcgcagctagcgtcggagcagaatatgaaagagggtgaccgggttgttgagattaccgcacaaaaatctcctgctgcggagcatacgtttcgtgcagcagatggcacatgttatgaaaaaaattgccgtgaagtaacaagaacgaataaaaagaagaaacgcaggaaatag

SEQ ID NO: 455844 - DNA, 459 bp, Serratia marcescens
atgaccatttccgaaggcaggatgacgatcagttattcgggattaacatcccaacaatgtgttgccgttcaggaaacgctggaaaagttttcacaggaccatcctggtttgaccaatatgctactggcgacgattgacgggtttgaagttgccgcagtgctagaagagcaggatgaagccaggatgagacgtctggcagccatgaccagttcaatcttgtcgattggcgttgccatgttcagagagattgaatctggtggtcagcgccttctgacattggaaggggaacacaataatatcctgatctttatcgttcaggggattaaagctgaactggtattgaccttggtcagcgctatggatgagcctttggggcaattgctttggttgatccgtaaactttctgcggaaattacggcgatatgcaatcgttccgagggcgaagattatgcggggtaa

SEQ ID NO: 455845 - DNA, 567 bp, Serratia marcescens
atgagagattttaaaataatgtttgttggctgtagcggttcaggtaaaaccagcgccatttcttgtgtaagtgatactcgtacggtttctactgatgtaatcaattcagaccgtgaaaattatgataaggggatcacgacggtagggttggattatggtgaagtgacattaccggggcagagcaacttactgcgattgtatggcacacctggccaggctcgcttttcatttatgtggaatattattggtaaagggacaatgggcattattttccttgctgataatagtcgctccgatcctttaggagaaataaaaggttatttacacgcttttcgccatttactggaggagaggaaggcggtggcaatattgggcattgttaaaacagatattgcgccctatccagataaagaaagctaccagcaactgttaagagatatggggctgtcaatctcggtggttaacgttgatgcgcgcgagacggccagtgtcttattaatgctgaaagtgatatctcgtcaattggaaaagtttgccaacactcagggagaggtaagtaaagtatga

SEQ ID NO: 455846 - DNA, 363 bp, Serratia marcescens
atggcaaatttaaacgataagatcgaagaattattaagtattgatggctcactctgcgctgctatggttgacagtaataacgggatgactctggcttcggcaggttctggtattgatattgaaattgctgcagcggggaataccgatgtgttgcgcgccaagatgaagaccatgaagttgctgggtattagtgatacgcttgaagatattttgattaccttagggaagcagtatcatatcatcaggccgctgaattcagtcccaggggtatttatctatctggtacttgatagccaaaaggcgaatttagccttggcgagacgtaaggttaatgatctcgaatcaacaatcaacgacatctga

SEQ ID NO: 455847 - DNA, 330 bp, Serratia marcescens
atgaacattgatggttcattgtgtgcagcaatggtcgacagcactaatggaatgatacttgcttgtataggtggagggattgatatagagattgccgcagcaggtaatactgacgtattacgcgcgaagatgaagaccattaatctactgggaatcaatgatacgattggtgatattttaataacaatgggcaagcagtatcacattataagaccgctacgctcggtcagcgatgtttttatttatttggcccttgatgtaagaacggcaaatctggcattggccagacggaaggttaatgactttgataccaaaactcatgatatttaa

SEQ ID NO: 455848 - DNA, 459 bp, Serratia marcescens
atgaaaacatatgaatatcgtgggatattagtccgggtccctgaagaaaccaagtatattgctgtaggtgctgatggtaaactcaaagcttacagtgatatgcctgacgttaattttgatggctctttggatgatagtcatgcatctgcattgactgttctgaatgcgaataaatcattaatagataccacattacttaaagtttttgcacctctggtattaacagaaaccgtaagtccgggcgccaagcctttcaatgtcggagataaatatattattcagtcctcggttgatgaagaggcctgccttaattccgaagtacatatcattgttaatggctatacgcctggttcttcaccctggatgcaggtgctgcacgtacatgtcaatggcctgtctattgataaccagcttcttgccaatgttgttgatattttgcatgaactccatgcggtataa

SEQ ID NO: 455849 - DNA, 1314 bp, Serratia marcescens
atgggcgtagttaagcaagttagttatatggctctctgtacgatgcttttggttggctgtcagggcaggtggcagcaggaaaataagattgatgagaatcagcaggaatatatcctcagtaaagtgaataattatcagggattagtaaagctataccgtgaaaaattaagcaggaaagaagatccgctcgttcgttataaactggctaattattataatctcgttgaagattatgattcttctctgcattatctgcagccgctgcttgaaaaaagtccgaatgataaagtctatttactgcaggcgaaaaacctgacggcgttggataaaaagcaacaggcatacacggcgattaagtcagcgcttaacttaaatgaaaaaaatggcgatgcctacaatatgctcggcgtacttcaggctgaaaggggcgagtttgatgcggcttaccaatcgctaaatacggcgcgcgggctttttgtttctgaggaacaagtagttaataatttggccatgctgatgattttgcaggagaactatcaacaggcatatgattatctgatgcccttgtaccttagagggcacagtacgccgtcgatattacataacctggtctatgttttggttaaaatgaaggactatgagcaggcgagtaatttaatccgtagtcatggtattgccgaaaaaccagaaacgctgattagtgaattaatgaccgtacgaactcgcgttaaacgtcgcgaacctcgcgttacggatgagcgtcagaaaaaaccggttatcgcagcggcggtttcccctgaacgctcaaaacgcaatgtctcagccggtcaacctgcagcacccgcagcgaaaatatccgcgctgaactctggtaaaggcgcagtagcacaggcttcagccggcgctatggagaaaaaaacgcataacaacagcggaaggcaatcctcgccgcgacagactgagaaaataaacagcataacgaacgcacgttttggcactcatctgaaattttcacgcttaacatttgaatccgtacaggcgatgagttttgaaaagctagcccagaaatcaaaacaaatattgcgtatcaggctgaataatgtgagacatgatgatagcataacaacgattctcaataacattaataaacaaataggaagtcaccatcaggatataaaaaatatttctctagtcagagaaaaagcgggaactttattattgattgttaatttcaagcgtaatatcaaaactgatatatttagattgccagctgataaaaataaatcagaaagatttgtattagacttcaagtaa

SEQ ID NO: 455850 - DNA, 846 bp, Serratia marcescens
atgatttatatcttggcgttattatatttggttttggttgccctgattaccgagtatcttcgtagggtaaataggaaaaaaacgataaatgcgatgttagcgatctcaacacagctaataacggcgcaagaggaaacagcgaaacaagaatcgccaacagaacgcttactgcggaaaaccagcaaaggcatagtattagcggcgatgcttgacaagaacatcgcgatgaaaggcttggcaatgctgattgtgtttataattatacagctgctggagatctttgacgttttgtaccttggcgcaacctacaagccgattattctgttgctggcgttgcttgccattcttctgctgcccaataaaataaagaatagaattattgaggcaagggtgaaaaggatctctgacgatcttcctttcgtgattgatatgatggcggtatgcgtacagtcggggatgacgattgaaaatgccattcgctatttggctaccaatacggaaaccatcaatccggatatttcggtattgttaaagcgcgttattatgaagatggatgtgagtggcatgaccgaagcgttagatttgatgcacgatgaagtcccttgccaggaagtcagaatgctttcttctacgctgcagcaaagcattaagtttggttcttcaatatatgctgtattgctggatttatctaaagaaatgcgagaaattcagttgcttgccgtggatgagaaagtatccaagcttgctgcgaaaatgtcattaccaatgattgtatttattatgttccctatcttagcattggttggtgggcccgggattataaggatgttgtcgctatgggcgtag

SEQ ID NO: 455851 - DNA, 906 bp, Serratia marcescens
atgattgtaattttttttattctgttaaccattgttggtgcggtccatattgtattttttttgcggcagagtaaaaggatggcgcgcctgaataacgttgatccttttttttctgaggaaaagtttagagagaaattgagcggttatacgtatggtatggcgctcagtaatctctggtctgacttttaccggcatataaagggtaagaatagggcagtaacaataaagcatgcctctgttatatttttcgtgctgattggcggagttttccttaacgctcaatatataaaaatgtctgttgagctatttatcccggtcattttttttgccacgatttacatgctgtatctacgtagtaaaaaggcggcaagggtggagtttgagcttggcttttccgaagcacttagcattgttaacagtgccgtcggcgccgggaattctctgctccaggggattgaacagtgtggattgaaagtggacggcatcgtgggggaagagtttagagtcgtgtctcaacgtcttgagattggtgaggatatcgaacgtatctttatggactcttacgaacggctgttttatcgggaatactacttttttatcgttgccgtattgatcagtatgaaaggtggcggtgaagttaaagaagtgatcaacaggttaagtaagcttatctctgacgcccgcattatggacagacggaaatatgctaaaaccgcggagccgagggcatcgataaaaatattaatcctgattcctattggtttctttttctttttaagatttctcagtccggaaaacttcgacattctgctcaacgatcccactggccgaatgatcctttactactgtattggcagtgagctgcttggtcttttcatcgtgtggtctatgatgaacaagatatag

SEQ ID NO: 455852 - DNA, 1263 bp, Serratia marcescens
atgttggcaatccgagagcaggtgttgaaaaacatcgacttggaaaagcttaacggttttaaaaacgatcgtgacttactgaccagggaaatctttgaaaatatacagcgtaccgtcagtattatggggggatatctctccaatcaggcagcaggcgtactgacagagaatattgttgatgaaataaccggctacgggcctttgcgtgaactgatggaggatgattctatcagcgatattttggtcaatggtcctaaccatatttatgccgagcggggcggtcgtctggagcgtgttaataagaagttccttaataatgaacaactcactgaaattgcgcggcggctggtttccaaggtagggcggcgtatcgatgactcacaaccgctggttgatgcccgtatgcctgacggcagccgtttaaacgtcgttatttcgccaatcgcgctggatggaacatcgatttctattcgtaagttcggcaaaggcaaaaagacgctggctgacctgatagagtacggcagcattaatgaaatgatggcgaattttttagtgatcgcggcacgctgtcgggtcaacatcatcgtttccggcggcaccggctcagggaaaaccaccttgcttaacgcgttgtcacagtatatcggcgaggatgaacgcgtcctcacgctggaggacgcggcggaacttcggctgattcagccgcacgtggtacgcctcgaaacacgtatggcgggggcggagaatcgcgggatgatttctatgcgcaatctggtggttaactcattacgtatgcgtcccgaccgcattattgtcggcgagtgtcgcggagaagaagcgtttgaaatgctgcaggcgatgaatacgggtcatgacggatcaatgtctacgctgcatgccaactcgccgcgtgacgcgctggcgcgtttggagagcatggtcatgatgtccagtgcggcattaccgttggtagcgattcggcgtaatatcgcatcggcagtcaatttaatcgtgcaggttacgcgtttaccggacggttcgcgaaaggttataaacatcactgaagttatgggaatggaaggggagaatattattctgcaggatatatttactttcaccgccgtcgccgagcgtgatgacaatggccgtatcaaaggtaattttaactcgttcggattactacagcgttcagccgtttatcgaaatgccgttttccatgaacttattgagccactcaagaaactatttggaaagccatcatga

SEQ ID NO: 455853 - DNA, 1152 bp, Serratia marcescens
atgatgaaactattcagtgatgataaaaatgaagtaagtgaagagtcgggcgctggcgttgaaacgcagaataaaatcgttatcatttcgccgcttaaaagaaatctggatgagattaatagcacgcttttgcgatatgctatcgccgatgtggaaagtatcgtacaggatttcttaaacgtccaggatgtcgctattacgcagtacgctgacattattattgcagatatttcagattgtactgatactgccaagattcaacaggcaataagcgtcttggtgcctgttaatacgcgctgcattctgctgggcgacaatgattcgattattttttctcgggagataaaccgactgggagccagctatcttcattatgccagccagctgtctgaactgccggcgtgtgtgctggataattcacagaatgcgctgatgcgtggctcaatgatttttagcgtcgtgggatgcaagggaggtaccggcacctcatcattttgctatgatttattgcaggaggcggggaaaatcagcacaattccattgttgatggtgcagggtgcagcaggtagtcaggatctggatttactgatcggcagggcaatacccaaagatggttccatcttgccttttgataaaaacgtaagcgttaaaatggaaccgagagataacgcatggcagtttgacgatcaaaatttcagccgatttaatatgatatttattgataaccccgtctataactgtcagcaggaacgtttggattatattatcagacgttcacacagcctgattgtggttatttcccgcgagctatcatcattgcgtgttgcaaagtcgttgctggaaggtattgcgcgtcgcggtgtctctgaagggcaggctcagacgctaagaacctttgtttgccttaatgaacatcggccgataggtaaagacgatgtgacgaatgatgatattgaagagtatctgagcagaaaaatagacctcgtacgtgattatcgtagggatcccaagaagagcaatagccagaatagcgatgtgataccaaaatttgccgctatgctattgggaaaaaaattgataaaaaatgatagtagtccgaaacaaaaattggcgacgcttttgttgtcaaagataacgtccaagtcaatttag

SEQ ID NO: 455854 - DNA, 1458 bp, Serratia marcescens
atggaaagattattcaagtccgtcgtgatctttgggcgcagtattggccaggttgcggcttatctgtgcgtggcggtaacgttgctggtgtcgacggggtccgccgcaagcacggtttttcttaagcacggccagtcgagaaatgtgacggtcagcgccggcggcatcgaaaccgtgtttgtctctaatccgaaagttgcagattacaaggtgatcagcaatgggacgatcgttttatacgccaaaagcacgggtaactcagaaatcatcatctatggaaaaaaagccaaggtgctacgcaaactgaacgtgagcgttgatccgtttttaggcgatattaacaaggctatcgcacggcagtttcctggcaataatattgagataagccgctttgtgggggagtcggacaagatcagctatatcatcagcgggacggtgtcggatgaagcgagtatggatgccatttatcggctggtcggtgcgacggtaaatgctgaggctattgacggcgagcagaatggcggcagtagcggtagcgagacagaaaagcttaacaagaaggattttgattttatccgcgccaagaaatatgacaacgtcatcaaccgtatgcaacttgcgcaaactaatcaggttaacgtccagttgacggttgtagaggtgagcaaaagttttaccgatgccttgggtattgactggagtagcctgaccctcgatagcattgtgaccggcggcaccagcaggaatacctcaggtatcttcagtctggtcggttttaaaggcggatttgatgccaaaaatatcagcaccacgattaatgctatccagaatgactcggttgccaggattatggcgcaacccaatttgacggtattgtcgggggaaacggccgattttctggttggtggggaaattccgatcctgacgaaaaatagcgacagagagggctcaagcgttacgtataaagagtacggtatcaagttaagcattgccgccaaagttgagaaaaagaaaaaaatcaagctgttcttatccaatgagataagtaatgtgtcaggtcattattctttcagcgattatgatattcctacgctggtgacccgccgttccagctcgacgattgaattggctgatggcgacagttttgttataggcgggttattaagtgagagtgataaggaatcattaggaaaagtgccattcattggtgatattcctatcctgggggctttggcgcgtaataccggcactcagcgtgagaaaactgagctggtcatttttgctacggtgaatttggttaatccggtcacgtcaaaccgtaagataacgctgcctgaatatcgcaaaaacaacagcgctaaactatttcttaacgttggcatagataaaaccaatggtgagaaacggttgtcgaaagataccaacagtttcctggaacgcggcggttttgtgaaataa

SEQ ID NO: 455855 - DNA, 858 bp, Serratia marcescens
atgaaaaagaatatgttgcttatctatattgtcatgacgctggtgggcattgtgggcttgtatctgatactgggcaatgaacagcctcaggtggtcactcctccaaccgcaatgacgccggttagcgcacagcccgcgcaggaaagtattaccgtagcgatggccacacgagatgtgccggcaaatgccctattaacggcggatgacttccgtttgcaaacgctgaaaatcaatcagggcggcagtgaaaaacagcagttctcgacggaggggaaatctctaacgggttatctggtcgatatgcctatcgccgaaggcgcgttgattccggctgcggcactggtagagccgggcagcgagcgttatctctctttgcgtctgcagccagggcatgtgctttacagtttttatctgtctcagactgataattatctcctcgataatattaaaccaggtcaggggatcgatatttacctggtttatggcaagaacgtatcaagcgaaggtcatgcagccatcgtttcgcccgcttcatcgattgaaaatacccggctgaaagcattaatgaaggatcgtaaagtcctggcgttgcggatggccacggtcggtgagcaaaacggtgttgcgatggcggaaaatggcagccagttaattgttgagttgaaggaccgcgatgtcaaagtgctcaagggactggaagggaaagccaaaattattctgtttcctgcatcggccgaccagcaggatgcagggaggcattccgatcttccgggtatggaagccatgtggcctgtttccgacgaggttatttttgatgcgacggaaccttttgccgcaatcaatgagttacgcggctga

SEQ ID NO: 455856 - DNA, 273 bp, Serratia marcescens
atgacaatgctgagcagaattgagagtgcaaaagcaatgggtagcctgatgttagaccaggctaaaggcgccgttgggaagttcatctccagtgaaaaaggtgtaacggctattgaatatgctgttgttgttgccggtgtcgctgccgttgtgatggtgatcttcaacagtaagaccggcccggttgcgaagatgctgaacagtacctttacgagccttgaaagcacggtaaccagtacgattaacggcgatgccggcggggctgggaaataa

SEQ ID NO: 455857 - DNA, 933 bp, Serratia marcescens
atgcagaataacaagaaatataaaagattctctataaacttacttaatggatacatagcgttctacgcggaatcagaaccaaacgaagttgttatctatagctataaccagaatggggaaacgtacaccctgcatgaaaaacactaccttaatcatatagaatcaagattgctcatcgccttactgtccaatcctggacagataataagcaatgccgttttgcagcagatcggtaatgaaaaaaaaaacattaccagtaataatctgagacaggctattttatcccttcgctgtttatttatggacaatgaaaaaccacacagactgattaaaaataagccacgcgtgggttatagcttgcataacgtcgttgttttagatgaagaaacagaggtatatctttccagcatcaataggcctagccagcaacccagcggcaaacatcatcagactgcaacacctgcagagccaacaaccgcaagccatctttatcgcgcagcccttggctatagtaaaatgctgcttaatccggcctatattcctctgttgttccttattgccatgttcgtatggcaaatggaaaaacaaagcgatcgtacagatttccacccggtaggtacgcatgtggaacttattaataacaatttaaaaatgatagtcatccacagtaaccatgataaccggcgctatctggcaacgctcaagggggcgttaaaacgctacgcggctacccatcctcatcccccgcatagtgatgtcatcgtatttcaggcgtcaaactcgattcagctgaactgcgtcaatacgcagcaacatcttctggcaaaaaacttcagtatcaacgcggatatattgaaatccaaagcctccgtggacgaactcatccgacaatgtttttatcagttgcctgtcaacaagactggagaggcatag

SEQ ID NO: 455858 - DNA, 234 bp, Serratia marcescens
gtggtgcgcccgcgcaaggtctatctggccgagtgcgacgcctaccggcggcacagtcagggattggtggcgccggggtacggcagcgggttcaaacagcatgccgttacgccgctcgacgtcggcgtatatccatttctggcggtggccgacggtaaggggaaccagaacgccgccggcgctacggcggtaatcttgatcgcgcgctggaagcgcgttttataccctaaataa

SEQ ID NO: 455859 - DNA, 147 bp, Serratia marcescens
atgacagcagtaatttatgtggcagtgggctttgtggttggttatgcggtgcattacttctctaaaggccagaccaagaaagagatcgaagcgcagctggaagaactgaagaaagagttagcgcgcgcaactcaaaaacaggtataa

SEQ ID NO: 455860 - DNA, 492 bp, Serratia marcescens
atgcctggcaaattgattgtggtgctggcggtgatcctcggtgtgttcgctggtggctattttaccggcatgaacatcgtcactgccaaatgggacaagcaaaaggcggatgacgaaagggcgtggggccaggagcgcgaagccctggacgcagaccgtaaatccgctgaggcaaaggcccgcgcggcagcggggcgcgctgatgcggaatatcaaagaggggttgaggatggcaaggcaactactgatcggcttatcgctgatttgcgcagtggcaatctccggttgcacgcaaacgtcaaagccgcgcgtgtatcagcggcaaacgagtttacccgtggtgccggcgtcggttatgcaaaagcgcgagccgaactttcagcagcggatagtgaatttcttctccgcatcggaggagaagcagacgaagtagtgaaacagcttggcgcgtgccaggcaattttaaacgcagatcgggaggcggtacgatga

SEQ ID NO: 455861 - DNA, 510 bp, Serratia marcescens
gtgaagctgaataaaactggtgccgccggcgccgcgtgttctgtcatagtcatcatcggccttgtacttagcaacggcaatgtaaagacatcacaggccggacttgaactgatcggcaacgcagagggctgccagcgcgacccctacaaatgcccggcggacgtgtggacggacggcatcggtaacacgcacggcgtgaccggcgcgcgcaaatctgatgtgcagatcgcagcggactgggaacggaatattctcggcgctgagcaatgcgttaaccgctacgccgccggcggcaaattggcgcagggcgctttcgacgcggcggtaagcatcacgtttaacgccggttgtccgacgatgcagaagtccacaatgttccgcctgtttcgccagggcgacacggttgcagcctgcgagcagttcccgcgctgggtgtacgctggcggccggaaactgaaagggctggagatccgccggggtaaggagcgcgcgttatgcctggcaaattga

SEQ ID NO: 455862 - DNA, 228 bp, Serratia marcescens
atggaaaacctaacaactggcgttgcctacggaactgcagcggtgaattctggctattgggcgctgcagtggatggacaagatttcacctaaccagtgggcggcgatcggggttctcggcagtttgctgttcggtctgctcacctggctgacgaacgtctatttcaagcggaaggagtttaagcgccgcgaaagagagtgggaggagcgtgcaagtgaagctgaataa

SEQ ID NO: 455863 - DNA, 3612 bp, Serratia marcescens
atgacggtaccaagaaattatacccccgctaaatataccgccaacggttctacgacggtgttcccgtttgaatatcctgtattcgacgccgaagacctgacggtgctggttaacggtgcggttactaccgattacacgatcgccggcctaggtaactccggcggcggcgaaatcacatttttcacaccgccggccaacggtagcgttgtgcttatcagccgtatcgtaccgctggaccgaactaccaactaccagtacaacggcgattttcgcaacgagacggtcaataaggacttcgatcgtcagattatgattgaccagcagctgcaagagcaaatcgatcgctctgtgaaagtaccgcctgattccgacaccgaccccgatgaccttattgccgagctgaaagccgatgcggaccgtgctgagaaagctgcagaacgtgccgaagatgtagccgaaaagctgggcgatctggactctgccgtcgagagtgcgcgagcggacgccggtcgagctgaggctgcccgtggcggcgcggaggcggcgcgagataaagccgagcaatatgctaccgaggcggcgctcaacttcccgacattcaacagcacggccgagggtattgccggtaccgctgacggcgaatattttcgcgtaccacagcagatcggagatttgcgctcgttcattttttatcaacatgtcggtgcaaaggcagttgagaaaaccgactatccgtctgccagttctgtgcgcactgctctgcatgctcccaacctgatagaaaatagcgttgccgacgaaagagaaaagctgccgttgttggctggtgtatcggtgtggaacaactctccatcatcggcctttgcggcctatggcgtaaaaaaatctgttgttgcacctccgcttggagccggggagtcgacaaaaaactatttcttcacgcatgatctttcgtttgttaaacccggcgacaacgtcgctgtcagctttttatttatggggtctacattctatgtagccgcccagtttcgattcgctgatgggacacaggcggggggcgtgactaccgaagacctgggaaacggaatctttcgagcatttgcgacgacaaaggtgcccgcaacaacgacgctaatagatgtaaatttcggttatcagcagcgtgtcgtcggcgctattgcgggtgaaatagcactgccaatgctggcggtgtcggggcatgttatcgcaggtatcggcggtgatatgtcgttcgcggattatcagcacacctcaggtatcattgcgccaaatctgttgttcaacggttatgctgatccgaaattccagttgccgcgtttgcgcgtcggttcctcaccgtgggttccggtcggggaattggctgatcctgtggttgcgggcgttctctcagacaaaggcgccctgcagtgtctttacgccccaccagtggcctcgggctatacagaccatttagtggaaccgtggcttgatggcacgttctacaaaagccagtatgcggccgctcagttttatatttatgtcgctcccggttcgggggtggatgcgcgtgcagaggtcgataaatccgcagtgttttttctggatgaaaacgggaatttcaccgagattgagccggatatcattgagcgtatcagtgataatttgtttaaagtccgcgccagctatcaatacacagcaggcacgccgcgccgcatttcgatgggtgttcgccagagcagtacggtttcgacgttctacgtgttcggcttctttatgtctgttgccggtcagaaaatccgagacattgcagagacgtctgcacgggatgcatccatcgaagaacgtatcgacggcaatgcagataacatcgcattcaacccatctgcagatccatccgttcagcagcaaccgatttattctggctccagcgcatggacgccggtcgctagcctgcccgctgccgtgcgagaaatagcccagcatggtgcgttagcggcgctgccggcactacgggcttcgtctggctataacgatggtctggtcgaaattagcctcgctggcgttaaggctggtgactacgttcgcacagaaaactacgtgtatatcaatgccgacgcgggcgttgacgttaaaactgcggtcatcactgcgtgcaagtcgttcttctatgacagtacatttcacgctgtaacgccgacgattaaagagcgcatcacagacaacatctatgttgtcactgccgaatatcactacacggcggacgccagacgggtaatttttggctctcgcaacgtgctgaaaaatgccgatttgtacgtgttcaatacgcgtgttgctgtatcagacaaaacgatactgaaaatcaacgcatcggcggtgcgtgatccgcttctgaacgcatatatccagcagcaactgtcgagcgacgggacatatcctgcgaggctgaaagtcgatacccccatcaagggagcggagaactatatattgctctctgatcagctattcgtgccgcctgaaacgcctctgctgctacagtgtccgcagatgcttatgtactggacacaagatatgaaccagtttcttgactggacattcattggcagaacacctccagatcgaccgtattcttaccagacaaaccgcacgtttgagattgaccccgtcaaactcggttcgtccgtcagtatcggtttccacgaccgccagaagccggctcagtggtcacggcgtaacgtcacgattgttcgcccgccggctacggccacagggacgaaaaatatctcgcttatcggtgactcaatcacgcatcgcggcatgtctgcgcgcgtgtcagcgcttctacgagccgcaggtttaacgattaacgaaatcggcacgatgcagcagcaggagagcggagtcggagaggggcgcacgtcgtggaacatttctcatgttgtcggacgccgaaacgtactcgatagccagcgcatagttatcagctacgacaatccgagcacgacgcacaaaaatccatttctgttcgaagccacggccgcgcagctggctgcagcaccggaaatgtgcttcctaaacactggcgctgtagaggaacaatcctacgcagaaacacaggaggggacgttctacacgtttgactatcgtcgctacctcgaccagcagggttttgcagaccctgacgtcgtcagcgtgtcgtttgcgtggaacgatggcacagcagcaatcccgccggcgacatatatcgcgcagatgaaatatgttgtcagccagatcaaggttgcatgccccgacgcaatcgttgctgtggctccatattgccattcgtacaagtttgccgatcgctggaacacgttcacgtctcagtacgtgcgcaacacgctcggcgcgttcagaaaccgccaggctgagaaaatacacgttattccgacgtgggctattttgccgacggatactgagtgggacagtgagggctacacgacaacagttgacccggaatcaggttcgtttgttgacacgcgaggggacggtattcacccgaacccgcatgggcggcagtatctggcatatcagtgcttgttcccgtactacatgtgggcttgcgctcaataa

SEQ ID NO: 455864 - DNA, 339 bp, Serratia marcescens
atgcacgaagattacaaaacgcggctgaccgcattatgcgataaattgacgggcgtagtcctcacggagtccaaccccgataactggccgggggcagggaaagcgagcgttgatctaacgaaagatgagcgcggcgaccgatactgggaaaagaagaacgcggccgctacgctgactttgcttgtcaaaatccattctctgatcgggatgcataatcgcggtggcacgcctgctgatcctgaaaacaccgtagagtccaaagtggataagcagattgccaaagcggaagccgacgcgcagcgcatcgttgccaaggcgatggcaaaggctaagggctga

SEQ ID NO: 455865 - DNA, 2697 bp, Serratia marcescens
atgaggataccaaccggaaatttcgggaacgtaactccacaagtccaaccgtcccgggccaacgttcaaggtgttggagccgtgggtaatgccctatccgtcgttggtggtgctgcggggcaggcagtggctgatattcaaaagatccaagacaaagccgatctcgcagcgacgcaggctatcctcaccgatctggaagcaaaatctaacgaccgatgggagaatcccgaaacgggagcgcttgttacgcgtcaggggtttaaatccgccggcgtaggttccgatatggataagctggacgcaacggattacgacgaagctcgccagcgggttccggaaagccagcggatgtactttgatgcgcagtggaaagcggggcaaatccgccgcgcgagcacgtacaacaccttcgagatttctcagacggcgcaggcacaacgccagcagcttaatgctaccgtgcagaactctgtcaaacaggaagcggctgcgtttgatgatccaaaggctgcggagcttatccgcggcgcccgccggcattctatcgagctgtacggacaggcgcagggctggtctcctgagcaaatcacgtctgcagttgccgaagctaatcagcaggctatgacgcaacgtgcgcagaattatgcggttactaacccggcggggtggttaaacggggatttcatgtctgacggtggtggctccggtatggatatgcgggcgatcggcattgtggagtcaggcggcaaacacttcaaagcggacggaagcgtagttacatcccctgccggcgcgcagggtaaataccagttaatgcccggcacgggtaaagagctggcggccaagcgcggcgtgcagtacgacccgaatgatgaggagcaaaatacgctccttgcgagtgattatgctaaccagctatatggaaaatacggctctgaaacgctggcgggggctgcgtataactggggaccggggaatgtcgataagctgatcgcaaaagtaggcgacccccgtaaaggtgagctgtcggaaacagagttcgttaagcacctgccggccgaaacgcgcggttggctgactcgataccggaaaaacaaagccgggatagacccggttaccgtgaacaagatcgacaatattgccgaagcgcaaatccgtgagcaacgcaccgcggtgcgcaatcagctcgagccggtcttgaataattcgcttacccagctttacaacggcgaagtcccggaggctatgcccgataaaggcactatccaattcgcgtacggtcctcagggcgaaaagatggttaggcagttggggattgctattgacaatgcgcggacgttccaggcaatccagtatgtttcacccgcgcaacagcaggaggaactggcccgagttaagccgcaggtgaacgacccggattacgcgctaaaaatggacgcctatgggaagctttccgctttggtgcaaaagagcaattccgcgatccaggcacagcgtgacgctgggcgctttaatgacgccttactaatgggcgaaaaactcgacccgacagataaagcgatgcagaaagccgcggacgcaacggctactgcgcggaacttccgtattaacgacgtaagcacgcacgatgctgtcgtccagcaggtggcccaaacaggcattatcccggggaaggtaaccacacaactgacagcgatttctcgcgcccgtaaccctgaggtagtgaagcagggggccgacttgttcgatcgcttgtatgacaccgatccggcctctgtgggggatatgcctaaagaaatgcaggggttctacatgtcagtcaagcagttgactgacgccgggatgccttcggacgaggctgtgcagcacgcgcagaatattacctataaccaaaccgatgcactgaaggcgcaactagcctcagatcaaagcagcgcctcttacaaaaaggaccgtagcaaggcaatgtcttctgctgcgagcgatatggcgcaatggtttcgctgggatccgtcggccgatgaccaaacaccggaagccgcgcgcttccgcaatgactaccaaactctctatgacctgaattaccgtacgtcaggcggcaatgcggatgccgcacggaaactgaccaaccagcagatctctaaaaattggatgatcagcgaggtgaacggcgacgctaaattcatgaagtatgcgccagaagctttatacaattatggccctgcgggatggcaggctgcgcagtggaaggctgaaaaagaaaagctgatgtatggtgagcgggataaggacattatcaccagcggagcttctctcggcataacttccgggcgtaccgcctttgtggatacgaaaacccctaagtcgaaaattggcggagagttagagatcgtttccgatgtaacgacacctcgcaatggcgattatgcgatttgggtcaagcccaaagaggggccgccacgtccgtattacgactactatgggcggccgatgcgatggaagccttccctggaggattgggagccttaccagaagatgcaaaaggagcgggaagagaaggatcaagccgagatgtcgaaaggccaggaactgcgggacttcaaggataaacaccgcgctttagacgcaatgtacaaacgtctgcacgatgaacgcgttgatcgtgtgaaaaaatacttttcatggagttctgaataa

SEQ ID NO: 455866 - DNA, 471 bp, Serratia marcescens
atgtgcacaggtgttgaaatcgcactggttgcgtcgtctgtccttgctgctggcggtgcagttgcgcaggggcagcagcagcggaagatggcgaactatcaggccaaccaggcacaggctgacgccgaagcacagcgcgcggcggcaaaggttgaagcggataaaatccgtaaggccggccggcagcaggcagcagcggctaacgcggcgctggcggcgtcaggggtggaaactggcgaaggtacagctctgcgtatcacgtcaggcattaccggcgacgcggaagaggatgcatataccacgattatgaacgggatgaataccggtgctcgtcttaatgcccaggcacaggccgatcggatcagcggccgtaatgcttcgactgctggctacatcaacgccggtagttcgctacttagtgcaggcggaacggcatataacggctggaaaaaatcagggagcaaaaaatga

SEQ ID NO: 455867 - DNA, 450 bp, Serratia marcescens
atgatccgtaatgcgaccgccggggatatcccggcactgattgaacttggcgcccggatgtacctggaatcccgctacgcggaaaactcgccgtttgacgggcagaaatgtgccgacctggcgaagcacctgatcgtggagtcgatgggctgtgtgttcgttgctgaacgcgacgggtgtgttatcggctggctggccggcggcatcgccgagcagtggttttctcgcaagctgatggcgttcgagtacggcctgtttatcgcaccagaacatcgtggtggctctgctggtccgcggctcgttaaggcgtttattgaatgggccggagccagcggcgcagcggtaatcaacatggggatcaccaccggcgttcacgaagaacgtacgggcacaatgtatgaacggctcgggctatcccgcacgggcttactgtattcgttggaggtttaa

SEQ ID NO: 455868 - DNA, 1995 bp, Serratia marcescens
atgcgcgccaatatcatcaaaaccaatttcaccgccggcgaaatctcgccgcgcctgatggggcgtgttgatatttcccggtacgccaacggcgcgacccgcattgaaaacggcatgtgcgtggtgcagggcggcgttatccgctgtccgggtttgcgtttctccgctgccgcaaaatatggcgaccggctggcgcggcttatcccgtacgtgttcaaccgttcccaggcgtatgtgttggaaatgggcgacgggtacatgcgcttttaccagaacggggcgcagttggtgaacgccgacggcacgccttacgaggtggcaagcccttacaccgccgcgatgctccgctcggtgaagtatgtgcagggcgccgacacaatgtttcttgtacacccggctgttaaaccgcaccggctgcagcgccgcgggcaacttgattgggttctggagccttgcccgttcatcgtcgagccgtttgacgagatccgcccgacgcctgaaaagtggtgcaagccatccgttaaggagtttgtcggcagcgaaatcacgttaacgctgagcgatgctgagccgccgaaggacagcgaagaaaaaccgccattcacgggcgatggctgggttgccgaagacgttggctcgtacgtccgtatcaacagtggcctggtgctgatcaacagcgtgaccgatgcgcaaaccgctgttggggtaatccgcacggacctgagcgccacgcagccggcatcccctggcgcttggacgcgcgaagacaccgtttggacggacgaactgggataccccggtgccgtcacgctgtatcagcagcggctggtgctggccggcagcacgcgctacccgcaaaccatctggttcagcgaaaccggtatttatctgtcgtttgagctgggtacggatgacgatgacgccatcagttttacgctgtcctctgaccagctgaatccgattgttcacctcgcccagatgaacacgctgatcgcgctgacctatggcggcgagttcactatcaccgcggggaatgattcggcaatcactccgacgaatatttcagtgaaaaaccccagcccgtacggctgcaatgacattcgccctgtacgagttggtaccgagatcatgtttgtccagcgcgccagccgaaagctgtatgcggtggcgtacgaccccgacagcttcgtgtcgtactcggccaacgacatgaccgtgctggcggagcacatcaccgccggcggcgtagtggatatggcctaccaacagcagccggatgcgtttatctggatggtacgcagcgacggggttatggcaacgatggcgattgaccgcgaccaagaggttatcgcctggtcgcgccaaatcactgacggggcgtttgagtctgtggccgccattccatccgaaagcgacgacgtcgtgtacacgctggtacgccgcgaggttaacgggcaaaccgtacgatacgtcgaggtgttcgaccgccggctgcaaacacacgcagccactaccggggagaacgccgccggcgcggagacctggcagggattggaccacctggaagggaagacggtcgatgttgtggccgacggttcggtgatgccgccgcaggtggtcaccggcggggaagttacgatcccccgcccggccaaggctatcgaagtgggcctgcactacgaaacgacgatcgagacgctcacgccggagctgtccaccactgaaggcacgacgcagaacgccagaaagcggcaaagcgaagtcaccctgcgtttcctcgaaaccacaggcgccgagttgaacggtcaggttatcgcgttccgcaatttgggcggtaacctgctcgacaaacctgcgccgttgttcacgggcgatatgcgcatcgggcagctgggctggtcacgcgacaaagacacgctggtcattcagcagcgccagccgctgccgttccatctgctcgccattatttccacattctcaagcaacgggggctaa

SEQ ID NO: 455869 - DNA, 573 bp, Serratia marcescens
atggcttccaccatttccagcgtgagcatttgctctaacgctctcctccttctcggcgaccgcccgataaacagctttgaagaaggcaccgaccacgccaggctgtgcgccaacttgtacccaaacgtacgcgatgacctgctgcgtaaacatccgtggaattgtgccgttaagcgcgtcgttctgtcgccaagcgctacagcccccgtgttcggcttccgctttcagttcccgctacctggcgacatggtacggatactgtctatcggcacgccgtgggaatacgaagcgtatcgggttgaagggaataaaatcctggcgaacatgcagtcgctgcacctgcgttatgtgttccgcaacgaaaacgaggccacctgggatccggcgctggtgcagctggccgaagtgacgatggcggccaagctggcgtatgccgtaacaggttcggccagtctgcgcgacgcgctgacgcaagaggcggcgttcctgctgcgccaggcaaaagcgattgacggtcaggaagaaccaccggaagagctgggcggctatccgacgcttgagtcgaggttttaa

SEQ ID NO: 455870 - DNA, 369 bp, Serratia marcescens
atgagcgatcaggcaatcgagcaggaaattcaggctaaaggcaagaccgcaccgcgtgtcacgccaggccatatcgaaagcatcatcaccagcgagcattactttaccgccgcggagggcgtatccggtgagttcgccaaaactgcggaacgctacccgccagagggttcagtacccgcaccgctggagctgctgacgttctgcgtattggtgctaaaaaatggcttcactgtcaccggtgagagcgcctgtgccagcccggagaacttcgacgcggagatcggccgcaaagtagcgcgcgagaatgccatcaacaaaatctgggcgctggaaggctatctgctgaaacagcgtttagcggaagagtaa

SEQ ID NO: 455871 - DNA, 831 bp, Serratia marcescens
atgtggaagattaaaaacgtattcatgaacgcagacgccggcggcgacgcgggcggcgctggtgctgagcaacagcctgctgagcaggataaccaaggcggcaactccctgctgagcacgggcggcgctggtgctgagcaacagaccgctgacgtggatttcatcccggagaagtatcgtgccaacggagaagacggcaaattcagtttgcaggaatctgcgcgcaagctggccgacgcatatacgcacctggaaaaacgctttggcagtggtgatgcaccgccaaagactgtggacgagtacgcgccaaaggtcgaggccgagggcttcaactgggaagagtttaagggtgacccggaaatgcagggcttcctgaaagcggcgcacgcaaaaggcatcaccaacgaccagatgggctttatccttggcgagtacatgcagcgcgcatccggccttgttggcggcgccgcagagctggacgccgacgcggcccgtaccgagctgcgcgagacctggaagaccgacggcgagtttaacaaaaacctcggcctggcgttccgtgcgttcaacaacttggccgaccccgccgacaaagggaagatggacgagatcggcaacaaccctatggtcattcgcatgcttgcgaagattggcgcggagatgggcgaggattctccggtagagggcagcgacccgcaggagcagcaggctatcaaagacctgatgaagtccgaagcctacaccaatccaaaacatgccgaccatgagcgagtatccgcacaggttcgcgcgttctaccagaaaaactacggcgaccaacccgtcgcataa

SEQ ID NO: 455872 - DNA, 228 bp, Serratia marcescens
atgaagaagataggcccgcaggactacaagaccctgttcaccgaaatgccggcaggcgcggaaattctggatgaactaacccggcgatttggccgggctatctacgtacagggcggacacgaagccgatcgcgaatcgtgctaccgggcggggcagcgctccgttcttgatttcattttgatgcaactcaacagagctgacggagtaaccgacgatgtggaagattaa

SEQ ID NO: 455873 - DNA, 1626 bp, Serratia marcescens
atggatgacaccgccgtacggctaatcagacgcgtggacacgctcaaaggcaaccgccagatgcacgaaagcgtctggcgtgagtgctacgactacacgtatccgctgcgcggcgctggcttttccgacgaggttctcgacgcccaaagcgctaagcacaaggttgccaagctgctggacggcacggcgaccgatagcgcccgtatgctggcctctgcgcttatgtcaggcatgacgccggctaacgcccaatggttgaacctcgacagcgaatcactgccagacgacgccaaggcgtggctatcgacctgcgcaacgctggtctgggagaacatccacgcggccaacttcgacgccgagggctacgaagcaaacctcgacgtggtgtgcgcgggctggttcgcactgtacatcgaggaagacaaggaagagggcggctacacgttccaacagtggccgctggcgcagtgctatgtcacctcgacgcgcaaagacggcatcgttgacaccatctaccgctgctatcagctgacggctgaacaggcggttgccgagttcggcgccgacgccgttagcgagaagatccgcggggcagcgaaggacaagcccgacgaaaagtttgattttctgcacgccattttcccccgcaccaactacgtcgttaatgcgcgcctggcgaagaacctgcgctttgcgtcgttcaacgtggaggtcaccggcaaaaagattgtgcgcgagtctggctaccatgagttcccggtatgcgtgccgcgctggatgaagatccccggcggtgcgtacggcatcggccccgtgtacgacgccttgcccgactgcaaggagctgaacgaaaccaagcgcatggagaaggccgcgcaagacctggctatttcaggcatgtggatagcggaagacgacggcgtgctcaacccgcgcaccgtcaaagtcgggccgcgtcgcatcattgtggcgaacagcaccgacagtatgaaaccgttgctaactggtgccgacttcaatgtcgcgttcactgccgaagagcgcctgcaggccagcattcgcaaaatcatgatggccgaccagctgcagccccaggacggcccggctatgacagctaccgaagtgcacgtgcgtgtcgcgctgatccgccagctgctcggcccggtctatggccggttccaggcggaatacctgcagccgctggtcgaacgctgtttcggtatcgcgttccgcgccggtgtgtttcctgacccacctgaaagcctgcaaaacgcaaacttcaacgtacgctacatctcgccactggcacgggcgcagaagctggaggacgtcacagcgattgaacgcctcgggcagaacgtggcgaacatggcgaacatcagccaggaagttgttgacctggtcgatgtggacgaagcgacccgcgtcgttgcggatgcgttgggcgtaccggcaaaagtcattcgctcgtcgggggctgtggctgacctgcgggagcagcgcgccaaggcgcagcagcaacagcagcaacaggcgctgatgatgcaggccgggcagcaggccgcagatgcagcagggcaggaggcaggggcggcactcggccagcgactggcaggtaaccaatga

SEQ ID NO: 455874 - DNA, 450 bp, Serratia marcescens
atggcacgtagcaaaaacaccaagattgaaaccccagggcaggagacgccgcaggacgacgacagcgacctgattggcggtgctgcgggtgaagagacccccaaagaggcgaacacggcgcaggagctgaacgcggccactgctggcgcaacggtaccggaaccagagagcgcacctgctgcacctgctgcacctgctgcacctgacgtcacggcgcgcaatgctgcgctgtcggcgctgaacgcgcagggcttcgccatcatttcggcgttcgaggggcggggcttcgttaccccggacggccagcagctgaccaatagcctcgactttatcgccctggtgaagcaggccactacgccaaccgcaccagcggttcgcaacgaagacggtgcccgcaaggtaaccggcacaccggtgctgacagagcacggctggcatgtaccacattga

SEQ ID NO: 455875 - DNA, 2166 bp, Serratia marcescens
atgcccgagaacaataactggggggcgacgcctgacgagtggtttcacttcgacctgatactcggccgcagtgacaacctgctgccggtggtgtgcaaccccgaagcgacgatctccccaaacagtaagctgaaagcgctgggtaagaccccgagccgttataaccgtgaccgccaggccgccggcgttagccagtgggcggaacgcgttatcaccgatagcgacctgacccgctggtctgccgaacccgattacgggatctgcgtacgtaccgggcatggttggctggcgttggattgcgatagcgatgtgcctgcaatccaggacagtgtgcgcgatgtgctgctggccctgctcggtacgttgccgccgcgccggtaccgggcgaacagcagcaaatgcctgtacctgctggctatcgccggcgactatcgcaaacgcatccaccgcctggccgacgataacggcatcattgagctgttggccgccggtcagcaggccgttgtcgccggtacccacccaagcggcgcccgtatcgaatgggatggcggactaccggacgagccgcccgttattacccctgaacagcttgaaacgctgtgggcgcagctggccgacgtgctgccggtggaaacgtctaccgaggcgggagtggggcgggcacgtgaccgcagcgtcagcacccccgacgcaacggacgaggtcgccgactacctggacgccaacggctggacgctggactacggcgccagcggtgagcgttacatccgctgcccgttcgacgacggccacagttcggccactgacaccacatcaacggtttatttccctggcggtaccgctggttttgagttgggccactttaagtgcctgcacgccagctgcgcccaccggaacgacggcgactacctcaacgagattggtttccgcgacagcgatttcgaggcgctgccggtagaggtgagcgagccggcgccgctgccgacgttcaagcgcgacaagttcggtcagatagaatcgaccatcgacaacgcggccaaggcggtaatgcggcccgacttctgcggcctgcagatccgcttcgaccagttccgcgacgagataatgttcgcgcccgaagattccgaccaatggcagtctttcggcgacccggattactcgcgcctgcgcatcacgatggagcggcgcggcttcaagcctattggccgcgagctgatccgcgacgtcgttatgctggccgccgacgagcagccgttcgacagcgctatgacctggctggagggcttgcgctgggacggcgtgccgcgcatcgagcgtttctaccacacccacttcggtaccgaggacagcgcctacacccgcgcggtgtcgttgtatatgtggacggcgctggccggccgcgtgctgtcccccggctgcaaggcggatatggtgccgatcctggtgggcgagcagggcgttaagaagtccagcggcgtggcggcgttgtcgcccgacccggcgttctttactgaggtgtcgttcgcggagaaagacgacgacctcgcgcgcaagatgcgcggccggctggttgccgagatcggggagctgcgcggcctgaatacccgtgagctggaatccatcaaggcgtttatcacccgtacgcacgaaaactggatccctaaataccgcgagtttgcgacccagttcccgcgccggctggtgttcatcggtaccaccaacgaggacgagtttctcgctgacaagacgggtaaccgccggtggttgccggtacgcgtcaccgaggtgaatgtcgatgcgatacacgctgacgttctgcagctgtgggcggaggcgcgcgagacctataagcgattgggcggcgtccagttccgcgaggcggagcgcctggcaaccaccgtgcacgaacagtacacgattaaggatgcgtggcttgagacggtggagcgctggctggacgaacccgacatgatgacggaagcgacgccacgaagccgcgaatttttacgcgctacggacgtgttacgcgatgcgttgaacctcgaccctaaaaacatcggcaagcgcgaagagatgcgaatcagcggaattttgcaaacttgcggatatcgacgcgttcaacgacgcgttgaagggaaaatgacaaggattttcgagccagtgtaa

SEQ ID NO: 455876 - DNA, 690 bp, Serratia marcescens
atgatttctgaaagaatccgccaagcacgtaaagaaacaaaactttctcaggaaatgctgggaaagcgcgtgggggttactaaatccactgtttcgcagtgggaatcagggacaacagaacctaagggcgaaaacctcctcaagctagccgacgcgcttaacgtcagcgccagctggttactgggccgaataccctcgcaacaagcgcgggacgaaaacgccaaacttgaaggcgtactatccccctgggattcaggtacgccgttagaaaacgatgaggttgaagtgcccttttataaagaaattcagctggccgcaggtaccggctcgttcgtcgacgttgaccacaatggcaataaactgaggtttgcacgctctactctccgcaaagcaggcgttgagcctgagtgcgcggcgtgcgtcagtatcatcggtggcagtatggaaccagtgctcgccgacggcgctgtcgtcggggtggacaccgcacagaccgcagtaaaggacggcaagatgtacgccatcgatcacgacggccttttacgggtaaaactcctgtatcgcatccctggggggattcgagttcgcagttacaaccgtgcagagtatgacgacgaagagtataccggcgccgcagcatcgagcattaaagtgatcggccgggtgttctggtactcggtattgttgtaa

SEQ ID NO: 455877 - DNA, 909 bp, Serratia marcescens
atgagcctggaatcaaatctcgagttaaacaacaagctggtcgccgagcagaacaccctgctgtcccagctgctggcggcgctggccggcggcaaaaccttcacccctgacaccccgccgcagccaaaagcagaaagcgccggtaagacgcgcaaggggccgttctactggaagcatgtagacggcgatgccgtcggcacagtaaccacagaagcagaactgcaacatgtgctggcggatgccgaacgacagggcacgtcatgcgcggagatcaacaaggtcgagtatctgcagctgaaagaagaggcagaaaaatcggcaacggccaagccgccttctctggaagaccagccgttgccggtagccgtggcgctggcggcgctgtacggcgataaagcccgcgcgctgaccgccgagcagttggcggccgccatccacatcactgaaacgatggacggcaaagagcgtgacgagcagatcgacgccctcacaatgacgctgaaaggcgtggagcgcgcacggaagctgcacggcgccggagtgttcgacctggcgttgcaactgctggaacactgggacgcgctgccgggtatcactgaacgtagcgcatatgccgagctgctgctcgacacgccgaaggaaaaacgcgctgacgtgaagccggccaagccgaaagctgaaaagccgaaagctgaaaagccgaaggacacagaaagcgagccagcagccgaagaccctaaagcgcttttctccaaggctgaaaagttgatcctgacgctggcaaaaggcggctaccgtagcgaagccgtgcaaatccttgccgaccacaacgcgaagaaactgggcgaagtcgcaccggaagacctcccgtctgtgattgctgcggcagagaaagcattggagggttaa

SEQ ID NO: 455878 - DNA, 1314 bp, Serratia marcescens
atgccagaccaacacgcaaggctgtccccttcgtcggcacatcgctggatgcgctgccccggcagcaccgcacgggaagccggtattattgacgaaggttccccgttcgccatcgagggcaccgcagcccacgccatcggcgaatgcgttctgcgtaaccgtctcgatccaacgttaggcggccacgtcttgaacggcggccagaacgccgccgactacatcggcacttacccgcttgccagcggggaaggcaccgacacggggccgcaggtcacggaggaaatggcggaacacgtccagacctacgttgagaccgtttgggcgctggcgcggggcaacacgctgctggttgagcagcgcgtagacttttctgacgtaatcggcgtcgaggagtcattcggtaccgctgacgccgttatcttcgccggcagcgagctgcagatccacgacctgaaatttgggcgcggtgtgcaagtcgatgccgaagagaacgagcagctacagctgtacgcgctcggcgcgctggagcagttcagtatcctgcaggattttgaaagcgtgcgcctgttcatccatcaaccgcgcctcaaccactgctctgagtgggcgctcagtgtcgccgacctccaagcgttcggcgagcgcgcccgtgaagcagctgcggcagcaatcaccaccgccgcagtcgctaattgtgaaggcgtcgacaccctgccgctggactcgttcgcaccgggtgaaaagcagtgtcgcttctgtaaggcaaaggccacctgtcccgcgctggagcagttcacgctgaacaccgtggccgatgatttcgttgacgtgacgcgcgacattgagccgcagctgtccggcgcacacgaacgcatcgcagtttgcgacagcgcacacctcgcgcacgtatatggactgctcgacctggtcgaaggttggtgcaccgccgtacgaggccggatgaatgccgaactgaccgccgggcatgaggtgccggggtacaagctggtagccggtaagaaaggtaaccgggcgtggcgcagtgaagcagaggccgaagccatgctggagcagttccgcctcaagaaagaacagcgctacagctacaagctgatcggccctgcgccggcagagaagttgctgaaaaaatccaaccctcgccagtgggccaaactggaaaagctaatcacccgcaccgatggcaaacctaccgtagcgccggaatccgacccccgcccggcgttgaatatcaaccctgaaaacgattttgaagatgtagccgctgccgaagcggatgccgaatccctcatttaa

SEQ ID NO: 455879 - DNA, 2061 bp, Serratia marcescens
atgcgaaaactctggctagataaagaaacattttgcgaggtgcctatacgcaacggcacccacgtgtacgcggaaagcgccgaggttatgctgatagcctgggcgatagacgacgagccggtgcgggttatcgacctgaccgccggcgatgctctacccgaacaatttctcgcggcactggccgatcctgatttcgaagtgtgggcacaaaactcccactttgaccgcacggtaatgcgccacgccctgcccgatatcctaccgcccgttgagcgctggcgtgacacgatggtgcaggcgctggcgcacggcctgcctggtgcgctgggcgcgctctgtgatgtgctgagcattccacaggacaaggcgaaggataaagaaggtaaagcgctgatccagctgttctgtaagccgcgtccgaagaacaacaaactgcggcgcgccacccgcaaaacccacccggaagattggcgccggttcgtggcctatgccgggaacgatatcgaggcaatgcgcgaagtacataagcgcctgccgaagtggaattaccagggcgcagagctggcgctgtggcatcgtgatcagcgaattaacgaccgcggcgtatgcgtggacgtcgaccttgcagaagcggcggtcatcgccgtggagcaagaacaaaaacgcctggcgaagcgtacccaggtaatgaccgacggcgaagtgcaggccgccacgcagcgcgatgccctgataaaacacatcgtggaatcctacggcgtggaactacccgacatgcagaaaagcacgctcgaacggcgtatcgccgacccggacttaccgccggcggttaaagaactgctggctatccggctgcaggcgagcacaaccagcaccagcaaatacaaagcgctgatgcgaggcgtgagcagcgacggccggctgcgcggcacgctgcagttctgcggcgcgtcacgtacaggccgctgggcgggccgcttgttccaaccgcagaacctcccccggccgtcgcttaaacaggacgaaatcgccgcaggcatcgaggctatcaaagcgggctgcgccgatctgctgtacgacgtgatgccgctaaccagttccgcgatacgtggctgcatccaggcgccaccaggtaaaaagctggtagtcagcgacttgtcgaacatcgagggccgcttcttggcatggctagccggcgaggagtggaagctgcaggcgttccgggattacgacaacggtacaggtgcagacctctacaagctggcttatgcgcgagcgttcaacatatcccccgacgacgtcaccaagcaccagcgccagatcggcaaggtgatggagctgggcctcggatatggcggcggcgtcgcggcatttgttaccttcgcgctggtctacggccttgatctggaagagttggccgacgctgcgctgccgaatatcccgctcaatattcagcgagaagcacgcagttggtggcgcaagtccgtagagacgaaacgcacctacggcctgagcgaacgagtgttcatcacatgcgattcgcttaaacggctgtggcgcaacgcgcacccggccaccgtatcgttctggtcggaactggagacgacagtacgccgcgccattggctccccgaaaaatacgtttgtttgccggcggctcaaggttcgccgcgatggcgcctggctgcgcatcgttctgccttccgggcgggcgatctgctacccatccccgggcatcaaagacggcaagatcacgtacatgggcgtcaaccagtacagccgcaaatggcagcgccttggcacgtacggcgggaagctggtcgagaacgtaacacagggcggctcgcgtgatgtgttggccgacaacatgccccacatagaaaacgctggctatgacattgtgctgaccgtgcacgatgaagatatcaccgaagcgccggacacccccgagtacaacgccgaggcattatccgccttgctcgccactaaccccgaatgggccgatggtttgccgctaaacgcggcgggctttgaggcttaccgctaccgaaaggatgattaa

SEQ ID NO: 455880 - DNA, 558 bp, Serratia marcescens
atgacaatcacaactgagcagcagaaagagctcaccatggaagaaattggcggtctagtgtccgccattcacaacctcagcaaagaccgcctgcgcgagctggtgctgcaattatggctgatggctgaaggatacgaaaaagccgccgtggataagcgccggctgacacgtgaactcgacgtgctgctgaacggcgagaatgcggcccagcaagcaagcctatgcgatatcgttgcgcaggtgcacgcggaaggtatcaggctgtccgcgcgggaggcggtgcctgtggcggtagttgagagcagtgattacgtcacagcggcacaaatcgcaggcgatgaaccacgcaggacagcggtaaaagaattgtacgacggcgcgctggttatcggccagcacctcttcaccgccccgccagcgccagtagtgccgccggaaataaccgacgggcatcaggaggatgtggcgatgggcgataaatgggctgacagtttccgcgccggctggaacgcctgccgcgccgcgatgctggcagcagcgccggaggtgggggagtga

SEQ ID NO: 455881 - DNA, 270 bp, Serratia marcescens
gtgaccgcagtacgcgaaagcgctatcgaaaagcacctgcgcgtcgaggtgcgtaaagccggcggcgtggcctacaagtttatatcgccgggggtgcgtggcgtacctgaccgcgttgtgctgctgcccggcggccgcattgtcttcgtcgagtgcaaagcgccgggcgagaagccacggcctgatcaactacgctgccacgcaaagctgcacgcgctgggcttcgacgtagtggtactggatagtaaaaatctggagggaattctgtga

SEQ ID NO: 455882 - DNA, 231 bp, Serratia marcescens
gtgaaaaacaccattcaagatttgatgaatcaccagttcgccatgctggaaaccgtcaccgatccgaatatcaaaggcgaggttttgcaggaagaattagcccgcgcgaaagccgttgtcgatatctgcggcaccatggtgaatacctaccgcattgcgctggatgcgcagaaggcggtttacgaagggtacgcaggtagtgttccaaaagtaatggggattgagaaatga

SEQ ID NO: 455883 - DNA, 642 bp, Serratia marcescens
atgagccaaaaatatacagaagaacagtatttattcctcgacattcattgccaaggtaaaaccttcaaagaaataacggagcaattcaactataaattcggaacaagtaaaagtgtaggctcacttagcgaagtcatacggcatcggggtttaagtaaccatatagtgaaagagccccgttacagcgaggcacagctaacttttttatttgtaaaccgtaatattggctggccggccctgactcagatgtttaatgaaaagtttggcgttaataaatccgtacacgctattaaagacgtaatggctgggaggggttggaatcagaaatgtcggcacggaaccgggaaaggcctaaaatatatttacgccgacggtaaaagaaaacgtttagacgtatatgtgtgggagtgtgttaatggtcctcttcccgcgggatacggtgttatccacctagataatgatgtgcaaaataatcaaataactaacctccgcgcagcccccttacatatcaaatcgatgttcacccgattcgggggtaacgatgtacctaaagcccttgcccctgctctttatgctcaaacaatgctgcgcagcgcaataaaccaacgaaccaaaaaagggacaaagcgccctacaatttga

SEQ ID NO: 455884 - DNA, 204 bp, Serratia marcescens
atgggcgataaaccgatcatgttcacgcgggatattatctcccgctatcagatttcagagaaaacactgtggaaatggcgggataaagaaaagtgcccgaaggggtttaagttaccctttccggcaccaacgatccccggtagcccgaaccgctggcgcttatccgcagtgctggcctgggaggacgccaacagcgaaaattaa

SEQ ID NO: 455885 - DNA, 1182 bp, Serratia marcescens
atgttaacggataccaaactgaaaaaggcgctcgggaaaaagcgcgagaagattgagatcatttctgacagccacgggctgaatgcacggataagtaaggccggcaaaataacgttcttctaccggtaccggtggctaaaagagccggtgcagttgtctataggggagtacccccagctgtcgatcgcgcaggcgcgagaacggcggcaggttatgcgagggtggctggcagaaggtttcgacccgcgggagaaagtccggttagaaagagctgctcgcagcgattccccgacggttgacgatgccttcaactactggatagataaatactgccgggttaataacctggtcaggatcgactactaccagcagatataccgcaaacacatccagcgttcattaggttctgttcggattgaggctaccgggcgcatgcactggcttgaagtattggacgctatcgaaagtagtgtgatggctaattacattacggcgatgtgcaagcgtgcttttaaattttgcgtgaaccgggggtatattaccgttaaccctttggaggcgctggaaccgaaagacgtcggggcggcgccttcgaggaaaacacgttatttatcaaataaggaaatgcggcaggtatggcaatggctggacacacggcagacggacgaggctcgactgatcatccggtttactatgctcacggggtgccgaactgccgaaatacgccgtgctaagtgggattggtttgacttcgagggggatacctggacggtaccgaaagaagagtataaaacgggggttgctgttcgtcgcgcgttgccggcgagggcgaaagcgctactgttggagcatcgggaaagggtcagcaccagccacgttgtgacctctcagcgggcggtgccgggaaaggatttcgaccgtcctgtgctctctggtgtggccgcaaactatgcgcggcatatttgggggaagttaggtatggagccgtggtcgttacatgatctgcgccgtacgctggcaacgaagctttcggagctgggttgtcccccacatgcgatcgagaaaatactcggccaccagatggcgggggttatggcgcattacaaccttcacgattacatggacgaccaacggcattggcttgcggtatgggaggagtacgtggggaaagttaccgggtga

SEQ ID NO: 455886 - DNA, 714 bp, Serratia marcescens
atgaaaacattttttcccgccgcactgctgattgccatgatgagcagcgccgccggcgctgcgacggcacaggaaacgccgcagaccaatacgcaaactatccgcgcgcagtcgggcgagcagcccacgacgtcgctttccgcggctaagaccgcgctgatcgtgattgatatccagaatgagtattatgcaggtgacggatttcgcggcaagatggtgattcctgacggccgggcggtgttggcaaacagtaaaaagctggttgatttcgctcatcaaaacggcatgccggtctactttgtccgccatgtgggggcaaaaggggggccgctgtttgccgaagggacgatctatgccgagtttcaccaggaactacagcccgccgcacaggacgcggtgatcgataaagcgacgcccagcgcctttgtcggcaccgatctggatgctcaactgaagaaacagggcgtcacgacgctgctggttgccgggctgatgacccatatgtgcgtatcgtcaaccgcacgtgatgcggtgccgctcggttataacgtgttgatcgccggggacgcaacggcaacgcgcgatctggatgacggagccggcggcgtggtggatcatcgcatgctgcagcgtgccgcgctggcgggcgtggcagatgtgtttgccgaaatacacagcacccaggctattttgtcgctgccggtgagccgttag

SEQ ID NO: 455887 - DNA, 825 bp, Serratia marcescens
atgagcaaggccgctccatggttgttaatgaccgtcttggccggctgtgccggcacgccggacggcggcgcatcttcgccgcattttgcccaacccgcggaaatacacgtgaatatagacgatatctcctcagcccagctgcagcgtctgctggtgctgcgtaaatcaatgccgacgctggacgacggcgcaatcattgacctcttgtcccgccagtttctcaatgtgccttacgttgccgacaggctgatcggcaacgccgcgacgccagaaaggctggtgattgattttcgcggactggactgctttacctacctggattatgtcgaggcgttgcgccatgccgatgaccagacgcagtttatccggcaattgatcgccacccgttaccgcaacggcgaaatcggtttcctgacccgtaaacactttttcagcgactgggcctatcagcctgtcgtcagcgctgatgacatcaccgcagacatcagcccgcacgccatcacgctgaacaaagtgctgaatcgcgacgccgacagcggcgcgtacctgcccggtttgccaaacgtcacgcgccgcatcagctatattcccagcgagttcgtcgatgcccggttgctcagccggctgcgcaccggcgattacatcggcatttacaccaatctggcggggctggacgtgacccacgtcggcatctatatcatgacgccgagcgggccggtgttacgcaacgcctcgtcgcgtaaggaaaaccgtaaagtggtggattcaccgtttatcgactacatcagcagcgcgccaggcattgtggttctgcgtccgcgctaa

SEQ ID NO: 455888 - DNA, 1014 bp, Serratia marcescens
atgcataagttttatggggctgatggtattcgtggtatagcatgtattattgtattactgttacataatacaagctcatatatagtagaaactggagtatatactagaggcgtggagaaatacggggtttggttgttctttactctaagtgcatttcttcttacttttaaattcatacaaaatggaataacactccattcattgtttttctattttttatctcgttcattaaggataatccctcctttctttatttgtgccttattctatttctataatggagtctatgacttagcaaatctgcgagatattctctctttaaatggaacttatgggcatttatggactgtacctgtagaattcaagttttattttatccttcctttttttgcattttcaatagtgacattgagtcataaaattggaacaataaacaccctatacgtttatttgtttttcattataattcatcagtattattacccatacaccgaaacaattgaaaataccattaatttgatctggtatattcccgttttttctattggtgtggtaactgccatcatttactctaaccacacgctgaacatggatgataagtggcgtgattttattggagtgatgattatattactactattctctttggctccaggaatcatagttaaaatttaccacctggatagtcccatcaaccttatgaataaattcattccgcttggcgttatttcatctgtctttattttgttattttgcgatgggaaaggaagagtaggttcattcgtgtcatttaagatttttaaatggttcggtaaatatagtttttctatatacctttatcatttttatttcttgttcttaggaaaaacctatgcaggaaccccatatgcatctatggcttgcagtttatttttcggtgttggcatgggggtgattatgtattacctggttgaatatccaactaatatattgcgttctaaattagaaaataacataaagaaagtaattttataa

SEQ ID NO: 455889 - DNA, 447 bp, Serratia marcescens
atggtcgccgtacgtatcggcccggacatccgtctggtggtcgccggctcgccggactatctggcgcagcagggtgtccccgccactccgcaggcgctacagcgccaccgctgtatcaatatgcgtctgctgacgctgggcggcatctacgcctgggagtgtgcaaaagacgggcaggaaattaaagtgcgggttgatggacaggttacctttaacagcctgcgccagcgtaatgatgccgcctgcgccgggctggggctggctttcgtgccggaagacgccatacaggcagaaattgccggcggtcgactggttaccgtacttgaggaatggtgtccgtcccttcccggctattatctgtattaccccagccgcaagcagcacaccactgcgttttccctgttgctcgaggcgctgcgttacccataccgttcagctgacacctag

SEQ ID NO: 455890 - DNA, 354 bp, Serratia marcescens
atgcatatcaccttggcgtgtaccttggaaacggcgccggcctcggcagatcaattaaaaagcgtcattaatgagaaacgtacagaactggctcccttactcaccagcgagctgcgctattattctgaaaatgcgcgctatgtcgatggttcattagaaatacttgatattcaaaacttgtccaatctagattattcaatgagttatcgttaccagtggcacatttttaatgcctgcctggctatcaatacacaagaaaccgtcaacggcagcgttcgattcacccaggttccacagggattaatttttgatataatcgataacacgcccccgtcacctgccgatgaattgtaa

SEQ ID NO: 455891 - DNA, 540 bp, Serratia marcescens
atgggacgttcacccaaggagggtgacctgcggagattaacattgggggaaattgtactggcgcgtcaggttttcggcgatgcggttgcctacctccgggtgtggatccgctatgacagctatttgccgttgggattgcagcgggaaaatactgctatgacaccgaatggtgaggtctatctgagaaaaggtacctatttacctgatttctcaactggttattaccggtcccaacatatgtttatccatgagatggggcatgtctggcagcatcagcagggggggtgggtgcgaacccgggggttactcagttgggcggcaaactatcactatcggcttgatggcaaaaaactattgcatcactatcctatggaacaacaggcgcagattattgcggattactttttattgagatttcacggttggaatatatggagccgagaggtgggtaatattgttacttttcaggggataacggagcggcgtactgctgcgccgctttatcaatatgcgctgactaaattctttacccaaaggtaa

SEQ ID NO: 455892 - DNA, 597 bp, Serratia marcescens
atgaaagtctataccttccccaaaagtcgctcgttgcgcgtgctgtgggcgcttgaagaactgcgcctgaattacgaaacggtgcgagtcgatctgctggccgccgcgccggcggtctgttcaccgcatccgcagcataaagtgccggtgctggacgacgatgggtttgttatttttgaaagcgcggctatctgtaaatatctgtgcgccaagacggcggggcagcgcttatatcctgccgagcttcgtgctaacgccggcgttgagcagtggctgagcttcacgctgaccgagctggaaccgccgttgtgggcgctgttgaaacatacggcgttgcttcccgatgcgcgcaaggtggcggcggtggcggaagttgcccgtcaggaggcggatgtcgccatcacgtgcctggcgcgtcagccttttgcgccgtggataaccggggagacattgacgcttgccgatatctttatcgcgcaaaacctgatgtgggcaacggcgtgcggtatttctctgccgccggcgctggaagcgtacctgcagcgtagtcaggcgcgggaggcctatcagcaagccgtgatcaggaataatggctga

SEQ ID NO: 455893 - DNA, 924 bp, Serratia marcescens
atgaaaagtgatatgaacagcattccggtttttctggccgccgctgaagccggcagcttttcccgtgcggcggaaaatctctacctgacgcgttctgccgtcaccaaaaccatcgcccggctggaagcgcgtctgggcgttaccctgtttaaccgcactacccgcagccaaaacctgaccgaacaaggcatgctgtattacgaccattgccggcgcgccgttaacgagatccagcaggcggaagatctgctggccggcgacagcctgcaggtcagtggacgcctgcgcgtttccgtaccggtgctgtttggtcacctctgcgttgcgccgctgctgacggcgctggcgcaggaacatcctgggctacagctggacatggcgttcagcgatcgggtggtcgatctgaccgaagaaggcttcgatctggcgatccgcatcggcgaactcaccgacagcagcagtctgatcggccgccaactggccgcgcacagcatggtgttttgcgccgcaccggactatctcgcgcgggccggcgaaccgctatcggcagaggatcttgggcaacacgccgccattgcctatacccgcgccggccgactgcagaaatggcgcatcggcagcgctcagggagagctgtcagaaatcacgccgcaggcaaaactgatgatggatgatatgcaggccatcaaagacgctgcgctctccgggtgcggcattgcctggctgccctactggctggtgcgcgatgcgttaaccaccggcgcgctgcgggccattctgaccgcgcacgacagcggcagctggccggtttacgccgtctggccacgcaccctgcggctgcccctcaaagtcaggatcgcggtcgagcgcctgctcggcgaactgcccgccagaatggcggcggcggaagcccccgtcaactag

SEQ ID NO: 455894 - DNA, 591 bp, Serratia marcescens
atgagcaaattactggtacttagatccagcattatgggcgcaggttcccagagcaatgcgctgattgatgactttttggcggcgcgccgggcgaaaggccttgatgacgagattatcgaacatgacctgacggcactggatttaccggtgctggacggcgagttgttcagcgccctgcgcggcgctcagccgcttggcgagcgggcgcagagggtggtggtgctgtcagaccgcctgattgccgaactgaaagcgagcgacatgctgctgattggcgcgccgatgtataacttgaatgttccgactcagctgaaaaattggttcgacctggtagcccgcgctggcatgacgttcaaatataccgccaattatcctatggggttggttgaaggcgtgaaggcgatcgtcgtcagtccacgcggcggggtgcatgtcgatcggctgacggatgcggtgacgccgtatctgcgcgccgtgctgggactgatcggtgtgaatgacgtcgcgtttatctatgcggaagggttggatgcccgaggacgggcgcagggcattgccgatgcgcaggcggccattgctgcgctggcgtaa

SEQ ID NO: 455895 - DNA, 366 bp, Serratia marcescens
atgtcattaaccttaaacctggcgcttgcacgccatcaaaccctcgccggcgcgctgctgagcatcgcgctgtgcttgttcccttcactgactgcggcggcggaaaagccgggcgtggtgcagacctcatcggcggcgagtgcgcagccgcagacgccggccgggcaggagacgacggtcagcattaatcaggccagcgcagaacagcttgccgaggcgctgaacggcgtaggcctgaaaaaagccgaagcgattgtgcgttatcgcgagcaaaacgggccgtttactgagattgatcagctgcaggaggtgccgggtatcggtctggcgctgctggagagaaaccgggagcggttgaaaatgtga

SEQ ID NO: 455896 - DNA, 312 bp, Serratia marcescens
atgcgcttaacacggctcaaacatcgctttttcacgctgctcagcacgctgctgtttatcggctgcctgcacagcgccgtacgcgttgaagggagcctgaaggtcacgctgcagccgacgctaagcgccttaagccgcgatatgcgggatatccgtgaagcgctgacgcgctacgccggtgaagacggggagcctcccacgaccctcacgcgcggcgaaacccgcgccgccgaacgtagaggctcggaggaagagttatataaccgctgcgcccctaccaggatatatcttcacatccacaccacgggttag

SEQ ID NO: 455897 - DNA, 249 bp, Serratia marcescens
atgttactgaaaatagcaagatggctgtttcaattacccggcaggctgtttggcatggtattcagccgtcgtctgacaatctttatcttttttatgctgcttgcgctgggattcatcgccgtgaaacgctatttacgtactgactcacagaccgaaccatcctctccagtacaaccccattatgatattcagcgtgagatgccgtcacgcgaagcgcgcggtcaatgctgcggaacggaccgcccatga

SEQ ID NO: 455898 - DNA, 1038 bp, Serratia marcescens
atggaacttgtaaaagaaacggaacagaacaggcgtgtgtcatgggggagtattatttccggtgtggtaactgtgatggcgatttccttgctgctaactacgcttggcacaagtttggggctgtcattgctctcccctcaatctgacgatgtcattaacggggccgataaagctgtcctgatttggtcaggtatctctatcgtagtgagcctggcctgtggtggttttgtcgccggcagactggctggcgcggatggaactatccatggttttctatcatgggctacatctctgcttgtcgcctccatactgggttttgccgctgccggcggtattcttcatatggcgggaagcgcagttggcgctgcggcctcagcggcaggttctgcggtgagtggactgggcagtgccgcaggaaaagctactggtgcgacagcaaatatcggccagactatcgctgacaagctcggacttaatactcagctcacgcatcagcaaacggataaacaagtgctggatgcgctgcgtaagagtaatattaaagaacttcagccagaatatctgcaatcacaacttgaagctgcaggaggcgatcttgcaacggcagttaaacaactggccgtcaacccagccaatagcgatgcgattctggatgagctgagtggtaagctgaaatcacgtgcagagactgtcagcaaaggtgttgaccgagatgaaattaaaaaggcgcttgcagaaaatacgcgcctgtctcaggaagaagccgacaaagccgttgataatttcatccaggctcgagacaaaaccgttcaggaagtcagcgatcgtatggctcagctccagagtaatctggacgacgctaaggcacagtacgctgaatttaagaagcaggcgaaagaaaaagcagacgctgcagccagcgtggcttcgaaaatagcgctgtggtcattcatcgctctcttggtcggtgcagttatcagtgctctggccggtttatggggtgtcaacacccatccctctcggaaaatccgagcctaa

SEQ ID NO: 455899 - DNA, 213 bp, Serratia marcescens
atgaaaaaaatgaaaatgacggaagcagggaaaatcatcggtggcggttatattcgtttctgcgactccagaacctttgaatggggggccggcgggaatgctgacctgtgctattcagtcgttaattgccgtaataaatatggcgtgccgcggaaggatacctatgttgtgccgagtaattactgcccgaccaaacctgccgctacgtcttaa

SEQ ID NO: 455900 - DNA, 216 bp, Serratia marcescens
atgaaaaagatgaccatgatggaatcatccaacattatcggcggttacagatgcacagagaccacctatgaaaaatcaaccgtaggcggtgttgaaagctgtactgcggtcagaaactgcaacaacaagtatggtcagacgtcgaaagtgatgttctacgtgcctgtcagcaactgtgccgctaccggcagcactgcaccagctgcaacggaataa

SEQ ID NO: 455901 - DNA, 198 bp, Serratia marcescens
atgatgaacatttatgcacaacaaggcgacaccattgacgcgatgtgctggcgcaattacggcagcacagaaaacgtggtggaactggtttatcgcgggctagcggcatacggcgcgctattgccgcgtggctgcccggtagaaatgcccgagctcaacgccgccgccaggcgggaaacggtgaaacagtgggactaa

SEQ ID NO: 455902 - DNA, 351 bp, Serratia marcescens
atggatattatggatgcagggaaagctattgcgttaggtattgccagtattccgcgtgatgcatatttaggattagagcgcacattgcaggatctaaacctgagtgatgggcgtagctactatcagcgccgtaatctggcggaagatgcccgttttgcccgtggtatgattaagattgcgaagaaccgcaatcagatatacgacattgccaagatcatattaaatgatgttattgataaggttccggagccggttctgaaatggctgcatagtgcagtgacgcaaaagcagacggaagcggaaagcagttgggttatgcaaaacttaatcgttacctaccttgcgcagtag

SEQ ID NO: 455903 - DNA, 528 bp, Serratia marcescens
atgtaccatgttgttgctgcaactaccaacccggcaaagatcaaggctattcaactggcttttgacgacatctacggcgccggtcagtgccatatcgaacccgtcgacgtcgccagcggcgtttctccgcaacctatcggcaatgctgaaacccgcaccggcgcgcgccaacgcgtgatggaagcgcgtcagatgcgcccggacgccgacttctgggtcggcgtggaagcgggaattgaagacaatatggccttcgcctggataaccatcgaaaatccgaacatgtgcggcgagtcgcgttccgccagtctgatgctgccggaggcggtattgcagggcgttcacgccggacgtgagctgggcagtgagatggcggccatgaccgacaacgccgatatcaagcaccagggcggcgccattgccatcttcacccacgggcggctaagccgcaccagcgtttaccatcaggcgctgatactgacgctggcgccgttcctcagcccgatttatcaccatccgccacgctaa

SEQ ID NO: 455904 - DNA, 597 bp, Serratia marcescens
atgaagagatctgaatacgccagcagctcaccccataccgcctggggttccttccggaacttatctttctcttgcccctttttccttgggctgctcctgctgatgccgttttgcccgcgggccgccatcgaaaacagcgaactgacacagtcgcgcacccaggccgtcaccaccgtggtgctgggcattatcagttatacccgctggccgacgccgcctaaccccgttcgcctgtgcgttaccgcgcaaacacactacgccgacggcctattcagcccgcttctgctgcaagccccgcatccgattaaaacgcagcggctgccgcttgacagcggccagctggcgcagcagtgcgacgtgatctatctcggagacatcagcaattcacagcgtcaggcgctgatcccacgcattgccggccattcgatcctggtcatcagcgaaaacgatgcggagtgcaccgcgggcagcgccttctgcctgcagccacgtggcggccagatcggctttaaagtcaatctggatgcgctggcacgcagcggtgtacgcgtgcatcccaacgtcctgcaactggcgcataagctggggccgtcatga

SEQ ID NO: 455905 - DNA, 156 bp, Serratia marcescens
atgttcgtcgcggcccgggtcccttcggggaccgggccgttgctatttattaatgcccttcatccttttccgtttttctgtctctcagattgcttcgtttcgcccgccgaatttcatgcgatgcgctatatttatcaggggctaatcgcgcaatga

SEQ ID NO: 455906 - DNA, 525 bp, Serratia marcescens
atgtcaccacggggccgaattctagagattttggcgaacacgtcaatagttatttcggtgttttggggcgatcgctgtaaaaagcgtcatatttgtttcatctggccgccattcgcttatttctcgtgcagcgggcgtgcggcaaacagttctatcagccagtcaatcagcatccggccggacggctgcagctattgctcacggaacagtgtgttggcttcttccagcgccgagcaactgaatacagcgttggtaatacagcgtgccttcatgggtgacgtgcacctggcgggggggcggatcagcaggcgcacgccaagctgctgttccagccgttttaacacgttgctgaccgtagcgcgcggcagctgcaggcgttcttccgtcgcagctggcattagcctgggtgatgacgcagggcgagcatattgtgctgattccgggcaccaagcgtcggcgctatctggaggagaatgtgtcggcggccggagcgcgctacggccaggagtcgatgggctacgttaa

SEQ ID NO: 455907 - DNA, 552 bp, Serratia marcescens
atgttccatttgctcgaaccggatattaaccaggagctttacgggctgccggaatatctcagcgcgttaaactccgcttggttaaacgaggctgcaacgctgttccgccgcaaatactatcaaaacggggcgcacgccggttacatcctgtatgtcaccgacgcatcgcaaagcaccagcgacattgaaaaaatgcgggcggcaatgcgtgacagcaaagggttgggcaatttccgtaacctgttcatgtacgcgccgaacggtaagccggacggcatcaagatcgtgccgctgtccgaggtcgccaccaaggacgattttttcaacatcaaaaacgtcagccgcgatgacctgttgagcgcccaccgcgtcccgccgcaaatgatggggattatccccagcaataccggcggtttcggcgacgtcaaaaaagccgctcaagtgtttgtccgtaacgaattaatcccgctacaggaacgcatgaaagaggtgaacgactggttaggggaagaggtgatccgtttcaaagattatgagttgccttctgaataa

SEQ ID NO: 455908 - DNA, 258 bp, Serratia marcescens
atgaaagattatccattactggacaacctcatggggggatcctttaaccaggatgcagacctgattacgggttcaaccgaacgggaaggaatgattgattattacctacaggggacatctaagaatttgctgcgaaatttaatcagtgaaatggacgattttcaaacagcatattccgacgatctggacatgtcgcctgtcggtgaattttttgatgttttccggcgacggatccagacagtattaggtcaagattaa

SEQ ID NO: 455909 - DNA, 1164 bp, Serratia marcescens
atgcaaaattttattctccacaccccaaccaaaatcctgttcggtaaagatcagattgccgaactgggccagcaaatcccggccgacgcccgtattctgattacctacggcggcggcagcgtgaagaaaaacggcgtgctggaccaggtacacgccgcgctgcaggggcgcagcgtcaccgagttcggcggtattgagccgaacccgacctttgaaacgctgatgaaagcggtcgaggtggtgcgcgctgagaaaattgattatctgctggcggtcggcggcggttccgtggtggacggcaccaaatttatcgccgctgcggcagactacagcgcctcgcctgacgcctggcacatcatgcagaccgtcggcagcgaaattacccgtgcggtgccgatgggttgcgtgctgaccctgccggccaccggctcggaatccaacagcggcgcggtgatcacccgtaaaagcagcggcgacaaacagcacttcttctcgccgctggtgcagccgcagtttgccgtgctggacccgcaggtcacctactcactgccgccgcggcagatcgccaacggcgtggtggacgcctttgtccacacgctggagcagtatctgacctacccggtcgacgctaaagtgcaggaccgcttcgccgaaggattgctgctgacgctgctggaagacggcccgcgcgcgctggcagacccggaaaactatgcggtacgcgccaacgtcatgtggagcgccaccatggcgctgaacggcctgatcggcgccggcgtgccgcaggactgggcgacccatatgctcggccacgagctgacggcgatgcacggcctggatcacgcacaaacgctggcgatcgttctgccgtcgctgctgcgggagaaaaaggcgcaaaaacgcgacaaactgctgcagtacgccgagcgcgtttggggcctgcgcgacggcgatgacgaccagcgcatcgaagccgccattgccgccaccgccgagttcttcgaaaaaatgggcgtaccgacccgcatggccgactaccagctcgacggcagcagcattcccgcgctgttggaaaagctgcgcgaacacggcatgaccgcgctgggcgagcatcaggacatcacgcttgacgtcagcgaacgcatctatcaggcggcgcgttaa

SEQ ID NO: 455910 - DNA, 549 bp, Serratia marcescens
atgaaaaaatcagcattgctcggcgctattgttatcgttttatttacgcttatgccggcacgggccgaacgccatagcgtaatactggattatgcgcgtgcccggcttgataatttcaaggatctggatggcgttgatatcaaatatcggtatgaatgggggtccgccctgagtctgatgagcgctttcaccgtgctgggcggcgatcatcacaatgtgaaaggcggtaaaactgaactgaattattacgcttacagcgtggggccagcctactctctgaatcgttatatggtgatttacgggctggtggggctgagccacagcaatgtgaagaactccgccgcttgggtaaggggccagggcaacggcgatcagcgcggcagccgcggcgccagctccgcttcggcctttgcctacggcgccggcctgctgtttaccccaacgaaaaatgtcgtgctggacctcggttatggcggatcgcagattgatatcggcggtttggagcgcgacgtgaatttgtttaccgtcggtatcggctatcgtttctga

SEQ ID NO: 455911 - DNA, 570 bp, Serratia marcescens
atgttgaatataggaaatcatcatctgcccacgagccacccgctacggctaaaaaagcagcgcaggctgctactggtgctttcgttgctgctattgatagcggggctgttttgtttgttcagcccgtttgcatcaggcgcagcgctcagcgtagtgatgggagtctttttactgttgagcggcatcgggatggttatcggtatgattgttaatcgggcgcaaaatacctggccgatgattggcggtattctattgggcatcgcctatctgattatcggctatgtgtttatcgccagcccagccgtcggcatctttaccatggcggtgtatttggcggcgctgtttgcgctggggggcgctttccgtctgctggccggctatcagctgcgcgatgttccgggcagcgcactccattacgtgatcggcgtgctggatttggcgatcgcctggatgctgctcagcgctgatgcggcaacctcggtgattttggtgaccaccatagtcgggattgaaatgttgttcagcgcttttggtctgtttatggtcccccgccgtttcagcgccaggtga

SEQ ID NO: 455912 - DNA, 819 bp, Serratia marcescens
atgatccgccgttactctcaccccatcctcttctacgggctgtcgacgcttatcccctggctgtgctggttcgccgccgcggcgctgagccgcgccaatggcgtcaacctggccgccagcctgctggcgctggccggactgtgcgcgccgctgttagttggttttgcgctgatctggcgcgacccgctgctgcgccgcgatactttccagcgttttttcaacttcagctcagcaccgatctattatctgctggccggtgggctgatgccgctcagtattatgctggctcagggcatctccttgctattcggctacgacagcgcgcagtttgtcatcagcacccggttcagctttacctccggcgtgtttccggtatggctgctgcttatcgcagcgccgctcattgaagaactcgcctggcacagctatggcaccgactgcctgcgcagtcgcttcaatctcttcaccacctgtatgatttttgccgtcttctggggcatatggcatatgccgctatcggcaataccagactattaccacagcgaactggtcgccagcggctggctgtatgctgcaaacttcctgatcagcatcattcctttcgtgatcataatgaattggctttactataaaacggggcgtaatattttgctgtgtggcgtattccacatcaccgccgggctgttcaacgagctattcgacccgcatccggacagcaaagtgatacaaaccggcctgctgctggttgtcgcaaccgtgctgatcgtgcatgaacgaacctttttcttcagtaaaaacagcgcagggaacgacgcttaa

SEQ ID NO: 455913 - DNA, 756 bp, Serratia marcescens
atgaatgctctgcacaatagcgccgtgttatccgcttgcctcactctctgtatatcaccgctctcgcaggccgatgagtggtcgcttggcgctggcgcgctctatgaacagatgccctaccgcgattaccagtccgatgtttttcccgtcccgctgcttggttacgaaggggagcactttttcctgcgcgacagcgccgcggccggcgtatttttgctgaaaaccgaagcggaccggctgtcgctgaatatctattactcaccgataaatttccgaccgtctaaaacggacgatgcggcactgaaacagctggacaaacgtcattccaccgccatggccggcgcggggtatcgccatgacgcggactgggggtcattacgggcggaagtggcggcagatatccttggcaacagcgatggcgtagcgatcgatgccgcctaccactatccgctgcagttcggcaaattatctatcgcccccggcgttggcgtgacatggcacagccagcgtcataacaattactatttcggcatcagccaacgcgaagcccaacgcagcggcctgcaagcctaccgccctgacagcggcgcaacgccttacgccagcctgtcgctcaactacgccttcaatgataactggcaggcctttgttctcggccgctattcccggctggacaatggcgccaaagacagtccgatgaccgaacgcgacggcaccgtactgctcggcagcggcatcgtttaccaattcaattaa

SEQ ID NO: 455914 - DNA, 645 bp, Serratia marcescens
atgcgcatcatcaaaacacctcagcaacgccgggccgacattattcaggccgcgcaacgtctgttccacgcacagggctacgccgacacctccgtggatgaaatcgtgcgtgaggcgcagatcgccaagggtacgttttattactacttcaaatcgaagcctgaagtactggccgcgctggcgcagcagctgatcgccgagatggccgtacaggcgcaaaaaatcgccgacgccccggcactgaacgccgtcgagaaactctgtcgaatcatccgtaaacagaatgaactcaaggacgacggggaaaatatcgtgcaggggatacacgaccccaccaaccgcgaactgcacgaccgtctcggcctcgaaaccgtgctgacgctcggcccggtgtttgcacaggtgatcgaacaaggcaaccgcgaaggggtgttccaggtggctgacccgctgagcaccatgcagtttattctggccggagcggacgccctgctggggcataacgcgttcaactggacgccgccggagcagatcgcacgtctgcaggcgatgctgatactgatcgagcgcgcgctgggcgccgccgccggcgcgctggccccgatgttggcgcaaaacctgctgccggcggggccatcatcatga

SEQ ID NO: 455915 - DNA, 261 bp, Serratia marcescens
atggccgcgatttaccgctgcgctttccgtttacgcccggttccgatctttcaggccgcgtggtggcggccgggggaaagcatattgatcgaaggcggcggcgtggatcatgcgcttgagctggcgggcggcgcgcacctgggacaggcggcggcaatgtgcgccacctttgatgccaacgggctggaaccggttatcgacagcgtgtatccgctggacgcgttgccgcaggctgacttttcgcccataaccatttattaa

SEQ ID NO: 455916 - DNA, 870 bp, Serratia marcescens
atgaataataaaagctctctattaagtgatttagaagaaaagattttatcgattatccgcggtgatgttgatgaatacacacctggaataccagcgatttatcttgaaggcggccattatgatccccgttatcccatcaatgagttcgcgaaaacatcattgtatcatgctttagacattgccagtcatgcgatcgtccatcataagaaaaacgtgaaaatatctcttggcattttaatcgatgaccttgggctgcaatgtggcgcagaatcctgtgaaatacatgcggcgccgttaaatgatagcgaacaggcggaagatagcggggaattacccaaggcgttggatgcgattttggcgcagtataagatcgttaaacgcgaacgtatgatcatacagggtgaaagaacctgtaagaaccgcggaatacagacgttaaggcgcattctcgatcttcatcgcatcacgccgtttcccgagctggagattgaagagggggaacagcgggtgaagatatttttcattaatgaagaaggcgtgcgcgtactgcttgccgagtcgaaatcgaaagacgtatggacggcaaagtgtccggtaattatggcgcagcactacagcgatgtttatgaccgtgtggcaaaactgcatccgcaaacccaggcgttgcatattatcgatttctcagaaactgatgattacaacaaagtgctcaacggtgccgacgtggcgatgaaacttttcctgtcacatgcgcgcgtcggtgacagagcggtgaagattaccaatattttcctttcatcgtttggcgacgaaggttacatcattcactcgacgtctaatcgcaccggggtgctgacgacagcagtgtga

SEQ ID NO: 455917 - DNA, 1179 bp, Serratia marcescens
atgtctgtagaacaacatataccactgtatcttgattataatgcgacaacgccgtgcgacgaattggttttggcagaaatgctgccgtttttttgccatcacttcggcaatgccgccagtataaccagccagcagggttttaaggcacatctggccgtagagcgcagccgggaacggctggctaaattacttaatgcgcaggctaacgaaatcatttttacctccggcgccaccgagagtaataacctggggctgcgcggggtgtatgaagcctgcaagaaaaacggcaatcatattatttcatcctcgatagagcattccgcgacgctggcaacgctcaaggatctggagcatgccggcgcccgggtgtctttaatcaaacccagaccggatggcagttttgatctcgacgcgctgaaagcattgatgacgccggaaacgattctgatcagcgtgatgtacgccaataatgagctgggagtgattaatccgattgcagaaatagccgccctcgccgagcgatataacattctttttatgtcggatgcgacgcaggctgcgggaaaaatcccgattgatctgcagcagtgcccggtcgatattctcacctgttccgcgcataagatctatgggcctaaaggcgtcggcgcgttatatctgcggcggaaaaacggcaaaaaaatcgtcgatctgcatccccagattaccggcggcaatagtgagcagggaatgcggggcggcacgttaaatgtgccgggtattgtcgggtttggcaaagcggcggaactggcggccgagcgcttgccccaggcgatggcaaaggcgcaatctcagcgtgaccgactggaaagggtgctgatacagctggacaacgtacaagtgaacggaagcgccgcaccgcgtctgtctcacgtttcgaatatctcgttcaaacgggttgatggcgccaagctgctgaatctcttgaaaaagagcctttcggtcagtacgggctccgcctgctcatcaagcagcctggcacccagccatgtgttaaccgaactgggactgtcggaagagctggctcaggctaccctgcgtttcagcctgggatggccgacccgggatgaagacattgattttgccctgtcggcggttaatcaggcgttgcgcatgctgtcttcaacctatgccgattaa

SEQ ID NO: 455918 - DNA, 210 bp, Serratia marcescens
atgaatcatttacagctgcatattccgacgatgaaatgcggcggctgcgccgtttcgatcgccaaaaccgtcaaagcgcgggatcccgcggctcgggtcgatgccgatccggccacgaaacgggtaatcattgaaagttgcgttgaaggcaccgagctgatagctgaactggccgcggccggtttccacgccagcgtcgagtctgattga

SEQ ID NO: 455919 - DNA, 1767 bp, Serratia marcescens
atgccaattaatttcttagacaatctcactccctttatcttctttaccggcaagggcggcgtggggaaaacgtcgctggcctgcgcaaccgcagtcactctggcggacagcggaaaaaaagtgctgctggtcagcaccgacccggcatcaaatgtcgggcaagtctttgaacagaccatcggccaccgcatcgtcgccctcaccaaggttgccaatctggcggcgatggaagtggatccgatggcggcagcgcaagcctaccgcgaccgcgtgttggatccggtgcgtgacgccatgccccaggacatcgtacaaagcatcgaagaacagctttccggttcgtgcaccacggagatcgcggcgttcgacgagtttaccggcctgttgaccaacagcgcgctgcgcagcgactttgaccatatcgtgttcgatactgcgccgaccggccacaccattcggatgttggaactgcccggcgcctggtccggttatctggaggccaaccccgacgccgcagcgaacctgggaccgcttatcggtctggaaaaacagaggaatcaatatgccgacgctgtagccgccctgtcggatccggcgctgacccggctggttctggttgcccgggctcagacgtcgacactgaaagaagtctctcacacccatgaagaactgtataatatcggcctgaaacaacaatatctggccatcaatggtattttacccgcggaagcggcccacaatgacgcgctggccagcagcattattgcgcgcgaaaacaatgcgctggataacatgccgcagaatttgtcggcgttaccgctcagccggttaccgttaaaaccgttcaatctggtaggcctggcggcactgcgtaaactgtttaccgatgatgcgactgacgaattggaaaccacccgtctggatccgcaggagctaaccttcccaaaattgtctcagttggtcgatgagctaagcacctcgggtaaaggactggtgatgaccatgggcaaaggcggcgtgggaaaaaccaccattgccgcagccattgcggttgctctcgcccagcgagggcatcaggtgcatttaaccactgccgatcccgccgcccatttatcctataccctgaacggcagtctgcccaacctgacggtcagcaggattgacccgaagattgaaacagaaaattatcgccagtttgtgctaagccatcagggcaaagggctggacgccgaaggtctggcggttctggaagaggacctacgctccccctgtacagaagaaatagccgtgttccaggcgttctcgcagattatcaaacaggctgaagatcgtttcgtcattatggataccgccccgacaggccacacgctactgttgctggatgccaccggcgcttatcatcgtgaaatggtgcgtcagatggggaaaaatggcaaacaaacgttgacgccgatgatgcagctgcaagatccagaacggacaaaagtggtgatcgtcaccctggcagaaacgacgccggtgctggaagccgccggtttacaagaagatttacgtcgcgcaaatattgaaccttgggcgtgggtcatcaacaacagcctggcgacggcggcgcccgcctcccccttcctgatcacgcgcgctaaccgggaattccccctcatcgccgaggttgaaacgcagtatgcgcataaggtggccgtcgttgctcaacaggccgccgatcccgttggcctgctccaactgcaaaggttggcgagcgaagcataa

SEQ ID NO: 455920 - DNA, 360 bp, Serratia marcescens
atgtcgaaaattgaaatctttgaacccgccggctgctgcaccactagcagtgccgttgtcgaacagagcagcattgctttcaatgcggatatggcgtggtgcaaacagcaagggcttgatgtcacccgatataatctgtcaaaaaatccgcagcgttttatggacaatacaaccgttaacgcctttctgaacgcatccggcgcggactcactgccgctaaccctgcttgatggcaacgtggtcatggccggacgccttccgacccgggccgattttgcccgctggaccaacacgccgctgacagccaataacgcagacgccgagccccccacctgctgctcatctccccgtatgccataa

SEQ ID NO: 455921 - DNA, 546 bp, Serratia marcescens
atggacgctatcgaaaaattcaaccgctgtatgacgcccttttggctgcagcaccaggcggagctttatcactttttacatacccgaaccggcgataacgacttggccgccgatttgctacaagaactgtttcttaaagccagagcggcgtctgaccatttctgtcaaatgcacaaccccagagcctggctgtatacctgcgcccgcaatctgttgcttgatatccataagtcagctaagccgttgctgccgctggacgagtcgctgccggtgccggaagagatcccgtcggccatcacccagctggccgcctgcctgcccgaagtgctgcaacagcttaatgaggaagagcgggaactcattgagctttgcgatattcaccggcgcagccaaaagcaggtggcggcagacaaagcgctgtcgcttaccgcggtgaaatcacggctgctgcgcgccaggcaacgtctaaaacaacagatgatcgccacctgcacggtggagttcgatgagtcggcgcatatctgctgccacaaaaaaattcgctga

SEQ ID NO: 455922 - DNA, 657 bp, Serratia marcescens
gtgtccaaattaatgagtaaagacgttatctcggagtcaatcggtgtatttactttagtgtttattggcgtcggcgcgattatcgtcaatcaaataacgcatgatattggcaactttggcatcgccctgacttttggacttagcgttaccgttattatcaattctatttccaagacaagcggcgcacatcttaatccgatcattacattttcattatgcgctaccggacaatgctcatcgcaatgcgctttttattatattatggcgcagataatcggtgcatgtatcgcctccgcagtgctatatcttgttttcggcgatcgattacagtctggcgtcaccgtcgtgacaccagacttaagtctgagcaaagggtttatccttgaggttatgatgtctttctttctggtattaaccgtattgcacacctccaacgcggcgatgattggcatcatcgtatttttaaatgcctttatcggcggcagtctcaccggcgccagtatgaacccggccagaagttttggcccggcgctgattagcaatcattgggattcccaatggctttattggctagcaccgctgggcggcgcactgctcgccatagcgctccacctcttatatcggcgtcccccctcctcacaacgttctgtcgattaa

SEQ ID NO: 455923 - DNA, 384 bp, Serratia marcescens
atgtccggcaaagcctttggctgcaaacctgtacaagattatttaagtcaggattattggagagggaccattaaaatgtctttatccaaattttttattttatgtgttctgcacgaagcgccgatgcatggctatgacatagcccgcgccgttgaccgcaaaactcagggatgctgctcacccagcgagggagcgctctatcccgccttacgcgacttcgaacagggcggctatcttactgccagcaatgaaatcgttaacggacggggccgtaaagtctaccggctcacggataaaggaagagaagcattccgcgttgccgtcagcgcctggatggaggtgacgcagtggatcactgataccaaacactttattaccgaataa

SEQ ID NO: 455924 - DNA, 1080 bp, Serratia marcescens
atgcccacaatagaaagtgaaatattgagccgtctcaatgaggtacagcattattacggtaaaacgctggcaaatagatacgatcttgccactcacgtatgtacggtagataccgagccgtcggacgagataaaagccattctttctatggtgcaccccgatgttcaaacacggttttacggctgcggaacgccctttcctccgctgttaaccggcatgacaatcttggatctgggatgcggcggtggccgggactgctttattctttccaaactcgtcggagaacaagggaaagtgattggcattgatgccacacgcgaacagatagatttcgccaataattaccgagaatttcatcgtgataaatatcattaccggcagtccaacgtgcaatttctacacggaaacattgaggcgctgcagcgtatgggcattgcagaaaactcggtcgacattattgtttccaattgcgttattaatctgtcagcagcaaaagcagacgtgctcgccggcatgtttaaactcttaaaacccggcggcgagatttactttgccgatatttatgccgatcgccgactgcctgagcaactcaaggaggatacgcaaatcgttggcgaatgtatcggcgacgttctgtattatgaagacttcttccggttagccagaaaggccggctttaacgacgtgagaaccgtcgccagttcattaaagtccattgacaataaaacgatagaagaaaaattggccggcgccaagctctattcaatgaccttcaggttatttaaactcgcccttgaggacaaatgcgaagattatggtcaggcagcgatttataacggcacgttgccagatgctcctcatcagtacgtctttgacctcgaacacacgtttgaaacgggaaaggcgcaaccggtatgccgcaataccgccctgatgctctccgagacgcgctatgccgcacattttacgctggtcggccagggagaaaaacattacggccccttcaattgcggcgccgacatcacgcttaatcacgccggcgcctttgctaccgcagccccggacagttgcggttgttaa

SEQ ID NO: 455925 - DNA, 615 bp, Serratia marcescens
atgtggcaacttaaaaaactcaccctgcgtcagccaccgcaagcgcatgccgttctgctgaaccgcgacacgctggccattaaccatcgcgccgaaacgctgatcgccgacgccgaacgccaggcgcaggccctgctcgacgcggcacaaacacaggccgaaacgctgctgcaacaggcagaagcagagcgcaacgcattactggcgggtgcgcaggagactttctggcagcaggcccggacgctgttcgccgactggcagcagcagcgccgcgccgagcagcaacagttgctcgataccgccggtgcgctgctggcgcaggcgctcggccgcctgctggaccaggtgccgccggccgagcagctgaatatcctgctgacgcagctgcgcaccaaacagccgtccgccgtcgccgccacgctgtactgccatagcgagcggcacgccgcggcggcgtactggctaacacagcgaccggagttgcgctggcagccggcgatcgacgacgcgctaccgccagacaccctgctgctgaccaccgaacagggcgagctgcatatcagctggcaggcgctgcgtcaggcgctgggcgcgacggacgccgaggcgatctga

SEQ ID NO: 455926 - DNA, 249 bp, Serratia marcescens
atgaaatctatctttatatacggtattaccggcgatatcggccagcgtacggcacgcctgctcaatgaggccggccaccgcgtatcgggcgtagccagaagcgaggataaggcccggccgttaatcgatcaaggcattaacgtggtgctgggcgacgtggcgtccgccagcgcgcagacgcatcagacatggcttgagggggggatgtggtgctgttcaccgccggggcgaagtcggacgatgaggtga

SEQ ID NO: 455927 - DNA, 996 bp, Serratia marcescens
atgagctttatttttaagaaaaaattcatcctgttttgctcaatgattggagtggtaataaccatttcaattgcatttctaatttttcattatggcgagtatacttcatactcagaaagtatagaaactaatggcaggactggattggaaaaaaaattggaatactatgttagtgagaataaaattgatgagttagagaaagagaaagaaaacctatcaaagcaattgctcatgcagcaaggtaagccagagctaccagaaaaaataaaagaatatccgataaaaacagaaattctttcaaagaataaagatttggattatgactcatatgtatatgagtatctgggaaagaaaagggtaataacgtatttaaatattaaatcaggaggtcaggggttttatgaaatgctctatccaaacattgattgtttagggaaaacattcgtgtcgacatttgaaggcgataaacctaagtcaaaaagtgaatgtgaaagtgaagtcagaaatacatactcattagctgcaaaaaaacaacgtaaaattattaatgaaataaatggtattgatgaatacataaagaaatcaattaatccactgaagagtgaagtagaaaaaaatggcggatacgaccaagtgtggatggctggcccgacttataatacatgttcaaaacatatagccatggcatctgataaaacaccgggggtatttaaaacaaaaatagaatgtattgacgatattaataaaaaaataaagttggtcgatgagagtaatttaatgagggaaaaaatatcttcatacatcccttttgcaataataataacattattactctttatgcctattttgttaaggttgatatttattattgctaaaaccctttggtctttctggcttttatttgttgagaaaacttttgagtcagcaaatcgttcagagaaaaaaataaagatagatgcagatattaagataaaggatagtaaagataaagagtaa

SEQ ID NO: 455928 - DNA, 792 bp, Serratia marcescens
atgacactatccctgacagcccctgtgcaacagcaactgactgccgccatcgaccttctcacccgccagcttggccgtaacctgatggccgtccacctgtacggctctgccgttaagggcggtctgcggccctatagcgatctcgatctgctggttactgtgcgcgcgccattggacgacgcgatgcgggcgtccctgatgcaggcgctgctggcgctgtccgcgccgcccggcgcatcggatacccagcgggcgctggaagtcaccgtgctggtgtattcacaactggtgccgtggcgctacccgccggtcagagaactgcagttcggtgaatggctgcgcgacgatattgccgccggcatttatgaaccggcgcagcaggacgcggatatcgccattctgctgaccaaagcgcgccacgccagcgtggcatgggttggcgatgaggcggcgcggctctatccccccgtgccaccgcgcgacctgcggcaaaccttgcaggatacgctggcgctgtggcaggaaacggcggatctgcagggggatgagcgcaatatcattctgacgctggcgcgcatctggtacagcgccaccaacggcggcatcgccggcaaggaagaagcggcggactggctgttgcctcagttacccgcctgccatgccgccacgctgcaggcggcacggcaggcgtacctggggctggcgacgcaggactgggcagcgctcatgccggcggtagaacgctttgttcactatgcccaagcgcagattggtgcccggctcggcggataa

SEQ ID NO: 455929 - DNA, 402 bp, Serratia marcescens
atgaaaaaactttatttcttgttattaatttgtgttgcagtaattttttccgccaacgctgtggcgggacgccagggctgcgagatcaagaaaagtaacatcagaacgcagatggaatatgccaaacgctacggcaaccatcaccggctggcaggcctggagcgggcgctagcccgggcagaggcctattgctttgacggttacagcggcgccagtcatcgccttgacggctatagtggagccagccgcctggataaaatacagggcaaggaagaaaaggtcaggcggcgtgaaattgaacttgatcgggcggttgccagcggcgatatggacaaggttcgtaacaaggcccacaagcttaatgaagccaggcaggaactggcggaagcgcggcgttggtaa

SEQ ID NO: 455930 - DNA, 150 bp, Serratia marcescens
atgccttctgcgtcctttgatcggtcgttccctggtattacgttacacggttatcgactgataacccccagaaccttcatcgatgataacaatgtagtttttctcacccacaaaagtcaacatatgaatataaaaatgatgattaagtga

SEQ ID NO: 455931 - DNA, 861 bp, Serratia marcescens
atgcagcgattttatcgaaccataaccgtagtgcttatgctggcgctggcgccgctggcccgtagtgaggatcagtctgggttgggcgtcatgcccaccatcgatctggtcaccgcctacaacgccgcaaccaactcttttatcctgaggagcgtactgtggccgagcgcgctgaccggccagccggtttccaactgcggatataatactaaccctgacagcgatacctgctttttctatttctggtgttcccgctttgggggagtcgccggatcatcagccccggtcataatacgcggctaccggatgaccgacatcgatctgcatgatcagctcctcgctctggccgggcaggaactgacgattcttgatccggactcctgcctaaaaggaaataccagcaactcctatctgcggctgatcgttgaatatcgaaacggcaacggcgccagagcggccgcgacgatctcccacagcgccaagaatgacaatattccggccaacatgtcctgctccgtcatcgataaatccgtgatcatcgattacggtatggtgccgccgaccgaagtggaaggccgtgaggaaagctcatggctacagctctcctgccacttaggtaatggctacgccaaaatttattcgccgaactataacgccagcaccgggataccgctgcgcgccgatggttcactcttcgccatgctggatatcgaagatgtttccctggcgcacccgacttcgctggttgttgacgccaacactaccgttagtattcccatcaccagtacactacgcagcaacggcgaagtcgttgacggcccgttcagcggctccgtggtgattaacatcgaattttattaa

SEQ ID NO: 455932 - DNA, 549 bp, Serratia marcescens
atgaactggcgtaatctggctttcggtgccggcatgctgctgctccactgcccgcatagcgcggcgcttatcagcagcggcaccaccaacatcacggtgcagggcgttattatgccgccgccgccctgcaccatcgagcctgaagacagcctgattcagctcaacttcggcacgattatcgacaaggctctgtatacccaccaacgcactcacggccaaccctttgctctgcatctgacagggtgtgatctgacgctgggcaacaccgtaaaagtctcgtttagcggggcggagagtgaaatgtcgggattgttggcgctggatgccaccagccaggccagcgggatcgccatcgggatcgaaacgccggacggtaaagcgctgccgatcaaccaaccgggcaccacccgctatccgttaatcagcggcagcaataactatatccagatgcaggcctacgtgcgcgccgaaccgttggcactttcgacccggagtattacccgggggccgttcagcgccacgatgacctttaccctatcctatgaataa

SEQ ID NO: 455933 - DNA, 753 bp, Serratia marcescens
atgatatttaaaaaattacaccagacggcgctgggcgccctgctgctgacaacgctcgttggccaagccgacgcggcgatcgccctcgaccgcacccgggtcatttttaacggcgacgccaagtctgttagccttaatgtcagcaatgaaaacaaacagctcccctatctggcgcagggatggatcgacaatgaaaagggcgaaaaaatcacctcgccgctgattgtattgccgccggtgcaacgtattgaggccggtgagaaaagtcaggtgaaaatccaggctctgccggctattgcgcaactgccgcaggaccgtgaaaccctgttttatttcaatatgcgagaaattccgccgcgcagcgacaaacctaattcactgcaaattgcgctgcaaacccgcatcaagctcttctaccgtccagcggcgatcgcccaacaggaagaatctggcatgcgctggcaagagagcatcacgctgagtcaacagggcggtaactatattctcaataatccgtccccctattacgtcaccattgtggatgccagcagccgcaaagacggcaagggtatcgccgatttcctgccgatcatggttgccccgaagtccagcacgccgctgggcgtctccgtgtcggcgctgggcaatgcgccggcgctgacctacatcaacgactacggcggacgtcccgttttgaccttccagtgcagcaaaggccagtgtcaggccaagctggaaaagagcaacagctaa

SEQ ID NO: 455934 - DNA, 2532 bp, Serratia marcescens
atgatttttgttcaatggaatgggcgtaaatttatggcacaacacgcaatcagacgtatatttcgcctgcgcaggctctggatattcgtcgccctgtcgctggggaagcccttttgcgcgtacgccagcgacaccattcagttcaatactgatgtcctggacgttaaagatcgcgccaatctcgatctcagccactttgcacacagtggctacgtcatgccaggcacctataccatgacgctgcgcgttaaccagcaagaactatcggaacaacagatcaccttcgcaacggcggcagataacgccgatgaaagcctgccctgcctgacgccagatctgacggttttgctcaacttaaaatcagattacctgaaatcgttgccctggcgcgatgatggccgctgcctggataaccgcgcactcaacggttggacggtgaaaggcgatctggccaacagctcgctgacgctgaccattccccaggcatatctggattacgactatccgaactgggatccgcctgcgcgctgggataacggcgtcaccggggcactgttcgattataatcttaacttcaccacgattcgtcagccccatcacggcagcgccagaaacctgacgggcaacggcacctccggctttaacgccggcccttggcgcctgcgcgctgactggcagatgcagcgcagcagccaggatcacaccacacaaaatcgctttgactggagccgttattatctgtatcggacgctgcccagccttatggcgcgtctgagcctgggcgaaaactacctaagttcagacatttttgacagtttccgctttatcggcgcggtcattaataccgacaacaacatgctgcctcctaacctgcgcggctacgcaccggaagtcgccggcgtggcgaaaaccaacgccaaagtcaccgtcagccagcaggggcgggtgatctatgaaactcaggtggcacctgggccgttccgcattcaggatctgaatgatgcggtatcgggaacgctggatgtccgggtggaagaacaggatggctcggtgcaaacgttcaatatggataccgccagcatcccctacctgacccgtccggggcgcatccgctataagctggcgaccggcaggccgaccgactggcgtcaccatgtcaacggccccctgtttgctaccggtgaattctcctggggcgtcagtaatggctggtcgctgtacagcggcgccgtaggcagcgacgactaccaggcgctggccgccggcgtcggacgcaacctgagactgttcggcgcgctgtcattcgacatcacacgctctcaggccagactgccgcagcaaaaaaaacaggcaggtcagtcgtaccgcctgagctacgccaaacgcttcgaagaatacgacagccaggtcaccttcgccggctatcgtttttccgatcgctattttatgagcatgggcgatttcctggatgcgcgcttatacggcgaccagcgacatagcagcaaggagatgtacaccatcacctttaacaagcagttcaccgatctggggcttggaatgttcctgaactataaccatcagacctactggaacagcagcaccaacgatcattatgacctgtcgctgtcgcgctattttgatatcgggaaatataaaaacctgagcttttccctgaccgcgtatcgcaacaaatatcacggtaccaacgacgacggtatgtatctgtcgttcaccatgccgtggggcgagaacagttcgctgagctataacagcacctggaataagcaggacaattcccagcaggtgagctactggggacggctaaaccataccgacaactatcagatcgccgccggtacaggccgccacggtccatcggtcaacggccactacacccatctcggcgatgccgctcaggtcaacgccacggccagttatcaggctggcagctacgcgtccgccagtctgtcgctgcaaggtggcgctaccgtcacggcacagggcggcgcgctgcaccgcgtcggtaaaatgggcgatacccggattctgttggataccgacggcgtgccggcggtgccctttagcagccacggcggtagaacgcgcaccaaccgcttcggcaaagcggtcatcgctgacatcaacagctattaccgtaaccagatccgcatcaacctgaaccagctgggcgaaaaaatggaagtcctccgctccgttgaacaggccacgctcaccgaaggcgccatcggtttccgccgttttgaggtgctttctggtttcaaagccatggcggcgattcgcctcgccgacggttctgcgccgccattcggcgccacggtgaaaaacgataaaaacaaaagcgtcggcattctcaacgatgacggcatggtttacctgagcggtatccaacctggcggcgtcatgaccgtgcactgggccgatcgcgagcagtgccggttaaatctgccgcagcagattaccgaaaatatgccccaaaacctgctgctgccttgccaggccaccaatccctaa

SEQ ID NO: 455935 - DNA, 540 bp, Serratia marcescens
atgaaactgaacaaactgacgatcgccgctattgcgttcggcatgaccagcctggctcacgctgccgttatcgatgctggacacggtaccgtgaaattcgaaggctccattgttgatgcgccatgctccatcacgccggataccgtagatcaaaccgtcagcctgggcgaagtgtccaacatcactttgcaaaacggtggtaagtccattccgcagaacttctttatcaaactggaaaactgcgacacctccaccaagaaaaacatcacgaccaccttcagtggttcgccatccgtaggcaatccagatctgctgggcattacgggtactgctcagggcgccagcatcgccatcaccgatggcgccggtacgctgatcaaactgggcgaaccaagcacgccacgcaacattcaggatatcaacaacacgctggtgttctcagcttacctgcagggtgacatgaaagacgccacaaccggcgcagacatcgttccgggtaaattcaccagcatcactaactttacgctggcgtacccataa

SEQ ID NO: 455936 - DNA, 975 bp, Serratia marcescens
atgattgttaatttattgttttatttctgtttttatttgatgttgctatggcacatttttatcgaatgggataagatttttctcggtattgatgctgttataaggatgtatatcaatatgtgcatgaatagggaacctgccagtgctttaacgggtgaggggctgccaaaaagctatcttatagaaggttgcgttgagtttttacaggaagaaaatattatttattcccggggaacgaagaaaaccattccgctgttggtttctgcgtcggagtgttttttattgttgttacaacagcatggtgaattgataacgaaaaatgcgctgactcacgcaggatggatacagtatggcctgcacgtgagtgacaacacgttttatcaaaatattcttacgcttcgtaaggcgctaaaattaagcggcattgaatcagaggtaatcaagacggttccacggaaggggctgttgatccctaaaggcattagggtcgaggcgctggcgccaggcatggaagaggcgagcaagcatgacagcgcgccgaaggctgccctgactagtcctgcgccactggaggacgttgataccgcttcgtgcctccagccggttgagccgccgagggtgagggacgcaaaaaaaccaggaattaaaacgctgttaggggggatcatcctggcgttggtcatctgtgctgtcgggggaggctatgccgcggcccctgaacattatctatccgattatcagtatatggatgacagcgtaggctgccggacttatatcgatgcgagaaacaccacgccggggattttccgtgcgtttgccgcaaagcaaaaaattagctgccgggatggtgaggcgctctatttttctacctaccagtttgtgcaacgggtttccttaatccgttgccaacgaccgttacaggagggaagggcggatgattgcgagtcccactattatttggagaaaaagttatga

SEQ ID NO: 455937 - DNA, 483 bp, Serratia marcescens
atgaagcggtcgatcctggtgcttttcgtggggggtgttcttgggatgcctgcggcgtttttgggcggcaagtatttgatgggggcgatcgccgactggcgggcaacccatttcacctgtgatgcctccctggtggtcagcaatctggatcatgagttagcgttgagaatgtcatacgttatggatggcgataatggcattgtcatttataaagggcggctaattaaagatggccagcgttacagtattagccggaagaattactttattattcaacgtacacaaaagttattacgtttgacgtcaacatccgtctatagcatgccaacagacaatgtgccgcaggaggatctgcgtcagctattgccattattctatctgaatcatggcgtcagcatctccgttaaaatctatccggaaggatttggcggatatgtcttttcaacgggttacgttccgtctttttactgccgtgacagttag

SEQ ID NO: 455938 - DNA, 246 bp, Serratia marcescens
atgcagaccttccttcaggtactgcagggcggcccgatgatcggcatgttgccggaagccatgaccgccgcacatctgcacgaagaactgctgagcgtgcaggacaccgatcttcggctgacgccgcagaaatacggcatactgactcggcgcggcgaaccgcttaccgagatagcccgcgagtttatgacgctgttgctggagccggaacaggattttgggggcgcgtcatccggatgccggtaa

SEQ ID NO: 455939 - DNA, 3522 bp, Serratia marcescens
atgggaaacatcgaactgcttgcgcaccgggggtcagatcgtgatgttaatggccataaagtcgttgaacattcgatggaagcatataatgcagcaattgattttggtgcagattatgtagaagccgatttatatttgaccaaagatggcatacttatcacatatcatgatgatgaggggtttcagcatatgacatatgctgaagcaaaagaaaagtatagcacgcttgctaaattcgatgatttcattgatttaataaaagagagaagtgttgagaccggccgaaaaatcaatattacattagagataaaaaaggctaaaggcaatgatgaaataactcatttggcagcaaagaaagctgttgatttattggtggagaaagaattcactgatacggacagggtttatatcaatagctttgataaaggaacgctaaaatatattcatgaagaagtgttacctaatgcgggtgtggatttcaaacttattcaactgattcctgaactcactgaggtagggaatgtaataagtgaaattcttgcatatattaatccttttgtaagttataaaaacacatccactttagattttgtagatggctatgcatattttatcggtataaatggcattgctggagatataaaaagaagaattgaggaaagtcacgataatggtaaagttatacacctctatacatttaaatcaggagcaagcagaaagaatatagataaaatattaaagctcgggccggatgccgtatatgctgatgactctaaggtaatgagagaggctattgatggcttgcaagataaaataacaaaatatggaaattatgatgataacaatattgagataaatgaaggctcaattaagtattatgctatgaagggtgatgataaaatcattgtcacttctgataataatattatttatggtgatggtgggaatgattcaataacttctaccggatctcataattttttaagtggtggaggcggggatgacgttatccgctcattaggcagtggaaaaaatatcattaatggaggtcaggggaatgatattataaaaatgcatccttctgatattcttttggttgataatgatgcagatggaactacacaggtttttggtggaggggtaatagattttatcgatatctcgatggatgaggctatatttattgtcagcgaggataagataatcattcactcaacgagtgggagtaatctggttttaaataattatgcggatgagaatggaaatcttttatataacatatcctttaaagatgaaggtatttatgactataatggattaaagaataagcttagcaatcaaaactttgaacatgatgacataaaatccattatctcatatgataataatgaagagtatacagactcggaaattgtaaagatcacgtttaaaaccatatatgacagagatgcaaatgacactgaatttaataactattataccctttatgttgagcttactaagtctggggctgctgaccctagaggtatcatcgctgatattatcgcaaacgatttaagatcatcttcatcttctgataattcaagggtatctgaaaaacataatcttgagtttaaaataggaacagccctttcatatgacacgatagctgagatatcaaaagcttcatcagagggtaatccaatttcgacagtcaacagtggcgttgaacatactcttgaaaatgcagaaattgccgtactgaaagacgtaataataaatattaattctaataactccgttaatctggagtatgctgactatttgaaagagttaaccattaacgggagtgagtttgccaccgtaaatttatcaaaaaatggcgttaatccaggggttaatattacagctaacaatggaaatgtcgtccttaacgcaagttctggggatgatgaagtcactataggtaaggaagcaaatatagcccacggatcggcaaaatttaatcttggtaatggtaatgatacattgtattgggatggtaatgccacgctggaaacaaacaacaggcatcaggtaagtgaattcatcaccgctgacggtggctctggtgtaaatacaatctctgccaatttaattaccaaaaaaatgcatattttggatcggccaggtttaaagtataactatacagattttaccagtaatgcggctaactttaaaaatttccaatatgttgaacttggtggctatacggggaaatcagaatcaacgtctacttcggggggcaagctgtatactttggccacaaagtctaatgtgtttgattacggacttttaaatgggaccgcgaagggggaaggtctccttgacgagtcgggtgtggatcgtgctcccagcggggggtatggttacgctaaaaacaccacacaagcaaagatacccgataatgtcgggacgttaggtatgaagttatcgagcaaggctgaccatgtggtggtaaataattatttcccatcccaggcaacaattgcaggcaatgcaacagcctcaagcgatataactttaaacctcagtgacagctttattggagatacgtttaacattcactttgactattccgacaatgccgatagcaaaaacgcaggggtcttggaattaaacgtacccgatgatattaaagaaaaggtgaatcttaaaacaattaacatagattcaaatggtaatggaaataatgaaaacgcactatttctggtgggggttaaccacgctacctcgatcaatatcagtgggaatgattacatgagtcttaaaatcaatggagactatacagaacttcgctctattgatgcatcaaataacaacgcgggtgtcagtattacctctgaggcaagcgggcaaggtaacgaaaaatggagtacggttgttaaacaaatacctaaggacaaatggacgggggaattcgtatcgcaagacgtgctgaccgtaaaaggctcatcatttgatgataccctgacactcaaggatgccatgaccgcatatggtaatgctggtaatgacacctttataattggtgccagtagcacgatgcttgaaacaggtaaaaccgtcaccattgctgattttgacgtaaaagaagacaagatagtagatatggattctggtattagtttttcttctgaatatagcaagggtaatgctatttatgattacggcgtcagaagtcctgaagaaattgctgctatcaaaaagatagccagttctggaagttttactcctgacaaaacaggatttgatctggtgagtaaaatgttgtcgcttagccgcaatgatcaccttgacgatagagttgggctggctactgtcggtgaaacccattatttgattatcgaccaaaataatgatcatcgtcttgatgagttggataaaattatcgtcgtcaagggtggctcacatgatgaaattatcaacacattaaaatattcagaaccagaactaaatggagtaccgtcaaatgaattacagtatacagaaatggtagcatag

SEQ ID NO: 455940 - DNA, 1236 bp, Serratia marcescens
ttgaaaattcaagctatcaaacgggatatatcagcagggatcgtggtatttttggtagccttgccactctgtttgggtattgcgcaggcttgcgggttgcctgcgtttgtcggtttactgaccggggtgattggcggtgtggttgtgaccacattcagcccgtcgcgttttgctgtcagtggccccgccgccggccttgtgacgatcgtggcggcggccattgacaatcttggttcatactccgctctcttgctggcgcttacgcttgccggtattttacaaattatcctgggcgcggtgcgcgccggccgattcatcgccctggtgcccggcagcgtcattaaaggcatgctggccgcgattggtattttactcatcatccagcaaatccctatcgtattaggcggagaagatctgaatgcatttcttcgcggcaaagaggcgttatccatcccggctatcgccgtcgccctgtccggattagcgatattattctgctggaacacattgggaaaaaaaatcccccagtggctctcctgggtgccagcacctttagtcgtggtgttatttggcagttgcatatcgatatttattgaatatataaaaccggagatgatacacaatctacagcgtatatccttaccgacactttccgatctatcaaccctcatcgcaggccaaacgacgccgaactggcaagcgtggaaaaatccgtcagtatatctggtcgctattactctggccttgatcgccagcctggaaacattactgagtcaagaagcgttaaacaaaatacgcccccagcatccagccccttccgctgacaaagagctgcgggcgcaaggtattggcaatctatgctctggccttatcggcggcttgcctctctcttcagtgatagttcgtagctcagtcaatgtcaatgccggcgcacagagtaagttatccgtgctggtgcatggaattttattgctggtttgcgggctatggtgtagtgcgataatcaacactattccattagccagtttatcggctattttaatttataccggttataaattagcaaatctgcgaattttcattgaacacattcgcatgggctatgagaaatgcataccatttatttcaacaattatttttattataagtttcgacatgctgacgggcattattatcggttttatttcacagtttattatcaatttttatcaaaaaaaccaaaaaacatgcgactaa

SEQ ID NO: 455941 - DNA, 627 bp, Serratia marcescens
atgattacgcttcagccattactggccaaaaatcgcagctgggcctatcagaaaaaacaaactgatcctgaatatttccaaaaacacatcaacgcacaaaaacctcattcattatggatcggttgttcagacagtcgagttcctgcagagatacttacgggatcagggcctggagagctttttgtttatcgaaatatcgccaatatggttgtagacagcgatgacgatctcatgagcgtacttcagtacgcgttagacaagcttcaagttaaacgaattattctgtgcggccattatggctgcggcggcgtacaagccgcgctgttatctgatggttctgcagataaagaaagctctccgcttgctcgccgcatgactcatctgcacaacatgctgtctagcagcatcaatgagtatcattcatcgccagagaatgaacacactaagaaaaacaagctgatagaagccaatgtgcttattcagtgtaagaatttagtgaaatctaaaccagtacaagatgtttggcaacaagatcgccaactcagtgtatttggttgcgtttacgatctgcaaacgggatatattgccgaactattccaacaatcaaaaaaggatattttattttga

SEQ ID NO: 455942 - DNA, 270 bp, Serratia marcescens
atgaaaatgaggggaaactttccagacaacccttcatcgcagatagatagcccgaccgcagatatcgttgagttggaagcggattatccggatatgttcaatgcggaatttggcgctcgtcggggggatgacattacgttggaaggatggggaacgacaacaaaggatttttttgcgcagaccgggctattagcgacaaaccatctgaagcaggaggtcgaatcattgatctgcgtatcgccagaaaagaaaaaggcgcttatcaaatga

SEQ ID NO: 455943 - DNA, 1674 bp, Serratia marcescens
atggactcagtcaatcaacgtctcgcgatgctatggctggggctcggcttgagtttcgcggcaaatgccagcctgctcagcccggccgatcgcgatactatccagcatcaacagcgtgcgttgttggaacaaaaccaacagcagcggcaggagctacaacgcagcctgacgccgtcgcgccctcgttctccttctgccccagcgccagccggcggttcctgcttcagcatcggcgctatccggctggaaggcgccgatcaccttccgaccgccgcgcgacaaaaattgacgcggccttatttgcagcgctgtctgggcctggagcaaattcaaactttggtgcagcagatctcggattggtacatcgacagaggctatatcaccagtcgcgcctttttgaccgagcaggatctgtcccagggcgaactgcggctactggtgttggaaggacgcctggaagacatcctgctggagcggcggaatgatcgtatcctgaagatggctttccccggtttgcgtgacaatattctcaacctgcgcgatatcgaacagggcatggagcatatcaaccggttgcggcagcggccggtacagatcgaaattttgcccggcagccagccgggttattcgctagtgaatctcagcgccaaacctgagtttccgctgatgtcgggagtgggattcgacaatacgggacaaaagagcgccggcaccggacagatcaatgcgtctttaaccgctaataacctgctggggctggcggatcagtggtttgtttccggcgcgcgcagcagcgacttcgccagggaccacaatgcgcgcagcgtgcagagcggcatgagtctgccctacggttattggctactcgattacaactatgcctacagcgattacctgaacaccattaacggtcaagaacttgactggcgctacaacggtgacagccagactcatcggctgagcctgtcgcgggtgctgttccgtaatgccgaaatgaaaacaggcctgtctctggggttgacgcaccgcattaaccgcaatcacctcaatgatacccggctgacaagcagtagtcgtaagctgaccagcctcactttggtgggcagccacagccggaagtggcagggcggttttgcgaccttaaacccggcttaccgtcgcggcgtgccttggctgggtgctgaaggtgatggcggtaagggaaaaccggctccccgtgcagagttccagacgttctcgctggccggtagctattacctgcctctggctcaggactggatctatctcaccagtttttacgggcagtggacgcccgatcgcctgtacggcagcgaacgattgaccctcggcggtgaaagttcggtacgcggcttcaaggcgcaatatctctccggtgataaaggtggttactggcgtaacgaaattaacgggtcatcgttcagcctgccgtatctggggagtatttccgcgttggttgcgatggatggcggctatctgcatcgcgatccgttggatccctccgccagcggtatgttgttggggggagcgctggggctgggcagccgcaaccgctatttcagcagccaatttaccgttggctggccactgacttacccgcgctggttggcaccggatcggcttgccgtttattaccgtattaacatcgttatttaa

SEQ ID NO: 455944 - DNA, 6882 bp, Serratia marcescens
atgaagaagaaaaagggacatcaacccattcacgccgtgcaacggcgtttgggctttaccctatgcggcgtgttggtctggcagccgctgctgcctgcgttggccgatggcattaacgtcgctgcgggtaatacccagctcgatcaggccgccaatggcgtgccggtggtgaacatcgccacgcccaatcaggctggcatctcccataataaataccacgatttcaacgtgagtaaagaggggctgatcctcaacaacgccaccgggccgcttaatcagacgcagcttggcggccagatccagaacaaccccaatctgaaggccgggcaagaagcgcggggcattatcaacgaagtggtgacgccgaaccgttcgcaactgcagggctatctggaagtggcgggcaaacaggccaatgttatggtggccaatccttatggcatcacctgcgatggctgcggttttatcaatactccacatgcggcgctgaccaccggtaagccggtgctgggctctgatggcaaactgcaggcgctggaggtgacccaaggggcgatcagcattcagggccaagggctggatgccagtcagagcgaaaagttcgccttgattgctcgcgccaccgaactgaacgcccagctttatgctcaggatgcgactctcatgttgggtgccaaccgtgtcgctgccgacggaacgatagccccgctgaccgggagcggtgaggtgcctaacgtcgcgattgataccagcgcgctgggcggtatgtacgccaaccgtattcatctggtgtccagtgacgctggagtgggcgtcaatcttggcaaccttaatgcccaatccgggggtatccggctggatgccagtggcaagttgaccctcaataatgcgcaggcacagggcggcctgaagattaacgccgccgacgcaaccctcacgggtaagaatcaggcggtaggttccgtgcgggtacaagccgataaccaactgattaaccagggtgtattacgtgcgggcggcgatatgcgtctgctggcagacggcatcgttaaccagaaaggggatattgcggcgggcgacagcctgtggctgcaaaaagacgcggcgggcaatgccaaccgggaaattgtcaaccgctcggggagcatcaccacagcgcgtggggatatcaccctgaagaccagccagctgaagaatgaacgggaagcgctggtggtggattatggcggtgagcgctggcgttacagcaacggcgggtacagtaagatcggccagggcaggcgcgtcacgttggcgccgtcggcgggtgaagcggaacgggtgctggcggcggagagttcttatctggcggtgagcgatgccgcggctgaggggcagattggcgctgcccgcgacctgcgggtaacggccgggcggttggacaatgtggccagcacgttgacggcgggacaggacgtctggctgagcggcggcagcctgactaacctgtcgtggctggaaggtacgcagacgcgttatcgtctgctaaccgattatggtcagaatgtcatgacacgcaacgattttggccaggagccgacgagcgagtcctatacgacctatgaggcgggcgccgcctatctggggggaatccgggcaggtaacgtgttgaatgcccattttatcgatgacatcagcaacctgacctaccgcgctaatgtgggtaacgttgggggtgaccttctcagtgcgcttaaacccggcgtcagctatcaattggccgatcaaacgcagcggttggtcgataaagagtcggcggcgcagcttggcggtgtgatgaccggcagggaggtggcgctacaggccaggcagatactcaaccatagcggcctgcttgctggccgcgaagcgatgacaattaccagcacgggggcggtggataaccgtaacagcggcgtgatcgcctctgagggagagctgactctgacgagtaacggcgatatcagcaaccgcggcgccttgatcgtcggcgagcgggtggcgatagaaagccggacgggcagcattattaaccggactgaacaaggtgatggccgctctgcggatacggcccagtggggttggtggggaacgccaaatggtgatgtggggacgctgaacggcacgttctcgctggatctgcgggcggctgacagtctctggctcaccgacgccaacctgctttccggggggaatctttccctgcgggcagagaacgatatcagcctgcacaacaatgcggaccattcaacgcatagcttcaacggtagtggcgggagttattacgcagacaatgtcaccaagctgggcagtaagatccttgcggagggcgcgctgcagatggatgccgggcgtaatgtggagggctgggggagccagattgccgccggggggaacctgagcctgaacgcaggggagagcgtatggctgtactccgacagcggtgattatcgctacactcgtgacggtgagcgggggatggattatgtctctggaagtgccgtggcggacatgtcgctcgtcagcggcggtgatatggtcatccatgccgcggagagtatctctaccagcggggcgagtatggcggcaggccaccatctccaattgaccgcgggtcaggacatcaacctgtggtcgacgttggtacagcagagtcaggacctgggtaacggagccttgagttttttacgccagatgggaacgctgttggttagcggggggaacaccgctgttcaggcgggcggtgacgtgacgctggatgccgcaaaactcgatgcgcagggtgatattgccattgacgccggcagcaatatttcgttggacacggctgctgagaacggttcagtctcaggcaatcatggtggcgactggctgaccgcggcgcaggcgatgctacagaaggttttggccttagatggttggcgcgacggcgatgacaaactccgtgactacggctggatgctggcgctcgattcgcagacgaaggataaggggacggaacttggtggtaatcatattcgcttaaccgcgcagaataacctgcaggttacgggagccagcataaccggtagggggacggtttcgctggttgcggatcgggctatgacgattgctgcgggccagcgctcaagcgagctgacatcaagctggtcgagcagcgatattcgtgctgctggcccgctgcagatgagggccggaggcgcactgtcggtgtctaccagccagcttttctccgacggtgagatgcggctggaggccggacaggatatcggactgtatacgcaaaccgggaatgtcaccgaatggaaatactggggggataactggtccagggaaagtctcgacacgttgagcggaagcggcatgctgatgaccagcggcagcgatatatgggtgaaggccgggcgggatctgcacaccaaggccgccggcctggcgacggagcaggacatcattctgacggctgggcgcgatattgtgctggataccacggaaaccaagcacgataaagaaagccacggcgacaataaacagcgggaagatatttccgtgcgtcagttaggcactgaacttgtcagtggcagagatacgctgttatatgctgaacaggatattcagctaaatgccgcccaacttaccgccaacggcgatattgaactggatgctgagcgcgatatcacgctacaaagcgccacggagagcgattactacttctttgaggagtccgagcgccacaaggatctgctgtcgaagaccatgcgctatgtgttggaggaggattttatctccctggaacaggggagccagctgagcagtaataacctgagtgtctgggcgggtaacgacctgacggtcagcggctcgacgctggttgggggggagagcgtctggctggatgcaggcaacgatctcgctatcactgcggcgacagaagagcagtcgagttaccggctggaggaaaccaaaaaaagcggattgctgagcggcggcgtgttgggttttaccatcggcagccgttcatcaaagcacaagattgacgagaaaaatatcacccagagccacagcatcagcacggtgggcagcaaccagggcagtgtgttcctcgatgcgcagcggcgtgtggccctgaccgggggagatgtggtggcagcgcataagctgatggtcagcggtggcagcgtgcatattatccccggccaggatatgcaccagcgtgacgaacggcttgagcataagaattcggggctgacgctggcgctaagcggagccgtcgccagtacggtaagcagcgcggtcaatatgttccagcggctgggcaaagtcggcgaggggcgcctggctgcgttgcagggcatgcaggctgcgctgggcggggtgcaggcggcacagggactgatactggagcagctgggtcaggaaggcggtggtctgatagggctaaatctgtcgctgggcatgcaaaaatcggtggcggaatggcatgaatcgtcgttattggtgaatagttcaaccctgatcagcggcggcgatctgagcgtgcaagcttccggtcagggagaggaggccgacagcggcaatatcttgattgccggcagccagttgaaagccggtggcgatatggtgctgtcggcggtccataatctattgctgagcggtgcggcgaatgtgcgcgaaagccgtcataagaacagcagtagcggcggtagtctcggtgtgggcatcaatcttggcaagaatggggttgggctgacggtctctgccagcgctaactacggcagaggcagcgagaagggtaacggtacggtatggaccgagactctgctggatagcggcaaccgtctggcgttgaccagcgggcgtgatatggccctggtgggggcacaggccagcggcagcaaggtggttctgacttccggcggcaatctggagatggccagcctgcgcgacagcgacagttatgacgtgaagcagtttaacgtcagcggtgggctgagcgtggcggtgatcggcgcggggagttcgggcaatgtcagcgcgagccatgaagcgatccatagcacctacgacagtgtgcgggagcagagcggggtgttcgccggtgacggtggttttgatgttaccgtcgcgggaaatagccagcttaatggcgcggtgttggcttcgacggcaccggcagaaaataaccgactgaagagcggcacactgggttggggtgatatcatcaatgaggccgaatttgacgcgcagcagcagagcgtcagtaccggtgtcggcggtaacagtatttcgcacaacagtggctatgtgcagggcatcacccaagcggcggtgtcgggcggtagcgtggagattatccacgctgcgacacagcagcaggatctcgcgacgttaaatcgcgacgtagagcatgccaatgggacaatctccccgatctttgataaggagaaagagcagaaacggctgcaacaggcgcggctgctgggggagatggcgtcgcaggtgagcaatatcgtgcacacccagggtaaaatttatggcatgcgggcgaccaaagatccgcaagcgctggcgaaggctaaagcagacttggaagcgcagggtaaaccgaccacggatcaggccattgcccagcaggcttacaacaatgcgatgcagaagtatggcatcggcggcagctatcagcgggcggcgcaggcgatcactgcggtactgcaggggttggccggcggaaatatcggccaagcgttagccgggggggcgaatccgtatgtggcgggtatgatcaagtcgcagacggaagggaacaagacggcgcaggtgatggcccatgcgatatggggcgccctcagtgcggagcttgccggcggtagcggggttgcgggaggaagcggcgcagctaccggtgaactggcggcgcaggcgctcagggagacgctgtattcggggcgtgacgtcagcgagctgacggaagatgagaaagagaacctcagctccctgagtacgttgacggccggcctggtcggagggttaagcagcgggacggccgaaggcgccgtgacgggggcgctggcgggtaagaatgcggttgagaataatgcgctgagtgacatcattgagaataaagtctccggtgtgtcacaggaagaaaagtaccagaaagcgcaggatgcactggttaaggcggctgaagagtttaaggcgaagaactgtgccggactcagtgcagaagcctgtggcgctaaaatggatgcacaccggaatgagttgttggccggagctgcggaatttggtagcgactttatccctgtctatggcgatatcaaaagctttgctgaagctgacagcgctctgggttatctggcggctacagttggaatattgccgggattgggcgatagtattagcaagctgattaaaggtgctgaaaaggctctgaagacgggcgatcttgacacagcgtctaagcttatcgttaaggctggggatgacattagctcagcgaagtattttggacaggagcgtaagtattggagtgccgagccggttaatataaacggtaataaagtttatcaaaggaacgatttatttgatcctaatgcgctggattccagaggaagatcaaatattcaaaggatggagaaagggttagctcctttggatgctaatggccaatctgtaaacctccatcatatgctgcaaaaacaggatggcccaattgctgaagttacgcaaagcttccacaagggtaatcatggcgttattcatataaacgataatagtataccttcaggtattgatcgtaatgagtttaataaatggcgttctgattattggaagcaaagagcaaatgactttaaaaagtag

SEQ ID NO: 455945 - DNA, 213 bp, Serratia marcescens
atggctgagcaacatcataagtcagaacccgccacaccccaagcccgcaagagcattgttggctaccgccccaacggcggcaggcccaacccgcccccgcagctcaccctcaccggtaaatggctcgagccgctgggctttaccaccggccagaagatcgaggtgctcgccgcgccggggcagctgatcgtccggctggcggaagagacataa

SEQ ID NO: 455946 - DNA, 387 bp, Serratia marcescens
atggcaacactcacccgacagcaacttaatgccatgaacaccagagatgaacagtttttcaaggcgctgggcgcacggattgcgctggccaggaaagaactccaactgacacaacaacaactggccgagcagttgggcattgcccagcagacgatggcgcactatgagggcggacggctgaaggtctccgcctcactgctgccgcaactggcacagatccttaacctgtctctggatgagctgctgggcctgccaaccagacgtaccaccaagcgtggcccggcgtcacggctggagcaacagattgaagtcatacggcagatgccggcgacgaagcagaagtttgtttccgagatgctggataatgtgattggtaaaacagagtag

SEQ ID NO: 455947 - DNA, 2793 bp, Serratia marcescens
atgaaagtcagaatgaccccggaagagctggaacggctgaagcgtgaggtatcgcttgtcacggtggctgaatcacaggggcataagctgaagcggcagggaaaagacagctacgcctgcctgtgcccgttccaccgggagaaaacaccctcctgtgttatctcgcctgctaaaaacctgtatcactgcctcggctgcggggcggcgggctcggtgctggactggctacaacacacggagcggctgacgtacccgcaaacgctgttgcggctgcgtgagctggccggttcggtctctgcgcccgccgccgttgtgcctgcgtcgtcgccggttcgccagaccctgaccgacctggatgacgacggtcaggcgctgctgcatcaggtggtggcgttctaccaccgtaacctgctggggaatacacaggcgcaggaatggctggcgtcgcgggggctgcatcatccggcgctgataagccattttaagctggggttcgccggggcgcacggggtggcgggggcgctgccgtcaccgcatgcgaagacgggcaaggcgttgcgcggccggctgacggcgctgggggtggtgcgcgagagtaaccggcaggaccacttccggggctgtctggtggtgccggtgacgggctgggcggaagcggcgaacacgggccaccgcggccgggtgttgcagctgtacggccgccggacgctggccgaccacaaaatcaagctgaccagcccgaaacacctgtacctgccgtcgccgctgtgcggggtgtggaacgagcaggcgctggcggcctcgcaggacatcatcctgtgcgaggtgcttatcgatgcgatgaccttctggtgcgccggctaccgcaacgttatcgcggcgttcggggtgaacggcttcacggccgaccatctggcggcgctctcgcaccacggggtcaggcgggtgctgatagccttcgacagggacagcgccggagagcagggtgcggaagcggtggccggcaggctggcgggttgcggcatcggggcgtggcgggtgcggttcccgcaggggatggatgcgaatgaatacgcacagaaaagcggcaatgcagagcgggcgctgggtctggcgctggagcaggcggtgcggatggacagcgacgtggcggcggcgtctgaatcgccgtctgtcagcgcgcaaaccccgtcctctttagcggtccggccgcaggcggaaagcgccgccgttgcctgcgaggtgacgccggccggcgagctgctactgcgcagcggcccgcgtcagtggcgggtgcggggctggcagaagaacacggccgccgaggtgatgaaggtcaatgtacaggtgctggatgaaagcaccggtgcgttccatgtggacaccttcgacatgtaccacgccaaacagcggcaggggtatgtgaacacggcggcgtcagagctggagtgcgacccggcggtgataaagcgcgagaccgggcgggtgctgctggcactggagcagcaacaggcggcgcagcgtcaggcggcagagaaagcgccggcatccggtgcggtgacggtcgccggcgaggatgaacgggatgcgctggcgctgctgaaagaccctgcgctgacttcgcgtatcgtgtcggaccttgcggcctgtggggtggtgggtgaagcgacgaacctgctgaccggctatctggcggcgacgtcgcgcaagctggcgcgtccgctggcggtgcttatccagtcttcaagcgcagccggaaaaagcagcctgatagatgcggtgctggggctgatgccggaagaggagtgggtgcagtacagcgcgatgaccggtcagagcctgtactaccttggcgagacctcgctgcaacacaagatactggcgatagcggaagaggaaggggtgcgtcaggcggcgtatgcgctgaagctgctgcagagtggcggagagctgaacatcgcctcgaccggcaaggatgaagccagcggtgagctggtgacacgggagtataaggtgcagggtccggtgatgctgatgttaacgacaacggcatcagatgtggacgaggagctgctgaaccgctgtctggtgctgacggtgaacgagagccgggcgcagacgcaggcgatacatgcgcggcagcggcaggcgcagacgctggcggggctgctggcgacgagcgagaaagggtatctgacggcgctgcaccagaacgcgcagcggctgctgcgaccgctgaaggtggtgaacccgtatgccgagcagctgacgttcctgtcggacaagacgcgcacgcggcgcgaccacatgaagtacctgacgctgatacaggcggtggcgctgctgcaccagtaccagcgggcggtgaagcgggtgacgcaccggggtcggtcgctggagtatatcgaggtggagccgtcagatatccggcttgcgaaccggctgacgcatgaggtgctggggcggacgctggacgggatgccgccgcagacgcgcaggctgttaatcctgctgaaggcgtgggtgcacgaacgggcggggcagcaggcggcgggcatcgaaaaaggcagttgccacctgttccggcacgcgatggcgacgcagatgctggagaacggagcggacctgcggtggatacaggcgatactggggcaccggagcgtggagagcacgcagctttacacgcaggtgagcatccgtgcgctgcaggcggtgcatgcgagtacgcatccggcggagcagcgggagaagccggagccggacgccgctgcggagccgccggacagggcgtaa

SEQ ID NO: 455948 - DNA, 384 bp, Serratia marcescens
atgactttgtttgacgaatgcaaagaagcgttgcttgttgattttaatatagttattggtgacgaagaaagaaaagctattgatatgctttatagttaccccgttgccgccggaggagttgtgtggaaggagatgaaatatagtgattatgatgatttatatggtgtcttaaacgcgaacttagtaaaaaactacgacgtatttgtcttagcagatgatgcagatataccactgttcaggacaaatattaagctgatagcggaaaacgtttatgatgttacatcattgtcaccaaagttatttatttataacgatgaaattataatacagccgttattcccatcagagcgttttcgcgttggactaagatctgacaatttataa

SEQ ID NO: 455949 - DNA, 237 bp, Serratia marcescens
atggctgagcacgatactaagccagaagtgaggatttccaaagcacagcgccgctataaagtcggctacgtcagtatccagcatattaagcgggctaccggtatgaccacgtattacagccgctcgcccagcctgcaccttaagggcgactggctggaagaggcgggattcgggaccgatacgccggttaccgtggtcgtggagcaggggcaactggtaatacggcctgctgagtga

SEQ ID NO: 455950 - DNA, 243 bp, Serratia marcescens
atgtctactgtcgtggggtcagtccacccgagactgcccgctgtggcgaagctgctttcggtttcactggaaggactgctgggagaggaagcggagagcacaccgcgcaagcgcggcccggcctcacgactggaacaacagatccagatgatcggccagttgccgaagagtaagcagaagctggtttcggagatgctggacgccgtactggcacaggcgcagcaggcaggaacggacggttaa

SEQ ID NO: 455951 - DNA, 570 bp, Serratia marcescens
atgatccgcccggcaggccgtccgtcgcgcggcaaccgggttattttgccagatgagatcctgtctgcggcgttggcgatactggatacgcagggagcggaagcctttacgatgcgcgctttggcaacgaagctgcacatcaacccgatgacgatctaccactattttggcgaccgcgacggcttgatcgccgctatagctgaaagggtatatcgagacgttgccatcccgccagaagacgatcccctcacccgactggcggggctgttacgggcttaccacagccaggtattgcagcaccctggcctgacgctgctgattttcagccggcccacggtgttccccgaacaagccagacgtctcaccgcggacattacacaactgcttcagcaaagcgggctgccgtcagccgacgccaggctatgggtcgatatagttgtcgattttacccatggcgccgcgctggcgacggcgtcaggagaacactcggccattgaacgtaacaccgccgccaaaaactatgccgaagcactggctgaattattgagtgcgctaaaaaagcgccaataa

SEQ ID NO: 455952 - DNA, 522 bp, Serratia marcescens
atgccccgttatagcactgaaattgctacacgtatgaacttgccccgtaatggaggttggcgttatacgccgacaattaagatcaccaaatacaaagatgttattcagggggcaaccaagccttggggagacgcggtggttgggcgtaactactatccaggggcgatgtcaaaagatgaagcgtatctcaaaatgcttaccacgctttaccatgagagggttcatatggcgattgctcctaaattttatctgttgcgtgagctacggggttttatgaggcagtctggctatacgaaatcctatatattacgttatcttgaagaggctcttgctgagacgattggtttgttacgagcaagggggatgaggcctgaatatataattcagggctttaaatttcctttaggtaatacttatgagataaccttttctctactccgtcatgaagcttctggcatccttatgggaccagtaactgtcggtggtattgtgtatagcgtctggtatgggattcagaaatga

SEQ ID NO: 455953 - DNA, 279 bp, Serratia marcescens
atgatcacgcaagggcaggctgttgagatagcaaaggattatgctaaaaaaagcgggcgtggctgggatgagcgttaccatgagtccagcccgatgatgctggagggtgaacctgtctggatgattgcaactgctgacgttaagtattcagacgagctaccttggatgatggagaatttaccgaaccctgcgtattactatatcagcatggtaacagcgaagtgtattgcagttgggagccgtcgggaggatttttatcgagtcaatgacgctaaataa

SEQ ID NO: 455954 - DNA, 195 bp, Serratia marcescens
atgggctgggtcatcacgccagaacggcgctggttgcggctgcaggttaggcagaaggtactgaacgggcgctggcaggtgcagcaaatcggtgtgcagacgctgaggctgcaggccgtgacgaccaatgcgttctgcccgccgacggttggcgaggttacgctgatattgggtagcaataaggaagcaacatga

SEQ ID NO: 455955 - DNA, 483 bp, Serratia marcescens
atgagtaggccgctgccagaagcgcttatcctctggctgcagcggccggggtggcaactgttggcattgcagtggctgctgctcggcgtactgctgacgttgcccggtatgggggtaatccgcggggagtggcgacagtcggagcggttaagcgatgacgttctgcagcaggcgcagcgcgtggagcagctgcagcggcaactggcatcactaccgccgctggcgacgctggagcaacagctagcgcagcagcgtgaacaccggccggccgcaccggaactggcggcagtattgcagcaatccggcgtcaggctgttgcgttggcagcggcaagaacagccgccgcagcagcggcttcggttacgcagcgactatttctcgttgttgcggttgttggaaagtttgccggacacggtgcgcatcaatcagttatccctggagatgcagccggaaggattgaatgcggaatggctgttgcagtga

SEQ ID NO: 455956 - DNA, 537 bp, Serratia marcescens
atgtatcaggtgaatttattgccctggcgccagcgggcgctgcgtcgccgcgcccggttctggttgggtttgctgacgctgcagctggctctggtgctgacgctggccgccctcatgctggcaggcgtgcgccaccggcagcagcaacagcgcgttcagttacaacaccacacgcagcggtacgaggccttgcagcagcagtaccggcttatccagacggcgacgggcgaactggcgcgtctgaccgaacgccaggctcagcatcgccgcaatcagggccataacttgcagtatgcgcggtttttgccgcggctggcggcggtgctgccggccagcgtctggctgctctcgctggagacacaggcacagaccctgcgggtacgcgggctgagccaggactatccggcgctggcccggctgacgcagcgcctggagacgcaggcgctattacccggtcatcggttggcggacgtcgcgcagcgcgcggacgggctgttcacttttaccctgacggcgccctgggggcatgatgagtag

SEQ ID NO: 455957 - DNA, 501 bp, Serratia marcescens
atgaaagaatattatagggaaggtaagggcataattatgccagcgaatcgattaactctactaatcgtgttactgttcgtggtgttgtcaatcttagcttttgggtggagcctgcgtccggtagaaattgttgccgttcatcagagaggtaattacagtgatgttttagtgaatgattttccttttacagataaaggaaaaataaattggtggctgaaaaacaaagaaaaaattaaaaataattatgatattccacaacctgcatcctatggtttttttacgattatcttttgggactttggtagtggttataaagaacctgataaatatgacagagtgtgctttgacgacgtcagagagaaagagaactgtatagataaaaacaaattattcacagtaagaaatgataggaatggcgatattatatttgcctttagcgatgctcgctatcgcctaaataaaaacggtgaaataaccaaactcaaacgcaagtcggattaa

SEQ ID NO: 455958 - DNA, 462 bp, Serratia marcescens
atgggtaagtgcaaaaaggtaatttatacgttggcattagcaggcatggctctactaggctattttttttggcgctcgctgcaaccagtagaaattattgctattcaccagagggagaactatagcgatgtgctggtgaaaaattttcctttcacagatcaagggaaaataaattggtggttagataataaagagatcctaaaggaaaaatatgatatccctaaaccagattcggatggattctttactattatattttgggactttggtgatggttataaagaggctgggaagtatgatcgaatgtgttttgaagatatgaaagagaaagaaaattgcattgagaagaatgtattttttattgctgaaaacgatagggataatgatatgttatttgtcggagatggtgggcggtatcttatgaaaaaaaatggtgagctcattaagcttaggcgtgattga

SEQ ID NO: 455959 - DNA, 843 bp, Serratia marcescens
atgacggcattacaattcccctgcacgatatttaaaaccaaaaacataatggatgattatggtgcagatgatatgcgctgcggagatctatccgtcccccaattaaaaacgcattttcatttagttgatgtatccacccgggttaatccctataccctgacgcagatcacaccgtttaatcagccgcatttgcgcttttacggcatgcgcgggcaggggactacgctcacccggcaggagtgcgccagaattctctttgacgaattccgtcagttatctcgcctgtttgcactctatggcccctataagcatctgattgaggaaatgatcggccatatgcagcacggcaatggcacgccgtttagcagcccacatctgaatgccgcgttaaaggcgcagattatgggggataaagatgagaaaaatagtacacgtttacgattatggaatgtttttgaccaaagaattgattggggaaataaatttttcccgtcagagtacgagaaggaacttactaaggcaatatttggtggtaaattaccaaaatttgatcggtttcaggataattttaacggtatggggattaccgtacatgatacttgggccacgcatatcactgtaaaatcactgcaggttgatagcgaaagttaccgtgcgctggtgcactatcgggtgcaggaccactttgggctggatgatgacgatatcagaaagattaagtttaaccagtttcgtttcttccgtatctggtttgtactccagcgctacaaccagtttggttttcggccatttatgactaatatggaagcaacggtggaaattacggggaagcggaatgggtaa

SEQ ID NO: 455960 - DNA, 516 bp, Serratia marcescens
atggcgcaaatcagcggggcgcgtcgggtattggagattggtacgctgggtggatacagcacccaatatcttgcccgcgggttgccggaggacggccatgtggtgacgctggaaaaagagccggccaacgcggcggtggcgcgggaaaatcttcaacgcgccggcttgctggagcgggtgtcgattgtggtgggggccgcggcgcagacgctgccgacgctgcagtcgcagccgccattcgatctgacatttatcgatgccgataaacaaaatagcctgctgtatctgcggtgggcgatcaaactgagccgcgtgggcagcatcatcattatggataatgtggtgcgcggcggggctattgtggccgcgcagcgtgatgatcacgccgaaggtattcgccaggcgctggaggcggtgcaaaacctgccggcgctgagcggtactgccttccagacggtgggcgaaaaaggctgggacggcttcgcgctattgcgcgtggaaaaagctgaatgctga

SEQ ID NO: 455961 - DNA, 1845 bp, Serratia marcescens
atgggtatttttaattataaaggattaagcgatactgaatcgcagcaattattttccgatgcattagccatgacgatgtatagctatcataatctggatgatggctttgcttatggctatcaacataatggcctgggttgggggttgccgctaacgttgctgaccgcgttggtcggcaattcgcagtcgcagggcattgtgccggggctgccgtggaatcctaattcagaacagcgggcgctggataaaatcaatgacgccggctggcaggtgattagcgcagaacagctggggtaccagggtaaaaccgataagctgggtacgtattatggcgaatcctggaaatataagagttctcaggctgaagtgttgggcaaatatgacggtgaaggcaagttaatcggcctgggcgtcgcgtttcgcggtactagcggcccgcgtgaaacgctgattaccgacaccattggcgatgccattcacgatctggttgcggggttgggaccggcatcgttttcgaacaacttcgcgttgaacgccttcggccgtttactgagcgatgtggccaagttcgccgcggcgaacggcctgcgcggcgaagatgtgaccatcaccggccatagtcttggcggtttggccaccaatagcctggcatctttaagcgaaaagcattgggacggcttttattcaaatgcaaaatatctggctttcgcttcgccgacccagcatgaaggcgacggtaaggtgctgaatattggttatgagaatgatccggtatttcgcgtcctcgacggcacgcattttactggggcaacgctgggcgtacatgataaaccgcatgaatcagcgaccaataatatcgttaattttaacgactattacgcgtcaacattctggggattactgccgtcatcgatagtcaatcttcccagctgggtttcgcatctgccgttcacctacggcgacgggctgtcgcgtatcgttaattctgagttttattcgtttatggatcgggactccacggtcattgtttccacgctttccgatgtgatgcgtggtaaaacctgggtggaggatctgaatctcgcggcgcaacagcataccggcacgacttttattatcggtacggacaagggcgatatgatcggcggcggcaaagggaatgattaccttgaaggcggggccggcaacgataccttccgcgacggcggcggatttaactatatttccggcggtgaaggtcatgacactctgattctgcagaagggaatcgcgaaaatgcaggtggcctacgacggtgaaaatctctatttgcgtgacggtgacggcgccatcaccattgccaacagcgtggaaacgctgcggagcgaagaacgcgggctgttcggcggtaagaaaacgacggattaccaggttaaggacttcgggttgatggtgggcagtatccacgttaattacaccgggcacggcatcggcagcaaagaggatgatgtgttgcaggcgagcggcaaggaacgctggctgttcgggctcgacggcgatgacaccctgataggcagcagtaatggcaacctgacgtttgtcggcggcaggggcaacgacgtgatgcacagcgtcggccagaacaataccttcctgtttgacggtgattttggtcaggatcaggtgctcaactttggtcagagcgacaggttggtgttctttacccctcaggataaggggggcgatttccacaactatgcgacgcagcacaatgaggatgtggtgttcaactttggtgagaatcaggtcacgctggtaggtatttctctggattatctcagcgacagccagatcgtgctggtataa

SEQ ID NO: 455962 - DNA, 132 bp, Serratia marcescens
atgcgaattgactcaggactgtacaattattacaatcccgcctctttatgtattgcgattgaggcgtcggtcgtcttcacgccgagtagccaaacgcgtttactgatcagtaatcaatttaagtttaggtag

SEQ ID NO: 455963 - DNA, 1929 bp, Serratia marcescens
atggcggtattacacacattaaccagcaggtatattcaccttggcgtagggaaaaaactcactctcggtttcattctgatgctgctgttggcggccatcatcgctggcacaggcatccactacctcaccattatcgaatcccgctccgaacgcattgatttcagcgatcgactgaataatgagatcatccaggcccgctataaccgggcaatgtacgcgcaacattacagcaaggagtatctggataaaaactaccaaaatatcagtaatgtagaaaaactgatcgcccgcggcaaagatctggactgggattcgcaaagtcgtaaggatttgcagcgtctggtcactatgatcgacgaataccagctgcaacagcaaaaatttctcgatgcggtcgccgccaaaaacgccgtgcgcgaaagttggaatatgtccgatattcaacagcagcttgcgcagatcgaacagcagttcggcaatgacgaattgaaaatatccttcattgagctcggcaaaaaactgacgcaaacgcgctatctctcgcgcggtctgctgctgcatctcaaccgcgacgccgaagcaccgttgctcgccgccatcgacgacgcccgtcgcagcgcacaggcccttcatcagaagctgcctgacggtcaaaaaccgctgctgcaacccttgctggatgcactggaggcctacgccggccacatcaaggcctatatgccggcctacgagcatgaacagacgctaaataacgccctgagcgacagcgccgcagatatcggcacgctggtcagagcctttttgaaagacgagctgacgcaaaccaacaacgatattcagagtgcgcagcttcggatgggcctgactacgctggcggcgatcatcattggtctggtggtttcatggcgcattaccttgcaaatcacccggccgctgaacaatacgttggccatcgcccaacgcatcgccaccggcgatctgcggcagatagaagtcacccatcgtcgcgatgaactgggcaggctgctggacgccatggccgccatgaaccaaaacctgcgcgacatgattgaaaaaatccagcagggggtcggccaggtttacaccgccgccagcgaaatctccgccggtaataccgacctctcctcgcgtaccgaacagcaggccgccgccgtggaggaaaccgccgccagtatggagcagttgaccgccaccgtgaagcagaatgcggacaacgcgcatcacgccaaccaactggcgaccgacgcgtcccagaccgcacagcaggggggtaaactggtgagcagtgtggtcgccaccatgcgcgatatctccaacagctcacaacgtatcgccgaaataaccaccctgatcaacggcattgccttccagaccaatattctggcgctgaatgccgccgtcgaagcggcgcgagctggtgaacaggggcgcggtttctcggtggtggccagcgaagtgcgcaacctggcgcagcgctgcgcccaggcggccaaagagattgaagggttgattaacgaatcggtcagccgcgtacagagcggcacctcgctggtggaagacaccggcagtaccatggaaaaaatcgtgctcgccgtcggccacgtgcgcgacatcatggcggagatcgcctccgcctccgatgagcagacgcgcggtatcgaccagataggtcaggcgattgccgaaatggatcagaccacgcagcaaaacgccgcgctggtggaacagtctgccgccgccgccgactcgctggaagagcaggcggaaatcctgcagcaaagcgtggcagtattccagctggcggaatcgccgtcgcgcggcgccgagccggccgagacgccgatcccgcgcgcggtgaaaaccgcagcgcccgcccagagcgagcaggataactggaccacattttaa

SEQ ID NO: 455964 - DNA, 693 bp, Serratia marcescens
atgaagcgtgtaatgacaaaggatattattgaaagactacatgagttatcaccggacgttcctttggaaatattgatttcctgggagtcgagtgatgatgcctggtttttaaaggatgaaaataatatacctatttatgccaatgaggaatacagtcagttgataacgcggggagatcaaagcgcctcctcgattcttgcgccttttaagccttttattgcccagcacgatcggcgtgttattaccgagttgcgcaagatcgaggcggtaggcatcctgccggttgctacgggtgagagattcagcgttttttattgtgaaagaatgccttactatgataatcatgcgcatccgtccggtattatcagtcatataaaaccgctgaatatgttcagcccgcgtttcttcatctccggagagggtgtgggaacactcacaacctgctgtcctaccctgttattttcaaaaaaagagtgggaagtgatatttttgctgttacagggaatgacggaaaaagatattgcagatagggtttatcgttctatcagaaccatcaaattccacaagaataatattttttccaaggcgcattgtgaaactacgcgtgattttatctgtgtggcgcggagtaaacaatgggatttgtatatcccgccgcttttttccaagccttgctatatgattaagcgttga

SEQ ID NO: 455965 - DNA, 2346 bp, Serratia marcescens
atgaattataaaaataatgttacttttccaatattgatcatttctgatggtgaaaatcaattaaatcgcgagcatccactttatcaggttcaggaggtgctggaacacggtaatcatcattttatccatgcgcataaccggacctccgcattggcgatggtccgtaaccaattaggcattgcctgtatcattattcatgatgatgatcccgcaaaaattgatattaatggattattttttaaagaaataatcagcgctattcgtaccagaaaccacgcaatcccgatattcttttcctctatgtccccgctgctggggcgcttgccgacggaggttatcaaagaattacatgaatacattaatgtctatgaagatacgccgaaatttattgccgggcgtatccatctggcggttgagcaatatatttcgaatctgcttccgtcctactttgcggcgcttaaaaattatgcgttagacagtccttattactgggattgtcccggacatcaggggggcgtagcctacctcaaacacccggtgggccgggaatttatcaatttcttcggtgagaacctgatgcgtgcggatattggtatctcaacgccggagctgggggattggttagagcataaaggcgtaccgggtaacgcagaaaaacgtgcggcgaaaacgttcggcgcagacagaaccttctttgtgaccgggggatcgtcgcaatccaatcagatcgtcggccactctattgatttaaaaaataaagtcatacttcttgaccggaactgccacaagtccgttaaccatgagctgaccatcacccgggccaagcccgtctattttcaaccatcccgcaacgggctgggcattattggtctgatttctcccaatcagtttacgcgcggcgcgatcggtaaaaaaatcacggacagtgtgctgacttatccgatcgaagacctggatcctgcttacgccattatcaccaactgtacctatgatggcctgatttacgatgtgacggccctgaccaggaaactgggcaaggtggtgtcgcgcatcaagtttgatgaagcctggtatgcctatgcgaagtttcaccccctctatcagggacgttttgccatgggggtgcctaaagacaaggaaaacggcccgacgatctacgccgtgcagtcgacgcataaaatgctggccgccctatcttcggcttctatgatacatattcgcaattcggcccgtgcgccggtggattacgaggtatttaatcaggccttcatgatgcacggcaccacatcgccgttttacccgattatcgcctcgatggatgtggcgacggcaatgatggagggagaaagcggtcagtcattagtggatgaagcggttcatgatgccatcagttttcgtaagacgatggtgaccgtgtcggagaaactcgaggcagaagagggggactggttttttgatgtctggcagccagccagcgtgctgttggaaggtgagcaggtacctttcgctctggttgatgatgacattttggcggcaagagcagaatgctggtatctgcgggccggtgatgcctggcatggttttgaggatttacccgatggctatgcgatgcttgatcccatcaaggtcacgatcacctgcccgggtcttgatgcacagggtgtgacgcgtgattttggcatcccggccccggtggttgtgaaatatctcgagacgcagcgcattattccggccaaacatggggattatacgattctggtgctctttgcgctgggatcgacgcagggaaaatggaataccctgattgatacgctgatgatgtttaaatatcaccatgacaccaatacgccgttagccgaaattctcccggaaatatctgccagttattcgtgttatcagggaatggggctcggtgatttatgtcaggttattcatcatgccaatattgaactgaaaattgccgaacggttagagctcgcctgcacggtagaggcgataccggtcttgtcgccttcacaggcctatgagtgcctgattgcgaatcaaaccgaactcgtcaagattgaagacatgtataaccgtaccctcggggtgatgattaccccttaccctcccggtatcccgttgattatgcctggtgaaaaggtcacgcaggaatcacgaccgatcatcgattatttggcggcattacaaacgtttggccggcgctttcctggattcgagcatgaattacaaggcgtggacgtggataacgacggcttttattgggtgaggtgtattaaagaagaacctacagcccggaaaagtatgcccggcggtgtgcctttgtccagttcagggcgttaa

SEQ ID NO: 455966 - DNA, 1359 bp, Serratia marcescens
atgactacaaataatatgggctccataaaaaaaatggggctggcctcgctgacgctggtgaccgcgtcaaatatgatgggttctggcgtttttatgctgccgaccaacctggcgggtattggttctatttctttatttggttggattattacgatcgtgggcgttatcgccattgcactggtgtttgcgaaaaacagcatggtgacaccgcgtgatggcggcattattgcgtatgccagtgacgcgttcgggccttttattggctttcagaccacgatttgttactggatcagcgcctgggtaggaaatgtggcattgctggtcgccggcgtgggttatctgagttactttttccctatgctcaacgatccgctcatcagttctgtctgcgccatcgtgatcctttgggggtttatcgctctggcgtcgctgggggctaacattgccggccgatcgcagtcagttacggccggctgtatgctggtggtggtattaggcatcggctttattggctggttctggtttaaacctgtactgttttccgaggtgtataacggcaccggcggcagcgatgcgtcggcgatattttcagctgcgtctttagctttatggggttttcttggcgtggaatctgccgtagtttcgagcggtcaggtagaccatccggaagccaccgtgcccaaagcgacggtgttcgggctattgattgccgccgtgtgttatgtcaccagctgttcggtgatcatggggctggtgccgcacagcgagctggtgaaatctgccgccccgtttgccgatgcggcacggtatatgtttggcgatttcgccggagaagtggtttcagccttgagtgtcatcgcctgcttcggttccatttccggctggctgattttgcagtctgaagctcccagagccggggcgaaacaagggttatttcctaagttttttgcggtggtcaataaaaatgatgtgccgatgaaggggctgatatttaccggcgtgctgatgagcatcatattattcgccacggcgtcgcccgatctggcgaaacagtttcaggtgattatattgatgtccgtgttcgcctcgttattgccttatatttatgcgctggttgccttgccgattatcatggtgtcgaagtcattaaataccggacgggcattttttatttattgcgcgctggcggcgatcggcgtgttatacagtctctttgcgttgtttggttccggcaacaatgccatgttttggggcgtgttaatgatgatgtgcacgattcctttatacgccttggttgcagtgaaacggagtcaggccggcataaaaacgctatatctggataaggatgacgttgcgtaa

SEQ ID NO: 455967 - DNA, 648 bp, Serratia marcescens
atgttcctcactgacatacaaattcgacaccccaagccgcaggcaaaatcctacatcctcaacgacggccagggtctgtcccttcttatcaacaaggacggtagtaagggctggcgttttcgctatcgctttgccggaaaagccaagctaatgtctttcggcacctatcctttgttatcactggccgaagcgcgaggaaagcgcgtggaagctcgtaagctggttgcgaatggcacgcgattaaagccgatcgctggacgctggcctacagagaagaaatcatgcgtacttttgaacaggatgtgttcccgtacatcggtcaacgtccgattgccgaaattaagcctttggaactgctggaagtactacgacgcattgaaaagcgtggggcattggagaagacccgcaaggtacgccagcgctgatgtaggtgttccgatagccctttctcttgggcttggagccgtaagagttgcttcagtccgagttggaagaatcaaacggattcagcatgaatcggcatcaggcgtcaaactcggtggacatgccatattaaagcacgttgccaaagcgaaggaagaattagccacgcgtcttaaaagtactgaacacctggtacggaaacctcatgcggtcagttcgttttag

SEQ ID NO: 455968 - DNA, 270 bp, Serratia marcescens
atgcggtcagttcgttttagtaatattaatttggcagaaacacccatctccaaggcactgaacgtaaacaaagagtggataaagctgtgggcagcaggtcagccacggcataatttagtcattgcatacgatacgggaaaagtcattggttattctctgtttctgggcagtgacaagctggtaaatgccaccaaagtaaagggtgtacttaaatatgaaacctataatggtaaaccatattatattttaaccgcgttcccagaggtttaa

SEQ ID NO: 455969 - DNA, 1152 bp, Serratia marcescens
atgatgctgaccccagggggaaacgtccccgttccttcacagacgctgcgcgtccggataacctctggcgccccggtagactcctccgctttccgcctgtttgccgacggaaaggtcaggggcgatgccgacatggtgttttacggtcagacccgcaacgatgacggctccatcaacctggcgcgtgaaggccaatgcgcgatattcaccgtgttgcttaaccggctgcatgccgatgtgcagaaagtcgcgttcacggtcacctgtgacggtcagcagaccgttgcagctctgcgcagcctcagtatcgatgttgagcagggggcctcatgcctggctcgcgggcatgtcgaccttgcagggcgccaggaggccgcgctgatactgggtgagttctatcgccgcaataatgaatggaagtttcgctttgtcgcgcaaggatttaatggcgggctgaaaccgctggccgagcactttggcgtggatgtcgctgatgaatccgccccaacggcggctccccccgttatcactgcgccgccagaaaatacagtcagcctgagtaaagtttccctgactaaagaaaaaccggcgataagccttgccaagcgtgacaattttggggaaatccgcgtcaacctgaactggcaccggggaagcggccgctctgcttttgccgggatattcggcgcaaaaggcattgaccttgatttgggggcgttcgtaaagctccaggatggttatcagtcggtcattcaggcattgggtaatgcctttggcagttatcacggtgagccctatgtgcagctacagggagacgatcgtaccggggacgattctgatggtgaatggctgcatatcaacggccatgcgtggcagcacattcgtgaagtcctgatttacgcctttatctacgagggcgttcccagctgggacaagaccgacggtgtcgtcacgatttatgtgccggatcagccgcctatcgaaacccggctgaccgaaggtgaagaccgccgcaccctgtgtgcgattgccagactggttaacgagaatggctcaatcagggttgagcgcatcaatcggtacttcagcgggcagcaggcgttggacagcgcgtttaactgggggtttcgttggaccgtcggttctaaataa

SEQ ID NO: 455970 - DNA, 678 bp, Serratia marcescens
atgagccagaccattaaagcaaaaagccagatcctttccgtctttgattttgacgggacattgacccggcatgatagttttcttccgttcttacgctttgcatttggtaaacgacgttttatcagaaatatgacaaaactcgttatcccgacgctcagatgcatgcggcggaaagtcacccgtgatgaactcaaagaagtgttgattaccctatttctcaccgacgtgaatgaagcatggttaacgctcagagccgaagagtactgcaaccggtattggacacacctaatgcgcccaaaaggtttgatggctgtcgcctatgaaatcgcctccggggcggaagtcaccctgtgctctgcttcgcccatgctcgtcctccagccttttgccgacaggttgggaatcaagcttatcggtacacagttggaaagtattaacggcgtactcaccggccgtatcgttggccataactgccgatgtattcagaagatccgccggcttgaatcaacctatggttccctcagtcaatttcaccttagggcatggggcgattcgcggggagattatgagctgttagctgcggcaaaggatgcatactggcggcactttcatcccgtctggcaaattggcaaacgccccgccgctcatgcaaacgtcgtccataaacacatgccctaa

SEQ ID NO: 455971 - DNA, 486 bp, Serratia marcescens
ttggttatccagcccgctggccatcaggtcgagattaccctgaccgataatctgcccctgcgtgttagccaaccgctgcgccaccagacgcacgtctgcgccgctcagggtaccggacgcgttattcagctcgctacccgcctcgagcgtcaggccgttcccggccagcaggttgcccccggtattgttcactgcgccatcagcctgaagcgtcagatccgtttgggtttttaccgtgccgttctggttatcgacgcgcccggcatccaggcgcaggtcgccgttgctgcccaccgtgccaccggcattgtcaagcaggccgccgacctgccagtgctgcgccgcgccgcccagcgccaccagacggccacgctgattgaccaaccggtctgccgaaaacccgaggctctgcgcctcgatggcaccgtcactgttatccaactcgcccgccaaggtgaagcggctctcaccgtcaccggtctgtga

SEQ ID NO: 455972 - DNA, 627 bp, Serratia marcescens
atgcacggtgagctgcccggcgctctccacgcgcccgccctggttaagcagcgccagcggcgagtcggtgcgggagaggactgcgttgatatcgagagggccgttggccaggatgcgcccctgccggttgtccagctgcgtgacccccgcaagggtcatctggccgcggctctgcaggcggcctgcggtattgtcgatatcacgggcggtgatgtcggtacgcgtggcgcccagtatcagcccgccgtcgcggttgttcagacggccggtcagcagagtgattgccgcctggctgctgagcgcgccctgtctgcggttatcgagcgcttcggccttgagcgtcaggtcctgagtcgacaccagttgccccccctggttgttgacctgcgtcccctcaagcgtgagcgcgtcgccgctgtgcaccttgccatgttgattgttaagctggtcgagacggtagacacccgccccctgactgataagcgcgccgccggcgttgtccagctgcgccgacgtcaccgcggcgccgccacggctgctgaatacgccgcgcgtattattgatacccgccgccgacacctgctggtcgccattactgcgcaccgcgccgtcaatattctcgagtaa

SEQ ID NO: 455973 - DNA, 627 bp, Serratia marcescens
atgctgacgctgtcgccgctcagcagactgcccttctcgcgcgtcacccggtcgtttttcaccgtgcggctgctttgcttcttcaggaagcctttcttcttggcgcgctcctccgagtacgtcgcctcgctttcggtagcgctgcttagcgtgacgttatttttcgcctgcagggcgatcgccccgtcgtcgctgtgcagcgtactgccggtgaccgtcacatccccgtcgcgcgccaccaccgtcacgccgttctggccgctgaaggtgctgcccaccgcgtcgctgcgcgaactctcctcctcgcgcccgctcctggtcttgccgacccggttgttctcgctgtcgcggtcgttaacctgctgccgcgcctctttgagggtcacgttctgcccgctcaggccgatgcgtccctcctggctgtcaacctgcgcgccctccgccagcagggtgttacccgccgtcagcgtcacgccctggtcgccgctcagggtgctgagcagcagacgctcttcctcacggctgttgttcaccgacgaggtgcggctgtcggccttcagactggtgcggttggtggtgctctccgccagcagcttaacgtcgccgcccgcctgcacgccgagctga

SEQ ID NO: 455974 - DNA, 258 bp, Serratia marcescens
atgggcatgatcgcatggcgcgttagaggtcgcgtaaacctgatgaaagggggaatctccgagatgccgtcgcaggctgtaacccttgaacccgaggttcaaggtgaacgtaccgtcgcaatcttaaggcttctcgacaagcgagcatgctcaccgatcgcggagcaatacattctgtttgtactaaatatcggctcaggggactggcccgctggcaaacatctcagagaaattttgtactcattgctgaaccgttag

SEQ ID NO: 455975 - DNA, 501 bp, Serratia marcescens
atgattattcgtttatccaaagcgctgttggtctgcgctattgccttgttcgcgtcattggtcgcctttggtaacatcaccgattacggctcgaatttcgcttttgtacaccatgtttttatgatggatacgatttttcctgacgccaccatcacctatcgcgccattcataccccttgggtgcatcatgccggctatatcggcatcattaccctggaagcgttaacggcactgctgtgctggattggcggagtgcgtctgctgcgcgcgcgccggctatcggcggcggtgtttaatcagcgtaaagcgtgggcagtggcgggactgacgttgggctttctgacctggcaggtcgcatttatgtcgatcggtggagagtggttcggcatgtggatgtcaaaacagtggaatggcgtacctgatgcttttcgcttctttgtcaccatcctgctggtgctgatttatctggtgcagcgcgatgatgagcttcatagggagtaa

SEQ ID NO: 455976 - DNA, 993 bp, Serratia marcescens
atgaaggtacaatcaaaatcacaaacgaaatcacggccagcagaatataacccgaccgtaacagttctggacgtcccgggcgtcactgccaagaaaccggcggaagcggtgcagccacaggataaagcatcccctgccccgagtacgttcaataaagcccctgagacgatctcagcaggccgtggtgcggttcaggccgcctttgcgtacgctggtactgtacaggcagccgaggcggttacagatcttcccacgctgttcacgccgatccgctacaccgatgacgagttatcttggcgataccgcagcagcacccgcagccgcgttgatttggagatgaaagacttaacccgcgattggcaggtgcactgcccggcagacatagatgacttgctggggatgctggccgctgcgctggtgaataaatacaaccatgcgaagcgtgacgggatacaaaccgccgaacaccagcgccgtaccgcagccgccgcgaagctggccgctgattaccaagtcgttgccgatggtcacatccagcggcatctgctgaacaagaaattcagcggagccgaagcgcaggaactgttgaacatggtggccgagggtaagactcagtttgcccgacaaatggccggggatggcatcgatattccggctatccacgctgcacttggtaccgattatcgcacggcggctgattcgtgggcggagcaggcaactgcaagcggacactgctcattcagctacacgccgcttgaaaacccagaggctcccgtcagcgcaagcggcaccagtttcggcatgtctgtacagccgggcggcaaatggattctgagcgtgtggacggattcaggttggtacccggtgcaggcgtcaccagcagcccgtgctgcggcgttacatgagcgagcagagattgaccggatgcggaacattcaagcccgcatgaagccgtacatcggggaggttttcgctgatgaactccagtattaa

SEQ ID NO: 455977 - DNA, 237 bp, Serratia marcescens
atgcgagtgcttgaccgcctgcgtgagcttgaacagaacgctcaacagttcggtgggttcagtattccacagactatgcacgacgccctgcgcctcgctgctgacctgtcggagcagaatcaggcgctggtgctgaaggtgcaggaggatgcgctgtcccgactctgggcgctgccagagcgggaggggtacgggggacaatgcaggctgtcagggtggagggaggccctcgcatga

SEQ ID NO: 455978 - DNA, 834 bp, Serratia marcescens
atgtcagaagaaaactcacaagcaaaaaccagtcaagttactgatattgctaatgcagtggcagcagtcacaaaagaggtgccgatctaccaagatgctattcagcctgcggcacaagaagttggtaaggctttgggtactgttgcaaagttagtaaacgttgctctggccccggttagtgttttggtatggggctatgaccaaattaaagaatttacagcaaccaaagttgccaagaagttggaaaatattcctccagaaaacattatcacaccaaaacctaatgttgctggccctgcaattgaagcgttacgctatacaggacatgaagaatcattaagcgagatgtacgccaatttattggctacagcaatgaataaagatacgatagaaaatgctcaccctgcctttgtggaaataatcaaacagttaacccctgatgaagcaaagattgtcaactcattccttaagccgaaattcagatttccgatcataaccatacagtcaaaacaaaaaggaaataaaactataggcacggtaaatatttatgaaaactactctcatataggaataaaatctggttgtgacaaccaccatttaactcccgcatacctaaataatttatgccgtttgggattgtgcgaaattccgagtggtgcatattatactgaggaacatcattacgatgaactcttatcgtccgattttgttaaggagttaaagcgaaaaatagagagtaggaatcttgattttaaataccaaaaatcatatctaaacataacagctctaggggagcaatttgcaagggcatgcataaataaagaggaaatttaa

SEQ ID NO: 455979 - DNA, 324 bp, Serratia marcescens
atgaaaatcgccaaggcacggcgcagaggtaacccggaacacgtctacctattccagaacgacagccgccgcagtaccggcaaaccgataaccaaggaggccgttatcagagcatttgcaaagaccaatgaggagtatgtaactcataagcacgtatcaacgcacaccatgcgcaagacgcccgcgcggattatgtgggatgagggtgtgccactggaaattatcagcaaccgcctaaaccatagcagcactgatgtaacgctgcgatatctggatatcaccaaggatcaggtgaatgaaacatatcagaattatcagttctaa

SEQ ID NO: 455980 - DNA, 678 bp, Serratia marcescens
atgttaaagagaccgttggttcttgttatatacacattatttgtgattgtgatttcctcgctgattaccaccgcatacattcattattttgttatggatgcgtacagcggcgataacgatgtatcggcattgacttctatcagcgacgaacagattaaaaatagcccgctcaaagacgataatacgattgtcgagattttctcttatggctgccattactgcgcagtgaatgaaggcaatgtgaaagagcttgaagcgcaactgccgccaggcagcaagcttgtccgtttacatattgccaatccgcaaaacagcgggcttgccgcctatgcgccgttgttcgccacgctgtcggtgatggggctggaggagcaataccgtgaaagcgcctaccaggcgattatcaaagagcgtcaggatctgagcgacccggcacagctggggcaatggttgcaggagaacggtatcgatcgtactgcctatcgcagcgccagccagtcgcaggacgtcaaggatctgatggcctacatgatggcggtgagcagttactacaaagtgaatgcgacgccgagctttatcgtcaataaaaaatggttggcgcagcaggatagcgacttctccacgtttggcaaaaagctgctttcgctgctgaaaaacgatagcccgctggagcagtaa

SEQ ID NO: 455981 - DNA, 1155 bp, Serratia marcescens
atgctattacggaaaagtcgcagagtcgttcttgtgtcgctgctgttattagcgttgggcattgccgtgatcgttggcatctctgtgcgtagctcggcagagcgcgttcctgagtccaccgtggttgtcagccggggcgatattgaaaaaaccgtgttggcgaccggtattttgaaaccgtcgctgcaggttaacgtcggtgcgcaggtcaatggtcagttgaccaagctgtatgtcaagcaaggcgaccgcgtgacgaaaggccagttgcttgcagagattgatccgacgctgcaggaaaatgaagttcgcaagtcgcaagcgcagctgcaaagcgcggtcgcgcagaagcaggcttcagaagcaagtctgaaacagtatcaactggaattgaagaggcaacgccagctagatagcgatggtgctgggataaaaagcgatctggaaaaagcgcaggcgcaatatgccacgcaggttgctcaggttcgcatgaacgaagcgcaaatcgtgcaaatggaaatggcgttagagacggccagggctaacctgggctatacccgcatactggcgcctatcgatggcgaagtgctgggtattgtcaccaaagaggggcagacgatcgtatcgtcacagagcgcgccgacgattctggtgttggcgaatgttgataccatgacggtgcatacccgcatttcggaaaccgatattttgaaagtgcgcgtcgggcaaccgctgtggttctacgtcgtggccgatcccaaacgtcgctatgacagcgtgatgggctcgattcaggaagcgccgaatgaagcgctgcgggaagacagcccaacctcctcatcaagccaacagccgacggcggtgtactacaacggcgtatttgccattgccaaccttgagcgccagctgcgtacgtcgatgactgcacaggtatttatcatcaccgcacaggagaagaatgcgttgcggattccgatggcggcgctggggccgctgcagggaaaagatcgttatctggtgcaggtcaggcggggcgctactcttgagccgcgcacggtcgtcaccggcatcagcgaccggcagtttattgaggtcaaaagcgggctgaaagaaggagaagaagtagtgctggcgcagatagcaggggggcaataa

SEQ ID NO: 455982 - DNA, 1362 bp, Serratia marcescens
atgctgtccggctgtggcgcgtgggttaagagcgaatatcagcagcccgcggtgtcaatcccgtcgcagtggcgtacggagattaccggaccggcttatttggcaaatagcggaaactggtgggatagctttaacgatccgcagctttcgcagctgatcgtcaacgtactcagcagcaataacgacctggcgaaggcaggtttgcagttacagcaggcgcgtctggcagccggattgaccaatactaatctgacgccgggtgtgacggtgagcggtagcgccagcaacgacaaaaatatgcgcggcggcagtgcccgtgaatcttacagctcctccctgaacctgagttatgagctggatctgtgggggaaactggcgcgcaggcgtgagcaatccgcctggttggtacaggcttcggaactggatcggcaaaatgtcgcactgacgttgattggcaataccgccgattattattggcagcttgccaagcttaatcagcagcttgatatacagcaactgatgatgcgcaacacgcaggagacgctccgcctggtgcaggcccgtcatgccgccggcagcgccagccaaatcgagctcttacaggcgcgtcaatcggttattgaccgggaaaaccagcagcaaagcctgcagcagcagcgtgaagcggtgcgtaatgccctggccattttattcaataattcgcctgatgtacgtcagccggagcgccgagcgttggatgctggccaagaggtgccgatcgcgacccgtgtaccgctggcggtcatcggccgcaggccagacgtgcaggcggcggaaaggcgcttgcgcgccgagttggccggctctgatgcagcgcggcttgatttttatccgtcgctctctttaacggcctcgataagtgccggtagcgccatatttcagcagtggttcagccagccggccagaacgttaggcggcagtctgatgttgcccttcgtgcagtggaacacgctgcggttaaccgtcgaaaaagcccaacttgatgtgcagcagcagatcattacgtttcgtagcgcggtgtacaacgcgctgtcggatgtggataacgcgatggcgcagcggttgagttatcagcggcagaagcagcgcctgttggaaaaattacggctcagtcagcagcgattggcgttggcggagagccaatatcgcgccggagcggtgtcgtttcagacattgatcgatgcgcaggatgcccgcttggacaatgaacgcagcctggcggatatgcaatacaactacctgaatgccacgatgaaattatggctggcgctcgggggcgctgtgggaaaggacgtaacgacagagggaaatgctcatgaataa

SEQ ID NO: 455983 - DNA, 804 bp, Serratia marcescens
atgcggcttaactatacgcgtagcgatgcggagcaatgggcggcattttccggtgactacaatccgattcattttgatctgcaatgggcgcgtaagcttggcagtgagcggctgacggtgcacggcatgcgcgccatgctggatatgaagcatgccttaagcgaggcgctgccgcctgcgtcgttggatgcgcatttttttcgttttagcgcccggctgcgccaaccggtgcattgcggcttggattatctcttgaacgttgccgcagcggagagccaggtcagcggcaaggtgttggatgtggccagtggtgagtgctgtttcagcgccaaactggcgccttctgcggcatttggcatcgctgacgcagcccctgttcagcggttagagcagcagggcattgcagcgcttgaacggcgttttcctggcgtgtcggaggcgccgatgcagccgtggagttttttggatgccttgttgtttcagcgcatcgtctcggctccggaaacgttgtcagcgataaaagatcgattacctgacatacaggcgcggacgttgattgaggtttttacgcaattgtcggtcgtgcagacacatcatgacgtgcattttaacgccggtttgttgacgtctggcgcactgttttccgctggagagattttgtattacgccatattgccgccgcttattgtcggtgatagcgacagcgggctggtggtgcggatagacgtgcagtgttggacaccgcaaggccctttgttggcgactgcggtgacgttaaaaacggcgggttatacgcagcggtaa

SEQ ID NO: 455984 - DNA, 534 bp, Serratia marcescens
atgaaaaagaatctgctcgctgttgctgtgctggtcgcatctgctgcatctgtatttcccaccgctgctctggcggctgatggacaggttaacttcaccggttccattaccgatgtagcttgcgaagtcgataagaccaagcctgtaaacatgggtaaagtcgctacgaccgcgtttgctggcgcaggctctactgacaaagtcaccgcaggtgacagacgcttcagcctgattctgaaaaactgcccggcttctgtcacggcggcaaccgtgcgcttcggcggaaaaatggttcccggtgcagacggcatactggcgctgaccgatgcgcctgatatggcgaaaggcgtggggattcagatttctgatgagcacaacaatgtgatcaacctgggtctggattctgaagtattccctctggtcagcaccgctgacaacaaactgaactttatggcgagctactacgcgctgtcgaataaggtagaacctggttcagcgaatgctgtagcacagttcaccattgtatatcagtaa

SEQ ID NO: 455985 - DNA, 675 bp, Serratia marcescens
atgaaagtttggcagagtgcgctgatcgcagcgttattggtgacaatgggtacccaggttcgagccggtgtggttatcggtggaacgcgtgtgatatacgacggtggtaagaaagagtcctccttaagtattaacaatccggatagggtgccatatctgatccagtcttggatcgatgccggcgaagataatgctgttaaagcgccgtttatcattactccccccctgttccgtctggatgatggacaaaataacatcctacgcattgtgcgggctggcggtgcattagcggaagataaagagtctttgttctgggtcaatatcaagtcgataccttccgcacctaaacaggataatacgctgcaaattgcggtgaaaacgcgtatcaagttgatttacaggccgcacggcttggagggttcgttagatgaggctgcacagaaggtgacatggcagcgtaacggtaatgctctgcaggtttccaatccctcgccttattacctcacttttttcaacgttaaggtaaatggtatggcagtaaaagacgccacgatggttgctccgcgtgccagcgctcgttttacgttgccgtctggtaatgccggtggcgaattgacttggcaaatcattaatgactttggtggggccagtaaagcgttcactgccaatttataa

SEQ ID NO: 455986 - DNA, 2559 bp, Serratia marcescens
atgaataacccgaagcgtaacagcccacgagggttcagacaaaaaccgctggcttggttgatctcttgccatttggtgatgttgatgggcttctctggcttggtgcaggcgcgcgattactttaaccccgccctgctggaaattgataatcctgaccaacgtggcgtcgatctgtcggtatttgaggtagacggagcccaggcaccgggaaagtatcgcgtagatgtctatgttaaccgcgacatggtagatacccgcgatattgatttctttctcgggcgggatcgcagtggccgtaacagtttgcagccatgtttggacagtgaattattggcatctttgggtgtgcgtgttgatgccattcctgccattacggctgcggggaagtgcgttgatattgcccaagtgattccccagtcctcatccacgtttcgtttcggtcagcaacgtctggagttaagtattccccaggctgcaattaagacgcaggcgcgcggttacgtttcaccaacaaaatggaattctggtattccggtattgttagccaactatagttttagcggcgctaatgataaagcgcggcgtggcgatagacataataacgacagctattatctgaatctacgttctgggcttaacttgggggcctggcgcttgcgtaactactccacatggaaccgggatagcaacggagggagccagtggcgatccattaatacctatctgcagcgcgatattatcgcattgaaaagccgtttgacccttggcgatagcagttcggctggcgatgtatttgagagcgtaccctaccgtggcgcccagctggcttccgatgacgatatgctgccagacagcatgaaaggctatgcacccgtggtgcgcggcattgcgaaaagcaacgcgcagatcaccatcaaacaaagcggttatgtgatttatcagagttatgtgccgccaggcccctttgagatcaacgatctttatccgacatcgggcagtggcgacctgaacgttacgatcaaggaagcggatggcagcgaacagaatatgacggtgccgtttgcctcggtgccagtgctgcagcgtgagggacgtttcaaatacaacattaccagcggccagtttcgctcttatctcgataatgtggacaaacggctgtttacccaggcgactggtatctatggcctgtcgtggggcgcgacaatctatggcggtattcagacagccagcaaataccaggctctggcgttgggctgggggcaaaaccttggtctgctaggggccatttctgccgatgtaacgcaggcttggaccaagcctgagttacggccgaaggaacatggtcaatcttggcgtttacgctatggcaagagctttgccgaaacgggcaccagcttcagcctggccagctatcgctattcaacgcaaggtttctataccatgcaggaggcattagaaacctataccaatggcgcttcaatcagattcccattacacaagaaaagccgttctgagctcacaatgaaccagaccctgtggaaaggtgccggggcgctgtcgctgagcctgatgagcgaagagttctggaacgacagccgtcgtagtcaatcagccagtatgggttataacaacagttggtcaggcgttagctatgggctgtactacacctttgttaagaacggctacaacagcggcggtaatcgtaccaataacgaagatcatgtcgtggcctttaacctcagcgtgccgctcagccgctggttaccaggtgggcatgcgacctatagcgttaacagcagccgtaacggtaaaacctcgaatcgggttgggttgcacggtaccgcgctggaggatcagaacctgagctacagcgtaagccagggatataccagccaaggacaaggcgccagcggtaatgtcgatgttgactaccgcggtgggctggggcaggtgaatgtagggtacggttacgatcgtgatacacagcgcctgagctatggtctgcagggcggcatcttgctgcatgaagatgggctcacattgtcccagcctcttggcgaaacaatcgcgttggttaaagcgccgggcgcgaaaggcgttcgcatagaaaaccagaccggtgtgactaccgactggcgcggctacgccgtagtgccatatcagtcgccgtaccgccgcaacgatatcaacttggtgaccacaaccttgccggatgatgtcgatatgacgttgaccagccaatcggtagttccgacgcgtggtgctgtggtgcgcgcagaatttaaaaccaacatcggtcagcgagtgttaatgacacttttacgtcaaggtggtgcagcggtgccgtttggcgcaaccgtcaccgatttacttaatccagataacagcgcggcgattgttggcgatggcggtcaggtgtacctgtccggtctggcggagagcggtaagttgaatgtgaaatgggggaacggtacttcacaacagtgccaggtaacttatcgcttagaaagcgcagtgcagaattctgctatccgtacggtcaacgctcagtgtttataa

SEQ ID NO: 455987 - DNA, 1095 bp, Serratia marcescens
atggaatttagcaaattactaaaaagattaccgattatctcggtttttgcggttacgggaatttttgttactccgtcactgctggctgcacctgctttaggaacttgtgaaagtcctcaaggagtaaaagagtatcctttcgaatttagtcggacttttacaagtccggatcagaatgttggggggacgtttattggattagttcactcatggagtttggggggatcttatactgcggtctgtggctgtaatagaatgaatgaagcgttctttacggctaaatccacgttacctgaagatcctggcgtgacggatagtgggaatccagagttacgttatttcaaattaaatgaattcttatcggtagcgagtgaggtgtatatcgcggggagaagaaggcaatatttaaaagttcctttctttcaagaaggaaattggaactcccaatccagtgacagcgtggcgtgtaatgatacacggaaaaacgttttcagcagtggttccactgggcgggtttatctttatttccgtcggccatttgttggtacgcaggttattgcaccaaccagattattggaagtctatatgacatcctcaccggatgcggtaagcactcaaccagtatcatacgttacgatgtatgggactgttaccgtcgatcagcggtgttctcttaatgggttggtctcagatcaacctatatccatcaattttggcaatatcatgtcgacggattttaaaacgaagagtgcgatgccaaaggggttcaccccgcatcataaagaacttcgcctagcatgtagtaatatatctgatggtgtgaaagtcaacctttcatttcatggcgaatctgatcctaacgttgtaacggcgtttaaaacggacagtaatccggatatcgccgttaggatcgatgatcctgcaggaaatcctatctctccagcaggcgggcgcttgcctatcaatatggatttcggtgccgttgaacaaacaggtagaacagaaataacggtttatccgataaatacaaccggtgagttgcctaaggtcggtgtgtttaattcatcagcaaccattaaagttgatatcgagtag

SEQ ID NO: 455988 - DNA, 537 bp, Serratia marcescens
atgaaggaactcaaattgaacgtaattaaaggtagcatcgcggcattgctgaccgcaacgttgggaattagtcatactgcactggcagatactcagttaaatattaccggcacaatcaaagcgtcgccgtgcattgtggctaatgacgccagcggcagcggtgtcccggtggatctgggtaataacattgaagcagtgaatctgagtaaagcgaacagtgccacgccatggaagacttttcaattgatattgaaagattgtccgtcaaccacctcatcggtaacggcaacctttagtggcacacaggcggatgagagtgctgatctgtataaaaacaccggtgacgcaagaaatgtacagattgatttgcaagatacggtcggcggcactgcgttgggtaatggtaaaagtctgaagcaaactatcgttgataatgccacaacctataatctccaagctcgtgcttactctaccgcggggggagcaacgcctggctctatcgttggtacggttatggttgcctttacctatgagtaa

SEQ ID NO: 455989 - DNA, 435 bp, Serratia marcescens
gtgaaacatttgcagataaccaagagacatgcgcatttgctgatcggcgccactgtggcggggagcctgttgcttaccggttgtcagagtaaaaaaacacgcagcctggtgtcccctcccgtggtggtggcgccagtgccggcgcctgtagcaccaccatctccgccagaaaaaaaagagagtcgcattagtctgtgccaaagcgagttggcgtcgctgaaaaaggtaaatcctaaagcgtatgcagtgcgtaaagcttattttgacagcttggtcaatagcgtgtcggtttatggcgctgtgcgcggtgatgtcaatactcttaccaaagagactcttgacgcgctgtacaaatacaagactaatcaggcgtgttcaatgattgaacgtgatgtgcttgatgcgttgatccgtaaaggggagagcgtgaagtga

SEQ ID NO: 455990 - DNA, 1944 bp, Serratia marcescens
gtgaataaggggattaagtatggttttttgtttgctctgatgctgccgtttagcgttggggcaacaaacagcttcagtgatgagcaaacgttacagtcgctggatgccatcacccgcagagttgacgatgcgccagcattattattactgacgccagctcaactggaggcaattgattcgcctccggaacagaaaatggcaccgcaaactaaaagtagcaatcagttggataagcgagcggcgaagcaaggtgccgcttcgttacgtgagttgaagtctcagcaagcgaaaatcaaccagcttaatgctgctttggccaggcagaatagagaaataaaaaagctgcgtgaggctgcacaggcggacggtgattcacgtacagaagtcgaacgcttaaaaaaatcgttgcgggaaagcttacagaaaacagaaaacatgcagcagcagctgtcagtgatgaacgcggtgaaaagtaataaacaacaggatagcactaggttgcagcaggcgttggagaagagtcagcagcaaagttcagaattacaaaagcaggttgcggcgttaacggcagctcaggatgagcgcataaaacagcagaaatctatgcaggcgacgttgaatgaaagccggaagcatgctgaagagttggaaaagcggctgacggcattgaccgatcggcgtcaacgcagggataagggaaatgaggtgttgcagagtgctttggatgaaagcaagaaacacatcgcagcgttgcagaaacagcttacgtccctggaatcgcaaggtaaggagaaagaaaaagcggcagcggcgctgcaagcggcgttgaatgaaagcaacaaggggcagagtgaactgcaaaagcaactgaggacattgacggaacagtataacgcgcaaaataaaggcatagcggcgttacaggctgagctggacacgagcaagaagaacggtgcagaactgcaaaagcagcttacgacgctgatagctcaaggcaggacgaaagagaaagacgcggcggcattacaggctgagctggacgcgagcaagaagaacggtgcagaactgcaaaagcagcttacggcactgatagctcaaggcaagacgaaagagaaagacgcggcggcgttgcaggtcgagctggacacgagcaaaaagcacgcactggcattgaaagaacagctggcaacgttgacggctcagaacaagacgcaagagaaagaccataatgcactacaacaggaattggccaggttaaaaaaagaacatacggtggataaaaatggcgtggctccgccgaaaacggctaatgagatccgcgattatgcgatcggcagttcgttggggaatgatgtcttagcattgctgcaagagaaaatcgcgcagggcattaaaatcaaccaacgtatggcgttttccggcgttcaggatgctttacagggtaagaacaaactggggcaggataagattgctaaggctctgtatgaaactgaagtcgcactgaatgagaaagagaagaagttaaaagcggaaactgagcaacaaggtttgcgttatatcgaacaattcaggaagaagaagggcgtcaagaaatcggcaaccggtttttattatcggattgattaccttggcgcaggaaaaatagacgatgctgatacggttgctgtcgttgtgaaggagagtctgaccagcggtaaagtgattaaggatatggatgtagccggcacctctatttcgcaaccgttgagcagttaccctgccatgtttcgtgatgcgattaagcaattacagaatcatggcacgatgattatggtggtgccgcctgaattagcatatggtgacaaggggctggcaccggacattccgccgggatcaaccatgatttataacatcagaattcttgatgtattgccagctgatagcgcagccggcaataaaaagtag

SEQ ID NO: 455991 - DNA, 150 bp, Serratia marcescens
atggtgcgcaacagcctgaaattagtatcgtggaaggactataacgccgtcagcggcgggctgaaaatggtctatcaggccccgacagaggaagccgccctgatggtgctgaatacgttcgcggacacctgggacgataaatacccgtaa

SEQ ID NO: 455992 - DNA, 171 bp, Serratia marcescens
atggataagaaaaaaattgagacggagaaactgcgcgtgtatcgcagcaaaaggaaaattccgccatcatggcagttgaacgaagcgcagcgcgcgtttattgaagacctctggcaagatgatgcgctggagacgaaagcgccttgcccagtgaaaaaggattcaccttag

SEQ ID NO: 455993 - DNA, 156 bp, Serratia marcescens
atgggcgccctatttaacatgagagcctgcggtataattacgccgctgcgttcagtgggtgatttcactaacctcaatgctgttaaatatcgacaagtcaccgattcgcgtctgattatacgagtgcgtaactcactgtccagtaagaataattaa

SEQ ID NO: 455994 - DNA, 582 bp, Serratia marcescens
gtgttaacgtcagcgcgaggcttcacgctgcctgagatgctgctggccatggtggcgggcagcctgattattttggcggcggcgaaggcctatcccgcgctgcgtcagcaaagcgcggcgtttctcgtcgcttatcagctggatctcaggctacggcaggtggcgttcggtattgaaaaagatgcgcgccgcgcgggtttttgcgcgggagcgtgcgccggccgtgcgctggctgttgcacggtattccggagaggccgccggcagctgcatcatcatcacctatgacctgaaccgcaacggccgttgggaagcggcgggcgacggagcggagacattcgcttaccgcttacgtgaagggcggcttgagcgccagcgcggcgttagccggtgcaatggcagcggctgggaaaacttgtttgagcgtgccgaggtgcgcattgaggtgtttaacgttcgcctgttgccgggtaaaaacgggcgtcgcctgctccgcctgacgctgagcggccgttcgatgcatgtgagggcgctgacgcgcttaatgcagtgggatatcaacgtggaggcgccgtcagcatga

SEQ ID NO: 455995 - DNA, 444 bp, Serratia marcescens
atgaagggaagggatactcagcaaggcagtgtactggcggcggtgatgctggtgctgctgatggggttgctgttgctgggcgcccagcaaaaacagctggatagcgcgctgctgatggcggttgagcagcggcgctacctgcaggcgtataatcaggcctcgtcggcgctgaactggggactggcgcaagcctggccgtcatcgttgctgaatgccggcgtgtggcgctgtcaacggcaacctgcgtcggggctgctggcctgtgtcaagcgcgcctccaggccgggcataatactgctgcgcgggctgggtgagatacctgcagcggaaccgctctggctgtaccaactggtcacgccggatacacaggggcggctgcgggctgagcagggcggctggctggatttttgcccggaaaaggacgcggcggcctgtgcggattaa

SEQ ID NO: 455996 - DNA, 357 bp, Serratia marcescens
gtgcggattaatgacgtcagcggagctgcccggcatcagcgtggtttcagtttgccggaagtattaattgcggcactgttattctctgtgtcgctgctcggtctgttgcagtaccatcaggtattattacaggggctgcagcggcagtggcagtcccggcaggcctggtcgctggcgcatcaacagttggagcggctggctgccggcagcgatgccgatgatgtcctggcgcccggctggcggcgtgaggtgcggcagagtgccgtcgacggcgtttgccgacagctcacggttacgatagaaacgccgcagcgccagcggatccggcttggccgctggtattgcggcgacggctaa

SEQ ID NO: 455997 - DNA, 807 bp, Serratia marcescens
atgaaacccgtagcgattttcttgattttatttattgggtgtttccatcattctgcctctttggctgcgtggcagggcggggtgaaattggattcgtttgtttgggagcgcgtagatcaaagcagaattaaaattatcgcggcttctgcttcagcttatgggattgagagtaaccgttcggcgtgcgataaaactgataccgcctgtggatataacttagccggcgatgccaccatgaatatcaagtttggctatcaggcgatgcgtttttccccgaaaacgaccaatatggtggcagctaatatggtgtccaatctggtggggcaaacatttttggttcccaaagtgccagggaccaacgacaaactgtgcttgtggggatatgataaaagccggcgaatggagggtatttcgttactcaatggggtttgcagctccgcctctggtgttccccctaaaccacctataccaacatgttccatatcggctaatgacataaaccatggaactttagcgccgggtgagttagatgggcatacgcaatcttcttcggtgacgatccgctgcgatggcgatgctaccgtaaagcttaaagtctcaaattataatttcacaaccggcgtgcctattatcatcaataaattatattcaagattatttatcaatggttctgaaggggagaaagttgtattaatgcgcggcagtggggcgatgtctataccgctcacttcaacgctgaaatcgacggggggtgttgctggcggtgattattcagcggctgttactatagtgtctaatgtactttaa

SEQ ID NO: 455998 - DNA, 606 bp, Serratia marcescens
atgaccaaacttatcacgtggcatgacgacacgcctggaagacgcgcggcccgactgatgcatcgaatgacaatagccagtctggcgctggtacagggaacgacattggccatggcgttagcctcgaccggcagtcaggcggccgacagcaatgtgcacctgtatggcgcattggtggcggagccgtgtgtgataccgccgggagatgaagaaatccgcctggattttgggacgatcgtggataagtacctgtaccagtacagtcgtacgcagagccaaacgtttgaggtacggctggctgagtgtgacctgactctgggcaagacggtgaaggtgacctttaaaggaacggagagtcaggcgcttcccggtctgctggccctcgatgccggcagtgaggcgaaaggcatagctatcggtctggagacgttgtcggcaaaaccgttgcccgtcaatacgcagagcgacgagtacccattgcaaagcggcaacaatgtgatagcgctgaaggcgtatgtacagggggagccgcaggctatcaccgatcactccatcggcaggggaacctttatggcgacggcgacgttcacgttggaatatgagtaa

SEQ ID NO: 455999 - DNA, 543 bp, Serratia marcescens
atgagacgatcacgacaccggtgtcgcccagccacactgatgacgatgggcgccttgctgttgagctgtgtgctgaacttctacgccccagcaacttcggcgtctgacggcagtgcggacatgacgtttcacggcacattgatagagccgccgccgtgcgtcatcaatgacgacaaccggattgaggtggacttcggtgaccgggtgggcatcagcaaggtggacggcaagaactaccgcatcccactgaactatcagattcgctgtgaaagggcgaacaacggcacgctcggcaagtgggcgctaaacctgagcctaaccggctcggcggcgagcttcgacagtgaagcgctggtgaccgacaaagacaacctggggatccggatttaccgcggtgatgtgccgttcacgccgaacagcacggtggagattgatttgaacaacccgccggtcctggaggcggtgcccatcaagagtgccggcggcacgctgacggctggggcgtttgaggcgtgggcgacgctgcgcgcagactacctgtga

SEQ ID NO: 456000 - DNA, 534 bp, Serratia marcescens
atgacacgagccgcaagcgttactgatcgctgttatcggcaagcacttaaacggacgcgctcagcctggtttcgccggtctgtcatgctgctgacggcgctgccgtttatggcgctggcggccacctcgatgacggtcaaggtgacggtgatttccccaccgccatgcactatcaatgataaccgaccgatcgaggtggagtttggggaagtgatgacctcgcaggtggacggcaatcattacaagatgccggtgaactataccctgaactgcaccgggaccagcagcagtacgatgacgttgacgattgcgggcaacgcgatgggcacggatggtacggcattgcagactgacaagagcgggttgggtgtcaggctgctggaggggactgctccttacacgattaacagccggataaaattcacctatccggacaagcccgcgctatatgcggtaccggtgcggcagagcggaaccaccctgacgggcggggagttctccgctgcggccaccatgaacgtggcgtatcaataa

SEQ ID NO: 456001 - DNA, 675 bp, Serratia marcescens
atgagacaagaagagcggcaacgacaaacggacgcctcaacggcgagggcgttatggctagatgaactgcgatattacggcgtgttaggcggattggcgctgatggtgccgctgacgttgggcgcgacgctgtggttgttgccaccggcgcaggccgcggcggatagctggagcgcggagggcgccaacggagcgttgtatgtgcatggcgcactgacggaaagcgcctgtcgcctggagatggaaagcgcacgtcaggacattacgctgggagcggtgggaacggggcgtctgcagacggtaggtgcgcgcggtacgccagtaaagtttgagctacggctgacagattgcctgcgcagtacggcaggcagcaacgatgtacgtaccggaggcgtgacctgggcggacaatcagccggcggtgacggtgagcttccgtgcgacccgtgatgcagacaacccgcagttagccaaggcgcagggggtttccgggctgggcttgcggctgcaggacgccagaggagaggacgtgcgcctgggtagacggggaaagcctttgctgctgacaccggggagcaacacgctgacctataccgttgcgcctgaacggacgccggccgctctgatggcgggtagctaccgggccgtggtggactttcatctgagctatgactga

SEQ ID NO: 456002 - DNA, 2571 bp, Serratia marcescens
atgaaaatgaaggctgtggtgttctcattggcaggggtgatatatcgtcgccgactattaggggtatgcattgcgcttgctttgagtataccggtcattacggcctggggggcagaagatgatattcagtttaatatcgatgtgctggatgttaatgatcgggaaaatattgacctgagccagttttcccgcggcggctatattatgcctggggattacagcatggcggtgcatattaataaaaacgatctgccggaacaaaccattccgttctaccccgacgaaaccgatcccggcgatagccgcgcctgtcttggcccggcgctggtggaacagctgggattcaaacctgccgtcctgaaacagttaacctggtggcatcaggggcagtgtctggaggaagccagcgttccgggaatggaaagccggggcgatttagcgactaatgcgttgtatctgaatatccctcaggcttttctggagtatatggcggaaaactgggatccgccgtcgcgttgggatgacggcattcccggcctcttgttcgactataacctcaatgcccgaacgcaaaaacagctcggacaggggagaagcagttacaacctgagcggcaacggcatcaccggcgccaatttaggggcctggcgcctgcgggccgactggcagctaaatattaatcaccagaacggtgctgaccagtcgacgacgcaaaaactcgactggagccgctattacgtatatcgggccatcccggccctgcgcgcgaaactgacgctcggtgaaaactatctggattccggcatgttcgacagtttccgttttaccggcggcagcctggcgtcggatgacaacatgctgccgcctaacctgcgtggttatgcgccggaggtgagcggtatcgcaaaaaccaatgccaaggtgaccatcagccagcagggacgcgtgctgtatgaaacgtcggtagcggcggggccattccgtattcaggacatcaacgatgcggtcagcggtgagctcaatgtacgggttgaggagcaggacggcagcgtgcaggagtttgcgatgaacaccgccaatatcccgtacctgacgcgtcccggctcggtgcgtttcaaactggcggccggcagacccactgactggcgtcaccatgctcaggggccgatgttcggctccggtgagttttcctggggggtgagtaacggttggtcgctgtacggcggcgctttatccggcagcgattatagcgcgttgtcgctggggattggccgcgatttgatggcgctgggggcgctgtcgtttgacgccacgcagtcgcgggccaggctgccgcagaaagaggtgacgctcagcggcggatcgtaccgcctcagctactcgaagaacttcgatgaatatgacagtcaggtgacttttgccggctaccgtttctcggaacaggattttatgagtatgagcgaatacctggatgcgcgttacgacggcagtcgcaccgggaacggtaaggagatgtacaccatcacctttaacaagcactttcgcgactgggggctgagcagttatctcaattacagccatgaaacctattgggacagggcagctaacgaccgttataacctgacgctgtcgcgttatttcgatatcggcagtttccgcaatatcagcctgtcgctgtcggcgtatcgcaatacctataacggcaccaaagatgacggcgcgtatctgtcgctgtcattgccatggagcgaccgatcaacggtgagttacaacgccacggtaaatcgtaacgatatgacccatagcgtgaattactacaaccggctgaatgaacacaataactaccagctgagcgcgggcagttctcgcagtggggctaatctgagcggttattacaaccatgagggcgatctggcgcggatcagtgctaatgccagttatcaggctggccgctacagcgccgtcggtttttcggcgcaggggggcgggacgctgaccgccgaaggcggggcgctgcaccgggcaggaacgccgggcggaacccgcattttggttgatactcatggcgtagcggacgtgccgatacgtggttacggcagcaccagcagcaccaacgcttggggtaaggcggtgattggcgatgtgaacagctattaccgcaataaagccagtatcgacctgaataagctgggcgacaacgccgaagcgaccaagtcggtggtacaggcgacgttgaccgagggcgccattggctaccggcagtttgatgtcatcgccggcgcgaaggcgatggcggtcatcaaactggcggacggcggtgaaccgcctttcggcgcgacggtgctgaacgtgcgcgaacaggaaaccggcattgtcaatgacagcggcagcgtttacctgagcggtatcaatgccggcgaacgcatgctggtgcgctggggcggcagggcgcagtgtgaggtaaggctgccggcgccgctgccggcggacatgctaatgaacagtctgttgctgccgtgtcagccgttgagcgcgccgcatgacgataaacctgatgaggttgcgcaatga

SEQ ID NO: 456003 - DNA, 525 bp, Serratia marcescens
atgcgctattttatagttcctttcatattggcaatgcttgcccgttctgtcgatgcggaactccgccctgcgcagggatggggccgagtcaatatgcaaggatctattgttgatacggcgtgcgccattgccgtcgagagccgtgaccagaccatcgatatggaggtagtgccgctggcggagattatccgtgacggacagggacgcagtaaatcattcaccattcagctggtgaactgcgtgacagagcgacctgataaaccagactggcggcaatttcaagtgaccttcgacggtgatgctgagggagagttattcagcatacggggagacgcttccggcgtggcgctgcggattatcgatcggtccggtaatattgccattcccggtcagccgttgccgtttggtgatatttcccccggtaatatgcaattgaattacaccatgaaattaatggctaatcaccatgcactgaaaacgggtgattatttttccgttattcgatttaagctcgattatttctaa

SEQ ID NO: 456004 - DNA, 549 bp, Serratia marcescens
atgaaactgaataaagtcatgctggcaactgtagtagcgatggggatggtgtcaatggcgaatgcagcagtacctgccgatcagggacacggtaaggtaacgttcaaaggcagcattattgatgcgccgtgttcaatcacgccagagacagccgatcagacggtagacttcggtcaggtttctaatgcagcgctgaaagatggcaaccgcacggcgccgaaacctttcactatcgatctggaaaactgtacgtttgaaggtgatgacgcgaaaaacaaagtgaccgtgacctttaccggtgatgcctctacggccaatccggatcgtctgggtattagcggcaccgcatcgggcgccagcgtagcgatcaccgaagccaatggcaccccaatcaagcttggccaaccaagtaacgcggtggaactgatgaatacgccaagcctgcagcagctgcagttctcctcttatctgcagggtgacggcgaatcggctgaaattaaagaaggtgatttcaccgcgattgccaacttcactctggcatataactaa

SEQ ID NO: 456005 - DNA, 300 bp, Serratia marcescens
atgaacatgtctactcaagggaaaaaactggagcagcgacggctacagcaaaaactactacatatcttacgtcaatattcttcagcacaatcaccttcgcaggcagattggccgtcaacccgacaattggctgatgcgctcgacctgagtatttataaaactcgccatatattgctggatatggccaatcataacctggtgctggttgcccgtcagggcaagaaccatgccctgcactggtatcccgccacggtcaatcccggaacagtgctcggttatcattttaatcggacgccataa

SEQ ID NO: 456006 - DNA, 609 bp, Serratia marcescens
atgaggcagaacatcaagatcgccgttcagacaaccaaccgctatctttacctgggactgaccgacttattacaaacatccttcaacaatagacaatggcgcgtgacgtttctgccggaacaacaaagcgtccgagccgatctgatcattcaaagcgatgcagaatactgtgcgcagcagtgtgataaacaaaccgcaggaatcgtccggcagcaaattaatcagcgacataacagaggcacctgttaccggcaccgacaggcccgggtctgcctatgcaagcaggtcgtcatctcttaccaacagcgcagcccggacttgcagcaacaggttgatagctggctggcatcgctggggagcgcaatcttccccaccatcaaccgcccgcagcacatgatgtcgttgaccacgcgcgaacatcagattctgtcgattatgcaacgggaactgacgccctccgaaatcgcggcagaccttgggatcaacataaaaaccgtcagccaccataaacgcaacgccatgcaaaaactgggttttactcgcaacagcgagctgtatcactggttgcggcaaggcgggctgttatttaacaaccgggcgttgatgtga

SEQ ID NO: 456007 - DNA, 312 bp, Serratia marcescens
atgatgaaaaaattattagctctggctgttgcggcaacgatggggctgtcttccatggctttcgctgctgaaaccgcggcggcgccggcaacaactgctccggcggcgaccaccagctcagcggctgctgcggcgacaaaagcgccggcaaaaaccagccacaagaaaacgcatcacaagaaagcgcataagaaagccatagagcagaaagctcaggccgccaaagcaaaaaaacacgcgaaaaaagccccggcgcaaaaagcgcaggcggccaaaaagcatcacaagaaagcaggcaagaaagccgcttga

SEQ ID NO: 456008 - DNA, 945 bp, Serratia marcescens
atgagcatgtctttaagttttacttcggcggcattgccggcagtatctttgcctgtgattcccgagcggcgcgcggagcctgccgctgctgctcggctgcctgcggcggtacattcatcaacgtcgccacatagcaggcaaacgcaacaactgctgcattcactggtcaatgatgtcgccgctgccgcctcgtcggccaaaaccgctctgacgcgcggacaggcgccgcagcagggggattacaccctggcgctgttggcgaaggacgtttacagcccggacgggaagggcgtagaaaatttcagccgcctgagtgatacagcgctgctgaatgccggcattgatcccgccggcctgcatgataccgcgtcgggccttcaggccggtatttatcataacgggcagcaatatgtgctggcttttgccggcaccaacgactggcgtgactggttgagcaatgtgcgccaggcaacgggttacgatgatgtgcagtacaatcaggcggtatcactggcgaaaagcgccagagcagtgtttggcgatcaactggtgattagcggacactcactgggcggtggtctggcggccacggccgcactagccaccggtacgttggcggtaacgtttaacgctgccggggtgtcggatcataccctgaaccgttttggtatcgaaccggccgtcgccagacaggatgcggaggcaggcggcattcgccgctacagtgagcaatatgacatgctgacgtcaacgcaggaatcgacgtcgctgatcccgagtgccattggccatcatatcattttagaaaataatgatacgtttagtggtcgtgatgactggcggccgagcaagcatctggagcgcagtcttgccgcgcatggtattgataaagtgattagctcaatgatggaacagaaaccgtgggagacacaggccgatgcctga

SEQ ID NO: 456009 - DNA, 750 bp, Serratia marcescens
atgcctgacagattacgctggccgatattgctgatgttattcacgtcgttattggcattggcgttgttgggaagggccgaggagcagccgatgaatcagcaaacaacgccgtttgacggcttggacagtcagccgctggcgcaggccattgccgccggtgacacggcgcgtattaccgacctgacgacgccggccatgcttggcgagcgtggcgagcaagggattacgctgctgcagtgggcgattttacgccagcggccgggcagcgtacaggcgttgctggctgccggcgccgacgtggcggaaaccggcatggacggcaacagcgcgctgcatatcgcggcgatggtgcaggatgccggctatctgacgcagctgttgcttcagcggccggaggtggatgtgcgtaatgccgtcagtggcgcgacgccgctggccgcagcggtactggctggccggccgacgcaggtgcgccaactgttggacgccggggccgacagccgtctggccgatcgcgtcggcgatacgccgctgcatattgccgccagaatcaacgcgccgcaggtggcgctaatgctgttgcagaacggcgcggacgctgcggcgcgcaaccggcaggggctgacatttcaggcctatttcgcccagacgccgcggcatctgcagaatgaaatcctgcgccgggcgcgtcagcaattggatgattggctgcaggcgcaccggctggcggcgcgttaccacgtatcatga

SEQ ID NO: 456010 - DNA, 780 bp, Serratia marcescens
atgctacgccggttttccagccaggtgctcattgtggacagtcagtcaaaagccaatttcaagccgcgacgcggtggtttcaccttcaaacagttttttgtcgctcacgatcgctgcgccatgaaagtcggcaccgacggcgtactgcttggcgcctgggcgccggtgaaggcggttcgaaaggcgctggatatcggctgcggcagcgggctgattgcgctgatgctggcgcagcgtacggcggaggatgtgctgattgatgcagtcgagctggacaccgccgccgccgcgcaggcgcatgataatgtcggtgaatcgccgtggccgcagcgtatccgcgtatacaagcaggatatccagcagtttgcccggcagtatgccgccggttacgatctgattgtcagcaatccgccgtatttcgcaccggcgctggcctgccgcgatcgggcgcgtgatgcggcgcgctataccgaaacgttgacgcatgacgttctgcttgcttgcgccgaacggctgctacagcccgacggtatgctgtgcgtggtgttgccgtatgacattggtgaggcctttgccgccgatgcgctgcagcgcggctggcatttggcgcagcgggtgaacgtcagcgaccaggcggagaccccgcgccaccgcatattgctggcgctgacgcgtacaccgcaggcgtgtgtcgagagcgatctggccatcaagcaggcggacggcgactacagcgcgtcgtttcgccgtctgatcaccgacttttacctgttttattga

SEQ ID NO: 456011 - DNA, 1587 bp, Serratia marcescens
atggatacacattatttatttagttcactgattatgcacacactaattaccgataaaatacgcacgcgcattaatttcaacacgattctaataagttcattatatgtcatatcatccgtcgtactgactttttctctcggttatcatggggcaaaaggcgtcgacattattctaatgttattgatattactcacacttccttccatcccactactgcgctatttcctcgttttcccgctgtttatcctgggtgctttatatttccctatcggttatatttacggcaagccatccgcctcggtgatatcagcgttaatgcaaaccaacaggctggaggcacatgaattcttactatcaatgccgacgacctgttatctgctgccgattttagttatcgcgttattaattgcagttaatcgctattcctggcgccatccttcgtcggtaaaagacaggctgccttgctggttattattaacactgctcctcctggtttacggtacaacgaataatttgcataaattaaagcttactgattactttatgtcgattatcaccggataccaggagtatcaagggcacatcgcacagctgaatatgacccatacctcctccccaagttggcaggtcattccggcagccggcgagcaacagctcaattatgtcattatcatcggggagagtatgcggcgcgactatatgtcgctttttggctatcccttgccgaccaccccctttctcgaccaggtcaacggcgacttttacagcaattatgtttcaaccgcccctaacacctttgaatccctgccgcggacgctagcactgagccaaggcaagcaggttgattacgctaacaatatcgtcactctggccaaagccgccggtatgaaaacctactggttttccaaccaaggattcattggcgattatgatattccagcgtccaaaattgccagctacagcgatcggcgctacttcctcaaacatggcgactatatgtcatcaaacaccgatgattatcagctactgccgcctttctccaatacgctgaaaaaggggcgtcatgggctgtttatcttacatattatgggatcgcatccggatttctgtgaacgcctgaatggcgcgcaaccggcgtttaactttaataatcaggatctgtcctgctatctctccacctaccggaaaaccgatgactttatccgacaaacctatcacctactgcagcagacacaacgccccttcaagctgttttacttctccgatcacggcctggccaagcataatatcggcggtaagtcctacctgcgccatcacagcgggttcaaacagaattacgaagtgccgctggtaattttgtccgataacgccacacaacaccgtcagatcgacacgccttacagcgcattcaattttctgcagctcttcgcccagcaagctggcatcaccattacccgacctaatatggcaacctatgcgttacaacaaaagcaacgccaggtctactcagggcaagagatgctggcctatgatgagctggaggaagataaagttgatctgcctgatgaaaaccattcttacggctaa

SEQ ID NO: 456012 - DNA, 276 bp, Serratia marcescens
atggggcgtattggtacatcgccatcgatccgggcagcggtcaagctgctgttgttgacgatggtgcgaaaaagcgagctgacaaatgccacctggagtgagatcaacttcagcgaagcgctctggacgatccccaaagagcggatgaaacggcgaaaccctcacctggtgtttctatccaggcaggtcatggacatcttcatcgctttgaagacgttctccggtggatcggagtatgttctgctgtcacgctacgattctgacgtccccatgtag

SEQ ID NO: 456013 - DNA, 123 bp, Serratia marcescens
atgcacgttagccaggggagacaaatctgtccctggctgattgtgcacgtaacctgtgggttaattacggtgcacacccaagagcattcgataaacaccgtgcaggcgtgtggcttatcgtaa

SEQ ID NO: 456014 - DNA, 1053 bp, Serratia marcescens
atgaacgatatggaacagcagtgcccggtacacaacaacaagcaccacgggggaaacgacatcagttccgaatactgccgcatcgacaggattaatccgcatgacctggacatgcttgcctacggctctgaccccaaggtgcgcgcccgtcatgcaatcttccaggttaatgcagacatgcggcagaactacgcggacctgaaggctgaacttatcgatcatctgacaccggttatcgtcgttaacaatgatgccaaagggggagaatacacgctaatccataacggtaagatcgaaacccttcagccgatatcggaaacgttcgagatggcgaaatctattgcacatataccgctgggtatcttctcgattatcgcgccctacctcaaaggatcagataccgacgcctgggttgaaaaactgaaagcattcgccgcaacgctgcgtaccgcacgtatgcagcttaagtacgccgacattcctgaagaactggagcgatcaagcgctcaaattattgatgcggccctgaggttcatcaagaagtcgatggagatgggctatttcagcatcaagtcgttccagatgttctcaagcagtgtgtacgatcacgttcgcaccaatatgaaatacgcttctgaagcgcagattgctggtgtgagcaagactatgaaacgctggagaaagaaagttggtgaacagcactggcaaaacctgtatgttgtggtgctgtcaatctggacaacctcagttttaaaccaaaactccatcatcattcgtaaatttatggatcctcgcaccgtcgacacgcatctcatcgacattcctacggcggaaacaccggacgactatatctacgttgccttagataatctcgcccgtatcgtacaggactacgtggccgctgagatgatcttcccaacggatcaccagactgccgatgctcttggcggaacccaggatctgctctcagagacgatcctgcaacagcttaactgcaccttccagggcgctcgccctgctgtggaacataagagcgcctgcccgcaagcctga

SEQ ID NO: 456015 - DNA, 591 bp, Serratia marcescens
atgacaacgacaacattacgtcaactgaatggttttgacgactctcccgggtcgctgaaagaatcgacgctcattatggtcgattaccaaaacacctatacacagggtgtgatggagctagaaggctggagacccgccctgaatgccgcggcagagttgctgggaaaagcccgtgaggcgggaaccacgatcatccacatcatcaatgacggcggtaaaggcagcccgtatgacatccatactgatatcggccagatccacgccaaggttgcccctctccaaggcgaaattgtgctcactaaaacgcgacctaatgcgttcattgataccgacctcggccagcaccttgatgccgcaaacaacgagtgtgtgatcattgccggatttatgacccacatgtgcgtacagttcacggccgagggcgcatttctacgcggaaataaaccgaccattgtcgccgatgcctgcgcaacgcgaccgctacaaaccgtcgcgtctgacgtctccgccgctcagcttcattattcggcattggcaaccattgccgatctgtacggtatcgtcgtccgctcttccagcgacctgaagtaa

SEQ ID NO: 456016 - DNA, 987 bp, Serratia marcescens
ttgacttatttagaacgattaattgtcataatattattcaataaagtagatctgcttgatgttaccggtccccccgaagtgttctcgttgttacagcgtgagatggataaacccaccggttataacgtggtgctcgcggccgaaagcatggaccccgtgatgacctccgccggcgtccgtattcttcccgatacgacattctctgagcttgcaaacaaagccatcgacactctgcttgtccctggtgcggttgacgttgatgaacatcgaaaagtccgtgcattaatcgacccaatgatcgtcgaacaggtgcgtaagctggccgaacattcgcgccgggtgacatccgtgtgcgtcggtgctcacgtgcttgctgctgcagggttgctggatggtaagcgggcaacgacgcactggtcgacagctcagcagcttgctgcagagtatcctcagatcacggtggatgccgatccgatattcattcgtcaggataatgtatggacgggggctggactgagcgcatgtatagatctggcgctagcgctggttgttgatgattatggtgaggccctggcgcagcgtgtagctcgtcagctcgtggtttatttcaaacgacctggcgggcaaaatcagttcagtgttcccctggaaccgctttcaattactcgccgcgtggataaacttcgtcattacatcaccgaacatgcgtccgaaccgctcactgtagccggactggccgaatatattcatgtcagtgaccggcagttgacccggatcttcaagaacgaattggggatgacgcccgccgcctatatcgaatcagccagagttgagattgcccgtaaccgcctggaaactacggatgcccccttggggcgcatcgccgccgtcagtgggctgggcacagtggatacgctcattagagcctttcgtcgtagcctgaacatgacccccacggaataccgtaatagattccgcgttaaatga

SEQ ID NO: 456017 - DNA, 2055 bp, Serratia marcescens
atggtcggactaaatcctgcactgcttggcgcggcagtaagaggcattaatcaaggtttgctccaccagcgcgatggttttgccggcctgtcccagatggcggggcgcgcgcacgatcggttgctgagcgcccattccccggcgctgatgcggcaatttacccagccaagtccgctgcgccacgccttttctgtccaactcaacgacgtaacgcacaagttccaccccggcgaactgcccgagctgtttctctccgccgtcaaacagggccataacgcgctgcgcgcattacaccatgcggtcaccagcggcctgcaagaggcctacgcctacagcgccaccttccgcgcggtgtttaatcacgcctatcgcgaccaagtccgattcggtggccacgccccacaatggcagatcgatcccctggcgacatcaactacgccggcgcatcagccatccgccaaaacgctgggattgcagttgctgcgcgaggtgttaaacggcaaaccgcccagctacgccaccgaacaggggcaacagccattaagtcaacgacgtgctctgctccatgcgctactcgaaggactgaccggactgccgcagcatgaaaacctgtatggcaagccccatccgcgcgggccgctgattgaactgctgaatattgtagtggatgagatcgtacgccacctcggtacgcaagaccccgcctgcatcagccatccagtgccggcaaacaccaaggtggcgccgccgtctgcggataccacggcaacctctccggaagagagctcgtcgccggccgcccgcgccgatacgcctgcgccacccgccacgccgcagcgtccggccagcacggctcccgcttcacagccggagatcgccgaagatgacagcccaatagaagagctaaaacggccggacccggcagccagtgccgcccggtatgcgtttggccgtaaggtgcttgacgggctgatgcgagaaggcgctgtcgcctatccgcatgacgcggccagcgcgaaaaaaatgggccagacctttcagcgcaatatggcgccgctgtttaccaacgtgacgggtcaagaaaaaagcgccgctgagctgctgcaaaaactccatgcggaagacaaaaaaacctcagctttccactttgatccgacattcccaggcggtttacttgccgccatgcaggaaaagcgcggcgatgcaaaggcggcctgccgtttctatctggtaatggcgcaagcggcgggcttcaaggcgcagacgcatacgttccccatcgctggcaacctcagcgtatcggtagccggccggcctggtgaacagcacccgctgactgagcatgcggtattaaaaatcagcgacgagaacggcaacaatcgctattttgacccattgctgggccgtgcggttaatccttttcgcagcgacagcatggaaaactacctgaacaccgccactctcgccggcgatgaaaccgcctatattcgtcagcgccacccggaagagaccgccgtgtatagcagaggcattatggatgcgctgatgaaagcgggcatgaataccttccccgcgccggaactggaggccaggcaacaggaagcgagccaatccatcctgcgggcatttgcaccattattcaaacacacccacggcaaagaaagcaccctgagcctgctgcagaagctggcggacgaaaatcagcgccgcaaggccatccaattcaacccggcggaaagtcagcgcgatatctataacatcgcgctcgaacatcaggctgacgccacctccatcagcaaactgtttcagacgctggcgcaaagtgccggccaccatcaggttgagctgcataccattgatacgccgctgtctatcgccatgggcgacagcccggttattcctggcgtaaagccgaatgccaggttcgaactgaaaaatcataccgtgctgaaattcagtgatccgcagggcaacacgctgtttttcgacccaattctggcacgtcgggtcaaccctgacgatacccgcagcctggagggctatttgcgggtataa

SEQ ID NO: 456018 - DNA, 195 bp, Serratia marcescens
atgagagaattatctaacgttgaagtcaatgaagtttccggcggtatcttcgggggtattatcagttcactcacccaaggcgctgaaactgtcctcggtacctttaccaatgcggccagaagcgtaggaaaagtcttcaccgacggcgtatttaacctcgtccgtggtttctgggaaggacgttacaccaaataa

SEQ ID NO: 456019 - DNA, 201 bp, Serratia marcescens
atgcaaaaattagcgcaaggcgaagctatgaatattattggtggcgcttggggatgtaaagtgagccataacttatccccgaccgccactggatggacttgttaccagaccgtaggctgtgttgacaagtttggtaacgtcacctcttccagtaagcctgttgagctggatgactgcacgcctgccgcaccgcagccgtaa

SEQ ID NO: 456020 - DNA, 255 bp, Serratia marcescens
atgagagaattatctaacgttgaggttgaagcagtttctggcgccggtatcggtactattatcagtggcatcattaacgctggcgttgataccctgactggcatcgcaggcaacatcgtcggcaatatcgccaactctatcggcgccaccattggcctgggcctcgggttcctggataagatcgccaatgtactccgcccgagccgccctgcccagccagaaccagaagcgccaagcgaagcagctacccgctaa

SEQ ID NO: 456021 - DNA, 192 bp, Serratia marcescens
atgcgtaaaagaaccaccggacaaatgaccaaaatcgtactactggtaagctttatcattttgataggccggcttctgtatacggctatcgccgccattccccatcatcaggaaaaaaagctttccgcgccggaattgcgcatgagtcaaccgctcaattcgcaacgggataacccctctgaaatgcagtga

SEQ ID NO: 456022 - DNA, 573 bp, Serratia marcescens
atgcagttatttaataaatccaagaaaaattccacagagaaacacgataaaaaagcggatgacatcacagcctcccgcaatcatgtgaaagagccggccaagacggcccccgctccgccgcccccagcggaaccgacggaaagcagtaagccggtcaaggccatcaaggacacctttatttcacagggcgcccagctgagcggcaccattgaaggccagggcaacattattgtcgaaggcgtgatcgaaggcatcctgacctgctcccaccaggtgcgcattgaaccgaccggccaggtgaaaggcgagatccacgcccagcatattatgattaacggcaccgtcgaaggcagctgccacgccgacagcctgaccatccagccgaagggccacatgcgcggcgatatttttaccgacgatttttctatcgagaaaggcggcgtgtttgtcggacagtctcagttgatgccgcaaacgaccgccggcgccggcaaagtcacgacgctgaaaacggcgcgccccgcacctgccgatgcggcgccgccgctgaaagagccccagcaggctaagtag

SEQ ID NO: 456023 - DNA, 549 bp, Serratia marcescens
atggcgcatatatatcaatcaaggatagaaaacatggcactatacgggaagtttatagttaatgatgcagattattcaccgctgacgatttatggcatcggcacgtttatggcgttctcgggaaacgggaaatacaggaatacttccgggtgtggtgcaatacccgataatggcccgataccgccgggtaaatactggatcgttgagcgcccgtcaggaggaaggttaggaccagtaacaacgtttgtgaaagacatggtgaacaggtactttaacgccgttcctaccggtaggcgggagtggttcgctctctaccggaatgacggcataatagacgatcaaacgtggataaatggcgttttgcgaaacaacttcagattgcacccaggcacagtgtcccgtggctgtattactctcaagcaccactcagattttgccgctattcgcagcgcattgaacaggacaaaaacaataccgattcaaggggcaaacataaggtcatttggtatgatcgaggttatcaatgccggagaatgcaaggtagactaa

SEQ ID NO: 456024 - DNA, 2655 bp, Serratia marcescens
atggaacagcaacctgactattttcgctattggggaaaaacgctgcgtaaagatgatcctgccagcgctgcctaccatctccttgtctggcataatctggatgttgcggcatgtggctggcacatggtgatgaataatcactttcatgcagcggatatttttgctgcgttggggttttcccgtgaggatgcggcgcagtggtttgcatgggttcttgctgtccatgatatcgggaaatttgcccgaggctttcaacaactgtatatcggggcttcttctgctctggttgctgcggtgagcggaaaatattattgcgcgcgccatgattccctgggctactggctctacagcgagtatttaatcccccgttgggaaggcggagaaagtaccgctattccgcgatgtgaaaaaaaaagaaaggttaaatatgcgctgaatagctggttaaaaatcgtcacgggccaccatggcaaaccaccgttggaggatgtcaaaggtaggcaggcatttacggaagaagacaagcttgcagcggaaaattggctggtcgatttatcgttattactgggggtgacggcgctccctgagtgtttcagtgataaagcctggcgagaaaaattaaagcagcaaagttggttattggccggcctggccgtgctggccgactggataggatcaaaccagacttattttcctttagtggatgaagttctcccgcttggtgcatattggcaaaccgcccaaagtcaggcgaaaaaagcgctggcgcatttgccagcgccttcaacggttcgggcctaccattcccatcaaaccttattcccctttattcaacagttgaccccgctgcagttaaaagctgcagatgccgatatttccatgtccgggccgcagctgtttatccttgaagatgttaccggggcagggaaaacagaagccgcactgattttggcgcatcgtctgatgtctgtcggtaagggcgatagcctgtatgtagggttgccgacgatggcaacctctaacgctatgttccggcgtttatccctggcttatcgggctttatatgatgagcacgacacgccctctctggtgttggcgcatggtgcccgccatatgtcggaggattttaaccattcgctatggagtgagagcagcacagggcaggagagttatcaaccgggcgaaagtgccgccagcagcgcttgcaaccgttggtttgcggattcccggaagaaatccttacttgctgaagtcggtgttggaacgcttgatcaggtattgatggccgccatgccgtttaatcatcagtcgctgaggctgcttgggctttatggaaaaattttaattttagatgaggtccatgcttacgatagctatatggttcgtctgctggaagggttgctgactttccatgcggcgcaaggcggcagcgccattattctcagcgcaacgctcccttactcgctacgcaaaaaactgctccatgccttccagcgcggaaccggtggtgtcttaccagcccctgagcctgacgcgcaatacccctggttttcacatctcacgacgcaatcgctgcaagaaagctatacgccaactcggcctgaagttactcgccaggttgcggttgcctggctaactgaaattgatcaggcggttgcgctcatcgaacaggcggtagcggcggggcaatgtatttgctggatccgtaacaccgtagatgaggcaactgcggtttatcgccagctgcaacaacgaggaagtattccggctgaagatttgctgctctttcacagtcggtttgcttttattgaccggatgaatattgaaaatcgggcgttggactggtttggcaaagaaagcacgccggaagggcgacgcggtaaggtattgattgctactcaagttatagagcaaagcctggatatcgatcttgatgtcatgatcagcgatctggcgccaattgatttattgatccagcgcgcggggcgtcttcagcgtcatcaacgcggggcgcgccttgcgccggtcctgcatgtgctggcgccggtttggcagcctgacccacagccagactggctgggtgaacagcttaaagggagcgggtttgtttacgccgaccacgcaaacctgtggcgcacccagtcgatacttcgggataagggcatgattaacatgccggaagatgcgcgtgagctggtcgaaagtgtctatgaggagtggattgagacccccacagggttgcaacgaggcagtgatattgcgtttggcaaaattctgggtaagcgcgaggtagcagcgcaagtcctgctggagcgtgatgaaggttacgatcagaaagcgagcgattacttttggaacgacgcggagttatccacccgtttaagtgatggatccatcgagctgtatcttgcctggcaagatggcacgccctacgccagcagtgagcattttccctgggaacaaagccacatagctgtccgcgaaacactgtggaaaaaattggttgaggagatcccacatctcagcgatgaagcattggagcaccatcgtcgggaaatccgtaacccacaggctcaggtagcattgataacccgcagcgaagagtgtgggttttatagcaaggaatgggggcttattagccatatcggtaaatag

SEQ ID NO: 456025 - DNA, 1563 bp, Serratia marcescens
atgttttcattaatcacggaaccttggttgcccgccatcgatcggatggggcagcttcggaagatttcaccgcaacaaatttttgataacgacatcgttgaactggcgtggccgcgggcagattttcaaggggcggcctatcaactgcttattggtttgttgcagaccacgctgccgccggatgatgaagaggagtgggatgacgtctgggaagacggcgttgatgtccagcgctggcatcaggcgctggatcgcgtcgcagccgcctttcattttgggccgcagaaacctgcgtttctgcaggacttttcaaccctcgacgttgagtcctcctctattgccgggttgttggtcgatgccccgggtggcaataccttaaagctgaacaaagaccacttcgttaagcgcagcagttaccagcagttttgcccgcattgcacggcgatggcgctgtttaccgtccagaccaactcgccagcggccggtgcggggttccgtaccagcatgcgcggcggtggcccgatgacaaccttgttggtgccgaaaacgccgagtgagccattatggaaaaagctctggctaaacgtgatgccgcaaagtgaaagctggcagggcgagcagttgccgctgattttcccctggctggccgctacccgcagcagtgaaacaccgaaaaatatcgttacgccaggcaattcgcacccgctgcaggcgtattgggggatgccgcgccggctggaaattgactttaaccatacgcatgccggtcagtgcgatttatgtggcgagcatcatgatgcattgttgagccaaatacgcagtaaaaattacggcgtgcaatatgatggctggcggcatccgttgtcaccttatcggcaggcgctcaaagatattgaggctccgctgatcccgttaaaaggtcagcccggcgggctggcctataaagactggcttggtttgattgcagagtcggaagaaaagctcaatcgtgtccttcccgcccgggttgtgcggctaaatccggtgccaacactcactcatttatggtgttttggctacgacatggataatgccaaggcgcgttgctggtatgaacatcgtgtagcgatatcttcgttgccgaaagcacagggggatgagctcaaagagctgttgcaaacggctattgaactggcggccagcagcttgccgctattacgccaggcgctgaaagaggcgtggtttgcctccccgaaagaggccaaaggtgatttcagcgctatcgatgtcgcgttctggcagcaaacggaggctgatttcagtcggctgtggaacactctcaatcactacccatcagcaacgtaccccgaagcgcgcgcggctctgcggcaatggaagacagcgctgcaggattacctgttccttgcatttgacgaacgggctttcaccaaccctgatgagagctcagatcttactcgcattctgggcgccagacagaatctgaataaaagctttatcaaacagaaaagcttaaaagcattggcagaaatagtgcgtgagcgtgaggagaagcagaatgtttga

SEQ ID NO: 456026 - DNA, 597 bp, Serratia marcescens
atgtttgacatggatacgacaaaaccggtgatttttaccgatccagctgcggcaaaagcgttgcgtcgttggtttgattttttgcaggagcgcaataatcaacatcagggtgttgccgtcaacggccgcgcctggcgcgctgaattacgccgttgcgcgcaaccttttggtgcattgactaccgccgcatttcactccctcaatcaggcgctttccggacatgtgcaatttcagcccagcgatcggctggcgttggcgattgttgcgcatgttgtttctcatgctcacgcggacaatagccaaaccagttttcctcgtcagttgggggagccgattaaagggaatgcttgcctttcgcgattgcgttttgaccgcctgctggcggtaaggacaccggcagaattatgtagccagctaacgcgtgccgtgaaattacggggcgacagcggtatcaacgttgtttccctggcagatggcgtttttctctggatgcgtgagtggcagcagcgcgagcaaaacctgcctgcacaaagtaatccgtttaagcgttttaatgtgcgttgggccagtgaatatttactggtgactgaaaaataa

SEQ ID NO: 456027 - DNA, 1056 bp, Serratia marcescens
atgacaacatttattcagcttcatgttcttaccgcttatgcaccttctaatttaaaccgtgatgataccggccggccaaaaacggcgattatggggggcgtagagcgcttgcgtgtctcatcacaaagtctgaagcgtgcctggcgcacgtctgaagtttttgaggacgccttaagcgggcatatcggtacccgaacccgtcgtcttggtcttgagatttatgagcagttacggaccaaaggcgtatcagaaaaaaaagcgcttttaatagcaggaaaaattgccaatgaatttggcaaattgaaaagcgataagaatgcgacgccggtcgagaaccttgaaatagagcagttggtgcatattagtaccgaagaacagcagcaaattgatgcattagtcgagatattagcggctgaagatcgcgaaccgaaagaagaagaactgaaactgctacgtgccaacgccaaatctgttgatattgcattatttggccgcatgctggcgtcgaaaccggagtttaacgttgaggcggcctgccaggtggcgcatgcgctaggggtaagcgcggtcaccgtggaagatgatttctttaccgcagtagatgacctgaacagtaaagaagacagcggctcggcgcatatgggcgaacaaggttttgcctcggccctgttctatagctacatctgtatcagccgcgatttattgcttgagaaccttaacggcgatgaagaactcctcagccgcactttgcgtgcgttgaccgaaacagccttaaccgtttcgccgggagggaagcaaaacagttttgcctcacgtgcctatgcctcgtatgtcatggcagaacgaggtaaacatcagccgcgtgcgctatctgttgctttctttagcccggtacgcggggaagaccagcatgctcaggcgatcatacgtttgcaacaacagcagcagaagtttgcccgcgcgtatggacagcacgcagatgaacaatgctatgaaatgaacgtggaatccggtgacggaacgctgcaggaactgctggattttgtcagccagtaa

SEQ ID NO: 456028 - DNA, 735 bp, Serratia marcescens
atgtcccgatatctggtgtttcagctttatgcgccgcttgcctcatggggggaggcggcagtaggggaagtccgccatacttctgcattacccagtcgttcggcattattggggatgttagcggctgcgttgggcatcaggcgtgaagaagaacagcggcttttggctattaatcagcattatcattttgcgataaggccgctgtctggtcgtgaacaatggttgcgcgactatcacaccgtacagatgccaaaagaaaaccgcaagcgccgctatgtaacgcgtcgtgatgaactggtgctctcaacagataagccggaaacgatactgacttcccgcgaataccgctgtgatgcgtattatcacgtcgcggtagagcacacgcccggtgcgccgttctcgctagacaaattggcgagcgcattggtttccccggttttccctctctacctagggcgtaagtcctgtccgccggcactacccctgttccctcaaatacttgatggaacgttgggggaggttttgcgtttggcgcagcgggatgcccgctacgatttaatcaatgaacaattggcaggcatcacctcagaacaaactttctgtgtatgggagggggagcaggagggagtaacgaagtttgcgacgcagcaacgtagcgatcaacctgtcagcaggcagcgttggcaattcaccacccgtctccagcatgcaggccatctcaaggaggagcactaa

SEQ ID NO: 456029 - DNA, 654 bp, Serratia marcescens
atgtttctttcacgcgtcatgcttaatttaacaaaattgacgccgggcatgtggctgaaatggcagtccataccgtcttatgccagccatcagtggttgtggcagctcttttcccagcagcaggagcgaaggtttttatttcgtcatgagagtacacggcagggagagtgtttttatgtcctttcagatgtgcagcctctgcacggcaatgggttgtttaccgttgaaactaaatcgtttgctcctcagttagccgaaggtatgcggctgacattcgcattacgcgccaacccggtggtgacccgtcaagggaagcgctgcgatgtgatgatggatgctaaatatcatgccaaagagcagggcgtcgaccctggggaatataaggaaaggcagatttcagcggcaactggatggttacggaatcagggagaaaaaagtggtttctttgctgaacgcgcccatattgatgtcaccggcagtcagcggcatcgctttgcgcgtcgtactggcgaacgcccggttagctataccagcgttgatttcaccggtagcctgatggtaacggatgtgcctctttttatgcgtactttgagcaaggggttagggaaaagtaaagcgctggggtgtggcctgatgttgatacggcgaggctga

SEQ ID NO: 456030 - DNA, 915 bp, Serratia marcescens
atgagttatatcccgttatcacctattccattgaaagatcgaacttcaatgatttttttgcagtatggccagatcgatgtcattgacggggcatttgttctgctcgataaaacgggtatccgtacgcatattcctgtgggatcggttgcctgcattatgcttgagcctggcacccgtatttcccatgcggcggtacgtcttgcggctactaccggtacgttgttggtttgggtgggtgaggcgggagtacggatgtatgccagtggccagcctggaggcgctcgttccgatcggctgttgtatcaggctaagttagctttggatgaagacctgcgcctcaaggttgtgcggaaaatgtttgagctgcgttttggtgagacagcaccaagccggcgttccgtcgatcagctgcgaggaatagaaggcgtcagagtgcgccaaacttatgccttattggctaaacgctatggcgtgaaatggcatggcagacgctacgatcctaaagattgggaaaagggggatgtagtcaatcaatgcattagtgcggcaacgtcttgtttatacggtattactgaggcagccgtattagcagcaggttatgcgcccgctattgggtttgttcattcgggtaagccgctgtcgtttgtttatgatattgccgatattgttaaatttgaaggtgttgtcccaatggcttttgaaattgctgcgcggacgcctaataaccccgataaagcggttcgtttagcctgtcgggatgtttttcgtagccaaaaaacgctggcgaagcttattccattaattgaggaagtattggctgccggagaaatcgatcctccacaacctttccctgactctcaacctcctgccattccagagcctttgaccattggcgatattggccatcgggggtga

SEQ ID NO: 456031 - DNA, 144 bp, Serratia marcescens
atgaaagaaaaaaatggcatgagagaattgactgaaaaagaattgaaggaagttgctggcggttggggtgttatctggggaaaggtcgatggcggtggtttctatgtccaaggtttccttgggaaaaaaccgggtaaaggctaa

SEQ ID NO: 456032 - DNA, 345 bp, Serratia marcescens
atgggaaaggatccaataaaagatgcagtatttgaatggtatgacagcaaatataacctgaggccgttattttccaagagcaagcctgttttaacgctggaaaccagcctttcgaccggtaaatacccctgggcgcgggaaaccggtgatgaaattatgcaggattattttgagcggtttaaagtggatagccgtgactttaatttcctgaagtattggccttatgagaaagggtggtggcctaatttcctgcgtcctgaatctcaaaaggtgcctgatgcagcgccaaaaccgctgacgattaaaatgctggtggagtcggcgagggctgggcggtggatttaa

SEQ ID NO: 456033 - DNA, 1161 bp, Serratia marcescens
atgagcaagacactctcggaaattgcccaacagttgggtacacctaagaaagtcaagacaactgtccgtaaggaagttgagcagacgagagccgtgccaaaagtgcagttaatctacgctttcaatggcacggggaaaacgcgtctttcccgagatttcaagcaattgattgcgcccaaagtcattgacgaagaaggtaaagacgaagctgaacagtccgagttgtcgcgcaaaaaaatcctttattataatgccttcaccgaggacttgttttactgggataacgatctgcaagaagacgcagaaccgaagctgaaggtgcagcctaattcctatacaaactggttgctgacattgctcaaagatttgggacaggatggcaatatcgtccgttatttccagcgctatgcgaacgacaagctaacgccacacttcaatccagattttaccgaagtcgctttttccatggagcgtggcaatgatgagcgttccgcccacatcaagttatcgaaaggtgaagaaagcaacttcatctggagtgtattttacaccctactggatcaagtcgtcacaattctcaatgtcgccgatccggatgcgcgtgagacccgcgcatttgatcaacttgaatatgtattcattgatgatcccgtcagctctcttgatgataaccacttgattgaactggcggttaatcttgcggggttgatcaaatccagtgaatccgatttgaagttcattatcacgacgcatagcccaatattttataatgtccttttcaatgagttgaacggtaaagcttgctacatgttggagagttttgaggatggtacatttgccctcacagaaaaatatggcgactctaacaagagtttttcttaccatctccacttaaagcaaaccatcgaacaggcaatcgctgacaacaacgttgaaaggtatcacttcacgttactgcgcaatctttatgagaaaacggccagctttctgggctaccctaaatggtctgaactcttgcctgacgacaagcagctttatctgagtagaatcatcaatttcactagccacagcacgccagcggagaaagcgactgtcaaactgttgctcgatcacttgaagaacaactgtggcttctggcagcaggaacaaaaaaatggttga

SEQ ID NO: 456034 - DNA, 372 bp, Serratia marcescens
atgaaatattatgcaaaagttatctcattgagtgataatattgaagaggaagttttattatctttaggagaaaaggaactttgctgctttatagatagtgctccatacaaactcgttgagggctgcgtttatctcattgatctaaatctatcttttgtcgataatgaatcaatgaccgagtcggaagataaaaaaatatctataaagagaatagatgatggtttttcatatgaaatagtcgggtttatgtcagaaaaaaaattaatcacagatggtgttatttttgatgatgagttattacttgactatgtgtatcttgattcaaattatgtaaaggttataccagacagaattggtgtttcttttttatag

SEQ ID NO: 456035 - DNA, 357 bp, Serratia marcescens
atgaaaagattattgacaaaaaatgaacttccagattggttctcctattcggatggttttttaaggatcgttaatcaggggctattagattttgatccgtggattatcatggagagtgataggcttagagttcgttatgaaggggtgaaaaaacgttacccaaatagagagttgataccttttgctaggagagaggattgtgatgatattgcatgctgggaaaaaaataaagatgggaaagtggtagtgattcatgatttttccagtgatggctatgagaatgtttgtgaattcaatagcttctgggattggttgcgaagtgctttagaagcaacgatagaatatgatggtgaataa

SEQ ID NO: 456036 - DNA, 159 bp, Serratia marcescens
atgaatgaaccagtgttgatcattagcattggctatggagaaattttctttgaaatacttgggcgtgaagtctatttcaccgttcggtgttacggcggtgtcttcgttttgtcatccaaaggaaaattgctgccgttatggacccttacccgtgaataa

SEQ ID NO: 456037 - DNA, 2094 bp, Serratia marcescens
atggaaaacaacagtcacaaattgaaaaaacgtcttttcaggttaagcctgaataatggcgtagtcagcaatggcgacgggttcaacggtaagttttttaaagcccattttattaatgcgtataatttgctcgtgcctgatggtgaaaaatttatcatcagaaactgcaaacactatttcggcaagctttccccggcgcttaaagatgaggtgaaaacctttttctaccaggaaagctctcattcacgcgaacatgaaaggctacagcccataatgcaggacatcgggctgggcatgaatcgctaccggaaaatcgtcaacggtctctgctatcgcatcctggagcctttaacgccgcgcaagctccggctgtcgacggcggtatgcattgaatactacaacgccttgatcgccatctattttctgcaaaaagatctactcaaagagatcgagagcgatgaactcagacggctgctttcctggcattttctggaagagatcgagcacaaggaaaccgtattcaaagtgtggcagagcgtcagtcattcctggctgctgcgcatcaccggtatggcggtgagtttcaccacctttatcggctccgtcttcgccggcgcctttgttctggcgatcaaaaataaagatatcggcaagcccgcgttctggcgagacttctgccacgagacgttctgtctgaacgggatgatgtgtttcctgctgaaaaattccgtgaaatatatgcggccaggattctacccttcgctgcccggatcagatgccttggtcaaagccattgccgaggagatgccggaaaaccaccggcagagtcagccggcgccagccgccgtcaacagtgacggcgctgggctcccggcggataaatccgccgcgttcacccgcaagatggcccgcaacatcgcccgttttcatcagttgagcgacaactatccgttcttcttccaggcgctggagggctatgatgatgagcatgccgcctgggtctatagcgaaggcaaaagaaagctcaatttctgcacctattcttacctcggtctgctgaaacaccccgccatcgaagcggcggcgcagcaggcgctgcagcgatacggtaccggtacccacggcgtacgcctgctgggcggcaatcttgatatccaccagcagctcgaacagcgcatcgccgacttttttggccgcgaaacggcgttaacctttagttccggctttatgaccaacctggccgtgattgactgcatgctgggcaaaggcgacctcattttatgcgacgaactgaaccacgccagcattatcgacggctgtcgtatcagtccggcggaagtcatcaaatttccccataacgatatgcaggcgctcgatgcactgctggccgccgcgccgccgcgtgcgcgcaagctgatcgtggtcgacgccgtgtacagcatggaaggcgatctcgcaccgctggataagttgatcggcttacgcgaccgctatccgaatacgctgctgatggttgatgaggcccacagcctcggcgttctgggggaaaacggccggggcatcgaagagctgttcgcctgtcaggggcaggttgatattttgatgggcacactcagtaaaaccttacccggccaaggcggttttatcgccgcaacgcagcagattatcaactatctgcgcatgagcgcccgcggctttattttcagcgccgccctctctccggtcacgacggcagccatgctcgccgcctttgaggtgctggaacgcgaaggtgcgcaaagacggcagaagctgacggaaaacatcacgtatttcgtcaccggtctgcggcgggaaggctttgaagtaagggccgggcaggccgcgattgtgccgattatggtgtacaacgaacatctcgcctttgcgatggcgcaatattgtcatcagcaggatatttatgtgatgccggtggggtacccagccgtccccagaggccaggagcgcttgcgcatgaatgtcaccagccaccatgaatttgccgatctcgatttggcgctgaaggtattgtgcgacgcgcgcgccgcttctgcagcgaccgccgccgaagcgtag

SEQ ID NO: 456038 - DNA, 1128 bp, Serratia marcescens
atgaccctcagcctcacgatcgccaaccgccagacctggttcggccagggcgccatttcgcagctgatcccgctgctgacgcaggatacgcagcccacgctgctgttcagctgccgctcgtttctcaatggtccggcctacgccgcgctggcgccgcagctcgatccgctgctgatcggccgggagatcgtcagccatgaggcgtcgccgcaggagctggaccagtgggtcgcgcgctggcgcggtcagccgacgcgggtagtggcgatcggcggcggcagcgtgctcgacgccgccaaggcgtttgcggcgctggtggcgcatccgctgccaacgctgcgctatatggaaaagattggcgatacggcgatcggcggcgacacgttgccgctgatcgccgtacccaccaccgccggcaccggcagcgaggtcacacagaacgcggtgattaccgatacccgcgtcaagcaggtgaaggcctcgctgcgccacgccaattttgtgccgcagacggcgatcctcgatccgcagctgctgcagggcgcgcccgaccacgtgctggcctactgcgcgattgacgccttcacccacctgttcgaggcctacctgtcaaagaccgccagcagcctgacgcgcgagcagtcgctgagcggcctgcgcctgttcctcgacgcctggccggcgctgaaccgcagcgacgatgcgcgcgaagccattatgcaggcttcctatctcggcgggctgacgctgagcagcgccggtttgggggtgatccacggcatcgccggtgaagtgggcgcgctgcgcgactatcatcacggccaggtgtgcggccgcctgctgctgccgttcctgcaattgctggcggagagccggcagccgcagcagcgccggctgatgcaggaactggccgaacggctgttcccgcagcatcagggcagccccgagcgctacctgagcgacttcatcaccgggcacgccatcgcgccgttctggcaggagccgctggccctgacggcggatgagctgcgcatcagcgtggagaaatccaacagcaaaaactcgctgctcgactacaccgccccgcagcggcaacagatgatagaagcggcattccatatcgaatga

SEQ ID NO: 456039 - DNA, 357 bp, Serratia marcescens
atgaaaagtgagtggttttctgccaaggagttgacgggcattgcggggttaccttcctcgccacagggaattaatcagatggcacgtcgggaaaagtgggtcactcagcgtcggaaaggcgtacagggcaaagcggtggaatatcacatcgacagcctgccgcctggtgtgcgcaatgcattgatattgagggaagattctgccgtttatactgccgaaaggcaggatcctcaagcggtatggaacgcctattttcatcatatgtcggacgatgaaagagcacggatactgtcatttctgttgcgtgagggcattggtgggctgttgacgcttatcgctgaggattacccgcgataa

SEQ ID NO: 456040 - DNA, 279 bp, Serratia marcescens
atgagagaactatccgtaagcgaacaaaaggaagtcagcggcggtctgtttggttttatcaccgcacctatcggcggtctgctcggcggagcaatcggcgcagtggtcgatgccggtgtccgcaccgcgggcggtgacaccaactacagaaattcaggcacgctgttgggcgcaggcatcggcgctgccgtaggtttatcgccgattaccgccgtcctcggtattggtgccggcgtggtttccatcgtccgcaacttcctgggcgtacgtgcttcctaa

SEQ ID NO: 456041 - DNA, 531 bp, Serratia marcescens
gtgtttgacattgggtttagtgagctgctgctggtactggtgattggtctggttgtgctggggccggaacggttgccggttgcggtaagaacggttgcaggctggatccgtgctctgcgttctctggctgcgtcggtgcaaaacgaactctctcaggagctgaagctgcaggaactgcaggatagtctgaagaaagcggaaagtgccggtctgcaaaatctgacgccggagctgaaggcgtcgatggacgaactgaaggaagcggccgactcgctgaagcgttcgtatcatcctgatggtgatgctgccgttaatactatccatcatccgcagaccgacgagcctgaggtggcgcatgatgaggtcattaccgcagagtcggtgaaccgcgccgcaccagtcgatgttgcgaaagctgtgtcgccggaaactcctgtgcccgcttcctcgacatcgattgcggccaaggctcccgtcacgtctgctgcggaccattccccggcatcccactcatctaatggcgatcgttaa

SEQ ID NO: 456042 - DNA, 1119 bp, Serratia marcescens
atgaaaaggatttcatgtttaacggcattgccgttgctgtttgtttccggcatggccgaatccatgacgctgtatgaaaaacagggcacaaaactggactttgccggttcaatccggctgatgttcgaaaatgcgcagaaaacccagccggggaaaagcaacacgcgcataaaggatgaacgttcgcgctttggcatcggtatttcacaccaaatcaacggtgactggcgtggcttcggctatctggagtttggcaacgatacgcagtcggcggaaaacgacttcaagctgggtaaccgtctggggtatgtcggcctggaatggcgcggcttcggtgatatcgccattggccgcgttctgtcgccgttcgataagctggcgcgttccgactatacctacgagtacggcggcgtattggattttggcgataagcctatcggccgctccaccggccgctctgaagacggtaaaaatgattttatcggccgcgtgtccgacaccgtgcgcgtgatgtccgctgaatttgccgggttcagcgccggcgcaacctatacgctgcaaaacggcgatgcaatcaacgaaatcaacaatgcctacacgctggcggcttttttccgccgggcaaatctgcgcgtggctgccggctacggcgcggcgcaaggcaatggcgaacgcgcgaagaaaccccgcaactacaagggcagtacagagagggtaaaggccgtcaaggaagatatctggggcctaggcctggaatatacttttgcggatctcgatctgtccctggcgctcgactatggccgattgcgcatcaaaaacggcaaccggcgttcgggggacgaatataagaaagtcaacggagtgcctaaagctgaactgttggggctgggcgcaaactgggactgggggcggggcaacctctacggcggttattatcggcaggcgggcaaccgggacaccaataactggcgggaacggcgttatgtaataggcgctgattatgaactgacgaaaaaggtgatcacctgggtggagtttgcccatgaggagaaagatgacgaccaacaggataaattcaccaacaggctgatgggaatggggctgcgtatctatttttaa

SEQ ID NO: 456043 - DNA, 1134 bp, Serratia marcescens
atgaaggtggcggaaattatgtttgccctgtcgggcggtgcctggcgcgtgcggcgctgctggccgcagctgagcgacacggaaccgccaaaggtgacgcgcgtcaccgtggaggcgacgccgctacatagcgaatgcagtcaccgctacgcggctcagctgtgtttccatccggcgcggccgaaagaggcgctgtggctgcggcttaatccctatggttatgacgcggcgctgccgacgctgacggcacatttacagcgtgcgttgcgggacgatcctggcgccggaattgtggcgcaccggcggggcaaacgggcggtgatccgttctgcccaggggtttattaaagtggtgcgtccgggcgccgccgcggcgctggtgcagcgccaggattgcgccgtgcgctattacggcgaacacgccgtgctggcggcgctgttgcgccaggaggacgacggcgcagtgatcacggcgccgttggctggccggacgctggctgaattggggaacgatccgtcactcagcgatgctgagctggctgcacgttggcgcgccttcggcgacatgatgcgccgctgccggcgtgaactccctgccgactggggtgggctgcctcagcatggccttgaggcggagcgacgcatcgttgatgactggctggtgcgcatgatgttgtctgagcaggtatcgccgagccgcgtacagcagctgcggcagcatagccggcagctttgccgccgcctggccgacgggcgtgcggtgccgttatcgctgctgcaccgggatttgcacgataagcaggtgctgttcacgccggaaggcccggccctgctggattttgacacgctggctctgggcgatgctgcgctggatttgggcaatgtgctggcgcacctgcggttacgtgcctgtcagcacgcctggcgcagtacgctggcaccatcgcacagttatacccgttttgctctggcgcggcaggccttgctgaacggctgggcgccggacgaggcgtcgatggcgcgggcggaattatttgccgagctgagttggattcgtctgatgggtgtttatctgtggcgtcccgcgtggcgaaaaatggcgcagaaacggttgcgggataacgacgtacggtga

SEQ ID NO: 456044 - DNA, 1101 bp, Serratia marcescens
atgaccattaatctggcggatccgcaggccattcggcgttgtctgactgacgaggcgctgactcaggcggccgggcaacccatccgctgccactacctgcgcgtcaaacccggcacctccgtctggggggaagtctccggcgattttggcgacgacgccggcagaggctggctttatgttcacaccgatccgattaaggcggaaaaattcagccggcgtgccgaaagtgatggcctgccgctgatcgcgctgggatccggggtgatcatgggcagtatggcgctcgatcctgcgttgcatcgcggttggcgaaggctgcgtcgccggctggcggacgcgcagacgacgaactggtcgctgctgaaatatcgccctgggcggcggatggttttgcgcgtggaggagagctcgggagaggccgtgctggtcagggtgctggcggggtgtacgccgcagtacgccaccatcgtccaacgcatgcatcaggccgggctgggcgcggcgctgaaacagctggatgcccggcatcatgtcgtcagtctgcaatggttgaagggagaaaccgccggaagcgtgccgcctggcaggtttgaggaggcgttatctgcggcggcccggctgcatgcgctgcgggtcgacggcctggctctgccgaattacgacgcctgttggtatgcccagacgctgacccaggccgaacgtacactgtgctggctgctcccggcgcagcgccagcgggtggaacagttgactgaacgcttgtcgctcgccgtcgcggacgtttggcaccggccgccggggctggtgcacggcgatttttccgccgatcagatggtgtggtccgcccggcgagcggtgcgtctgattgatatggatcgcgtgggttatgggcagccggtgatggacatcggctcgctgttggcggtcgagatgctgcaggggggattacgcagcctgccggcgctgccttatcccgcgctaccggcctgggtggcctatgcgctgctgcagcgggcggcggagccttatcgttatggccgcgccgactggcaggatgcggtgcaggcgcgtattcaacaggcttgggaggtgctgggatga

SEQ ID NO: 456045 - DNA, 1827 bp, Serratia marcescens
atgacgccaacaatcgtgcctgatccgcgcgtatacgcttcaccgctcaggcggatggtacgccagctgctgccttatctgcgtcagcagaaggcgttggcggccggcggcgtcttggcgatgttggcagaggtggccctgcgcgtggttgaaccgtggccggtgaagtatgtcatcgatgcgctgtcggtatcgctgggcgcacagctggacgacaacatggcgccggcgacgctgcggctgttgctgatttgcggggcctgcgcgctgacgctggcaatgctgcgcgcgatggcaagctttctgacgacgctggcctttgcgctgaccggcagccgcatcgccacccggctgcgcgccgatctgtatcagcatgtgcaaagcctgagcatccagtaccaccgaaccacggcgcagggcgatttggtacaacggctggtggcggatatcggccgtttgcaggaggtggcggtcaccgccggcctgccgctgacgggcaatatgctgactctgatcgccatgaccggcgtgatgctgtggctcaacccgccgctgacgctgtgtgtggtcggctgcgcggcggcgtttgcgttcgccacccgctactcggcaccgaaaatcaccgccgcggcgcggaaaacccgtaagcaggagggcgcgctggcctcgcaggcgcatgaaacgctgggggcgatagcggtggtgcaggcttatggtctggagtcggcgctcggccggcgttttgccggtgccaatcaaaaatcgctgaccgaaggcgtgcgggcgcggcggctggctgcggcgctggagcgcgccaccgatgtgctggtcgccctcgccgtcggggcggtgctgtttttcggcgggctgcaggtgctgcgcaaccatatgacgcccggtgatttggtgctgttcctgacgtacatgaaaaccaccatgaaaccgctgcgcgacgtggcgaaatatagcggcaggattgcgcgcgccgccgcttccggtgagcgggtgatggaggtgttgcggcagcagccggcgataagcgacgccgccgatgcacaaccctgcccggagccggtgcgcggcgagctgcatcttgtcgacgtttggtcaagctatggcggcgcgccggtattaaaaggcgttggtctgcatatccgcgccggcgagcatgttgcgctggtcggcgcgtcgggggcgggcaaatccagcctggcctcgttattgatgcgtctgcaggatccctgccgtggcgaggtgcgtctcgacggccgaccgctgcgcagcatgacgctggcctccctacgcgcgcaggtggcggtggtgcatcaggagccggtgctgttcgccatgagtattcgcgacaacatccgcatgggcaatttggccgcggacgatgcggcgattgttgccgccgcccggcaggccgatgcgctggcctttattcaggcgttgccggccggttttgacaccgtgcttggcgagcgtggcgaaacgctgtccggcggacaacgccagcgtatcgccattgccagagcgttattgcgtgatgcggcggtggtggtgctcgatgaggtgacgtccggactggactgccgggctgcgcaggcggtgctggacagccttgaccgtctgatccgcgccagaaccaccttggtgataacccatgattttgagacggcgatgcgctgtgagcgcattatctggctggaggacggcagggtggttgaatcgggtttgcgcgataccttattggccggcggcggccgttttgcccgctggcgcacagaacacgcccgccattacgcgccgttcagagggacgccatga

SEQ ID NO: 456046 - DNA, 1176 bp, Serratia marcescens
atgagaattgcgtatgtgtgtgcggatcccggcattgcgttgttcggcaccaaaggcgccagcgtgcatatacaggaggtgatccgcgcgctgcgtggcgccggacatcaggtgaatgtgttatgcctgcgcttgggcgatgcggtgcccgccgatctggcggatttgccggttgaggttttcccgctgccgccggggacgctgacgtcccgtgagcgcgaagatgcggtatggcgcgccgggcgtcagatggcggaggccatcgcggcccagcggccggagcgggtggtggaacgctattcgctgttcagcgccgatgtgatgttggcggccagggagctcggcatccccagcgcgctggaggtgaatgcgccgctgctggaggagcagcgcaaataccgcagcctgatccattacgatcgggcgcaggcgacgctgcagacggcggcgcaggcggccggcgtcgtgattgccgtctcttccgccgtcgccgcctgggtgttgcgccatgcaccggctgccagagtgctgatgctgcccaatggcgtgaatggcgaacgcattgttccggggccgccgcgtgatgcggcggaaccgctggtcatcggttttatcggtacgctcaagccgtggcatggcgtagaggtgttgctgcaggcggcggcgcaggcggcgcggcctgactggcggctgagtatcgtcggcgacgggccgcaggcggcaacgctcaggcggcaggcccagcggctgggggtgcgggcggcatttagcggctcggtggcgccggagcgcattcccgcgctgctgcaacagatggatattgcggttgcgccctataccgctgaggcggagccctatttctccccgctgaaggtatttgaatacgccgccgccgggttgccgatcgtggcgggcgcgcatggacaactgacggatattctgcggcacggcgaaacagcgctgttgtttcatccgggagacagtcgggcgctggcgcgtcatttgctgacgctggcggacgatccggcgctgcgcagccggctgggtcaggcggcccggcgttgggcgctgggacaaagttggcagagcgtggtggcgcgcatgctgcaggcgatggcagcgggtcagccggaattacagcaggagtgcgatcatgacgccaacaatcgtgcctga

SEQ ID NO: 456047 - DNA, 1227 bp, Serratia marcescens
atgatgcaacggacatcgcgcacaggctatgtgctgaaaacctatcccaagctgtctgaaacctttatcacgacggaaattctggcgcgtgaagcggcaggagaaacgctggagatcttttccctgcgtaggcctgatgagacgttagttcacgatgcggtgcggcgggtcaaagcgccggtgtgttatccacaacggccgcaaacagcggatgcgctgtggacacagctgcgccaggcggcgcagcggttgcccgcgctgacctcactgttgcctgatttattcagtcagcccatggatgtggcggcgcaggcctgcgccattgcgtgtcaggtgcgggcgcacaacattggccatctgcatgcgcatttcgcctcggtgtctgctgatacggcggcgctggcggcgcgtttggcggaggtgccgttctcggtgaccgcgcatgccaaggatctgttccatcagtcggtgtctcacgcacatttgcaacggctattttctcaggcgcaccatgtggtcgccatcagcgattacaacgcgcgctggctggaaacgcgcctgggcgccggttttcgcatccggcgtatctataacggactggatctgaaaacttttactttccagtcgcctgacgcccagccgggtgcgttgccgcgctttatcgccgtggggcgtctggtggcgaaaaaaggcttcgccactctgattgacgccgccggactgttgcgcgaccggggcgtcgcctttcagttggatatcatcggcagcggcgcggagcaggcgcggctgcagacgcagattatgcacctcggcctggcgtcgcaggtgacgctgcgcggcgcgttgccgcaggagcaggtgattccgttattgcgtcaggcgacggcgtttgccgcgccctgcgtggtggccgaagacggtaatgcggacgggttgccgacggtattgctggaggcgatggcgctgggggttccctgtattgcgacggatgtgactgggattccggaagtgataaaccatgaggaaaccggcctgctggtcgcgcagtacgatgcgccggcgctggcggaggcattgctgcgtctggcgcgggatcgggcgctgggccgtcgtttggccgatgccgggcgcagtctgattgagcgccgtttcaacgccgcgacgcaggcgcggcggctggcgcaggcgcaggctgagccgccgcattcaggagggcagcagcgatga

SEQ ID NO: 456048 - DNA, 411 bp, Serratia marcescens
atgagaacgctcaatattggtttactgacggcggcgttgttcggttttgccgcgcagggcgcagatatcaagaacccgcttagtgtgcatgtattgaatttgcaaagcggtcagccttcgcagggtgtcagggtgacgctggataaaaaagaagatgataaatggatacatttaagttcgggtgtcaccaaccaacagggccgcatcagcgcgctatatccgcaggggcaaaccctgcagcgaggtgagtaccgcgttaccttcaagaccggtgattactacgcgcaacaccagcagaagacgctgtttccagaaatccctgtgttaatccacattgaaaaaacggacgagcattaccatgtgccgctgttgctgagtcaatacggctattcaacgtatcgtggcagttga

SEQ ID NO: 456049 - DNA, 240 bp, Serratia marcescens
atgaagctaaatgctcgacaggtagaggccgctaagccaaaggataagccgtacaagatggctgatggcggtgggctttatctgcttgttaaccccaatggtgctcgctactggcgcttaaaataccgtgtggatggcaaagagaaactcttggcgcttggcgtttaccctgccgttacccttgctgatgctcgctcaaaacgtgatgaggcgaaaaggggtatcgctgggggtatctaa

SEQ ID NO: 456050 - DNA, 975 bp, Serratia marcescens
atgctcgctcaaaacgtgatgaggcgaaaaggggtatcgctgggggtatctaagcgagagaaaaaaatcactcgggctctggcagtgaaaaacacattcaaagaaatcgctctggaatggcatgaaagcaggcttaagaaatggtcttctggatatgcctctgacatccttgaggctttcaataaagatatatttccttttatcggcgatagagctatttcagaaattaagcctctggaactattgcaggttttgaggaagatggaggccaggggagcaacagagaaagccaaaaaagtacgccaacgctgtggggaggtttttcgctatgccatagttacagggcgtgctgagtataaccctgcccctgacctaagcattgcgatgcaaggccatcagtcaaagcaccacccctttttaactgctgcagaactgccagctttcttcgaagctctatcgcaatattcaggtagtgagctggtggtgctagccgcgcatttgctaatactgacaggggttagaaccggtgagcttcgcgcagccagatgggaagagttcgatctccaccaggaaatttgggaaatacctgcagaaagaatgaaaatgcgccgtccgcatattgttcctttgcccaaacaagctatcgcagtactatctcgcatccatgaacttactggccgctatcctttggtcttccctggacgtaatgatccccgtaagactatgagtgaagccagtatcaatcaaatattcaagcgtattggttatcagggcaaagttactggccatggattccgccataccatgagtacgatcctgcacgaacaaggtttcaacacagcatggatagaaacacagctggcacacatagataagaacgctattcgcggcacttacaaccacgctcagtatcttgaggggcgtagagaaatgcttcagtggtatgccgactatttacaaaatcatggtagatga

SEQ ID NO: 456051 - DNA, 1023 bp, Serratia marcescens
gtgatacagagcaagttattgaaagtaaaaaaatggattgatttaaacgaagcagcgctgcgtctatcacttgccttagatgagcctgtaaatgctatggatctattagagttggggcttgatcaagaactaatattatcagtcaagcttccattagataagaaatttttagcaaaaaaaatgactgaaaaattaataccagttggtgaacgactcaaagagtttttcagattccagaatatcattatggggtcgggttgcgatgaaaatgatgatgtatataagaaagatgaactcgaatatataaatactaaatacatgcgttatctcgaagaagctcaagaaggaaattatacagaagagcaaagaacatttgattatttttgcaattccgtaatgtatcaggagtgggattatggtccaataaaatatcttgatgaaaatgtttatgaattgtcgatgttaggagcagaaggaatcgatattatgacgttgattcaagaaaataaaaatagagaaatggaagaattaacgaatctcaatggagtcatacttaggagtagagatggacaactctataatttacaagaaaaattcaatgaagaataccttcagaaaatgaatgaactcgctgatagtactaatgaagatgagtcttctaaaaacgagtctcctgagaaaaagtcttctgagaatgctcgcagagtaatcaaccgttttcacattgaggaatcacattacttccctgccggaggattacctgcaggttgtgaaattggtatatcacctgagaacttatcgaagtttgaattaaagttatcggatgaacattctataccctcaaaccaaatattgataactctcggtgcagcgcttaatacagtcacatcctctagagctaaaaaatggactcaaggtgatctggcatcgagtattgcagaacttaagatttcaaaacttggtgagcgtgttattaacgggattttttcagaggccaataaggcttttaaatcaaatagttaa

SEQ ID NO: 456052 - DNA, 255 bp, Serratia marcescens
atgtttctctttgccacgatttacatgtcgttcgctgccgcggagtccgggctattttgccacggcatgcaagacgagcagccgcaagatcgtgcgcaactggctgaaatgactgccaagaattatttcttcaactaccgctatccggatgactggagcgagagtccaaaactgaaaaatggccatttgcagcaagggcgtagctatctgattgcaggcgatcgcttggtagttgggccggaacagcgggtttag

SEQ ID NO: 456053 - DNA, 165 bp, Serratia marcescens
atgatgagtctggtggaacaactggcggcgtattaccgcgcatcgcgtacggcggaagttcagcatccgctttgccgctggtggctgccgcagggagaggtacgcgtggcctatttacgtgaattgctggaaccggcggccaaatcacccgccgaccggcactaa

SEQ ID NO: 456054 - DNA, 624 bp, Serratia marcescens
atgagtcacgtgatctatcgcatcgaagaaagcattatctttagtcctgaagatacaggcctttatcgacataaccacgctgatgatattgtcgccatttccagcgccgccgccagactgtttaccctactgatcaaaaataaagggcatatcgtcgagcgggataccatcctggaaaaggtttgggatgaatacggtctgcaggccagtaataataatctcaatcaatgcttgagtacattgcgacgcattatcaagaatatgggggtagacaaaaacattattgaaaccattcccaaagtcggtctgaggatctctcccgtcattcagattgaagaaatcaacctacacccggcaatgcaacccgcgtctggcgacccgccatcgcccggcagacatgccagaaaaaacattcccaaaacgcttttttaccccgctctgctcgctggcttgctattgacgctttcccttctcttcaatatttttcatctctataacaaccaccaaagcaagccagcaccgctttcatcatggaatcccccacaggaacagcgcgaacactgcgccatcctgccggcggaaacctcgttgctatcaacggtatctttccgtccaccccactga

SEQ ID NO: 456055 - DNA, 198 bp, Serratia marcescens
atgttaagcaccggtcccgcgacgtatacgatcgcagtgccggtggtgttatcgcgtaaacataaggaaaaaagcggcgatgcgggcgggaatcaggcgcgaagttttctgcgccagattttccacagagaaatgcaaacgacggcgacaatcgccgccaggttcagcgcgatggcaaccggtaaatacgccagatag

SEQ ID NO: 456056 - DNA, 666 bp, Serratia marcescens
atgcaaagtgaacgttttaccgatggccataatattattctgggcggtgatggtaatgacaccatcaccacgctccatccggttgacctcaacaatccggcggatggcgtcagcgtcgtgccggtcaacgatgttatttatggcggtgagggcgacgatcgcatcgatgtcatggggcagaacttccgggtgaagggggacgccggcaacgatgatattatggttcgcctgatgctgttggcgccgagtgataacggcaaaattgacggcggcgccgggaacgacatgattatttcctcgtcaatgggcggtgatacgctgaccggcggtgaaggtaacgacaccttcttttatgaatgggagctggtaagctcagctgacgaccccgatgtgattaccgatttcaccttcaatgaccaggaacaggacaaaatagatttatcaaagatggacgatctctgcgcctatgactatgatggcaagccctcaaatctgacgtttattggctataacgaatttagtcgtcatggttcagaagtacggttggttcataccgaagaggggactaatgttgaggttattccaggcacctctttctacgatccggtgattatccagttagccggtgtgacacaggagctgacgcaagaggcgtttattctttga

SEQ ID NO: 456057 - DNA, 1257 bp, Serratia marcescens
atgctttgtaaactaagcaccgccaacctggcagttattgcttttttgttcgccattatcgccgcatcaaccagtttgaccgatagtacgattactcggaatgcattttatttggcaataacgttttccgtggccgctgtcatattcaaacggccacttactttcccacgtagtgcttgttatatagctattgccgtactctgtgtagggctaagtcaactagtgtggctctggcgtttccccgcgtcgggtgtgctggaaatcaataaggaataccttaatagcgcgatacgcctgctgtgtggagcggtgctgattatgaccctagcccccttacgtgatcacataggtaaaaaatcccacttggtggctaacttgctcttaatagcaggtttcttttatgcatccggcgttggtctgtactcacataaaactaaccctgacgagcggctagagattaatactgtcgctaccatgacagcatatatttacatgttacaatcgctgctcaccgtatacgtcacagccaatatgacatggcgttataaatccatcgccattgttattgaaatactacttagcctttgggtcattttgttaacagaaacacgagcggcgctcctgtgttatccagtatttttattattattcttcttccataggcgccattgctcgcccagaaaaataataatatcttgtttaattgccgcctctgctgcgataactacatacctcttgttctccgcagcgactgagcgattagcaagcaccatcaatgaactgagcaactatcagcaaggtaatggtaattcctccattggagggcgcattagcctgtggaaagcagggattcatacgatcgagcaaaaccctaatgggcaaggtgagtccgcacggctggaaatggtaacccagtatatcgatcatcacgaaggcggtaatccagaagcgctgcgtaatactgtctatcacctccacaatgatttcattgaagccggttcgctacaaggtatcactggcatcattgcgctattactgttttatattttttctgtcctcggcagcatcaaacattcccataccaaagcagttctgctgttgctcttgctgccaacgtttgttattggcatggtagatacactgtttatcgatcatcgctatgtaacaaatttaacgctaatgttggctatctatctttgcctacaattctctgggcaaaacaacacagatgcccatgcacgagaaaaccgtatctaa

SEQ ID NO: 456058 - DNA, 1026 bp, Serratia marcescens
atggctattttagttaccggaggtgccgggtacattggctcacataccgtccttagcttgttggagcgtaatgaagacgtcattgtgatcgacaacctgtctaatgcttccgaagtttcacttcagcgggtgatcgacctcacgggcaaagaggtaacgttctaccgccaagatatcatggacagggaagcgttggcgcacatattcgccacacacgatattttgacggtgattcattttgcaggtctaaaagcagttggtgaatcagtagaaaaaccgcttgaatactatcaaaacaatgtcgccggcacgctaattctgcttgaagaaatgcgcaaggctggcgtacgccgattcatttttagctcctctgctaccgtatacggaaagccaaaacagatcccgttgtttgaaacctcagaaattggcggtacaactaacccctatggctcctctaaattgatggttgaacagattctgcaagatttcgccaaggcagaacctgaattttccatcacgattttgcgctatttcaaccctgtgggagcccatccatcaggcctgatcggtgaagatcctcaaggtatccctaataatcttatgccctatattacccaggtggccatcggtaaattggaaagattagcggtatttggcaacgactacccgacccctgacggtaccggcgtgcgtgactatatccacgtaatggacctggctgaaggacatttgaaagctatagatcatattaacgatcataagggtgttgccgtgtataacctcggcaccggggaaggctactctgtattacagatgctgaaaatgtttgaacatgtatcaggccgccaagtaccttaccaaattgtttctcgccggcctggagatattgccgaatgttgggcggatacgtctttggcagcaaaagagctgggctggaaggcgcagcgaggtttacaagacatgatgcgtgatgcctggaactggcaacaaaaaaacccgcagggttactcttctaaagctggataa

SEQ ID NO: 456059 - DNA, 189 bp, Serratia marcescens
atggttaggaacattctgaatacaaatactattttgctctttgaccgcgttaaaaaaataattaccctgctagttatcctgcatggtttcgctatttattaccataaacagacgaggttatttaacgtttccgcgaaccgtcaacgtggccgcctcttttccccgtccaccgccgacggccttatttaa

SEQ ID NO: 456060 - DNA, 579 bp, Serratia marcescens
gtggatatgctgttaacgccccccggggctgtcgacagggcagccactctgcacggcagtgactgctacagcctgtacggcctgtataaactactgatggagatgtttgccgaggatgcctcgctggacagacatctgccggatatctgggtgctgaccgggatccaggatatttttccgtatatccgtcagagccgggaaagggaaagcatcgtatttggtgatgagcgccactgccggctgctgtcaggactgccgagaacgaggaagtgctattttatcaatgcgtcgctgccgctgtcggagctgaaaaagagcgtccgtttgatcatccggcagggcttttactgccggacgctgaacgagagcgccggccatgacgtgagaaccttcccgaaagggacacgcagtacgctgcgtatgttgctggaaggggtagcgcccggtcaggtggcgcaggcgtgcaacacaacggtgaggctggtgagcctgcacaagcgcagcgtcatgcggcaactgaatgtgaacagcacgcaggagttgatattcaagtcccggcttctggggttggagtggtga

SEQ ID NO: 456061 - DNA, 1008 bp, Serratia marcescens
atgtttgcgactaaattaagcggctattctgccgttgggattgctatgttatgcgttgccggttctgcctattctgccagccaggatcttgcagtgaaaaccgttacggtaccctcctggaatattatcactgccaccatggataactttattcctcttgttaatggggaagataatccgtttgtagtgaaacagatttgtgatttggcgcgaggcgataaatcccagcaggaagttaacgatttcttgctgaagaataaaataaatccagaaaatctgcgtaagtctgacgggccggagtcattattagttaacggtgatttgcgtcgtcaacaagcgtcatgcatcggttatttatcttcttttgcgcttcggccgatagatatcgcagcttacattaaaaataccgacgtgtcggtgaatgatgaccatgctaataaaaccgtgaaatcgcaagtgcagaaggaaaagcaagaaaatagcagctctattatggatttcttccgcctgtcttcacggaaggaaagccagccagtggagaaagagaatgacgtcccgccagcgaaaaaagaagtgcggcagacatttaatcagactcagtttattgccgatgccaggctgaaggtggcagtgactgccgcaacggcccagttgtatgcggtcatcgctgcgaatatcaaaggaaacgggccaacaacgtggcaggggtatcagcagcgaataacatctgtgattgaaaactatgcgcctgaatatttcgccagtattaaacagaatctgcaggcaggggagaggacgcagtttgtactggaaaacgtggcattggccggctttacgatgtctggctctgacggtagtcggctgattcaggatggtagcaatattcagctggtatccagaggtgtaccgtggtttggcgcaggcaaggtgtttggtaatcaacacaatgtcgaggtggtgatcattaaggatgcgcagaaaaaagggacgaaaaaatcgagaaaatga

SEQ ID NO: 456062 - DNA, 804 bp, Serratia marcescens
atgcgatcttttaaatctatttattgggcaccgcttattgccagcgttgttctcctgtctgcctgtacccgttctgtcagtgatgttgattctcgtggttctacccgtcagccaatcttccccgcggtaggaactacggtcagtgatcagggcatttttgttaatgtgaataatttaaagcaaataagaacagggttaacgaaatcccagttgcgtcatttaatcggctcgccgcattttaaagagggcatgctgcgggtaaaagaatgggactatatcttccattttaccaaaaaagataacagggtaatgacctgtcagtataaagtattgtttgattctgacatgctggcgagaaacttttactataaacctgccgattgtctgtcgcaggtggaagctgggaatgagccggagaaaagaaaatatagggagttaaatgccgaagcgttatttgcattctccagcgccaagctcagcgcatccgggcaggaacgcatacggcagctggctcgtcatctgatgggcgatacgttgaatggtaagcgtattgttgtaaccggccataccgatcgtatcggtaactctgcagaaaatctgcagctttctttgcagcgggcggtatcggtaagactcgcgctaatccagaatggcgtaccggccgctatgattgacgtgcgcggtatgggtgacacgatgccaaaagtccagtgctccggcggtaaatcccccgccatcattcgttgcctggcgccgaaccgccgcattactgttgatattattgattatacttccggggagtaa

SEQ ID NO: 456063 - DNA, 3972 bp, Serratia marcescens
atggatttcagaggacataaatataattttgccgggggagttccgggctcgagcgtgtctattggtaatgccaccacggggctgaccaggacgattaccggggttgcggcaggcaggatcggtaatacaagtacggatgctgttaacggttcgcaattattcgcaactcatgaggcgatcaataatctggctctggaaggggtgaacctgaagggcaataccggttcgggtcattttaatctgggcgctacgatgagcgttctcggaggggcgacgacggcgggcgcctacagcaacggaaatctccgcacggaggtggatgcgaaaggcaacctgaatatcctgctggcaaacgctccgaaatttggcggtgtgacgatcaacgacggcggaaaaatcaccggcgtgaaggcgggcactgcggataccgacgcggtgaatgtgtcgcagctgacctcggcgaagggagagctgaccgctgcggggttgaacctgaagggcaatgcggggacaagccaccttaatctgggcgctacgatgagcgttcttggtggggcgacaacggcgggcgcctacagcaacggaaacctccgtacggaggcggatgcgaaaggcaacctgaatatcctgctggcgaatgccccgaaatttggcgacgtaacgatcaacgacggcggaaaaatcaccggcgtgaaagcgggggctgcggataccgacgcggtgaacctggcgcagctgaacagcgtggcaaaggtggcgaatgcgggctggaacgtgacggacgccgggggtcatacggcgaatatcgggccggggggcaaattggcgttcacatcaggcgatggcaacatcacggtggcgcagacgggcaaagataacgcgggacaggtgggcattacgttgaaccgcgctctgaagttggacagcgtgaccaccgggcagacggtcatcaacaacagcggtgtgcaggtgggtaagaatatcgccctgggcagcacggggctgacgattaccggcggcccgagcgtgacgagcaatggcatcaatgctgggggtaagaaaatcaccaatgtggctgatggtacggaagccaaagatgcggtgaacctgtcgcaactgaacagcgtagccggcgtggcgaaagccggctggaaggtaacggacgccggagggaatgcggcgaagattggccccggcggtgagctgaaattcacgggcgatgacaacatcacggtggcgcaaacgggcaaggacaatgcgggccagatgggcattacgctgaaccgcgatctgacgctgaacagcgtgaccaccgggcagacggtcatcaacaacggcggcgtgcaggtgggtaacgatgtcgccctgggcaacacggggctgacgattaaagacggcccaagcgtgacgatcaacggtatcaatgccggcggcgataaaatcaccaatgtggcggacggtaccgacgctaacgatgcggcgaacatgtcgcagctggaggcggcgaaggaagcgctgaccacggcgggcctgaacctgaaaggcaacagcggtgagggccatctcaacctgggcgatacgctgaacattcggggaggcggcaccacggcaggcagctacagcagcggcaacctccgcacggaagtggatgcgcagggtaatctgcatatccagctggcggatgccccgaaatttggcaacgtgacgatcaacgacgacggaaaaatcaccggcgtgaaagcgggcactgcggataccgacgcggtgaacctggcgcagctgaacggcgtagccggtgtggcgaatgccggctggaacgtgacggacgccggggacaatctggtgaatattggccccggcggtgaactgaaattcacgggtgatgacaacatcgcggtggcgcaaacgggcaaggacaatgcgggccagatgggcattacgctgaaccgcgatctgacgctgaacagcgtgaccaccgggcagacggtcatcaacaacggcggcgtgcaggtgggtaacgatgtcatgctgggcaacacggggctaacgattgtcggcggtccgagcgtgacgatcaatggtatcgatgcgggtggcgataaaatcaccaatttggcggacggtgccgacgctaacgatgcggcgaacatgtcgcagctggaggcggcgaaggaagcgctgaccacggcgggcctgaacctgaaaggcaacagcggtgagggccatctcaacctgggcgatacgctgaacattcggggtgacggcaccaccgcaggcagctacagcagcggcaacctccgcacggaagtggatgcgcagggtaatctgcatatccagctggcggatgccccgaaatttggcaacgtgacgatcaacgacgacggaaaaatcaccggcgtgaaagcgggcactgcggataccgacgcggtgaacctggcgcagctgaatggcgtagccagtgtggcgaatgccggctggaatgtgacggacgccgggggcaatctggtgaatattggcccgggcggtgaactgaaattcacgggtgatgacaacatcacggtggcgcagacgggcgtggataatgcgggccagatgggcattacgctgaaccgcgatctgacgctgaacagcgtgaccaccgggcagacggtcattaacaacaacggcgtacaggtgggtgaagatgtcatgctgggcaacacggggctgacgattgtcggcggtccgagcgtgacgatcaatggtatcgatgccggcggcaagaaaatcactaatgtagcggcaggcactgatgacacggatgcggttaacgtctctcaactgaatgctatgggagagaatgttaataatatttactacaaggggacgaagtatttccacgcaaactcaaccggcgcggattctgtcgcatcgggaatgaacgcgattgcgatcggccagaatgcggtggcatccggggacaatgcggtagccaacgggcatagcgcggtagcatctggcgcgggagccgtggctgagggacataatgccaaagcaagcggctccgcttcagtggctgttggtgaacattctttcgccggcgcagaaaactctgtcgcattgggagccggagccattgtcaccgaagaggcgaaaaattctgtcgcattgggctcaggttccgtcgccgatcgggaaaattcggtgtctgtcggcgccgagggggccgagcggcaggtgaccaatgtcgctgccggcacaaaagataccgatgcggtgaacctcagtcagttaaaagacgtcggggaacaggtcagcagtgtgggaaatacggtaaataatatttcccagggtaaggaaggtatgttccaggtgaataatacccataattactctaaaccgatgccggttggcgaaaacgccattgctggcggtgccggcgcacaggcctcaggcaacaatagtatggctgtcggtaataattcctctgcatcgatggaaaacagtatggcattggggaatggtgcatcctcaacgtcaaaaaacgcggtcgcacttggggccaactcggtggcggacagggagaattcagtgtctgtcggcgctgccggggctgaacgacagattacccatgtggctgcggggactaaagataccgatgcggtgaatgttagccaactgaaggagtccagcactattaacaagaattacacggataataagtttggacagctcagaaatatggttgaaaagcagaataatacgctaagagccggtattgccggcgccatggcgatggcgggcctgcctcaggcttatcagcctggcgcgagtatggtgggcctgtctggcggtacttataaaggcgaatcggccatggccttggggatttccaccgtttctgataacggcaagtgggtagggaaattctcgggaagcacaaacagccaaggggattttggcgcctctgttggcatcggctatcagtggtaa

SEQ ID NO: 456064 - DNA, 597 bp, Serratia marcescens
atgtcagggttattacttgtgaaaatagtgttattcattttagtcttgttgattctttggggagttagcaggtttgtttttatttgtttttcatttttaaagataaaagcaaacacggcaacgcattgttactatcatattatgtattcggagttgctctgtggactggatgatattctaaaaaacaacgatcggattgctaattttaaccggttacgtacagagtatatgaaatgcctgtctttttgtgatgtaaaattagagcagtctgtcaggaactatttgctggcattgcttgagtctattcagaacaacaaaagtctgaatgacgaagaacattgccggttccagtctttgattgttaatgatctgcgtaaagcgcgcggcggcaaagcgttgggctcccttgcgatgattcgtgcgcttaaacaacaaaaagataataaaaatcaaaaaagaaagagcaatatcaatctggcgggagagtcagtaatgagtatacattttgattttgatacctacagcaacgcaataaagaacagagtattgcgcctgaataccccttctgaatttgtacagcagccctttatccggtga

SEQ ID NO: 456065 - DNA, 966 bp, Serratia marcescens
atgaaccttacttgtaaggctgtactgatcgttattttttctttgctattttcaggctgtcgggatattacgcccgatacattttctggttatgccagcggcgaatttatctatctttcttatcaggccagtgaaaaaattgaggaagtcttggtcgataaaggcgactgggtagagaagggacaacctttggtcaacatggagtcctttaacgctgagaacgcgttacgtattgcagagaaaaactatatggcggaacgtgcgttgttgcaggacttgcgctctggcgaacgtgacaaagaattggacgtggtgcgttcgcagcttgaacgcgcgcgtgccgctgccaaactggcaaagcgccagctggaaagaagccgctctctttatgccagccatgttatctccgccacggagtgggatggtatagaggcggactatgcccagaaggctgcgcaggtgaatgaactggcgcatcaactgacggccaaggcgttgccggcaaggcaggagcgcattaatagccagtcggcgcaggttgcatccgccagactgcagctggataaggcgcgttgggatttgctgcaaagccgcattaccgccccgcagtcggcattggtctatgacgttatttatcgtcccggcgagcgtcccgtcgcggggcgaccgattatcagtctgttgccgccggaaaatatcaaggtcagattctttgtacctgaaaaaggccttgctgcgctcagtgtggggatgcaggttgatattttgtgcgacgggtgcgagcagccgattgcggggaaaattcattatatcagcccgcaggcggaatactcgccaccggttatttacagcaccgagcgtcgtgaaaaactggtgtttatggttgaagcgcgtccggagcgtgcactggcgcaactgatgaagattggccagccggtgcaggtgaggctcgctcataatgaatga

SEQ ID NO: 456066 - DNA, 1683 bp, Serratia marcescens
atggatacaattggcagggttattgaggagtttttcccagggcgggatgtttctcctcgccggcgtaagttaattaaatgggtgtttggcgaagaaaaaattgcgttcgtattacaaaaagccaaaggaaagcaagggattgactggattgattcagttgtcgataccctacagttgcgctttgaggtgcacagcggcgattatgataatatccccagcaaggggccgctgattgtggtttccaatcatcctacggttattgatgggctagcgttaataagcacgatttcacgtgtgcgtaaagatgttaaaataattgctaaccatgttttaacttttctgtttcctgcaataaaagatatctctatcggcgtcagaaatatgcacggcaagatgagccaccgacaattcaaagagatgaatgaccatctggaaagcgggggggttctgattatctgtccggccggacgtctggccagtctgtcgctgggcgggctgcgggagtcgccgtggcatccggggtttatccacttggcgcgccgtaatcaggcaacgttgttgccggtgcatattcgcggaatcaacagcgtctggtattacatggcggcgctcgcctggcgtcctctatccaacctgatgattttccgtgaaatagccaggcaccaaggcactacgctacgtatgcggatttgtcagcagatcggtatattggggggtaaaaagggggcggatgagccgctggaggaggtggccgccgattgtcgggcccatctgctgagagtcggtaagggcaagacagggttggtgcccacgaaggcgcccctgggcgggccggagcagagaagcctgctggtgaatgcattaaaccgctgcgaggtattgaaaacgctcggcgatggtaaacaagtctatctttaccgctatcagggtgaagcgtatgcgccgattttgctggagttggggcggttacgggaaaccacgttccgcgctttggagatgggaaccggtcagaaacgtgataatgacgtttatgatttggattattatcacgtgattctctgggatccgcaggcgttggaaattatcggtgcttaccgcattgtgccggcaggtgaacagatcgccaggcgcggtgtagaggggctgtatagttataccttattcaaatataccgaaccgctgacggatgacgttgccgaaagttttgaggtcggtcgtggatttattcagcgccaatatcaaaaaaccaatgcgctggatgcgttatggaaaggtattttttgttttgcccgacgttaccccgattataaaaatttattaggggtgttaaccattcctaaaaactattctgttacagcacagcgattgatcattagcttttatcaatgctatttttccggacagcaggggaatgacctgatgacgtggtcagacagcccacccattacgtttgccggcgatgattttcgtgcagactggaaacgtctgaacatattgctgggcgaggccggttatcaattgccgtggccatttaaacagatggcgcgctggttttatcttggcggttcagtgttgattggttttagagacgatcagagctttaattccatcgccggtctgagtatttgcaagctggcgtcgctgaagaaaagttaccaatcccattatattgagacggcgtaa

SEQ ID NO: 456067 - DNA, 303 bp, Serratia marcescens
atgatcatgctcatctaccgcattgtttctactttcctggcggtagttttacgctcggggaaaatcgcgctgcgaaaacaaggccctattattatttcccgacgggtttcctatctggcctttttcgtatccgcctatcagtttgtcatcgttgccaacggcaacgcatcattcttccccgaaacagccgcctggatgcagggtcataatatcttgagattctccgcgttatttttttccgtgctggctgctgctgctgctgctgtgtcattccacccacaaagaagccgcagtaagctttaa

SEQ ID NO: 456068 - DNA, 816 bp, Serratia marcescens
gtggagcacgccaatcagacgttaagcccgatatttgataaggagaaggagcagaaccggctgaaggaagcacagctgattggcgaaattggcagccaactgatgaatattgcagagacggaaggtgcgatagcagcgacgaaagaagccagggagaaacagaaagacccggctgcattggcagcggccagggaaaaactggagaaagaaggcaagccgacgacggcggaagcgattcagaaacaggcctatgaaacggcatacaatcaggcgctgaatgactctggttttggtacgggcggcaaggtacagcgtgcaatgcaggcggcgacagcggtcattcaggggctggtcggcggagacctgacgaaggcgatagcgggcggttcagcgccgtatattgcgaatatcatcggcagcagcggtctggatgatgcaggcaaggtactggcgcacgccgcagtgaatgccgcattggcggcggcgcagggcaataatgcgctggttggtgcaggtggcgctgccacgggtgagcttattgggatgatcgcgattaatgcgtacggcaggccggtaagtgaactgagtgagacagaaaaacagacggtgtcggcactggccacgctggcgtcaggcctggcgggaggattgattggcggcagcacagctgatactgtaagtatcccgcataatcgtgccattcacattgagagatctcccagcatacacatcttaccaatgaaggagatcgccatgtgtaaagcccgtgttactaggcatgaaatcagcaccgtacaccgtaattggattgcctga

SEQ ID NO: 456069 - DNA, 336 bp, Serratia marcescens
ttgcgcgaagcccgtaacctcagccaggtccggctttctgagctgcttggtgcggacccgcgagcctacaaccgctgggaaaaaggtgccaccgcacctcacctggagacggtgattaagattgccgatgtgttgcaggtaacgctggatgagctggtcggccgccaggccgtgtcagaagaggtgaagatccgcaaccatacgctgcatgccctgtggcagaaggcggatctgttgccggactccgatcagcaggcgctgatcgccgtgctggacagttttgtcaagaagtcgatggttgaacaggctataggttttaacagtaacagacgttaa

SEQ ID NO: 456070 - DNA, 219 bp, Serratia marcescens
atggctgaacacgatactaagccagaagtgaggatttccaaaacgttacggcagctgaagatcggatataccagcatccggcacgaggaccgccgcactggcagaaccacccgctacagccgctcgcccagcctgcatctcaagggtaactggctggcagaggcagggttcgggaccgatacgccggttaccgtggccgtggaacagggcaactggtga

SEQ ID NO: 456071 - DNA, 798 bp, Serratia marcescens
gtgtctgagaagagcgagcttgagctggcgaagcagaaactgaacagtagtgacccggcagagcgtgaaaaggcgcagcaggatgtggcctgcttggtagagaaagacatcagcagcgataaggaagtgatcgatgcctgtggcaatggcaatgctggaagtgcggcttgtgcgagtgcaagactgaaggttatcgcgacgaaaggtgagtacgaaaccgggcagtacaataataaagtcagtgacatgtactcggatgcctacgggcagatagtgaacctgctaaatatcaccagtgttgatgcacagaatcagcagcaggtgaaagatgcaatggtgaattatgccatgcagcagcttggtgtggataaggccacggcagagcagtacgtatcgacgtatgatgggatgaagatggttgctgcttcattatctccggtacttggcaaagcagttggtgacaagttaaccggaatggtgaataaggctaatcagtacccttcaggaattaactttaaaatcaatcaaccagagcatctggcacaacttgatggatattcccagaagaagggtattactggtgcacataatgctgatgctttcaacaaagctgttgctgataatggtgtgaagattatatctcaggaaaaagatcagaacggtattacgcatgttaagtatcaaattcctgctaaagatagagcaggtaatatagtcggttataaaaatgatgttttagaaaagacgatttatgttccaaaaatatttactgatgaaaaaatactacagttgggctaa

SEQ ID NO: 456072 - DNA, 633 bp, Serratia marcescens
gtggtatcggcgggtgttgctggcgtcgccggtggtgcgatgatagttgctgcgtcacctgaaatagcagctgcagcgaaagccgcactggaaggctgcaaggcagcgccagcaatttgtctgaacaatgccggattgcaggtagctgaagcgatgacaccgggaggtgttggcgtagctggagcgattggggttggtaagacagcggttgaggcgacggcagcgaaagttgaggctgttgcagctaacgcagtaaagaatggccaattaccaacagggactgtttttgactcaattaaaggaactcagccggtgtatcctggctcggtcattccaaaatcttttgaaatggcattaccgaacggccaaaaagtatgggttcacggaaatgctaccgagcatatggcagaatatgcagcatcaaaagctgttacgcatacacctgaagctgtaaggcttgccagtcaggaagagttgagaagcttccaggcagctgtaaatactgcaacgaaaaataatatgccatatggtgagagaattaccgttgatggctggcaattggaaattaagccacctcgcgctgctggcgagttgccaacaattatccatgctcgttacttggggtcacattaa

SEQ ID NO: 456073 - DNA, 1020 bp, Serratia marcescens
gtgagcgcgctgagccagttggcggcaggacttgcgggcggactggtgacgggcgatactgcaggtggcgtgacggcggcacagaccgggaaaaatgcggttgagaataactatctgagcagcacggagaagagccgtcagacggagctgaaccacaagcagaacctgacgccgcaggagcagaaagagaaagacatgctgaaccgcaaggatgcggaaaccagtaaggcgctggttgatgcctgtatgagtggcagcgctgcggcctgtagcgccgcccggcaggatgcgctggagaagcagggcacttatcagaatctgggttaccagaatcagaaggaagcgcaggaaggttatcagcagatacagcagttgctgaatggcaccagtccggaagcgaagcagacgcaggagctgtttaacggaatggtggcggcttatatgcgcaccggtatgagtgaagatgcggctaaatctgcggtgggctaccagcttagtgcgatgtatatcatcggagggatcgcgggtatcggggccggtaaagcggttgatgaaggattaacaccgggagtgaaaccatcgacgccgtcgacgaagcccggagccggtggtactcaggcagaaagtaagccatcaagtggagcagagaacgctgcgacatacccgaaactgaaagacgacttggtacaacagaatctggctaatatagcgaagcaggatccgaggctggcggcagcggttcagggcgataacggcaaactgaattatggcgttggttccggcaccagagctgaagctgatcgattaggccaaatctgggttggtgatggtgcaaaaccgaccagtgatggaacaggcctaatgagtgctgatggaacgcgtgtgtatcgctaccctgctccgaagaaaaatagcccacatgcaacaacaggtgttcaagctaactttgaaacttttaaaataaaccctgctacaggtgacaaagttaaggtcggcaacggacacttaaatatacaatag

SEQ ID NO: 456074 - DNA, 384 bp, Serratia marcescens
atggatataattatgaaatttttacatatcatcattgtagcggttgttattattgcaataggttattcccttgtcagaaaccttataagtaagaatgttgaaaaagagatactggataacccatgttatactgaagcaactatcgtagatattacccccgggactccatcaaatattggcattgttagtatccatgttggttaccgcttcacaacagaaactggggatacttttgaaaaggatgatgagctaataaacataaaaacaatggatttacaaaaatatcaagtgggatccgggatacctattgtttatgctagaaatgaaccatcaaaaaacatgttgaatatgagggatgcgatgaaagatttcaagcgaaagtaa

SEQ ID NO: 456075 - DNA, 252 bp, Serratia marcescens
atgaaaagtggtcaagaagtggaggccatagtgattagtgcaaggccacatgataaccaaactgctgatgggcgtctgtttctttctttattagtcgagttcaccgttgggggtgaaaagatcgctgccaataaagatgttaatgtttcggtgttttattctgaagaatataagccaggtaaagtaattactataaaatatcaaaggagtaatccgcagaatatcattgttgttggcaatgttaataactag

SEQ ID NO: 456076 - DNA, 936 bp, Serratia marcescens
atggccccttttaattcgcaagaagtcatagaagagagaataaatcaagtagatttatatggttacttggttggctttgatttagatgatcaagggattccattttatcgcctagatcctttagtaaaaaaaatcttatccgcactacacgagtttgcatatggatttcatgaaggtactcaaacaagtaacactgacacacttgaaaaaatagttgaagcggctaagtccgtttataaaatagatgcattccagaaagtcagagatctttattcaaactctggtgcactttccgatgatgtggccaataaatatcttcgacgaggcgagtttggtgaactaattctccatttaattcttagagattttcacgaaaccctgccactactctcgaaaatatattttaaagactcagttggacacaccgtacatggctttgatgccgtacatattgatcccagaaaaaaaacgctatggcttggagaatcaaaattatacatagaccctaaaaagggagtcagcgagctactaaaagatattgaagagcattttaaatttgattacctgaactcagaattcactcttatatctaaaaaaataaaacacttcgaaaatacccctattttagactactggctgaaaatactagcgtctggcggaaaattaattgataaattggataaaatacaaataccattattatgtacatacagttgcgattcattttccaaatatgacgatgaaaatagcgatgagtttaatatctactttaatgataaaatcaaagagataaaagagcattttgataaaaactacaaccacccattaaaaggcaaactaaatataatacttatgctgtttcctgtaaaaaacaaagtagaattagtcaaaactcttcataacaaactatcattaattcaacaaataggagattaa

SEQ ID NO: 456077 - DNA, 504 bp, Serratia marcescens
  misc_feature (481)..(490): n is a, c, g, or t
atggataatgatattttcaaccaaacgtttgaagagtataaaaaatgtgcatccctaattacaagtaatgaagatctcggtcgagataggcttatacagattttagaaaacagaagtgactacgcccctgagttagatatgattttggcagacttagtggagtcagtagggttttatccctatttagaaaaagaaggtttagtcgttagttccatatcacaaaaaataagaaaagagacaaatcggtctaataatattgatgggaaattattccatgatgaacaaaagcatttgttggggttaattgaatctgggaaaaatattattgccagtgcacctacgagctttggaaaaagcttgctaattgaagagattgtctcttcgaaaaaatatcgaaacatattaataatccagcctacactagcactattagatgaaactagaaaaaagttaactaaatattataatagttataagttannnnnnnnnnaagttaatagttag

SEQ ID NO: 456078 - DNA, 1851 bp, Serratia marcescens
atgataacgataaaaaatacgctgctggcggtggcttcctccgtcacggctttttccgtctgggcgcaagacaacgcagtagtcgacaacaatggcgaaaatctggtggtgtcggccaaccgttttccgcaacctgtctcttccgtattggcgccgacctcggtggtcacccgcaatgatatcgaccgctggcaggcaaaaagcctgaccgacgtgatgcgtcgactgccaggggtcgatgtcggtcagaacggtggcctggggcaaaaaagctcgctgtttatccgcggcaccaactccagccatgtgctgctgctgatcgacggtatccgcctgaatcaggccggcgtcagcggttcttccgatctgagccaaattcctctctcgctggtacagaaggtggaatatatccgcggcccgcgttcggcggtgtacggttccgacgccatcggcggcgtggtcaacattatcaccacccgtgaaaagaacggcaccacggtgtctgccggcgttggctctaacggctatcaggcctatgacgccgcgatgcagcaaccgttgggagataataccgtcgccaccctggccggtaactatacctataccaaagggtatgacgtggtggcatatggcagcagcgtgccgcagcccgatcgtgatggctttatgagtaaatcgttgtatggggctgttgatcaccagttcagcgaggcactcgttggttttgtccgtggttatggttacgaaaaccggactggatatgacaatttcaccgatattgacaccagtaaggtgtatagccagacctgggatagcggattgcgttatcaacagagcggctacgccacgcagctggtaggtagctatagccatagcaaagagtaccagtacgatccgcgtctggggatgcatgatggttcagccaacctggtagacgccgaacaatacaatctgcaatggggaaatactctgcagctggggcaggggacagtgagctctggcatcgactggcagcagcagaaaataaaacctgattcgaccagcgtgaacggcgagaaacgccagcacaatactggcatttatctgaccgcacagcaggtggtagggccggtgatgttagaaggtgccgtgcgtggcgacgatcattccgagtttggctggcatggtacctggcagaccagtgcggcgtgggagtttgtccaggggtatcgttttatcgtttcttatggcactgcgtttaaagcgccgaatatgagccagttgtatggccgatatggcagtaacgctaatttgaagccagaagagagcaaacagtgggaaggcggttttgaagggctgagcgggccggtgagctggcatgtttccgcttatcgtaatgatatcgataacctgattgatgctattgaagacaataattatgtgttttacaacgttgataaagtgacaattaaaggcgttgaggcaaccgcatcgtttgaaaccggtccgttaacccatcagttgggttacgactatgtggatgcgcgcaatgccaacaccaatgagttactgccgcgtcgcgccaaacagcaggtaaaatatgagctggactggcagatatacgatttagactgggcggtgacctatcattacctggggcaacgatacgataaagactacagcggctacccggcgcgcagcgtgaagctcggcggcgtcagcctgtgggatctcgcggtgtcgtatccggtcacatcacatctgacagttcgtggtagaattgccaacctgtttgataaagattatgagacggcatatggctacgctactccagggagagagtactaccttacaggaagctataccttctaa

SEQ ID NO: 456079 - DNA, 1137 bp, Serratia marcescens
atgaatatattaattattaatacattatataccccttttaaagtcggaggggcggaggtatctgtccaacttcttgcagaagaacttgctgcttcagggaataaggttcgcgttgtttgtctgcatgataaatatcaacgagagaaaagtatcattaatgatgtagaggtcgtatatttacctctgaaaaatgtatactggccttttgataacagtaaaaaagggaaggtgaaaaagatattgtggcatttgttcgacagctataatccattgatggctaaagcggttgaaagcgaactcgatgagtttaaacctgatgtagtacataccaataatgtgagtggattttcagttgcagtatgggatgccgtaaaacgtaaaaaaatcaggctggttcatactacacgcgattattatttattccaccataactgtacgctgtttaaaaacggcgaaaatatggatgtggtctcgaagaaaatcagggcgctttcggcaataaaacgttggagaagtaaaaatatcgatgtctttgtcggtattagtgattatattgctgagttgcataaatctaatggatatgcaaaaaatgcaaaatatacgcatatatataatccgatcaatagccatgttattgatagtgtgcccgcagagcaaattagggtcggttttattgggcgtttgaccgccgataaaggatttgccgacttttgccatatggcgaaagagacccggcagcacagcgatattacctattttgccgcagggcgcctggctggtaatgatgaaggtaaagctatgcagtgcttagctgaagaagccggcgtgaccttagtcggttttgttccagccgatgagtttttggctaatatcgatatgctattgctgccaaccagatggaacgaaccgtttggtcgggtagtggcggagggggcatcggcaggtaaacacgtatttgcttcctttacaggtggtatcaaagaaattgcagatttttatagtaatgtctatgagttaaacgaatttactccagagcggattcggacgttaaaaaatcagtcccccaagttgccggaaaataacccatttgatgtgatgacgcttgcgagctcttaccagactatttaccaaaagtag

SEQ ID NO: 456080 - DNA, 546 bp, Serratia marcescens
atgcagtggttgagttttgaactgaagacgtgctccaataagcgttttgttccatcagacggtagtgagcatgagtcaaggaacacaatttctcaggaattggtaatgatgaaatttgattcaatcctggtggtgtgtgtaggcaatatctgccgttcgcctaccggagaagctttattgagagagcgccttccctcaaagaaagtagcgtctgcaggcttgcatgcgttgtcaggccatggtgctgactctcatgcctgtttggctgcagagaaaaatggcgtttcgttatcgggccatgtggcgcagcaacttacttcctcactgtgtcacgagtacgatttgattttggtgatggagaaaaaacatattgatgccgttggtaatttagcgccagaagtgcgcggtaaaacaatgttgttcggacattggttaaaccaaatggaaatagatgatccatatcgcaaaagccaagaagcgtttgacagaactttccaacttttacttcgctcggccgataaatgggcaaaattattaacctcttaa

SEQ ID NO: 456081 - DNA, 633 bp, Serratia marcescens
  misc_feature (616)..(625): n is a, c, g, or t
atgagcgagctgagttatctggaaaaactgctggatggggttactgtggtatataagccactcagtgaagtgcttgtgcgaactaaaggcacgaagattacagctgctcagatgaaagaactacataaagacggttcccctctgaaaattttcgctggtggaagaacggttgcatttgtcgattttggtgatatacctgcgaaaaacatcaatagagaaccgtctattatcgttaaatctcgtggcgttattgaatttgagtattatgataaaccattttctcataaaaatgagatgtggtcttatcattcaaatactgattcaatacatatcaaatatatttatcattttctaaaaatgaacgagacttactttcagaatattggaagcaagatgcaaatgccacaaatctctacccctgatacggataagtttgaagtaccaattccctgcccaaacaacccggaaaagtccctggccatccagtctgaaatcgtccggattctggatacatttactgcgcttaccaccgagcttaccaccgagcttaccatgcgtaaaaaacagtacaactactatcgcgaccagttgctgagttttgatgatggtgaggttnnnnnnnnnngaggttga

SEQ ID NO: 456082 - DNA, 2088 bp, Serratia marcescens
atgaaggcaaaagaagccaagctgcttaattttctccagaccgcaccgcaactggtgatacctatttatcagcggatttactcttggggaattaaggagtgtcagcagctgtgggacgatattatccgctgcggccaggatgaagataatcaggggcactttatcggctcggtggtttatatcgaaaatggtctctattcggttacttctcagtcacctttgttaattattgatggccagcaacgcgtgacgactgtatctttactgatcgccgcactggctcaggcggtgggtgagcaggagtttatagaaggttttaatcaagcccagttgcgcggcttttatctgaccaacccgttgctgtcaggggaaaaacgttacaagcttattttgtcgcaaacggataatgaaacgctacgggcaatcatcgacaacaaacctcagccagagaactactctgtacgcgtgcaggagaattttgcgttctttcaggataagttgagagatgcgtcgatactagagaccgtatgtaaaggtctcagcaagctgattgtggttgatatctctcttcagcgtggtaatgacaacccacagcttatttttgaaagtatgaactccacggggaaaaagctcagtcaggccgacctgatacgtaactatatactgatggggttagagaacgaacgtcaaacggcgctatataatgattattggcgtaagatggagctgttgttcggccaggaagcatattcaacgcagttcgacgcctttatgcgtcattatctgacggtgaagacgcgagatatcccgaagattgatgatatttatgaagcgtttaagcaatatttttaccgtactcatcagacggtggagtcggtggttgccgatattcatcagtatgcggtttatttttgcgctatcgctttaggtgcggaaaaaaacaaagatctgaaagatatatttaaaaacatccgcgagctgaggatggatgttgcatatcctctgatgctagagctatatgccgactaccaacatggacgactcgcgctgagtgactttgccgaggcacttcgcctgatggaaagttacgtattccggcgggcggtatgcgctattcctaccaactcaatgaataaaacctttgctggcttgagcaaaaatctcgataaaaaacagtatctggaaagcctgaaagcggcatttatgctgctgccatcttatcgccgtttcccgaatgatgaggagtttaagaaggatatccaaacgcgtgatttgtataattttagaagccgcagttactggttaagacggttggaaaatcataatcataaagaacctattccggtagatgaatacaccattgagcacattatgccgcagtgcgataaccaacctgagaaagtacctgctgcgtggcgtgtatcactgggtgatgagtggcagcgcgtatgggagaattggcgccatacgttggggaatctgacgctgacaggttataacgctgagtacagcaatcgtccgtttgctgagaagcgtgatatggaaggtggtttcaaatatagccatttgcgcctgaatgatgggctggcttctttggccacatggaacgaagacaccattttattacgcgcgaagaaaatggctgaacaagcgagcaatgtttggccgagtgcaaagctttctgatgagattttggcacgttatcagccgcaaagtgaagctaatgtgacttatgggtttgaggatcacccacacttggcaaaatcacatgttcacgcgttatttgaagcgtttcgtaaagctacgctggctctcgacccttgtgtaaccgaggtgttcctgaaactttatattgcctacaaagctgaggtgaactttgtggatgtcgtgccacaggcgaagcggctgcgtttgtcactgaatattccttttgctgaaattaatgatccgcgagggttatgtaaggatgtcaccagcctcgggcgttggggcaatggcgatgttgaagtggggtttgagaagcttgaagacttaccctatatcatgtctctggttacgcaggcttttgaacgtcagatggataattaa

SEQ ID NO: 456083 - DNA, 876 bp, Serratia marcescens
atgaaaacaaaaatattgactgccgtaatgctgggagcactggcgacaagcgtgcaggccattgagaagccaatgaaaatcctgctggttaatgacgacggctgcgcatccatcggcaccacaagtctgcaggataagctgaccgccaagggatacgatgtctggctggtggcaccggccaccaaccagagcggcattggttccgccatcacctttaagcccggtaaaattttcaacgtcaaaaagacgggcgataagcgctactgcttcccgggcaccccggcggacgcgctggatttcggcctgtggggcgtactgcaaaacgcagcgcccgatctggtgatctccggcgttaacgacggtccgaacaccggtatggctcaggtgaactccggcaccgtcagcgccgcagcacgggcggtacgctacggttttcccgccatcgccgccagtatcggctaccgctttacgcaacaggaaatggataataactggccgagtacccatcaatactggccggacgccgtggactatgtggtcgacatggtggacaagctcaacagcgctcgccagcccggcaccgccctcctgccaaaaggctccggcctgagtatcaactacccgccgctgccggcgtcagaaataaaaggggtgcactatatcggcaacgaacagtacccgacgccgcagatcggttaccagctgcggcctgacggcacggcgcagcaaaccatgaaccctgccgcgctggaaccaacaaccgccgataacgacagcggctggctgaataaggggtatatcacctacaccctctttagcggctcctggaacgcaccgcagtttcaggcgcagtatgaggccctgttgggcaaataa

SEQ ID NO: 456084 - DNA, 126 bp, Serratia marcescens
atgcagctttattttgtgatgaggatcaataaatatggtgcaatgtgccatgtcatgcggtgctgtattttattcgccgcgtttagccgcaatgagcggcgcgtatgtattaacgaataccattaa

SEQ ID NO: 456085 - DNA, 1197 bp, Serratia marcescens
atgttgcacaacctgttaccctcaccaccagagcaccacccaaattacgattttcggtttattgatctttttgctggtatcggcggtatccgaaaaggatttgaagaaattggtgggcagtgtgtattcaccagtgaatggaataaagatgctgttcgcacttataaagcgaactggtattctgatccagaaaatcatacgttcaattcggatataagagaagtaactttaagtaacgatccatctgttaatgaagatgaagcatacagaaatattgatcatgagatccctgatcatgacgtactattagctggtttcccttgtcagcctttttctttagctggtgtttctaagaagaattcattggggcgtgctcatggttttgagtgtgatacacagggaactttattttttgatgttgcacgtataattgcggctaaaaaacctgctattttccttctggaaaatgtgaaaaaccttaagagccatgataaagggaaaacatttcgcgttattatgcaaacgttggatgaattaggatacgtggtatctgatgctgatcatattggggctaacgatcctaaagttattgacgggaaaaactttctccctcagcatcgtgagcgtatagtattggtaggttttagacgagatctaaacatccatggtggttttacattgaaggatgttcatcaatattttccggaaaaaagacccacttttggtgagttacttgatagtgatgtggatgctaaatacattttaacaccgtctttatggaagtatttatataattatgcaaaaaaacatcaggcgaagggaaatggatttggttttgggcttgtagcaccagaaaaaaaggatagcatcgcccgaaccttatcagcaagataccacaaggatggttctgaaattttaatcgatcgtggatggaataaggagttgggggaaaaagattttgacaatgaggaaaatcagaaaaatcgtccccgaagactgactcccagagaatgtgcccgtctgatgggatttgagcaaccctatgaaaaaaaattccgtatacctgtgtcagatacccaagcatatcgtcagtttggaaattctgttgttgtccctgttttctctgctgtagctaaactactgaagccttatataaataaagcagtcgggctaaaaaaaaataaagacgtcgcataa

SEQ ID NO: 456086 - DNA, 1242 bp, Serratia marcescens
atgagagaaatgtttgaacagttatctaatcactttgtatttgccgttgcaaagtatctttcagccgtcgatgttaatccgaaaaagtcaaaccagcatgagattggcggcttggtaaaagctgggtttgcaaaataccttccagttcccataagtggggataagatattcttcaaagctacgcttacttatatctctggagacgagtctgaacctgtaaattgtgaagataagttaacgtggtatgatactcgttataatcaaaagaatagatctcctgagtacagaatgtattataaaactaatgacgtatcatccttgatgaaggaaggagacttttttcttattgctaaacgtaacaatggtgatttattaattattattacaccatcaggtggtaccgttgagcttcaactaaaaaacttatttggtattgataacgttagtagtgaattttcatcatcttcaattcaaggtaagtctttgattcttcccgtaagaattttatttgaagatttgggaatagagctttcggagcctgcaagtgaaagtcaggagttacttgaaatattattggaacgttttcctgatggttttccaaaagctaaagatttttctgcttttgcaagagagagagtgcctggtgatcctatcggtgagcctgatgatactcttatgttatggcttgaacaagaagagatgttgttcagagcttatgaacgttttggtgtaaagaaaaaactcttagaagggtttggagctaagggcgatgatgtagatgatttcatcaatttttccctaagtgttcaaaacaggcgaaaatccagagtgggatttgcttttgagagccatcttaactatttgtttacgcagcatggtcttaagtttcaacaaggaacgtctaaaaatactacagaaaataaatctaaacctgattttttattccccgatttttccgcataccatgatctctcttttccgcaagaaaaactacgtctgcttggcgcaaaaacaacatgtaaagacagatggcgtcaagtgttggcagaaggagacagagtaagacgaaaacaccttgtgactattcaacccggaattagcgagcaacaactcatggaaatgaaaaataagtcgttacagctagttgttccgctgtctgtacaatcggcatacccaaaatcatgcattgaggatttacaatctattactggatttatttctgaggttaaagaaactcagtaa

SEQ ID NO: 456087 - DNA, 453 bp, Serratia marcescens
atgcctgatttctcccgttgcgcctttaccgaaggcagcgtcaagctgcctgacggctaccgcgatcgcagcgttaacgtgctgctggccggggatgatatttccccctctctgaatatttcccgtgatgccctgctggcggaagaaacgctgtcggattacatgacgcgtcagctggcgacgctggccgacggcctgaagggctgggtgcaaaaaagccgtgagccggcaacgctgggtaatggcgtgctgagcggcgaatgcgtgcacgccagctatatgcgcgacggcaaacgcatctggcagcgtcaggcggtgtttgccctgccgcagggacaggttctggtgtttacgctggcgcagccgcgcaagctgacggcgcaggatgaagcgctgttgcaacaggtattagccagctatcagccggcggcggacgccgcctcacaggcgtaa

SEQ ID NO: 456088 - DNA, 3294 bp, Serratia marcescens
atgctgctcgtacagcccgttgcgccggcttatcaggttgccccaggcgtcgtaacggtagaacagctgctgccagtgcgtcagccggttgtcccccagcggcgccggcggcaactgctcctccagcgcgcggctgacgctctgcgcgcccagcaggttgtccgccatgtcgtactgcaggcggtggcccggcttgccctgctgcgcctcgcggtgctgcagcaggcgtccttccgcatcgtagccgtagcggatttctccgcgcagcgcgtcgtcgacgccggctatctcgccgcgcccgctgtagtggtatacccgccacagcacgccgtcttccggcttcgtcagctgcccgtggctaaaaccgctgctctgccagctgcgccgccccagcgcgtcgtactgtcgccgctggtgcagcgccccctgcgtacgtccggtctcccggtgcaaccggtcgcggctgaactcgctcaccagctgctgattgaacttgatggcgctggcatggccggagccgtaatagagccactgcaaccggtcgccctgcggcagcgtcagcgcctgcaggttgcccagcgcgtcccactgatactgcagctcgccgttgacgccctgctcgctcagcaggttgccggcgcggtcgtaacgcagccggatgctgtccggctcgatgcccaacgccgcaccggcggcggtcggcgtacgcgtcagcgtcgtcagccgcccgccggcgtcgtagtcgtagcgccattcggcgctgtcggtggtgcgcgccgtcagctggcccgcctcatcaaagcggaagtgctgccgccgctctgccaccgcgccatcggcggccggtgcgccggtttccagcagcgtcgtcggcagcccgtcggcgccgtaatggtagtaacggcgctgcccgtccggccgctgttccacctgcaggcggcctgccgcgtcgtagctgaactggtagtcggcgccgttgccgttctccagccgcatcagccagccgcgcgggccgtagtgataacgacgcgtgcggttgatgcggtcggtaatgctgtccggcaggcccagcggggtgtactgccagcgcgtctcgctgccgagcgggtcccggtgcgcggccagctggccctgcgcgttccagtcaaactgctcgtcgctgccgtccggatggagcagctgttgcagccggccggcatcgtcccagcggtagcgggtcaggtggccttccgcatcggtgcggtgcgtcagctggcccaaggcgtcataggtgtaggcggtgacgctgccggaacagtcagtatggcgcgtcagctgcccctgtgcgttccagaccagctgcacctcgccgcccagcgcgtcggtgatgcgctccggcaggctctcttccgggtccgggtagtggtaatgcgtgctctgcccctgtgcgtccgtctgtctgaccaggcgcccctgctcgtcccagtgctgaaattcctggctgccgtcggggtaggtgaccgagaacagacggccgctgttgcgggagtactgataggtggtggtgcggcccagcgggtcggtctcgctcagcatgcggccgtacgcgtcccactcgctctggcgctgcgccccgcccggcagcaccacgctgcacagttcgccgcgcgcgtcgtagataagcccgtagcggcggccgtcatagtcggtgaactgcgcgacgttgtcgtcatcgtccagctgccacagcgcctgtttaccgtcgtcacgcaccgcccggcgcgtcccgctggcaacatcgtaatggatgtccagctgctcgccggcgctgttgcggtaggccaccacccgcggcaggccgtcaatctcctgccagcggtattcgttcagcaggccgttctggtcctgatggctgaccatcagcccgtcctgccagccaaaacgccgcgtcatctcgccggcgcggttgcggacggtaaccagttgcccgtcgtcgtcgtactcgtagctcgccagcacctgcgcgtcctggccgtgttgccacgctaccgccgccagccgcaccgcgccgccggtcgtcgtcaggtagcggcaggccagacgctgcccggcgctgtccaccagctcgctcagctgccccgcgtcgttgtagaacagcgaggtggcgttgccgaccgcatcggtcatcatgctcagccggctcggttgctgcgcctccagccgcggatagtgccacgcctgttcgctgacatcgaacacctgccagctgccgtcggcgtggtgcatcagccagcatttttccgcttcgcagtaggtcttgtggccgcgcggcaccctcgggaaggagacataatcgccggacggtgcgcgccacaccagcccctcctgccaggtctgcaggctgctctcccagaacaggctccagccgcgccccagcacgccctccgccgggttgccgctgcgccagtagcgctgccacgccaccggcaggcgcgacggcagcacaaagtccagctcgtcgtcgccgtcgagaaacttctgcccgctgaccacgtccagcggccgggcgataatgcccgtcgccgcggtggcggtcatcagcgcgccggcgcggcaggccacgcggccaagcttgttgatgcccggcgccttgctgagcatgcgcccgagcgcccccagcttgctggccgcaccgccgacgccgcctatcaggccggcgaacagcagcgtcaggtcagagattttatacagccagtcgggcacttccggtttgatgggcagcgtggtgacggtaccgccgccaatgcgcacatcgggcgagccggccatcacctgcgcgtcgcagttggtcttgtccccgctgcgcaccgccgggtaaccgttgataaacaccttgtccgagccctgcgccatctgcatgctcgggccgtcatcctcgcagaccacgcggctgacggtggcgatggccgccggtttgccgttgataaacacgttgccggagccggtcagtatcgtgcctttgggcgacagactgccggcgccggcggcggcaatgccgtcgcgcgccttggtggccagctcgccggaaaggtagcccaccgccaggctggcgccaatcagcagcacgccgacgcccacgcaggaggccgccagcccggcgacaaacaaggcgcccgccgccaccgcaccggcggcggcaatcaggccgccgataagcgtgccgccaatcatccctgccagcgcatgggaatggccgatgctgtccccgacgcgcgctgcttcacccatgttcctgctcctttattacgcctgtga

SEQ ID NO: 456089 - DNA, 252 bp, Serratia marcescens
atgctatttgcagcgagaaaaatcactccagttgtagcgatacagaaaattattgcctcgtatgttacgccccacacaagtgaggggcgtgtagcaccggcaaagagaacatcttttcctgatgccatgacgctctccttactggactacagcaatgattgcgtcggcaatagacgccgcaccaaataccagcacgataccgccgatagcaaacccggcattacggggttgaagacgtccggcccatgctaa

SEQ ID NO: 456090 - DNA, 255 bp, Serratia marcescens; identical to SEQ ID NO: 40476

SEQ ID NO: 456091 - DNA, 228 bp, Serratia marcescens
atgaactatgttgatattgcgcagcggtggcgcacagggaatgttgaacatgctgatacagggattgtgatgatttgggaaggtcaggtttatggttggaaaaattgccttcgtgacgcgcagcatgaacgccccggagtgattgctgttgatgtcgaaaataatgtttttgttgccgaaggtgggaatgattacgatggtgctaagtgttgggtggcacattcataa

SEQ ID NO: 456092 - DNA, 321 bp, Serratia marcescens
gtgtttgtattgatttttcacccggaagcacaacaggaaattttggatcttgatagtccaatgcaaggtaaagcgtttgctgcgctggataaacttgaggcccaaggtaatcagttgcgctatccacatacggatattattcaagatggcctttttgaattaagagcgggtaaaaaagatattacacgtaccttttttgcttttgctaaaggtaaaaagatatatatcttgcgcacgtttgttaaaaagacacctaggacgccaccggcagagatccaattagcattaaagagactggaggaactgacagatgaaagttaa

SEQ ID NO: 456093 - DNA, 522 bp, Serratia marcescens
atgaaaaagcgggatgctatctttttatcattgcttataggaaagcgattaatagcactgtctgcattgatttttgctatattgtcaactttccattacatccctaacgtcttattggatatagtgatccctcatataaattcagtgagggatacagatttaatcccaaatcgtttttctgatattgatgtaggtataagttttacattcataccttatgcatttttaatttttatttgttatccattcaattttatatttgtttccactttgataggggttggcggcgatttgttcgagttgttagctatccgtcgcgaattgggtgtgaatggatttaaaaaatataaagcgtttgcaaacataaaacgaaaaaaaatagaagctatttacgatgctcaagagcgccgcagggcatataaagaaaaacgccgggaagtaatgaaaagaaaatatggtggttctaattccggcgcaggtgctttattggccggtattttgttaggtatttttcttagctaa

SEQ ID NO: 456094 - DNA, 228 bp, Serratia marcescens
atgaaaaacaaagtaatgggatgggtaaataaattacctaatgttgaaggtacttttgttgaggttaagcgtaacgaaatttcggatctggttgctcaggcggatgaactgactaccagagctggccagttacgtgaacaggcttactttaaatccttgaagctggaagcggagatccgcactcattggtcttatcaagatgttgagaaggcaaaagcactaacttga

SEQ ID NO: 456095 - DNA, 240 bp, Serratia marcescens
atgaaaaatcgcatagtgctaatcagcggcgttatcgccgctttagtcctgattctttttctggcgtatccctacctgaaaagcagccaatcatttttggctgtagtagctatttgcgtcacgtttgcagtattggcattggctataccatccaacttatttagttggctgcgaggaaagagagatatgcccggattcatcaaaagcactttcataggcattttcaggagagcgaagtaa

SEQ ID NO: 456096 - DNA, 498 bp, Serratia marcescens
atgttggctcttctgagtcgggtctcaccagcattgagcaaaccaagtatagggaaagaattaacttcggcagctttatcttgtgggacgctattggtgtcagtattccttttggcttcgggaagcgttgctgttccttttaccggggggacgagttcagcagtggcttatttaggctatgccggcctagctgccagcgctttacagtgcggcaacggattgtatcgtgttaataaactatatgaaggaagagggaatgagttgacggctctggattctgagcagtggtatgttgcgactagtacggttctggatgtgatctctttggctagtgctggagcggcattaaaagaggctgctatgacctatcgtgctatgcggagagtttcgtcacgtagagcgttggactggcttaaaagtatgcccagaagcgaaagactgcggttaactgaaagtattattcgctcggaaaccctggtatttccaatcaagtattaa

SEQ ID NO: 456097 - DNA, 177 bp, Serratia marcescens
atgatattggaaaccggaacggtcaaaggaaacatctttgatgcctttttccaacgcgcgctcagcgatagctttacctactgctgctgctgcgtctttgttaccggaatacttcagttgctcagtgatagctttttctacagtagaagcggctaccagaacttcagaaccgtttga

SEQ ID NO: 456098 - DNA, 315 bp, Serratia marcescens
atggcagcgaaaatccgtcgtgatgacgaagttatcgtgcttaccgggaaagacaaaggtaaacgcggtaaagtgaaaaatgtcctgtctgcgggtaaggtcattgttgaaggtatcaacctggttaagaaacaccagaagccggttccggctctgaaccaaccaggcggcatcgttgaaaaagaagctgcaattcaggtttctaacgttgctatcttcaacgcggcaaccggcaaggctgaccgtgtaggctttagattcgaagacggtaaaaaagtccgtttcttcaagtctaacagcgaaactatcaagtaa

SEQ ID NO: 456099 - DNA, 603 bp, Serratia marcescens
atgttgcattttgatattcaggcattacgtcaggtcgttgctgaagtgaaggcaaatgattgtgggctggtgttcgtcaaggatgagggcatttacctgatgtcatccattggtgaacgtaccgaatcgggaagtgccaagtacctggtttatgctgatggctgtaatcctcaaaaggatgaagcctggtatgaaacatctcgcatgttggttggcggagatgattttcaagaacggcttgagctgggttacgacagcatagcgcagatactctcgggcgattttgaactttggatgcatgtgctgcatgacaggatccatatacatgttgcacaggtaacctgggtaccggttgcagagtatcgccaagttactaaccgcatgcagcgcctggctcgtgttcattaccaggcatgcgtcgggaaagctgaactcaggcgctggcgcgaaagtgctattgacctgttgggaatagccagccatatcgactgtaaacgggcaacaccgggtgatcgggaagagtaccagcaacaataccaatgtctgcttcactatgctgatacggtaaacgctgcaggctctatccgttatcccgctcgttaa

SEQ ID NO: 456100 - DNA, 723 bp, Serratia marcescens
atgaatacccaaattaacttccgcactaatgttttcgacctcaagacgacacaggacgtgcttttctacctttgcgcgattgaaagcgagctctataccgcaagagctcattctcggctcggactctgtcaggagcgagaagagcctcgtgagctgaccgatctggaaaatacggttgccaattccggtgaggcttttggtttcttcctgtatttcctgcatcgtggtgtcttgccgaagctttctgagactggacgagaagtattgagcaatctacggagccttggccacgaagttcatgcccaagcctgggaatggagtttgtccaacggcaaaattaacggcgagagtgaagcggcctatgtgtatgagcgcctggccaataacagcactctcgataacgtgaagacgtcgtacgacattctgtgctacctgagtcttctcgaaagtgaactgatgggggcaggaatgccatttctgtttgattcgaagtcagaggttgaggcagcggtctataacactggctttaagttcgggtatttcctgtttgctttgcagcgaaataagttacccgcacttcctgaatcaggaaaggatgtgattaacgtcctggaaaaaacagggaaatcactcagtgcgtctgtctgggatcgagccgtccatgagggcaaaattgaacgagatatagacgaagcgatcgccgcgcttgatacggagtattga

SEQ ID NO: 456101 - DNA, 729 bp, Serratia marcescens
gtgaaaaagagcatttatgacgacggcaatttctttgcctcatatttaaaaaaacaggatgacggggctaccgctagtatgaacagctttgccatccaggagcagtatgagctcctgcccgaaatgaagggcctgtcagtgctcgaccttggctgtgggacaggcgatttcctgcgatatgctacccgacagggtgccagtaacgttgtcgggttagacagttctgctcgtatgattcaggaagcccttcgccgcagtgagggctataccattgagtatatccatgctgacttcgaggctcctggtgagattggcacgtttgacctctgcttctcatcgctggcgctgcattacgttaatgacatcactgcgctacttaaacgggtcaaccaactgctaagggtgaatggtgtcctgcttttctctgtggagcatcccatcgccagtgctcagctggcgcggtggcacactgatgatcaggataatagctattggggggtggaaggataccttgcagaaggtgaacggaaatcacgctggttcggtcaggaggccatcaaatatcaccgtccgttttcagcctggtttaacgctcttgagtcggcaggtttccgcctgaccgacatctcagaacctcatcccagtccaaacacgctgagcattcgccgacaggctggcctcgcctcaaacaggccagcattcatcgttttcaaagccataaaagagtaa

SEQ ID NO: 456102 - DNA, 504 bp, Serratia marcescens
atggaatctaaacactgtattaactgcgaaagtccagcgcaaaaatattctgattactgtgttgattgtgaagagaaagaactaagtaaaatcggtgggtttctttatattcctgccataagtgtcgttatatcaatttttactttcctattcgcttcatacaatgctgtgatggtgctttcctctagttatagtcttattggtagcttaaggccacttgtttattttgaggttgtgtcattgttcctattgttcttgttaagcctttatactgccgtgttgttttttaagaaaaataaaaacacaccgcgatgctatattttattattgctgttggggttaatgtgcgcagtggttgatacgctatggccctattatggctttaatattgaaataacgagagatgattattctcgtatattccgcaacgtggtctcatgttgtatttgggtgccttactttatcgtttccgtcagagtgaaaagaacgtttgtcagaggttga

SEQ ID NO: 456103 - DNA, 819 bp, Serratia marcescens
atgaattggttacatatttacttggcaggatgcgcagcggtagtcattactgtggtggtaggattaatacgtaagaagaattggataagtcgaggtggtgcagttgtattaactctcgcagcgattgttatttggaatgttgccgatttttactatatcagaaatttatcagatcaggaaagtgcgaggaaactagatactgcgatagaaagtataccaacttataaattgattgaggtgcatgaaccgcaagtattggcacagatccgaactcaagttttggcaatgattaaagaaggaaaaaacgagcaacaagttattgatgctattcaaccacaagttctggcgatacaaagacaaagattgcagtttgcatcagatgctctagtggttgcagtaatgcaggtaaatatggagcaaactgccgcagtacaaaaagtaagtgatgatgcttgttaccgatttctttatccggaagtcaaaggtgggattaattctgtaaagatgttatctcacgatatgctcatgaaacgagttaatactgatgttgcgatgatgcagtcctcttacggacctaacaagcacacggtaacgaatgaagagttgctgaacgcaaagaaagacatacagtcagtagtacaggaattgatgccaaagtatggagaagattttgcaataatgagcgatccacgcagaggtttggggaaagaaaagattgcttgtgaaatggttcaggacgtgtggaataatgtgattaagttgccggaaaataaagcagcgggcattattcgtatggcgttggccatggaggatgaataa

SEQ ID NO: 456104 - DNA, 204 bp, Serratia marcescens
atggaattaatatcatttaaaaaaaatggtgcggagataagttttagtgaaaatgagttgcttatattaaacgcagcccttaatgaaatttgtaattgtattgatctggaagaatttgaaacacgaatgggttctgatagagaaaaagtatccattttgttaggggagataggaactgttttagataaaatatctattgcttaa

SEQ ID NO: 456105 - DNA, 405 bp, Serratia marcescens
atgataaactttgagctaggtggatattactttgactatgatagacgcgtgcaactgcctctgataacgcaaccatcaatagttcaggtaatgaattacttgaatatattaaaagctcataacggaatattagttcttgataatgatcaagaagataatcaaactccttataagttaacattgtattctgattgtgggctttacatggtattgcttgagacaatgatggatgatggtgatttagatattaggactttttataacaaatctgagtcaaaaaaattcatatcaatacttggcgagccgtattcagaagcatcaatagttaaagaattcgatttggttatcgaggtggttaaggagttttatgagactggcaacgtatcaacggatcttctgaactaa

SEQ ID NO: 456106 - DNA, 2172 bp, Serratia marcescens
atgaaagtaaacctagagctaacaaactgctatggtataaatcaattaacaaaagaaatcaatctaaccaaatcagacaccaacaatggcgtcaactctctttatgcccctaacggcactctaaaaacatcgctagccaaagtatttaaagacatcgaaagtggcaatgaaagcaaggatttaatatttccagaccgggaatgcatcagagatataaaagttaatgactcatatattgaatctggccaagtcatggtcattgactcatacaatgaaagctacagctctcagcaaatttcaacattacttgtcaatgatgagctcaaacaacaatacgactcagctctgaaagaagttgatgataagcgatcagcactaataaaatccatctcaaagctctctggcaagcaagctaaaagcatacccgaaatcatatgtgacgcattcaacagaccagagaaaagccttctagatctactcactgaaatatcgcatgaagatcaaccggattatactcaattatctgaattgaaatatggcgacctcttcaaccaaaaggtcattgacttaatttccacaggcagcttcaaccaagacttagaagaatatgttgacacctacgaaaaacttatcagcgaatctacaatattatcaaaaacctttaaccatcaaagggctggcgacatatctaagaacttaggcgaatcaggattctttacagcttcacacagtgtgaatctaactattgagggcgaaaaacaagaagtagattcaaaggaaaagctaaacgagctattaaaaactgaacaagaaaaaattattcaaaaccctgagctaagagagaaatttgggaaggtagatgaaaaactcaagacaaaagacactcaagcttttagagattttataacagaacatcaagatctgctcccagagtataaagatatctcgttacttaagaggaaggtaatcattgcctatctgcaatcccaaaaaacattgtgggatgatttggttgacacctataagcaaaacaaagccgttgtagaagaaattactgcccaagcccggcaacagaagaccacatgggaaacggttgtcgatactttcaacaaacgtttcagtgttccgttcaaattaagcatcgagaaccaagatgaagttatccttaacagcgctgcacctgcgataaaatttgattttgacgatggcagaggagagataaagcaggtaaaacagtcgagtctcattgaggctctaagccaaggagaaaagagagcactttatatacttaacatcctatttgagatagagatacgtaaacaggtcactcatcccattttgcttataattgatgatatagctgattcttttgactataaaaacaaatacgcaattgtcgaatatttgagagacatttcaaagttcgaaaacttccacctactactacttactcacaattttgacttccatagaatcattagcagcagactgggcgtcaaaagaaaaaatcggctaatggcaataaagtcgccgggcagcataaaaattgtaaaagaaaagtatcagaatgatgtcttcaaagcatggaagcaagaactaaataccaatgaaagctatctgctcgccagtataccatttgccaggaacatagctgaatattgtggccatgaggatcatttcaacacccttacgtcattgctgcatttaaaagaagataccagagatataaaaataagccacctacaagaagtgtaccgcaatatattcacagatctatcagagatcgtaatcccgaatggtgatgaacgcattttggataaaatcctaaaatatggcgacgaactcaccgctgccagcaatgactcacctgaacttgaatgcaaagtaattttagccatggctattagaattaaggctgaagaatttatgatcggtagcatcggcgacgatgactttgttcgttccataacttccaatcagacacgagcactctttgatcgatatgtggagagccaaacaggtgatgaagaaactataagcttgttggaccaggtgaatctgatgactccagagaatattcacctcaactcgttcatgtacgaacctatcctagatatgtcggctcaccgcttatatcagctttactcagaaatttcacaattgcaaagctaa

SEQ ID NO: 456107 - DNA, 615 bp, Serratia marcescens
atggcaactaaaaaagcttcaacccgcggaagaccaagggattttgacagagacgcagcgcttgaaaaagcgatggaaacattctggcagtacggttatgagtcatcaagcttgtcgactctcaaagcggccatgggcattaactctcccagtctgtatgcagcattcggcaataaagaaacactgttcgtacaagcagttgagtactatttggcaaaatatgggtcataccgagagaaggcgttggaggaggcaaaaacaaccgttgaaggtattgcttctctgtttgaacaaacaataaaacagttctttaccagcaaaacccatcatggctgcctggtcgtgcttgccgcgctgactggctcccaggaaagcaaacccgttcaacaaatactggagaaagagagacgaagaacggctcagcttttcaaaaatcgcttagacaaaggcctgcaggatggtgatatcccaacagggagtcatgtagaaattttagcggaatatttcaccactttgctgtttggtttgacaattcaggtaagggatggcttaacagaagatacttgccgagagatcgtgtcgatggcgatgcgggtactcaaaactgaggattaa

SEQ ID NO: 456108 - DNA, 1041 bp, Serratia marcescens
atgaagttaaaatatattattttgcctgctttgcttttaaatacactgaatgtcgcgtatgcagagtatgatcctacattgaaatccatcgatactcccccagaaaaatcgcaacaacaatttaatctggttaagagtgaaagccgtggtcaatataaatattcccatggacttgaaagtcgatatattgatgttaatgatgtgcgacttcactacgtcgaaggtggtaataacggtacacctattgtctttatacatggatttggctcaacgtggaaaatgtgggagccattgatggagaaattcaaagatcaacataaagtgatcgctatagatcttccaggattaggtcagtcttcagcgatcaccaatggagattattctgctcagaatgtatccaatattctgttgaccgctataaaatctatcgctggcgcgcagccaatttattttgtaagtcatgatttaggcaatagcgcttcttatcccttagtggcaaacaatcaggggtatattaaaaaagttgtttttatggactctccaattcctgataaagcgatgttcgaatacccaggatacacaccctctgggccgggactggggtggcattttggatatttcagctttggcgatattgctgaaaaacaaatttcacatgatccatcattatttttctcttattttattaaaacctatgcaggtaaaaaagaaatattcactccagaattactaagtgagttaattgaaccttattcaactcaagaaaaattacatgcggcatttggttattataaatcgcatgcacaatccgttaaacagaacgaagcgctattggctgcaggaaaactgttgactattccttcgatggctttgactggtcagcagggcgtaaatgatgtgcttgtcaaagaaatgaagactcgctttgtaaaagatcctaaaaacttcaaaggtgtgattttgccagagactggacattggatggtggaggaaaatgcagccggtgtaatgcaggagatttcgacattcctatttgaataa

SEQ ID NO: 456109 - DNA, 642 bp, Serratia marcescens
atgaacaagtcgccaggccgtccgacaaaggcccgcccacgtattctggaagctgcgtgcgacctgttccttgagcagggtctggatgtttcgctccatattattgctgagaaggcaaaaaccaccagacccacgctttatagtcatttccccggaggaaaagatcaactgctggttgaaacctttggtcttcttaatgagcgtctgcacccccctttacagcagttgctgagtgaaaaacgccacgatttaccggcgctgctgcttgggattgcccgcatgatacaaaactactttttttcccctaccaacatccattttcaacgcctgcttattcaggttctggttcagcgcccggagatatttttaaacctctcccaacgtcccactggacgaattcgcgatatgcttgctcaggctttaacagcattcagtgatgatggcgtcattcaagtagacgatgctgctctacaatccacagcatttcttggcgcaatcatgggttactatcttccgacggcgatgattagccagacgccggtagacagtatttctctggataaactggcgcaatccgctgtgaatacttttcttatagcatggagatatagctctgatacgcgacaagactgctgtctttag

SEQ ID NO: 456110 - DNA, 387 bp, Serratia marcescens
atgccgaataacactgccattaactatattgacagagcattgaatttagcaagaattcgtcatgctgatattttgcgggaaaaagacaacgaaaaagttgaacctatgtacaactctattgtgcagcaattaatttatctaaaaagcattgtcactgaaaaagaaaatgataagagtaaacttaaagaactaaccatggggttatacgcagcaaaagaatttgaatcatccgaccctgttttcgcagaccggatacttagtgcatcatttatcgctcatcagatgagaaagggattaaaagtaagattaccacatgaagtggagcctgattatcacgaaaaacagcgggtacttcggttaaaattccctaatgatttcgaagactaa

SEQ ID NO: 456111 - DNA, 381 bp, Serratia marcescens
gtgaataacaacaccgctttagactatatagatcgggcacttcgtttagctaaaaaacggcacctgcacatcttacaggtgaaagggggtgaacctctcgaacctatgtacaattccattgttcaacaactcacctacctccgtcaggttatcatcggtgaagaaaagaacaaagctaaactttgggaattgacttttggcatgtatgcaaccaaggagtttgaagcaacagatccgatttttgaagatagactgggagatgccttctatatcgcatctcaaattagaaaaggacttaaagtgaaactccctcatcaggtagaccctaacttcattgtaaaacaagaacagcttaaagctacttaccctgacgatttttaa

SEQ ID NO: 456112 - DNA, 387 bp, Serratia marcescens
atgattaatgacactgctattaactatatcgatagagcattaaatttagcaaaaattcgtcatgctgagatcttacgggcagaagacaacgaaaaagttgaacctatgtacaattctattgttcagcaattgatttatttaaaaaatattatcattggaaaagaaaaggataaaagtaaacttaaagaactaaccatggggttgtatgcagcaaaagaatttgaatcatccgaccctgtcttcgcggatcggatatttagcgcatcatttatcgctcatcagatgagaaagggattaaaagtaagattaccacatgaagtggagactgattatcacgaaaaacagcgggcacttcggttaaaatttcctaatgatttcgaagactaa

SEQ ID NO: 456113 - DNA, 1239 bp, Serratia marcescens
atggcggatcttgcggctgcccgcgaacttgatgaaatagcacatacggcttctcaaggctggatgattgccggattgattggcggcgccattgtcggggctgccgttatcgccgtaacgggcggtactgcagccatcgccgtggccgccgtagcggctggtgcttccgccggtgggggattaggtgaagtcttggggagcatgtcctgggcaccgcgccacgttaccggcctacttgtcgacggttctccgaacgtttacatcaatggacgccctgcaattagggcgcatatttcctttggtgaatgtggtgaagatggccccgccaaacaggttgttgcccaaggctccgcaaaggtatacatcaatgattttcctgctgcgcgcataaatgacttattggcatgcagcgctgaaattcaaggcggttcacccaatgtcattatcggaggagacaccgaacagacggatgatattgaacctgaaataccagcctgggttaactggacgttgttggctgttggagccggcgctgcggcagtcttggcctctcctgctatcgctgtgttgggcacaataggcggcttaggaggaggatttgccggcagtctgctagggggggcgctgtttggtgaaggtagcgatggtcagaaatggtcaatgcttgccggtggtttcgtcggcggttttgcagggggtaaaggcggcgccaaatttgatgcgtttaatcgcactaaagcgatcagtgcacgacgggcttatttgaatgaaaaattcgaaagaacaggagacattaatcgggatattaaccttcgtcaaaatagggagattgcatctaacttcatgagaaaaaatggagtcagtgaaagctccattgacgattacctaatgggaatagatttaaacaataaagtatctatagaaaccatcaacagagggaaaattgcttatcagaatcaatctcctggtaactggcaagggaactggtattcattagatgccacgacgccaccaacaaaactgggtattaaccctgatggggtaatcagaggaaccaataccgttgtaccaaaagaagtaacctcttatcaagcggttaataaagttgaaatgttgcgaagcactgcaacgccggcacttgatacatggtcaactccgggtaaacctttccaaaccgaggggggtgggatacaatggttctcaaccaataagaatgcttggattataaaaaatgattaa

SEQ ID NO: 456114 - DNA, 801 bp, Serratia marcescens
atggcgcaatatctaacgcaagaggcaaacttcgaattgcctgatgcatttaaagacaggacaatgaatatttttactctcagtgaaaataatgccagtgagtttaccttcgttgtctcacgagcaacggctatgccagaagatactctgcaaaaggttgccgcccgtctgactaaagatttggaaaacaccgtccaaggattccaactagcctcatcatctttaggcactattgatgggataccctcgatagagatttactatcagtttaagtctgctgaagcgctgatctggcaaaaacagcaaattgttattttgaacgatgaacagcaaggtaggaaagttgtttgctatattgggacgtgccaaaataaatttgatgattattacctgcgacaatatgaaaaaataatctccagcatctcatttaacaaagccgaagccccctatacagagatgctgccggcagactcaatcggcaatttttttgtttttgatagtgatagcaaggagctgtctgtattcacagccattacggagctttatcagcacattgacttaaaaagagcgctaaatggcagttacttgttttatcacacaaagggtgagcctctgcatatcgctcctgttgaaaactcaaattcgcaggaatttactcgctatgcactttggacatcatcacccaataacacgcaaaatctagaatccattctattactttgccgctcagtaaaaggccatgacgaacttaacaaccctgaacgtattgcagagtacttgagaaccaacaaggaatcgtag

SEQ ID NO: 456115 - DNA, 333 bp, Serratia marcescens
atgagaactgatcaagaaatctataatgatattggttcaatattgctatcaatagcccctgataatgcggcaaaagttattctgtgtgcaacgttggagccagagagtgattgcggtgaatttacttatgactatatagataacaatggtgagcagcgttggataactgaaaccgctgatgcaagtgaaagactactggacctacttgtagagttaagaaattactttgtagataattttaagtctcaagagaagccgttctggcatggttgtgaagtaacggtaaatgtagagaccttaaagattaatattgattttaaatacgacaactaa

SEQ ID NO: 456116 - DNA, 213 bp, Serratia marcescens
atggctgagaaacatcataagtcagaacccgccacaccccaagcacgcaggtgcattgtcggctaccgccccaacggcggcaggcccaacccgcccccgcagctcaccctcaccggtaaatggctcgagccgctgggctttaccaccggtcagaagatagaggtgctcgccgcgccggggcagctgatcgtccggctggcggaagagacataa

SEQ ID NO: 456117 - DNA, 1416 bp, Serratia marcescens
atgtcttatgccttgattgacaatacttctttaaccgcagttgaaaggacccttggtgatatcactattaataacacagatactattaatggtgatttggttgcttttgaaaacacaattcaagcaattcttttttacgataacctgatatgcatagataattataaagaagaatatcgcgaagcgcgaaaagaaaagttcgactttattaatttcttatcagaaagtgactataatttaagtaaattagacaagattgctaaaactgaagctcaacaaatcaaacctgaaataaaaggtggggagtttattgataatgacttcggccagcttatagacatgttgaaacttaacatggtttgcacatgggatcttaggtccagcgtatactacctaacaatgaagatgctaggacaacctaatacacctgaatatgagaaatatagcgaattaagcgcgtctatatttaatgaactttctgacattgctgtaacgaaaggctattggtcgtctgaagcaaaactaataagctcgaccggtcatgtttttaccgaagctgagttcagacaagaaagagagaaatcatctggtggtaaaggtggaatgacaactgccttggaaagttttattgctgcgttgaattggatggcttataaatcaatttattacagtgttgtcgcaaaacattttcaagcagattcttttattcatccaattagacatgcctatcaattacattggatgaaaaaaactggcgcatttggacatgattataccgctaaaatcataaactccttatctaaaaaaataaacacaaccagatcagaaatcgttgatcatgggcgtaactcgacaacttcgttggacttaccaatattctcagcatggctagcgaatgaatctggaagtgtaagcagtgtaataaaaacggccctagaaattaaaaatgaaaaccatttcaaaacctgtcgagaaataattcgtgaaattgacacagcctacaacgaatccggaattagggatggtaataaaaaaacaacagctttaatgaaggatttagataaaatatccggtgatattaaaaggctatatggtgttccttcaaaccaaggaattcaaggtagttttttaattaaaacatttaactcactctcttctattatcagcataccaagcattccagaaaaagagtttgctcttagcacccccgagttcatgaaatctaaacggcataaagcattttctaccgtattcaaagatgtcactaacgaactcatgagcattgagcgacttgggggactcagagacaaacttgtctctgagtttaaggtacgcaaaggaccagtttactccggtgcaaaaacagagaatccaaagttcaggtatgcaaccactcactggaagcagccgatgtaa

SEQ ID NO: 456118 - DNA, 816 bp, Serratia marcescens
atggcattaatttatcactattgttccccccaaacgtttctgcaaataattgaaaataaatgtatttggctttcatcgactaacaatatgaatgatttttcagaaggtgcgtgggtcaaaaactcttttaagaaagctgttcatgatttgaagccgttatttgggattgagtgggtgtatcaggtactacaaaattataatgatatagatttaaagaaatacatttgttgcttttcaaaagatggagattcgctcagccagtggcgagcttatgcacaagatggggagggggtttcaatcggtattgaggaagacgagctagggattaatgaacactcgttgacggcatatagagatccgagaaaaagcttagcaataaaagaaattaactatgtaagtaaggacgatatttataatgaaatgttaatatatgccaaggaaaaaatttcacctgataatttctataaggctactgcatatacttttgctaaatattgtgtcgatagagcagctattgtaaaaaacccagcctttattgaagaaaaagaaaaaagaataatattttcatatgctgaagattttgcgtgtgtaacggatgacttggattcgggtagtaatgcactaggggagttgaaattcagagtgtcgaatggatatttgacaaattatttcgagtatacccttcctactgagtcgataaaagaaatacatataggtccaagaaataaattttccacttatgatttagaactttttctgagacataaatcgctgtgggatgttgaagtaaaacgttcatctgctacatacagatga

SEQ ID NO: 456119 - DNA, 177 bp, Serratia marcescens
atgctggaagagctcgagactatgttagacaacatgggggaagtggaggttttatcaaccgatactgaggtagataaatcacttgttctggatgatgaggctgcaaagcagaagaaaacgggcgatgaagctaagttgccagaaccattagaacacgaactgatcctacccacgtaa

SEQ ID NO: 456120 - DNA, 246 bp, Serratia marcescens
gtgagtaaaatgttgtcacttagcaaaaatgacaaacttgaaggaaaagtaggcctggctactgtcggtgaaacccattatctggttatcgaccaaaacaatgatcatcgtcttgataaatcagataaaattatcgtcatcaagggtagctcacatgatgaaatcataaacgatttaaaatactcaacgccagaactaaatggtatagcatcaagtgaaatgaattatagtgaaatgatagcataa

SEQ ID NO: 456121 - DNA, 804 bp, Serratia marcescens
atggatatttcactgcttacaggacaacggactaacgcttggtcagcgaccatgattaatctggaagcacgtaaactcattaatacagcaaacatagttgcagctaaccacctccaggatgggctcaacaggatccagtttatagaagacattaaatcactaatcaatcagcaattttctcttgcccgtaaagcaaaatccgacgaagaaggtattgcctgcataaaaaatctacgagcagagaatgaaagccttcttgaacaggatcgcctgctcaaaacaagagcagcccagctttacgccaaggttgaattcattagggaaaacgacaaagttgttggctatgtcatctcagcagtacaggttgttttagctgggatgcaagttgcaggtggggtgatccttgcaagttcgatgacacctgtaggtgtcctgcttggcgcgacattggtgatcgacgcagctaataccatatctaaagaagtaaataaccagttgttgaacaaaactgactcgcaggggtttgtagcggatacagcgatgtctgccgctgagtttatgggatttcgtggagaacgtggcctggccgcgtataaaacgataagtattgctgccaatgcgtacagtgtttttggtttacttcgaaaaccagggtcctggcgtctgttctattttatgcgatcggatttttacagaaaaatggactccatgagccggcccaaacttaccatgaaaatcattggatacggcttaaatgcgaaaatcgtctttgacctgctgactattgataaccccgcttcttaa

SEQ ID NO: 456122 - DNA, 246 bp, Serratia marcescens
atgaaaatcagcacgttgctgacgttgttccctctgctgatgccggcatcggtgcttgccggcacggtactctataccgattctcaccatcccccgaccaacatcgatgcctcggtatgtgtgatttatcttgacggcccggagcaactgcaaaagcaactgttcggcgaactgtcgtcaaaccccgataaggccgagcgccaggcgcaggccgtatgtagtggcacactgaatttggccacctga

SEQ ID NO: 456123 - DNA, 315 bp, Serratia marcescens
atgaaaaaacgccataccgaagagcaagtggtgtttgtcttgaaacaggctgaaaaccggcactcgcgtggaggaagtgtgcaggacgatggcaatttcctaaatcattttttacacgtgaaaaatgaaattcgcaggtatgagcgtaacagctcttcttcagctgaggcggtaggaggaagtaaaacagcgcctgaagcgtttgatggcagatctgagtctgaacaacaggatactgtagcagatcatcaatacgattctgatataaatagaaccgctttagttccatgtgattttgagatcgcggtctggtaa

SEQ ID NO: 456124 - DNA, 810 bp, Serratia marcescens
atgggaggaaccaatcaagaacatattaatctgaaggttgatgattatcgcgtcgaatgggaaagccctaggcataatgtgcagatccgaaagagttttgccatttcgaaaacagaagttaccgtagaggacttcgcacagtttgtaaaagaaaccaatcgcaagatggcaaaaggttgcttggcattcccaggatatcctgagatgagtaatcctgagtatacaatgtataataaagatttatcttgggagaatcctggtttcacgcaagataaatcatcgccagttacctgtgtaactcgtaaggatgctgaagactattcggtctggctttctgctaaaactggtgctaaatatcgtcttcctagtgaggcagaatgggagtatgcagcacgtgctggtaccagtacgccttacttttggggagataagattgaagatggctgcgactatgccgctatctatgatttatctacggataaagctaccggttatcgctttgtaactgcgaaatgtgatgataaaacaccctatatagctaatgtcgcgagttttaaaccgaacgattggggaatctacgatattactggtaatgcacgcgaatgggtggctgatgcttgggaggattcttatgaaacgggaccatatacagaagaagttcgtgaaaatggggtctctcaattcccggttctgcgtggtggtgcctggaattatatgccgcaaaatgagcgtattgcatatcgctcagcctattattcctggctaatgcgctcatatatgtgggggtttaggctggtgcgtgaaatctga

SEQ ID NO: 456125 - DNA, 570 bp, Serratia marcescens
  misc_feature (542)..(551): n is a, c, g, or t
atgggtaatatttccaatgctgtcaataaactcattgatgatacattgtactacaccggttttgatcccattgcactggatattcagtctggatttgaatcacaaataaatgaagcattgtaccctgcggctgctaatattgcctctgaaggtgcacaaacgatactgggtatttactatgctaccggcggcacggtgtcgcaggagggcgttaattattggggcgagaaactcgttagcggcgtggttaaagcgtcagacgtagcccaaaaatatatcgaatctcgaaaagaccttacaaaattgagcaatgaagagtttgtagataagatatacgaaaatttacttcaccgtgcaccaactaaaacagaattgttgtctttaacaaatgagttaaataaaggtctcacaaagggagatcttgttttaaaacttattgatacggttaaaaatgaagctacagagatagatcttgacgctcaaaaacaatttgcacaagcgacaatgtcttataaaccaggtcaattgccagagctgagtcnnnnnnnnnntcgccattcttggccgtga

SEQ ID NO: 456126 - DNA, 675 bp, Serratia marcescens
atgcagtgcatccggatccttaccgccgtcggacaggaaatccggaatgctgacgccccagctgttattaatcacccgcacgccgctttcgatcatcgcctgccagccggcgttggttaccgcgccgtccagccccagaaactcgccgtaggccggaccgtcgttgtcgttgtccacgctgataatctgcgaatcaaacgccacgccgtgcatccccgtaccgtcgcggttggccgcagcgatacccgccacatgcacaccgtgattgctcagcgtctcgccgttgtagaaatggaaggtgccgtcgaaatagaacggatcgccggcgttaatgcccggccggtggggatcggtataggcacggatcccctgcgtcaccacattgatcagtttgccgtcgccggcgaactcgggatgctggttatacaccggcgtatccaggatccccactttctgccctttgccggtatagccggcggcataggcctggtcggcgttaatcgcccccagcccccagtcagcattaaactcggcgctgcgccagctgcccgggtcgccgattttaccgtcgtccgcctgtacgctacctgccgccaacagcgaacacagcaaggcattcagtttccatgtcggccttttctttcctgtagatgctttcattcccgttacctttga

SEQ ID NO: 456127 - DNA, 552 bp, Serratia marcescens
atgagatgtcatctgattactgacgattattttttcggtctgggttgcaaatcaattcttttggataatggttacaatgctgacgtgattaagttagatgataattggtttggccatgaaatacaaggaatagaacctgattcgcttgtttttatatcaatgtgctcacatttaagaaaccagaaggtgcttgagagaatatcttgcctgggtataagaagccttgtttttgtagagacaccaagaaaatatcactcattaacagagtggatgaaaggtttttattcaaaaggcattcctgtacgaagtctcatacccagcattgaattagcaagtcgtagttataagttagccggaaacgccttgacacgtaaggaaaagaaagtcgttgagctacagcttgagggacattccattcaagaaatatcgctaatactaaaagtatcaataaaaaccgtttactctcacagaaggaatgcaatgaaaaaaatcggacttactcatatcagctcatattgctatgtgaaatatcaaaccatctgttgcgtatag

SEQ ID NO: 456128 - DNA, 138 bp, Serratia marcescens
atgtgtgaggtctgtgctcgcttgtgtcagcttggctcgatactcagcgatgtccattcgggtctgagtcagctgtgtgcgcacttctttctggtagtccgctatgctacgggcgatattttgctcttcctccagtaa

SEQ ID NO: 456129 - DNA, 300 bp, Serratia marcescens
atgtttactgccttcaatcaaaaccagactcccaaggttctgggtgaagtcgccttagtctcagctgaccgcctgaccgactcaaaatctggtgaaagttactacagcatgaaagtgagcgttcaccagtgcgtacaaatattgagacttccagcagagcaaataaaaagactgggagaaaatacgatcgtgcccggtatgccagtctcaatatttgtacgcactggtgaacgctcattgctcaattacctgttcaagccggtgatggaccgtgcacatatgtctctgacggaggaatag

SEQ ID NO: 456130 - DNA, 420 bp, Serratia marcescens
atgaagcagaggatcattataacagtagtcgcattgctgttagccgtctgttggcccttgacggctccagcaacccccataactctcaaagaagcctttatgctggctttacgtaacgaccctactctgcaggcagcggtacaggaaaaactggctagtgaagaagaaaaggtaataggtcgcgcaggattactgccgcaagtttccgccaattatcaaaatgggccacgcaactggcagaactctaaacttcagcaacaaaatccgtataccggtcaagccagcgaggaaagcgtaaataaacaatatcgcagtcactcgctatctatcacggctacgcaaccaatatttgattacacagcgtgggcaaattaccaaaagggtatagctctggatcatggtgcccataccaccgtctaa

SEQ ID NO: 456131 - DNA, 708 bp, Serratia marcescens
atgggaagctataacgatgatctgatacaaggaggaagcggaaatgactatctggatggtgctggaagtgggaatgatttttttgaggatgataatggtttcaatgttatctatggcggtagcggtaaagatgtttattcaataagtcgtggttatgataatacatttataacgaaatctcctgacggcagtatatattttaagttcgataatggtgatattacaaaaacaacctatttagacaaggtttctttcgactattctgttgagggtatttccacttattttgacttggatgaacttaatgagatgaaaaccttttatgccactgcagataatgaatataaagtagtaggtaaaagtgaacagaatacagttcagtttgctggttgtgaggatagcactttaatttcttttaatgaagatacgttacttttttctgggacaaaaaatgattcaatttatggaagtggtaaaggagatacgttttattttgataaagatttcggggatgatgttgtctataatgcaacaaaacttgataagtttgttttcagagaacaagctataggatcagaattcgatttccgtaactatttatcacaaaatgatcaaggagatgctgtttttcaacttaacgattacggtagtgtgactttttttggatgtaaagtagaagatcttaatgattttctttttatcgtatag

SEQ ID NO: 456132 - DNA, 558 bp, Serratia marcescens
atggtgcgggttatcggccagcaccatggtgtgtttgtcctgctcgtgcttgaagtagtagtaaatgccttccagctccatcaggcggctgatgaagttaaaggtggattcactgtactgcacgcagtagccccactgtcgatactcgccggtcagctggtcttccagctgaatgttctgttcggccagcagcgttttgacgatgtccggaacggtctgttcctggaagatgcggaagttgcgatccttgagcatcggccacaggtcaggctgtacgcgcagggtgtacacggaatagcgggtgccgccgatctcttcgctgctgacggcgatggcggtgatcttgccgttgagatagcggggcgggcgcagcaggccggggatcgggatttccagcgtcagcggctggccgagcagcgccttgcggtccagacgtgcgtcggtgctcagcagctcgatgcggaaatcaaacggcgtggacagggcttcggtgccttccagcgaacgaaacagcagttgttcagggccaagcggcgtataagctgtgatgcggtctaa

SEQ ID NO: 456133 - DNA, 1491 bp, Serratia marcescens
gtgacaaaaacggtagttgatcttaatgtatcagatacgttcgattctgactttgatttgatattaaaaatagggtcaaatcatgattcgaatttaatctatgtatcaagtaaatcacagtgtgtgaacaaggccatagagtttgctgagtatttaaattctaaaaaaataccgctaaaagttgatgatgagttgattaatgaagcgaagctaatttctgactttattcataaggatttctcgttacctcatctcttaaaatatggtatcgcatatcatcatggtaatttgccttcttttattcgtaagagaattgagttcctttatgcgaacaaaaaaattaaatatattttttgcacatctactttgttggagggggtaaacttaccaactaaaaatgtgtttatctacccatttggtaaggctaatagtaatagtggcttctcccttgatttttggaaccttgcagggagagcaggccgctacaaaaacgagttgacaggaaatattatttgtattggtaatggagaaaatacgtggtgtgaatttgaaagttcggtatcaagcaaagataaaatagaaattgatgacgaaatctccccattattgaaagcacatcgcaaaattcttaattatcttaatgaaaatgtacaaaaccccgaccccaaagtggtagaaatatcaactatgattttatcggaggttttaacatatctaaatgaaggtaaaatcggtgggctattagaaacctttgattcaaaggttagacaaaaaataatttccgctgggcgtgaacatctaacaaggaaaaagatccttggcattgatatctctaccttttcagaaaatcatcgttttgactctaatactcagtcttctgcctataagttggcattaaataaaaataataccctaactacttttcagaatgaagatgtcaaaagatatctcaaaaaaattaatgacgtatacgaaattgttaaccctaagggtattgttccttttcatataatgacatactcttggctgatgggagaacctataagtgcaataataaataactccattaaatatagcaaatcagtacgtgatgttgaatcattctcttgggtcgattttgataaaaataatccgcaacatttgaatcaaaaaattttagaagttataaataccatagaaactgatattacattcaaactagaaagtgctttagctcattatcatcaattgtgtaaatcaatacatggtgaggattcgagtggcataaatctttcaaagtttgtcgattatggaacggtgaatccaaaagaaatgtcattacaagaatatggtttttcacgtgctgcagcttcggagttgctgaggaagtatcgacatttaatcgaatttgataataaagaccaattgattgaaataaaaactaaagctctggttaaagttttagataataatggtttggtcaaaaaggaaattgagtggcttaatctctga

SEQ ID NO: 456134 - DNA, 312 bp, Serratia marcescens
atgaccgtcatcaccaccgccggtatggccgtcatcaccgccgccggtatggccgtcatcaccgccaccggtattaccgtcatcaccgccgccggtatggccgtcatcaccaccgccggtattaccgtcatcaccgccgccggtattaccgtcatcaccgccgccggtatcgccatcatcgcccccgccagcgtctttttgccggataatcagatcgacagacttatcgtcgtttgccaacgaggcatccaagaaggcggagtccaacaccgctttgccaaatgtaccgtcgagatttttttcggaggttaa

SEQ ID NO: 456135 - DNA, 426 bp, Serratia marcescens
gtgagtacgttgttgaagtggggcagtttgacgctgattagcgtgcttctccttggcggcgtgtttatctacgtcgttgcaaccggcattaatgacgtgactaaatacacggaaagcgattttttcaactaccgcatcctgacggataaggagatcgcgcaagcgccacgtatttcaccagactacgtttttgtttcgcagcccggggatgggcatgcgccatcaaatgccattattttccaacgtgtcgctgatgtcgagccgctcagggcttatctgcaaggtttgggttaccatcgggataagcggcgccttggcgctaatgaagtttggttacagcaggaacgggatggcggcgcgattttttatctctcttttgatcgaggtaccggtgaagcggtattgaccaaagtgcagaacgactaa

SEQ ID NO: 456136 - DNA, 1401 bp, Serratia marcescens
atggtcgatgtactggtgattggcggcggcaatgccgccctatgcgccgccctgacggcccgtgaggccggcgcgtcggtgctgctgctggaagcggcgccgcgcgaatggcgcgggggaaactcgcagcacacgcgtaatttacgctgcatgcacgatgcgccgcaggatgtcctggtggacagctacggcgaagaggagtactggcaggatctgcggcgggtaaccgacggtcataccgacgaagcgctggcgcgcctggtgatccgcacttctgcgcactgccgcgactggatgcgccgccacggcgttaacttccagccgccgctgtcgggcgcgctgcacgtggcgcgcaccaatgcgttctttatgggcggcggtaaagcgctggtgaacgcctattaccgcagcgcagaacgtctgggggtgcagatccgctacaacacgccggtacagtcgcttgagctacgggaaggaaactttgtcgccgccatggcgggagaggaacggatcgaagccaaagcctgcgtgctcgctgccggcgggtttgaatccaaccgcgcgtggctgcgcgcggcctgggggcaaaatgcgcgcggcgaatggccggccgacaattttttaattcgcggcacccgctttaatcagggcgtactgctcaaatttatgatggacgcgggcgcggacattatcggcgacccttcccagtcgcactgcgtggccatcgacgccagagcgccgcgctatgacggcggcatctgcacccgcgtagactgcgtgtcgctggggattgtggttaaccgcgatgccgaacgtttctatgacgaaggcgaagacttctggccgaagcgttacgccatctgggggcgtctggtagcccttcaggccggacaaatcggctattcgattatcgacagcaaagcgatcggccattttatgccgccggtgttccccggcgtacaggctgacacgctggccgaactggcccggcggctggggctggacgccgcgcgctttacccacaccgtgacgcaatacaatcaggcctgcagaccggggcgtttcgaccacaccacgctcgacgactgcagcacggaacatctgacgccgccgaaaacgcactgggcgcgcccgctcgatacgccgccctattacggttacgccctgcgcccgggaataaccttcacctaccttgggctgaaagtgaacgatcgcgcggccgtgcactttgccggccggccgagccgcaacctgtttgtcgccggggaaatgatggcgggcaacgtgctgggcaagggctataccgccggggtgggcatgtctatcggcaccaccttcggccgcattgccggtaaagaggccgctctggcggcacgggaggcgcagtatgcagccgcttga

SEQ ID NO: 456137 - DNA, 1038 bp, Serratia marcescens
atgggcctccgtttcccccccaaattggttcagggtgatctgattgccataacagcgccgtcatctggcgttccggccgcgttgcatcctcgtttggattttgcgatagccgcgcttaagcaaagaggctttagcgttgttgaaggagagtgcctgcgtaagcagtttaagaataaaagtgcgggcaggcgagagcgagcgcaagagctgatgtcttttttaacggatccagcggtcaaagcggtgatgccgccgtgggggggcgaactggcgatggaattgctcgaactattggattttaagctgttggcgaaaaacgaaccgaaatggtttatgggattttccgatctgagtaccttacatttccctttaacgacgctggccggctgggcgacgttacacggccctaatctgatggatcttggcgccaaaactctggatccgacaacgcaggcgatctggcgcattatggaaagcgaacgcggaacagtggttacacagcgctcatcaaacgcttttcaacttgctgaaaatggatggggagaagcgacagataaagggtttaatcttacgcaaccgacacgatggaaatgtctggatgaacaactcacttctgtcagttttagaggacgtctgcttggcggctgtttagagacaatatcacgattagccgggacaaaatttggcaattttccgttattttgtcggcagtatcgcgatgatggcgttatattgtattttgaaaatgcagaaatggcgccttgtgagttaacccggactttatacagcttgcgtatacacggctggtttgacgccgttagcggtatattgattggcagaagtgccgcgccggttgtaacgaatcctgaacaacaaaattattttgatgctatttgttccgcattaggccagcttaccattcccgttctatatgatgttgatattgggcatatgccgccacagctgtcattagttaatggcgctgtggcgacggtcatgtttacagagaggggcggctcgttgctgcaacaatggtaa

SEQ ID NO: 456138 - DNA, 183 bp, Serratia marcescens
atgccaagtctagttgagaattactgcaagctcgaggtcaggcatttcccgccattgaaaattcaggcgacgcagatatatcaacgcgtcccgccatacgggttttattgcccgcgccgcgctattagcgaaactcatcagcctgcggccatcatgaataacaatgttatcaacctgttataa

SEQ ID NO: 456139 - DNA, 141 bp, Serratia marcescens
atgcctatgaggaacgagggtttggctccctactttgcgagaattgccgtgatgagcaaactggttatgaggagcactgggcaagatttagtaaggattgatcatttagatttttaccgcacatataatatggagttttaa

SEQ ID NO: 456140 - DNA, 303 bp, Serratia marcescens
atgcagataacgcaggatgctgtcctgaaaatgtggtgggacaacgccacggccgacgtcaaccagatcaccgagtatcgccggctatgctgttgttattgttggggcttcggccaccagtatcagtggatggatgcggtggagcacgaggaggaggcggcgaaggtcaaggcaacgaataatctgagccatccgacagaggtggctacggctttgatgcgatgctggatcccaaccccgaatgccctcggtgccatggcgctggcgttggccgcgcacacttccatgattcctgcgatttga

SEQ ID NO: 456141 - DNA, 183 bp, Serratia marcescens
atgccaaaaaatattaaacagataattatattttcccttctcagtctattggttgaatttgcaccactccctgagtggcatcagcactgtcaacattcaaccactgaagcccaagtaacgcatgaacactgcctcggtacggaatgtgacagcctgcagttcaaatacaaaaatattaaatag

SEQ ID NO: 456142 - DNA, 831 bp, Serratia marcescens
atgagtacaccctgcatgtacagcataatacgctacctcccatacactgatacggaggagttcgccaacattggagtgatcctttgtgcgccaaaagctggctatttgtcatacaaattagctccaaaaaataatgctcgcgtaaaaaattttttcaacgattcaagcatttacccaattgcacgagactcatttaacagtgagttaaaatttatcaatatgaatgcatcagcgttttctaatgatgtcacgttggcaaattttttcatgcgctatgtggaaaaaagagagtcgatcttccaattcagtgacgtacgcgtatctatggctaaaagccctacacatgaacttgagcgactctatcaaaaatttgttaatgcttcagaggttacaaaagagagacgcgaggagattcttacccgggagcttaaagagcgttttcgccagcaaggtgattgggctagatattttaagcaagaatcccttgggaaagagctgtccaagttttcaatgcctctcgttctaacccgagatggagtagttgattgtgctataaaacctctggccttcgaccaagatgaaccaggtaaaatggtggagcattgtgatacttgggtagcaagaataacccgcgcagccagtgaggggatgctcaatttgaccaaggttttattgcctattgcccctcctctcgaaccaaacagcaagcaaacccatgctatgcgtgtgattagagaaacatttgatgaaaataaaatctctacgataggacatgaaaagcaagaaagcataattgactttgcaaaaaattgttatgtgacatctaactaa

SEQ ID NO: 456143 - DNA, 1566 bp, Serratia marcescens
atggaacatgttcagactgggaaccaggaaaggtatgccgccgtgggcgagggcaattacaccccggaaatgttcggcgctgccggtgacggcgcgaccgatgatcgcacggcaattcaggcggcgatcgatgcggcgcatcagtcttatctgtcgtacggaacgccctgttgcgtcacgctgggggcgagaacgtacatggtgtcgaaaaatccggcttcaaccgtgatcgccggtgaggtggccgccggctttggctgcctgaatatgcgttcgggcgtgacgctgtgcggcaacgggacgattaagctgatgcccggtacggcaggaaacgtccccggcgcgctcgtgaccaactggagcggcgcctgcaccgatatcagcattgaaggcatcacccttgacggcaatgcctcccaggtcaccgctgccagtatggtggcgatcaatatcgtcgattcccaacgcgtgcgcattcatcaggttcgggtgcataacaataatgtcggccaggccggcggtatttatttacgccgcagcggcagttcaacgtcggcgtatggctgtaaagagagccaggttaccgcgtgttatgttcaggatgtcgcctttatcggtattcaggccgagcgccccgacgggattatcatcgcggggaactacgtgatgaatacgggggataatggcatcgatattgaaggtaatacgccggagaatgcgtccggcaccgcccgccaaatgaatatcagcggcaatattttaagaaataacaagaacggcatatttatcgagtcctgttcgggcgccgttatcaacggcaatgatattgccgaggtggcggggatcggcattgtcagcaaccggattcattccggctcattcaataacgtgattaccaacaacaaaattgccggtacggccggtaaaacggcctatggcctgagggtgattaacagctctggcaactgtctgattcagggcaactttttctccagcctgcagagcgctatcaagcttaacggcatggcgacgcgggtttgtattggcgaaaatacccacgccgcgattgaacgctttatcattgagctgggggcgacggcggactatccgatcgccgcgctcagaagcctggtcggccggcagtttattatgggcgggcaggaaaacggcttcccggcgctgatatcgccgctgggcagcccgggcaacttcccgaatcgtttctcgatcggcacctgcgaacgcgggcattattctgacttaaacggcgcgggagaaatcaacttcacgcgcggcagcctggtgctgcagtaccacccggactggaaaggctacgccttatataattaccgcggcgacggctatacggaaattctggccacggcggcgccgggcgaatatttgctgattaacggggagacatacctggtggaggcggggcataccgcgacgcaaagaaggctgaagcgttgggatggcgggcagtatgcggatggcgactatcgcagctatctggaccagaactaccagggcgaaatcaagcggcgtgagtgggggacgctgtaa

SEQ ID NO: 456144 - DNA, 333 bp, Serratia marcescens
atggtaacggagcaagatgttttagcatttttccgcagtgagctgtccgtccctcttacctggaagctgaaagcgattccgcttgaactggatacgccgttacaggactacgcggcaggcgacgaattcttttatgcgatcgccgactatgctgaaaaattcggcgttgatgtgtccgtgatcgagatgcgtcattattacccttgggaaaatctatcccgctgggaacgctggaccaaatataaaaaagctgacatagaaaagagcagaaagcctttaaccgtgcgtatgttcgccgagtccgccaaagccgggcgctggctgtatgattag

SEQ ID NO: 456145 - DNA, 1368 bp, Serratia marcescens
atgagagttacgccaccacctaaactcaatattactgatgttaatattgattcgccctcagctttggtagataaatatcaccaaattacagataaataccttcattacgacgagttgaggcatcgagtcaggcagcagcaagaactcgacagtatgtggtttgtcatcaacttgacacgtactatttcactaaaacgcttttcgttgctggcattagctgaagatgaaaacaaacccggcattagtaccactggggtaatacagcgttcatgttcaattgttgatcgtttaacttcttcggcggcggaagccgagcgctatgaagaatttgatgctggcgattatcttatggctgagttagttgctgcggaatctatcgcatccagtcagttggaaggggcggcaacaacgagccgagttgcgttggagatgatcaaagttggcagattaccgcgggatgaaagtgaaaaaatgatcatggggaattaccgcatgatgaattttgttgctgaacatgcgggggatgaggtcactctggattatattcttgagttgcaccgtgttgcggtcgttggtgtcaatgatgataactatgcgccaggccagttccggcagggtgaagataatgttgcggttgttgatttggagggaaatgtgattcataccccaccgccagcagcgcagctccaggaacggctcactcgattgtgtgaatttatcaacacaccgcatgaaacgtatcagggggagaaatacttacacccgttggttaagtcgagcattatccattttatgatgggttatttgcacccattcagagatggtaatggtcgttccgcaagagcgttgttttatgcatacatgcttaaatgcggttacaccgcctttcggtatatctccattagtaaattgctcaaaaatgcgccggcgcaatatgtgaagtcctacctttatacggaaactgacggtatggatttgacctattttgttaattatcaaagtgaaattattgcccgcgccgtacaggagtatatcgactatattcgcaacatcattcgtacgcgtgaggagcttactcgctggttctaccgttccggcctgttgaccaagttgaacggacgtcagcgggatattgttctgatggcgatcagtcaacctggtgtattgttctcggcaagtgagattgccgaacggatgggggtggcggaaaatacggcaagggatgatctgaaaaagcttgcagaattagggatcatgcgggttttaaaagagggtaaaggcaaggtatatacttcgccaaaaagtattcgtgatttgaagaagtggcatcagaaaaaaaatagcgtcttgagtactcaagactggtaa

SEQ ID NO: 456146 - DNA, 258 bp, Serratia marcescens
atggggaaaaagagaatttctgattataccgaggccgagtttttggcattcgtggaaaagctcttcaatgtaaaaaacacaacggaagaagaggatataaagaacattatcgagttcaaacggctctgtgaacatccatcaggatctgatcttatctattacccagacgatagcagagaagatagtccggaaggggttgtaaaagaggtcaaagaatggcgcgcaaaaaacggtaaaccgggtttcaaaaaaggataa

SEQ ID NO: 456147 - DNA, 1413 bp, Serratia marcescens
atgagcgatgataaacatcaaaaaaaccacgagaataaacgcggaggcaatgacgactcctcactgtacacctaccttggtgatgggaaattcaaatttaaatctcagaccaaagtctgttatctgaagccgctgaatgcgctcggttggtcatgggtgatggatcggaacgacgggcaaggcgtcgcggcctgcttcgccagcgaagcagaaaaacgagctgcggtggcaaagctttccggcatgctgcctgcgccggagtatacggaaaaggaggcgcaaacggcctcctcgctgctggcagaagccggcgcgctggcactgaaccgggtatccggcgccatgcaactgtcggtcgccggagaaggcgtggcgacgctggccggagaagccgccagcgcgctgagcgccgcgctttcccgagtggcggcattgctgacagccagcgtaaccggcccggtggccgcttccgcctctgcgttattgttctcttccagcgtcggtgaaggcagcgataaagtaccaggacgtgacgttcccgcgttgttcagctacccggccagcgcgatgctgcccagagagtaccgtctgcagcccggcactgaaacggtcgatttaccggtgcgcgcctcgctggcggtgaaaaatggacagttggcgctcagcctgctgaaaaccggctccggcgaagttcccaaagccgtccaggtgctgacagcggtgcgggacgaggccagcgggctggataaaatcacggtgccggccgtcgcaggagccccggctcagaccattttgattaacccggcgcccgctaaaccaaccgcgccgtcaaataccggcaattcgtcgccggcgccggtgacgccggtgcacaccggaacaacggtgacgccggtagataacattgccaccactccccccgtgcctacgctggacgggtgtagggactttatctactggcagccaaatgcaaagggcaccggggtggagccggtgtatgtggtactaagcagcccacgtgatatgccaggaaaagttagcggcaatgggcaacaagtgggcgacggttggctgaataaggctggtcaagagttaggggcgccgattcctagtcagatagcggacaaattgcgcggccgtgagtttgtgaattttggtgcgtttcgtaaggcattctggactgaggttgggaaagatcatgagctaaacaaacagttcaagtcaggtaatctaggtaatattcaagcaggaaaagcaccggccaccagagataaagaacaggtcggagggcgtgttaaatatgagttacaccacatgaagccgattaaaaacaacggggaagtgtataatgttgacaatattagtgtaacgactccgaaacgccatattgagattcacagagaggtgaaataa

SEQ ID NO: 456148 - DNA, 732 bp, Serratia marcescens
atgtcaagactcccttctaaaatttataaatatcacgttgccaaccttcgagagttgcaattggctttgggtcatacaggtcgacttgctcgtaaagaaatcgcttcgaaagatcctcagcaggggctaaggtctcttcttcgtctttactcattcttggttggagcatggattgagactcgccttagaaagttactacatgaagaattcggttttactgagtctgaacgtaatcaaattgagcagaaatcatcgcaacttgagcaatggaaagaaactgttgatttagcttttcgcaagcatcataaaataactaaagcccctctggatgaaaggagtcttgggatagcacatgccgcacgaagagcagcattacatgatgttttgtcgaatgagctacgaatcctgatagaaatacgaaacaagctagcacatgggcaatggatctatcccttcaataatgaaggaaatgctgtggaacctgataaatttaaattaatcaataaagaaaacttgcagtcactccaattcaaatattcattagcggagcatttagctgacgctgtacatgatttggttgtaagtcctacgacattcgaacgagatttcgaaagccattttaaaaaattatatcaagtacgaacaaacttagtgacaaaagactacgaaaaatataaagcaagtttagtattaagtagagagaaatctcgtgctgctagaacgcagcaatag

SEQ ID NO: 456149 - DNA, 633 bp, Serratia marcescens
atgagtaagaagctaggaatggataaaagttcgttaagtacaatcgagaaggtacatatagtattccaagtttttttgcaggttttagcgacttccgctgcaatagcagtcgggatttggggatactattcagctgtttatgtgaataaggaaaaggaagttacagaatatactcttaaggaattagaacaaaagactaagcaagtaccacatatccaagcaaagattaactcgacggttcagcccatcggaaatggacttaacctgctacaggttaaagtaatactttcgaatcttggtaataaagaaagtaaaatttttttggacgatgaggctttgacgcttgtgcctgttagtttttctaaaggaaatccactttatcaacagccaataagcctaagcaccggtcgctacacaggtacatcccatcgtctggtactgccgttcattaatattggttctggagaaagttatgaacttacatttgtgcatagcttaaaggagtcggggacttttcttatccattttctggcactcaatggtataagtccccagggaacggaatcttttgattccgaggcgtcactatataaatactctgttggtgcagataattatatagttataaattag

SEQ ID NO: 456150 - DNA, 981 bp, Serratia marcescens
atgataaagcgaatggtgtatatatttttgttgggtgtgtcttttactccactacagctaatggctgcatgcaattggtatacggggagtcttgggacaatgaatattaatgttggaacgttaaataacctggcagaacaaaatataggggcggttgttttctccagaactgtttcccttgatagtgttggtagtcatttcggtatccggtgtggcgcatatacgcgctttaatatttatggcagcatgagcggaagtccggaaagtgggtatagtggtgtgtatcggacaaatattcccggactggggattcgtgtcagtatgtggagcgatacaatttaccatgaaacaccaaccacgccaacagtcgccccttttacatggcggatattttataataccagcgaaaattttgactataattatggctctggatatatacaggtaagagttgaattaataaagacagcggagtttgtcgagtcaggaaatcttagttatcaggttaataatatattggtcgcagaacagttgcctgtgcaaaaccttaatgttacaggacgggtgatcggtgggtgttctgtcagtaacagcgctattaatgttcccttgggtattgttcctagcaaccgtttttctgggccgggagacaccgctcaacctacggactttaatatctctttacgttgtagtgtagacactagagttagcgtcaggtttgacggtacagctgatggttctggcgctacaggtgttattgccctggatccgccaacgagcggtagtgcagctgaaggcgtagggatacagattatttataatgatcttcccgtaccaataggttcggatatttatgtgttaacgccaagcagtaatgggaatattgatgtgccatttatagctcaatattatcagacgagagatcgtataaatagtggtcaggcgaatggtacggtgacatttacaatgtcatatgattag

SEQ ID NO: 456151 - DNA, 354 bp, Serratia marcescens
atgaaaaaattatacttcctaaaatacggtagtgataaatctaaagaagaaataagcgaattactggataataaatgggatataacttgctctgaacatgatagctcctattttggcgtatacctctcttattctggtctttatgcggataaattaactatcacggataattatatcctagcatccgaagaatggttggatgaggaaaataagcactttaacacattagtaaaagtatcttttattaatgggaaaaatgctgacaaactgagcaggtataaatttttgaaaagctcgtttaaacagatggatatactatcgcttatcagtgatgaatgccttgaagaagagtaa

SEQ ID NO: 456152 - DNA, 123 bp, Serratia marcescens
atggcgattcagacgcgtggcgatggattaacggaggcggagaaaagtttcaccggtaaaacttttatggcggataatttattttattctaccgggcgcgcattgcctctgttcatttcttga

SEQ ID NO: 456153 - DNA, 639 bp, Serratia marcescens
atggacgcaaggcaagttgcgcaggggatcgctgaagggattgcatctataccagtaacatttgggtatagtgtccgccgtacatgggaaggttctggcgctgctggcagtgaccttaaagcgcggaacagcaaagaaacagagcgatttatcgccctaattcgttctgcagtaaacaaagaagagccgatcagaaaactggtgatgattgtcatcactgagttttacaccaagctaaatgataacggcaaaaaaacggtcaacggaaaactaaaccgcgttgaggggaagttagttggccgcagcctagcacagttttacgtcgccaataaaatagcatcaacccttatccgcaaggccagctacgggatgatttacaagcggttcatctcatacagcaccacggtatcactgaacattgtcatgttccaagggatgatcgagcaatccgctctagcatcacgtaggatgcaagtgaaatatccgtggctctattacaaagtgcggggaatgaaccttgatatggcctattttcttgtcgaggacttcctcgaaccatacctaatttacataagcagcccatcacagcagttttgcgcaggtgttgataatgaactcgataaaatcctttctcgctaa

SEQ ID NO: 456154 - DNA, 129 bp, Serratia marcescens
atggatacggttgaacagctaggtgaaacatacttctataaagggttcgcaaacctatcagcgcatgagttactgttctggatcacgattgatactgtcgaggaacagctaggcgttcaagatgtatga

SEQ ID NO: 456155 - DNA, 732 bp, Serratia marcescens
atggtcaagagatctggtcggactttcaaatatggagatatgccaataagagcaaaaactgttcaggtggtgcaggagcagtttggcggagcagcaacagccgtagaggtggatgaatatttgaagtctatttatccaaattatagggatgatactcgcctcaatctcattgttaatactgttaactgcaatagaagttactggagctttaataaaacagctagaagaacagatgatgagtctcatcggcaccatacatatgaccggttgtttaaacgcgggaatatatttgaaatatataatcctttagtccatggcgtatgggaattatatgaaaactcacaagggaagtggtgttttagagaggtgaaatctgaatttgaagaggctgtagatgctgcatctagactatcatctggacaacgcagtgaaatattagctaccaagagtaaaaatcccgattttatagaggtgacatcgcgagtatttaagcgaaacccatatgttgttgcagaggttatatttagagccaatggtaaatgtcaatgttgtaaacgtgatgcgcctttcaaacgtgaagatggtacgccatatcttgaagttcatcatatcgaatggctgtctagaggtggagaggactctgttgaaaatgcgatcgcgttatgtcctaactgccataggcaagcccactacggagtgcttaaattatctgctattaattcatgccattag

SEQ ID NO: 456156 - DNA, 2190 bp, Serratia marcescens
atgttaccgatagcacatgttaagttaaacgcagatggcgaatgggctgaatcacaccgattagatgaacatctacgttgtgttgccgtgtttgcagagcaattttttatacgccccatgtcagggtgggcggtacttgtggggcgatggcatgatttaggtaaataccgaccatccttccaaagctacattcgtaataagtcaggttttgagtcagaaagtgcccatattgagcaacagagtgggcgagtgattcattcaactgcaggcgcattgcacgcaattgatacgttaggtgccggctatgggcatatgttggcctatctgattgccggccatcatgcgggtttacctgattggagtggcggaaatggatcactacaggtacgtcttgcacaggcgcaacaagaatatacagaatcagtctcctcacaagtacctgctgacattctgacagctgatgaccaacctctcattaatccaacattaactcctgaatcggtagctttgtggctacgtatgctgttttcctgtctggtggatgccgattatctggatactgagcgctatatggcaccggacaaatttgccatgcgcggcaattaccccactttgtcgggattacataagcgctatcgtgattttatggccgggttggtagggcgtgccccaagtacacagctgcagaaaatcagggcggagatacttacgcaaaccctggcggcagcggttggagtacccgggatattcagccttacagtgcctaccggtggcggtaagacgctggcaagtctgggatttgcccttgagcatgcgatcaagcatggaaaaaaacgcatcatttacgccattccttttaccagcattattgagcaaaacgcggcagtctttcgtagggtactgggggatgaggctgtattggagcaccattgtagccttgatgatgatggcaatgtatataggcggttggtgacggaaaattgggatgctccggtgattgtcaccacaaatgtacaacttttcgaatcgttgcatgcatcacgtacgagccgctgccgcaagctgcataacctcatcgatagcatcatcatccttgatgaagctcaacaattaccacgcgacttccaccagccaatcactaacgtcatgacacaactcagtgagttgtttggcgttacctgggtgttgtgtacagcaactcagcctgtattggcagaaagccgggatgtgtttggtaagaagttaatggaaggggtgaaggttaccttttctgccgaacctatgcattggcaacagattgcagacgaattgaccggggaagagtgtgttctttgtatcgtcaacacgcgtcgccatgcacgtgaacttttcaacttgttacccgacgatgataaccgtttccatctttctgctcatatgtgtgcggctcatcgtagtcaggtgattactgatattcgccaacggcttgaagctcgccgtcagggagataaacggccattgagagttgtcagcactcaattggtagaagcaggggtagatcttgatttccctgcggtatttcgtgcgatggcggggttggatgcaattgcccaggctgcaggacgctgtaatcgtgaaggtgtaatggggaagttgggcagagtgtgggtatttatgcctacagactcagcgccagttggtctgctccggcaggcagaacaatgtactgtggccatgttgaaagctggtctgctatctgaacctctgtcgccgcaaactcttgaacaatacttcatgcgtcttaatagccaaggggagcgtgataagcacaagatttgtgagaagttgacggccaaatactcagcagattcccctctcattattcaatttcgtgaggcagccgacagttttcgtttaattgatgataaaggcgtggcggtgattgtgccttactgccctgagcatcaggatgaaagtccggtatttatgctgctcaatacattagaaagtgatcccacggccaaatgggggcaacgaaaactacagcgttacagcgtgacgctacctgagtcgttggctgaagcgttacaagctatcggtgctctgcaagtttgcgcaggccagttggtgttattagaaagtcactaccatccatgttggggagtggaattaccggatacgttgttatctgtggaacgttcagttatttga

SEQ ID NO: 456157 - DNA, 663 bp, Serratia marcescens
atgggattttgtctggatatcagtggtgatttcgcctgttttacgcgcccagagatgaaagtagagcgtgtgagctacgatgtcataaccccgtcagcagcccgcagtgtctttgaatcgatcttgtggaaaccggcgatacgctggcaagtgacccgtattgaagtaatcaaccctatacgttggattaacctgcgccgcaatgaggtaggctcggtgatttccagccgtaatgtgaaaacggcgatgaagtcaggcaaagggagtcttgggctttatatcgaagaggatcgtcagcagcgtgcggggttactcctgcgcgatgtccgttatcgtctttatgccgaatttcatctcactactaaagcgggtggcggtgataacgcagcaaagtttgccgatatgtttcgccgtcgggctgaaaaggggcaatgtattaaccaaccctatctgggatgcagggaatttgcctgtgactttacgttagtcagtgatgccgagcgtcagcctctgccgttaactcaggatatcgatctgggttggatgctctatgacatggattacagcgatccgacatcacctaatcccctgttttttcgggcgcagatgatacaagggcgaattgatatcccggccttggatagcccggaggtatacgtatga

SEQ ID NO: 456158 - DNA, 1728 bp, Serratia marcescens
atgatcctgcaagcattatgcgattattaccaacgcaaacaggccgaaccgaataccgcgctggccccatttggttttgaagaaaaagggatcccgtttctggtggtgatcgatcgcgacggccgatttattcaatttgaagatacccgagcgatggagaggaaaaagccaataccccgtcgttttatggtggctaaaagcgtaaaaaaatcctcgggggtggcggctaacttactgtgggatcctgcgaactatgttttggggattgatcaaaaagacaaaccgcaacgcacggaacaacagcggcaaagttttattgagcagatccgcttgctattgggggatgcagttactgatgttggcgtagctgccgtgctgcgtttctatgaacgaccggaacagaatttaactgcggatttgcattgggcagaaattattgaaaccaacccggtaatgacctttagcctgttggaggatgggggacagattgtgttccatcggcctgccgtgttggcggcttaccagcagtctattaacctgcagggtgatgtggcctcccgctgcctggtcaacggaaaagtgctgcctgtggccaggctccatccctccatcaggggggtatggggtgcgcactcctctggagccagtctggtttcatttaataaagatgcattcaggtcatggggaaaagagcagggggccaattccccgatcagcgagagagcagcatttgaatacaccacggcactgaattacctgttagaaacgaatagccccaaccgtatgcagctgggcgaaacctcagtcgtgtgttgggctgcccaagatcatccgctggaaaccctgttacctttcattttcgccgatagtcctaaagacgatcccgaccgtaatgttcgtgctgtgaccaagcttggcgacagcgtgcataacggcctttatcaagggaccggggccactgagcgtttttacttgctggggttatcgcccaatgcggcacgggtggctatccgtttctggctggtagggacagttgcagattttgctcaacgtttgtggcaatggcttgatgatattgagcttgcggggagtagtgattcgccaagacgcccatcgttgaaaaccttgttacgtagtacggcattactgggtaaagaagagaatttgccgcctcactgggtgggggaggttgtacgggcgattttatcaggttcacctttacctgctgctttactcactggggtattgattcgcattaaagcggaatcaggtgcggtgaatggttaccgaactgcgttaatcaaggcgtggttaaaccgctattttcgtcagcaaaaattcaaggaggtcactgtggcactcaatctggaagaagaccgtatcggctatctattgggaaggctgtttgctgtgttggaaaaattacaaaccgatgcaagcccagggcttaatgcaactatccgcgatcgctattacagcagcgccagctgtacgcccaaagcggtgtttggcaccttgatgcgtttgcatacccatcatctgaaaaagctggataaacctggatatcgtattgcggctcaaaatcgtatccaagagattattgcggcaattaccgacttcccggcccatctggacctgactcagcaggggctgttcgctatcggttactaccatcaacgtcaggatttaactcccaagaaaacatctacccaaggagaggcagcatga

SEQ ID NO: 456159 - DNA, 882 bp, Serratia marcescens
atgagtcttaacaatcgctatgagttcgttctgttatttgacgtcaaggatgggaaccccaatggcgacccagatgcgggcaatttacctcgtgtggatgcagaaactggccaaggcttggttaccgacgtctgtctgaaacgtaaagtacgcaactttatcggcctgcataaaggagaaataccaccctatgaaatttacgtcaaagagaaagcgatcctgaataaaacccatgagcgtgcctatgaagggattggcaagtccgacttgctgaaaggcgatgataaaaaacgcaagggaggggatgcggtagatgaggctcgccaatggatgtgtaaaaatttctatgacattcgtacctttggcgccgtgatgtctaccggtgttaactgtggtcaggttcgtgggccggtacagcttacgtttgcccgctccattgagcctattgtagcgcatgagcattccattactcgctgtgccgtggcaacggaggcggcagcacaaaaacaggatggtgataatcgtacgatgggccgtaaaaatactgtgccttatggtttatatcgttgtcacggttatgtttcagcgcatttggcacaacaaaccggtttcagtgaggacgatctcaggctcttttgggattctttaattaatatgtttgatcatgatcgctcagccgctcgtggcgaaatgaacgcctgcgctctgtacgttttcaagcacgacagcgtattgggcaatgcccctgctcgtaaacttttcgataccatcaatattgaacgtgtgaccgatggccccgctcgcagtctgtccgattaccgcatcagtgtgactgaggagcagattccaggtggtgtaacgctgcacgttatgctggcgtaa

SEQ ID NO: 456160 - DNA, 627 bp, Serratia marcescens
atggctgatacgcgactgattccgctatccgcactgcagcattatgcattttgtcccagacagtgtgccttgattcataatgagcaagtgtgggctgataactggttgacagcacagggagcattgctgcatcaacgtgtggaccacggtgagccagagacccgcaaagggatacggtatgaacgtggtttgcccgtcagtgcgccgcagcttggtctttccggcaagctggatctgttggagaaagatctctctaccggggcactaaccccggtagagtataaacgcggtaagccaaagcgtcatgatagcgatgctattcagctttgtgcacaggctctctgcctggaggagatgacaggacaagaggtggctactggagctgtgtggtactggcaaactcggcatcggctggacattgccttggatagtgccctgcgtcagcgaacactctcggttattgcctctgttgctgaactgttgcgttccggtgagacacccaaatctcagtccggaaggcactgcaagtcttgttcactgcttgatgaatgccttcctgctcaacagcaagatacctccattacctatgtgtcggcgatttattcctcagcggaggaggataaatga

SEQ ID NO: 456161 - DNA, 1026 bp, Serratia marcescens
atgaagaaactccagaactgtctttatatcaatcgtgatggtgcttatctgcataaagagcgggaaacattattgatcgagcagtcgattgacggccagcgccagaaattgctgcaagtaccgatccattccgttggtaatattttctgcttcggtaatattatggtgtcgccgcaattaatggggttctgtggtgagaatggcacccagctttctttttttgatcgctttggccgcttccaagctcgggtggttggtaagcaaacgggtaatgtgttgttacgtagagcacaatttcgttgtagtgaaaatggtgatgcgacgatcgctcgtaatgtggtggccgctaaaattcaatcgtctcgggtcgtactgatgcgtcatttacgcacttatggcgaacaaacagatattcgcgtggcaacccataggatgcgtcagattgttgcggaactggccgtacagaccgatattaatcggatacgtggtttagagggggaggctgcaagccattatttcggtgtatttgatcgattattgactcgtcgcagcggttttgttttcgatggccggaacagaagaccccctcgtgatccagtcaacgccatgctttcatttttgtattcgctcatgtctaaagagatcagcggcgctttgcaaggcgtagggttagatccacaagttggttttttacatgttgaaaggccggggcgtgatagtctggcgctggatttgcttgaggagtttagagcccccattattgatcggttagtgctgacattgattaaccgacaacaattgaaaacagcggattttactaccgatatattgggaggtgtgatcctcaaggaggatgccagaaaactagttctccaagcatggcaaactaaaaagcaagaagaaattatccacccatttttacaagaaaaggttgcaataggtttattgcctcatgtgcaggctatgttacttgcccgccatttgcggggtgatttggctgtatatcctccttacacatatcgttga

SEQ ID NO: 456162 - DNA, 264 bp, Serratia marcescens
atggatacggttgaagagttagctggaacgtacttctatgcgggaaggtataatctcagtgctagtgagttgttttttatgatcttctgtgaagagacggcaactcagttaggtattgaggatattgccgccgtagcttttatccatgcggggagaaatatttcaccaacacgggggaattttggagggctatacctgatacctcttttgcatcccgacaggcaagaaaagtatttggcaatagaatgtttcctctcggattga

SEQ ID NO: 456163 - DNA, 417 bp, Serratia marcescens
atgcgcggcatcgaagccaccgccggctggaagttcgccaaagactggcagctgaccaccaactatacctacaccgagtcggagcagaaaagcggccagttccagggtaaaccgctgaaccagatgccgaagcatatgttcaacaccgtgctggactggcaggcgacgcacgacgtcgatctgtggacccgcgtcaacttccgcagtaaaacctcggagtacctgagccgcacctcaatggccaagagcacgccgtcctataccttcgtcgacgtcggcgtcagctatcaggcggcaaaaaacctgcagctgaccggcggggtgtataacattctcgataagaccgtggattacgagcactacaacaccacgctggacggccgtcgctacaccgtagggatgagctataacttctga

SEQ ID NO: 456164 - DNA, 921 bp, Serratia marcescens
atgaaaacgctgaataaatcccgtccgcgccgcagcatgctgttcgtgccgggggccaacgcggcgatggtcagcaacgcctttatctatcaggccgatgcgctgatgttcgatctggaagactcggtgatcctgcgggaaaaagacgcggcgcgccggctggtgtaccacgcgctgcagcacccgctgtatcaggaggtggaaaccatcgtgcgggtcaacgcgctggactctgcctacggcctggcggatctgcaggcggtggtgcgcggcggcgccgacgtggtgcggctgccgaaaaccgacagcgcgcaggacgtgctggatatggcggatgaaatcgacgccatcgaacgcgcgtgcggccggccgcagggcagcaccggcctgctggcggcgattgagtcggcggcgggcatcaccaacgccgtcgccatcgcccaggcgtcgccgcgcctgatcggcatcgcgctcggcgcagaggattacgtgcgcaacctgcgcaccgaacgttcgccggaggggattgagctgctgttcgcccgctgctcgattctgcaggcggccagggcggccggcattcaggcgttcgacaccgtctattccgatgccaacaacgaggccggtttcctgcaggaggcggcgctgatcaaacagctgggcttcgacggcaaatcgctgatcaacccgcggcagattgagctgctgcacaacctgtacgcgccaagcgccaaagaggtggcgcatgccgagcgggtggtgcaggccgccgaggcggcggcgcgcgaagggctcggcgtggtgtcgctgaacggcaaaatggtcgacagcccggtgattgagcgggcgcgtctggtgctgcagcgcgcggcgctgtccggcattcgtgaagaagcagcgcacagcggggaggcgcaatga

SEQ ID NO: 456165 - DNA, 792 bp, Serratia marcescens
atgtcaatgacccattatgttgacatggggccgacgcttgtaccctctgagatgaatgctgggtattttaaattaactgatgatgtggatgttaggatagggagtggctcaccaattaaatacttccctttggtaccttctgatgggttgattggcttgaagtctcccagctcatatggggaaaatataaaggtttctgggttcagtgtggccggtagtgggatcgtggagataaaattaaggcgggatattattggcggcgctattgtcgtaccgtcagataccgaacttttttcagcctacagggttatggattggctacctcctccgccgcgaccaagccggccgatagttcaggcgcgtaccaaaggcggcggacaggtgatagcgataacgccggaatgctcgattaaccagggtaacgttattgaggcgaatttccatacgctgcaaacggatcaggtggtcagccgcagcgatggcgaacgctacagtaaagatatcgccctgcgctttagctgtaatagcagcctgacgcaggatattaaggtgcagctggtggcggatagcgccggtttttcatcagatcttatccgtagcgataatagcgccttagggttcgcgctaaaacatcacggtcagttggtgaagccgatgacctcattccccgcccggcttgacgcggggacgggcaatgcaacggttaccctgacgccggtaaaggatcctgacgttgcgttaaccgccggtgcttttaacgcttcggccaccttggtgattacgtcgctttag

SEQ ID NO: 456166 - DNA, 897 bp, Serratia marcescens
atgacgttatctaagttactgctccctttgctgattgccgggaatctttcttctgcgtgggctgccgaacagattgtttcgtcttccaccacctttcatgtcaccactgatgatgcgctgaaaagtaagcttccggcggatattgccaaacgcggatatatcgttgcaggcaccaatccgaatactccgccaaccactttttttcaggaagacaataaaacgctcgccgggcgtgagattgatgtgatgaatgccgtggcggcaaggctcggtgtggaagtgcgctggcaggataccggcggtttcgacaacatcattccggggctgaaatccggtcgctatgacgtcgcgctatccaatatcaatgcgaccaaaaaacgtctcgagcaggtcgatttcgtcagttattacgatgcgtcgcgcttgggtgtgatctcgcgtaaagacgccaatattgcgccatttacctcttttgatgcggtgtgcgggcaggaagtaggggcaggagcgggcactacgcagatcgggcgtcttgaagcggccagcaaaatttgtactgatgccggtaaaccgccgatcaagattgccgtattcccggatcgtccttcaggcgtacaagctgtggtcagcggtcgggtaccgatgttcttcggcccgtatgaaggtctgacgtatcaggttagccaggttaaaccgctggcgctgaccggcaccattcatgtggatgatgcgcctgtatctgtggcgttttctaaacagtcgggactggaagatgcggtgcaggcatccctgaactcgctgatcaaagacggcacttaccagcagatcctcgataaatggtccatcggttttggcgcagtcaaagaatcaaaacgtaatgaagagattttcggatga

SEQ ID NO: 456167 - DNA, 939 bp, Serratia marcescens
atgagcagtgaaacacacgaacagcagccggaagcactgcggatcgtcggtaaaaaatatatcgggcgctggataagcgccctgatcgtattgctgatattgctggctatggggaactccatgctcagcaatccgcgttttgaatggtcggtgatcgccgaaaactttaccggcccgtcgatcattcagggcgtactgatgacgttgcaattgaccgcaatttccgtggtttttggctttgcaggcggcacggttctggcattgatgcgcctgtcatccaatccggtgcttgtcgccgtcagttgggggtatacctggtttttccgcggggtgccgatgctggttcagttgtttctctggtacaatattgccgcgctttacccgaatatttcgatttcgctgccgtgggtaggtgaaatctggagcgcttccgcgaactccctgattagcccgttcagcgccgccgtgattgcattagtcatgcatcagtctgcctatgccgcggagattattcgcgccggtattcagagcgtcggcgctggacaaatcgaggcggcacgcgccttgggttaccgcccgtcgcagatatttcgccacaccattttgccgcaggcgatgcgggctattctgcctcctgcggggaatgaagtgatcggtcagctgaaagccacggcggtcgtttcggtgatttcattacaggatgtgctgttctcggcgcagattatttatcagcgcacctatgaagtgatcccgctgctgctggtcgccacattgtggtacctgttgctgacgtcgttgctgtcggtgatccagtattacgttgaacgacattttagtcgcagcagtcaccgtaaggtgaaacgtaaagtcacgaaaaccggagcagtccgcacggtcagcactgtcagtctcagcgcaggagaaaccagccatgggtga

SEQ ID NO: 456168 - DNA, 762 bp, Serratia marcescens
atgggtgaagccattgaatttcgcaaagtcaccaagcgtttctccggtaataccattctggatgaaatcagtctcgatattccggccggttcggtcacggtgatcctcgggccttccggctcagggaaatccaccttgctgcgctgtatcaatcatcttgaaaaacttgatggcggcacaatccgcatcggtggcgaactggttggttatcaacagaaaggaaccgcgttgtatgaactgggcagccgcaaaattgccgcacagcgcagccgcaccggcatggtgtttcagcaatttaacctgtttccgcaccgtacggttttgcaaaatattatcgatgcaccgctgcgggtgaagaagcaaaaccgtcagcaggtagtcagtaaagcccgcgcgttgctccagcaggtcggattaggcagccgcgaagatgactggcctcagcagctttccggtggtcagcaacaacgcgtggcaattgcccgtgcgctggcgatggacccggaagtgatgttattcgatgaaccgacctccgcgctggatcccgaactggtgggcgaagtgttgcaggtgatcaaaaagctggcgcattcagggataactatggtgatcgtcacccacgaaatcggctttgcacgtgaagtggcggatagcgtcatctttatggagggcggaaaaattgtggcgtcgggaccgacgaaaagcgtgctggatgaagcggagaacgtccgtgtccgccattttctgtcgactgttttataa

SEQ ID NO: 456169 - DNA, 1335 bp, Serratia marcescens
atgacattaacgcagtcgctggcaaaacttatcctcagttcatccccttctccagccgctcatgaagcagcccgcgaagggttgctggattttctggcagtcaccctgccggttttacacggcgatttacccgatgcaggactgaacagtttgcatcaggtttaccgcgctgacgatcaggcaactcacgcgttactgctcgggtatgccggtcacgcgctggattttgatgatttccatcccgactttcgcggccatcccggcgtggtgattttgcccgcgctgttggcgctggcctcacaacgaccagacatcagcggcgcgcagtttctcgatgcgtacgtgaccggagtggaaatggccggacgcctcgggctggccgccggttctcagcattacaaactcggttttcacaataccgccacgctcggcacgattgcggcctccgcggcctgtgcgcggctggtgaatgccactgaacggcaaacggcgttgattctgggtatcgcggcgacgcaatccgcaggtttacgtgcgcagttcggcagtgacgtcaaaccgctgcacgccgggttagcggcgcagaccgccgtcattgccgcacagctgatgctggcaggctttcacggccagacagacaatgtgcttgacagctttttatcggcttattgcgccggccagcaacagccggaaaaactcatttcagactggggcgcgccgtggcggattgtctcgcccggtctggaattcaaaccctatccgacctgcggtggcacgcacagcgctgccgatgccgcgcggactattcgtcatgactggctgcaaaccggtcaaagcacagacgcactgatcggcgccatcgaacggatcgaggtgtctttcccgccgggcggtgatattgcggcgtcggtgcgaaaaccggcaaccggcgttgaagcgcggttcagtctggaatacgtgattgcagcctgtctgctgcgcggaaacttacgtttagaggatttcaccccgcaggcggtggacgcaggcacagccgcgctggcaggacgtgtctcgcgttgcccggatttctccgcaccgccggacgagctgaaccccgctgcacgttttcatcaggtgacggtattcttacgcgacggcagtctgctgcaacggcgtttcacccgtcagcaaagtctggcgatcccgtttgatttaccggcgaaactgcgcgtctgcttgccggatttcactgacgcacagcggacagaaatcgtggcactgagcaggctggacagccgcggcagtctgccacggctggcaaagatgttgtttgggaaacgggtgacgggatga

SEQ ID NO: 456170 - DNA, 336 bp, Serratia marcescens
atgagtcagcggaagcatttttcggcgcaattacgtcttcagcaggccatgaccatttttaccgggtggggaatgcccgaaaatattgcgctggaaaccgatttgctgggcattgattctcacggcatatcaatgccgtcgcattacgacaaattactccaggaagggaaatggcgccctgatacccaggtagtggctggtgaaccggaaaaccagaggtatcggcaacgccagcgcgacgggatcccggtttcagccccctttctgacgcaattgcatgcgctctgcgagcgtgaacatttcgttgatttattatctccggttactcgggcttga

SEQ ID NO: 456171 - DNA, 1185 bp, Serratia marcescens
atgtcagatatcacgcaggaacatcagccgctggcggcgtttattcaggattttcgccaccacatgcaccgccatccggagctgtccaacgaagaagttaacaccacagccagcatccgggcggtactggagaagtatcaaatccgcgtgatagatttgccgctaaaaaccggtctggtggcagaaattggcggcatcaatcccggcgaactggtggtgctgcgttctgatattgatgccctgccgattgaagaaaaatccggagtggattacacctcgcaaaatcccggtgtgatgcacgcctgtggccacgatttccatacctcggcggcgcttggcgcggcgattttgctgaaaacacaggaagattctcttttcggcacggtgcgcattctgtttcaggcggcggaagaaaccggtcacggtgccccggcgctgattgacaccggcgcactcgacaacgccgccgtcattttcggcattcataacgatccttctttaccggtcggcgttatcggcagcaaagaaggcgcattaacagcgggcgtggatcgctttgcgatcaccatctccggtaccggcagccacgcggcacgtccgcacgaaggcaacgacccgattattatcgccggacaggtgatttccgcgttgcaaaccctaatcgcccgcaacgtgcagtccgcacacaacgcggtggtttccatcactcaggttcacagcggcagtacctggaacgtgatcccggattccgcctggctggaaggcaccgtccgcacctttaatcaggacacacgggaactgatagaacgccgtttccggcaggttctcgcgggcatcgctgctgcatttgataccgacatcatcctcgactggcaacccggcccaccgtcggtgaacaacacggccaaatgggtggatttcgcgctggcgcatggtgaaggctccggcttcgaagcccgccgcgttgaagccagcccgattggggaagacttcgcgttctatcagcaaaaattgcccggcgcgttcatcatgatcggctccggcggcccttacgcgctgcatcatccgcaatttcgcgttgatgatcgcgccctgtttccgactgcacattacctgtcgcaactggcggtacaagcgctgcgcactctcagtgaggaaattctccgtaaggataaaatcgcatga

SEQ ID NO: 456172 - DNA, 537 bp, Serratia marcescens
atgacacagcatttcaggcggctgacgctggatgataaacacgattatctggcgctgatgctggccgcctacgcgccaatcaaaacactcgggattcagtttgatgctgccaccaccgatctggcacgcgtgacacaacacctcgacgatcatgcggtgtttgcgctctttgataaccagcggatggtggcttcggtgaccctgcgcttcccgtggggtgcaatgcctggccccatgggcctgccgcacattggctggttcggcacgcatccagattactccggtcagagactcggcaaaaaactgctgggctggctggaagacaacattctgagccgcgaattgaaagccccggcttactcactcggcaccgccaccagccacccgtggctgcgcgatatgtacctgaaactgggttttcagccggtcttcgaaagagacctcggcaaaggacacaccacgctgtacctgaaaaaaattctcgatgcaaaaggccacacccgctggctggaacatcagccacctacaggagcttaa

SEQ ID NO: 456173 - DNA, 327 bp, Serratia marcescens
atgtcctcacatccgatagcttttcttttacttggtaataattttggcacaccagaaatgcggaaaatctggtcagcgcaaaatcgcctgacacagcaaataaatgtcgacgttgcgctggcatcagccgaaggtgaactgggtgtgatttcgcaacaggccgcgctgagcattgcgaagctggcgaccagtattactgaacaggatcttgaccacgggttggatccggcccattacaccggcagccccgcgcaaaaagtcgatgacgtcatccgctttgccgtgcagtccggtcatctgacttcgcctgaggaacccgggttatga

SEQ ID NO: 456174 - DNA, 423 bp, Serratia marcescens
gtgttcgccataaaatcaccgcagacctatcattatcaaccgggcctgctttcacgcaccggtgagctgcttgccgatcattcctccgatatcgcgatcatcaccagcccgaaagcgtggcgggcggtgaatccgcaactggaagccagcctgaaggcggccggtattcgctggcaggtcaattttctcaccacggaatgctccgatgcggctatcaaaacgcatctggtcagcgtacgggaacaaaacgccacgctggcactgccgccactgaatggcgaccgtgacatgatcatcgcggccattgcccgcgaagtgaaattctccaccgaaaatgccgcccgcttgccgttctcaatggctgcggaaaatatcgaaaaagccctgcgggcaactgaaattcaccattattctcagggataa

SEQ ID NO: 456175 - DNA, 1332 bp, Serratia marcescens
atgacctcttcttcatcttcttcaaaaaacacccatcaattgcgtcttggtctgtttgtgcagccgctcgggcatcatgtcagtggctggcgcttaactgaaaacctcggttcgccgaccgatatcgactggctgacgtggatcgccaaaaaagccgaagagggaaaatttgatatgttcttcattggcgatgccctggcaaccagcgtctaccgtttgccgtctaccatggcgcggctcgaaccgctgactctgctgtcggcactggcagtgcaaacccgccatatcgggctggccgccacggcttcaacgacattcagcaatccgtttaatctggcacgcagcttttcttctcttgatcacatcagccacggccgggcggcgtggaacgtggtgacgtcgttttcaacggatgtggcgcgcaatttcagccgtgacgatatgcccgcgcatgctgaacgttacgccgtagcacatgagtttctcgaggtgacgttcaaactgtgggaaggctggcaggaaggggcggtgcagccggacaacgccagcggccagtatttcgtcaatgagaaaatcaattcggtgaaccatcagggcaagtattttcaggtacaggggccgctgaatattacccgttcgccgcaggggcgtccggtgattatcgaagcgggttcttctgctgacggccagaaactggcagcggccaccgccgaagtggtatttaccgctgccgcaacgctggaagaagcacagacgttttaccgtgcgcagaaacagcaggtgaaagaggccggacgtaacccggaacatgtgctgattttgccgggcgtaatgcccattgtcggccgcacacgggaagaggcgcgcgaaacctggcgcgaactgaattcgctggtagatattgataatggcatccgccaactgtccacccgctttaatatggatctgagtgtgtttccgctcgacgggccggtgccggatgtgcctgccggtgaaggtaatcagagccgtgtgaaactgctgaccgatctggcgtatcgcgaaaatctgaccttacgtgaactggccgcaattgctgccggttcgcgtgggcatcgcgtgctgatcggtacggcggaagatatcgccgatgatttccagcattggctggaagaaggcggggcagacggttttaacatcatgcctgcagtgatgccggaacagctttcgctgtttgttgagctggtgatccccgaattgcgtcgtcgcgggttgttccgtgaagaatatgaattcagcacgctgcgtgaaaacctcggtctgcctgagcctgactttacccctcagtcttaa

SEQ ID NO: 456176 - DNA, 1911 bp, Serratia marcescens
atggaaaagctctgggggcatccatcgttaccggtcaaaacccggctgtcgcggctgtatgtcgcgctggcggcggcgctgacgctggccggtacggtcggcgcggcctatgcggaaaacatcaatgtcgaaaacggcgagaagcggatcagagaggtggacggcgccggattcggtaaggtcagcggtaagggcagcgagtggcgggtcagtgatgtactgtcgatcagcgccgggctgtatgtgctggatggcggtgtgatgagcatcggccggctggattcggcaggctcgattgttggcactaaccgttcgacggaaattgtcgttagcggcagcggttcgcatctgcaaatagaaagttatccgagaattgaaatcctctctctgtccgatcatggccgttttagcagcgcgagtgataggttagagatccatggcggcctgataataggcagtcgcggcaccctggatggccatgcgcaggatgatgaagatgtggtggagaaagggtgggatatttttaccctgggggaagcacaggcgcccggcatattggatcctaatatcgtcgtcttctttgatcgtgatacatatttgggcgggcgctggaactccctcatcttcaaccatactgcggatgactatcagtttgtcaacagcgtcagggacgacgagggacatgcgtcaatagccaattttgccggcaataccaccatgtccggcgacctcagtgagttccacggcgatattttcgttaaaggcggcaagctgacgattaactctgatgtggggcgctacaagagtgatcctccttatcaaggtttatacgttgagcgcggcggtacgctgatcctcaacggcaccatcgggggatttggacgcggcatcggttttaccacttcactgtttgttgatcccggcgcgaggctgggcggcgatgcgaccatcggtcgtacgattatcgagggcggcggccatattgctcccggcgacggcagcacgggcaagttcgacatcaacagctatctgacctttaaagacggcgcgttttatgacgtggatatcgccgccgacggccgcagcgataccatggcggtggtcggtcagacgacgatcggcaacaacgtgaaggtgctggtgaatatgctggatccctacaccagctatcaggatgaacagacctaccgcatactcacctccgaaaaagatattgccggcatgttcagcgaagcggtgctggattcggcctttctggaagcgacctttaaacgcggccagcagtttatcgatctgctgattaaacaaattacccccggcggtgatgtgacgctggacggcgatcgccacgtttcccagtctgtctcctatgccggcgcggtcagtatgggtcaggataaagccagcaagtggttgatagacggcggtacgttcagcgctaaaaagctgattatcggctctgaacgccagtcgcaggcggcggtgcaggtggagaacggggctaaattggtgaccgaacgggcaaggatcgactacggtctggatgatgccgactatcaacaccggccgatggcgacgatcagcggtaaaggcagtgagtggcaggtcaacgactggctgtcgctcgccggcaagttggacgtgctggacggcgcgcaggtgaaggttggcgatctgctggcctctgaacgtcccgccgaggcgaaaaaatctgcggaaatttacgtcagcggtgaaggctcgcatctgcacacccggggaactaccgacgccgatgtgctggcgctggcaaacggcgggcgcttcagtaacgataataaacagttaacgccgcgcagcgcgctggtgatcggcagccgcgcctcttttgacggctattcggcggatggcccttacggccacgagatctga

SEQ ID NO: 456177 - DNA, 363 bp, Serratia marcescens
atgaccatcgtcaccgccgccgctatgaccatcgtcaccgccgccgctatggccgtcatcaccaccgccggtatggccgtcatcaccgccgccggtatgaccatcgtcaccgccgccgctatggccgtcgtcaccaccgccgccggtctctttctgccggatggtcagatcgacgttttgatgatcgcgcgtcaactccgtgtccaaaaaggccgagtccagcaccgcttcactgaacataccgttaacgccgccgccggcggtcagaatgcggtaggtttgcccatcccgatagctggtgtgcggatcgagggtattgaccaataccttgacgttcttatcaatgtaggcgccgccctgtga

SEQ ID NO: 456178 - DNA, 561 bp, Serratia marcescens
atgaacggtcaacgtattggctacattcggatgagtcactttgagcgcaatccggaacagcaatgggaacaactggtggtagataaagtgtttacagataacgcgtcaaacaaagacgtccagcgcccggcactggatacgctgttctcgacggtatgcaacggcgacaccgtcgtggttcccagtatggataggctggcgcgcaacttgaccgacctgcagcgccaggtgcgcagactggtcgataagggcgtgtgtattgagttcgtgaaagagcgtttaacttttagcaataacggttcatcaatggcaaatctgatgctggccatgatgggggcatttgccgaattcgaacgtgctttaaggcgtgaacgtcaacgagaaggcatcgagtcggccagaatgcgcggagcttatcgcggtaggaaaaaatcactgtctgcggaacaacaggctgaattacaactgcgcgttaccaacggtgagagtaaagcgcagcttgcccgtgagtttggcatcagcagagaaacgttataccaatacctgaaaagatgcggttaa

SEQ ID NO: 456179 - DNA, 156 bp, Serratia marcescens
atgtctaagttagctaaagaaattatcatgaacaaagctgtggtaaccgttgctgctgataaaaaagaggcacggaaagccctgactcaatctatgctggatagcgtttctggcggttgggtcaacgcctttgcgcgctggtctaagagcttctaa

SEQ ID NO: 456180 - DNA, 945 bp, Serratia marcescens
atgatgggaaaggcgaggtttgatcgcgcatgccaagagctgatgtccggtgattataacggcgccagacttaaccttgcttgtcagacaaatgctattcttattgataatgagtgggttaatattttctctaaatataatgtcagtgttggtatttctattgatgggcccaagcacattaacgacagacaccgactggatagaaaaggccgcagcacctatgaaggtacggtaagaggcttgaaaatgctgcaggaggcctggcgggaaggcagattaaacgatgagccgggtatcctgtgcgttgccaatccatcggtcaaaggggctgaaatctatcgtcattttgtcgatgtgttgaaatgcaaaaagtttgatttcctcattccggatgaaagtcatgatacatgcaccgatccggaaggtttgtcggacttttattgttcagcgctggatgagttttttggggatgcggataaagacgtatatgtgcgctacttccatacgcacatgcaatccatgttgagttcagaattcaacccggtcatgggggtaagtaaagccggtagcgacgctttcgctttcacggtcagctccgatggcgacctttatgtggatgatacgttaagaacgacgaacgacgcgatatttacacctattggaaatgtccggcatttaatgctgtcagaaacactctcttcatggcaggtgaataaatatgtggctataaataatcagctgcctagcgtttgcgtcgattgcgtctggcaaaaagtctgcggtggtgggcgccatattcagcgctactcctccggagatgattttaatcgtgaaagcgtgtactgcccgtcgatcagaaagatcatgagtcgtgcggcttcgcatttgattgcgtcaggggtggaggaggacattatcatgaaaaacttagaggttaattcgtga

SEQ ID NO: 456181 - DNA, 864 bp, Serratia marcescens
gtgatcaggcgactattcttgggggcattcctgttttccggcatttgcatggcaaaccctcccgctgattttgggcgggtgcggtatgacgaacgtggcttgccgttaattgatgtttggattgacaagcgtcttcataccttaatgctggataccggcagcggggaggggatgcatctttatcaacacgaacttgacaagttgctggctaatccgagtctgagtgcgactgaaaaaacgcctcgccggctgatggatgttgctggtggtgaaaataaagtttcggcatggaatattagccggttatttgtttccaatattccttttgacaatgttgaaacggtcagttttaaaccgtgggggttgagcatcggcggcgatgtcccggtaaatgaagttatgggattgggactttttcgccaacgtcgggttcttatggattttaaaaacgatcggctgcaaatattggcggatttgcctgctgacatcaaaaagtggtcatcctatcctgtggagccaagtgcatctggattacgtgttaccgcatctgcgggcgatgcgcctttacatttaattgtcgatactgccgccagccattctctcctgttttctgaccgcttgccgtcagggctgcttttctctgggtgtcgcgacattgaacctgaagcatccaacctggactgccgggtgaccaaaatagcggttacggatcgtgagggtaaaacacgtgatgacctggccgtcgttacctctggcgaaacgcctcaggaattggattttgacggcctgttggggatgaaatttatgcgggggcatcaggtgatcatcgatatgcctggacgcctgctttatatcagccgttag

SEQ ID NO: 456182 - DNA, 1218 bp, Serratia marcescens
atggacaacgaaaactctctctttcgccaggaggcgttgcagcataaaaaaaacgcctggctgggtgatttcaccgtgtcagcgccctcggcgttgccgattgcgttatggagcgccgccggcgttttgctgttagccaccctcctgctatttaccacctataccaaaagagtccccgtgagtgggcgagtgatctatacgccctcggctgcggaggcggtgtttagtcatgagggaattatcggccgtatcgaagtacgtcagggggaaaaggtgaaaaagggtgacgtcattgcgacgttttcacgcgatgttacctacgccgggggcggaatgaatcaggcgttgcaagatacgtcgcagcgtcagcttgtggagttgcaaaagcggggcgaagaacgacgtaacgagggagaagaagagcgccggcgcttgcgtgaaaaggtcagcgccaaagaacgggaaatggcggctattcgagcggcagccgcagcagaatcagagcgcgtcggcggtttgaaaaaacgcttgggattttatcaacagctgttccagaaaggcgttgcgaccgtgcaagagaaaattgagcgggagaatgaatatcatgattccgttgcacaactgaatatgcatcacatcaacatcgcacgcgtgcagggcgaacggctgcagttggtggatgaattggcccgctcggaagctcaggaaaagcaggcgctgacagagattcagcagcaggaagttacgctgcaacaacaggtgattagtgcgtcggccgtggtggagtcacgcgttattgctccgcttgatggcgtcgtcgcctcaatgagcatcatggcaggccagagagtgacggccggtgccattgccgccgtgctggtgccggaaaatgcgcggccgttggttgaaatgtggatcccgccctctgcactgcaggaggtgaagacaggtcagcatgtctccatgcgcgtcgcgtcattgccgtgggagtggtttgggaaagtgcccggtacggttgccgccatcagcgcgagtccggaggccctgacgggaaatcatcgacgttttcgcgtgctgatagcgcccgatgcagacacgcaggcactgcctgcgggggtggacgttgaggcggatatattgacgacgcgccgtcgcatctggcaatggctatttttaccattaaaacaaacaattagccgcatcgtacttgagagttga

SEQ ID NO: 456183 - DNA, 513 bp, Serratia marcescens
atggacattaacctgcctggttttatccctgcgctgctacccgttgcgctttctcccggcgcgagtttcacgctggcgatgaacggcgcgctggcggacgggcgtcaggggctgctgcgcacgctgctgagcatcgtcggcagcctgtatctgctctggttggggatttcactgatccgcagcggcgttgccgcgcggcggctggcgctgaacagcggcggcacgcgcgtaacgctaaagagcgcctggttgctcaacgtgctgaaccccaaagcgattatgttttatctgacggtggtgtcgcagttcgccgggcagcatggcgatatcggtaactatttactgctggcttccgtacatatcgccgtgatgtgcacctggctgattgccgtcagctatgcgctggtgttttccgccagaaaggccgatccgctgacgctgaaaaagtacatcaatatcggcgggggaacgctgttggtgctgttctccctgagtagcctgtttcatcattaa

SEQ ID NO: 456184 - DNA, 711 bp, Serratia marcescens
atgtcacaaacctacttaaaattgaagatgcaggccaataaacggttagctatcgcgttaacaaattcattaagtgacattcatgcaaattatattaccaccattgaaaaagtaaagcttggtgggcaacggcttactaattatggttcatgccttatccctaatgagtattatcgtagctcctgtcgtgacacgtggagagaggataaaagactagttcttgctttaggtgaaatttatgaaagaaacgatgttgctctagatatggttgagatttactttcgaaaaacgttaacaaagcttggagaccaaaaaagtaataatttggtattccggatccaaaaattgttaggtaaagcagcagaacatgcttctgttaaagccagtaagctagcattatcattgacactagcaaacttagtactcggtagtgcggattttaaaaatagccatgtgaaacttgttaattctttctcatcatggtttgtaaatggtgcaacactctatgcaaaggcgcagatagcagcatcatccgctaataaactcaagtatcaagatgcctcatactaccaagcgctatgcaaagaaaaccttgaaatgctttactttttgattgagcctcaaatgtcaaaaataatatatcaaataaactctggtgataataatgaagagaaaatagctgacgctttatatgagattctacggaaatga

SEQ ID NO: 456185 - DNA, 558 bp, Serratia marcescens
atgaggattaaaacttctttggttgcttttctgatgattctaatcccaatagctgctgtagccgctaacggaatagaatatcaagataaagcgacagaggacgcggctaacctggtaactaagtatacgctttctggtgacggggaaagggggaagtatctaaaacagttggagaaaatgactgctaagcacccagggaataacaatgtcaggaacatgtatgcaagcatattaattgctgagagaaattaccccatggggttagagcaattaaaaataataaataaagataatcccaagcccggttcaaaactgacagagtgtatgctgatggaaaaaacgggtgaacgtgctggtggctgctatcagggcgtcgtatcgctatttgaagagagccatacagaagatgacaactatatcatagccctttacttgtctggtaatcctaaatttgaagctgagaaaaataagctgatggattcaggaagactaacggaagaggagaaaaatatattgtcattgagcagggataagttgataggctccgtgctgccttga

SEQ ID NO: 456186 - DNA, 741 bp, Serratia marcescens
atggaaaatgaaattttcccaggagagagttgcgctctggcgacgccggtcagcgatagattagccctatttcgtgagcgacactttatctattttcctgcctgtgagcttggcgtcggcaataacgcagtcgcggaggaagctctggtttcaacatgggaaaatttacccgttgataaatatttacaggggagcaggctgcgccggcggcgtatttgcaaatttgatctcagccagcagggtgagataacgccgttgcaggactgtcatttttttcaaagctcacaggtcaatggtctattaggtggcattgagcgcctgtatccccgcagcgaaaacgattttatttcctcatcggtcgttcagcagctgctggcccatcaccatgcgttactgacccgtttggtgggtaatcagcgttggctggtgacgtgccaccaactgcgcgtctgctgtgatgcgcagcaggcggggctggcagcgccggaagggcgtcattctgacggacatgattatatttttcagcaccttattcaacgcagcaacgtattaggcggcgccagcgaagtgtatgaccgtgatggcaggcaggtgctgactcgggtattacagggttttctcgacacgttgctgcttgatgaccgcatgatgcagcacgatgtcacaccgctatatcctgacgatccgctcagggcggcatttcgcgacatgctgattattgattttgaccaaatacgctga

SEQ ID NO: 456187 - DNA, 453 bp, Serratia marcescens
atgtccgtgacacttaaagaaaggcttaaagttgccaaaaatgaaaagcaaaaaaagataatcattaaagatatttgtgatgagattttaatttgtgattcggatgtctcgtttgtggatgttagttataatgatctgttgtcccctttgtgtgggcatgatgttcagtcaattgggtttgaggttgatgataaattattatttgataggtttgtttgttttttaaatgagaagcgtgttagtggtgatgcttacttttatatatcgaaagaagattcttatcatgttataaaagttaacatttcatatttcatatctaatccagcttttttttggaggttgaaaggcggaaataatggaaaaagtgactgcatattagtatccgtaaatgggacgttcgggttctgtaagctatatactgaatataactatgagttggttgaatgggggtga

SEQ ID NO: 456188 - DNA, 357 bp, Serratia marcescens
atgaacagtgagtggttttctgccagggaattgacgggcattgcggggctaccttcctcgccacagggaattaaccagatggcgcgtcgggaaaaatgggtcagtcagcgtcgcaaaggcgttcagggcaaagcggtggagtatcatatcgacagcctgccgccgggcgtgcgcagtgccctgatgctgaaggaggatcccgcgggttacgccgcagaaagacaggatccgttggcggtatggaacgcctattttcactatatgtcggatgatgaaagagcgcagatactgacgtttctgctgcgtgagggcattggcggactgctggcgcttatcgctgagggtcgtcagcgataa

SEQ ID NO: 456189 - DNA, 357 bp, Serratia marcescens
atgaaaagtgagtggttttctgccaaggaattgacgggcattgcggggttaccttcctcgccacagggaattaaccagatggcgcgtcgggaaaaatgggtcagtcagcgtcgcaaaggcgtacagggcaaagcggtggagtaccatatcgacagcctgccgccgggcgtgcgcaatgccctgatactgaaggaagactctgcgggctacaccgtagagaaacaggatccgctggcggtatggaacgcctattttcaccatatgtcggacgatgaaagagagcagatgctggcgtttctgctgcgcgaaggtattggcgggctgctggcgcttatcgccgaggggcgtcagcgataa

SEQ ID NO: 456190 - DNA, 279 bp, Serratia marcescens
atggcgcgtcgggaaaaatgggtcagtcagcgtcgcaaaggcgtacagggcaaagcggtggagtaccatatcgacagcctgccgccgggcgtgcgcaatgccctgatactgaaggaagactctgcgggctacaccgtagagaaacaggatccgctggcggtatggaacgcctattttcaccatatgtcggacgatgaaagagagcagatgctggcgtttctgctgcgcgaaggtattggcgggctgctggcgcttatcgccgaggggcgtcagcgataa

SEQ ID NO: 456191 - DNA, 696 bp, Serratia marcescens
atgtccgccatgcccttaccgaagtcgttcgggttcagcgcattattctcaacaacaactttatccggtgcaacaccagccagcgaacagcacttttcccagcacactcagcagcttgcagccactttttccctgtgcattctgacgtcccggcatttttgccccgacgcgctttttcccactgttaaagagcagccaacaacccatcatagccagcaccgtcacccctgtcattaccgcccttactccggcgggaggcgggtcacagcttgctgtgacccgctgaaccgcctgccgggcgcgggctggcgaggcccgcaagcgacggcacggcgctctgtcgcacacctgcatgaccggggttggcctttgcatgaccgcaccggaccggggcgggctgcggacgctggcgaacggggaaggagcaacgcagcgaagcgcagtgcgaccccgtgcagccagacgacgccgggcgggcatcaacgcccttcagcggaggccgtcaggccgacttcctttggggttttctcacagacgatgatgcggccgacgccgccagggacggcggccactcccgatgccccacgcggggcgcacgccataatgcagattatacgcatacgagcgcatagcgaggtttatgggggttccgaggctgaccgcgagagtgcgtataatctcccgcattatggttaa

SEQ ID NO: 456192 - DNA, 678 bp, Serratia marcescens
atgtcacaaacctcactcggtgcttccatgttgcaaagtggcgcttcaccggatgaaatcgcagcagctctggtcaagaacgcccaaggagatatgccagaaggtcaggatgcagttaaaggtctgttgagcgcctggggcgagttcttcggggtgccggtcagtgcattaactgctgatggagaaatgacgccgcaaagagcggcggagatcgtggcaagtggtgtgccgacgagtgaagctaagttagttcagtatgtggcggcgaaagctgttctgacggtaacgaagacattaagtacgggctctacaaatgccgctgaaaatgcgaccaaaacagttattgattccaagaagtttgattatctctttggtaatgtgaaaagtagtgagcataacgctgatcgctctacccaattggctcagacaatgaaccgcttgggattagaaaccaatgagaaaggggcaagtgtacttaccgaacacttaaagcaggtagtgaatacgaagggtaatgttgtagatacctatacaaaaggaaatcaagcctttgaagtgcgggagtcattgctttttggtccttcaggaaaggcggctaaattagaaactgcttttgagatcatgcctgatggctctcgtagatttgtcacaactattcctaaagatggtaaaaagtaa

SEQ ID NO: 456193 - DNA, 336 bp, Serratia marcescens
atgagaactgatcaagaaatttataatgatatcggttcgatcctgttcgctattgcgcctgatatcgcatctaaagttataatgagggcagaactttctcctgaaaatgaccattgtaaatgtgaatttgactatgtgaacgcaactacgggtgatacggattggttttcggctggagcgcaggcgaatggtgatttatttgatttgcttgtagagttaagggattattttgtagataattttaagtctcaagagaagccgttctggcatggttgtgaagtaacggtaaatgtagagaccttaaagattaatattgattttaaatacgacgactaa

SEQ ID NO: 456194 - DNA, 432 bp, Serratia marcescens
atgggaaagaagttaatattggtagtcgccgccatcggtttactcagcggttgttttggcgacaggttggagcagcgttatgcacctgacttgccgctcgaggcttcattgcgctccggtcaagacgtctgcatttatccgccgccaaaagatggcgagcagcaggatacgctgctgatcgcgggcggtgcggaagacaagctgttggaggtcgacggacgggcattggcgcagggcatttgcgtgactccgcatgattaccgctttcaggcagaccggccctatagcatgagactgaactttgtacctgcagaggcgcgccggcagctgcaggagcgctatggccggacttttatcgccaggttcaaaatcgtcgagcaacatggtcagcgccggattgagaatctgcctgcgatagacggtaaaccgtaa

SEQ ID NO: 456195 - DNA, 813 bp, Serratia marcescens; identical to SEQ ID NO: 453790

SEQ ID NO: 456196 - DNA, 795 bp, Serratia marcescens
atggcaaatactccaaacaccccgctcttccccccgacctggcagccgctgctggaacagggccgccttgagcggcagcatatcggtcgctccgatgcggacgtcttccgcctgcggcggcacgctggggatctgtttttaaaatcggaacgggccgatgcgttcagcgagctgccggccgaggtggaaaagctgaagtggatgcgtcggcaggggctggctgtgccggaggtggtggagtttacccgccacgccgagcatcactggctgctgatgagcgccctgccgggacgagacctggcctcagagccgacgctgccgcctgaacggctggtcgccattatggcgcaggcgctgcgccggctgcacgccctgccttaccacgactgcccgttcgaccagcgcctgagcgtgcaaatcccgctggcgcagcagcacctgcaggccggcctggtggacgagtcggacttcgacgccagccggctgggtaaatccgccgccgagctgttcgccacgctgctggccgagcgtcccgcgccggagacggaagattgggtggtgacccacggcgacccgtgcctgcccaacctgatggcggacggcgatcgcttcagcggctttatcgactgcggccggctgggctgtgccgaccgctatcaggatctggctctggcgtcgcgcagcattggctacaacctgggcagcgactgggtggcgccgtttttccgggcgtacggcatcgtgccggatgaggcgcggctggagtattaccggctgctggatgagtttttctaa

SEQ ID NO: 456197 - DNA, 849 bp, Serratia marcescens
atgaaaatcgccaaaatactcaataataatgtggtggtggttctgggtgagcatcagcgtgaacaggtggtgatggggcgcgggctggcgtttcagaagcgcgtgggcgatgtgctggatacggctcagattgaaaaggtgtttgcgctgcagagcgacgaactggtcagccgcctgggcgagctgctcagccagatcccgctggaggtgatgaccgcctgcgaccgtattatcgagctggcgcgcgcgcggctgggtaagctgcaggagagcctgtatatcaccctgaccgaccactgccactacgccattgagcggcagaagagcgggctggcgatcaagaacgcgctgctgtgggaaacccggcgtctctatccgaaggagtttgagctggggcaggaggcgcgggcgattatcgcccggcggctcggcgtggagctggacgaggacgaggccgggtttatcgccctgcatctggtcaccgcgcagctgaacagcgccatgccggaggtgatgcacgtcacccgggtgatgcaggagatcctgcagctggtgaagtatcagctgcggctggagtacgatgaggattccctcagctaccagcgctttgttactcacctgaagttttttgcccagcgcatgctgacgcgcaccgtggtgccggatgacgacgtcacgctgcatggcgcggtgaaggacaactacgccaaggcctggaagtgcgcggagaaaattgcgcgccatctgcgcgccggctatcagcgcgagctgacgacggaggagattatgtttttaaccattcacatcgagcgggtgcggaaagagggcaataagagaacggataactga

SEQ ID NO: 456198 - DNA, 1344 bp, Serratia marcescens
atgaaacttaatttattaaccatcgcgttagcggtatgggttattcccgtctgcgcctggtcgtcagtcgatacgcggatgcaggaaaaggatgttattgaccgggtgctggcggaccctttttttaatcagtcgcagatgacgctgtcgctgaaaaattactggaaatatctgaaggaagacaacaccgatccgaaaaaggtgcataacgcctgggggcagggcgtagccgtggattatcagtccggctattttgccgatacccttggcgtggacgtcacctattatggtgcggtcaagctgggggccagcgattatttcaacacccgcggcgtgctgtataacaacggcagcggcaatgataaaagtaacgccgaaggctacagcaaattcggccagcgcaacctgaagctgaaatcctcgctggcgggcgcgcagctgcacgcccgctggggctggcagacgatgaaaaacgtcggcgtaatctccaactctacgcgcctgtcgcccattacctatctgggctggctgggctcggtcaactatgatgcgctgaccctgcgcggcgcctatatcgaaagctccatggaccgtaactcgccggataaaaagcgttttcagaccaatagcggcaactatatcaaccacatcgccagcggcgacctgctgtggaaaagcgacggactgagcctgcagtacggctacggtgaaagcgataactatctgcgccgccagttgctgatagcccagctgatgccgagcaaacggctgaaagtcggcgcacaggtttacggcacccgcgcgctggaggcgtacaaagcgatgccggccggcaagcgtgacttcgatcgcaacgcctggcactacacgctggagggcagctggcgggcggacaattggagcagcaagtgggggttgggctacacccaggccagaaaagagcacgaggtggggttctatccgcgccatatgagtaaaaactcccgcggcaccttcggttcgatggcgttcgccggcgatgactatatgcgcgacggcgaggtgatgctggcgaatatctcggactataagctgacgccggagctggtggtgggcctggccgcgattgccggccagttcagctaccggggcaatcacgtacgcagcggcgaggtcagcgcttttacccgctgggcgccttcccacggcaaactcaacaacctgaccgtgtggaccatgttcggcccgggttggtcgtataaggcccgcggcaaaacgccgctgttgaacgaggacggccgctatatgcgtgcccacaccctctcgtccgaggtgattatcgagtacaaattcaaactgttctga

SEQ ID NO: 456199 - DNA, 789 bp, Serratia marcescens
atgaaaaaatggttagcggcactgattttatgcaccagtacggcggtcggcgcggcggaaaatacgccgccgcagactgacgaggcgatcaccatctatttcgcccgtcatggcaaaacgctgtttaacaccttcgaccgcgttcagggctgggcggattcgccgctgaccgaagacggcatccgcgtggcgcgctatctgggcgaggggctgaagggcatcaagtttgacagctattactccagcgacgccggccgccagcgtgaaaccatggcggtgattttacgccaggcgggcgtcaaggattaccagctgatcgagctgcccggcctgcgcgaggccttcttcggcggctttgagggcggctggaataaagatatggcggacgccggcgcgcggcagctggggatgaaggacggcggcgagctgttcagtaaaatgaaggcgggcgagctgacgcaggaccagagtcagaacgcgctggccgcggcggacccgaaagggctgacggaaaactaccagcaggtgaagcagcgcacgcaggcggcgctgcataccatcgtggataacgccaaggcacgcggtgagaagaacgtgctggcgatctcctccggtacctccatgcagattatgatttccgacctgaccacggatccggccagaaacaagccgctgtccaacgccgcggtggtcaaagtggtttatcagaacggtaaatatacggtgccggaaattggctcgatgaaatatgtcgaagccggtaagcaggcgttagataataataaataa

SEQ ID NO: 456200 - DNA, 1878 bp, Serratia marcescens
atgaactatcaggagttggccggcgacattctgcaaggtgtcggcgggcgggaaaacatcatcagcctggtgcactgcgccacccggctgcgctttaaactcagcgacccggcgcaggcggacgccgcagggctaaaaaataaccccggcgtgattatggtggttgaaagcggcgggcaatttcaggtggtgatcggcaaccacgtgcacgaggtgtatcaggcagtctgccgcgccgcggggctggacgacgagccggccgccgcgccgccgtcgcaggaaaaatccgggctgctggcgcgctttatcgatgtggtgtccggcattttcaccccgttcctcggcgtgatggcggcctgcggcattctgaaaggctgcctggcgctcagcctggcgggcggcgtgctgaacgagagcagcggcgcctaccgcatgctgttcgccgccagcgacgcgctgttctacttcctgccgatcgtgctgggctacaccgccgggaaaaaattcggcggcaacccgttcctgaccatggtggtcggcggcgcgctggtgcacccgctgatgctggaggcctttcaggcgtccgccggtggagaatccctgagcttcttcggcatcccggtggtgctgattaactacgcctcgtcggtgatcccgattatcgcctccgcctggttctgctgctggctggagcgccagtgcaacaaggtgatgccgtcggcggtgaaaaacttcttcacgccgctgatctgcctggcggtggtggtgccgctgacgtttctggccatcggcccgctggccaccgggctgggcgagctgctggccgccggcttccagcgcgtctaccactttgcgccgtggctggcgggcggcattctcggcgcgctgtggcaggtgtgcgtgatcttcggcctgcactggggactggtgccgctgatgatgaacaacgtggcggtgctgggctatgacccgatgatggcgatcctgctgccggcggtgttcggccaggtgggcgccgcgctcggcgtgttcctgaaaacccgcgacccgcgcctgaagacgctggccggctccggcgccgtcgccggcgtgttcggcattaccgagccggcggtgtacggcgtcaccctgccgaaccgccgcccgtttattttcggctgcgtcggcggcgcgctgggcggggcgattgtcgccttcagccagagcaaggtgtactccctcggcctggccagcatctttgcgctggcgcagatgatcccgccgagcggcccggacgccacggtatggggcgcgatggccggcgtggcgctgtcgtttaccctcgccgcgctgctgacgctgtttgccggcctgccggcgcagcccgccgccgagacgacgccgacggcgctggccgacgcggacgcagttctggcgccgctgaccggcgtcgccgtcgcgctggatacggtgccggacccgaccttcgccagcggcctgatgggccagggcgcagcgatcattcccgccgaagggcgggtggtggcgccgttccatggcgaggtggcgtcgctgttttccaccaaacacgccctcggcctgctgagcgacagcggcatcgaggtgctgatccacgtcggcatcgacacggtaaaactgaacggtgagcactttaccgcccatatcaaagagggcgacaaaatagcccccggcgatctgctggtggagtttgaccgcgaggcgatcctgcgcgccggctacgatctcagcaccccggtgattatcagcaacagtgaggactacgccggcgtggagagcgtcagcccgacccctgatgtacgagcgggtgcggcatttctgcacgttacgcgcaacaacaaaggagataaccatgactaa

SEQ ID NO: 456201 - DNA, 1398 bp, Serratia marcescens
atgactaagacattcccggacgattttttatggggcggcgcgctggcggccaaccaggttgaaggcgcctatttggaggacggcaaagggctgtcgacctcggacgtgatgccgaacggggtgttcggcccggtgcgcgaacgcacgcccggcgacttcagtattaaagacgtcgccatcgatttttatcaccgctacccggaagatatcgccctgttcgccgagatgggcttcagctgcctgcgggtttccatcgcctggtcgcgtattttcccgcagggcgacgagcaggaaccgaacgaagccggcctggcctggtacgacaagctgttcgatgagctggcgcgccacaatattcagccgatggtgacgctgtcgcactacgagatgccctgggggctggtggagaactacggcggctggggcaaccgtaaagtcatcgccttctttgagcattacgcccgcacggtgttcagccgctaccgcgacaaggtcaagctgtggctgacctttaatgagattaatatgtcgctgcacgcgccgatgaccggcgtcggcctgccggaaggcagcagccgcgcggcggtgtatcaggccattcatcaccagctggtggccagcggcctggcggtgaaggcctgccacgagctgattccggacgcgcgcatcggcaatatgctgttgggcggcctgacctatccgctctcctgcaagccggaggacgtgttcgccacgctgcaggacaaccgcagctggctgttctttggcgacgtgcagtgccgcggcgcctaccccggctatatgcagcgttacttccgcgagcaggacatcagcctgcagattaccccggaagatctggcggcgctgcgccacaccgtcgactttatctccttcagctactatatgaccggctgcgtcaccgccgatccggcgctggtggagaagctgcgcggcaatattctggatatggtgcccaacccgcacctggcaagctccgagtggggctggcaaattgacccgctcggcctgcgcacgctgctcaatacgctgtgggatcgctaccagaagccgctgtttatcgtggagaacggcctgggcgccaatgaccagccggccgccgacggccagatccacgacgactaccgcatcagctacctgaacgaccatctggtgcaggtgcgcgaggcaatcgacgacggcgttgagctgatgggctatacctcatggggaccgatagatttgatcagcgcctccaaggcggaggtcggcaagcgctacggctttatccacgtcgacctgaaccaggacggctccggcacgctgaaccgcagccgcaaggacagcttccggtggtatcagcaggtgatcaaaacccacggcgcggcgttaaaggattaa

SEQ ID NO: 456202 - DNA, 507 bp, Serratia marcescens; identical to SEQ ID NO: 453783

SEQ ID NO: 456203 - DNA, 891 bp, Serratia marcescens
atgcgaacccggtatgtattactggcgctgttgcctgcgctggcgcaggccgatggcgcgctggtgctgcagccgcagcctgacggaaccctgatgacgtttaccgagggcagcgccggcgcgggcgccaaagacgtgctgagctttacgcaaacggcgggcaaggcgttagcggtacagattatgcccgccggcgcggggcgctgcgccgacggcgtgctctcactggatccgttgcggctgacgtttagttttgccaaagacgggcggcggctgtcgtgcggtgagccggtgcagctggcggcggcggatcaaccgcagcgggtcgccgtcagggtggagaataatgcgacggcgcgcggcgtcgactggtgggggaatctcggcgacggaatgcgccagccgctgggcagcgtcagcttcagcctggaaggcggagacgccgatacctatccactgtacctcgacctgagcgtgctccggacgcaggcggccacggtgacggcggctttcagcaaaccggagatgcggctgggcatggtcggtgagctgaataatgtgaatgcctcgacgcagttgcgcatcagcaaaacgcgacaggccgatgaggccgcgctgccctatgcgctgaccttcgaatcggcccagcagcaggataatcaatatcgtctgcgcgcgtcgtccggtgaagcttatatcccttaccagatcagcgtgggcggcaaagaagtggcgccggacagcgcttaccacggacagatcccggcgggagaggcgacatccgacgtcctggacgtgcagttttcgctacaggggcgcgccacccgcgggctggcggcgggcgtacggctgctggatacggtgacggcggtgattacgccgggaagctaa

SEQ ID NO: 456204 - DNA, 717 bp, Serratia marcescens
gtgaagttcagtaagtgggcggcagtgtcgttggggttgatggggctggcggcgctgaacagcgcgcgagcgattgaggttttcccggtggtgaaagagatccgcgaagagacgccgcgtgataattacatcaccgtgaaatccatgtatcaggccaaagacagcgtgacgggcaacgataccaataagcagaggtatgagtttgtcaccctggaactgttctatgtgccgaatccgggggatggtgaagaacagcgggtcaaggtgttgggctcggcggatccgaagctggtgttttcaccgacccggctggtggtcccttacggcgaagagcgtaaggtgcgcattatgccgctgaaaccggtggataaagagcaggtgtatcgcctgcgggtgcgccccagctacccggagcaggagctggataaaggtaaggtgcgttttgcgatcggctatgacgtcctgctgcgttacctgcctaccggcgagcatcggcagggcgttacgctgagctgcaatgggcggcagtggacgttgacggcgaccggcaatgtgcgcagtgagttgcacaacctggtggtcgacgggcgtcaatccgtcggtcagtttaacgtctatccggggcacagccgccagctgacggtgagtcgcaaactggcgtttgaactgaataacaaactgcaggtgtacgaacagtgccagcgtaaggagccataa

SEQ ID NO: 456205 - DNA, 2562 bp, Serratia marcescens
atgaataaaaaaataaaaatcagcatggttatgtgtggcgttatggcggcgacgggaatcccgccattgaaggcatcgaattccgtgccggtgcccgccggctttgaggatatctttgatgccaaacaaaacagcatcgttgacattatttatggcgaccgctccattgcatcactggccgtcgagtatgaccgcaatgacgtccagctgctttcgccgaacctgattgtcgagcagattaccgccgtcgatatgccgccgctggcctttacgccggcagagctgctcaagaaactgtcagcgccgttaaagcgggtcaaccggcaagggttcacggacgatcggatcgtggccaaccttgatgagtccaacagcgtgctgcgtctgatctttcctgccgattactttaaatcggacggtaaaacctatgacaaaacctatattccgcaccgcagccaagccggctttgtccataaccacaatatcaactacctgtcggactcctggggagacagcctgagcgtctcggccaacgatacgctgaatctgaccggcaacagctatatcaaaggcacctggagttactcgaaagatatcgactttaacctggacgagctggcgctctatctggaaagccaggacacgcgctttaaggcggggcgtcagcgcctgaatgataacctgatttccagtacgccctccatggcgttcagtttctttaattcagtcagctttgacggcatcgcgctgggctatatggcggacaattatctggatcccggttccggcgccgcctcgccggtcagcctgtatctgccgcaatcgggtacggttgaggtctatcgcaacgggcggatgatcgatctgcagcagttctccgccggtctgcagtatctggatacccgcagctggccgagcggcggctatgacgtggtgctggtgtcccggctggccaacggcgcgcgggaagagaaagtgcagcccttttacaaacgcaacgggatgttccgctcgggcgatctggaatatctggtgcagggggggcgctatgatcagcgtcaggggcggctctcctcccgcacatacacgggcaactgccggcagtgtaatttttgggagcaagacgtcgccgataactatttcgtcagcgccattgcgggctataccaccgagtctgcgctctctctggggggcggcctgatgatggatgacgacctgaattatgccaatgccagcgttgatatcccggtgaatacctggattgccgagcggctctacctggacggtatttacggcgatcggggcagttacggctatcaggccggcatcacgaaaaacttttatcgactgggcctgaatctgagctaccgggataaccgctttcacggcgaccggcaggacttccgccgtttcggcatcgtgcccgcctatgactatagctacctgcagttcagcgccaatacttttctaccctgggatatcgggctgggtgtgaacttcggcataaatacgctttatcaggactatggccgccagaataagaataaatttgaaacctgggatgtaaacctgagccgcgatttttcgctggtggacgatatgaacctgcgggtggatctcggctaccaccgcggcgttaatgcttttgttaatcgtcagtcgcgcaacagcagcagtgaggatcgcgtttttgcccagtttacgctgggaatgcgcgagcgcagttataaccactaccagtctctgtacttacgctcccgcctcagcggcgatggcggcgacaacaatatctacagcgccgactatgccctgaatctggacaacccgggcttcgatcgcggcggcaaatacaccctgaacgcaggcgttaaccatggccccgacggcgaaaacaacgccagcgcggggatgatggtgaacaatcgtctgggctacagcgccgccggtttctcccgttcgtttggtcaggatcattatcagcaatattacctctcgcagcgcggcgggtttgccgttggcgacggtgagatagcgctggggcagggagacggcgcggccgcgttgattgttgacgcgacggcgttgccggaaggcgacttttttgaggcgcgcaaccgcaatgcgcagccggtggtggtgaagggggggcaaaagacggtgctgaccgtgaacccctaccagaaggtcgatccgcgcgttgaacaggtatttaccggtaagaccaacgcgttctacaacctgagcgttgaggcgccgtccacctgggtgatgccggggcaggtttatcgggtcaaggtttccgccacgcgtaaccagacggcgaccggccggctctatgcggatggacggccgctggtgaatgccagagtggtgggcggcaatgcggtatcggatgaggaagggctgtttgtcggggatttcactctgaagacggatgaacgcctgacgtcgttaaccgttaaaaaagagggtcagaactacgtttgcccgttgctggagcaaaacgtcaggatgacccagggcattatgcagattcgtgaggttaattgtgaagttcagtaa

SEQ ID NO: 456206 - DNA, 516 bp, Serratia marcescens
atgagacttcattattatttatccgggctgggcgcggcgattttattatggagtccgttggcgctttgtctgcctaactctcagctagccattgagatctcggcggaatcggtcgccagggtgacgctctattataaattcttccccgtcgccggggagctgtttgattttccgttggcgataaacagccagtcgcgcaagtttgaacgggaagccggttacttttatgccgtgggcaatgttgctcaggcggaagtgctgtttgtcgacgacaagtttgaattgctgccggccggcggccgcggtaatcccatgacgctgcaaggcgcgtttttatttaacggcgcagacaaaccggccaaccagccattgagaattccggtattaaaaagcgttgcgcagggtaataaggaaaatggcatcagagtgcgcttctcttccgagtattccatcgatagctatagccagggcagttattccaatacgttcacgttgattgtcagaccagtgatttaa

SEQ ID NO: 456207 - DNA, 543 bp, Serratia marcescens
atgaaaactaaagtgattattaccgcattggcgggtttgctggtgtccgcctcttcactggcggccagcccggcaagttatgatactaaatttaatgtcagcgccaacgtgcccgacagcgccaaaattaccgacccaagcggccgcccgattaccgatatggatgtcgaactggtgccggcggcctcaggcaagatggaagcgcaaaccgcggcgctgaagctgtggaacaacgatgtcaaacagctgaacgttgcgttaacgctggatgacagccagtcggcaaccggcggtgcatttacgctgtacagcaccggcggcggcaagctgagcgacatgacctataaaatcagcgcggtgacgggcaacggtacgcaggagtttgcggcttccggcgattccaaagatttcgccctggtggccaataacacccacggtgaactgccggtggcctttaaatttgtctcagacaaaaattatgacgaattgggtcaggggatgtataccggcgtggtatacgctaacgtagtcgcgaaaccttaa

SEQ ID NO: 456208 - DNA, 1239 bp, Serratia marcescens
atgtctttgtactcacgcctgttaagcgggccggcgcgtttttgccgcgaccggcgcggcgccttcgccatcagttttgtgctgatgtctggcgcgctgttggcgatcgccgccttcgccattgaagggccgcgctatatcaccgaacgggcgcgcctgtccgatgcgatggaacaggccgcgctggcgctgacggcggaggataacggcgccggcgccgcgcgtaattacagtttatccagcgattacttccgcgcctatatgcgtcacgatgtggaggtatttacgccgacggtggtggtaaaaaatgggagcgctgcgggtcgaagctatgtcgagtaccgggtcagcgggcagacgctgcaggattcctggttcgcctcatcgctgtttccgagctttgataaacaggtaacgattggcgataacggcgccgcgcgtaagtaccgttctaatatcgacgtgattttcgtgacggacttttccggttcaatgacggagccgtttggcggcggcaccaagctgggggagctgaagcggattatcatgaaactgtccacggaactgtttcagtacaatatcgataataaaatcggctttgtgcctttcagctggggagggcgggaaggcggatattgcgatttcccgttagtgaccaaccaaccggtgccggaagatatcctgatgaatggcgcaactcccgcgctggaaaattatgtcgatttttacgccacggtggcggcgatcccgcgtccggtgcgcgatatcaacatcccgctggataaggccggcgtaggcacctgcctgaaagaaagcaccagctggaaggtgccgttaacctccagcttagccagtatcagccagatacaaggcatgcaggcgggcggttccaccctggtcagcaacggggtgctgatgggcgttccctatctggtgcggggaacggcgtcgcgcaaagttttaattattgtttccgacggtacggattcgccgggagaagtcagcatcactcccagactgatggctgccggaatgtgcgagaaaatacgccgggtgatcagcacgccggaatcggtggggaagattgcttttatcggcatcaattatgcgccgacctatgactggaaacagtgtgtcggtgaaaagaacttctacctgccgcataacgttaatcaactggaagataatttacgccgcgccatttttgaagaggtcggccataacattctgaaggactga

SEQ ID NO: 456209 - DNA, 363 bp, Serratia marcescens; identical to SEQ ID NO: 453776

SEQ ID NO: 456210 - DNA, 570 bp, Serratia marcescens
ttgttcaggaatttgaacgttccaaatttatggagtgatcggcgcggatcggtggcggtggagtttgtggtgatcgccatcgtgttgattttcatgctgctgtttatcacggatctggtgatgcgtcaggcgctggtcggcaagctggaccgggtgtcctattcggtggccggggtgctgcgcgagcgtattcagctgtttgatgcgcgcgaaaccctcgagcagcaggatatcgagcagaccaggcggctggcggaaaaaatgctgcgtgatatgcatgccagcgccgatctgtcccaactgcgcattcaggtggaagaagcccactacaacgacggtaagggcgtgtcgctgtatcgcgcctggcgcagcggcagcgcaggtgagtgtcaggcgccgcagccgctgaatcagctgaccaggctgacgcctaaagggagctacggccgctgggtgccgctgtatcaggtcacggtttgtctgccgaccgtcagctggtttacccgcctgaccaaagcgctggatgaacggccggtgatgtcgtcgttcgccattgtgatggcgaggtag

SEQ ID NO: 456211 - DNA, 510 bp, Serratia marcescens
atgctggccggctggaaaagcaaagcgtcgcgctgggcgctggttaaagaccggcgcggcgtcgcgaccatcgaatttgcgctgacggttgcgctgttcattatgctggtgctgtttatggctgaaagcgcccggctggcctatgtctcctcggttatcgacctggcggtgtccgaggcggcgaaagaggcgaaaaacgcctccgccgcccaggccggcggttaccgcgcccggtttgaaaaacgcctgaccgaacagggcggctcactgtggggatttttaacacgtgcggatgcggtgacgattaacatcggctacgcccgttcgattgacgatatggtggcgaccggcggcggcggcagctcacgctatcggccgctggcgcgttatcagctctcctaccgctaccatccgatgttttttcccttccctcatatgtgggccgataacttaatgaatcgtgaggtgatctttgttcaggaatttgaacgttccaaatttatggagtga

SEQ ID NO: 456212 - DNA, 738 bp, Serratia marcescens; identical to SEQ ID NO: 453773

SEQ ID NO: 456213 - DNA, 843 bp, Serratia marcescens
atgaatatgctgttttatgcaatggtattgctgccgggcgtattgctgttcttgctggcgctgttcaaattccaggtgtggggaaaaagacgcaaggttattgaagcggaggaaagcggtaataaaaagggcgaaaatccgttattggattaccgcgccattattatcagcaataacgcgctgatgcgcagcctgcagcgcattgacgacaacctgtcgattaaattacgtctgtggggcggatgcggcgcgttgctgctggcggccaaactgctgggtttattcccggtgggcgctaaaggcctggcgatgataatgctgctggtgatggtgctggtcattgtcgcgccggcgatgcttatcaggccgatggttaagacaaaagtgaagctgatgctggacgcgctgccctatttcgtcgatttgattgcggtatgcattcaggcggggatgacggtggaaagcgcgattaagtttatcggcgagcgctctgacgatctggatgaaaacctggcgtcgctgatgcgctatctggtgaagcgcgcgggcgtcagcgggctggaagaggcgctgctggagctgtatcgcgcgatggatatgaccgaaatgcgcatgttctgctcggcgctgcagcagagcgtgcattacggcacctcgctgtatgaaaacctgatggagctgtcgaaggatattcgcgatctgcaactgctcgaatcggaagaaaagatcggcagtctctcggccaaaatgagcgtgccgctgatcctgtttattatgttcccgataaccgtattaatcgctgcccccggcattttaaggataatgaaaaatgcgatgttttaa

SEQ ID NO: 456214 - DNA, 879 bp, Serratia marcescens
atgccctatttgattctggtacttggcctggcgcttttactggtgaattactatcgcctgaaaaagctgtccggctcaattagcgttgcgcatgagacggccaatgcgcgtccctcgctgctgcagaggcatctaaaacctttatggcgggaatggcagcggtacgcgctgggcaatggcacctggcgggggcgtaaaggagccgtcaccgcctctatcgttgtcgcgctgctgctgttgctgaatgccaactggctcggcttcagtctggcgttttttttaccggccgtcttgctgagcgtgttctacgcgcagatcagcatcggccgcgcgctgcgccgccgctattttgacaaccgcttcccggaggtgctggcggtgattaacgccgccatctcggcggggaacagtattcaccaggcgctgcaccgctgcggcgacggggtggacggcgagctgggcgcggtgttcaagcgcattgaccgccggctgaatctgggcgaggagccggaacgggtgtttaaagacgcctggctggaataccgctaccgcgagttctacttctttgtgatcgtgatgctggtcagcctgcagcgcggcggtcagctgcgggtgctggtcgggcgtttgtcgcgcattatcaccaacagcaagaatatggcgcggcgcaaggcggcgatgacctccgaagcgcggatgtcggccaaaatcgtcgccgccattccgctgctgtttttatgcggcatgaagtatttcagcccggagaatttcgatttcattattaacgatcccgtcggacgcctgattttgtattacgtcatcggcagtgaagccattggcatgggcattatctgggttctggtgaagagggccacctga

SEQ ID NO: 456215 - DNA, 1281 bp, Serratia marcescens
atggatatgagcattgagctacaggaaatattgcgtgaaggcgtcatcaagaatatcgaaattaataaactcgaacatctgatgcatgaccgcagccagctattggtggagatgaaccggctgctggagcgggtgatagagcagcagaacctctatctgaacggccacgatcagcagcgtatggcggagtgtatggcggatgaaatcatggggttcggcccgatgcgtccgctgctggaagacgacaccgtcaacgatattctggtcaacggcccggaaaaaatcttcgtcgagcggcgcggcaaactggagcagacggagctgcggtttatcaacaacgcccaactgacggatatcgccaaacgtctggtgcagcgggtcggccgtcgcctggatgaaagccagccgctggtggacgcccgtctgccggacggcagccgtctgaacgtcgccatccagccgattgcgctggacggcaccgcgatctccatccgtaagttcggcaagagcaatattgagctggaggatctgatccgcttcggtgccatgagcggtcagatggccaactttctgattatcgccgcccgctgccggttgaacatcattatttccggcggtaccggctcagggaaaaccacgctgctgaacgccctgtccaaatatatcgatccgacggagcgcatcatcaccatggaggatgcggcggagctgcgtctgatgcagccgcatgtgctgcggatggaaactcgtctggcgggggtggagaacaccgggcaggtgacgatgcgcgcgctgctgatcaactccctgaggatgcgaccggatcgcattattgtcggcgagtgccgcggcgaggagtcgtttgaaatgctgcaggcgatgaataccggccacgatggctccatgtcgacgctgcacgccaataacccgcgcgatgccatttcgcgtctggaaaatatggtgatgatggcggggatgaatattcctattgattccatccggcgcaatattgtttccgccatcaatatcgttattcagtcgacgagattaaatgatggttcgcgaaaaataatgaacattagtgaggtaatgggcattgaaggcgaccgcgttattcttcaggatattttttccttccaaagccagtcggaacgtgatgaacagggaagaatacagggagagtttgtgaatcacggtctgctgatgcgctctgccgtgatgcgtaacgccattatgtttaatttaaacgaagagttaaaacaaattttcggcatggagtag

SEQ ID NO: 456216 - DNA, 1116 bp, Serratia marcescens
atgctgttattcccccaacagaaagaagaaaaatcggcgcagacggataaggtcttttatatcctttccgcgcgtgacgcagtgaataaacaattaactcagcagctcagccaggccggtttcaacaaggtggagacggtgacctgggcgccggggcagccgagcgacatgacgctctcctcccacgcctggggcgtgattattgatatcggcgcgctgcagcaggctgacgatattgtcctgtcgattcagggcatcgtaccgcgcggcgtctggtgctgcgcggtgggcgacagcgactccatctcgctggcgcaggcgttcgcccgccacggcgttcactatttctatctgcatgcgcaggcggatgaactggtgcaggccgccgccgcgggcaccgcggcgaaggtgcggcgcgcgtcggtcaatatcggcattctgggctgtaagggcggtatcggcaacaccacgatcgcctatcagctggtgaatcgtttggtgcagctacgccagaaaccgacgctgtttatccaggggaaatccggttcacgcgatcttgatctgctgttcgataaaaagtttacccagagcctgatgcccatcagccggtatctggacgcgatgagctggacggacgcgagcttcccggatctcgacagtgaatcctttgaaaaatataacttcgttatttttgaagagtcgatcaactccgccgacaaggaacagctgcggcgcatcgtcgagcgcacctcctgcctgattctgatgctggaccgctccatgtcgtcggtgcggacggtgcgacagatcgccgaaatccacgatgttatctgccggacgcaaaatacgccgcggcgtctgtttatttgcctgaacgacagccgtccggtgacctcggagatgctggggatagaggacctgcagctgttgctggggcgcaaggtggatattgtttttccctggcgcaatgcgcgcacggacacccgcttctccgcgctgagattccggccgaaaaaagagcagttggaaacgctgctgcagcaggtgttgggcgaatttcctcagccgaaaggcccgcgttttcgctggttaccggaaataaaaaggaggtcgtaa

SEQ ID NO: 456217 - DNA, 477 bp, Serratia marcescens
atgaaaacgctgtgttgcctgttattggcggtcgttgcattggcatcggccgcccatgccgagtcatggcgtatgccgcgcgttgatgagcgtcaactgcaattaagcgataccggccaggttgcgctggagattatggccgggcagatcctgtcgctgaccggcccgcgtttctcgggcagcatccggttggtctgggtcgacgacggttttgccagcagcgccagaatgttgcgcagcatgctgattggcaaaggcatcgcgccggaacgggtggtgctggcgccggaaagcggcggctaccaacggcaggccgtcagcgggctggagatcagaatccgtcagattgtgctgcgcttaccggactgtcattacgccgagcaaaattatcgctttgactatcgcgatgacctggggtgcgcgctgaacaatacccgcagcgccattattagcaatccgaacaagttttatttttaa

SEQ ID NO: 456218 - DNA, 1386 bp, Serratia marcescens
atgaaagctcagaataaggccgtctgctggtccgccgcgctggcgggcgcactgcgctgtgcgctgacattggccgggattttcctggcgcactgcagctatgcgcaggaaatttatatgaacccaggcgcgacgcaaaatattcaggttaagggcgatatcgatacggtctttatctcggcccctgaggttgtcgactatgaagtcattggcgaccgcgggctgattatttatgcgcgcgacagcgggcgcgccgagctggtggcgtttgataaggatggcgaacaaattatgaaggcgacgctggtggtggatgcgctgctgagcgaactgcaaaagcatattaccgaaatcgcgccggacagccaggtcaccatccagaaaatgggcaaaagctacgtcatcagcggcaccgtggcgacagaagaggaccgcgacaaagtgtatcaaatcgtcggggagggcgtgggcgcccagcaacaggtcacgaaaaaagagatcgccgatgtcagcggcaacagcggcggcggcggagaagggcaaaatggcagcaactggctcaatgaggtggtttataagggggtgatcaataagctgcagctgccgtcgaccaatcaggtcaacgtcaagctgtcggtggtggaggtgaccaaggactttaccgataacgtcgggatcgactggtcaaccgtcggttcggcgaccggcaccttccgttttattaaattcgacgccaataccctgaccggtctggtgcacgccatcagcaatgactcggtggcgcgggtgctggcggagccgaacctctcggtgctgtccggcgaaacggctgaatttctggttggcggtgagattccggtcgtcaccacctccaacaataacggcaccaacgtgcagtacaaggaattcggcatcaagctcaatgtcggcgccaaggtcagcagcagcaaccgtatccgcatcatgctgggcgaagaggtcagcaacgtcgacgacaccttcagcacctccgccggcaacagtttccccaccttccagacgcgccgggcgcgcaccaccgtggaactggcggacggcgagagtttcctgctcggcggtctgatcagcagtaacgaacgcgaggcgttgtccagggtgccgtttatcggcgacgtgccgattctgggcgcgctgttccgcaatgccagtacgtcacgcaaacgtggagaactgatggtggtggcgaccgtgaatctggtgaagcccgtcggcgcacgggacgtggtgttgcctgattttcagcgcagttctacctgggcgcgttttttcaacgttgacggcatcagcaatctgcgcgaccgcaagctggcccaggagtttattgaacagggaggatttattaaatga

SEQ ID NO: 456219 - DNA, 837 bp, Serratia marcescens
atgaatcatcgcgttttatttttcctgtctgtcacggtcattgtgatcgggctggcgggcatttttatacagggccgacatgctgatgacgtcggggcgccgcaaacggtgtctgccggcgtgaaaactaaatccatcacgattgcggaaacattacgcgatcttaagcctcacgacattattgaggttaaagattatcggttgagaacgattgaggttgcgcaagacagccaggatgagagagatatcgccgccatgggctcatccgatctcaacggttttttagtgcgtaatcatattgctaaacatagcgccattgttgccaaagcggttgagtcgccgctgagtaaaacttttttattacacagtcttaaaaaaaatgaattgccttatggctatctggttcgccctcaggaggagtatttgctctcctcactgtctgttggcgacaaggttgccctgtatatcaggattgccgaggttgataaaagccgcgatgcaaaagccggtgcggcaacgccggacggcgtaggcagcggtacggggtcaacaaataaaaaatatgccttgggaagaattagcgggccgttgagcattcttgatgttcagcgtgaggagaaaaaaggagaaacgaacgcttttgatagtgataaatacgtagggaaaattgtgctgcgtatggatcagaaacaattagcagacctgagggtcgttgagaaatcgggagagattttattattccccgcagaagacggtatgggtaataaacaaaagataaacatggatgaggttttgcctcaatttaaaacaattaaagagttacggggtgagaagtga

SEQ ID NO: 456220 - DNA, 435 bp, Serratia marcescens
atgagctgcttactatctatcaattttatgctgttggtttgcgtgctggtatttatttcctggcaagatattctcttccgggtgatccctcatggcagcctgttattgctgttgattatcatgttgcctctggcggtcatgcagcagatataccccaactttatcgccgcaatcagcatactgtttgtcggctatcttcttttttgtttcaacgtcattggcggcggcgatgtaaagctgatggccttactgtcgttgctgctctccgattcatcgctggcggcatttttatttatgaccgcatgtatcggcggtcttatcgctgttgccggcctgatattttttaaccgggcaacgcgcctgcaaggcattccctatggcgttgccatctcattagcctttgttttgactttgccgtttaaaaccccgttataa

SEQ ID NO: 456221 - DNA, 231 bp, Serratia marcescens; identical to SEQ ID NO: 453764

SEQ ID NO: 456222 - DNA, 594 bp, Serratia marcescens
atgtggcagttaaaaaattttgatgatgttgtctttactctcgataaaggtgtgcggtttctgccgggaaagcggtgtgttgtcagtgagtccggcgttgtcgccagtctttctgaaaatagctatcgttttttgctcttattggtaacgggtgagacggataaacaggaaattattaatcaagtctggcacgaacagcgcggctcggtaaccgatagtagttattacgggcaaatatatatccttagaaaagcctttgagttggttggcctgtccggcgagctgataaaaacacttccccgtaaaggcgttatttatctggggaaggtggtgcaggaaagcaaaccggaaggcgatgacaatgatgcatcaatagccgaggacgcgaaactccaggagccacagctccaggaaacgacggcgacggcaatgattcattatgaggaaaataaggtcatactggcggaaaaaaataccaccgttgaatggtataactcgccgcattggaacaaacttatcagtattttagccgtgctggccgtatgctggctgaccacgcttattcttactgtctattattttattttgcactaa

SEQ ID NO: 456223 - DNA, 387 bp, Serratia marcescens
atgagtaatgaaagaaacggtggggatcaaccaggaaacgagcttgggtggtatgcctaccctggcgattcgcagaacgctgagcgcgagctcggcaaacggttggataaaaaatttaagcatgcggcagagttcggcatcgccgacacgcagaaaaaccatgcggcgctgataaaattccgtgatgccgttacggctcatttaacagaccgcgataccataaagtggggcacctatttgccgatcaaagattctacggtttttttcaacaccaaaacaaaaaacgttgttgtactcagtggtgataatcattttgtttccggctggcgattacaagaaggcactcagcaatacaaaaaatgcattgaacaagggattttgggatga

SEQ ID NO: 456224 - DNA, 282 bp, Serratia marcescens
atgagtaaaaagctgattgattttgccaggaattttattgcatccaacatcgatgcagatgaatttgccgatccgtatatcgctatgtggaaagcggagaggaacgccaggcagttaaccatcgacgggccagacgtcgatgaggcctcctccagccttttctgcctcgcggatagctataacccggacgtaagacgtgaagagtatgagctggatgacaatgcgctgagaacaggcgtaaaagcgacgcttgagaaatttaatctcctgcataacgtataa

SEQ ID NO: 456225 - DNA, 1041 bp, Serratia marcescens
atggcggcagcatactggtggcaagatcttctggatcgtaacaagacttggcaagggctggagctgatagtccgaaaatccgagggcgcggggcagacgatggagatgctcagcggccaccatgggcgcatggcgctgcaggtgcggggagataatctgttctgggcgtcgatgctgaaagatcactccggcgtctggctggtgatgaacgttgagcatcccgggcagcaaggtcttctgccgccggtaacctcgcacgacgtggagtcggtcaggaacaagggacagacgcaatggacgggcgagtggtgccgctatttcgcccgtcagctgctggatgtgtccacgccgttgttagccccgggccgctggctgctaaggccgatgttctcgtctcaggcgcaggacacgcctttggcaagctggcgttttgatgcgccggccagcagtatggatatggggtgtgactggtgcctgtatggcgaagattttcccgatctggctgaaccggtgaaggtgcgtctggttgattggtggtggggcggtaatttactgcttggccgttatccggtgcaggcagaggccgggcgactgaaatggtggcgcaaaaagtgccgcgaaggtacgttgccgccgatactggtctggtacatcgccggtctggcgtcgtttgtggttctggacggtcactaccgcctgcaggcggcgatagaagagggaataccgccgcagtttttggtgctcagcgagctgaaggaacagacattggctccggatccggagcatcgggcccgggttgccggagcgttggagcagcagctgcgtaagaatcccaaatgcagcatagacagcgtcaaccagtcattaatcaatctgtacgatacccgttatctgtacgccgctacccacagccgcgctgttctcggtaatggtgagcgatgggagcaggaggtcagcgcctatctgctgcgtcatcagcttggcgacggtctggataatattcttaaccgggttaacgatgatgtattgccggcagaataa

SEQ ID NO: 456226 - DNA, 411 bp, Serratia marcescens
atgaaaaggattttttgtcttacgccgttggtatttttactctccggctgttttcattttggtgacccgcggcctcccttgatgcgggccaaagtgctgacggtcgcgaataaggtgtgcatgatggtgcaaccgaaaggggacgagcaaattgtgacggtgagtatccgtgaagtcggagacgatcgtcatgtcttggaaaaatatgacctgaatcttcccgcctcagtgaataagtgtgttcccacgttcgactacccgtttaaggtgggcaaggcctacggcttctcggtaatcctggagtcgcaggccaaacttaaacgaggcgttcaacccgcagcgcgcatctacggcgtcagctttagcctgtgggaaaataacggccaactggaggcaaatgtgctgcaatag

SEQ ID NO: 456227 - DNA, 390 bp, Serratia marcescens
atgaaaaaagcttttctactgacgctactattgctcctttccggctgctggatgggggacaaattcccgctgtatccggcgcaggccagcgtggttaacagccgggtatgcgtctttgttaatcaggatgatatcgccgccaaaggagaagatgtacgcaggattgccatttggcacaacgccagcggcgcttatgtgtatgaaaaagcctatggcgataagctgaacaaactcagtttaacgcctggccagtgcctgccgggaatagcggagtataattttgtcccggaacaggggtacagcgtgacggtaaataccgcgcacaacgcctatatcgctaactttgtggtatctaggcagggcgaagagataacgcttaagaagagataa

SEQ ID NO: 456228 - DNA, 534 bp, Serratia marcescens
atggaaaatggacatgtaaacaaggaaggttcactgcggcgtctgactttaggtgaaatagctctagcaaaaaccgtttttggcattgcgattgcctatcacaaagtttggatacattgtgatagctatttaccctttggattacaaaagtctaacgtcgcgatggcacctaatggcgagatttattttagaaagcacctctataaagaagatttttctacaaggccgccagatgaacaatatgtattcattcatgaaatggcccatgtttggcaataccaaaaaggcatgtgggttagggcgagaggtttctttagttgggcggttagttataattataagctaaataaatctagactcggtgattacccgatggaacaacaggcatctatcattgcagatttcttttatataaaaaactatgggttgggaaaatttcatggtttttatggtaggtgttacatagggcgtatagataagagtatcctacccatatataagtcaatgatgcatcatgcaggattatccgtatga

SEQ ID NO: 456229 - DNA, 1059 bp, Serratia marcescens
atgaccatgatgcaatcagacagtgcgttgtctgcgctctccggcgcagtgggtgggaaccgcggtgtattgtcggcagccgcaacgggactcagtgatttcatcggttcccagggaggggacgttgaccgaattttcggtatcagcggtattgatcccgagaatctctcctgcccgaccctgagtctggatctggtgagctattgccgggtgatggaggaggcggcccacctggccgtttgtgataatttcgggctgtattacggccagcagttccggccgcagtcattagggcttatcggctatatcggcctgtgctcggccactctcgagcaggcgctgcgcaacctggtcagcgcctttccgttccatcagcacaacacgctgatccaactgaccgaacgccatgacagctggcagctggactatcaggtgcgccacggggcgatcctctcccggcgtcaggatgcagagctgacgttgggcatgtttctgaaccttatccgccgtgcggcgggcaagcactgggcgcccagagaagtgcattttgaacatccccgcccggaacagtggcatgagcactgtaaggtatttgacgcgccggtttattttgagcagccgtttaactccatgatcattaataaagccgacgttgtgcgcaaaatgcccgatcacgatccgatgctgctgctggttatgcaggatgcgatccggcgtctgagcgcggatccggtgagccagtgctgcgttcacctgacccggaccggcatccagctgcagctggttaatggcgaaccgtcgctggaggcggttgctgaaaagcaggggctttccgcctggtctctgcagcggcgcctgcgtgaggaaaataccagcttcagcgcgcaggttgatcaggtgcgtaaagagatggcgatccactacctgcggcagcagcatctttccgtttcggaaatggcgctgttgctggggtactccgaggtaagcgccttttcgcgggcatttcgccgctggtttggctgtagcccccgccactaccgccagtccagggcgggttag

SEQ ID NO: 456230 - DNA, 1005 bp, Serratia marcescens
atgagcgcgaaacagtacgacaccctgagtaacgggacgatcctccggctggccgatcgggcgctggccaactatccgcaatacgcgggcgccgcggtccggctgctgtgccgttcggaaaatgccaccctgcaggtcacccatggcggccgccggtttgcgctgcgcattcaccgtggcgattatcacgatcgtcaggatattgaaagtgagctgctctggctggatgccctgcgcgaagcaggcattgcggtgccgcaggcgatcagggattgccgtggcgagcggatccagcggttacccctggccgacggcggccagcgctacagcgtattgtttcactggatcgacggggaaatgccgacaaccggcatcgacccggcggccttccgtcagctgggaaatatcaccgcgcggctacaccagcacagccgcagttggcaaaagcctgcgggttttcgccgcattatctgggatcaccagagcatggtgtcggcggccagccactggggagactggcgcgatgcgcccggcctcgatccgcaggcacatcagccgatcgaggaggctatccggcacgtgggccggcagatggcggaatttggtcagtcgccgcagcactatgggctgatccatgcggatctgcgcttaaccaatctgctgttacatcgtggggaaacccgggtgattgattttgatgactgcggtatggggtggtatctgcatgatttagctgcggccatcagttttgtggagcaccacgccagcgcgccgcagtggatcgaaaactggttgcgcggatatgagcaggttgcgcatatcagcgatcgggagctggcgatcgttccggcgatgttgatccagcggcgcatccagctgaccgcctgggtgggctcgcaccgggaaacggagatggcgcgcagcctgggggatgcctggagcagcgataccgtgcgtttgtgtcaacgctatctggccggcgcggcgttaccggtcggcgtatga

SEQ ID NO: 456231 - DNA, 474 bp, Serratia marcescens
atgaaaaagacacttaaacctactctcggcaccctacagctgtggggaattgccgtcgggctggtgatttccggggagtatttcggctggagttacggctggggaacggcaggcacgctgggctttctggtcaccaccttatttattgccctgatgtatacctgctttatttttagctttaccgaactgaccaccgcgatcccgcaagccggcggcccctttgcctatagccgccgtgcatttggcgataccggcggcctgattgccggtatcgccacgctggtggagtttgtcttcgccccgccggctatcgccatggcgattggcgcttacctgaatgtccagtacccggagctgaaccccaaactggtcgcggtcagcgcctatctgatctttatggggctgaatattgtcggcgtcagcatcgccgccaccttcgaactgctggtcacgctgctggcggtcattgaatga

SEQ ID NO: 456232 - DNA, 882 bp, Serratia marcescens
atgggggtggtcgcgcccggcttcagcctggctaactttgtcgcccacggctgggccggcagcgacagtttctctgcggcgtccatatccggtatttttgccgcgatcccttacgctatctggtttttcctcgctatcgagggggcggcaatggccgccgaagaggccaaggacccgcgccggaccatccccagagcctatatcagcggcatcatcacgctggttgttctggcggtaggcgtgatggtgctggccggcggcgccggcgactggcgcaccctgtctgacattaacgacccgctgccgcaggcgatgaaaatgctggttggtagcgattcccgctggatgcacatgctggtgtggatcggcctgtttggcctgattgccagcttccacggcattatcatgggctattcccgccagttctatgcgctggcccgctccggttatctgccccctgcgctggctaagctgtcacgctttcagaccccgcaccgggcgatacttgccggcggcgtcattggcattgcggctatcttctccgatggcatcagcctgcagggcatgagcctgaccgccgcgatgatcaccatggcggtgttcggcgccatcgtgatgtacatcatgagcatgctgagcctgttcaaactgcgccgcagtgaacccggcctactccgcagctacatggcccccagctacccgttagtccctgcaatcgccctgtgctgcgccgtcgtttgtctggccgccatgctgtggtttaacccgcagattggcgcgctattcctggcgtttatggttgcgggctatctctattttctgaccacgcatgcccggagaaatgcgcttgcccgcactccggttgccgcaaccaacgaataa

SEQ ID NO: 456233 - DNA, 1341 bp, Serratia marcescens
atgaccgtacaatccaccatcatggacaccaacagctttcgtgccgagcatgccgacagtctggccccggagatccgccgcttaaccgataaacgcagcaaaatcctcggcgagtcctaccggctgttttaccgtaatccggtgcatctggtgcgcggccaaggccagtatctgtgggataaacagggtaataaatacctggatgtttacaacaacgtcgccagtatcggccactgccatccggcggtgatcgacgccgttcaccagcagatgacgcagttaaatacccatacccgctatctgcatgaacatattcttgattacagcgagtcgctgcttgccaccctgcccgcagaaatcaaccgggcgatgtatatgtgcaccggctcggaggccaacgatctggcgattcgcattgcccacgcctggagcggcggcaccgggattattgtctcccgcgaggcctaccacggcaccagttcgctcacctccggcgtatcaccggcgctgggcagcggccagcctctggcccctgaaacccgcttagtggccgcgccggatttttaccgcaaccagaccgccgaccccggagcctggtttgcggcggagattcaaaagcagattgatgatatggcggcccacggcgttaagtttgccggtttcctggctgactcgattttctcttccgacggcgtgttgcccggcccgcgcggctttctgcagccggcgatcgacgtcgttcataaaaacggcgggatttttattgccgatgaagtccagcccggttttgcccgcaccggcgaagcattctggggatttgcccgccacgatgtggtgccggatgtcgtgactaccggcaagccgatgggcaacggtttcccggtctcgggactgatggccaaggcggaggtgctggcggcgttcagcgatgcgcttccctattttaatacctttggcggcaaccccgttgccatggctgcggcccaggcggtgttgaacgtgattcagcaggaagagctgcaggcccacagccggcataccggccagcagctgctggcggcgctgcgcaccttgcaggataagcatgaatgcgtcggcgacgtgcgcggcgcagggctgtttattggcttcgagctggtcaccgaccgggaaagtaagcagccggataaagctttggcgctgaatctgatcgaagcgctgcgcgaggagtttgtgctgacctccgtggccgggccttacggcaacgtccttaagctgcgcccgccgttatgcttccaggaggcagatatcgactggctggtgagcgcacttgaccgctgcctgactcgcttacgcgggtaa

SEQ ID NO: 456234 - DNA, 402 bp, Serratia marcescens
atgaacaaatggatattatcgggagcaatactcctgctgacggggtgccccggcccgatggatccggtaacgcttacgctgccggcgcaggctgcggtggtggataaccgggtctgcatcaccgttccggccgaagagggggagaaggtgttctctgcccagtttggcagcgatgcggggcaggagatgtataaaacctttggtgatgcggataagcaactcaaggcggtaaagggcgcatgcctgcccacctttgattttgcgttccagcctgataacacctatgccgtttactaccgtctggaaaagaaccccacggaaaaagggcggctgtttgcggcgcgcttctccctgacgcaagataacaacggcaggctgcaaatagtgcagtaccaacgatga

SEQ ID NO: 456235 - DNA, 810 bp, Serratia marcescens
gtgtgcgcgccgcataagcccttgctgctgctgtatgtgctgtcgcagtacaaagccggtcattcgcgcctgtttaactacggccgggagatccatgagccgctgacccggctgctgaaagagttcggccccaagcgccgcaccgactaccccaatatgcccttctggcgcctgaggagcgacgggttctgggagatcgccaatgcggagagctgtaaaccgcgcaaggggaacactcagcccaccaaaaaggagctgattgataaccaggttgccggcggctttgatgaggcgcactaccggcggctgcaggaacacccgcaggagatcgataagctggcgcagcagattctgaccgatcgtttccctgaaagcgtccagcgcattctggccaatcagctgggctttgattttatcgatcgttccaacaatcgcgatccgcgttttcgggagatcgtgctgcgcgcctaccactcccgctgcgccttctgcggttacgatctgcgcctggacggcgcgctggtcggcatcgaggctgcgcatattcattggaaggtgtacggcggtccgtgcgtggtcagcaacgggatagcgctgtgctcgctgcatcactccgcctttgatatgggcgcgtttgggctggatgaagatatgacgatccgcatctccggcggcgtaagccgcagcccggtggtggatcagctgttctggcagaagaaccaacagcggctgttgttgcctcatgacaaagcgctatggcctgcggagcagtacgtcggctggcaccgaaagcagatttttaagacttga

SEQ ID NO: 456236 - DNA, 2631 bp, Serratia marcescens
atggcgaagaaaccgaaatcaggcagcagtgagaagctactgtttaacaagctgaagcaatttgacgaacccggtctgttccatgacaactaccagacgccgggctacgttcaggcgaacctgaaggacgagctgcgtccgtatcagcacggggcacttcgttacctgcattatacgcagcgtaagcgggaagaggcactgctgcattaccgtcacctgctgtttcacatggcaactggtgctggaaaaacgatggtgatggcgggaacgatactctatttgtttaaagagtatggatatcagaacttcatcttcttcgttcataccgacgcgattattcagaaaacccgcgagaacctgcttaacccacagtcgccgaagtacctgttcagtcaggagctggaaatcgatggggaaaaaatcaccatcgcgtcggtggagacgtttccgtccgtgccggagtgcaacacgatttatctcaagctctcgaccatccataagatgcacgatgagctgaacagctatcgtgagaatagcatcacttacgaggatttgaaggaaatcccgatcgtgctgcttggtgacgaggcgcatcacttcaacgccggcaccaaagcgaaaggcaaggcaaaaaactcgacggaatacgaggaactgacctgggagcgcacgattgaaaatatgctcgcgcagcgccccgacaaccgtctgctggagttcaccgccaccatagacctaggtaaaaaagaaatttggcagaagtaccatgacaaggtggtgtatcagtatgacctgaagcagttcatgtcagacggttactcgaagaaggtcatgctgttggaagccaatcagaatgacggcgacaagatgcttgatgcggtactgctgagccaataccgcaagctgacggcggcggataacagtatcgccggcttcaagccggtcattctgttcaagtcgaacaagattgccatctcaaaggcgaagcaggatgaattttcgcacctgattgccgagctgacacctgagagcgtcagacgtcatctggcgaacaaaaaagtacagctcagttctaacaccagtatctggcataaagtgatacagcgttacgctgagagcgatttggtgacagttatcgggcagattcaggaggattttaacgacttcaatctgctgaacgtcaataagtcagatctgctggaagaaaaccccattctgctgaacacgctggaggaagccgataatccggtgagagtcgtctttgctgtggcaaaggtcaatgaaggttgggatgtactcaacctctacgatattgtccgcatcagcgaacaggcgagcagcagcaaaaccggcacggacagtgaggcgcagcttatcgggcgcggtgcacgctattatccgttccgttatgacggcaagcggagcttcacccgccggtttgataacagcgcgaaggatttaagcgtgctggaacaactgcactatcacaccatcaatgaaccgacgtacatcaaaacgctgcacgcttcccttgagcatgcggacattgacgtgcatcaggatggtggcggcacaatcgaacacgccaggctgaaagaggactttaaaaagtccgccatctatcagacgggtaaactgtacttcaacgaagtggaagagatagagagcagcaaccgctgctgggaaacgtactcactggaaacgcgttttgaaatatcgtatcagaccgccggtgaggagtcactggacaacctgacaggggtaacgggcaacgtcacgaaacatgaaccgctggtgctggatgagcgtttttaccgcaaagcgatgcagagaatccgcttctacgagctggataacctgcaacgctttttcccgaagctgaccggtattcgtgagttcatcggcagtgaagcttatcttggcaagctgagaatcactgtcaccgtgccgcagccgctggatttctctaccgtaccggcaaaagaaaaactgcatctgctggaaaacgtcctgctgcgtatctcagagaacgtacggcgtaatgaccagaaggtgaaaggcacatatcgcttcataagcctgccggtgaaggacgttatcaaggactacagcctgcacattgacccttccgtgataattaaccagaaaatcactgccgcgcagaccatcggtaaaaaatggtacgtgtatgacaacgctatactgaatcagcttgagcatcgtctggtgaaaatgctggaagcttttatgccgaagctcagagcccgttacgacgatatttatgtactgcgtaacgacgaacagtcaacgcgctttaagctcactgagtttggcggcgtgcgcggctttatgccggacttcattatgatactgacgcgccatgcggataacgcttactggcaggtcttccttgagccgaagggtgatgacagattgctggatgatgcatggaaagaaaaaatgctggaaaccctgaatgacagggatcgcattgtgattgatgaaagtgaggacgtaaggctggttgggattaagttctttgccaacagtcagatggaggcatttgttagcgatatgcaggataaaattaacgatggtgagccactggaaatctcatcactgctgctttga

SEQ ID NO: 456237 - DNA, 477 bp, Serratia marcescens
atggggcgtcgctatattggcattgagcaaatggattacatcaatgagattaccgtgccgcgcctgcaaaaagtcatcgaaggtgagcaggggggtatatccaaagacgttaattggaaaggtgggggaagctttgtctatgctgaactgatggagctgaacgcgtacttcgtgcatgaaatccagaaagcgctgtctactgaggaactcgaaaatctgttttccgtaatgaaaacggaggcgcacctcaattatcaggtggcacttgaaaacgtgctgtccgctgagtacgaaatggaaggcattccacgaaaggttgcattcagcgagttggaactgcacgagaagaagcagcttctgattgaaatacttgataaaaatcaactctacgtgaatgcctcggagatggacgactgcgatctgaacatttcagagagcgacaaagctttcacccgcagcttctacggtatggagtga

SEQ ID NO: 456238 - DNA, 642 bp, Serratia marcescens
atgagcctattaaataatcttaataaaaaatttaattctgatattaaaaacactgtgaccttaagtgttcgagtcactaatgaagaaaatgctgtactccaagaaattgccgatgttgttggctgtacaagacaagatgttatttatcagttgatctccgactatgctatccccgaatggcggaagatgaaaatggaaagtgagaatgaattaacagatattgctgatgaaaatagcggggtttcttatttcctcttaaatactaataaaacaaatagcaccgttgaccataacataattctggagcaaggaattgctgcaactttcgaagatgattatatagggaaaatcaatagaataaaaaaaggggatgttgttttcttatacgaatcagggtcagggattgtggcatatggttttggtagtggccagaacattgatgagcctaatccagaaaaaattaaccatagctcaatgcgatatcaggtgttatctgatttttctttgctggaaaagcctttatctgcaagagatgtaaaacgagtacttgaaaatgatatacctttcgctcaaacactgtcacgcgttaaaaatggtgaagtgttatataattatctaaaaaataaaactaatctcgcataa

SEQ ID NO: 456239 - DNA, 267 bp, Serratia marcescens
atgcgtaaagcccgattcaccgaacaccagatcattgccgttctgaagtccgtcgaagccggacgtaccgtcaaggatgtctgctgcgaagctggtatctctgaggcctcgtattacaactggaaagcgaagtttggcgggatggaaacctctgatatcaaaaagatgaaagaactgaaggatgaaaaccggcgcctcaaacagatgtttgctgatctcagccttgaatgccgggtcctgaaagacgttatcgaaaaaaagctttaa

SEQ ID NO: 456240 - DNA, 663 bp, Serratia marcescens
atgattatggcgctgaccgtggcggctaaacgctatccgcgatacggatttaaaaagctttttcaggtccttcgcaggcagagcaatagctggaatcataaaagagttcaccgtatttactgcctgctgaaactgaattttcgccgtaagggaaaacagcgcctgccggtacgtaatccggctccgctggcaacgccggaggcgatgaaccagagctggtccatcgattttatgcacgatgcgctggtctgcggcagacacttccggaccttcaatgtagtggatgactttaaccgcgaggccctcgcaatagaaatcgatctgaatatcccggcacagcgggtggtcagggtgctgaacaggatcgtagtaaaccagggttatccactgaaactgcagatggataacgggccggaactggtctcgcttacgcaggtgcagtgggctgaagagcatggtgtgatactagaatttatcaaacccgggaaaccaacgcagaatacctttattgaacgttttaaccggacgtaccggacagaaatactggatttttatttattcagaacgctgaatgaagcccgggaaattacagagcgctggttggctgaatataacagcgaacggccccatgaatccctgaataacctgacaccggaagagtag

SEQ ID NO: 456241 - DNA, 1257 bp, Serratia marcescens
atggctctgagttatgtgaaggttcgttcggctaagccggaagcaaaagcctataagcttactggcggtgaaggcatggtgttgctggttcaccctaatggctccaaatactggcggctgcgttatcgcttttgcggtaaagagaagatgctggcactgggaaaataccccgaagtctcgctggtggatgccagggctcgtcgggatgaggcccgtaagctgttagctaatggcgtcgatcccagtgagaacaagaaagccgttaaggtagagctggagcaagaggcgataacgtttgaagtggtagccagagactggcacgccagcaatcaaaagtggtctgagtcgcacagtgctcgtgtattgaaaagcctggaagataatctcttttcagccatcggtaagcggaacattgctgaattgaagacacgggatctgcttgtccccatcaaagccgtcgagtcatccgggcggctcgaagttgccgcccgtttacagcagagtactaccgcgattatgcgctttgccgttcagagtggtttaatcgactacaatcctgcgcaagagattgccggtgcggttgctacggcgaaaagacagcatcgtgcggctttggagcttaatcgtattcctgaattacttcatcgcattgatcactattccggaagaccattaacccgacttgctgtcgaacttaccttgttagtctttatccgctcaagcgagctgcgctttgcccgctggccagaagtggattttgaaacggccatgtggacgattccgggagagcgtgaaccgctggaaggtgttaaacattctcagcgtggttcaaagatgcggacgccacatcttgttcccttgtcgcgtcaggccttagctattttggaaaagatcaaaggcatgaatggaaaccgagagctgatcttcgttggcgatcacgatcctcgtaaacccatgagtgagaatacggtgaataaagctctgcgagtgatgggttatgacacgaaaacggaagtgtgtggccatggttttaggacaatggtgtgtagttcgttgattgagtcgggattgtggtcgagggatgcggtagaaaggcagatgagccatcaggagcgtagctctgtgcgggcggcttatattcataaggcggagcatctgggggagaggaggttgatgctgcagtggtgggcggattatctggatgcgaacagggataaggctgtgagtccgtttgattttgctaggcttgggcgatga

SEQ ID NO: 456242 - DNA, 768 bp, Serratia marcescens
atgatcccatccgaacgccgcgattttatctatcgctacgtgcatgaatatcagctggtgcccatcgccgcgctgacagagctgatgagcgtgtcccatatgacggtgcggcgcgatatccgcgtgctggaggaagagggcaaggtggtcagcgtcagcggcggcgtgcgcctgagcgacgcgctgcggcaggagctggcctacaacgaaaaaatgcagctgcaccaccgccataagcgcgccatcggcaaatacgccgccagcctggtggaggatggccaggtggtctacctggacgccggcaccaccacctttgaaatcgcccgcaacctggcggagcgcttcaacctgacggtggtcaccaacgacttctccattatccagcacctgatgaaccgcccgcagctcagcctgtttcacaccggcgggcaggtggaccagcgcaactactcctgcgtcggcaacagcgccgccatgctgctgcgcacgctgaatatcgacgtggcgtttatcagcaccagctcctgggatctggagcacgggctgtcgacgccgcatgaagaaaaagtgctggtgaaacaggcgctgctggaggtggcgcgccggcgggtgctggtctccgacagcagcaagttcggcaagtacggcatgttccgcgtctgcccgctggaggcgctggacgacatcctgtgcgacgccgcgctggcggcggaaacccagcagcaacttaacgatcgcgggctgcgactgcactgcgtcagcctctga

SEQ ID NO: 456243 - DNA, 963 bp, Serratia marcescens
atgaacattattattaccggcgccgccggcttcctcggccagcgtctggccgccgcgctgctgcaaaacaacgtcctgccgttcgaacggctgatcctggcggacataaacaccccgcacccgccggtggaggatgcgcgcgtacgctgcgtggcgctcgatctcagccagccgcaggcggcggaatcgctgatcgacgccgactgcggcgtgctgttccatctggccgccatcgtcagcagccacgccgaaagcgactttgacctcggcatgcaggtcaacttcgacgccacacgccagctgctggaggtcgcacgccgcaaagcgccggcgatgaagtttatcttcaccagctcgctggcggtgttcggcggcgagctgccggcgctgatcgacgacggctgcgcggtaacgccgcagtcctcctacggcacgcaaaaggcgatgtgcgaactgctgatcaacgactacgcgcgcaaaggctttgtcgacggccgcgtgctgcgcctgccgaccatcagcgtgcggccgggcaagccgaataaggcggcctcgtcgttcgccagcggcattatccgcgaaccgctgcacggcgaagcggcggtgtgcccggtatcgccggagctgacgctgtggctctccagccccggccgcgtggtgcagaactttatccacgccgccaccctgcccgccagcgccttcggcgtatcgcgcaccgtcaacctgcccggcatcagcgtcagcgtgcgccagatgctggcggcgctgcgtgaggtcgccggcgaacaggtcagcaatctggtgcgctttgagccggacgaggcgatcaaccgcatcgtcgccagctggccgggcaacttcgacgtgcgacgcgcgctggcgatgggctttggcgccgatgaagattttcagcaggcgatccgcgctttcctgcgcgatgagcaggcgcagagcgagggctga

SEQ ID NO: 456244 - DNA, 1386 bp, Serratia marcescens
atggaattatatattccgattatcggcctggcggtggcggtgttcgtgctggtatttctggtgctgcgcacccgggtgcacgcgctgatcgccatgctgatcgccgcctccatcgccggcatctccggcgggctcagcgcggtgcagacggtggataccatcaccaagggcttcggctccaccctcggcagcatcggcattgtgatcgggctgggggtgatgatgggccgggtgctggaagtctccggcgcggcggaacagatcgcctacagctttatcaaatggctgggcaaaaagcgcgaagagtgggcgctggcgatcaccggctatatcgtcagcattcctatctttgttgattcggcgttcgttatcctctatccgctggtgaaggcgctggccaaaaagggccagcgtaacttgctgacgctgggcgtcgcgctggccggcgggctgatcatcacccaccacgcggtgccgccgacgccggggccgctaggggtggcgggcatcttcggcgtcgatatcggcgcgatgatgctggccgggctgacgctggcagtgccctgcgtggtcggcatcgtgctctatgcccgctggctgggcaagaagtacccggattttcagccggcgatggaggacgaagcgccgcaggatctgcgcgccgcccacgataactacctggcggaaaaaggcgccaaggcgctgccggggctgacactttcgctgctgccgatcgtcacgccgatcgcgctgatctttatcaacgcagtcaacggcatgctggcgaagctcgacggcttcagcgggctgacggacagcctgtgggggcagaccttcgccttcctcggttcgccggtgattgcgctggcgatcagcgtcctgctggcggtcagcaccctgatgccgaaggtcgataaacagcaaacgctggagcggctggaggaagggctgcagtcggcagggatcatcctgctggtgaccggcgccggcggcgcgctgggcgcggtgctgcgtgaaagcggcaccggcaacctgctggcgcagcacgtcgccagcctgccgctgtcgccggtgctgatcccgttctttatcgccacgctggtgcggctgattcagggatccggcaccgtggcgatgatcaccgccgcgtccatctccgcccctatcgtcagccagctgccgggcatcaacatgctggcggcggcgcaggcggcgaccatgggcgcgctgttcttcagctactttaacgacagcatgttctgggtggtgaaccgcatgatgggcatcaaggacgtgaagcagcagattatggtgtggtcggtgcccaccaccatcgcctgggcgatcagtctggtaggggtcgtactgctcgactggctgctgtaa

SEQ ID NO: 456245 - DNA, 804 bp, Serratia marcescens
atgaagtacagaatcaatgcctttcttgattatgatgccaccgaaggttcactgcggctgaacgacgacggcaagtccgatacccagctcaccatcaccgccaacgccctgctgtactttattattcagcatcccggcattatcagccgcgacgacgtcatgaagcgcgtctgggacgataacggcctggtctcttccaacagcaacctcaaccagtacctgagcatgctgcgtaaggcgttccgccgctacggcatcgacaacgtgatcgtcaccgtgtcgcgcggccggctggagctgaaccccgaactgcagatagagctgattgacgacacgccgctgcaccccgccgtgctggcggcagagccagcgccgccgcccgcagagccgctaagcgcgccgccaacgccgcccgcagtctccggcgaccatgaccactactggggctacagcggcgcggcgctggtgctgctggccctggcgctgttctgctggtcatgggccaacggccgcagcctgacgccgctgcgcttctcacaggtggcgcaggagccgttcgaggtgttctccaccgatgccatgctggatccgcgcatgcgcgaaaattaccggaaaaattttatcgcggtgaaggagaaaaaaggcatcaggcagcataacggcgagcagttcctgttcttttacggtgataagctgcagtccaacggattaggccgcacttttctcgcacactgcgtcaagcatcaggataattcgttcagctactgcgataactatttttattactcatggaatgcagtatga

SEQ ID NO: 456246 - DNA, 519 bp, Serratia marcescens
atgaaaaaattagtctggggaaaatgttttttcttcggctctgtgctattgctgctgctggcaatatttgtcgccgcccggcacgaagccatctggcgtaacgatctgttaaactgctccaccaaagcaataatgcattttgaagataccgagaccgaatccgtcaacgttaatatccatttcagctttaacgccgacaataaaggttcgatcgtagtagaaggttattccaactccgccgccggctggctctatttacagcgctacgtgcagtttgattacaccagcaaacgcatctcgcccggcacccgctattatcgcatcagccgttgggaggccagcaagtcctccatcgaccagtcgccggacgtgattttcgactactttatgcgggaaatgtcagacagccacgacggtctgcagctggcggtggagcaaatcaacccgcgtaccgtcctgctcagttcgatcaactcgccgctgtatatctgcacgctgaagcccggcgcggcccgctga

SEQ ID NO: 456247 - DNA, 279 bp, Serratia marcescens
atgggtgatgcattaggtctgatcgaaaccaaaggcctggtggcctgtgtggaagcagcggacgccatgtgtaaggcagccaacgtggaattgattggttatgagaacgtcggttccggcctggtaaccgccatggtgaaaggcgacgtcggcgcggtgaaggcggcggtcgactccggggtggaatcggcgcagcgcgtcggtgaagtggtgacttcgctggtgattgcccgtccgcacaacgacatcaacaaaatcgtcattaagcacaaagcataa

SEQ ID NO: 456248 - DNA, 285 bp, Serratia marcescens
atgggtgacgcattaggattgattgaaaccaaagggctggtggcctgcgtagaagccgccgacgccatgtgtaaagcggccaacgtcgagctgatcggctatgagaacgtcggttccggcctggtgaccgccatggtgaaaggcgatgtcggcgcggtgaaagcggcggttgattccggcgtggaatcggcgcagcgcgtgggtgaagtggtgacctcgctggttatcgcccgtccgcacaacgacattcagaaaatcgtcgcacagtacaaagtcgccgaataa

SEQ ID NO: 456249 - DNA, 279 bp, Serratia marcescens
atgaaagacgcactcggattgatcgagaccaaagggctggtgccggcaattgaagccgccgatgccatgtgcaaggccgccaatatcgcgctgatcggctatgagaacgttggttccggcctggtgaccgtgatggtaagaggcgacgtcggcgcggtgaacgccgcggtggaatcgggcattgaggccgccgggcgtatcggctgcgtggtctcttcgcgggtgattgcccgtccgcataacgatattgaaaaaatcgccgccaaacataaaacctga

SEQ ID NO: 456250 - DNA, 1593 bp, Serratia marcescens
atgacgacattagatccggatttacaatctattcagcaggcgagaaatttaattcatcacgccaagcaggcgcagaaaatatttgccgcctactcgcaggaaaagatcgacgaaattgttaagcagattgcgcaatatgccgcgcagcatgcggaagagttggccaaactggcgcatgaagaaaccggcttcggtaattggcaggataaagtattaaaaaatatcttcgcctccgagagagtttattcgcatattaaagcgatcaaaaccgtcggtattctgcacgacgatcaggaaagcaaggtgatggacgtcggcgtaccgctgggcgttatcacggcgctggtgccctccaccaacccgacctccaccattttctacaaaacgctgattgccctgaaggccggcaacgcgattatcttctctccgcacccgaacgcccgccagtgcagccagcgggcgattgaaatcgtcaagcaggccgccctgcaggccggcgcaccggccggcatcgtcgacgggctgacccagctgacgctggacgccaccaaaaccctgatgcacagcaaagacgtggcgctgatcctggcgaccggcggcgaaggcatggtgcgcgccgcctacagttccggcacgccgaccatcagcggcggcccgggcaacggcccggcgtttatcgaacgcagcgccgatatcaagcaggcggtctgcgacatcattaccagtaaaaccttcgataacggcgtgatctgcgcctctgagcagtcgatcatcgtagaaaaatgcatctatcaggacgtgcaccgcgagctgctggcgcagggcgcctacttcctgaatgacgacgaggcccgccgcctggccaatatcctgctgcggccgaacggcatgatcaacccggaaatcgtcggcaaaaccgcgatctacctcagcgagcgcgccggcttcaacgtgccgccggacacccgggtgctggtcgccctgcaggacagcgtatcgcgcagcaacccgtacgcccgcgaaaaactctgcccggtgctggggctgtatatcgaagaggactggatgcgcgcctgcgaccgcgtggttgagctgcttaccaacgaaggtctggggcatacgctggtgatccacacgcagaaccagcaggtgatccgcgagtttgcgctgcaaaaaccggtgcaccgcatcctgatcaatacccctgccgcgctgggcggcatcggcgccaccaccaacctgataccagcgctgaccctcggctgcggcgccgtcggcggcggctccacctctgacaacgtcgggccgctgaacctgatcaacatccgcaaggtcggctacggcgtgcgcagcatcgaagaactgcgtcatccctcacggccaagccgcggccaggatcacagcaccagcatttttgccgactcgcgcttccagcagggatcgcaggccgccgcaccacagccgccgagcgcccgggccgatgaccgtttcggcgccgtgagcccggcagcggcgtcgcaggcggccaacgacatcaacgaagagaacgtcgagcacattatcaaagcggtgcttggccgtatgtcccggtaa

SEQ ID NO: 456251 - DNA, 258 bp, Serratia marcescens
atgattctcgcaagggtgaccggacacgtggtggccacacagaaaagcgacgaactgcgcggcagcaatctgctgctggtgacggcgctgggggatgacctgcaggccatcaaggaccggacctatgtggcggtcgacagcgtcggcgccggggaggatgacctggtgctggtggaggagtatttcgcgctgaataaagaccgttacaaggccatgtcgatcgtcgccattgtcgagaaggttcaccgggagcgttaa

SEQ ID NO: 456252 - DNA, 1209 bp, Serratia marcescens
atgaatgaatttctgattaagccaaaaatccatttcggtgcggatgccctgaacgcgctgcgggatctgcccggccgttcggcatttttggtgacggatcaggcgatggtaaagctggggatggcgcagcaggtgacgcgtctgctccagcagcagcaggtgcgctgccgccagtatgacagcgtcgcctccgatccggatatcgccgccatcgtcagcgggatgaagatgatggacgacgactaccccgagctgattatcgctctgggcggcggctcggtgattgatgcggccaaggcggtgatgtacacgctgtggcactgtcgccaggagcgtccgcgcccctgcttcgttgcaatccccaccaccagcggcaccggttccgaggtcaccagcttttccgtcatcaaatcacgcagtgaaaagctggtgctggtggacgagtttatgctgcccgacgtcgccattctggacccgcagctggtggcgtcggtgccgcctgtgattaccgccgacaccggcatggacgtactgtgccatgcgctggaagcctatgtctcacgacgcgccagcgatttcagcgatgcgctggccgagaaggtggtgcagctggtgttccatcatctgctgcccagctaccagcaaggcagcgacatgctggcgcgcgagaaaatgcataacgcctcctgcatggccggcatggcgttcaccaacgcctcgctcggggtgacccacagcatggcgcacgccctcggcggcatgttcggcgtgccgcacgggcgggccaatgcgctgctgatgcaggaggccattgcctttaacgccgatctggacggcgagtgcgccacccccgccgcccggaaatacgccgcgctggcgcgcctgctggctctgccggccgccactgcgcgcgaaggggttaacagcctgctggtggcgatcgccacgctgaaacaggaaatgaacatgccggccagcctgtacgccgccgggctggacgagcaccgcttccaggtctgcctgagtgaaatggcgcaccaggcgctgcatgacagctgcacgccgaccaacccgcgggcggtcagcctcgccgacctggagagcatgctgcgccgcgcctatcacggcggcggtaacggcaacgacccatcatcaagcttacggactttgcgcgacgacgtgcaaggcgaaggaatcaggagagattga

SEQ ID NO: 456253 - DNA, 3405 bp, Serratia marcescens
atggcacactatgcactgacgccgcgcgtacagcagctggcggaacgctttttatctcagaacagcaccatcagcaccgaacgcgccagcctgctggagacactgaacgacgacgtggccggccagccggcccaggttcgccatgcccggcgcttcaatgagctggtgaaaaaactgcccggctatatcggcccggatgagctgattgtcggcagccagtcctccgtgccgcgcgccgccattttccacagcgaaagcgagctgcgcaccccttccgcctttaccgcgccgggccagaaatcgcctgactatctggcggttatcaccaaaggcctgaacgctatcggcgccgagatggaagaccgcgccagaagcatcggcagcgcagtcagccgcggcgcgttggatgaggccaaccagtgccgcgcaatgatctacgcctgtaacgccgtcgttaatctggcgcagaagctggccgataaggcggagaacctggccgcggtggaaagccacccttaccgccaggccgagctgcgcgaaaccgccgccatcctgagaaaagtgccggcgcagggcgcaggcagctttaaagaggcgtgccaggcgttctatctgttccagctggcgctgcacctggaaaacggcagctacgcggtcagcccgggcggcttcgacaaattgctgtacggcttctaccagcacgatattacccatggcgttctgaccccggcgcaggcctatgaaattgtcgaatgcctgtggttaaaactgagcgaactgtcagaagtgcgcgccccttgcgagcaggacggttacccgatgtttgacgccatgctgcacggcgtaaacattgacgacccggcgctggtgattaacgaactgtccgccatgctgctggccgcgcgccgcaacctggagagcatcaacccggcgctgcgcatccggctgtttggcggccaatccgtctgccacgcccagcgctacgccgccgccagcgcgcagccgacgccggccgccggccagctgatgccgggcctgacgccgcgcctgcagcgcctgcgcgacaactatctggacgcccgtccgagcgtctccatctaccgcgccctggcctttaccgaagtggcgaagaacaacccgggcctgccgaccatcctgctgcgcgccaagtcgttccgcgccgcctgtgaaagcgcgccgatcctgatccagccggacgaactgatcgtcggccacccgtgcggtaagccgcgcgccggcgccttctcgccggatatcgcctggcgctgggtgaaggacgagctggacaccatgagcacccgtccgcaggatccgttcgagatcgccgaagaagacaagcagatcatccgcgaacagatcgtaccgttctgggaaggccgctcgctggatgagatctgcgaggcgcagtaccgcgaggccggcgtctggtcgttcagcggcgaaacctttgtcagcgatctctcctaccaccagatcaacggcggcggcgatacctgcccgggctacgacatcctgctgttcaccaagggcatgaacggcatcaaggccgacgcccagcagcgcctcaacgcgctgagcatggaaaacccggaagatatcgacaagatctacttctacaaggcggcgatcgaaacctgcgacggcgtgatgaactatgccaaacgcatcgccgacaaggcgcgcgagctggcgtctcaggagcacgatccggcgcggcgtgccgagttgctgaccattgcggaaaccaacgacaacgtgccggccaacccgccgcagaccctgcaggaagcgctgcagagcatctggacggtagagtcgctgtttgaggtggaagagaaccagaccggcctgtcgctggggcgtctcgaccagtactgctacccgatgtatcaggcggatatcgcctccggtcgtctgacgcaggagcaggcgctggagatgatgcaggcgtttatcatcaagtgcgccgagctgatgtggatgtccagcgagcagggcgccaagtacttcgccggctaccagccgtttatcaacctgaccgtgggcggccagaagcgcagcggcggcgacgcctgtaacgaactgacttacctgattatggatgcggtgcgctttgtcaaagtgtaccagccgtcgctggcctgccgtattcacaaccagtcgccgcagcagtatatggaaaaaatcgtcgaggtggtgaaagccggcatgggcttcccggcctgtcactttgatgattcccacatcaagatgatgctgcgcaaggggttcgattttgaagacgcgcgcgactactgcctgatgggctgcgtggagccgcaaaagtcgggccgcatctatcagtggacctccaccggctacacccagtggccgatcgccatcgagttcgtactcaaccgcggccgcatggtgctgttcgacagctatcagggcctggataccggcgagctgcatacgctgaaaacctatgaagacttcgaccgcgcggtgaaggagcaggtggcgcatatcgtcaaactctccgccatcggcaccgtaatcagccagcgcgtacaccgcgacgtggcgccgaaaccgctgatgtcgctgctggtggaaggctgtatggagaaaggtctcgacgtcgccgccggcggcgcgatgatcaaccacggcccgggcctgatcttctcgggtctggcgacctatgtcgactcgatggccgccatccgcaagctggtgtatcaagatcgtaaatacaccctggagcagatccgcgatgcgttgctggctaacttcgaaggttacgaacagctgcgccgcgactgtctgaacgcgccgaagtacggcaacgacgacgacagcgtggatcagttcgccctcgacatcaccgagtggacggaacgcgagtgccgtcaatacaagatgctctactcgcgcctgagccacggcaccctgtccatctccaacaacacgccgatcggcgagctgacggcggcgacgccgaacggccgtctggcctggatgccgctgtccgacggcatcagcccgacccagggcgcggacaagcaggggccgaccgccatcatcaagtccgtcagcaagatgaacgtggagaccatgaacatcggcatggtgcacaacttcaagttcctcaaggggttgctggataccccggaaggcaagaacgggctgatcaccctgctgcgtaccgcttcgattctcggcaatggccagatgcagttcagctatgtcgataacgaggtgctgaaaaaagcccagctggagccggagaaataccgcgacctgatcgtgcgcgttgcgggctacagcgcctacttcgtggagctgtgcaaagaggttcaggacgaaatcatcagccgtacggtgattgagaagttctga

SEQ ID NO: 456254 - DNA, 948 bp, Serratia marcescens
atggataacatggaaaaaaagggtcgcattttcaacatccagaaatactcgatctatgacggaaacggtatccgcaccctgatttttttcaaaggctgcaacatccgctgtgcctggtgcgccaaccctgaaggactgagcagccagttccaggtgatgtactcccgcgacaagtgcgttgactgcggccagtgcgtcgatgtctgcccggtaggcatccattcgatgattaaaaccccgcatggcgacccgcaacaccgggtagaccgccagatcgactgcatcggctgccgcaagtgtgaagaagtgtgcgtcagcgacgcgctggacatcatgggcaaagacgtcacggtgcgggagctgttggacatcatcatgcaggacatcgacttttaccacgcttccggcggcggcgtaacgctgggcggcggcgagctgagcatgcagacggatttcgccgtcgcgctgctgaccgaatgcaaaaagatgatgatcaacaccgccatcgagaccaacggcaccacgccgctggccaattacgaaaagctggcgacctgcaccgatatgttcctgttcgacatcaaacatatcgacaccgaacgccaccgtgagctgttcggcatcggcaacgaaggcgtgaagcgcaacctggagcgcctggtggaacttggcgcgcacgtcgtggcgcgcatgccgctggtgcgcggttacaacgactcctacgacgccattaccggcgcgattgagtatgtcatcgcgctggcgcgccgcggcaatatcagccgcatcgacgtgctgccctaccaccaactgggctcaaccaaatacgaccggctcgacatgatttatcccgttcagcacgaccccagctacagcgagcaggagctggatcaactggcggcgtttttccaacgcttcgatttcgacatcagactggtaaggcactaa

SEQ ID NO: 456255 - DNA, 429 bp, Serratia marcescens
atgaagttaagcctgggagtcattgaaacctacggcctcaccgccgccatccaggcagccgatgcggcctgtaaatccgcctcggtcacgctgctgggttataagaagatcggcgccggtttggtcaacgtgttcctcggcggcgagatcagcgcggtgaagagcgccgtagacagcggcgttgccgccgtcggccagccgacgtttatccgcggccggctggttatcgcccgtccgggcgaacgggtggtggcgctgctgaacgatctcgccggcaatgccctgacgccgtctgccgacgacgatgccgtcaagccgaccgtcaccgccgcccctgccgccaaaccggaggaaaccccgccgccggccgccgaagcgaagcccgcgcgcgccgagaaccgtgcaggcggcaaaaaggatcagaaataa

SEQ ID NO: 456256 - DNA, 636 bp, Serratia marcescens
atgtttaaagcatcgttactggaaaaggtgcggcacaacctggcgcaggcgcagccgctgtcgtcggcgatgacgatcccggttggcgtctccaaccgccatgtccacctgtcgcagccggatatcgaggcgctgttcggccccggttaccggctgacgccactgaaggaactgcgccagccggggcagttcgccgccaaagagtgcgtaaccatcgtcgggccgagaggttcgatcggcaaggtgcgggtgctggggccggcgcgggaggcttcccagttggaaatatccaaggccgactgctttaccctcggggtgaaagcgccagtgcgcgagtccggccagctgcagggatccggcgacgcgatgttggccggcccggcgggctatgtcgcgctgcgttcgcaggtgatttgcgcccagcggcatatccatatgtcgccgctggacgccgcccggctgggggtcagcaacgggcaggcggtgcgggtcaaaacggcgggccagcgtgcgctggtctttgatcaggtggtggtgcgcgtgaaagaaagttttgcgttggagctgcacatcgacaccgatgaggccaacgccgccggactggcctccggcgacagcgtcacgctggccgactga

SEQ ID NO: 456257 - DNA, 672 bp, Serratia marcescens
atgcaggacgaaaccatcgaacggattgtggacgcggtactgatgcgcatgcggccgcggctgttgctgctgctcaacgccgcggacggctaccacgacattatcctggcgcgtctgcagcactgtcgtcacttcgcgccgcaggtgctgtttgccgacggcgcgcaggctgtccatccggcggacgcctggcggcagctcggccccgtcgtcacgccggcggagatagagcaggtcggcgcgctggacaatatcgaccgcgtcatcgcgcccttcctggattttgccaccgcggcggaagtcgctcacgacctgtttcagtccgctggcgcacgctgcattcagctggcgcggctgcacaacacgccggtgctggcgctggattacaactgcaatccgcacagcgagttaaaccggctaaaagggctgggcggcaatcaggacgcccactcgctggcggacaatctgccccggttggcgcagcgcggcattcagttctgcagtctggaacagatgctgtcgccgacgccgctgcccgcaaccgccgccgacgccgtggcggaaaccggcggctatatcaccctcagcgaacttaagcagcgcaacggccattgcccgccgggcgccaggctgaccgatctggcgctggaataccaacgaggaaaccaataa

SEQ ID NO: 456258 - DNA, 363 bp, Serratia marcescens
atgtcatcgaaagcgaagtcctggctgtggatgttgttggtgatagcgtccgaaacctcagccacctcaaccttaaagatgtttgataacagcgagggcgccaccaaaaccttactgctgggccttatcgtcgtgctgtattgcgcctgttactacgccctgtccaacgcggtgaaatacatccccgtcggcctggcctacgcgacctggtcaggcaccggtattttgctggtatcgacgctggggatggtgttctacggtcagcaccccgatgtcccggcgatgatcagcatggcgattatcgccagcggcatcgtgattatgaacctgttttctaaaatgggctcgtcagagtcagagtaa

SEQ ID NO: 456259 - DNA, 330 bp, Serratia marcescens
atgtttaatattggctttctgtggctggcattgtcgatcggcgccgaaatcaccggcacctcgatgattaaaaaaaccaacagctttaagaagttcggtccctcgctgctggtgatctgcgcgtactgcctgtgctacttcgcgctgacccgggcgatgggctatatgccggtaggggtggcctactcgctgtggtgcggctttggcatcgttggcgtaaccgcggtgtcgatgctgctctataagcaaaagcccgacctgccggccatcttcgccatggcgctgatcattggcggcggcatcatcatgaacaccttctcgcagatgtaa

SEQ ID NO: 456260 - DNA, 1071 bp, Serratia marcescens
atgtttggcgtattagaccgctatatcggtaaaaccatcttcaacaccattatcatgacgctgttcatgctggtgtcgctgtccggcatcatcaagtttgtcgatcagctgcgcaaagtggggcaaggggagtattcggcgctgggggcaggggtctataccctgctgagcgtgccgaaggacattgaaaccttcttcccgatggcggcgctgctgggcgcgctgctggggctggggcagctggcgacgcgcagcgaactggtggtgatgcaggcctccggctttacgcggctgcaaatcgccggctcggtgatgaaaaccgctattccgctgatgctgctgaccatggcgatcggcgagtgggtggcgccgcagggcgagcagatggcgcgtaactaccgggcgcagcagatgtacggcggttcgctgctgtccaccaagagcggcctgtgggcgaaggacggcaccgactttatctatatcgagcgggtttccggtaaaaacgagctgtccggcgttaatatctaccactttaacgaccagcgccggctggaaacggtgcgctatgccgccaccgccagctttgaagacggcgtgtggaaactgtcgcaggtggatacctcggacctgaccaatgccaagcaggtcaccggcacccagacgctgagcggggagtggaagaccaacctgacgccggataagctgggcgtggtggcgctggatccggactcgctctccatcagcgggttgcacaactactccaaatatctcaagcagagcggccaggaagccagccgctatcagctgaacatgtggagcaaaatcttctcgccgctgtcggtggcggtgatgatgctgatggcgctgtcgtttatcttcggcccgctacgcagcgtgccgatgggggtgcgggtggtgaccggcatcagctgcggcttcctgttctacgtgctggaccagatcttcggcccgctgagcctggtgtacagtatgccgccggtactgggcgcgctgctgccgagcctgctgttcctgtcggtcagcgtgtatatgctgcttaagcgtaaataa

SEQ ID NO: 456261 - DNA, 1095 bp, Serratia marcescens
gtgattatcattagatatctggtacgggaaacgctcaagagccaaatcgcgatcctgttcatcctgctgctgatcttcttttgtcagaacctggtcagggtgttaggcgacgcggtggacggcgatgtcccgacaaatttagtattatccctgctcgctctgggcgtgccgaaaatggcgcagctcattcttccgttaagcctgtttcttggcttgttgatgacgcttggacggttgtacaccgaaagtgaaattacggtgatgcacgcctgcggcctgggcaaacgcaccctgattatcgccgcgatggtgttggcgctgttcaccgccgccgccgccgccgccaacgtgttctggatcggcccgtgggcttccagccatcaggatgaagtgattgccgaagccaaggccaacccgagcgtggccgggctggcggaagggcagttcaagccgtcgcaggacggcaactcggtgctgtttatcggcaatgtcaaaggcaataccttcaatgacgtgttcctggcgcagctgcggccgaacggcaaccagcgcccgtcggtggtggtggcggaacatggccggattaaccagacgaaagacggttcacaggtggtgacgctggataagggcacccggtttgagggcaccgcgctgctgcgcgacttccgcattaccgacttcagcgactacaaggcggtgattggtcaccgcgccgtgaccatggacaacaccgaggccgagcagatgccgatgagcatgctgtggcagtccgacgagcaggaggcgcgcgccgagttccactggcgtctgacgctggtggtctccgtggtgctgatggcgctgctggtggtgccgctcagcgtggtgaacccgcgtcagggacgcgtgctgagcatgctgccggccattctgctgtatctgatcttcttcctgctgcagacgtcgctgcgttccaacgccggcaagggcaagctggacccgatgctgtggatctggctggtgaatgcggtgtactttgcgatcgcgctggcgctcaacctgtgggataccgtgccgatgcgtaagctgcgcggacgtctgagaggagcagcctga

SEQ ID NO: 456262 - DNA, 1512 bp, Serratia marcescens
atggagttcagtgtaaaaagcggtagcccggaaaaacagcgcagtgcctgtattgtagtcggcgttttcgaaccgcgccgcctgtcgcctatcgcagaacaactcgacaaaatcagtgatggttatatcagcgccctgttgcgccgtggtgaactggaaggcaaggtcggccagacattgctgctgcaccacgtgcctaacatcctctccgaacgtatcctgcttatcggctgcggtaaagagcgcgaattggatgaacgccagtacaagcaggtgattcagaaaaccatcaatacccttaacgacaccggctcaatggaggcggtctgcttcctgaccgagctgcacgtcaaaggccgcaacacctactggaaggtgcgtcaggcggtggaaaccgccaaagagacgctgtacaccttcgaccagctgaaaagcaacaaggtggagccgcgccgtccgctgcgcaaaatggtgttcaacgtgccgacccgccgtgaactgaccagcggcgaacgcgccattcagcacggcctggcgatcgcctccggcatcaaggcggcgaaagatctcggcaatatgccgccgaacatctgtaacgccggctatctggcctcgcaggcgcgccagctggcggacgccttcagcaccaacgtcaccacccgcgtgatcggcgagcagcagatgaaagagctgggcatgaacgcctatctggcggtcggcgccggttcgcagaacgaatcattaatgtcggtgatggaatataagggcaatccgaacccggacgctaagcctatcgtgctggtcggcaagggcctgacctttgactccggcggcatctcgcttaagccgggcgaaggcatggacgagatgaaatacgacatgtgcggcgcggcgacggtgtacggcgtgatgcgcgtggtggcggagctgaagctgccgctgaacgtgatcggtgtactggcgggctgtgaaaacatgccgggcgggcgcgcctatcgtccgggcgacgtgctgaccaccatgtccggccaaacggtggaagtgctgaacaccgacgccgaaggccgtctggtgctgtgcgataccctgacctacgttgagcgcttcgaaccggagctggtgattgatatcgccaccctgaccggcgcctgcgtgatcgcgctcggccaccatatcaccgggctgatgtcgaaccacaacccgctggcgcacgagctgatcggcgcgtccgagcaggccggcgaccgcgcgtggcgtctgccgatggccgacgaatactacgagcagatggactccaacttcgccgatatggcgaatatcggcggccgtccgggcggcgccatcaccgccgcctgcttcctgtcgcgctttacccgcaagtacagctgggcgcacctggatatcgccggcaccgcctggcgctccggcaaggccaaaggcgcgaccggccgtccggtagcgctgctgtcgcagttcctgctcaaccgctccgggctgaacggcgacgaataa

SEQ ID NO: 456263 - DNA, 450 bp, Serratia marcescens
atgaaacaggcgacgttttacttgctcgacaatgccgacccggcgggcgcgctgagcgcgcacgaggccgtggcctgcaccgtagccgccgacgccttccgcgccggcaagcgggtgctggtcgcctgtgaaagtcaggaacaggccatccggctggatgaagcgctgtggcagcgcgacccgcaccagtttgtgccgcacaacctggccggcgaagggccgcactacggcgcgccggtggaactgtgctggcccggcaagcgcggcaacgccccgcgcgatctgctgatcgccctgctgccgcagtttgcggactttgccaccgctttccatgaagtggtagactttgtcccttatgaagaaaccttaaaacagttggcgcgcgaccgatacaaagcctatcgcagcgtcggcttccacttgaccacggcaacgccgccaactcactga

SEQ ID NO: 456264 - DNA, 2877 bp, Serratia marcescens
atggaaaagacaaacagtcagctcgataccgcctataacccgtcccagatcgaacagaaactgtacgaccactgggaagagcaaggttacttcaagcccaatggcgacaccagccaggaaagcttctgcatcatgatcccgccgccgaacgtcaccggcagcctgcacatgggtcacgctttccagcagaccatcatggacaccatgatccgctaccagcgcatgcagggtaaaaacaccctgtggcaggcgggcaccgaccacgccggcatcgccacccagatggtggtggagcgtaaaatcgccgcggaagaaggcaaaacccgccacgactacggccgcgacgcgtttatcgacaaaatctggcagtggaaggcggaatccggcggcaccatcacccgtcagatgcgtcgcctcggcaactcggtcgactgggagcgcgagcgcttcaccatggacgacggcctgtccaacgcggtgaaggaagtgtttgtccgcctgtacaatgaagacctgatctaccgcggcaagcgcctggtgaactgggatccgaaactgcgcaccgccatctccgatctggaagtggaaaaccgcgaatccaaaggttccatgtggcacctgcgctatccgctggccgacggcgcgaagaccgctgaaggtaaagactacctgatcgtcgccaccacccgtccggaaaccgtactgggcgacaccggcgtggcggtaaacccggaagatccgcgctacaaggatctgatcggcaaagagatcatgctgccgctggtgggccgccgcatccgcatcgtcggcgatgaacacgccgatatggaaaaaggcaccggctgcgtgaaaatcaccccggcgcacgacttcaacgactatgaagtgggcaagcgccacggcctgccgatgatcaacattctgactttcgacggcgatattcgtcaggaagcggaagtgttcgataccctgggcgaagccagcgacgtttacagcagcgatatcccggcgcagttccgcggcctggagcgcttcgcggcgcgtaaagccgtggtggccgcttttgaagaactcggcctgctggacgaaatcaaaccgcacgacctgaccgtgccttacggcgaccgcggcggcgtggtcatcgaaccgatgctgaccgaccaatggtacgtgcgcaccgcgccgctggcgaaagtggcggtggaagcggttgagcaaggcgatattcagttcgtgccgaagcagtacgaaaacatgtacttcagctggatgcgcgacattcaggactggtgtatctcccgtcagctgtggtggggccaccgcattccggcctggtacgacgccaacggcaaagtatacgtcggccgcaacgaggaagaagtgcgccgcgacaacaacctggcggcggacgtggcgctcagccaggacgaagacgtgctggacacctggttctcttccggcctgtggaccttctccaccctgggctggccggagcagaccgacgcgctgaaaaccttccacccgaccagcgtgatggtcagcggcttcgacatcatcttcttctggatcgcccgcatgatcatgctgaccatgcactttatcaaagatgaaaacggcaagccgcaggtaccgttccacactgtttacatgaccggcctgatccgcgacgacgaagggcagaagatgtccaagtccaagggcaacgtcattgacccgctggatatggtcgacggcatttcgctggaagatctgctggaaaaacgcaccggcaacatgatgcagccgcagttggcggagaaaatccgcaagcgcaccgagaagcagttcccgaacggtatcgaaccgcacggcaccgacgccctgcgctttaccctggcggcgctggcctccaccggccgcgacatcaactgggatatgaagcgtctggaaggctaccgcaacttctgtaacaagctgtggaacgccagccgctttgtgctgatgaacaccgaagagcacgactgcggcttcaacggcggcgaaatgcagctgtcgctggcggaccgctggatcctggcggaattcaaccgtacggtgaaagcctaccgcgacgcgctggacagctaccgcttcgacatcgccgccggcattctgtacgagttcacctggaaccagttctgcgactggtacctggagctgaccaagccggttatcagcaacggcagcgaagcggaacagcgcggcacgcgcaacacgctgatcaccgtgctggaagcgctgctgcgtctggcgcacccgatcattccgtttatcactgaaaccatctggcagcgcgtcaagctgctgaagggcatcagcgccgataccatcatgctgcagccgttcccggcctacgacagcgcgctggaagatgagcaggcgctggcggatctggagtggatcaagcaggccatcatcgcggtgcgtaacatccgcgccgagatgaacatcgcgccaagcaaaacgctggaagtgctgctgcgcaacgctaacggcaacgcccagcgccgcgtgcaggagaaccagaactttatcgcccgtctggcgcgtctggaatccatcgcgctgctgcctgccggcgagaaaggcccggtttccgtcaccaagctggtggacggcgccgaactgctgatcccgatggccggctttatcgacaaggacgcggaaattgcgcgcctggcgaaagagatggccaagctggacggcgagatcgccgcgattgaaggcaagctgtcgaacgaaggctttgtctcgcgcgcgccggaagcggtcgtcgccaaagagcgcgatcgcctggcggcctgcaaggaaggcaaggtgaaactgcaagagcagcaggcgaccatcgccgcgctgtaa

SEQ ID NO: 456265 - DNA, 504 bp, Serratia marcescens
atgacaaccgcaactcccgtgcgcctgcgggtgcgccccatcgcggcggccgataacgccgccatcgcccaggtgatccgcgaggtgtccgccgagcacggcctcactgcggacaagggctacaccgtttccgacccggatctggatgcgctgtaccagctgtacagtcggccgcgcagcgcctactgggtggtggagctgaacggccaggtggccggcggcggcggcgttgccccgctgccgggcggcgaagcggacgtgtgcgaactgcagaaaatgtacttcctgccggcgctgcgcggacaggggctggcgaagcggctggcgctgcaggcgctggcgttcgcccgcgagcagggcttcctgcgctgctatctggaaaccaccgccagcctgacgcaggccgtcggcctgtatcagcacctcggctttgtccatatcgaccacgccatgggccacaccggccacggcgactgcgaagtcaccatgctgaaaacgctgtaa

SEQ ID NO: 456266 - DNA, 1608 bp, Serratia marcescens
atgtcagacaaccgttttgattacatcatcgtcggcgccggctcggccggctgcgtgctggcggcgcagctgatccgccgcacccaggcgcgggtgctactgctggaggccggcggcgacgacaataacctgtttatcaaaatgcccgccggggtggcgaagattatcgccaaaaaaagctggccctatgaaaccgagccggaaccgcacgccaacggccgccgcatgcagatcgcccaggggaaagtgctgggcggcagcagctcgatcaacggcatgatctacatccgcggccagcagcaggattacgacgactgggagcagcagtacggctgccgcggctggggctaccgcgacgtgctgccctacttccggcgcgccgaggccaacgaaagcctgtccgacgcctaccacggcgacgaggggctgctgccggtcagtgagaaccgctatcgccatccgctcagcatggcgtttatccgcgccgggcaggagctgaacctgccctaccgcaacgacttcaacggcgacagccagcacggcgtcggcttctaccagaccaccacccgcaacggcgagcgcgccagcaccgcgcgcacctacctgcaggcggtgcgcgaccagcagcggctggtggtaaaactcaacgcgctggcgcaccgggtgattattgaagacaacgtcgcccgcggcgtggcctacagccagaacggcggcgccgaggtgagcgccttcgccgaacaggaagtgattatctgcgccggcgcggtcggctcgcccaagctgctgatgctgtcgggcatcggcccgcatgcgcatctgacatcgctgggcatcacgccgctggccgacctgccggtgggcaaaaacttccacgaccatctgcatatgtcgatcaacgccagcacccgccagccggtcagcctgttcggcgccgaccgcggcctgcaggcgctgcgccacggcgcgcagtggctggcgttccgcagcggcgtgctgacctccaatattctggaaggcgcggccttcgccgacagccgcggcggcgatcgccccgacgtgcaggtgcatttcctgccgctgctcgacggctgggacaacgtgccgggcgaaccgctgcccgaggtccacggcgtgacgctgaaggtcggctacctgcagccgaaggcgcgcggcgaggtgctgctgcgcagccgcaacccggccgacgcggtgaagctgcacgccaactacctcggccacccggaagacctggccggctgcgtgcgcgcggtgaaattcggcctgcgttttctgcagaccgcggcgctgaagccgttaatcaaagaggtgctgatgccgcagccggcgtggcagcaggatgacgcgcaactggaggagttcgtgcgcaacttctgtaaaacggtgtatcacccggtgggcagctgccgcatggggcagcacgccgcggattcggtcaccgatctgcagctgcgggtgcacggttttgcgcggctgcgggtggtcgacggttcggtgatgccgcaggtgcccagcggcaacaccaacgcgccgaccattatgctggccgagaaggccgccgatctgatcctcggcgcggcggactag

SEQ ID NO: 456267 - DNA, 762 bp, Serratia marcescens
atgaattacccatcgttacttgccccgatcctctcttttctgcactgtgaaaccccggacggctggatcgacgccgcgcgccggccggaaaacctgtcgctgctgctgaccgaccatctggtgtgcgagctgaaggccgcccagaccggcatgtggctgatccgtcgctacgtggtggacaaggagagcggcgatgcgctgttggcgctgctgaagccgtatgagacgtttgtgcatgaggcgcagggcgtgccggaggcgctgttcaaccagagccagttcacccgcaaactgctgccgaagcagggttccgcctacggccaggatctggtggacaaaatggtgctgctgattaaagaggagctgcaccacttttctcaggtgctgtcgattatgcagtcgcgcggcattgcctataagaaaatcaccgccagccgctacgccaagcggatgatccgcgaggtgcgcactcacgatccggcgacgctgatcgataaactgatctgcggcgcctatatcgaggcccgctcctgcgagcgcttcgccaggctggcgccgcatctggacgacgagctgcaccgcttctacctgtcgctgctgcgctcggaggcgcgccactatcaggattacctgacgctggcgcagcagatcgccggcagcgaggatatcagcgcacgcgtcgcccacttcggcggtatcgaggcggagctgatcctgtcgccggacgatgagttccgcttccacagcggcctgccggcctag

SEQ ID NO: 456268 - DNA, 423 bp, Serratia marcescens
atggcaaaccgcgaattgctggaagaacaacgggaagagacgcgtctgatcatcgaagagctgctggaagacggcagcgatccggatgcgctctacaccatcgagcaccatttctctgccgaaaagtttgaagtcctggagaaggccgcggtggaagccttcaaactgggttacgaagtcaccgacgccgaagagttggaagtggaagacggccagctgctgatgtgctgcgacgtgatcagcgaagtgggcctgaacccggaagtgatcgacgcacaggtcgagcagctggtggcgctggcggaaaaatgcggcgtcaactacgacggctggggcacctattttgaagacccggacggtgaagacggcgacgacgaagacggtgaatttatcgacgaagacgacgacggcaagcgccactga

SEQ ID NO: 456269 - DNA, 1020 bp, Serratia marcescens
atgagcagcacaaaccccttttaccagcggcattttttacgcttgatggatttcaccccggcagagctgcaggcgctgctgcagctggccgccgatctgaaactggcgaaaaaacagggccgtgaagcccgccgcctgcaggggaaaaatattgcgctcatcttcgagaaggattccacccgcacccgctgcgcgtttgaagtcgccgcgttcgaccaaggagcgcaggtcacctatctcgggccgagcggcagccagatcggccacaaggagtcgatgaaagacaccgcccgggtgctggggcgcatgtacgacggcattcagtaccgcggctacggccagccgctggtggaaactctggcgcactacgccggcgtgccggtctggaacggcctgaccgatgagttccaccccacccagctgctcgccgatctgctgacggtgcaggaacacctgccgggcaaaccgctgtcagcggtgaagttcgcctatatcggcgatgcgcgcaacaacatgggcaacacgctgctggaagcggcggcgctgacgggcatggatctgcgtctggtggcgcccaaggcctgctggccgcaggcggagctggtggcggagtgccaggcgcaggccgaacgtctgggcggcaagattaccctgaccgaagatattgccgccggggtgcaggacgccgatttcctgtataccgacgtctgggtgtcgatgggcgaagcaaaagaggtgtggcaggagcgtatcgcgctgctcaaaccttatcaggtcaatatggcgatgctgcgccagaccggcaacccgcaggtcaagttcctgcactgtctgccggcgttccacgacgatcagaccacgctcggccggcaaatggccgaacagtacggcctgtacggcggcatggaggtcaccgacgaagtgtttgagtcgtcgcacagcatcgtgttcgatcaggcggagaaccgtctgcacaccatcaaggcggtaatggtcgccacgctgagccaggaagggtaa

SEQ ID NO: 456270 - DNA, 936 bp, Serratia marcescens
atggccaacccgctgtatcacaaaaacatcatctctattaacgatctcagccgtgaagatctggaactggtgctgcgcaccgccgccagtctgaaggcgcagccgcagccggagctgctgaagcacaaggtcatcgccagctgtttcttcgaggcttcaacccgcacccgtctgtcgtttgaaaccgccattcagcgcctgggcgcctcggtggtcggcttctccgacagcagcaacacctccctcggcaagaaaggcgaaacgctgtccgacaccatttccgttatcagcacctacgttgacgcgattgtgatgcgccacccgcaggaaggcgcggcgcgcctggcctccgacttctccggcgatattccggtgcttaacgccggcgacggcgccaaccagcacccgacgcaaacgctgctggatctgttcaccattcaggaaacgcaggggcggctgagcaatatcaacatcgccatggtcggcgacctgaagtacggccgtaccgtgcactccctgacccaggcgctggccaagtttgaaggcaaccgcttctatttcatcgccccggacgcgctggcgatgccgggctacatcctgaagatgctggaagagaaaggcattccgtacagcctgcacaacagcattgaggaagtggtgccgcagctggatattctgtatatgacgcgcgtacagaaagagcgcctcgacccgtcggaatacgccaacgtgaaggcgcagttcgtgctgcgcgccgccgatctggccggggcgcgcgacaacatgaaggtgctgcacccgctgccgcgcatcgatgaaatcaccatcgacgtcgataaaacgccgtacgcctactacttccagcaggcgggcaacggcattttcgcccggcaggcgctgctggcgctggtattaaccgcagaactggacttttaa

SEQ ID NO: 456271 - DNA, 465 bp, Serratia marcescens
atgacgcacgataataaactgcaggttgaagccattaaatgcggcacggtgatcgaccacattccggcgcaggtcggctttaaactgctgaccctgttcaagctgaccgctaccgaccagcgcatcaccatcggcctgaatctgccctcgaaagagctggggcataaagatctgatcaagattgagaacaccttcctgaccgagcagcaggccaaccagctggcgatgtacgcgccgaaggccacggtcaaccgcatcgacaattatgaggtggtgcacaagctgacccccagcctgccggaccatatcgacggcgtgctgacctgcccgaacggcaactgcatcagccgcagcgagccggtgccctccagcttcagcgttaaatcccgcgccgacgcggtgcacctgcagtgccgctactgcgaaaaagagttcgagcatcaggtggtgctgcaggccggataa

SEQ ID NO: 456272 - DNA, 387 bp, Serratia marcescens
atgtcacgtaacatcagcactgaactcgcaccggcagccattggtccttatgtgcagggcgttgacctgggcagcatgatcatcacctctggccagatcccggtcgatccgaaaaccggcgccgtggccgacgacgtcgccgctcaggcgcgccagtcgctggaaaacgtgcaggccatcgtcgaagccgccggcctgaaggtcgccgacatcgttaaaactacggtgttcgtcaaagatctcaacgatttcgccaccgttaacgccacctacgaagcatttttcagcgagcacaacgcgccgttcccggcccgctcctgcgtggaagtggcgcgtctgccaaaagacgtgaagattgaaatcgaagcgattgccgtacgtcgttaa

SEQ ID NO: 456273 - DNA, 2988 bp, Serratia marcescens
atggccaatcacgtattggatgcttttatccaacaggtttccacgtcccctactcacccggcaattatcgataaagacaataagaatatcagctatcaacaactggacgatctcagcaaccggctgtgcgccctgctgcagcggcgtggcgtcggccccggtgattatattccactgctggcgcagcgtacgccgcagctgattatcggcatgctggcgatagtcaaagccggcgccgcctatattccgctggacagcagttatcctgagcaacgtatcaaatacattattgaaaaaagccgttcgccgattatattatcagaccatgaaaataataatgaaaaaaatcagtacgacagcgtaaaattaattaacattgatactattccagacgaaatagtattaactcgtcaaccggtcgatattcctcaacaggcactggcgtatgttatttttacctccggcaccaccggcacgcctaaaggcgtgatggtcgaacacctgtcgctgtggaatatcgtccgctggcacaaccggcaatttgccatggacgccgactgccgcaccacgctgaacgccggcatcggctttgacgtcgcgcagtgggagatctggtcggcactgaccagcggcgccgcactgtgcctgcctgcggaggagcagcggttgcagcccgccgcgctgctgcagttttttgccgaccggcggttgacccacgccttcgtgccgacggtgctggtgcctgacgtggtgcgcgccgacaaaccggcgcgactggcgctgcgctacctgttcaccgccggcgaaaagctggcgccgctcgacccgacgccgctcggctgtccgctgattgactactacggcccgaccgaagcgacaattttcgccacctgtaatccactcacctgcgccgccgatgccgccaccgccagcatcggccgcccggtgaccgacacggaaatctttattctggatgagcagctgcagccggtcagcggcgacgcgcccggcgaactgtttatcagcggcagctgtctggcgcgcggctatctgcataacccgcagctcagcgccgaaaaattcctgcagcccgccgggtttaacggcaaacggctgtaccgcagcggcgaccgcgcccgctggctggcggacggccgcattcagtacctcggccggctggacgatcaggtcaagatccgcggcaatcgcattgagctgggcgagattgagagcgtcatcatgcagacccccggcgtgagcgcggcggtcgccgtagtgaccgagcctgagcaggccgccgataaaaagatcgtcgcctgcctggtggccgacgctgcgcagcctgacctgctcgacgccgtcaaagcacgcctaaaaaagacactaccgtcttactttctgccggccgattacctgctgctgccgcgtttgccgctgaacgccaacggcaaaaccgacaaggcggcgctgctggcgcactatgccgccagccgcaccacggcgggcaatgcgctgccggacgccgcgcaggaacaggtcgccgccgtctggcgtgagctgttggcgctgaacgcgatcggcgccgatgataatttcttcgatatcggcggccattcgctgctggcggcccggctggcggaggccatcggccagcggctcggggtgaaaacctacgtgcgcgatatttacgaattccccaccgtcgccgcgctgacccgcgagctggcgcaacgcagcgggcaggcgcagccggagctggacagcgagccggtgcgcgcgctacaggaagatgcaaaattgccgccggacgtacagatcaacccgcactttgaaccgcagcagctgacgcagccacgcgccattctgctgaccggcgccagcggctttgtcggctcgcatctgctggcggacctgctcgccacgcgtcaggcggatatttactgcctggtgcgcggcgacagcgccgaacaggcaggccaacgcctggatgcggtgctgcaaaaacaccatatcgccctgagcgccgaacagcgcagccgggtgtatgtcgtgcccggtaatctggcggaaccccgcttcgcgctgcccgatgagcagtatcaacaactgtgccgacaggtggacatcatttaccactccgccagcgcggtgaactttatccagccctactcctacatgaagcgcgacaacgtgcagggcctgaacgaagttatccgcttcgccgcccacctgcgcaccaagccgctgatgctgctgtccaccatctccgtttacagctgggggcatctgcacaccggtaaacgggtgatgctggaaagcgacgacatcgaccagaacctgccggcggtgctcagcgatcttggctacgtgcgcagcaaatgggtaatggaaaaaatcgccgatctggcggcgctgcaggggctgccgctgatgaccttccggctggggtacgccaccagccacagccggagcggcgtcagcgccgactaccagtggtgggggcggctggtgaaaacctgcctgagcaacggtacggtgcccgacctgcgcgatctgcgcgaaggcctgaccacggtggattatatgacgcgcgccattgcgcatatcagcggtaacccgcaggcgctggggctgaagttcaatctgatccacgaggacagcaacaacctgacgctgcagcagttcttccggcggctggaggactatttcggctaccgcttccgccagatgccttaccacgactggctggcgcagtggcagcatgatgaaaacgcgccgctgtacccgctgctcagcctgttccgcgacaacatgtcgcacggccaggcggcggtgcagctgtatcaggatacctaccagtgggactgcagcaacgtgaagcgctttctggccggcagcggcattgaggagccgcgctttacccgccaggagctggaaaattatctgtaccggctcaccggcaaggcgccggtctcgctgacggcatag

SEQ ID NO: 456274 - DNA, 2391 bp, Serratia marcescens
atgcataaaccgcttcgttatacgttgcttgcgacgtcattactctgccccctgggcgcgctggcgcagtcggcgggcaagctgccgctgatgccgtggccgcagcaggtggagatcgcccagccgcagggcaaactggtgctgacgccccgcatcagtctgcaggtggagggcgataatctgggggacgcgccggcgcgctggcgtcagcgtcttgaactgcagaccggctggacgctggcgccgggggcgacgcagcaggccagcacgattacggtgaagatccagcgccaggtctcggcgcagccgctgccggacagcgatgaaagttaccggctgtcggtgacgccacagggggtgacgctgaacgccgccacccgcttcggcgcgctgcgcggcatggaaaccctgctgcagctggtgcagaccgacggacacaacaccttcctgccgctggtcagcatccatgataaaccgcgctttgcctggcgcggggtgctgctggattcggcgcgccatttcctgccggtcagcgatattttgcgccagctggacggcatggcggcggccaagctgaacgtcttccactggcatctgaccgacgatcagggctggcgcttcgcctccgcgcgctatcccaagctgcagcagctggccagcgacggccagttctatacccgcgaacagatgcagcaggtggtggcctacgccgcggcgcgcggcatccgcgtggtgccggaggtcgatctgccgggccacgcctccagcattgcagtggcctacccggagttgatcagcgcgccggggccgtaccagatggagcgcgagtggggcgtgcatgcgccgacgctggatcccggcaacgagcaggtttatcagtttattgacgcgatcgtcggcgagctgacgacgatcttccccgatccttacctgcatatcggcggcgacgaggtcgatcccagccagtggcagcagtcgaaaacgctgcaggcgctgatgcgcgagcatcagctggcggacgcccatgcgctgcaggcctggtttaaccagcggctggaaaagatcctcgaacgccatcagcggcgcatggtgggttgggacgagatctaccatccggcgctgccgcgcaccatcctgatccagtcctggcaggggccggactcgctgggggccagcgcgcaggacggctatcagggcattctgtccaccggcttctatctcgatcagccgcagagcaccgcctaccactatcgcaatgaagtgctgccgcagccgctcggggttgagacccaggtcgcggccggcgagcaggcgcaaagctggcgttttgagatcccgcggctgaagggcagcgcggtggcgggcagctttactctgattaagggccggcagggctggcgcggctttatcgacttcgatggcaaaacccgccgcgcgctgcacgatattgtctggcgtacgccgcagcaggtgagcttccggctggatacctggatgggcgacacccgcccggtcgtcaccctgcagggggacaagctcagcggctatacgctgctgggcaatgtgcgttaccccaccagcggcagccggctggatgcggcgccggagggcaaaatgccggtggtgccggacgccaaacagcaggccaatatcctcggcggtgaggcggcgctgtgggcggagaacgtacgcgcgccgctgctggatctgaagctgtggccgcgcgccttcgcagtggcggagcggctgtggtcggcgcaggacgttaccgatgagaacaacatgtaccgccgtctggcggcggtggacgcctggtcggtggtatccgtcggtctgcagcagcatgcggaaaccgcgcgggagttcacccgcctggccaacagcgtcgagattatgccgctgcagacgctggccgaagcgctggagccggcgcagtattacacgcgtcagcatctcaagttccgggcgggcaactaccatcagtttgagccgctgaaccggctggtggacgcgctgccgccggagagccgggcggtgcgcgagatgcatcagcaggtggaggcgctgctgcgcgaccgcgataaccgcgtggccgccgaggcgctgcgcagccgcctgctgcgctggcagcagaatgcggcgccggtgaagcggctgattggcggcaacgtgctgatgaaagacctggcgccggtggcgcaggacgtcaacgcgctggcggaactggggctgacgctgctggatcgctggcggcagggcaagccgctcggcaagcgtgaggcggagcagatccagcagcagctggacgcggcggcgcaggtgcgcgatgagctgaccatcgccgcagtgtatccgctggaaaccctgctgcgcggcctgacggtgcgctga

SEQ ID NO: 456275 - DNA, 948 bp, Serratia marcescens
atgcaaaaccggctgaccattaaggacatcgcccgcctcagcggggtaggaaaatccaccgtttcacgcgtgctgaacaacgaaggcagcgtgagccagcaaacccgcgaacgggtggaggcggtgatccgtcagcagggcttcaccccgtccaaatccgcgcgcgccatgcgcggccagagcgacaaggtggtcggcatcctggtgtcgcggctggactcgccgtcggagaatcaggcggtgcgcaccatgctgccgctgctgtaccagcacggctacgacccgatcgtgatggagagccagttcgacagccggctggtgcaggagcatctgcacgtgctggcgcagcgtaacgtcgacggggtgatcctgttcggctttaccggccttgaggccgagatgctgcagccgtggcaggagaaaatggtggtgatggtgcgcgagtatcagggcttctcttcggtctgctacgatgacgccggcgcggtgaatctgctgatggatcggctgcgccagcaggggcaccgccatatcagctacctcggcgtccaacagtcggacgccaccaccggcgcgcgccgctaccaggcctatctggacgcctgccaacgccacggcctgaccccgcacgcggcgctgggggaactcagctaccaaagcggcttccagctggcggcggaggcgatcgccccgcagacccgcgcgctgatctgcgcctctgacagcatcgccctgggcgccatcaaatatctgcagcagcagcagatcgccgatatccaggtgtgcgccatcggcaataccccgctgctcagcttcctgttcccggacaccctgtcggtggaattcggctacggcagcgccggcgtgcaggcggcgcagcagctgctggcccagctcagcggcgacgcgccgatccgccgcatcgtagtgccgagcaaactctcttaa

SEQ ID NO: 456276 - DNA, 1416 bp, Serratia marcescens
atgagcaaagtaaaacagcaggatatcgatcgcctgattgcgctggtcggcggccgcgagaatatcgccaccgtcagccactgcattacccggctgcgcttcgtgcttaacgacccggccaaggccagcccgaaagagatcgaaaccttacccatggtgaaaggctgcttcaccaacgccgggcagttccaggtggtgatcggcccggaggtcggtgattactatcaggcgctgatcgccagcgccggcgtcaacgaggcggacaaagagcaggctaaaaccgccgcgcgccagaatatgacctggtccgagcgcgccatctcccacttcgccgagatcttcttcccgctgctgccggcgctgatcagcggcggtctgatcctcggcttccgcaacgtgatcggcgatattccgctgtccgacggccagacgctggcgcagtccagcgccggctggaaaaccgcctatgacttcctgtggctgctgggcgaggcgatctttatgttcctgccggtcgccatctgctggtcgacggtgaaaaaaatgggcggcacgccggtgctgggcatcgtgctcggcgtaacgctggtgtcgccgcagctgatgaactcctatctgctcggccagcaggcgcctgagctgtggaacttcggctggtttaccgtggagaaggtcggctatcaggcgcaggtgatcccgtcgatcctcgccgggatggcgctcggctggattgaaacccggctgaaaaagtgggtgccggattacctctatctggtggtggtgccggtgctgtcgctgctgctggccaccttcctggcccataccctgatcgggccgttcggccgcatgatcggcgacggcgtcgcctgggcggtcaaggcggtgatgaccggcagcttcgcgccgatcggcgccgcgctgttcggcttcctgtatgcgccgctggtgatcaccggcgtccaccagaccacgctggcgatcgatatgcagatggtgcagagcatgggcggcacgccggtctggccgattatcgccctgtccaacattgcgcaggcctcggcggtgctggcgatcattatcgtcagccgcaaggccaatgagcgcgagatttcggtgccggcggcgatttccgcctacctcggcgtcaccgagccggcgatgtacggcatcaacctgaaataccgcttcccgatgctgtgcgcgatgatcggctccgcctgcgccggcctgatctgcggcctggccggggtgatggccaacggcatcggcgtcggcggcctgccgggtatcttgtcgatcaaaccgcagttctggctggtgttcgcgctggcgatgctggtggccgtggtggtgccgctggtgctgaccatgctggtgtaccggcgcaaggcgcgccgcggcgaactgccggtatag

SEQ ID NO: 456277 - DNA, 1665 bp, Serratia marcescens
atgagcaaccccatcccctggtggcaaaacggcgtcatctaccaaatttacccgaagagctttcaggacagcagcggcaacggctacggcgatctggccggcgtcattcagcggctggactatctgcaggcgctgggcgtggacgccatctggctgacgccggtctacctctccccgcaggtggataacggctatgacgtcgccgactactgcgccatcgaccctgcctacggcagcatggagacctttgagcagctggtggcggccgcgcaccggcgcgatatccgcatcgtgatggatatggtgttcaaccatacgtcgaccgagcatccgtggttccgggcggcgcaggatcgccacagcccgctgcgccagttctatatctggcgcgacggtgccgaaggaacgccgccgaacaactggcgctccaagttcggcggttcggcctggcagtggcacgccgacagcggccagtattacctgcacctgttcgccaccgagcaggccgacctgaactgggagcacccgccggtgcgcgaggagctgaaaaaaatctgtcagttctgggcggataaaggcgtcgacggcctgcggctggacgtaattaacctggtgtccaagcagcaggagttcccggacgacgcgcacggcgacggccggcgcttctacaccgacggcccgcgcattcatgagtttctgcaggaaatgagccgcgaggtgttccggccgcgcggcctgatgacggtcggcgaaatgtcgtccaccagcctggagcactgccggcaatatgcggccaacggcggcgaagagctgtcaatgacctttaatttccaccatctgaaggtcgattacgccaacggcgagaaatggacgctggcggcgccggactacgtggcgctgaagcagattttccgccactggcagcagggcatgcacaaccacgcctggaacgcgctgttctggtgcaaccacgaccagccgcgcatcgtctcgcgcttcggcgatgaccatgcgctgcgcgtaccggcggcgaagatgctggcgatggtgctgcacggcatgcagggcacgccctatatctatcagggcgaagagatcggcatgaccaacccgggctttgacagtatcgaacaataccgcgacgttgaaagcctgaacatgtacgccgaactgcgcgccgcggggcgcagcgacgccgagctgctggcgattctggccagcaagtcgcgcgataacggccgcacgccgatgcagtggagtgccgaacccaacgccggcttcagcagcggtacgccatggatcccctgcgccggcaactaccgccaggtcaacgtcgaggcagcgctggccgaccaggagtcggtgttttacacctatcgccacctgatcgccctgcgtaaacagtacccgctgctgacccacggcgactatcaggatctggcgccgacgcatccggcgctgtggtgctatcagcgcagctggaacggccagcggctgctggtggcggccaacctgagcgcccagccgctggcgtgggacgcggccggcgttgaggcgtctgacctgtggcgcgtggcgatcggcaactacggcgatgcgccgccgcagccgcagccgctgaccctgcggccgttcgaagcggtgtggtggctgctggaggcgtga

SEQ ID NO: 456278 - DNA, 2139 bp, Serratia marcescens
gtgaaaccagtagtgattaaacgggacggctgtcaggttccctttgacgaagcacgcatcaaacaggccatcgaacgcgccgcccgcgccgccgaggtgaacgacagtgagtattgcgccgccgtcgcccgtgaagtcgctcaacagatgtcccgtcagccgcggctggatatccatgatattcagcaggcggtggaaaaccggctgatggccggtgaatacaagcagctggcgcgcgcctatatcgaataccgccacgaccgcgacgtcgcccgcgaactgcgcggccggctgaaccaggagatccgcggcctggtcgaacagagcaacgccgcgctgctgaatgaaaacgccaacaaagacagcaaggtcatccccacccagcgcgatctgctggccggcatcgtcgccaagcactatgccaagcagcacatcctgccgcgcgacgtggtgctggcccacgaacgcggcgaaattcactatcacgatctggactacgcgccgttcttcccgatgttcaactgcatgctgatcgacctgcagggcatgctgaccaacggctttaaaatgggcaacgccgagatcgaaacgccgaaatcgatctccaccgccaccgcggtcaccgcgcagatcatcgcgcaggtcgccagccatatctacggcggcaccactatcaaccgcatcgatgagattctggcgccgtacgtcagcgccagcttcaacaagcaccgccaggtggcggaagagtggcagatcccggacgcggcgggctacgccatggcgcgcaccgaaaaagagtgctacgacgccttccagtcgctggagtatgaggtcaatacgctgcataccgccaacggccagacgccgttcgtcaccttcggcttcggcctcggcaccagctggcagtcgcggctgatccagcagtcgatcctgaaaaaccgcatcgccggactgggtaaaaaccgtaaaacggcggtgtttccgaagctggtgttcgccatccgcgatggcctcaaccaccgctacggcgaaccgaactacgacatcaaacagctggcgctggagtgcgccagcaaacgcatgtaccccgatatcctcaattacgatcaggtggtgcaggtgaccggctcgtttaaaacgccgatgggctgccgcagcttcctcggcgagtatcaggaaaacggtaagccggtgcacgacggccgcaataacctcggcgtgatcagcctgaacctgccgcgcatcgcgctggagtcgcagggcaatgaggagcgcttctggcagctgctggaccgccgcctgctgctggcgaagaaggcgctgatgacgcgcatcgcgcgcctgcagggcatcaaggcgcgcgtggcgccgattctgtatatggaaggggcctgcggcgtgcggctgaacgccgacgatgatatcgccgagatcttcaagaacggccgcgcgtcgatctccctcggctatatcggcgtccatgaaaccatcaacgcgctgttcggcaacgccggccacctgtacgacgatcgggcgctgcgcgccaaggccatcgccatcgtcgagcacctgcgcgccgccaccgacagctggaaagaagaaaccggctacggcttcagcctgtacagcacgccgagcgagaacctgtgcgaccgtttctgccggctggacaccgccgatttcggcgtggtggcgggggtgaccgacaaaggctactacaccaacagcttccacctcgacgttgagaaaaaggtcaatccgtacgacaagctggacttcgaggcgccctacccgccgttagccaacggcggctttatctgttacggcgaataccccaacctgcagcataacctgaaggcgctggaagacgtgtgggactacagctacagccgcgtgccctattacggcaccaatacgccgatcgacgaatgctacgcgtgcggctacaccggcgagttctcctgcaccagcaaagggtttacctgcccgaaatgcggcaatcacgacgccgccaaggtgtcggtcacccgccgcgtctgcggctatctcggcagcccggatgcgcggccgttcaacgccggtaagcaggaagaggtgaaacgccgggtgaaacacctggataacgggcagttgggctga

SEQ ID NO: 456279 - DNA, 465 bp, Serratia marcescens
atgaattatcaccagtattatcccgtcgatgtggtcaacggccccggcacccgctgtacgctgtttgtcgccggctgcgtgcaccagtgccgcggctgctacaaccagggcacctggcggcccgattccggccggccgttcaccgcggcgctggcggataagattatcgccgacctcaacgacccgcgcatcgcgcgccaggggctgtcgctgtccggcggcgatccgctgcacccggccaacgtggcggaggtgttacggctggtgcagcgggtgcgcgccgaatgtcccggcaaggatatctggctgtggaccggctaccggctggcggagctggacgcggcgcagcagcaggtggcagcgctgatcaacgtgctgattgacggtaagttcgagcaggaactgcgcgatccggcgctgatttggcgcggcagcagcaatcaggtggtgcataagctgcgctga

SEQ ID NO: 456280 - DNA, 276 bp, Serratia marcescens
atgcgcatcgaatgggacgacgttgcgttgcaggacagggaacgtctgtttgaatttctctatcccgttaatccgcgggcggcggagcaggcggacgctgaactggaaaaagccgtggcgcgtttaatcgataacccgcggcttggcaaagtctggtatcagcaggcgcgtaagctgctgatcgataaggcgtcgctgctggtggtctacctgatcgatggtgaagcgataaagattttagccgtggcccatcagcgcgagaaattcccgaattaa

SEQ ID NO: 456281 - DNA, 216 bp, Serratia marcescens
atgcagtttctcattgaaaatgacgccagcttgttggcgcagatggcggacgagcagcacagcgccgacgagcatgaagcctggctgaaacagaaggtggatgacgcctttgcccgcctgcatgaagagcaggcggtctacctggatgaatcgcaggccacggagcggatgaacgattttaaagccaaagtaagggcaaaatacccggctgaataa

SEQ ID NO: 456282 - DNA, 1062 bp, Serratia marcescens
atgtctcaacctttacctgcctctggcggccaggcgcgttcatggccgctgtggaagcccgtgctgtttttactggtggtcgccgtcggcctgtattacgtcaaatggcagccttattacggcaaggcgtttgtcgcggcggaaaatcactccatcggcggttcgatcctggccgatggcgcgcttaacccgtggatggcggcgtggcagtacgcgctgacctactttacggcggtgtggaaagcggcgctgctgggggtgctggttggctcgctggtgcaggtactgatcccgcgcgactggctggcgcgcacgctggggcatcagcgcttttccggcacgctgctggggtcgctgattgcgctgccgggcatgatgtgcacctgctgcgcggcgccggtggcggccggtttgcgccgccagtcggtatccagcggcgcggcgttggcgttttggctcagcaacccggtgctgaatccggccacgctgatttttatgggctttgtgctgggctggcagtttgccgccatccgtctggtggccggcgccgttatggtgctgggcgtggcctggctggtgcagcgcctgacggtgaacgacgcgccgccggtcagtagcgatgcggcgacggcgctgccggcgtgcgagagcgcatctcagccgttcctgcgccgctggctggcggcgctgtggacgctgttctggtcaaccatcccggtctatattctggcggtgctgctgctaggggcggcgcgggtctggctgttcccgcacgccgagggcgtggtggataacggcctgctgtggattatcggcctggcgctggccggctgcctgtttgtgatccccaccgcggcggaaatcccgattgtgcaggcgatgatgctggcgggcatgggccccggcccggcgctggcgctgctgatgacgctgccggcggtcagcctgccgtcgctgctgatgttgaagaaagccttctccgccaaggcgctgtgtctgactgcggcgctggtggcgctgtgcggcatcctgaccggcatagtcgggatgtggctgatataa

SEQ ID NO: 456283 - DNA, 729 bp, Serratia marcescens
atgacgcagatatctagacatcctaccagttaccccacccgctaccagcagatcgcggcgcagctggaagaggagctgcgcagccgctaccgcggcggcgactacctgccttcggagcagcagctggcggaccattatcaggtcaaccgccacacgctgcgccgggcggtggatcagctggtagagcgcggctggctgcagcgccgccacggcgtcggcattttggtgctgatgcgcccttacgactacccgctgcacgccaaaacccgctttacccagaacctgctggagcagggcaaccaccccaccagtgagtgcttactcgcggtattgcggccgtgcaacggccacatcgccagcgcgctgggcggcgaggaggggcaacaggtgattcacctgcgcaccctgcgccgggtaaacggcgtgccgatgagcgtgatcgaccactacctgcccgacctcgactggtggccggccctgcagtcgttccgccaggggtcgctgcatgaatttattgaacagcatatccgccagtcgctcagccgtcgtcagacgcgcatcagcgcccgccgtgcgcaggcgaaagagcagcagctgctggagctggccgccgatgcgccgctgctgtgcgtgcgcaccctcaacgtctgcagcggcagcgaccggctggcggaatactccgtcagcctggcgcgcgccgatatgatcgaactgaccatggagcactga

SEQ ID NO: 456284 - DNA, 444 bp, Serratia marcescens
atgtcttctcccacatcacgacaacgctggatgtcggtgctggcgcacagccagccggcccagttgcgcagccactggcaggcgctgaacctgaaccccgagtaccggctgctgcgcgcgccggagatcggcctgacgcagctgctggggcgcatgggcgccaccggccgccgctttgtgctgggcgatatgaccgtcacccgcgcggtggtggagctggcagacggcggccacggctacagctacgtcgccgggcgcgacaaggcgcatgccgaactgtgcgcgctggcggacgccctgctgcagcaaccggcgcaccatgaacagctgcagcaacggctgatcgccccgctggcggcggcgcagcaggagcgacgcctgcagcgcgcccgcgaggtggccgccagccgggtcgatttctttacgctggtgcggggagagtag

SEQ ID NO: 456285 - DNA, 582 bp, Serratia marcescens
atgagcttactgaatggtttcgccagcccggtggcgcaggcgcagcagacgttccgcctgatcctgaaagcgctgagcgagccgggcgtcacggtgcggctgacggacgcgccgcagtggccgccgctcgatgccgccaccaccgccaccctgctgacgctggccgacggcgaaacgccgctcctgctcggcccggcgctgagcagtgagcaggtgctgactaaccttcgtttccataccggcgcgccgcaggcctcctcggcggcggacgcggtattcgccgtgaccgaccaccgcctgcagccggcggatttgcaggcactgccgcacggcgatgagctggcgccggagcaaggcgcaacgctgatcgtccagctcaccgatctgcagagcggcgcgccgctgcggctgagcggccccggcattgcccatagccgcaccatcgcgccgccgttgccggaggcgctgcgccgctatctgctggcgcggccgcagcccttcccgctcgggctggacgtgattctgacctgcggcgacacgctgctggccatcccgcgcaccactcatctggaggaatgctga

SEQ ID NO: 456286 - DNA, 1092 bp, Serratia marcescens
atgtacgtagccgtaaaagggggcgaaaaagccattgaggccgcgcaccggctgcaggagcagctgcgccgcggcgacccgacgctgccggcgctgacggccgcacagctggagcagcagctcgggttggcggtggaccgggttatgacagaaggcggcgtgtacgaccgcgaactggcggcgctggcgattaagcaggccagcggcgatctggtggaggcgattttcctgctgcgcgcctaccgcaccacgctgccgcgcctggccgtcagtgagccgttactcactgagcaaatgcggctggaacgccgcatctcggcgatttataaggatttacccggcggccagctgctcggcccgacctatgactacacccaccgactgctggactttacgctgctggcaaacggcgacgcgcccgatgccgcgccgcagagcgccgacgccgcgccggaagaaccctgcccgcacgtgttcagcctgctgagccggcagcagctggcgcaggcggaacaggacgacggcagcacgccggcggatatcacccgcacgccgccggtctacccctgcccgcgctcggcgcgtctgcagcaactggtgcgcggcgatgaaggctttctgctggcgctcggctactccacccagcgcggctacggccgcaaccacccgttcgccggcgagatccgcagcggctgcgtcacggtggagatcgtgccggaggagctgggcttcgccatcgatatcggcgaaatcctgctgaccgaatgcgagatggtgaacggctttgtcgccccggaaacgcagccgccgcactttacccgcggctacggcctggtgttcggccgcgccgagcgcaaagcgatggcgatggcgctggtggatcgcgccctgcagaaagacgagtacgcggaagacggcgacagcccggcgcaggatgaagagttcgtgctgtcccacgccgataacgtcgaggccgccggcttcgtttcccaccttaaactgccgcactatgtggacttccaggcggaactggaactgctgcagcgcctgcggcagcgccgcgaatcagcacaggagacgccccatgagtga

SEQ ID NO: 456287 - DNA, 861 bp, Serratia marcescens
atgagtgacgttctgagcggctataaccccggctatctggatgagcagaccaaacgcatgatccgccgcgccatcctgaagggcgtggcgatccccggctatcaggtgccgttcggcggccgcgagatgccgatgccctacggctggggcaccggcggcatccagctgaccgccagcgtcatcggcgacgccgacgtgctgaaagtgatcgaccagggcgcggacgataccaccaacgcggtctcgattcgccgcttcttccgccgcgttgccggcgtcgccaccaccgagcgcacccgcgaggcgacgctgatccagacccgccaccgcatcccggaaacgccgctgcgggaagaccagatcctgatctatcaggtgccgatcccggagccgctgcgctttatcgaaccgcgcgaaaccgaaacgcgcaagatgcacgcgctggaggagtacggcgtgatgcaggtgaagctgtacgaggatatcgcccgctacggccatatcgccaccacctacgcctacccggtgaaggtcaacgatcgctacgtgatggacccgtcgccgatcccgaaattcgacaacccgaagatgcatatgatgccggcgctgcagctgttcggcgccggtcgggagaagcgcatctacgccctgccgccgtacacccgggtcgtcagcctggactttgacgatcacccgttcagcgtccagcagtgggagcagccctgcgcgctgtgcggctcccgcagcagctatctggacgaagtggtgctcgatgaccagggcaaccgcatgttcgtctgctcagataccgactactgccagcagcggctggcgtcacccacggagacaccgcactcatga

SEQ ID NO: 456288 - DNA, 789 bp, Serratia marcescens
atgagcaccacaccgttacacgaggctccgctgctgtcggtcgagcgcctgacccatctgtacgcgccgggcaaaggcttcagcaacgtctcctttgatctctaccccggcgaggtgctgggcatcgtcggcgaatccggctccggcaaaaccaccctgctgaaaagcgtctcggcgcgcctgccgccgcagcagggacgcattctctaccgcccgcaggccgggcagcagcaggatctgtacgccatggcggagagcgcgcgccgccgcctgctgcgcaccgagtggggcgtggtgcaccagcacccgctggacgggctgcggccgcaggtgtccgccggcggcaatatcggcgaacggctgatggccgtcggccagcgccactacggcgagatccgccgtcaggccggccagtggctggaggacgtcgagatcccgctgtcgcgccttgacgatctgcccaccaccttttccggcggcatgcagcagcggctgcagatcgcccgcaatctggtcacccatcccaagctggtgtttatggatgagccgaccggcgggctggacgtgtcggtgcaggcgcggctgctggatctgctgcgcacgctggtggtggagatgcggctggcggcggtgatcgtcacccacgatctgggggtcgcgcgcctgctggcgcaccggctgctggtgatgaaacagggggaagtgatggaaagcggcctgaccgaccgggtgctggacgacccgcaccatccctatacccaactgctggtgtcttccgtgctgtcgtaa

SEQ ID NO: 456289 - DNA, 705 bp, Serratia marcescens
atgacgatcaaaattcgcgtcgaacatctgagcaagacctttgtgctgcaccagcagcacggtacgcgactgccggtgctgcacgacgccagcctgacggtcagcgccggcgaatgcgtggtgctgcacggccactccggcagcggcaaatccaccctgctgcgctcgctgtacgccaactacctgccggacagcggccatatctggctggagcatcagggcgagtggatcgatatggcgcaggcggaagcgcggcagatcctggcggtgcgccgccggacgctcggctgggtcagccagtttctgcgggtgatcccgcgcatcagcgcgctggaggtggtgatgcagccgctgctggagctgggcgtggcgcatgacgagtgccgcgagcgcgccagcgcgctgctcagccggctgaacgtgccgcaacggctgtgggggctggcgccgtccaccttctccggcggcgaacagcagcgggttaatatcgcccgcggctttatcgttgactacccgatcctgctgctggatgagccgaccgcctcgctggacgcgcgcaacagcgcggcggtggtggcgctggttgaacaggcgcgtcagcgcggcgcggccatcgtcggcatttttcatgacgaccaggtgcgcgcgcaggtcgccgaccggctgcatattatgcaggcgccgcagacgctggagacgccgtga

SEQ ID NO: 456290 - DNA, 1137 bp, Serratia marcescens
atgattattaataacgtacggctggtgctggaagaccaggtggtgcacggctcgctggaggtggcggacggcgtgatccgcagcttcgccgacggcaacagccgcctgccgcaggcgctggacggcgaaggcggctggctgctgccggggctgatcgagctgcataccgataatctggataaattctttatgccgcgccccaaggtggactggccggcccattcggccatgagcagccacgacgcgctgatggtggcctgcggcatcaccactgtgctggacgcggtggcgattggcgacgtgcgcgacggcggccaccggctggagaacctgcaaaagatgattgacgcggtgatccacagccagcgcgccgggctgaaccgcgccgaacaccggctgcacctgcgctgcgagctgcccaacgccggcacgctgccgctgtttgagcagctgatggataagccgggcgtatcgctggtgtcgctgatggatcactcgccgggtcagcgccagttcgtctcgcgcgccaaataccgtgaataccatcagggcaaatataacctgagcgacgccgcgatggacgagtatgagcagcagcaggtcgcgctgtctgcccgctgggcgacgccgaaccgtcaggccatcgccgcccgctgccgcgagcggggcatcgcacttgccagccacgatgatgccaccgccgcccacgtcgccgagtcctgcgcgctgggcagcgcgatcgccgagttccccaccaccgaggaggcggcccgcgcctcacaccggcaggggctgcaggtgctgatgggcgcgccgaacatcgtgcgcggcggctcgcactccggcaacgtggcggcgcaccagctggcggccatcgggacgctggatatcctctcctccgactactaccccgccagcctgcttgacgcggcgttccgcctggccgccgacgcgcgcaacggttatgacctgccgcagtcggtggcgatggtcacccgcaacccggcgcgggcattggggttaaccgatcgcggcgcgattgccgaggggctgcgcggcgatctggtgctggcgcgcgcgcacggcgaacacgtttacgtgcagcaggtgtggcgtcagggacggcaggtgttctga

SEQ ID NO: 456291 - DNA, 561 bp, Serratia marcescens
atggcgcagcttatctatctgatgggcgcctccggcgccggcaaggacagcctgctggcggcgctgcgcaatgcggcggacgccgcaccgctggtggcgcaccgctatatcacccgcccggcgcaggccggctgtgagaaccacgtggcgctgagcgagcgtgagtttctgcgccgacgcgccaacggcctgttcgcgctggactggcaggcgcaccacacccgctacgcgctggggatcgaggtcgatctgtggctgctgcaggggatcgacgtggtggtcaacggctcgcgcgcctatctgccctacgcccgccagcgctacggcgcgcagctgctgccgctgtgcctgcaggtcgagccggcggtgctgcgccggcgtctggaacagcgcgggcgcgaagacagcgggcagattgagcagcggctggcgcgcgcggcggcctacagcgtgccttccgactgcctgcgactggataataacggtgcgctgagcgacacgctggcggcgctgctgcaactgctgacggcgctgcggcgcgaggagaacccatgcaactga

SEQ ID NO: 456292 - DNA, 816 bp, Serratia marcescens
atgcaactgacctttctcggcaccggcggcgcccagcaggtgccggcgttcggctgcgaatgcgccatctgccggcgggcgcggaacgaaccggcctttcgtcggcgcgcatgcagcgccatgctgtattttcagggggaaactacgttaattgatgcgggattgacgtcattggagaggcggttttcggcggggcaaattcagcgttttttactgacacattaccacatggatcacgttcaggggctatttcatttgcgctgggggtgcggaaattccattccggtgtacggcccggccgatgaacagggctgcgacgacctgttcaaacaccccggcattctggactttcagccgccgctgacgccgtttgtcagcgtgacactgggcgggctgcgcatcactccgctgccgctgaaccactctaaaatcacccacggctacctgatccagagcgccgacggcgcgctggcctacctgaccgacaccgtcggcctgccggcggagacccagcgctttctggagggcgtccgcctggatctgctggtgctggactgcagcctgccgccgcagccgcaggcgccgcgcaaccataacgacctcacccgcgcgctggagattcagcagcatctgcggccgccgcgcaccctgctgacgcatatcagccaccggctcgacgcctggctgctggaccatccgctgccgccgggcgtggaactagcgtacgacggcctgcgcatcgatctcagtgcgccagaggctcccgctgctgcagccggtccgactccagcacccgaacgccgtcgccggggctga

SEQ ID NO: 456293 - DNA, 642 bp, Serratia marcescens
atggcacgggtattgataacgggcgcgaccgggctggtgggcggtgagctgctgcgcctgctgctggcggaccgacgggtgacggcgattaccgcccccagccgccggccgctgccgccggatgacaaactgacgaacccggtgggcgacgatctgttcgccctgctgacggagctggatcagccggtggacgcggtgttctgctgccttggcaccacgcggcagcaggccggcagcgacggcaattttcactacgtcgactatacgctggtggtggaaagcgcgctgaccggtcgccggctcggcgcgcagcactgcctggcggtgagcgcgatgggggccgacccgcaatccaccttcctgtacaaccgcatcaaaggtgagatggagcaggcgctgcgcgagcagggctggcagcgtctgacgctggtgcggccgtcgatgctggtgggggatcgcgccgagccgcgcctgttggaacgcgtggcccagccgctgtttaagatgctgcccggcaggtggaaatcggtcgccgcccgcgatgtggcgcaggcgatgctggaacaggcgttcagccccggcgacggcgttcgggtgctggagtcggaccggctgcagcagcgggagcctctggcgcactga

SEQ ID NO: 456294 - DNA, 1452 bp, Serratia marcescens
atgccgtatgccgacttacgtagctacctggccgcgctggaagcccagcagcaactactgcgcgtgaccgaacaggttcgtcccgaaccggatcttgccgccgcggcctgcgccgccagcagactgggcgacgactcaccggcattgctgtttgaaaacgtgtacggctatcacaccgcgcgcatcgcgatgaacgtgcacggctcctggcccaatctggcgatcgccatggatctgccgaaaaacaccccgttaaaaagtcagttcttcgagtttgtacgccgttaccaaaactatcccggcgaagtcgagcagctcgacagcgccccctggcaggagatagtggtcgatcaggcggtcagcctgttcgatattttgccgctgtttcgcctcaaccacggcgacggcggcttttatatcgataaagcctgcgtgatctcgcgcgatccgtcgctggccgacaatcggcccagtcagaacgtcggcatttatcgcctcgaagtcaaaggccctgcccggctgggcattcagccggtgccggcgcatgatatcgccattcacctgcagcgcgccgaggagctgggtgtcgatctgccgatcgccattgccatcggcaacgatcccatgctcaccaccgccggcgcgatgccgatcctctacgatcagtcggaatatgccatggctgccgcgctgaacggcgcgccctatcccgtcgtctacagcgagtacagcggtctcgacctgccgtggagctcggaggtgatgctggaaggacgcatcctgtcgcgggtgcgcgaggccgaaggaccgttcggggagtttaccggccactattccggcggccgcctgatgccggtggtggagatcacccgcatctcctgccgaagccggccgatcttcgaacatctgtacctcggcatgccgtggacggaggttgactacctgatcggcatcaacacctgcgccccgctgtacgtgcagctcaagcaggccttccctgaggtggtggcggtcaacgcgctgtatacccacgggctggtggtgattgtttctacccgcacccgcttcggcggttttgccaaaggcgtcgggatgcgcgtgctgaccaccccgcacggcctcggctatgccaagctggtgatcgtggttgatgagacagtggacccgtttaatctgccgcaggtgatgtgggctatcgccaccaagttcaaccccgactttgatctgattaccgtgcccgggctgtcggtgctgccgctggatccggcgtcgcaaccggccggcattaccggcaaagtgattatcgacgccaccacgcccaaagcgccggaaacgcacggccgcttcgagcaggggctggacgaccctatcaccaccgaggcctgggtggagaaactgcaggtcctgattcaggccgcgcaaaccgctcaggaacaggaggaggagaaatga

SEQ ID NO: 456295 - DNA, 243 bp, Serratia marcescens
atgaataagctgcccgccgcgtgcccgcgctgtgaatccgccgggccggaggtgctgtgccactcgccggtaaaagatgcctggacggtgttccactgtgcaacctgcttcttcacctggcgcagcagcgaaccggattttattaccgacccggccaaataccccgcacattttaaaatttccccggcggatatggcgcacttcagcattatgccggtcattccggagcgcaaacgccgttag

SEQ ID NO: 456296 - DNA, 441 bp, Serratia marcescens
gtggaacagagcgaacaacagcagcatatcatccgcttcctcagtaaacagcacgtgctgacgctctgcgccggcaacggtctggacatgtggtgcgccaactgtttctacgtgtttgacgccgagcgcatggcgctgtggctgatgaccgaaccgcacacccgccacggccagctgatgcagcagcatgccgaagtggtcggcaccattgcgccaaagcccaaaagcatcgcgctgattaagggcgtccagtaccgcgcgacggcgcgcatcctcagcggggaagaagagcagcaggcacgcgcccgctattgcaggcgttttccggtggcgaaagcgatgccggccacactgtggctgctgagcctgcaggaggtgaaaatgaccgacaacgcgctgggcttcggtaaaaaaatgtactggcagcgcgaaaattcctaa

SEQ ID NO: 456297 - DNA, 216 bp, Serratia marcescens
atgaaaagggtcctcgctattatcgttggggcagtgatgggcattgtgcttatatggttggcgtatccttatatttcagattggctggtgggaccggttcatggtgaagaccaaatgtccgcgaactttgttctgctgcttgccgggctggggatagggtgcgtcgttggtggtctggccggcggcctggcctattcccgtttgactaagggatag

SEQ ID NO: 456298 - DNA, 294 bp, Serratia marcescens
atggcggaaagcaccacctggcatctgtatatgctgcgcctgccaagcggcatgctgtataccggcatcaccaccgacgtgctgcggcggctggctcagcatcaggcgggtaaaggcgccaaggcgctgcgcggcaaaggcgagctgcagttggcctttcactgcgcggtcggcgaccgttcgctggcgctgcggctggaataccgcgtcaagcagctgagtaaaacgcaaaaagagaggctggtgtcacacccgcctctgtctttggattatctgctggttaaaaacggttaa

SEQ ID NO: 456299 - DNA, 504 bp, Serratia marcescens
atgctgattcgcgtcgagattccggtagacgccgcaggcatcgacgctctgctgcgccgcgccttcgggcgtgatgatgaagccgacctggtgcgccaactgcgtgaagacggccagctgacgctgggcgtggtcgccaccgatgacgaaggcggcgtggtgggctatgccgccttcagcccggttgacgtcgccggggaggaccgccagtgggtcggtctggcgccgttggcggtggaagagagcctgcgccgtcaggggctgggggagaagctggtttacgaagggctggatgcgctaaacgagttcagctacgccgcggtggtggtgctgggcgagccggagtactacgcgcgctttggctttaagccggcggcggagtacgggctgagctgccgctggccgggctgtgagcaggcgtttcaggtctacccgctggcgccggacgcgctggacggcgtcagcggcaccgtggactacgccgcgccgtttaaccgtttttaa

SEQ ID NO: 456300 - DNA, 528 bp, Serratia marcescens
atgaccgtgttggaaaaactacgatcgcgcattgtgcgccaggggccgtcgctgctgcgcgtgccgctcaaactcacccctttcgccctgcagcgtcaactgctggagcaggtgttgggttggcagttccgtcaggcgctcgcggatggcgatctggaatttcttgaatcacggtggctgaagatcgaagtgcgggatctggcgctacaatggtttatgacggtagaaaacgatcggctggtggttcgccagcatgcacaagccgacgtcagcttcagcggcgacgccaacgatctgatcctgatcgcggcgcgcaagcaggatcctgacacgctgtttttccagcgtcggctacagattgaaggggataccgaattgggcctgtatgtaaaaaatctgatggatgcgattgaactggaagccatgccggcgccgctgcgtattgggttactgcagttggcggaatttgttgaagcaggtttacaagagggcgcagaaccgtcttcccaagtggtggcgccatgctga

SEQ ID NO: 456301 - DNA, 996 bp, Serratia marcescens
atggagctgctttgtcccgccgggaatttaccggcgctgaaggccgcggtcgataacggcgccgacgccgtgtatatcggtctgaaggacgacaccaacgcgcgccacttcgccgggctcaacttcagcgaaaaaaaactgcaggaagcggtggagtatgttcaccgtcacggtcgtaagctgcatatcgccatcaacaccttcgcccaccccgacggctacgcccgctggcagcgcgcggtggatatggcggcgcagctgggcgccgacgcgctgattctggcggatctggcgatgctggagtacgccgccgagcgctatccgcatattgagcgccacgtctcggtgcaggcctccgccaccaatgaggaggcgattcgcttctatcagcgccactttgccgtgcaccgcgtggtgctgccgcgcgtgctgtcgatgcatcaggtgaaacaactggcgcgcaccagcccggtgccgctggaggtgttcgccttcggcagcctgtgcatcatggcggaaggccgctgctatctctcttcttacctgaccggcgagtcccccaataccgtcggcgcctgttcgccggcgcgctttgtccgctggcagcagacgccgcagggcatggaatcacgcctcaacgacgtgctgattgaccgctatcaggaaggcgaaaacgccggttacccgacgctgtgcaaagggcgctatctggttgacgacgtgcgctaccacgcgctggaagaacccaccagcctgaacacgctggcgctgctgccggagctgctggccgccaatatcgcttcggtaaaaattgaggggcgccagcgcagcccggcctacgtcagccaggtggcgcgcgtctggcgccaggcgatcgaccgctgcatcgccgaccccgctggctaccagcccgacgccggctggatgacggcgctcggcgccatgtctgaaggcactcaaaccacgctcggcgcctatcaccgtaaatggcaatag

SEQ ID NO: 456302 - DNA, 879 bp, Serratia marcescens
atgaaatacgcattggggccagtgctctactactggccgaaaaccgagaccgagagcttttaccagcaggcgatgcacagcagcgccgatattatttatctcggtgaaagcgtctgcaccaagcggcgtgagatgaaggtcggcgactggctggcgctggctaaagcggtggcgcagtccggcaagcaggtagtgctctccactctggcattgctgcaggcgccttccgaattaaacgagctgaaacgctacgtggaaaacggcgagtttctgatagaggctaacgatctcggtacggtgaatatggcggcggagcgcggcctgccgttcgtcgccggtcacgcactgaactgctacaacgcctataccctgcggctgctgcacaagcagggcatgacgcgctggtgcatgccggtggaactgtcccgcgactggctgggcaaggtgctggagcagtgcgccgagctgggcttccgccgcggctttgaggtagaggtgctgggctacggccacctgccgctggcctactccgcccgctgctttaccgcacgctcggaaaaccgcggcaaggatgagtgcgaaacctgctgcatcaaatacccgcaggggcgcgccatgcgctcacaggaaaaccagcaggtattcgtgctcaacggcatccagacgatgagcggctactgctacaacctgggtaatgagctaagcggtatgcaggagctggtcgatatcgtgcggctgtcgccgcagggcatggaaacgctggcgatgctcgagcagttccgcgccaacgaaaatgccgggcagccgctggcgctgaccaacgacagcgactgcaacggttactggcggcgcgtcgccgggctggaactggtgcggtaa

SEQ ID NO: 456303 - DNA, 1140 bp, Serratia marcescens
atgaagagctactggcaaacctttagccgggtgctgatcggcatgctggagcggccgatgtggctgatgctgatcctgtcgctgtgtgtaatgagcctggtgtacgccaaccgttcggtgtgggatctgccggtgggggtgatcgaccaggatcacagcagcgccagccgtgagctgatccgccaactggacgccacctcaaaagtcgccatcaaaacctacgacagcctggagcaggcccagcgcgatctgggctggcgcgagctgtttgcggtgatcattatgccggtgaatctggagaagaagatcctgcacggcgagaacattgtggtgccggtgtacggcgacgccaccaaccggctggcaaacggccagatccagcaggacgtggtgaccgcctatcagcagctgctgagtcagtacaatacctcgctgctgctgcgcagcggctttagcgaacggcaggcgcagattatcctgacgccgattcaggggcagacgctggacgtgtttaaccccggcatcagcttcgcggcaatcgtgttccccggcctgctggtcatgctgctgcagcactcgctgctgatcgccagcgtacgcgtcagcattgcgctgaaaagtgcaccgagcggcaaaccgtcgatcccggtgtacctcggcggcctgtcggcgctgctgccgatctggctgtttttgtccatcgtgctgtttgtgctgtggccgtgggtgttgggctaccggcagacggcgaacattgcggaggtgctgctgctgaccttcccgttcctgttggcggtgctggggttagggaagctggtgaccgagtgcctgcgcagcgtggagatgatttacctgacgctggcgtttatcaccacgccgattttctacctttccggcaccatctggccgctgcaggcgatgccgggctgggtgcgcgccatttcatactgcattccttccacctgggccaccaaagcgatcgccggggtgaaccagatggggatgtcgctgaatgaagtggggaacgacgtgctgatgttgctgctgcttggcgcggtgtataccgtgatcggtatcggagtggggctggcgcataacagtgtggcgctgcgcagtctgttccggaaacggcgggcgtag

SEQ ID NO: 456304 - DNA, 1155 bp, Serratia marcescens
atggcaatggaaagagtaagggccggatggcgctgcttcagccacgcgtttaaccgggagtgccgggttgcctttcgcagcccggtgatccactggctgggctggctgtttccgctgatgctgttcggcctgatcagcagcaacttctcggagggcacgctgctgaacctgccggtttcggtggtggataacgatcacagcccgctgtcgaaatcgctgatccgcaaactggacgcaggctcccatgctcacgtcgaggcccatgacggcgggctgagcgagtcgctgcgccggctgcgcagcgcgcaggactatgcgctgctgtatgtgccgccggatctggaggcgaacgccctggcgggcaagcagccgagcatcgtgctgtattacaacgctctgttctacggcgccgggctctattccacccaggatttcagcggcctgatgacggaaaccaacgccagttaccgctcgattatcgccgccagcatggggaaaacgctgccgcagctggcggacgtgacgcttaactacggcagcctgtttaacgccagcggcagctatatctattatcagcagttcgccgcgaccattcacctgctgcagctgtttgtcgtcacctgcatgatctatgtgatggcgcgtagcaagtcgctgctgagcgcgcggccgttcagcctggcgctgctgggcaagctggcgccgtataccatctgctttaccaccctgctgatgattgagattgccgcgctggtggggattttcgacgcgcgcgtcagcggcaacccgctgtttatgctgctgatcggctttttctacgtggcggcggcacagagtatcggcctgctgctgtttacctttaccggcagcgcgatcaccgcctacagcctgatcggtattctggtcagtattgcgatgacctactccggcatggcggtgccggagctgtcgatgccgctgccggcgcggattatttccaatattgagccgctgacccatgcgctgtacgcgatgtttgacgtcttcctgcgccaggtgccggcgcgggcgattttcggcgtgtgcgcgctgctgctggtttatccgctggtgaccgcgtttttggtgcgcaaccggctgctgaagcggctggctaaggacggaggagcgcaatga

SEQ ID NO: 456305 - DNA, 972 bp, Serratia marcescens
atgaataaaaagaccttatttaccctgctgctggtggtgatcgccattgcgatggcggtattgttccgctcgcataatcaggatctgttgctgcagggcgaagtggacgcgccggaagtgatcgtggcgtcaaaagccaagggacgggtggtggaacgcctgattgaacgcggcgatgacgtcaaggccggccaggtgatgattaaactggacagcccggagctgctggcccagctgcgttcggcgcaggcgacgcgcgatgaggccaaggcgcagctcgatcagtcgctgcacggcacgcgcgaagagaacatccgcagcctgcgcgccagcctggcgcaggcgcaggccgaactgcgcaacgcacagcatgattacgaccgcaaccgcagcgtggcggccaaaggctatatctccaagtccgagctggacagctcgcgccgttcgcgcgataccgcctatcaacaggtgcaggacgcgaaggccaagctggatgaaggcatcaacggcgaccgtattgagctgcgtcagcaatacgccgcggcgctgcgcgcagcggaagagaacctgctggaagtgcaggcgcaggccgacgacctgcaggtgaaagcgccggtggacggggaagtggggccgattccggccgaggtcggcgaactgctgaacgcctccagcccgctggtgacgctgatccgcctgccggacgcctactttgtgtttaacctgcgggaagatattctggcgaatatacgcaagggcgataaggtgaagctgcgcgtaccggcgctgaaggataagctcatcgatgccgaagtgcgttatatcgcgccgctgggggattacgccaccaaacgcgccacgcgcgccaccggcgacttcgacctgaaaacctttgaagtacgcctgtacccggctcagccgattgaaggcctgcgcccagggatgagcagcttatggcaatggaaagagtaa

SEQ ID NO: 456306 - DNA, 1014 bp, Serratia marcescens
atgacacaacacgcatcggtcccgctttcggtactggatctctcccccattcctcagggagcaaaggcgcgcgacgcgtttcactgctctttagatttagcacaacatgctgaaaagtgggggttccaacgctattggttggcggaacatcacaatatgaccggtatcggcagcgcggcgacctcggtgctgctcggctatctggccgccggcaccgacactattcgcctgggctctggcggcgtgatgctgcccaaccatgccccgctggtgatcgccgaacagttcggcacgctggagtcgctgtaccccggccgtatcgatctggggctgggccgcgcgcccggcaccgaccagcgcaccatgatggcgctgcgccgccacctgtccagcgaggtggataacttcccgcgcgacgtgcaggagctgcagcactactttgccgagacgcagcccggacagccggtacaggcggtgccggggcaagggctgcacgtgccgatttggctgctgggctccagcctgtacagcgcgcagctggccgccaagttgggcctgccgttcgccttcgcctcccacttcgcgccggatatgctgttccaggcgctgagactgtaccgggaaaactatcagccttccgaacgctggccgcagccgcatgcgatggtgtgcgtcaacgtgattgccgccgacagcgagcgcgatgcgcgcttcctgttcagctccatgcagcagcagtttatcaacctgcgccgcggcgaaccggggccgctgccgccgccggtagacaatattcacgcgctgtggagcgccggcgagcagtatggcgtcgaacaggcgctgcggatgtcgatcgtcggtgatgaaaatagcgtgcgcgaagggctgcaggcgctgctgcaggaaaccgaggccgatgaaatcatggttaacggccagatctttgaccatcaggcgcggctgcgttcgtttgagatcgtcgcgcaggtgaaggatgggttaacgcgcggctaa

SEQ ID NO: 456307 - DNA, 1443 bp, Serratia marcescens
atgagcacaccatcatccgcggccggtctgggccgtgcgggattgataattttattggcggggcagctgttgccgatgatcgacttttccatcgtcaacgtcgggctggacgcgatggcgcagtcgctgcacgccagtccgacgcagctggagctgatcgtcgcggtttacggcgtggcgtttgccgtttgtctggcgatgggcagccgcatgggggataacctggggcgcagacgtctgtttttatggggcgtgcggctgttcgccgtggcctcgctgatgtgcggcctggcgaactcggtctggctgctgctggtggcgcgtacgctgcagggcgtcggcgcggcgatgattgtgccgcagattatggcgaccattcacgtttgcctgcgcggacgcgagcacgcccgggcgatggccctgtacggcggcatcggcgggctggcgtttatcatcggccaggtgctgggcgggttgctgatttcactgaatatcgccggctacggctggcgcagcgtctttttgatcaatattccgctgtgcgcgctggtgctggcctgcgcccatcgctgggtgccggacacgcgcgcggagcggccggtcagtatcgactggcccggcactttactgctggcgctgaccatcgtctgcctgctgtttccgctggcgctggggccggtgtggcactggccgtggccgtgtctggcgttgctggcgcttagcgggccgctgttgctgcagctgtggcgcgtggagctgcggcaggaacggcgcaataacttcccgctgctgccgccggcgctgctgcggctggcgagcgtcagattcgggctgaccatcgctattttgtttttctcctgctggagcggctttatgtttgtgatggcgctgacgctgcaggcgggcgcgcagctgaacgccttccagtcgggcaatgcgtttattgcgctcggggtggcctattttatctcctcactgctgagcagcacggtgatcgagcatatcggcaaggtgcgcgcgctgctgcttggctgcctgatccagatcggcgggctgttggcgctgatgctgaccatgctgctggtgtggccgcagccgggcattctcaatttgatcccggcgacgctgctgattggcgccggtcaggcgctgatcgtcagcggcttcttccgtattggtctggcggacgtgccggtcgagcatgccggttccggcagcgccctgctggcgacggtgcaacagacgtcgctggggctggggccgattctgttggggacggtgctggtgcaggtgctgcacgtgtcgccgggcgactacctgcatgctttgctggcggcattggcgctggaactgctgctgatgttggcgctgctgctgcgcaccgggctggcgttgcgcgccgatcggcggttggcggcggccgggcagccttcacgcagctga

SEQ ID NO: 456308 - DNA, 867 bp, Serratia marcescens
atgtctgaaaccatatccccgttcgacgccggacaggcagataaccgcaagcagctgggcgcctttttgcgcgcgcgccgcgaaagcctggacccgaaccggctgggcctgccgcgtatgcgccagcgccgcacgcccggcctgcgccgggaggaagtggcgcagctggccgacgtcggcattacctggtacacctggctggaacagggccgggcgatccaggcctcggcgaaaacgctgagcgccatcgcccacgcgctgcagtgcaacgaggcggaaacccaccacctgttcagactggcggggcaaagtctgccggccggcgcccgccacgacggctgtgaaaagctgtcgccctacgggcagcggctgctggatcagctcgatccgctgccggcgatcatctctaacgcacgttttgatattctcggctttaaccgcgcctactgtctgctgatgggcgtcgatctggctacgctgccgccggaggatcgtaactgtatctatctggcgttcacccacgagcagtggcgcgccagccagctggactgggacgatatcatgccgaaaatggtggcgctgttccgcgcgcagatggcggaacatctgggcgatccggtctgggagcagcagctagcccgctatctgtcggtctcggaggattttcgcgcgctgtgggagcggcatgaggtacgcagcatcgataacaacgtcaaacgcttcctccacccgcaggtcggggaaatgagtctgcggcagaataactggtggtcggcgccgcgcaacggcgaccggatgctggtgtatataccggcggatgagcagagcgagcgccgcctgcaactgctgaccggcggcgcggagtaa

SEQ ID NO: 456309 - DNA, 240 bp, Serratia marcescens
atgatgcaacaaacgatagtgccggattaccgtctggatatgctgggtgagccgtgcccgtacccggcggtggcgacgctggaagcgatgccacagctgaaagccggcgaaatcctggaggtgatcagcgattgcccgcagtcgatcaataacatcccgctcgatgcgcgcaaccacggctacacggtgctggatatccagcaggacgggccgaccatccgctacctgatccagcgttaa

SEQ ID NO: 456310 - DNA, 1212 bp, Serratia marcescens
gtgaactggcaacaatttaaaactgactatctagtgcgtttctgggcgccgctgccggcggtgatcgccgccggtctgctggccacttattactttggcctgaccggtaccttctgggcggtcaccggggaatttacccgctggggcggccacgttctgcaatggctggggctgcatcccgaacagtgggcgtatttcaaagtgattggcctggaaggcacgccgctgacgcgcatcgacggccggatgattatcggcatgttcgccggctgcattgccgccgcgctgtgggccaacaacatcaagctgcgccggccgcagcaccgcattcgcattgtgcaggcgctgctgggcggcattatcgccggtttcggcgcgcgcctggcgatgggctgcaacctggcggcattttttaccggtattccgcagttttcgctgcacgcctggctgtttgcgctggcgaccgccgtcggctcttactttggcgccaaatttaccctgctgccgctgttccgcgtgccggtaaaactgcagaaagtgcaggccgccgcgccgctgacccagctgccgcagcaggcgcgccgccgtttccgtctggggatggttatcttcctgttgatgacggcctggtcgctgtggacgctgtttgatgcgccgaagctgggcatcgccatgctgttcggcatcgccttcggcctgctgatcgaacgggcgcagatttgcttcacctcggcgtttcgcgatctgtggatcaccggccgtacccatatggcgcgggcgattattttaggcatggcggtcagcgccatcggcatcttcagctatgtgcagctgggcgtggcgcccaaaatcatgtgggccgggccgaacgcgctgattggcggcctgctgttcggcttcggcatcgtgctggccggcggctgcgagaccggctggatgtaccgcgcggtggaagggcaggtgcactactggtgggtcgggctgggcaatatcatcggcgcgacgctgctggcctactactgggatgcgctggcgccgtcgctggccaccgactatgacaaggtcaacctgctggaggtattcggtccgacgggcgggctgctggtgacttacctgctgttggcgttggcgttggtcgccatgctgtggtgggagaaacgctttttccgcgccaaggcgcgggcagaacaggttagtgcgaggagtatgtga

SEQ ID NO: 456311 - DNA, 1857 bp, Serratia marcescens
atgactgttgagcttgaaacctcttttgctgacctggggctgtctgctccgatcatttctgctctgaacgacctgggctatgttaagccatcacctattcaggctgagtgtattcctcacctgttgaacggccgcgatgtgctgggtatggcacaaaccggcagcggcaagactgcggcgttctcgctgccgctgctgcacaatatcgacgcttccctgaaggcgccacaaatcctggtgctggcgccaacccgcgaactggcggtgcaggttgccgaagcgatgaccgatttctccaaacatatgaacggcgtgaacgttgtggccctgtatggcggccagcgttacgacgtacagctgcgcgccctgcgtcaaggcccgcaaatcgtggtgggtacgccaggccgtctgctggaccacctgaaacgcggcaccctgaacctctccaacctgagcggtctggtgctggatgaagccgacgaaatgctgcgcatgggctttatcgaagacgttgaaaccatcatggcggaaatcccggctgaacatcagaccgcgctgttctccgccaccatgccggaagcgattcgccgcatcacccgccgctttatgaaagagccgcaggaagtgcgcattcagtccagcatcaacacccgtccggacatcagccagagctactggacggcgtacggcatgcgtaaaaacgaagcgctggtgcgtttcctggaagcggaagactttgatgcggcgattatcttcgtgcgcaccaaaaacgccacgctggaagtggcggaagcgctggagcgtaacggctacagcagcgccgcgctgaacggcgacatgaaccaggcgctgcgtgagcagaccctggagcgcctgaaagacggccgcctggatattctgatcgccaccgacgtggcggcgcgtggtctggacgttgagcgtatcagcctggtggttaactacgatatcccgatggacgcagaatcttacgttcaccgtatcggtcgtaccggccgcgccggtcgcgccggtcgcgcgctgctgttcgtggaaaaccgcgaacgccgcctgctgcgcaacatcgagcgcaccatgaagctgaccattccggaagtagaactgccgaacgcagaactgctgggcaaacgccgtctggaaaaattcgccgctaaagttcagcagcagctggaaagcagcgatctggatatgtaccgtgcactgctggctaaactgcagccggaagaagagctggacatggaaacgctggccgccgcgctgctgaaaatggcgcagggcgaacgcccgctgatcctgccgccggatccggtcttcaagccgcgtaaaccacgtgagttcaacgatcgtgacgaccgccgcggcgaccgtcgtgacggcgaccgtccgcgtcgtgaacgtcgtgacgttggtgaaatgcagctgtaccgcattgaagtgggccgtgatgacggtgttgaagtgcgtcatatcgtgggcgctatcgccaacgaaggcgacatcagcagccgttacatcggtaacatcaagctgtttggctcccactccaccatcgagctgccaaaaggcatgccgggcgagatcctgaatcacttcactcgcacccgcattctgaacaagccgatgaacatgcagctgctgggcgatgcacagccgcacgagcgccgcgaacgtcgcgacggcggcaaccgtcgtccgttcaacggtgagcgccgtgaaggcggcccacgtcgttctttcggtgaacgtcgtgaaggcggcaacgcagccggcaacggcgagcgtcgtggcggcaacgccagccgcgagcgcgcaccacgtcgtcgtttcggcgatgcataa

SEQ ID NO: 456312 - DNA, 885 bp, Serratia marcescens
atgaagcttttcttacgctggtgttacgttgcgacagcgctcatgctggcaggatgcagcaacaatgattggcgtaaagacgaagttttggcgatcccgttgcagccaacgctgcagcaggaagtgatcctggcgcgcatggaacaaattcttgccagccgggcactgacggacgatgaacgcgcacagcttttatatgagcgcggtgtgctgtatgatagcctcgggctacgtgcactggcgcgcaatgatttttcacaagcgctggcgatacgtcctgatatgccggaagttttcaactacctgggcatttacttaacgcaggcaggcaattttgatgctgcctatgaagcgtttgattctgtactagagcttgatccaacttacaattacgcgcgtttaaaccggggcatcgcactgtactatggcggccgcttcccgttggcgcaggatgatctgcaggcgttttatcaagacgacccaaacgatcccttccgttcgttatggctgtacctggtggaaagagaaatcgatcccaagatggccgtcagcgcgctccagcagcgttatgacaaagcggacagagggcaatggggatggaatattgtcgaattctacctgggcgatatcagcgaaaacacgctgatggaacgcctcaaggcagatgcaacggataacacttcgctcgctgagcatctcagtgaaactgacttctatttgggtaaacactacctgagtctgggggacaagaactccgcttcggcgttgttcaaactgacggtcgctaacaacgttcataactttgttgagcaccgctatgcattgttggaattggcgcttttgggccaagaacaagacgacctatcggaatcggaccagcaatag

SEQ ID NO: 456313 - DNA, 2121 bp, Serratia marcescens
ttgctgacaccgactattcgcaaattccagtatggccagcataccgtcaccatcgagaccggtatgatggcgcgtcaggcgacggccgccgtcatggtaagcatggacgacaccgccgtattcgttaccgtcgtgggccagaaaaaagccaaaccaggccagagcttcttcccgctgaccgttaactatcaggagcgtacctacgccgccggtcgtatcccgggcagcttcttccgtcgtgaaggccgtccgagcgaaggcgaaaccctgacttcccgtctgattgaccgtccaatccgcccactgttcccggaccacttcctgaacgaagtgcaggtgatcgcgaccgtggtttccgttaacccgcaggttaacccggatatcgtggcgatgatcggcgcctccgccgcgctgagcctgtccggcattccgttcaacggcccaatcggcgcggcgcgcgtgggttatgtcaatgaccagtacgtgctgaacccgaccgttgacgagctgaaagagagccgtctggacctggtggttgccggtaccgccggcgcagtgctgatggttgaatctgaagccgaagtgctgagcgaagatcagatgctgggcgccgtggtgttcggccacgagcagcagcaggtggttatcgacaacatcaactcactggttgccgaagtgggcaaacctaagtgggactggcagccgactccggttaacgaagcgctgcaggcgcgcgtagccgagctggcgcagagccgtctgggcgatgcttaccagatcactgagaagcaggatcgttacgcacaggttgacgccatcaaagaagacgtcaccgccgcgctgctggagcaggacgagacgctggacgccgcagatatccaggacgcgctgagcgatctggagaaaaacgtggtgcgtagccgcgtactgcgtggcgagccgcgtatcgacggccgtgaaaaagacatgatccgtggtctggacgtgcgcaccggcgtactgccgcgtacccacggctccgcgctgttcacccgtggcgaaacgcaggcgctggttaccgccaccctgggcaccgcacgcgacgcgcagaacctggatgagctgatgggcgaaaagaccgacagcttcctgttccactacaacttccctccgtactccgtgggcgaaaccggcatggtcggttcaccgaagcgtcgtgaaattggtcacggtcgcctggcgaaacgcggcgtattggctatgatgcctaaaccggaagatttcccgtacaccgttcgcgtggtgtccgagatcactgaatccaacggttcttcttccatggcttccgtctgtggcgcctctctggcgctgatggacgcaggcgtgccgatcaaggcagcggttgcgggcatcgccatgggtctggtaaaagaagacgacaactttgtggtactgtcagacattctgggtgacgaagaccacctgggcgacatggacttcaaagtggccggtagccgtgacggtatcaccgcgctgcagatggatattaaaattgaaggcatcacccgcgaaatcatgcaggtggctctgaaccaggccaagggtgcgcgtctgcacattctgggcgttatggaacaggcgatcagcacgccgcgcggcgatatctctcagttcgcaccgcgtatccataccatgaagatcaatccggacaagattaaggatgtgatcggtaaaggcggctccgtgatccgtgcgctgaccgaagagactggcactaccattgaaatcgaagatgatggtacagtgaaaatcgcagcgaccgacggtgagaaagcgaaatacgccattcgtcgtattgaagagatcaccgctgagatcgaagttggccgtatctaccagggtaaagtaacccgtatcgttgacttcggcgccttcgtggccatcggcggcggtaaagaaggtctggtgcacatttctcagatcgctgacaagcgcgttgagaaagtgaccgactatctgcagatgggccaggaagtgccggttaaggtgctggaagttgatcgccagggccgcgtgcgcctgagcatcaaggaagccactgcctctgaagaggcggctcctgctgcgcctgaagcagaataa

SEQ ID NO: 456314 - DNA, 270 bp, Serratia marcescens
atgtctctaagtgttgaagctaaagctaaaatcgtagctgatttcggtcgtggtactaacgacagcggttctaccgaagttcaggttgccctgctgaccgcgcagattaaccatctgcaaggccacttctccgagcacaaaaaagatcaccacagccgtcgtggtctgctgcgtatggtttctcagcgtcgtaagctgctggactacctgaagcgtaaagatgtagcacgttacaccagcctgatcgagcgtctgggcctgcgtcgctaa

SEQ ID NO: 456315 - DNA, 945 bp, Serratia marcescens
atgagtcgccctcgtcgccgcggccgcgatatccacggcgtgctgttgctggacaagccgcagggcctgtcctccaacgacgcgctgcaaaaagtaaagcgttgctataacgccaaccgtgcgggccataccggcgcgctcgacccgctggcgaccggcatgctgccgatctgcctgggggaagccaccaagttttcccagttcctgctggattccgacaagcgctatcgggtgattgcccgcctggggcagcgtaccgacacctcggacgcggacggtcagatcgtgcaggaacgcccggtgaatatcacccaacagcagcttgatgcagcgctggagaccttccgcggcgatatccagcaggtgccgtcgatgtactccgcgctgaagtatcagggtaaaaaactgtacgaatatgcgcgtcagggcattgaagtgccgcgcgaagcgcgcagcattacggtctacgagctgaagtttatccgctgggaaggtgatgagctggagctggaagttcactgctccaaaggcacctatatccgcaccattaccgacgacctgggcgaactgctgggctgcggcgcgcacgtgatttatctgcgccgtctgcaggtggcgaagtacccgatcgaacggatggtgacgctggagcagctgaacgcgctgctggagcaggcgcaggccgaaggcatagcgccgggcgagctgctcgatccgctgctgatgccgatggacagcccgtgcgccgacttcccggaagtgaacctgctgccggcggtggccggctacgtcaagcagggccagccggtgcaggccgccggcgcgccggactccggcatggtgcgcatcaccgaaggcgacgcgcataagtttatcggcgtcggcgagattgccgacgacggtcgtgtggcgcctaagcgtctggttgtcgagcatttcgactga

SEQ ID NO: 456316 - DNA, 411 bp, Serratia marcescens
atggcaaaagaattcagccgcggccagcgcgtcgcgcaagagatgcagaaagagattgcgatcattctgcagcgtgaaatcaaagatccgcgcgtaggcatggcgaccgtttccggcgttgaaatttcccgcgacctggcgtacgccaaagtttacgttaccttcctcaacgtgctgacggaaaaccacgatcccgatctggtgaacaagggcgttaaggcgttgcaggacgcgtccggctatatccgcacgctgctgggcaaggcgatgcgcctgcgcgtggtgccggagctgaccttcgcgtacgacaactcgctggttgaaggcatgcgtatgtccaacctggtgagcaacgtggtgaaaaatgatgccgagcgtcgctccgcatcaggcgatgacgaggaggcttaa

SEQ ID NO: 456317 - DNA, 2688 bp, Serratia marcescens
atgacgacagatgtaaccgtaaaatcgctggcagcagagattcagactccggttgatcgcctggtacagcagtttgctgatgcagggatcaacaagtctgaaaccgactctgttacccagcaagagaaagaaaccttattggcgcacctgaaccgtgagcacggcagcgcgccgggtaaactgacgctgcagcgtaaaacgcgcagcaccttgaatatcccgagcaccggcggtaagagtaaatcggtgcaaattgaggtccgcaagaaacgcacttatgtaaatcgcgatacgcaagaagctcaacaggcggaagcggcagagcaggcacagcgtgaagcggaagagcaggcacggcgcgaagcggaagaactcgccaaacgcgaagcagaagcgaagcgcgcagccgaagagcaagccaaacgtgaggccgcagaaattgctaagcgtgatgcagcggaaaaagaaaaagtgaccaatcaacaaaccgacgaaatgaccaagccagctcaggctgaaaaagcgcgccgcgaagccgaagccgcagaactgaagcgtaaagctgaagaagaagtgcgccgcaaggtggaagaagaagccaagcgcgttgctgaagaagcgcgccgcatggcggaagaaaacggcgagaagtgggcagccgctgaaaaaacctccgagtctgagactgctgactaccacgtaaccacctcccagcacgcgcgtgccgcggaagatgagaacgacgccaaggttgaaggcgatcgccgcagccgcagccgcggcggcaaatccgccaagcagaagaaaggcagcaagctgtccgaatccaaagcggatcgcgaagaagcgcgcgccgttacccgtggtggtaagggccgtcgtaagccaagcaccctgcagcagggcttcaacaagccggctcaggtggttaaccgcgacgtagtgatcggcgaaaccatcaccgtggccgaactggccaacaagatggcggtgaaaggctctcaggttatcaaaaccatgatgaagctgggcgcgatggcgaccatcaaccaggttatcgatcaggaaaccgcacagctggttgccgaagagatgggccacaaagttatcctgcgtcgtgagaacgagctggaagaagcgctgatgagcgatcgcgacaccggtgcagctgctgctgaaccgcgtgcgccggtcgtgaccatcatgggccacgttgaccacggtaaaacctctctgctggactacatccgttccaccaaggtggcatcgggcgaagcgggcggcattacccagcacatcggtgcttaccacgttgaaaccgataacggcatgatcaccttcctggataccccgggccacgctgcgtttacctccatgcgtgcccgcggtgctcaggcgaccgatatcgtggttctggtggtggcggcggacgacggcgtgatgccgcagaccatcgaggctatccagcacgcgaaagcggccaaggtgccactggtggtggcggtcaacaagattgacaagccggaagccgatcctgagcgcgtgaagaacgaactgtcccagtacggcgtcatgccggaagagtggggcggtgaagcgcagttcgtccacgtatctgcgaaagcgggcaccggcatcgatgagctgctggacgctatcctgctgcaggctgaagttcttgaactgaaagcggtgcgcaccggtatggcgagcggcgtggtcatcgaatccttcctggataaaggccgcggtccggtagcgaccgtgctggtacaggaaggtacgctgaataaaggcgatatcgtcctgtgtggcttcgaatacggccgcgtgcgtgcgatgcgcgacgagctgggtcgtgaagtgacctcagccggcccatccatcccggtggaaattctgggtctgtccagcgttccggcggcgggtgatgaagcgaccgtggtgcgtgacgagaagaaagcgcgtgaagtggcgctgtaccgtcagggcaaattccgcgaagtcaaactggcgcgtcagcagaaatccaaactggaaaacatgttctccaacatgaccgacggtgaggtttccgagctgaacatcgtgctgaagtccgacgtacagggctcttgcgaagcgatcagcgatgcgttgatgaagctgtccaccgacgaagtgaaggtgaagattgtcggctccggcgtaggtggcatcaccgaaaccgacgcgacgctggctgcggcatccaacgccatcatcctgggcttcaacgtgcgtgccgacgcttctgcgcgccgcgtgatcgaagcagaaagcctggatctgcgttactactccgtcatctatagcctgattgacgaagtgaagcaggcgatgagcggcatgctggcacctgagtacaaacagcagattatcggcctggccgaagtgcgtgacgtgttcaaatcaccgaaatttggcgctatcgccggctgtatggttaccgaaggcaacatcaagcgtcacaacccaatccgcgtcctgcgcgacaacgtggttatctatgaaggtgagctggaatccctgcgtcgcttcaaagatgacgttaacgaagtccgtaacggcatggaatgtggtatcggcgtgaagaactacaacgacgtgcgcgttggcgacatgatcgaagtcttcgaaatcatcgagatccagcgcaccatcgattaa

SEQ ID NO: 456318 - DNA, 1506 bp, Serratia marcescens
atgaataaagagattctggctgttgttgaagcagtttccaatgagaaatcccttccgcgtgagaagatttttgaagcgttggaaaccgcattagccaccgcaaccaagaaaaaatacgagcaggaaatcgacgttcgcgttagcatcgatcgcagaaccggcgacttcgacaccttccgccgttgggttgccgtagacgaagtgacccagccaacgcgtgaaatcacgctggaagccgcgcagtttgaagacccgagcatcgagctgggcggttttatcgaagatcagatcgaatccgtgaccttcgaccgcatcaccacccaaaccgcgaagcaggttatcgtccagaaggtgcgtgaagccgagcgtgcgatggtggtcgacgcattccgcggccacgaaggcgaaatcatcaccggcgtggtgaaaaaagtaaaccgcgacaacatctccctggatatcaaagcctccgacggcagcggcaccagtgcggaagccgtgatcctgcgtgaagacatgctgccgcgtgagaacttccgtccgggcgaccgcatccgcggcgtactgtatgcggtgcgtcctgaagcgcgcggcgcgcagctgttcgtcagccgttcccgtccggaaatgctgattgagctgttccgcatcgaagtgccggaaatcggcgaagaagtgctcgaaattaaagcggcggcccgcgatccgggttcccgtgcgaaaattgccgtgaaaaccaacgacaagcgcatcgacccggtcggcgcctgcgtggggatgcgcggtgctcgcgttcaggccgtatcgagcgaactgggcggcgagcgtattgatattgtgctgtgggacgacaatcctgcgcagttcgtgatcaacgccatggcgccggcagacgtcgcctctatcgtggtggacgaagacaagcacactatggatattgccgttgaagccagcaatctggcacaggcgatcggccgtaacggccaaaacgtgcgtttggcttctcagctcagcggctgggaactgaacgtgatgacggcggacgatctgcaggccaaacaccaggccgaagctcatgccgccattgataccttcaccaagtatcttgatatcgacgaagagttcgccaccgtactggtcgaagaaggcttctcaacgcttgaagagttggcgtatgtgccaatcaatgagctgctggaaatcgacggtctggatgaagatacggttgaagcgttgcgcgatcgcgccaaagctgcattgaccacgctggcactggctcaggaagaaagcctgggtgaccagaagcctgctgaagacctgctcaacctgccagggcttgagcgcagcatggcctttaaactggccgcgcgtggggtttgtacgctggaagatcttgccgagcagggtgttgacgatctggctgatattgaagggcttgacgatgagcaagccggcgagctgatcatggccgcccgtaatatctgttggtttggcgacaacgcgtaa

SEQ ID NO: 456319 - DNA, 453 bp, Serratia marcescens
ttgtccacgttagagcaaaaattaacagagatgctgtcggcaccggtagaggcgttgggctttgagcttgtaggcatcgaatttattcgtgcgcgccaatctacgctccgcatctatattgatagtgatgacggcatcaatgttgatgattgtgctgatgtcagccaccaggtcagcgcggtgctggacgttgaagatccgatcaccgtcgcttacaacttggaagtctcctctcctggccttgatcgcccgatgttcaccgcagaacactacacgcgtttcctcggtgaagaagtcagtatggtgctgcgcatggcggtacagaaccgtcgcaaatggcagggcatcatcaagtccgtcgatggcgaaatgatcacggttactgtggatgggaaagatgaagtgttcgcgctgagcaatattcagaaagcgaatctggtaccccacttttaa

SEQ ID NO: 456320 - DNA, 249 bp, Serratia marcescens
atgggagcctcattcggagcaggtgcatctggcacattgttcggttcgagtggttccggtaacttcatgacccgcatgacggccgtgctggcgacgctgttcttcgtcatcagcctgattctgggcaacctgagcagcaaccagagcaaaaaaggcagcgagtgggaaaacctcggtcagccggtgaaaaccgagcagactaccgcgccggcggcaccagccaagccgagcagcgatatcccgcagtaa

SEQ ID NO: 456321 - DNA, 1338 bp, Serratia marcescens
atgagcgagcgtaaatattttggtaccgacggcattcgtgggaaggtcggcgacagcccgattactccggattttgtccttaagctcggctgggctgcgggtaaagtgctggcgcgccatggctcacgcaaaatcatcatcggcaaggacacccgcatctccggctatatgctggagtcggcgctggaggccggtttggccgccgcaggcctgtccgcgtccttcaccggcccgatgccgacgccggcagtcgcctacctgacgcgcaccttccgcgccgaggccggcatcgtgatttccgcgtcgcataacccgtattacgacaacggcatcaagttcttctccatcgacggcgccaaactgccggatcatgtggaagaggcgattgaagcagagatggaaaagccgctgacctgcgtagagtcggccgagctgggcaaagccagccgcattatcgacgccgccgggcgctacatcgaattttgcaagggcaccttccccagcgaactgagcctgaagggcctgaagatcgtcgttgactgcgccaacggggcgacgtaccacatcgcgccgagcgtgctgcgcgagctgggcgccaaggtgatcgccatcggctgcgagccggacggcatgaacatcaacgagaagtgcggcgcgaccgatgtgcgccagctgcaagagcgcgtactggcggaaaaagcccacgtcggcctggcgtttgacggcgacggcgaccgggtgatgatggtggatcacctgggcaacaaggtggacggcgatcagatcctgtacatcatcgcgcgcgaagggctgcgtcagggccagctgcgcggcggtgcggtcggcacgctgatgagcaacatggggctggagctggcgctgaagcagctgggcattccgtttgcccgcgccaaagtcggcgaccgctacgtgctggaaaaactgcaggagctgggctggcgcatcggcgctgaaaactccggccacgtgatcctgctggataaaaccaccaccggcgacggcattgtggccggcctgcaggtgctgaccgccatggtgcgcaacagcatgagtttgcacgacctgtgcagcggcatgcagctgctgccgcaggtgttggtgaacgtgcgttttgccggcgagcataacccgctggaatcggacgacgttgtcagcgtcaccaaaagcgtggaggccgaactgaacggccgcggtcgcgtgctgctgcgcaaatccggtacggaaccgctgatccgcgtgatggtggaaggcgaagacgaaaaacaggtgaccgagctggcgaaccgcatcgccgacgcggtgaaatctgcaggttaa

SEQ ID NO: 456322 - DNA, 837 bp, Serratia marcescens
atgcaattaaccgtgcgcgacatgactttcgatctctcccatcctcgggtgatgggtatcctcaacgtgactccggattcgttctccgacggaggacggcacaattcgctgaacgacgccttactgcatgcccacgcgctgatttccgccggcgccaccatgatcgacgttggcggcgagtcaacccgtcccggtgcggcggaggtgagcgaggaagaggagatcgagcgggtggtgccggtggtggaggccatcgcccggcgttttgaggtctttatttccgtcgatacctccaagcctggcgtaatccacgagtcggccagcgccggcgcgcacctgattaacgatgtgcgctctctgcaggagcctggcgcgctggaggcggcggcggacagcgggctgccggtatgcctgatgcatatgcagggtgagccgcgcaccatgcagcaggcgccgcattatgacgatctgatgggggaggtgaacgcctttttccagcagcatattgcacgctgtactgcggcgggcatagcaaaacagaaattgttactcgacccgggcttcggtttcggtaagaatttagcgcataattatcagcttctggcccgactgtcggaatttcatcatttcggcctgccgctgctggtcggcatgtcgcgtaaatcgatgattggacaactgctgaacgtaccgccggaacagcggacgatcggcagcgtcgcctgcgcggtgattgccgcgatgcagggcgcgcagattgtcagagtgcatgatgttaaagaaaccgtcgaggcgatgcgcgtcgtcgaggcaacactttcagctaagggacagtag

SEQ ID NO: 456323 - DNA, 1941 bp, Serratia marcescens
ttgagtgacatggcgaaaaacctaattctctggctggtcatcgcagttgtgctgatgtccgtattccagagctttgggcccagcgagtcgaatggccgtagggtggattactctaccttcatgtccgaactgacccaggatcaggttcgcgaagcgcgaattaacggacgtgagatcaacgttaccaagaaagatagtaaccgatacacgacttatatccccgtcaacgatcccaagctgttggatacgttactgacgaagaatgtgaaagttgtcggtgaaccgccggaagagccgagtttgctggcttctatctttatttcatggttcccgatgctgttgctgatcggggtctggatcttctttatgcggcaaatgcagggcggcggcggtaagggcgcgatgtccttcggcaagagcaaggcccgtatgctgactgaagatcagatcaaaaccacctttgccgatgtcgccggctgcgacgaagcaaaagaagaagtaagcgaactggttgaatacctgcgcgaaccgagccgtttccagaagctgggcggcaagattccgaaaggcgtgctgatggttggcccgccgggtaccggtaaaacgttgctggcgaaagccatcgccggcgaggcgaaagtgccgttctttaccatctccggttccgacttcgtggaaatgtttgtcggcgtgggcgcgtcccgcgtacgtgatatgttcgagcaggcgaaaaaagccgcaccgtgcatcatctttatcgatgaaatcgacgccgtcggccgccagcgtggcgccggtctgggcggcggtcacgatgaacgtgagcagacgctgaaccagatgctggttgagatggacggctttgaaggcaacgaaggcatcatcgtcatcgcggcgaccaaccgtccggacgtgcttgaccctgcgctgctgcgtccgggccgtttcgaccgccaggtggtggttggtctgccggatgtgcgtggtcgtgagcagattctgaaggtgcacatgcgccgcgtcccgctggcggcggatatcgacgcctccgtgattgcgcgcggtacgccgggcttctccggtgcggatctggccaacctggtcaacgaagcggcgctgtttgccgcccgcggcaacaagcgtgtggtgtcgatggttgagttcgaaaaggccaaagacaaaatcatgatgggtgcggaacgtcgctccatggtgatgaccgaagcgcagaaagagtcgaccgcgtaccacgaagccggccacgccattatcggccgtctggtgccggagcacgatccggtgcacaaagtgacgattattccgcgcggccgtgcgctcggcgtgaccttcttcctgcctgaaggcgatgccatcagcgccagccgtcagaagctggagagccaaatctccaccctgtacggcggtcgtctggcggaagagattatttacggtgcagagcacgtctctaccggcgcatcgaacgacattaaagtggcgacctccatcgcccgcaacatggtgacccaatggggcttctccgagaagctggggccgctgctgtacgcggaagaagagggcgaagtgttcctgggccgctccgtggccaaggcgaaacacatgtcggacgaaacggcgcgcattatcgaccaggaagtgaaatccctgatcgaacgcaactacgtgcgtgcccgcacgctgttgatggaaaacatggacatcctgcattcaatgaaagatgccctgatgaagtatgaaaccatcgacgcgccgcagattgacgatttgatgaaccgcaaggacgtccgtccgccggcaggctgggacgatccgaacaaaggcaacaactccgacaacggcggcaccccgaaagccccgacgccggttgatgagccgcggacgccgaatccaggcaatcctctgtctgaacagctcgacaagtaa

SEQ ID NO: 456324 - DNA, 630 bp, Serratia marcescens
atgacaggtaaaaagcgttcggccagttctagccgctggcttcaggaacactttagcgacaaatatgtgcagcaggcgcagaaaaaagggctgcgctcgcgcgcctggtttaaactggatgaaatacagcagagcgacaagctgtttaaaccgggtatgacggtggttgatttgggggcggcgccaggcggctggtcgcagtatgtcgttacccagatcggcggttctgggcgaattatcgcctgtgatattttaccgatggatcctatcgtcggcgtcgatttcctccagggagattttcgtgatgaactggtgctgaaggcgctgctggatcgcgtaggtgaaaagaaggttcaggtggtcatgtccgatatggccccgaatatgagtggcaacccggcggtcgatattccaagatcgatgtatctggtggaattagcactggaaatgtgtcgtgatgtcctcgcaccaggcggaagtttcctggtgaaggtgttccagggagatggctttgacgagtacctacgggaaattcgctccctgtttacgaaggttaagattcgtaagccagacgcttcgcgcgctcgttcgcgtgaagtgtacattgtagcgacagggcgcaaactgtag

SEQ ID NO: 456325 - DNA, 294 bp, Serratia marcescens
atgaatctgaataataaacaaaaacagcacctgaaaggcctggcgcatccgttaaaaccggtcgtgatgctgggcaataacggtctcaccgaaggggtgctggctgaaattgagcaggcgctgacgcatcatgagctgatcaaagtgaaaatcgcgacggaagatcgcgaaaccaaagctttgatcgctgacgccatcgtgcgtgaaacaaaagcctgcaacgtacagattatcggtaatacccttattctttaccgcccttctgaagagcgcaagatcagtctaccgcgttaa

SEQ ID NO: 456326 - DNA, 477 bp, Serratia marcescens
atgcaacagattccgatgaccctgtttggcgcagagaaattgcgcgaagaactggaatatttgaaaagcgtccgccgtccgaaaatcattgcggacatcgcggaagcgcgtgaacacggcgatctgaaagaaaacgcggagtaccatgcggcgcgcgagcagcaggggttctgcgaaggacgaattcaggaaattgaagccaagctgtcgaacgcgcaggtgatcgacgtcaccaaaatgccgaataacggccgggtgattttcggcgcgacggtatcggtgatgaacctggataccgaagacgaagtgacctaccgcatcgtgggtgacgacgaggccgacttcaagaaaaatctgatttcggtaaactccccgatggcgcgtggtttaatcggtaaagaacaagacgacgtggtggtgattaaaacgccgggcggcgatgtggaatacgaaatcctgaaggtggaatacctctga

SEQ ID NO: 456327 - DNA, 1320 bp, Serratia marcescens
atggttcaaaaaatcggcgccagcacgccgacgattgattaccactcgcagcagatggcgctgcccgccagtacccagaaggtgttgaccgcgctggcggccctgctgcagctcggccctgactaccgctttaccaccacgctggaaagccagggcaagattgacgatggcgtgctgcgcggcaatctgatcgcccgcttcggcggcgacccgacctttaagcgccagaacctgcgcaatatggtcgccgagctgaaaaagcagggcgtcagacaaatcagcggcgacgtgctggtcgatacttcggtattcgccagccatgacaaggcgcccggctggccgtggaacgatatgacgcagtgcttcagcgccccgccggcggcggcgattgtcgaccgcaactgcttctcggtatcgctgtacagcgcggccaaaccgggcgatatcgcctttatccgcgtcgcctcctattacccagtcaatatgttcagccaggtgcgtacgctggccaaaggctcgccggacgcccaatactgcgagctggacgtggtgccgggtgaactgaaccgctttaccctgaccggctgcctgacgcagcgcagcgatccgctgccgctggcgttcgccattcaggacggggccagctatgccggcgccattctgaaagatgagctgactcaggccggcatccagattgacggccatctgaagcgtcagacccagccgggcatgaacggcacggtgattgcccgcacccagtcggcgccgctgcacgacctgctgaaggtgatgctgaaaaaatctgacaatatgatcgccgataccgtattccgcaccatcggccacgaacgcttcggcgtgccgggcacctggcgcgccggcgccgacgcggtacgtcaggtgctgcgccagaaagccggggtcgatctgggcaacagcatcgtggtggacggctccggcctgtcgcgccataacctgctggcgccggcgaccatgatgcaggcgctgcaatatatcgcccagcatgacaacgaattggactttatttcaatgctgccgctggccggctacgacggcacgctgcgctaccgcggcggcctgcatgaggccggcgtggacggtaaagtctcggcgaaaaccggcgcgctgcagggggtctataatctggcaggctttatcaccaccgccagcggtcagcgcatggcgtttgtgcagtatctgtcgggttacgccgtaccgccggaagatcagcgccagcgccggatcccgctggtgcgtttcgaaagccggctataccgggatatttatcaaaataactga

SEQ ID NO: 456328 - DNA, 663 bp, Serratia marcescens
gtgaagctattgattgtcgaagacgatgagctgttgcaacaggggctggccatggcgctggccgccgagggctacgcctgcgactgcgcgctgacggcggcgcaggccaatgcgctgatcgacaccagccagtacagcatggttattctcgatctcggcctgcccgacgttgacggcggcgccctgctgcggcagtggcgacgccggcagatcgatttgccggtattgattctcaccgcccgcgacgcattggaagaccgcgtcgacggactggacgccggcgccgatgattacctggtgaagcccttcgcgctggttgagctgcaggcgcgcgtcagggcgctgatacgtcgctaccagggccacagcgacaacctgctgcagcaagacgatctaacgctcaatctctccagccagcaggtttacctgcaacagcagcccgtcgacgttacgccgaaggagttcgccattttatcgcggctgatcatgcgcgccggccagacggtcaaccgcgagctgctgcagcaggatttatacgcctggaacgacgacctcggctccaataccctcgaagtacacgtccataatctgcgccgcaagctgggcaaagaccgcatccgcacggtgcgcggcatcggctaccgcctggagccgctgccatga

SEQ ID NO: 456329 - DNA, 1065 bp, Serratia marcescens
atgatcagcatgcgccgccgcctgctgctgatgctggcgctgattctgctggtcacccagttgatcagcgcgctgtggctatggcatgaaagccgggaacagatcggctttctggtggatgaaaccctgtcggcccaggtgcgtaccgaaaaagtcgacggcgaaatcgccgaagcgatcgcctccctgctggcgccgtcgctgattatgatgatggtcacgctgatcgcttcgttctgggccatcagctggatcatccgcccgcttaaccagctgcaaaaccggctggagaaacgttccgccgataatctgtcgccgctgccggtcagcaacgacagccgggaagtggtggcggtcaccaccgcgctcaatcagctgttctcgcggctcgatagcaccattcagcaggagcggctgtttaccgccgacgccgctcacgagctgcgtaccccgctggccggtatccggctgcatctggaactgatggagcaacagggagtacgggaaagcacgccgctgattgcgcgcatcgaccagctgatgcataccgtcgagcagttgctgatgctgtcacgcgccgggcagaattttgccggtggccactatcaacgtttcgactgggtggcggacgtcatcacgccgctgcgcgaagagctggaagagctggcacaacggcgcaatcaacggctggcgtggcaactgccggccgaggccgtcacccatggcgatccggtgttactgcgcctgctgctgcgtaatctggtggagaatgcccaccgctacggcccgccgggcagcgctatcctcatccgcctcggcgcgcaaaacggcggccatcagctgcaggtcatcgatgaggggccgggtattaagccggagatggccggcgagctgacccaggccttcagaagaatggaccagcgctatggcggcagcgggctggggctgaacatcgtcatccgcattatccaactgcaccagggacgtctggcgctggaaaaccgccatgacgccagcggccttaacgcctgctgctggctaccggtcaacccgctgcagccgtaa

SEQ ID NO: 456330 - DNA, 1173 bp, Serratia marcescens
atgaagtttgtagatgaagcagcgatattggtcgttgcaggtgacggtggtaatggttgcgtcagcttccgtcgcgaaaaatatatccccaacggcggcccggacggcggcgacggcggtgacggcggcgacgtctacctgctggcggacgaaaacctgaacacgctgatcgactatcgctttgagaagtccttccgcgccgagcgcggtcagaacggccagagccgtgactgtaccggcaaacgcggtaaagacatcgtgatcaaggtgccggtcggcacccgggtgaaagatcagggcaccggcgagatcctcggcgatatgacgcgtcatcagcagcgactgatggtggcgaagggcggctggcacggcctgggcaacacccgtttcaaatcctcggtcaaccgcgctccgcgccagaagaccaacggtacgtcgggtgaagcgcgcgatatcctgctggagctgatgctgctggcggacgtcggcatgcttggcctgccgaatgccggtaaatccacctttatccgcgcggtatcggccgccaagccgaaagtagcggactacccgttcactacgctggtgccaagcctcggcgtggtgcgtatggacagcgaacagagcttcgtggtggcggatattccggggctgattgaaggcgcgtctgaaggcgccggcctgggcattcgcttcctgaagcacctggagcgttgccgcgtgctgctgcacctggtggatatcgatccgattgaccagaccgatccggtggaaaacgcccgtgtgattatcaacgagctgaatcagtacagtgagaatctggcgcagaagccacgctggctggtgttcaacaaggttgacctgctgagtgaagaagaagccgccgaacgcgccaaggcgattgtcgacgcgctgggttgggaagagaaatactacacgatctccgccgccagccatcttggcgttaaagagctgtgctgggacgtgatgaactttatcaacagccagccgaaagcgatggcgctcgaagagagcgcaccggaaaaagtcgagtttatgtgggacgattaccaccgccaacagttggcggaagtagaagccgaagccgacgacgactgggatgatgactgggatgaagatgacgacgaaggcgtcgaaatcatctaccagaaataa

SEQ ID NO: 456331 - DNA, 972 bp, Serratia marcescens
atggaaacaaaacagcaggtcggggtcggtatttctctggcgttaaccacggcggtttgctggggcgcgctgccgatagccatgaaagaagttctacaggtgatgacgccgtttaccatcgtctggtatcgctttaccattgcggcggttgggcttggcgttattctggcgttacgcggccgtttgccgccggtaaaactttttcgccagccgcgctggctgctgttgctggtgattgctaccgccgggctgctggggaactttgtgtttttcagctcctcgctgcagtatctcagcccgacggcctcgcaggtgattggccagctgtcgccggtggggatgatgttcgccagcgtgctgatcctgaaagagcggatgcgcattacccaggtgattggcgcgctgatgctgatttgcgggctgatgctgtttttcaacgtcagcctggttgagatttttacccgcctgacggattacaccctgggggtgctgttgggcgtctgcgccgcaacggtatgggtcacctacggcgtggcgcaaaaggttctgctgcgccggctggcgtcgccgcagattctggtaatgttgtacactttatgtgcaatcgcattatttcccctggcgcagccggggatgatttttcagctgagcggctggcaactggcctgcctgctgttttgcggtgcgaatacgctgattggttatggcgctttggcagaggcgatggcgcgttggcaggcggcgcaggtgagcgcgttagtgacgctgacaccgctgtttaccctgctgttttcagatttattggcgttggcatggccgcagatgtttgccgccccgacgttgaatgtcgtcggttacgtgggcgcgtttgtggtggttgcgggcgcaatgttttccgcaattggtcaccggtggtggccacgacgggcagaaaacctcctggttgctcctatcaagcagcccggtgaatga

SEQ ID NO: 456332 - DNA, 3063 bp, Serratia marcescens
atgaaagcatctacaggaaagaaaaggccgacatggaaactgaatgccttgctgtgttcgctgttggcggcaggcagcgtgcaggcggacgacggtaaaatcggcgacccgggcagttggcgcagcgccgagtttaatgccgactgggggctgggggcgattcacgccgaccaggcctacgccgccggctataccggcaaagggcagaaagtggggatcctggatacgccggtgtataaccagcatcccgagttcgccggcgacggcaagctgatcaatgtggtgacgcaggggatccgcgcctataccgatccccaccggccgggcattaacgccggcgatccgttctatttcgacggcaccttccatttttataacggcgagacgctgagcaaccacggcgtgcacgtggcgggcatcgccgcggccaaccgcgacggtgcgggcatgcacggcgtggcgtttgattcacagataatcagcgtggacaacgataacgacggcccggcctacggtgaatttctggggctggacggcgcggtgaccaacgccggctggcaggcgatgattgaaagcggcgcgcgggtgattaacaacagctggggcgtcagcatccctgatttcctttccgacggcggtaaagacccggatgcgctgcactttgaactgcgcgatgcgcaagagcagttcgaccaggtgaagccgctgctgggcagcctggccggcgcaggctatcagggggcgatcgacgccgcgcgccacaatattctggtgctgtttgccgcaggcaacgacggcaactacaaccagccggacgtgatcagcgggctgggctattttgtaccggatatcgcgccgaactggctgaccgtcgccagcgtggcgcaggatgaggcgtcgaccaacagcgtaccttacaccctcagttccttctcaacccgttgcggctacaccgccagcttctgcgttgcttcgccgggcagtaaaatatacagcgcggtggccaacggctccgatccgcagcagctgacgtcggactacggcaataaaaacggtacctcgatggcaacgccgcacgtgaccggtgcggtcgccgtactgctgcagcgtttcccttatctgtcgacagcgcaaattgccgacgtgctgaaaactaccgccaccgatatgggcgccccgggaatcgatgcgctgtacggctgggggatgattaacctcggcaaggcgatcaacgggccggggatgttttacaccgcgcaggatattccgcaagagttccgcatccctgatgccgagggcgtggcctatggtcctacgcagtttgtcgccaatattccgggggtaggcgcggagctggatagcggtacgcgctatcagcgtatctgtgacgacgtacactgtggcctggaagtttattcgaacgatatctccggccatggcggcctgaccaaagagggcatcggtacgctggtgctgaccggcaacaacagctacagcgggccgacgctggtgaatcagggcctgctggcggtgaacggtacgctggcgtcggacgtgacggtgcaggacggcggcgtgctcggcggctcgggccgcatcggctcgctgaccgccaacgccggcgccaccgtggcgccgggcaactcgatcggcacgctgaacgtgacccgcgacgtgacctttgccgccggctcgcgctacgcggtggaagcggcggcggacggcagcagcgatcggatcgtcagcggcggatcggcgcagatcgacggcggtgaggtggtgatgctgctggatcagcagaacgtgctgaacggcgagggcggcggcagcgccatcggtcagtatgacatcctgcaggcgcagcagggcatcggcgggcagtttgacggcgcgacgaccagctcgccgttcctggacgccacgctgtcgacgcagggcagccagctgacggccgacgtggcgcgtaacgataccgcgttcgccagtgtggcgacaacgcagaacgagcgctcggtggcggcggcggcggatgcgctggcggcgggcaacccggtgtatgaaagcatcctggcttccggcagcgcggggcaggcgcagcaggcgttccgccagctgtcggggcagatccatgcggatatcgcctcggcgcaggtgaacgacagccgctacctgcgtgacgcgctgaacagccgtctgcgtcaggcggaagggctggcgacggcgccggacatcaaggcggatgacggcggcgcgtgggcgcagtttgtcggcgcgtgggaccatgcgtccggggatgtgaacgccaccggctaccaggcttcgacctacggggtgttgctgggactggattcggcctatgacgactggcggctgggggtggcgaccggctatacccgcacctcgctggacggcggctacggctcgaacgcggacagcgacaactaccacctggcggcgtacggcagcaagcagtacggggcgctggcgctgcgcgccgggggcgcttacacctggcaccggttcgatacggcgcgctcggtgaactacgggctgcagtcggaccgtgcgacggcgaaatacagcgcgcgcaccgagcagctgttcgcggaggcgggctacagcgtgcagagtgagtgggtgaacctggagccgttcgccaacctggcgtacatcaacttccggaacaacggcatcagcgagtcgggtggcgcagcggcgctgcacggcgacaagcagcatacggacgccacggtgtcgacgctggggctgcgtgcggaccaccagtggcagctgagccgtgaaacggcggtgacgctgcgcggtgaggcgggctggcagcatcagtacggcgagctggagcgcggcacggggctgaagttccgcggcggcaacgcggcgttcgtcagcaacagcgtgccggtctcgcgtgacggcctgttgctgaaggccagcgcggacgtggcggtgagccagaacgcgtcagtgtcgctgggctacggcggcctgctgtcggatcgtcatcaggacaacagcgtcaacgccggcttcacctggcgtttctga

SEQ ID NO: 456333 - DNA, 933 bp, Serratia marcescens
atgagcgaagaaaaaatttttaagtcgttaaccgatcgcattgcattcgttcagcatgatgttgatttattgtctaaaaataaaagcagatcatttgcagataaaattatatacaagtcaatggagtctcaccttacagatctgttaacacagcaaagagcgattgataacagacatccattacgcgattttatggagctccgtttacgtggcgccgttgtcgatctagggtctgtcccattagacatactggccgttatatccggaagcctagctagcttggtgcaaagggctgtccatcgcatatcttcaggaaaagactcacaaaaggttccaggaaacattagaaattccttggacatgagattggcagatatatcacctggttctacaaagttagcagtaacattttctacaggatcttgtgagctcgttgataccgtatcaagtaaagcggttaaagatatattcagcttacttgagtctgttgatgatgagtcattcatggcaaaagttgcagatataggttcgaaatccgcctctagtctcaagaacctcgtggacgaatgtcaaaaaaatgagatttcatttgacctatcttggattggtcctctaactgatgggcgtaagactgttaccattgataataacggcattagaaagctaaatgacaggctaacattcacacaggtttctaagccctgggatgagtcaattactggtgaacttgcagttttatcaatgtatggaagacttgaaatagtaaatgaaactggaagtattaaagcctcatacccaattgatttacttacagaaatacacaaaaggtgcaaggtcggagaacggatatctgttatagcctcagttaccgagattcataacgacagccttggtatatcaagaagaaactacatgataaaaagcatcaaataa

SEQ ID NO: 456334 - DNA, 2169 bp, Serratia marcescens
atggttagcaggttaaagcaaaaggtgggcagtgaccccatcggtgtcgataaggaaatgaaaatatcggaacttccttcggctgagaattcgttaattgatgaccttcttgttatttctcaaagcgacggtgatggtttattgcgaaccaaaaaaatattaatgtcattacttattaagtcgctggtttctgatcgctccggtaatctcgtcagtcttgtagacggttttaaactttttgccgacaagtctgttttggacggattgacggaaagggctgaggatgccgcaggaagggcggagaatactgctgacgccaacacgtattacatcacccctgatgatcctgatggaacaattgccggccttgctggtactcctttcgggaaaagcttccgtgttggtcagggggaggggaaaggttttaaatattatatgaacctgaatggcaccgcactggagtttgcaagtgcagccggtgccagtgatgttgagaatgccattgactttgcgagcaaatcattatcacagagtggtgaggttgataagcgcacacaggggtatggcgttgaaaaaaaggtctatgacacagaaggggtattagtcgggggcggtttttttgctgcgaacggcgtgtcaccgattaactatacagaaaacggtgacgtaaatattaccggcgtacagtttaaaaactttgccaaccatcatgaatatgattgggcgcagacggataaaaagaacgtgccgtatatcggcggttcgaaaatgggcggggttatcattggccgggttgagattgttgaaattccggggccaccaggcgttgtgtttgtcgataaaggttatgtcccttatgcctgtgatcctgggtatgaaaccgacctggatattcccttgattggctctacgccaccaaagcctgatgttccaccggtgccattccgtccttatgactacatgggggtgcgcagtgaggggcagtcgttgtctcttggtgcagcgaaccctaacgatgacccacaaccggtcagcacagaacagcgctatgggaacaagggattcagcaccaataacaacagcggcatgaccgatacggacacactggtgccactcgtggaaaagcgttaccaaccgtcagagggaacctggccggcggcggaaacccctgttaccggcgcgacgcataagctggtggaaatgatccaggcagaaacagggctgccctttgaccatcaggccagcgcctatatcggttctgcgcccggcaccggcggtcagcctatcaagaacctgatcaaaggtactgcggcctatagtcgcatgatcgcccatgttaccaacagcctacgcctcgctgcagaagagggaaggacttttgcagaattggcagttgtgtggatgcagggcgaatcagattatcgcgatcagacgtcgcgcgctaactatctcgctatttacctgcagtacatcgccgattcgctggcagacaaaaaagcgatcaccggccaactgtttgaccccatttttatcagctaccagctcagcacgcaccgggcgtaccgacgccgtgacccacttgtcgctctggcactgcgtgacgctgcaatgctgggtaaaacggaaatcgcttaccccggctacatcggtgattactacgcatcagaccacatccacggtatgcctgaaacgtactacatgttctctcagtatacgggccgcatgatttacaaaaagcggcgggacatgctggagggcgtgacgcgcatgcatcgcctggatgtgattgatgaaatccggcagggcatcttcaccatgctctatttcaacgtgcctgctccgccgctggttttcgacacggactgggtggcgccggcggaaaacatgggcttctacatccgggataagggttcgctcgatgtcatcgacattattaccgctgtcgatattgccggtcatgaccgtgtgcggatcacaacctcgcggccactgcgcgataacgaaatcgtcacttacggatggggtaaggccggtgacccaatgacgaacggcagaactacggggccgcgcggaaacctgcgtgatagcgaaggggatttagcgggcgaaagctacactgacggcgcaggagtgctgcgcaaactgcacaactggtgcgtaattttttaa

SEQ ID NO: 456335 - DNA, 519 bp, Serratia marcescens
atgaaaataaataatgtgcttatgcttctacctctgttagcagcatctttttcaacctttgcatcttcttggcaggtgtcgtatggcaacgatgagatgcggggaacggctcagaagttccttcaagtaacctctgagaacgcggttaattttgagtttccatacaatggtggatcggaaatggccatcttggttcgctctaaaaaagttgagctaaaggaaggggagaaacctgaggggcttaagccaacagaggctatgttgatgattgaaaaagggcagtttttgtgcagctcttacaatgattgccatatatcagcaaaatttgatgatgggaaaatccaaacctatccaatggtagaagctgctgacgcaagttctgacgttatcttcttctcaagttcatctcgtttcatcaagaacctgcagagtcataaaaaagtcattattgaggctgagtttttccaagcaggtaagaagcagttcaagttcaatattgatggcttcccgaaacaataa

SEQ ID NO: 456336 - DNA, 180 bp, Serratia marcescens
atgagcatcaactggcgattggccgtttccggtctggcgctggctgttttggttggggtctgctgggcagccagctactaccacgataaagccgaaaaactggaaggcacggtgcagcagctgcagcgcgaaaacattcaacaatctgcggttatcgcggagcaggcaatccagttctag

SEQ ID NO: 456337 - DNA, 177 bp, Serratia marcescens
atgtcagacactatcaacccgttacgctcccctgctacagctgcctaccaggcggtcatggaaatggtcaaagctggaaaaatatctaacgcaactatgtttaaccgggagtttactgagctacttgagcatttccgttctgagaatgttcgtttaaaggagaataaagagcaataa

SEQ ID NO: 456338 - DNA, 783 bp, Serratia marcescens
atgagactggaagcggcgttaaagcacttcagcgcccaagggctggtgataacagatagtccaagcggcacatcaaaggatcgcatcaccggtactgatgtgatggctgcgctgggattggcggaatcaaaagcccgattcggcatggccgcgtttctcggtaagaccggtatcagccaggaagacaaagaacgggcgatcgttgaattggcgcagtacgcaaagcaaaaggctccgaagcacgtcggcaaggttgccgggcgccggcttgcaaagtgcatggagatcttggcggtgtttgcgtatgaggaatactcacattccgccggtacgggcgtgacgtgtcacgattgcaacggcaacggcctgatatctgtcacgcgtgacgtcgtgaaatatccgggatacatcggcgcagacggcgaggagaaaatcgccccagtagttgaagcgcaggttgtccgggagctgtgcacatcgtgcaatggcaaagggattcgccataagcgttgccgtaactgcaaaggcacaggcaaggcgctcgacaaaggtgctacgaaagcaagtggtgcgccggtagtcaaagactgcgaacgctgcagcggaaaaggatttagtcgcacaccctcatcaacggcctacaaggcgattacagcgttgcttccagagctgacgcaatcgtcttggtcacgcaattggaagccattctatgaggcgctggtggacaaatgccgtagggaagaagatagagctgcggcagcatttgtcaaagtaacaaagtag

SEQ ID NO: 456339 - DNA, 984 bp, Serratia marcescens
atgaaagaccagaaagccgaaatcctgcgcctcaagcaagaaggtaaaggctataagaccatttcgcgcctgaccggtgtgaacctcaacacagtaaagaccacctgtcgccgttcagggttgtttcgtgataatcctgaacaccgggtgctcttcaccattccagagagaaaatacagcacggcggtagcagttcccaaaccattgccgccccagcgaacgatcacaggcgacaagcagaccgatgcctatttgtgggtgctagaggtcatcaagaccggagagccggcacatattgccgcagcggaagaagcattgaagaaactgaccatcactccgaagctggcgcaggaaaactacacgctctatctgcaggctcaaggagctggttggacgtcggtattttccactatgtggatggacagtcctcagcactacattgatcaagcgaaagcgcagtacgaaaaagcctgtgcggtgcgtggcgtatttggcagctatgaagctgcaatgaaaccgactgaggcagagcggagaatgttggctgaatacggcgatatttacgatgacgaatgctacggctggtctgatgaggagaggctacaaggtagcattagcggaaaccgcatacttgaagcctgggacgagcgtagagctgcgtcaaagggattcgcggatactttaccgaccccttatacattgtccgatgtagtacgtgagtttgagtattggagttggttatgcagcatacgaaacgcagcaaggaaagaaatagatcccgctggctatgatgacggcgatggccctattgctgacagagaggactggctggataaacaactagaaggcttgcgaccgagagatcaacgagaagcgctggcggtgctgaaatggtatttgcaaagtgagcgccatcaggggagctacgatgccgatagtgacgcagtctatttgaacttgattggggttcatgaggacgtttga

SEQ ID NO: 456340 - DNA, 369 bp, Serratia marcescens
atgaatcgctcaattgaattaaatcgcaagcatatttctgaggcatttgtggattattgcaaacgccgtagcggcggacacccggtgtgcaccgtcatcgtaaaccgacaacaggtcatcatcggtgaactgcgggcagaagcggtactccgttgccttaccgactgttttgaagccgcgtgcttcgaaaaatacgggcaggcgaacagcctcaaactgttggcatctacctatgccggcatgctgaataaagacaacagcaaattatcgccggaaggcatcgagtttatggcattgctgatgagtaatgccgtggagatggcgttgaaaaatccgcagaacaatactctcggcctggagttgtactga

SEQ ID NO: 456341 - DNA, 306 bp, Serratia marcescens
gtgagctatatcgagcaagttttgtcgcgacctgatatggggcgcgaagacactgagaggttaaaattcattcgaatgcattccgagtgtgcctatgatggtttgctatctggtcttggggctattggtaatattactttttgggcatgtgataacgaaaactatagcgacgaaatggcgcgggcggatttatacgcaataagcgaaatgttgatgcatattcccggtattacagcagcgttaaaatttaatgcagatgaagcggacttccttattagagagcgtgagcagaaaaagaaacgctaa

SEQ ID NO: 456342 - DNA, 783 bp, Serratia marcescens
atggctaagaaaaacgaattgatggccgtcgaggccaaagacctgcatatcgttgagtatcgtggtcagcgcgtggtgaccaccgagcagatggcggcgggatacgatatcgatgtcgcaaatatcaaagtgaactattcacgcaatgcaaaccgcttcgttgaaggaaaacatttcttcaaggtcgtcgggaaagagcttgcagatttgcgggtatcttttagttacctgcaaatttccagcaaaactcgctccctgatgctctggactgaacgcggtgctgccaatcacgcgaagatgttggaaaccgatcaggcgtggagctactacgacgagatggtcgagttctacttcacgcgtcgtgaagcactgccagcaccggccgatttgtcgaagttggagatcctgcaactggccattgagtccgaaaaaggtcggttggcagaaaaagagcgcgcagatcatgccgaacgcaccaagtcgcagatcagccgcaaacgcgaagcctcagcccttggcaaactcagcgcggccacacgcaaatgccgtgaactagaagaacgcctgggcgaaagcgttaaacacgcgaccatcaccaaggtggagggcaaaactggtggtgaatacaggttcgttgatctgcggcgctggtgtaagacgaagggtgtcacggcagttgatgtgccggacccgcgttacggtagcgtcaagtcctggccggctggtgcctggttgaacgtgtacgggattgacctgcgtaaattattcggaggtgtacggtga

SEQ ID NO: 456343 - DNA, 234 bp, Serratia marcescens
atgagtaaaacctacacctttcaggtaaacgaagatgtgctttcgcttttggcccgttcgctggatttgatgaattgtgcgcaacttatcatcaatagcggaaacgaggatatgcagaagtacgtaatgtctctggtggatgctgcggaatatttcggacaacggacattcaatacgttggattacggtgaacaaccgacggtgaaaaatgaacagggggtatgcaatggctaa

SEQ ID NO: 456344 - DNA, 171 bp, Serratia marcescens
atgcgtagcgtaaaagtattggatgccatcaatgccctggacaaaatccaggtgttggctgcagctgcaggttatctgacatcaagcgaaaaagaagagcagctctgttttgagatcatcgaattgattgaagaaactgcccgacgtggtgtggaggctgagaatgagtaa

SEQ ID NO: 456345 - DNA, 201 bp, Serratia marcescens
atgttgcatgaaaatggattgagcgaagcctgtaaacaggtggaccaactcaacgcattgctgttggcgatggatctcgtatcagaggaactcgatacgacggatctgaagacattggtcactcttgcttttgagctggctggtgggcctgcctgctggttaatggaagaacaacaacgccggaggaagaaaaatgcgtag

SEQ ID NO: 456346 - DNA, 222 bp, Serratia marcescens
atgcataacatttcccctgaaattctaacccaactcggcatttaccctagcactactggccgcgtgatgctgtatgtgaaaaacggtgtaatcaccgcgggtttaccgatccccgagcatcatttctgttgttctgtggagtgctttatcgagctggctcagcgtgctgggtggcatgtatcaccggaacgccatgatttggaggtatccaatgttgcatga

SEQ ID NO: 456347 - DNA, 840 bp, Serratia marcescens
atggctagtatctacggggttatcgcagagcataccgcaccgtacaagggctaccgcgatgttgtccagcagtttttagacaaagaaaaaggcagcaccgcaaatgctgccctttgggatgaccactttctaaatcagaagcactatcagtatattgcagaactgtgcgggcgacgctatgaaagaagtgtagatcatccttctgtagattctttggcttttttacggagcctgcgtttaatttctccctcaagggcagcaacgatgaattgccctgtactttctccagaaaacttcagtttttcaacctcatcagcaatgtcatggggaaccctagcctcaagtttttttgattttgcatttactgcttttgttgccattactatctccagtgctatcgagagtctgagagtatacacaagaaaaaaaacaaaaatagcattgacgtggctgacacttgaaaatatagtggctgacaccttgctactggtaaggtggaaaaacaaaacccagaaggatggccgtccgttctgggtttctaaccaaaatgttatcggagctaacaatatggcatgtttacatgatagccaaactcgccctaaatttgtatacctgttcttaggggtccccgaggattttcccagcattaccccaactgtgttgcgtgtagaggcagatactgaggttgatgcccgcagcaaactccctcactggacgttaactttcgccgcgcaaattcgcactgaatcaccgtgtcgcctgcagctgttttccaccgatgaaggtttcatgtggatttacgagcagcatcaggccgtgtcggaggtgtcccatgcataa

SEQ ID NO: 456348 - DNA, 696 bp, Serratia marcescens
atgaaactgaaaaatacggccattcttggtcgggcccaaactcggcccaaaatcagcctggacgaattaacagagatccgccggtatgttgtttccggcgactggtcagcaataaacaccggcatctgcatgctcgcggatctcggtttgcgccataacggcagcgggctggtttggcttcgttctggcgtatctgttcaccaggcagattatgacgccggggtgatgggtaaagataagactatcgggagcgtcaacggactgcctttggcgatggttcgtcagtggaaggagttccagacgaaacgcagctttgcggtttctatccctgctgaactgcgccgcgagtattactcggatgatgccgcgtttggtaaggcgatgcgagaagcaggttatgttcccgtgcgctcacgcacattgaccggaaaggatgctcgcttctggctatatcgagtatctggcaatgacaaaggggttgtcgcagcagaacccacacggcctaaggcttgcagcgtagttgtccagaccatgactaagccgcacccgtggtttaagcgggtggcactcgatggtaaatggctgtacgtctatgccgatcacatccgcttcttgacgaaaaagcgtcatcgtgtcggtggtgttcgtgttcaggggtatacagctggcgggttgaaagtggaggtgctggcataa

SEQ ID NO: 456349 - DNA, 888 bp, Serratia marcescens
atggaaaaagcgacaattagcgattttgcatggttcaacattgataattatgactttattacaaaaattactgttgaggagcttatacacgaacttgaatggcgccacacgttattttactgtcacgacgagaataaggcgcttaatgagcttggtttcgaagactctataaaatatttccgtatttttcgcggagacccacaccttaatatcgattcgccagaagaggtagagtttaataaagaagttgaagattatgctaagtcttctggaagggatacatcatcagacagaccgatgcttcctcatgatcaaggtgtaatgccagtttcttttgccgagttatcacagtactcaaaggtagctcaaaaaatagaagcatactcacttgatgataatgggaattatacccacatcgatccccgaagtatgcttgctagtgttagctataatgcaccagattatatgaatcataaagtactcatagacatatggttgaatgaggcaactgatgaagagattttatcaagtttaaaaaaacttcttcctgtttggagggataggcttgggcatccagaaccagatatattaccgaagcgtcgtgttggactgaaaacattccaaaagctgatctccaatagagttttaatgattttggatcttatattatgggctgaagtctttaagaaagaaattagcaatccgatgttatcgcacctagtattcccagatgatcctaaagatactcaggcaattaaagaaacaataaggcctttttctattgaggctatgtctgaaccttacacaaggcttttgagactatttattgataaggatggtgaattaggtagcgctaaagtatctgacatgttcgacagaatttcatga

SEQ ID NO: 456350 - DNA, 201 bp, Serratia marcescens
atgaaaaaagtaactctgctggcagcggaagcggtgattggcggcaagtgcaaaaaaaattgcactgacagctttgaatgggttggaacggagccaaatgaggtatgtaccatgatacgtacctgtactgacaagtatggtaaggtacaccaaacgtctatgccggcagttgacagtaaacaatgtcgcaaagatggctaa

SEQ ID NO: 456351 - DNA, 588 bp, Serratia marcescens
atggcgtgggatattgagggaactaaacgtaaaattctggatgcggctacaagcgaatttgcccgtttcggccctgatggcaccaccctggaacgtgttgccaagctggccggcgttaacaaggagcgtatttataattactttggcgacaagcgtgctctgttttctgccgtgctgcgacgcgagttggccaaagtagcatcagtgctacctgtcacatcctttgcagtcgaaaatattggcgattatgccggacgagtttacgattaccatcttgaaaaccctgagttgagccggcttatgcgctgggaggggttgacgttcagcggtgaggttccagacgaagaacaacgccgcgaatactatggatacaagatcaaggcagtagccgacggacagcaacaaggttgcgtaacccaagccattgaggcagatcacctggcttttttggtgctggcactggccggatggtggtccgcggttccgcaggttgctcgtatgttaacaggtactgatagcgcggaagaacattccagaagacgggcctctgtcatcgaagctgcacgacgtttggcatcagcaccataa

SEQ ID NO: 456352 - DNA, 720 bp, Serratia marcescens
atgaagaatactgtccttatttgtggacatggtcctggtatatcccatgctcttgcgcgccgttttggcaaggcgggttaccctgttgcgctgattgcgcgcaatgctcggcgccttgctgatgcggtagcagaattgacgtctgaaggtatgaatgttcgatcttttcctgctgacgtgagcaagaacgatgcaatacgaagcgctattacggatgcacgtgaaatgctgggccctattggtattttgcactggaacgcttttcttgatactgaaggcgatctgttgtccacattgcctgaggagctgaaccaaagcttctcgacccgagttaccggttatatcaccgcagtgcaagagtgtctgaccgaccttgttgcttctaagggggcggtactcgctaccagcggtattatggcgcttgatacaccgcaaattaacgcttttgccactcaatatgcagcacttgctatcggcgtagccgcgcaacacaaagccacaaaccttttggtgcaaactcttgcaccacatggcatctatgtcggtgagattatcgtcaatggctttgtcacggggacgccgggcggcgatggagaaagtcatacgatcgctccggaagacgtcgctaaacagttttgggaactctataccgcacgacaggtacattccgtcattattggaaagacggtgtcaaccacggaggttggatacgatgactga

SEQ ID NO: 456353 - DNA, 1242 bp, Serratia marcescens
atgactgaacattcacaggttactgctccgacgaatcatggttcaggagaagctgcgcgccttaatcaagcgtattcggcgaacggaaaggttgtcatactcatggttgttgttgcgttgttggtgttgagtcagctttatctgtccattcctttgttgtcgtatgtcggccaggctttcagtccgtcgacgccgggagcggtcacattcgctttggccacctgttttagcctggcttatgccggaggatttttgctctggggaccattatccgatcagtatggtcggcgtccagtgattctgatcgggctaagcgcactgtccgtgagcactcttgtatgtgcgatggcgccttcgctgccatggttagcgggattgcgaataatacaaggactggcagcatccagttttgcccccgtagcgttggcctatcttgccgaagccatgccggcacgccaccgggcaaccgccattggggcaatgtctacgtctttcctcgtggcaggaatttttggacaagtgctagcaggttggatggcgttaagatgggaatggttttgggtcttcctggtcaccggggcctgtttgataatcatgattccatttatttctgtgatggtaaaggaaccagggcgcaccgttgttgatgggcatcttgggcatcgtttcgtcgcattgggtaaactggttacacaacccactatcctgctactgtcatgtgcgcacatcatgcttcttttgtctttcgttgcgatgtatacggcattggggccgcatatgatgggattgggtcttgatccggccaaggtcatcatgctgcgtctggtcggactgccgggaatgttcatggccttgttggtcgggccgttggctgcgcggataggcatgccgggtgttgccaaaacaggttatttggtggctgctgcaggattggccgttgaggtcatgttatcgcaatctcttgttggtatagcgataggcagcttgatctttgtcactggtgtggctctcgctgttccggcgatgatcacgcagtttggagaactggcggtacctaaccgcgccggaggcatggcgcttaatgggtttgtactgtttgttggcgccagtattggcccacttatcgtgacatgggtgcctggttttactccgatgctgttagggcttacggtagtgcttttattggcgatagcgtgtattgctggtagcgcatcgcttgctgcagcgagaaagaaatcataa

SEQ ID NO: 456354 - DNA, 360 bp, Serratia marcescens
atgaaatttattccgggttcagttctccatggcctgattgccgctaaaattggcgaaaccgttgcgggcaactatgtaaagctgcaggagggatggagtgtcgacggtgtgcaaaatcaagccgatggctctgttaagatggctgtgttctattccatattatttttagatttggcagagcagaagtattattccatcatgcaggtaggtacggtgttgtcaaaggaccagtatggacacactttggttgttcagcagccttttaaatctttacgaccggactctaccatggatgtcctcgactcatggccggttaatgttccctatccaacgttccaggcggaaagggctcatggctga

SEQ ID NO: 456355 - DNA, 261 bp, Serratia marcescens
gtgctgcatcaacataccccgcattccgacgctgaacgcaccgctagcctggaacgggacggctttggtatgctaagcgccctcaacgtgctgagcctcgccaacaatgccatcacccaactgccggatacattctgccagctcactcagctgtgtgagatgaaaaatttacgccggctggatttacgttggaataactttacccgttaccccgcggttatcgatcggctgatcgcacgcggatgcatggtacatgcgtaa

SEQ ID NO: 456356 - DNA, 165 bp, Serratia marcescens
atggggaaaactccgaacaccagcgcgattattaccattattataataaatgcattgctcattttactttccgcaattatattcccaattctttttcatacaaagacactatttatccaatggggattttatttttatcttgatttttttaggatcaacccttga

SEQ ID NO: 456357 - DNA, 804 bp, Serratia marcescens
atggatttatcaccactaaaccctagttttggtcttgagataaaaaatatagacttgcgaaatttagcacaagagggtattgcccgattgaaagagtacttatacgaaaaaaaactactcgtcatcagagaacagcatttgaatcatgatgcatacctggcctttgcggaaaaattaggttctattgctaagtatcctttctctgatgggatcccgggctatccgcagatagtacaaataaaaaagaatccggagcagacaaaaaacttcagcggtatgtggcatgttgattcaacttatttggatgcgcctccagatatcaccatgctatccgccgaagtaacacctcctcttggaggagataccgtattcagcaatactacattggcatttgataagttatctgaaaaatttcaacaactccttgtcaatttagaatgtaattacatttcagatttgcacgaccaagatagaacgaaacatctattagctaacaatgagaagagaacatttaaggctattcatccagccatcaagaaacaccctataacccaaaaatccagtatctatgtaaaccaagagcacacccatagctttgtcggtatgtcacgtgaagaaagccttccagtcatcgattatttgacgggttttatcaaaaactcagagttcacattaagggtaagctggcagaaaggaactatcgtactctgggataacagggcagttcaacaccatgcagttaatgactacaccggacatcttagaatcatgcatcgcattacccttaacgattccttggtttga

SEQ ID NO: 456358 - DNA, 789 bp, Serratia marcescens
atgacagatatggtacatattgctgacagcattattgtgattctattctttatcgcaatatttgctggatttatcgatgctatagccggcggcggtggactgatatccacacccgccatgttaatattaggactcccccccgttattgctcttggaacaaataggctgcaatcaagcataggtgaacttacatccatcttgatttacaaaaacaatgggaagattaacggcaagcatcttttaaaaggtatagtatcggcatcaattggcgccatacttggtagttatttcgtcaactcaattcctaacgacacgttatatatcatactgccgatattaatgacagccattctcatttataccattttctctaaaaaaatcagagaaaataaagagagcaaaaagatcataagcctgccagtgtttatgataatgatgggagtcctgctaggtttttacaatggattttttggcccaggaactggctccctctgggtaatatcttttatctcactagtcgggtacaccataaaaaatgcatccattaattcaaaacctttaaacttctcgagcaacctggtttctcttttttgctttatttatatgggacaggtcaactacaaagtggggataactatggctataggacagattattggctctacattaggaagccgcgccgtattaaataatggtgataaaatcgtcagacctatatttatagccgtaacatcagtaatgacaatgaagatgatatatgatggggtcaccttaggtaaattttactaa

SEQ ID NO: 456359 - DNA, 1773 bp, Serratia marcescens
atgttgaaggtcatcaaggaactgctggtcggtacccgtgaagtaccggccagggcaaaatcatcagcatcttcaccgcctgctgggccggcagggtactttatgccgcagtccgccacgcagttgctggatatgcccgcccgtaaacagtgcctgcagcagctgtgggaaaacagctcactgccaaaggatttgtacgagcagttttatctgcagccactgcatcacctggtgacgctgatgcaggtactgccggcagcccggcaaggtgagtatgccagcgaagggggcctggttgatatcacgctgcagacgacgacttttgccgttcgcctggccaaggggcacatgttgccgcctggcgccgcacctgaagatcagtcggcgcaaaatattctgtggaacgccgtggtattttacgcggcgctctggcgttacctgccgcaattagacctggtagaaggcgagtttcaaaacggccgggcgtggttacctggtgttatggtacccgctgaaccttaccgttttcggttcaaaccggtagttcctgatcctgttatcacagcaagccaaagtgcgttaatagcatgtcggtcgttgccggcggaggcggtcaattggttgtctaccctgccggctgccgcgcaggcagtgatgctgatagcttcacgtcagcccagctccctgccggtgatcgatgagatagtccaggaggctgtcaagctggcgcgcggtgatgccattggcatggcggcgccaacagccgttactgctccttcctcttccatacccgtgccgacagagacatcgccagatcctggtggtgcacctgctgcggaggttgtgttggagagcagtgtacctggtgcagcagtccaaagtgctgtgacgggagaacctgctgccactaacgaccaggaaaagggtgctgacactgcagctgcagtcagctcggaagaagccatggctgttccatcgggggatgtactgctgagctccgcgttggatgcccctgtaaatgatttgcccctggccgagatggttgttgcccccgaacctgctgttgaggttgaggaggatatgcaggcgctgctttcgctgatgaatgtcagtgtatctgcgccggaggctcccgagatgcagtctcaggaggacgccccccaggaggaagatcctgaacttgcacaacgtgaacgaccggcaacagatttgcccactgtagcggatagtgagccggcagtgccagaaaagacaccagtcctgatggcaagcgcggctccctctgaggatgtcgttgcccatgcagaaacagcgatacctcaatcgcctcctgaacaaacggaacctgggacagataaggaaagcgcagtggtcagtgcggaggctgtgcctgtctccgatgagcattccggagaactgttctggcagtggctgagcgccggcctgagtgcaggagatattccaattaatacgatagaggcgagggtgcacctggttgccgggttcgtctttatcactgtgcctggaattttttacctctatctgaagcaaaccggattagccggcgatcagcgtgaagcattacaggatagtttcgagcgcctggacaagcatcgccgagttaagggtaagcgtttttattttgcggagttgtatgccagctcagaacgcaaaggatctttcaagcgaacgaaagggtatctcattaaagccagtttactctaccgaggcgtacccgtacctgacgacagtccggtactggttatcccttga

SEQ ID NO: 456360 - DNA, 1404 bp, Serratia marcescens
atgcctggatttaattatggcggtggtgtgggtgatggtacgaactggagttcagagcgcggggaaaccccgtcgccaggaggtggcagtaaggggaatgcgggaaatcgagataataattccactggtgcttccgtttcagtactgaagcctggtgaatcttactcaactccttggggaaagattattatcaacggcgaaggtcaccccatgatgaatggtacgatcatgacagcaggtaactccacactggtttctgatggaaccggaggatatacccgagttcttaattcactggcgaagactccgccaaaaccaaccctgggaaatggtggggaaaaggcacaatctcagattaatacggaaaactatctggcgggtgggagttgggcgggaagtggcccaatggataaaaccgtgatcaatgctgcaatcggagaggccattgataaaatgctgcctcgaggtaacattccagcgactagcacacattcctatcaggttatgcgcaaggtattcaatgccaaacctatcagccaacaacccgaatgccgggcgcaaattattcgcagttggcaacatgcgcatgacatcatgccgaatacggtgcgaaccacacacgagaccggtggtaaaaacgggcggaccattacaggaaacaaggataacccagccaaacaacttatggcttgggctatccctcaggttgtcgacgatacgctgaaagcattgcaacaaaatcaagcagccgaacagcaccgcaaagaagcagaggctaaagcaaaagctgaagcaaaggctaaagccgaagcagaacgtaagcgcaaggccgaagctgaagcgaagaaaaaagaagaagatgctgtgaaagatgccgtgagcaaagtggcagacttttacaaagaattgacatcgaaatatggggagaaactggctaaagaagccaaagagctggctactgatgctaaaggaaaaaaactgagaagtgctgctgaagctattcaggcatttgacaagtataaagacagtatcaataaaaaattcagcgtaaaagaccgcgaggccattgcgaaagctctggaatctttaagcaaagaccagatggccaaacagttagctacatttagtaaagcatttggactcgttggcgatgcgattcaatggagtggttttgtgaatggtctgattaaaggttttagaaccggaaactgggaggaggccattatcaacggtgaaagtatcgcggcaaacaagttagccacggctttagtcgcagtagcatttagctcaatggctgtagcccctatcggcattattggctttgctattatcatggctatcgtcggcgcactcattacggaagataggctcaaaaaaatgaatgatttcataatgagcctataa

SEQ ID NO: 456361 - DNA, 447 bp, Serratia marcescens
atgcccgagtataccgtgccctgcgacatgctgatgttgatccccacgcgtctggcgacagagctgaacggggccggcggcgcgctgctgcgtgatgtgccggcaacggttgacctgtacgggcgtcagtatggcgttgaatggccgtgtggccacaacgtcggttgcgtgcgtgacagcatcaatgttctgacggtgcattttgattctccgtggtacgcgccggcaggcgaggtcataggggagttctcaaaacaattcagctgtcaggttgagcacagctggcatatgttcgacgccggccgtagcagttacgaccgttacgaccacggcgaacatgttgatggcggccgaatggagccggaagttcaggccggtgaggtgatccagtttacctatgccgacaaggactccttgccgttaccagccaacgccgtagcgagttaa

SEQ ID NO: 456362 - DNA, 582 bp, Serratia marcescens
atgaaagctaaatctgagctgatgagagagaaaattctcaaagctgttgtggaattgtttattgagaagggcattgaaaaggttacaacacgcgatctgacagaatatttaggcatatcccgtagtcatatttatcactattttaaagactggcgctctctgtgcctcgcggcgataacaaactttatgaatgacgaactggcagagttttgctccatcattcagcctttaaccgccagtgagaagttgcaggaatttattgatggcatgatttccaatgacccagacccaacccgaaagttatatggttccttatggttactctccacccatgacgaagactacgcgagtttgatgcagacttttttggacaagtggcagttggtgctggcgaacattatccagtcaggtatggacgagcgtacatttcgcattgtcgatgcgcaacgcgttgcacggcagctggatgcgatgctatttggctatggtgaacacctgttaaccttgccctgtgaagatttagtgaagcaggcgaaagaagatatcgacgattttatccatcgaaatatgctagcgcgttga

SEQ ID NO: 456363 - DNA, 900 bp, Serratia marcescens
atgaacactgaaaatatccctgcgccctccgcgggcgcaagcgcctccggcaccctaagattactggccggtcgcaaccgcaaaaaactgttgtttacctttttgctggttgttgccgaaaacgtcacctatctgctgtacccgatccttgctggcgcctccattaacgccatcctgtcggggcagacgttaaatgccgtactttacgggctgatgatcttatttatctggtgcctgggggcggcgcgcagaagcgtggatacccgcaccttcgccagaatttatgcggctctggcggtctcggtggtcatggcgcaacgtaaaaataattttaatcattcaaccgttgcagcacgcgtggcgctgtcgcgagagtttgttgatttctttgagttgcacctgcccatgcttatcacttcactggtatcaatgatcggtgcggcggtgatgttgctgattatcgaatcctgggcaggcgttgcctgtctggtcattctggctttcctggcctgctttctgcccggtttcgcccggaaaaacgaggcgctgtataacaagctcaacaaccgtcttgaaaaggaggttgactttgttaccaaggctacaacgttatctttgcagcggcattattctacgctcgccaaattacgtatacgcctctctgaccgggaagccatcggctatctgtcgattggcgtgttggtcgccctgctatttagcctgaccattatctggatgacgcagtcggcggggatcagcgccgggcatatttactccgtgatgacctatatgtggatgtttgccaccagtcttgatgatggcccgcaactgctggagaaatattctcagcttaaggatattggcaaacgggtgagcactgatgcaggggaagataagtga

SEQ ID NO: 456364 - DNA, 3084 bp, Serratia marcescens
atgtctcagttttttattgagcggccgatctttgcctgggttatagcgttatttattattttcagcggtattctggcgatccctaaactcccggtggctcaatatccggctgtggctccgcctaccgtgtcgatatccgtcagttatcccggcgccacgccggaagcgatgaacacatcggttgtctctctgcttgagcgtgaaatttcaggcgttgataacctgctgtattttgagtcaaccagcgatacttccggttcggcctccattacggtgacgtttaagcctggtaccgatatcaaactcgcccaaatggatattcagaaccaaatcaaagtggttgaaccgcgccttccgcaagccgtgcggcagaatggcgtgagcgtagaagcggcaaattcaggttttctgatgatggtgggattgaaatcaccttccgggacctatcaggaagctgatttgagcgattattttgcccgccatgtgagtgatgagctacgtcgtgttcctggcgtcggtaaagtccagttatttggtgcggaaaaagccatccgcatctggctggacccgctgaagatgtacacgtttaagctgtcagttaatgaggtgatcgctgcgctcagccaacaaaacgttctggtttcaccgggccgtattggtgatgaacctgcggcatccggccagcgggtaacttatccgcttatagtgaaaggtcagctcgcttcgataaaggagttccgcaatattaccattagagccgaaaccagcggcgctcgcttaaagctggcagatattgcccgggtggagtccggcctgcaaagctatgcctttgcgatacgtgaaaatggtttgtccgcgacagcggcggcgatccaactcgctccgggggcgaatgccatcagtacggcagccggcattcgcgcgcggcttgcggaactttctgctaacttgccggcagggatggtgttctcggtcccctttgatacggccccctttgtcaaactgtcgattgataaagtcatccacacctttatcgaagcgatggttctggtttttctggtgatgctgctgttcctgcataagatccgctgtactctgatccctgccattgtggcgcccgtggcattattgggtacgttcaccatcatgctgctatgcggtttttctatcaacgttctgaccatgtttggcatggtgttagctatcggcatcattgtagatgatgcgatcgtcgtggtggaaaacgtcgaacggctgatggaagagaaaagattgacgccccgcgaggccactagtgaggcgatgaccgaaatgccccccgccattatcggcattactctggtgttaaccgccgtatttatccctatgggtttcgccagtggatcggtcggtgttatctatcgccagtttgcgctctctatggccgtatcaattctgttttcggcttttttggcgctgacgctgaccccggcgctcagcgcgtctttactaaagccgcatacccaacaaaatggcggtaaaaaaggtttttcgggttggtttaatcgtcatttcactgccttatcagtccattatgaatctgggctgcgatacgtactaaagcgtactggaaggatgctgctgttgtatgccgctctttgcggtttactgttgtttgccctgaaaaacctcccttcatcatttttgccgaatgaagaccaaggctacttcatgtcctctattcagctgccatctgatgccacgatggagcggacgctcgaagtcgtgcggcgctttgaggatgtcatcgggacgcgtaaggccgtcgagagcaatgtcatgatcctcgggtttggtttttcagggtcgggtcccaacaccgccatggcgtttactacattaaaggactggcaatctcgaaacggcgctactgctcagggcgaggctgactttatgcagactgctttgggggaagtctccgacgccactacccagagcctgttacctccggccatcgctgatatggggacgtcatccggctttacgctatatatcgaagaccgggcgggaaaaggttatcctgcgttgcaagcggcaacaaaaaagcttatcgccttggctaacaacagcgcagtgctgacggatgtctacattgacggacttcctcagggggtaagcgtgtctctggatgtggacagggaaaaggccgaagctttcggcgtgtcatttgatgagattaaccaggcgctctcagtctcttctggttcttattatgtcaatgactacacgaacgacggccgcgttcagcaggttatcgtccaggctgacaccgcctacagaatgcagctgactgacttactgaaagtatcggtaaaaaacaaaacgggcggaatggtcccgctttcctcttttgtctcgccgtcctgggtccaggccccacaacaattaaatcgctatcaaggctatcctgcaataagggtgacgggcagtgccgcaccagggcagtcaagcggcaatgccatggcggaaatggatcgccttacgagtgaattacctcagggattcagagccgagtgggcgggcagctcgctgcaggaaagagaatcagcgtctcaacttccggcgcttattttgttatccatcctggtggtgtttatggtgctggcggcactctatgaaagctggtcaatcccctttgcggtaatattagtcgttccattggggctggcgggcgccgtatgtgcggtaatgattgctgatatgtcgaatgacgtctttttccgggtgggcatgataactatcattgggctttcgacaaaaaacgccatattgattattgaattcgcccggcaattacgtttacaggggatggatactgtcgccgcgaccctgcaggcggccagacaacggttacggccaattatgatgacgtcgctggcctttacactgggcgtagtccccttgatgctcgccagcggcgccagtgataggactcagcatgccattggaacaggggtttttggcggcatgataagtgggaccttattagcaatattttttgtgcccgtattttttgttttagtcatgcggatgtataaaaaataa

SEQ ID NO: 456365 - DNA, 912 bp, Serratia marcescens
atgtctgacttagaacaaatcgataaaaaaaccttaaatcttaaattaacagaattagaaaagaccattcaggaactgcaagaaataggaacaaaagaaaaaaaagaagaaagaaaacgtaaaaagatagctgagattctagatgcaaccatgaaggtaatgcaaatcgttacatttctcgcggcaatttacggctcatggatgttgttttcatttgcgaaagagaacaacataaaatacacagatttagttggatcaagctttatcatttcatttggtgctttaagtgcagcggcaatactctcaatcgcattattcccttcactcatagttatactcagtcatgtaaactcaaagaacaattacaaaaccttagtttttcactctagattcaccatagtaaaaaacaacaaactaaaaacattactcgcgtacaacctaattatatctttatggccatttattcacatgctgtcaaaagaacatcacgcacttattcttacactactctacccacctttaatacacttagttctatccgtactattaaacaaaaatccaataagtattatcaaaccatcagcaattcaaataatgacattaaccatggaggttatactagcgcttatatctattattttcttgtcgtcattcataaaaagcatatacagtgaaataaacgatggagtgttgagcttaatattctccattgtttttttccttcttaaacaccccgggttatcaacagacaataaaaaggcaaaagcaacaacggtaatcatagtattcctattatcggctgaagcgttctttatgttctcattcccgttttcgagtaatataggaaacacaattgcaaagtccattgacttaaagttaggtgagaaatgcttcctaaatagctgcgcctaa

SEQ ID NO: 456366 - DNA, 438 bp, Serratia marcescens
atgagtagattccagaaagcatctcatgtgctctggtgttgtcaatatcatattgtatggacacccaagtaccgatttcgcatccttaggaataatgttggcaaagaggtctacaagcagataaggatctcaagtgagcaactcgggatagaagtggtagagctgaatgttcagatagatcatgtccatttactggtaaaagtcccgccacgtctttctatttcacatgtgataggtcatttgaaaggtaaaacagcccttaggctgttcagcaaatttccctatctgcggaagaacaagttgtggggaaatcacttctgggcgcggggttactgcgtagataccgtaggtataaatgaagaaatgataagaaagtacgtgaagtatcaggaaaagcatgaagttgaagagagccagcttccactaaaagaggtgtga

SEQ ID NO: 456367 - DNA, 492 bp, Serratia marcescens; identical to SEQ ID NO: 455557

SEQ ID NO: 456368 - DNA, 504 bp, Serratia marcescens
atggccgctttcgcctatcaatggcaactgcaagatcatcggcgtggcagtagagaccaagatgaggctggtttaagcatcaaaggaggatttgtgtcactggaaaaaatagcattcctattcccatacaatgggccaacaggagaaaaggaaattccgccacctctccttgcgtacgattgcgaagaattcccagccgagcttgacatgagtgctggagtatttttcatcgggatgtctagaggaaagccgtattacctggaaatgcagatttttaggtcagaagatgaagtggatattccagtttctcccgcaaaagggatgtggataaggcttagtgatgaccagaaacgaaatgatgatatcgcggcatcgatagatattagcctgataaaatgcaagttcgaccatccaggagcgcacatgttacgggcgagattgcttgtggaaaacgaaataatccacgaaaataaagcctacttcagggtgagtaaggccttatga

SEQ ID NO: 456369 - DNA, 165 bp, Serratia marcescens
atggcctatctggtgtcaaattccgcattttttacccgtccgcacgccgggattgccctgatgaacgccggcgacatgccgcctggcgggcttcagtcgtccggcaaggcccagtgcgggttccacaccacttcccatagatgcccgtccgggtcgcgaaagtag

SEQ ID NO: 456370 - DNA, 1146 bp, Serratia marcescens
atgcttctgaataaggtagagagtgggaatccatatgctattcaaattgcgggtgaattagaaaaacttctcggtaaaaaaattcagatgttgaatgatgataaacattcgtcaaatgatgttctggatgaaaagattgtattgaacatatcagattatccaccggatagtttcgatgaactcatcgttgatctaaaaggaaattatagcactcataaatttttagtgtcttggtataaatactggtgtgatcagggaaaagaaaatgaattgctgcatatacttacttcacgtatttcgacatttactgatcgatttgatgataaacgatatttgctagatcttcttttttcaagctcttttaaattagaaggtaagagtagagcctttaaaattttggtggcagcccatagatcaatggggggatggtcggattggtatgagcgtgaagaaaatagcattaaccgacttaagatagttgcggaacagtacccacaaaaaattgaggaatttataaagctcacaacattacaacctgacgactggaacgacaaatttggtaaactgatcataccaaatgacaaactggtttttttactttctcatagcggcagaaaagaagaagctcttaagctcacattacagatggtaaaaagtttagaagatagcgtccggaatcttcaacttacaaaacctatttgggattggcacagaaatgactctcttgaggaagcattacttaaatctttagtttcaagacttaagctgccaattccttcaattaaaatctgggtaatggagcagctttcacaacttttaatagctcagaagcctaaagtaggggatctattaaaaagagacttagctagtagaaaacaagaatcagaatgtgttgaagtacttagcgttttctttatcgcaaaatctaaaggatatgtttgtgataatgaaattgggaaatttattaaagcaaggtcctctctatccgacttaatgatcacggaacttgtatcaaatgcaaattatttcggggaatacgcttctcaattcaatccatttattgttttagatggtgataataatcgctttgaatactgtctcttatacacatctccgagcccacgagaccagagaggatcgctttga

SEQ ID NO: 456371 - DNA, 1503 bp, Serratia marcescens
atggcaaactttgaagtcgcagctcgaacactgatccatctaggagcagaacttataacctcggatgctattgctattaacgaattgattaaaaatgcaatagatgcacaatcagaaaatgtcaatatttacttcatctgccctataccaaatagagttttggttgagtgtattgacaaactcaactctaaattgacaatagatgaagaaacaatattagacttggttgatatattgaatattaatcgactaccaaatctagatgatcgggttaaacaaaaccttgaaaataaaattaacaaattaaagaaacttaaagataaaaattctataattgatactatttattctataaatcacattataatcagtgactccggccatggaatgtcaaaggatactttagaaaacgttttcttgacggttggaaccggatttaagatgaactcagatggaagtatattaggaaataaaggaattgggcgcttggcgatgatgcgtctaggtaaaaagtctataattacaagttgggaagacttgagtaatgtgcatcaaatcacatttgactggaaagaatttgaatcaagtgataaaaaaataacagacataataataccaattacaaaaatagatctaaaaaaaacaaccaataaaagtggaacaaaaatacggatatatgaactaaataatgaatggacggaagcctatattcgaaaagaattaattgatggttttctcagaagattgagaaatccatttcagagtaaaaataagaaattccctataaatgtttactttaatacttatgatattaataaccgaatacctatacgtaaaatatctaataacctttgggatctcgggcaaaaaagtgttgagcttacatttgatccattcaatgaagagctgataaacaatcaattaaaaattatcgttgaaggtaaagcagctggagacaatcctccaccatacgaaacagggttaataaatctagcccatgaacttgattgtagtatcgaagatctccaaaaaattggtccttttaaattcaaacttcgctggtataacagacaaactttaaaaagtgatataaaaaaccaaggactaagtaaagagcaaaaagagttacgccatgaactagatatatggagcggtggtgttgccatatatagagatggattcagaattggatactcaggttcacaatcagataaagattggttcgaaattgacagtaaggccttaaaaggacaaggttttacagttaataggattcagattataggtgcacttgagataacaaaggagagaaacccattattacaagatcgctctaatagagaagggctcttagataacttacaagttgaactggttaaaaaaataatatcccagatagtattgcctgaatttagagaagcgataaatagcgataaaggaataatagcgacaagaaaactagatgaaattatagaaaatggtctgtctcttatacacatctga

SEQ ID NO: 456372 - DNA, 585 bp, Serratia marcescens
atgagagttattactgctctgggtagtgattttgaccgtctgtgtgatgagttagcaaaaacagttataaatgactattcaccggatctgattattggaatagctacgggtggggaatttgtcgccagggctgtcgcaaaaaatatcgatgctcctgtaatgataatcaaacggcagagaaaactaacaaagtataaatctcgtttcaaaatatccaaactgttagcgcttttccctcgctggctcaatgatattttgagaaaggttgaaataaagaataatgaacgtaagttcatcgccaagggtaaggtctggacaccttctgatgtagtggtcatttctggagacttggattctttatcgcagtataaaaaggtattactagttgatgactctgttgacagtggtagtaccatggtcgacagtattaaatttattcaggactacttggctgaggggactgcgctaaaaacagcggctcttaatgtaaccttcagtgagcctgtattgactcctgatttctacttatataaggatacgttgatccgttgtccttgggcaaatgatgtcgggaaaagaaaatga

SEQ ID NO: 456373 - DNA, 435 bp, Serratia marcescens
gtgatactgagcggaatttatggagaaaccaatgccaaagaaaaatgcagcggacgtgaccacgataccgacaaagccggtggccctatccagaatctggactggagaacggccaacatcgaccgggctggcgtggataaggtgaagttgcataccgggcggtttgaagacacccccgaaaacaaggtgatgattgaccgactggagaaaattttgcagggtaagctacaggcaacggataccgacaagcgtttttacacccatgaaatcagggaattggatcgctaccgggcgctgggcattcctgatggcaccacccaaaaaaatagctacgaagtctggaataacactcacacagcaacattagaagattaccagcttagttctgatgaaagcctgttatacacaccagaggctctgaacgcacataactaa

SEQ ID NO: 456374 - DNA, 222 bp, Serratia marcescens
atgaactcgataaaatcctttctcgctaaattcgtcaaattcgtgggacgccaaaccgctgatttagtcgagtcggttgtcttgggcctattttcgatagccgcgtttgttgcactgttctggtttgatgaatggtggcagtcaataggcgctgcggttgggatcttcctcatgggctttttggtcagcctggccattggatggggtcggggggagcgatag

SEQ ID NO: 456375 - DNA, 498 bp, Serratia marcescens
atgcgcatgaacaactttacccgctacacaccagaatcaccggaatttggcccattggcgttatacctgcaagatgataaagggcgtgattggtacgcctcacaggataaattcaagaaagtctatacgctggcgatcaatccccgcactggcgttattcactgcatcacccaggacgtttcggcgctattccctgacggattaaccgttgttgatatcgacgaactgccgccgggttgtgatatctcaggtgactgggtttatagcaatggcaccgtgaagaaagccgaaggtgcgaacatccgccaaaccgccgagttgaaaaataaactcatgaaccaggcaaccagccgtattcaggtattggccgacgccgttgatctgggtatggctacgcagaaagaaacagcccaattggcccagtggcgagaataccgcgtgttggtgtcacgtatcgacaccgaagccagtgatattacttggccggagatcccataa

SEQ ID NO: 456376 - DNA, 1119 bp, Serratia marcescens
atgaccccacaacaaagcgcaaagcattggttagataaaaacttcctgatcctggacaccgaaaccaccggcctgggtgacgatgccgagatcgtggaaatcagcatcatcgactgcgcgggcaacgtcctggttgatacgctggtgaagccatccaaaccaatccccgtagaagccacaaaaattcatggcatcactaatgagatggtggcttctgcacactcatggccttttgtttttgttcatcaggttgcccatatcattgctggccgcgagatcgttatttacaacgcggactatgacatccgtctgattaagcagtcttgcgaaattaccaacatgattggggcgatcaatatcccgtcacattgcgcgatgttggcctatgccgagttttacggccagaaaggaaaccgcggcgggtacaaatggcagaagctgaccaacgccgccgcacagcagggcgttatcattgaaggaacaccacaccgcgcactttccgactgcctgacaacactgggcgtcatcaaaacaatggccggcaaaagttaccctgaacccgtcacccgcatcatggacgaattagaccatgctgcagaggcggccgcctgggagccgcgtgtctataacgccgttgttcgcgctaaacaaatcatccaatgccagcagaaatccaacaataattttaaagtcaagttccgtcataccgaccagcatattcatgaactggaaacggaaaacgcgacgcagcgccgtcgcatcgagcatcttgagcaatataaagccggcgtcatttccattgttaacgcctgtaacgaggcacacccaagccccgtgccattttctgaagatgatttcctgcgcattgtcgatttaatcaagattgacgatatcccgttcggtgccgaaaacgcagatcaggacatcattgcagcacaagaacgcctgttgggggagcaagcgacactgttgcagcaggccaaagagaaagagcagaaattagagaagtgcctcggactagcgctcgctttcatgaaaggggcggccgccgatgtgtcgttcgttgactggctggagaaaacagccgacaacctgaccacaaaggagcggaataaatga

SEQ ID NO: 456377 - DNA, 261 bp, Serratia marcescens
atgaacgccccgttctacgccgcggccaaccgcgtgatccgcatgtacgagatgcgccagcaacacgccagccctgcgcattcaccgtctgaaatcgagtgggccgccgatcgtcttcttgatctggcgctggccgctggttacgcagcaagtaacgaggccatcaaactgcgcgaccgcgctgtaatttggaaacgatgcggcacacagccggaattttttcccgaagtaatcgaagaggtatcaccaacatggaaatga

SEQ ID NO: 456378 - DNA, 300 bp, Serratia marcescens
atgtcaagcgggtacggtgaaaaactgaagcaaatgcgaaacgcagagaagttaacccagccggaattagctgaacttacaggggtaagtcttggcgctattagaaattatgagacggggcagcgcgaagtagggttgatcgttttagacaaaattatcaaacatcctcgttttgagaagtacacgatgtggttaatgacaggaaaagcaatgccggaggtgggacagatctgtccggctctctcccctaatgggcaagacggcatatccaacaaccaaaacggccagaaggttggttaa

SEQ ID NO: 456379 - DNA, 945 bp, Serratia marcescens
atgaaaattatcgcgatagaagaacactggatatctgaggaatttcaacgttattaccccaaagccgggagcgtaggctacgacgctgatatcgctgtactgaccgatatcggcgaacggagaatcgccgttatggaccagcacggcattgatatgcaggtgttgggacacggcatgtttcccgtcacgacagtgagcgtggaacaggtaatgaaaaccaacgatcaggccgccgccgcggttgagcggtatcctgaccggtttgctgcgtttgccgccttaccgctggcgaatatcggcgcggccgtggaggagctggcaagaaccgtgacccagtttggctttaaaggtacgatgatcaacggcacggtggagggcaagttccttgaccacccagacttctggccgctgttggcaaaggctgaagagcttggcgtcccgatttatttgcacccggcctatccggtagcggcggtcagcaaaccttattacgacggtaacttcagcgatttggtgtcattcacgctgggctctacggccgcaggctggcactgggaaaccggtttgcacgtactgagaatgatcgtttccggtattttcgataaatttccccggttgcagattattatcggccatctcggcgagctgattcctttttactgggaacggattgaatactggctggagccgcgggtggaaaatctgcgcaaaccggtcagagagtattttcgcagcaatatccatattacaaccagcggatacagcacgcaggcgccttttcaactggcactgcaaaccttcgggctggagcggttgattttttccgtcgattatccatttaacccgctggcgccggccatatcgtttttgcataatctgccgttgacgcaggaacagaaagcgcaggtcgctgggctgaatgttgcacggctgctgcggctttaa

SEQ ID NO: 456380 - DNA, 615 bp, Serratia marcescens
atgaaagaaaccgcagaggaaattaaaaaaaacctaaacaaaacatacttagccttgtctgaagatgataatttattggaaaaaatcgagtcaattaaatccgataaagaagaaaaagtattatcctggtctaaaataaatgcatttagcgtcattccattttataatgaactaactggatttaagaccggatctatgctagataaagaacccaaagacaaaaaaaacacatattgttatttatccaataacaaagaaataactaaaatattaagttacaactcaaaaggaagcatagaggatgtatcatatatcataagaaaaaaaaatgaaaaccttgaaataagggaaagtatcaaaggtggatttcttgctatatctcaagtcattctagatgataaaggtagacctaccgaagcatactatgcaaatgatgataatgcttcagggtatcattatttttatgatggtgatgtgataaataaaatcctaacagtgagcaataactctccattaccttgggtagttttatcatgcgagtatgatgacaaaaaaaatataaaagaaatatattttgaaaccaaacagggaaaagttaatgttttcccgagatag

SEQ ID NO: 456381 - DNA, 327 bp, Serratia marcescens
atgaaatttctcattgataaacaagggcatccatctttagatatagattattattatcatgtattggctgatttcttatctggggatatacaacgcagtttatttggtgtaaatgaatatattgaagcttgtaacagtgttgcttcagggaaaatggaaacatggtcaggaacaggaaatgctcacaccgttactataaaaaaagatggtgtgaatattctcaatgaatactctgaagaagagttaaccataaaatccatagaaaaattcgaagaatatcttgaaggctggaaaaaattacttataagcaatggagcaaaagaataa

SEQ ID NO: 456382 - DNA, 393 bp, Serratia marcescens
atgtggtttgattacgcccatggaaaagaaaatattaaattcatgtttaacaatgagttatctttaaatgactctgaacttgaaagctttctattttatgacctttcaaaaataagaatatgtttcaacacgaggaatatccccaaaaaaacgccagacaaatggaaaaaattagaatttaatggactatctataaaattaacacttgtaggtataaaagaactaaacctgcaaggtaaacgaattggttttacatgcacaccagaaataaaaaaatcagataataaaatagtttttaccgtcaataacgacgaggggaggtatttattatgttctgccgaatttattgtcatagattcaattgaaccatatttagatgaacgatggaaatga

SEQ ID NO: 456383 - DNA, 330 bp, Serratia marcescens
atgtatgctgaaactcgtaatatgacgccaatcagcgtcaacggtgagcagggctttgccaacaagacacagaacattgagctggtggcgcagtaccagtttgagaacggcctgcgtccgtcactggcctatgtgcagtcgaaaggcaaggatatagaaggaataggggatgccgatctggtgaaatattttgatgttggcgcgacctactacttcaacaaaaacatgtacgcctatgtggattatcagattaaccagctgagcgatgataacaagctgaagctcagcaacgatgatatcgtggcggtcagcctgacttatcacttctga

SEQ ID NO: 456384 - DNA, 183 bp, Serratia marcescens
atggcttttgagacgttggtatgtgttgggagctttgaagagatggtggtgggggaaggattattcgtcgctacgctcctcacccttcgggccgcgctgaagcgcgttgtttcgctacgctcaactcgaaccttatcgaagcttctcatccttcccctgtgcggagaattatgtggcttttga

SEQ ID NO: 456385 - DNA, 405 bp, Serratia marcescens
atgagtttctatttaatgttgttcgggacagtgctaggtttctctggcgctacttttttcatatttattatggtgtacttcggtttcacaaagaaaagatatgaggaggttttatcccggtatttatccagtgatcttatcatgccggatgtttacgttgtttattccaagggtggtttttttacaagcctatttgtcgttggatttttcaggaagcttctcaaaaacaaaaccattaagttggggaggggtgccaaaatgccaaaaagttcctatgaatatgtgcaatcattacctgaacctttgaaggcatggataaataggtattacagtatgcatatggtagcggccactttaatttcttctggttttatccttatgcttattgatagtcttgcctcgtga

SEQ ID NO: 456386 - DNA, 1239 bp, Serratia marcescens
atgatgaaagaaaaaaacatagttcttatcgcctgcgggaaggagctttatagaaaataccttcttgagcagctcgcttccgaataccatgtgtggcttatcagcactgaaaatccgacatggcaatcaccattaataacagatgcggtaaagatcagtaactatacctttgaagctatcagcaacgctgttgaagacatacaaaaagactttcctgttcacggtctgatttgctgggatgaacgctttattatggtaaccgccgatgtcgctgaacactataatctgcctacggctggaaaagcaggaatacgcggctgccgtgataaagcactttgccgtaagttattatccgatgcaggtttattgcagccgcaaagtcgattttgccacacactcaatgaagcccaggagtttgctgaacgaataaactatccattggttattaagcctcgggggatgggcggaagtattggcgttgctctggctaaaaatcacgaggagttgattctgcgctttactgaagcggatgctattagccatcagggggcggaagatttccatagtggtgcattgctggaagaatatattgaaggtcaggaaatcagcgtcgatggtatgatcgtcaacgggcattatcagccactgtttgtcgccagaaaacgtattggtctagaacctcactttgaagaactgggccatgtgttacaccatgatgatcctttacttggcgagcaaacactgatcgatgttttagttaaagcgcatcagaccatcaatttccaaaatggcgtgacgcatactgagttaaaaataaccccaaaaggtttcttgattatcgaaatcaatgggcgcctaggtggtgacttgataccgtggttagcaacaaatgcaatgggcatctccccgggactcattgctggtaaaatagcctgtggcgatgtggtggaagcagtaatacataagaatgcaaaaaatgcagcaataagcttcaaatatcctgattttgatatgacggtatgcgatatcaggctgcctgaacctattactaccgaaacagcacaggcctattgcgttcagcttgccgagcaaggagataaactggcactgccgccatcagggtatgtatctcgcgctgcatacgcactatgtctttaccaggatggtattgacggcgaacaattatgccaggcattactcgacgacgtaaaagtgtcaggccagcccatggagaaatag

SEQ ID NO: 456387 - DNA, 240 bp, Serratia marcescens
atgtatgaggtggacaagaaaaacaaaaaacagagggtgcttgaaagcctgacagaagggcttgcgcttgagaaagtatcaacccgagtgaatgttgcatctcccgggatagcgggtaatgcgtcggcgcctgcatatttgagtgacgaggaacggccgtctatcgaagcccgccagcccgccagcctgccaggacaatttttcatcctgagctcacggcagatgctgtcttcctcttga

SEQ ID NO: 456388 - DNA, 936 bp, Serratia marcescens
atgcgattttttattttattgctggggatgtttgcagtaattggcgcccatgcggagccggataatacctgttggagcgatccggtgaatattgccatcgtggatatagcttccgcaccttttacgagtaataaaaaaggtgcggaggcaacaatgcaatatcaaactaatcctagcaggtttagtgggtattgtaatcgcagtgagtcatttgactcaatgactcattatattgatatggggccggcacttataccttcagatattaacccgggatattttaaactcagtgatgacattgacattattttaggtagtaaaggttacggcccagcaattaaatactttcctttggagccatcttattcattaactggtggtcctccaagcgtgttgggggaaaatgttttctacagagacggatttattgtggccggtactggaatagtaaaattcaaattaaggcgggatattattggcggagctattgtggtaccgccagatactgaacttttttcagccttccgggttatgaataagcaaccttatccgccacgccccagcaggccaatggttcaggcgcgtaccaacgggggcggacaggtaataccggtgacgccggagtgttcgattaatcaggggaacaccattgaagctaacttccatacgttacaaacggatttggttcccagccgcagcgatgatgagggctaccgcaaagatattgcgttgcattttagctgtaatattagcctgacgcaggatattcaggtgcagctggtggcggacagcgcggacttttcctcagatctgatccgctccgataataatgctttagggtttgcgctaaaacatcacgggaatctggtaaagccgatggcgaccttcccggtccggcttgaagcgggggggtgggcaatgagaccattaccctga

SEQ ID NO: 456389 - DNA, 1017 bp, Serratia marcescens
atgaagaggttaataggcttgccgttgattcttttctcgctttctatttgtgcggaaccagtggatacctgctggggggaaccgataggtatcgcccgcgtcactatcgacaagttaccctttgccagcagtaagcgtggggagacaataaaggtaagcttctctgctaaaccgggaagttttgctggtttttgtcatttcagtcaggaaacgcgcattgtcggcaatacaacagtaatcggaaagtcactggttagttcagaaatcaatccgggttattttaaattaacggatgatctagatgtcagaatagaaaagtacgattattcggttccgtttagttttagttccgttggggcgaataatatcattgatatactggataatttcgttcctctgcctgctggtgagcgagtgccggccaagaattttcaagactctacctcgggggattttgtttttaagttacgccgggacgttctgggcggagtggtcatgattcctcctgatattgaactgtactcggtttatgcaagcgtgcagcgtaaccagagggcaagtaagccaatataccaggtgaaaacgcaatcatctgtgcaaattataccgataccatcagaatgcagtattaatcagggtaaagccatcgaggttgattttggcaatataaaaacaacctctattccggatgacattaccaaaagcgagacgggctacgtcagagaagtggcattgaattttagctgtaatagcaagctgacgcaggatattcaggtgcgactggtggcagaacctaccgacttctcaccagatgttattcgctcgaataaaccacgattggggtttgtgatgaagcataataatcagccggttaagccatggagttcgtttcgctcccggcttgagggcggtacgggcagggaaatgattacactggctccgatcaaaagccccgggcttactttgcaaggcggcccgtttaacgcgtcggctaccctgattattttttcattgtaa

SEQ ID NO: 456390 - DNA, 432 bp, Serratia marcescens
ttggttcgctacggctgccaatcggacagcgatgacgatgcgtttgtctcactgctgcatgagaacggcgtacgttcccgcctgtggatgaacggccaggcggcgcagaacggaccgcgctttcacctgctgggcagccggggcggctatacctgctggggcctggataaccaggagccgtcgctcgccgccggtctgttaccaagcgactcgcaatatggcgtcacgccggagccggactgggggacgctgagcaatggcgaaactcgccatgccgtaccgcatcagcgcgggaattaccccgcgttttatcagcagctggccggcgccctgctggacggcggcccttccccggttgatgccggagaagcgctgacggtactccggctgatcgacgatctccatcaacgctttgccgtccgctgcgcctga

SEQ ID NO: 456391 - DNA, 318 bp, Serratia marcescens
atggaaattgctgagatcgccggacatggtggtattgccggcaaaattagctatcgacgcatgtccctcgtcgtccctgacgctgttgacaaactgatagtcatccgcagtatggttgaagatgagggagttccagcgcccgcccaaatacgtatcccgatcaaagaagacgacaatattaggatccaatacgccgggcgcctgcgcttcccccagggtaaaaatatcccatcctttctccaccacatcctcatcatcctgcgcatggccatccagggtgccacgactgcctattatcaggccgccatggatttctaa

SEQ ID NO: 456392 - DNA, 228 bp, Serratia marcescens
atgatatgccccacattaccgttaagcagcagcgttccgccgttctctaccgccaacccttgtagtttttcggactcctccacgttcgtgcctacatcaccgtcaatcgttaacttgccgcccttcacgaaaatgcgcccgccgtattgcgagagatcgccggtcagcgtggtctgcccggccacgttggccatcgatccactgccgatgatggtattggcgaactga

SEQ ID NO: 456393 - DNA, 594 bp, Serratia marcescens
atggccgtcatcaccgccgccgctatggccgtcatcaccgccgccgctatggccgtcatcaccgccgccggtatggccgtcatcaccgccaccggtatggccgtcgtcaccgccgccgctatggccatcatcaccgccaccggtatggccgtcgtcaccgccgccggtctctttctgccggatggtcagatcgacgttttgatgatcgcgcgtcaactccgtgtccaaaaaggccgaatccagcaccgcttcactgaacataccgttaacgccgccgccggcggtcagaatgcggtaggtttgcccatcctgatagctggtgtgcggatcaagggtattgaccagcaccttgacgttcttgtcgatataagcgccgccctgcgacctcacatagtcgctgcggccatccgcggcgatatcaacgtcataaaacgcgccctcattgaagcccaaattactcttaatgataaattgaccgatagcgttattgtcaggatccccgggggaaagatggcttccgcgcccgatactcacccggcctgtcgtcgcattaccgcgcagtacactgccgccgcctacgaacaatgccgttga

SEQ ID NO: 456394 - DNA, 1833 bp, Serratia marcescens
atgagtctcattggtatcgaggaaagagcattaacggcagtaactttgggagaaagccatttcagggagttcaaaagtgcacttcaggggccaccagacaaaaaagaaaaaaggcccaccaaagatatttcgaccaacatcgcacaaactcttgttgcatttgcaaatgctgatggtggcgagctgcttatcggcgtcgaagataacggagaaatcactggaatagatgctttcaatgacgctgaaataaacaccctcctggatgcgccaagagttagagtacacacggatactcctttaaactctgtcagaaaaaaactaataacgatagagaacaaaagagttatttatttttcagttgaaaagagcactgaggtcatacatataacatcagatgggagatgcttacaaagaaaggatttagagtcagtgccagtacctcatgaaaatataaaatttgaccgacaagacaaattatccagggagtatgacaggcaattcattgatgctgctaaggtcgacgacctagacattgatcttatccgaacagtatctgatgttattttgaaaggaatgtctcctgagaaatgccttcaatacttgaatttagcagagttcggaactagtaaactcaacttgagaagagcttctttgcttttattttctaaagaatatattcgatggcaccctagattgcaggtcaggattataagagtagatgggacggaactcttaacagggaaaaattataatgttgtaatggatgaagcaataggcgggaatattctaaatcttgttgataagtcatgggaggcactgagaccacatttagtacaaacaaaaattgataaatcggctcgattcgaacagaaaactatttatccagaactagcctgccgagaggcgttgctgaatgcaatagcccacagagattattctcaagaaggtaaaggtgttgaagtatacatcttcaatgacagattggaattcaaaagccccggagcattactttcgaccatcagaattaaggatataattgatcaaacaggggcacatcaatcaaggaatacatatatagcaagagtcttaagagaattaggatatatgagagaattgggcgaaggaatgcgaagaatttatcaactaatgcaagaaaatgaactaacacctccagaacttaggggaagccaagatagttttagtataacattatttaacaaacccatatactcgaataaggaagcatttttcttagagcagtttgatagatttaacttggataaggatatgaaagcagtgatccttttaggtatggatgaggctatattctctgcgcagaatatatgggatgctgtggggattgtggacaccgaacattatagaagattggttgaaaagctttggcgtttaaaaattttggaaaataaagtcgatcgcgagttggctaaaaaaatcagccgtaaagaaaaaataccttttaaaaaatatccacgctattcaatctctttccctagtaaatctcctcaggctcctcaggctcctcaggctcctcaggctcctcaggctcctcaggctcctcaggctcctcaggctcctcaggctcctcaggctcctcaatccgtagtaataaaaaattccgccatcattagtggaaaagtaaagaaagtttcccctaaaggattttttgggtttgtagttgatgagaaaggtaatgaatactacttcagacttagtgaaaataaaacaaatgataagttgaaagttgatcaacctgtaaagttccagataagtaatggtaaaagaggtgatattgcaataaatattacaaattaa

SEQ ID NO: 456395 - DNA, 828 bp, Serratia marcescens
atggataaagaagtgttgccttattttggtaagcgaaccctcaaagagatcagcccaactgacctccgaatcctgtgcgaagaaatccgcgatcgcggtgcgccgtccactgctctgaatgtcagacatctggtcagtaaggtctttgaatttgctattgatcgcggtgttgaggttgataatcccgcattacgtgtcaaggcaaagtcgatcgccacgtttaaaccaaaggagcgggcattaagtgaacgggagattgtcgtgttctttaacgcactggcgcgtaccggcgttgcgcagacgatccagatgtcagtgaaatttgtccttctgacattactgcgaaagcgggaatttcgtctggcgcgatgggagctggtggacagggagcagcagacgcttacgcttccgtcctccatcatgaaaatgtcacgaccacataggatttacctctcacggcaggcaaaggacattctggttgcgctgaatagtgtatatgcgtattccgagtaccttcatcccgggcgtttcagtcccaaactcccactttccgacgctgcgctgaatgctgctattcgttcggggctaaagcaattagcggaagagggggtagagtttgaatccttctctgttcatgacttgcgccgggcagccagtacacttttgcacgagggcggatataacttagactggagcgaaaaatgtctggtgcacgaacagcgaggcgttcgggcggtgtataacaaggaggaatatgcagaacaacgatcatcaatgctgcaggattgggcggatatggtcgacaggtggatagaaaaattcaaatga

SEQ ID NO: 456396 - DNA, 4575 bp, Serratia marcescens
atgagtattgcaggtatacgttccaatcgtggtgatggataccagacactggtagcctttgattgggcgttgacagtcctatccgataagaattttcaatggattgaggtcgactcgataaggtactctgttgatgatgttgtcattggcaaagttgatggctctttgattgcctgccaatgcaaaaaaaatcaaaccgattttaaggcctggacgatagctgagcttgctgatgagctggataaagccttccttctactggctgataatccaaaggtgaatgttcgtttctattcccgcaataactttggcgaccttgcaaaacttaaagagcacagttcatctcaaccagacgaaagcagctatcaacaaagcttaggtaaggcgcagcgggcgttggatgacaatttgtcagaacagttggcgaaaactgcccccagcctttcaacgtttgaattcctgagtcgaaccaattttgtgaccagcgatgatttagaccggatgaaagaattgctacacgaacgtttacgaaacctggtaagcaatactgattctgcattcaatgctctctggatgaaactcgatcaactgggcgcacgtatggatggtaatagcgcgtctactgcggttcagcatcgcctaactaaacacgacattcgcagcattatccaacaggcagggtccacactggttcctcccatggaccttgcaaagatacgtcattcttttatcagtacttctgctattggtcggtcatggctacgggatatcgcggggcaacgtatagtcagcccaattgtggatgaactcattgctgccattgatgcccgaaaaaggtccatcttgcttacgggtctccctggttcaggaaaaacctgtgtgatgcttgcgttgcaggagacgttggaagagcgagcaaaaaaacgttcagatatcgtacctctctttattcaatcccgtgagtttgccgacctgactacatcagaagagcgtcaggcccaggggctatcgcagcaatgggttgaggaagcagcaaggctggctgaagacgcccatgtggtagtagttgttgattctttggatgtattgtccatcgcccgtgaacatcgcgtactgcagtattttcttgctcagatcgaccgcctgctattgatccccaacctcaccgttattaccgcgtgtcgcgattttgacaaacattacgacagaagaattgccgaacgacattgggattgtgaattaaagtgccagccactggactgggacaacgaaattgccccattgcttgatacgctggggatagagacagcgactattgatgctgatactcgcgagctaattcgcaatccgcgtgagttggcattatttgttgagttagcccgaagagacggtagtttcaatgtggtgaccagccaggcactggcgcaacgctatctcaatactatcgtgcttgccgatagcgaattagggtataatgctatacgggcaattgaagctatcgcgtcagaaatgctgaaaatgcgaagcctggtggtgccgcatcaacgtttcactgcttctcaggacatacagcgaaaactgtgtagtctcaacgtattgcaggagacacaggatgggaagctaacctttggtcatcaaaccctgctggatgtgcttgtcataagtggatccattcgtcatggcgtcacattgaatgagttcatacgcagcttacctcctgttccatttgtacgtcccagtatccggagttttatcgctcagttggcgctgggtgagcgccgtgaattcaggaaacaactcaggacgatattgacgggtaacgcggccttccatatcaggcgcctggtggctgaatcgtttgccgaacaaaaacctcaggatgacgactggtcattgatacgagaactacgtgaaaaaaatcgtgaagtttttcaggtggtttatgctgcgggatgttcgattgagtggcatcgtttctggattaacaacctgattccctgcttaaaggcggcccgggatgccgaaggcgtagggatacatgttcatcgtattgctcaatggagtaatgctgatactgaaggcgtagtgtcattctggatggaagcgctgacgctggattggtttgatggcaatggtgttgcggatcagctggcaatgcatctttcaggaattaagtctgaaaatctatcgcgtgttgttccattgctggcacgattgcttgatatgccgcttcctgagtacagctccgttggtgaggtcattgctaattgtgtggcgaccggcgtgataggggatgctttactctggcgttatattacggatggcctcactgatgaggatatactgcaatatagactcgataataaactacgttgccagccccatgaatttgggagcagaaatgaaaacttcctcctgcaacgtatggtgcaatcccctgctttgctgggttttgccttagattcaatagagtactggagccatatcagagaatcacgatatggcgaaccccgtacaggctatcgacatggtttcctggataagacttcatatgaaaatagtcatagccagcgggatatacgccatgtggacagtatgaacgttctgtttaatgcagttgaggttggcattcttcaccacgcaaaaatacactcagactggtggcaaaaaaactgcgaacgtctttgttacaatgacgaaggcgcattgctctacttcggcatacttgcctgtaccgaatcgcctgaaaccaatattgaccttataggccacatgttgtccgaccggtatctgctggagtctgaactttcttatgaattaggtgagttaatacaatccgcattcaagtctctttccgtccctatacaagatagggtgatggcgaatattttgactgtgcgaaatgaatatgtttccgacgaatccagactttggaaattaagggcacaagcaaaattgatcgtaccgattccttgctatttgcgttcattcgaagcgcaggcggtagtggatgcgtatgagaaaaaagcaggagtattgttccgccagcctgaaatccattctcatggtggtattattagagcaccattttcatttgaagagtttctcggtgccagtgatagcggggttttgaaactactggcccactatgagggtcactcacattgggatgattttgatttattggtcggcggtgaacgtgaggtgggctggcaattaagagaggcctcttctcgtcatccttcccgatttttgggcttattatctaatcattgggcggaaatacctgaaagttttcgtgatgacgtcatgagtggggtttccacatatctggcccatcgctatggcaacttgaagactgacgaaacatggaagccgctcgaagaacctgatgcttccctcctggcaagccagatccttgatgaactggaaagacatccaatgtactggaggcatcgacgctctgtggctaaagcccttgaagcatgctcgcatgtcatacatgacccactaaaagcagagcaattaatatttttagccatagattttgcaggactccatgaagaagatcccatcaaaggggactctgtcggtttgattggtttaggactcaacatggcaaaaggtgcagttgccgaagccttggtgatccttgctgataattttcaagagcagggcaacgaatacccaaaattgctggcgcccacattgcgccgtttcgcctgtgacgagcatccggcggtacgcgccatgattctgcgccgcttaccatatttgcaaagcaaatctttcgatttcggttgggatttgttctacctcgccatgaagaatgcaggtggactttggcaaatcgctgagcgatgcctttattatgcgtaccacagacattttgatgtagtaaagcctttattggcgcggctttgcagtgagggatgtggtaaagatttggaaacatgggggcgcatttcggctttagctgccatgactcgacacatcgacttcgatgaatttctaaacgacttaaataccttggacaacacagaggcctggcatggtgcaaccaccgtctggacgaacgctgaaaatatacgacagcaccgggagcagtgcctggcgggtattagtgcgggtttaaatgctggtggcctccatgccctggaagttgcggataagatggtttgcattttccactataaaggcgaagcagtttttgttccgtcagggctgattagtcgttgtttttcagtatttgaaaacgatagcaatggtgagaagaaacaccctcgtttcttcgggtttcacgaatggcttaatgtaatttctcaacaggatccagcgcatgctttagcagcaactgaaatctacttaacctacgcaggtcatagtaaacaacgcttgtatgaccatagtgataatctcactcagttaatgaccagactttttacggaagcagaagaacgcgaggaatctgatcgtggctcaatgctacaacgcgttgtggacatacaagatacactactttccttaggggtgcaggggatagctgattggttaaaagcagcggagcgaccataa

SEQ ID NO: 456397 - DNA, 1185 bp, Serratia marcescens
atgcccattgaactgaataagataccggaaaaacgcttgcttcccgaaccgccaaataaattgagatgggcactgatagttatacttattacgcttatagcaggcggtttttcgctctatttctggccaaaggaagtcgctacccattccagctggttttggtttagcacgcttgtggcgccttttctcaccggaagcgtctgctatgctgcccgactgcgttattacgaaaataaacgcgacgctattatctggtggaaccagttgcaccaggagcggtatgacgagctggtgctttatgggcagcgcgccgccggcatcttgggtaaggcatatatgactcccgggatatgcaacaaactggctgctgcgttaatacagggtaactgtatgttgcagtcgcatttttcctcccgtttgcagaaaacggtaatcagtgcgcaacttgccccgccattaactgagattacccagcggggatatcaacagcgtgtggcgcattttctgagcgatgtgattaagatgctgcagccagaactttccgcactgactgaacctgtgtcagttcgtctacgccatgacggcactctgaataatgtacaaatgctcgctgtctggcagcgtatatttccggctgaatattcaggcggtgaaatagacgttattgctgagggtgatggcctgatatggctggacagttggttagacagcagtaaagcagagctgctgctctctgttgagataaatttgtttcttgatgcccgggatcgtcaggccgagtctgtttcagccatactgctggcttcccccgaatggctggccacacataacgaggaattgattgccagagttcatcgtcccgttatgcggcggggtgagtctacatggctggaagatacggcgcgttggggaaaactttccgcaggagaaagcttcacgctttggcgtgcgcagttaaatgagggcgttctgagcgaaatactgcaagacatggagcgggccggatatttaccaggaatacggaatgattatcggcttgacgatctatttggcaggcctggggctgcggttggaaatattgcgttgctatgcgccgcggagcatgcgcaggcgaccggagaggcgcagtgggtgatcgcgcaggagatgaccccgcaccaagttattgtgcgcccggcatcatga

SEQ ID NO: 456398 - DNA, 1050 bp, Serratia marcescens
atggctgatttggaagaggttatcactactagaaggaactcactgaaagctgacagacttgatatgtcttttggtgagcttatgaatatgtatgaggatggtgacttattcataacaccagaatatcagcgtgcatttagatggtcagtgtttcaacaatcaagatttattgagtccgtgttattaggtatccctattccgcctatatttgtggctgaagatgaaaccgggaagtgggaggttgtggacggtttacaacgaatttcaacaatatttgcattttttggaatacttgaaggtacaccggagaagaataggctgaagctttgtgctggtgaaatggtttcagagttagatcaggtttctattgatgagctgccaatacgcctaaaaacaacaattaaaagggcggtctgtagagtcgagattgtacgttgggacagcaatgaggatattcgttatgagttatttaatcgcttgaatactggagcaagccctctttctgaacaagaaattagaaactgtattttccgctcttacccagtagatttgaatcaggtgctacgtgatgtggctggaatgaaaaatttcgcagcgttaattaacccatcgactaccaaaaaagaggaaatgttccttgaagagcttgtattaagatactttgcgtttaagcattttgatggccagttcaaaacaacagtgcctaatttcctttctgaattcatgcgggatgtttctaaaggagagagagaatttaatttagaagaagaaaaagaagatgttataaatttcgttgcttttcttcatgataattttggggcttcactgtttagaccaaaaggaaattttgctctacatatttatgattcattatcttatgcattacctaaagtgtatcgaaaaatttcaggtcacgagggtgaaataatcaattccatcaataacttaatgtgtgatcaagagtaccaaaatattggcgttgctactttttcaacaacacgtataagaaatcgtatggatagagcacttgaggtatttagaggtgcataa

SEQ ID NO: 456399 - DNA, 615 bp, Serratia marcescens
atgcataaaatagtggaggaaatttccgcgactaatgcttggagagatggggagtttgctaaattcaaagtaaacccccatcaagtagatgaatcactttggtatcgtatgtgcgtgccaatgatttatgcaaactgggaggggtttgtagttaattcacttaagatagtattatcacatcttaattcattgaagctcactcctcctcaaattccaacgaaattagttgttattggcttgggggatacttataggtctttaagtggtaagcaaacttttgagcaacgttgcatgttcacagagagatttagtggattcttaaatgaaacggttaaatttcagacaaaaataacaacaaagtcaaacctgaatagtgctattttatctgagttatgcaatatgtatgggtttgactatagtaaatttgacgagcatgcacatatgctagacagattagttcatgttagaaattctattgcccatggtgaaaactctatcgttcccaccaaagataacatagataattatgtatcgacagttcaaaatatgattgacttgttccttattgaaattgatatttttatgacaaaagaaaaatatttatttcaagaatag

SEQ ID NO: 456400 - DNA, 156 bp, Serratia marcescens
atgggaagaacaaaacattatctgacctacaagaagactaagaattttcgtgagatccaacacctgctgggctacaagaaactggaaagcacggtccgttatctggacactgaagtcgatgatgcattagagatctttgaatcgattgaagtctaa

SEQ ID NO: 456401 - DNA, 342 bp, Serratia marcescens
atgcggctgaccgacgtacagggcgagctggtgtggtcggaacaatgcggggtctggggtgagccgggggtggtgcatgcagaccgggtggccaacccgttgcgcttccaggggcagtactttgatgcggaaacggggctgcactataaccgctaccgctactacgatccgcagaccgggagctatatccgtcaggagccgatagggctggcggggggactgaatttatatcagtatgcgcctaatccgctgacatggatcgatccactggggctgagttgtggtagtacgactgagtcagtattcagggttcaggggggaattccaccgaatgctaaatag

SEQ ID NO: 456402 - DNA, 216 bp, Serratia marcescens
gtgcgcacagcgatgaaggaaaagatcgtcagggtatgtgaagaaaaaatcatggccaaaggcagtcatgtagggctgtcattctatgcttttttcgctaacaagaatgatgatccggagttgttgatggaggttgcacattggtggatcatggagatgaagctggatcattttgagaaagctgaaaagataaaatcgatagtttcagccatgtaa

SEQ ID NO: 456403 - DNA, 468 bp, Serratia marcescens
atgttgattaatgagttaatgaaaaatcaacttcaaaatatttcttggggtgatgtggaagtgcttaaacttccccatgaacttgatgaaatagtttctttgggatttttagaggtaagtgggtgttttttatctaaaaaattatttgagtattgcaaaaataactcactccataattttgaagatgagatcgcttttgaatgctttgtaaactcaatgcatatagatgattatgtaagtgaaaaatacttgcagtattcaatagtattttgtaattcaataattaaaaagtggaatgaaagtcactatggaaagttaaacgtaattatctcgttagatgacgaaacattgctgccaacagttaagtttcattcgaaaagaaaaggtgtttcatggcttgatgaggataatcttgagttaagtattcagcctatactagtaactactaatgaacttaaaagatcataa

SEQ ID NO: 456404 - DNA, 1755 bp, Serratia marcescens
gtgataggcagtacggcgacggcggacaagaaccggctggagacgggaacgctgggctttaaggatatccacaatcaggcggactttaagaccgagcaccagagcgtgagtgtgagcaccagcggcaacgttggcggccagttcctggggaacgtggcgaacaacctgctggtgggcgcgaacaacgaggggcatgccagttcgacgacgaaatcggcggtgagcgagggcgcgatagttatccgcgaccagggcaagcagcagcaggatgttaatgagctgagccgcgatgtggagcacgccaatcaggcgttaagcccgatatttgataaggagaaggagcagaaccggctgcgggaagcgcagctgattggcgagattggcggtatggcgatggacgtcatcagcacgcagggcgatcttatcgggctgaaggcggcgaaggaaaagcatcagggactgagtgcggatgagctgcgggagacgaaagagtaccaggcggcgatgaaggagtacggcacgggcagcgacctgcataaggcggcgcaggcgctgaccggggcgctgacggcgctggcgggtaataacctggcgggtgcgctggcaagcggcgcgtcgccgtatctggcaacggaaatcaagaagcgggtgggcgaagataacgttgcggcgaacgcgatggcgcacgcggtgctgggggcggtgaccgcgcagttgaacaaccagtcgggggtcgccggcgggttgggagccggcggtggtgaactggcggcacggtatatcgccggccagctgttcccgggcaagaaggcaagcgagctgagtgaaagtgagaagcagcaggtgagcgcgctgagccagttggcggcaggacttgcgggcggactggcgacgggcgatactgcaggtggggtgacggcggcacagaccgggaagaatgcggttgagaataatgcgctgaatgcggatcaatcgctagccttcgataaagaactgtcggaatgccggaaaggtgggggtaactgtcagggcgtcattgataaatggaagaacatcagtgataagcaaagtgctgaaaccgatcagaagctgaaagataacccacttgaagcacaggttgttgataaggaagtggctcagggcggtgttgatatggcagagcgtccgggctggctgggtaagatcccaggagtggatgtaatgaccagcgatgaggcaaaggcttacgttcgggagtggaacggccaggatctggcgaatattgatgtaaacagtcctgactggacgaagtttgcagcgttcgcatctgacccggaaaatcaggcagcggtagcatctttggggatgttaggtaaagaccttgtttcgatagcaaaaaataccgttgtgacaaaatctttatttaaagaaatgacggctcaaggtattaaatttacacctgaaaatgttgttggagcagcaagagatagtagtggaaaaattattttccttgagaagggtaattctaaagcaggactacaacatattgtcaaagaacatggtagtcaattttcgcaaataggtgtaccagaggcgcgtattcctgatgtggtaatgaaggccgtcactgatggtaaaatagttggttatcaagggactggcactggtcggccaatatatgaaactatgataaatggtaagaagtacaatatagccgtcactgtaggtaataacggatttattgtaggtgctaacttgcgaggttcagtcaagtga

SEQ ID NO: 456405 - DNA, 333 bp, Serratia marcescens
atgagcgaactagatgatctgcataataaaattggtcagttattagtagatgctgggcctgaaaatgccaagaagattatcgctcgtgcaaatttacctcttgatggtgagtcatgtgagtatgaatatgattatattgatcaggaagatgaaaaagattggtttgtaccagataaattagccagttatgaccttcgtcttctgctggtcgaaatgagaaatttctatatcaagaataatatgactaacggaaaacccgcgtggacttcttgtgaaataaccattgatataccggaagagaaaataaacatcagcttcctgtatgatgactaa

SEQ ID NO: 456406 - DNA, 138 bp, Serratia marcescens
atgattcacagtgacctttctcagtgccgcgtaaacagcgaacggctgttgctgaccccttttagcgcagccgacgccgatgaggtttaccaggcgattacaccgaccctgacccgctttatgagttttgagccgtaa

SEQ ID NO: 456407 - DNA, 489 bp, Serratia marcescens
atgaataatcagaattatagcattacttccgccaggaaatttgagttttatcacgagctctatattgagagtatgttggtgaaactctatgaaagagtgtacatcgctatcatggcgctgcaggttgttgtatgtattattactgcttttggcggtctccaggctaggagcgctgctgtgatgatggctgtattggtcgcatttattatgatcgtcaatccgcaaagaaaggccctgaaagcaaaaaataaagagtctaagtatgtcgaaatgatcgcatttatagaaagttatagcgatgatgaattaattaatcgtatgtgctcgattgctgatgaaacgtcccatggccgagcgttggtcgaaaagtctgcctatctgcaggctgctcactaccttggagcaacagagcaagttgttaagatcaaagagcagcttagccatcgtgataagttggttgcttttttatctggcgggcttcccatgtaa

SEQ ID NO: 456408 - DNA, 1407 bp, Serratia marcescens
ttgaacgttaaaaaaatatctttgtttgctattggccccctaggcgccgcaattattgggtttattactctaccgttgatgacgtggctttattctacggaggatatcggtagggttggtatactaaatattgctatatcattcgtggttttattgttcagcttagggatggatcaagcctatgtcaggcagtatcatgaagagcctgaaaaatcagccttattaaaagtgtcgatactccctgggctgattattttattggtgacattttccgtattattcttcagtccatttagtctgtcttatattctttttgaacttagcgatccaacaataagtgtactctgtgtactgatactgttagcgtgctttatatcccgttttctgtcactgatcttacgaatgcaggaacgaggtttggcatattctctcagtcaagtcttgccaaaactaatgatactgatagtcatcggttatttttcactggcttacaatcagcatgcatttattcaactcatattggctaatgtcgttagttattttagtgtgctatttattttattgtggacgactaggcatgactggttgccggcgataaaggaaaggtttgattctgataaatcgcttgggatgataaagtttggttttccactgatcttgggtagcctggcattttggggtgtgactgcaatggatcgcgttttcctcagaaccttttccacctttgagcaacttgcaatattcaccgttgcggctggtttttccagcgcggcgggtattgtccagagcgtattttccaccatttgggctccgatggtatataaggttactcatgataaagagcaggctattcaccttgttaagacagtatctaaatacatgttgatggtcgttgtgatttttttctccttgggagggcttttttcttgggtagtagactggtttttacctgagaattatcgtgatgttaaatatattgttatcgcttgtttaggttttccattgctgtatacgctttctgaagttaccgtcgtgggtattggtatcagccgtaggacgatatattcaatgcttgcttcatcattggctctgttggtcaatttgggaattaattactacatggttcctaagtttggtgcggcaggcgccgctgtcagtacgtgtatcactttctggttgtttttaattcttagaactgaattctctatcataacctggagtgattttcctagaatggaaatgtatttttttacagggctttgcgttattggcgcatctcttggtgcgctgtttggtgatgccgtacgtagtgagcttgttatctactggctgttggttttagctctattaatcgtcaggaattggcgccttttagctatcgttgcgaagaagtacgttctgacttga

SEQ ID NO: 456409 - DNA, 1149 bp, Serratia marcescens
atgacagttcaacttaaaattattcacctatgcccagatgacaagtttatcgacaatgctatcaatatgtttgaggatgttttcccacgcagtaatttcgtatgtgtatatacgaaaggtcaaccggggaaatatgtcaagaacaggatagattatcatgttggtgtgaaagatgttatttttggtatcaaaactgcggagataatggatgccagcgttgttgttgttcattcattaagcagcgcatggtatcgtactcttgaaaagctaaataaagacattcctattgtatggttgggatggggatctgattactatgatattattgactcccatggtaataacttgctcgataaaactactgtattggagcataaattacagtcaggaaatagaaaaggaataaaaggatatttgcagttattatttgattcagccttgcgtaaagtaaaagttatcgaaagaataaactacttttctcctgtaatacctaacgagtatgccacattaaagtcggcgagaaagtggaagtcatttcctatgcaagctgattggaactatagcccttcgaaacaggagttgtctgattatataaacgtccacgatgtggctggcgatatggggcgtgatatcttgatcggcaatagtgcaaccagttctaataatcatctggaagcatttgacatcattaataaaattaaagtcagtgaccggcggttggttgtgccgctaagctatggaaacatgatttatggccgtgaaataaaaaatataggtgagtcgttctttggctgcaattttgatgcgttgattgattatatgccgattgatatgtatatggaaaagatagcgcattgtggctttgttatcatgaatcatgtacggcaacaggcggttggcaatattattattatgctttatatgggggctaaagtttttcttcgagatgataatccaacttataaatattttaaggaattaggattgactattttctcgatccaagagttggaaagagataagtatcacctagattcccggcttacgtcagacgaggtaatggagaaccgtaaaattctcgacagagtttggtcgcaaagagttttaactgagaaaacaaggatactgatagagaccattgctaattaa

SEQ ID NO: 456410 - DNA, 966 bp, Serratia marcescens
atgaaacaatatggaatactgctggcacctctcctgttgacggcctgtgataacaatttagccgtagagatagtcccagcttccgagcagagtacgcaatacactaatgagctgaacagccttattcaccaggtaaaaagcaatctggtatttgtcgaaggtggtgattttttgatgggtgatttcggtaaggaatatggcccggagaagattcagcttgatcctgagaaggatagcaaaccactacatcaggtccagctaaccagctattccatcagtaaatttaaagtcaccaatcatgaatatcagctttatctgaaattaaataatttacagtttaaaaaagcggatgatttgctaactcaagagttgttagatgcgttaaatacactgcctaatacgcctgcgcatatggattggtacgatgcggagaaatactgcacctggttaggtaaaataagtggtttgtcatttgcactaccgacagaagcacagtgggagtatgcggcccgcagtcgtggacaatttttcatcgttggaaccaatagcggcgtgctggaaatgaagggtattcaacgcggcattaatatttccggaacattggatcgtaaagagtttgctcgagatatgggtctcaattcagcaatcgatacagcaatgccagtagaccgctatccgcctaacccactgggtatttacgatatggcgggtaatggctttgagtggattaatgattggtacgacccgaattattatcagaattcccctgtcaaagatcccaaagggccggaaagtccgatatataaggattatgagggtaattataccaaagtaatgcgtggcgcaggaacttcaggcccctttaaagggttgactgttgctcgctttaagcgtagtccggatactaagaacacctttacatctacggttcgctgtgtcgttaacagcgcacagccgataaaataa

SEQ ID NO: 456411 - DNA, 2331 bp, Serratia marcescens
atggatacgaaaaataaggcaaatgctgagtgccagctgaataagtcggatagtaatattactaaagtctgtcacggttctggcatgctttactttaggccggaaactgaagagattattgttgtgccttcgcaggaggcgggggagtttgaagcacactgtctggatatgatggggcacgttgatgaattccatcaggctaatcatgtttattccgccgccatagaaaagtatgggcaacaaaaacagcagcccggtgtgaatctggattcacaggctgccgaggtggttgccgcagaaaacgatctggaaaaaaagcgagaagacttactggaaaaactcaaggatggtgaaaccagcaatatgggatatcagggtgtggtggaattgcttccgctgcttgatacccgcagaggctcaggtaaccaaagattgggcagacgctatgcatacgccagccagcgctatttttccgaacgttcaggtgggcgctcccaggcaggggcaagaaaaaagtggcgtaccgttactctgaagaataaagacactgcaaccggacagggaagtatttattcggtggatagccgcggtcgccgaagaattgatacagaaaaacttaagaaacagttaaccacggatatattaccggtaataaagcttgagcttaaggactacgttaacctggatgattataacctggataagacgttgtttgactgggcggaaagctggaatagcagtctggttggcagccatacctttgatagtggcgttgaggtatccggtgcggcgcagtttatgcgctttatttccaatgtcggcgccgaagcggagtttaaccctaatgaagggagcgtcaagattaagggtgaggccaaggcctctatggctattgcgtcgggtattagccgtgcagtcttttatatgccggatcggttgggttgggacttaagttatcggccccaaacagaggatgaggcgggtaatacttttcaggcacagacagccatcaatatgggcgtggtgcgcatttacatcgaaaatcagctgattggttttgtcggcgcttctgcgcagctagaggcccagctgcaggtaatggtaaaagacgatgaacagcagatcgttgctggccagccacaggggcggctgccgcgtttttcggagcggcagtcaggcaacagtggccagttttatcagcagatgaaaaaagaagatgaaggggcttcagcctctgcagaggcctttgccggagccagtgtggaatactcgctgaagggggccgtccagtggctgaaacccacaccgcccgcagcgatgggaagtaccgcagtttctaaaacggtgggggagtttaccgattttgccactcttggtgccagtatcgctggtctggcagggattggtgcgggggctaaattcctgtgtacctttataaacggtaaattctgctttaaggttgccgccagcctgtgttgtggtgttggggcaaaaggggcatttctctgcgaggttggggggaaagcattgctggagtttggcagttggctggcctatcagctctttacgctggattatcgtttttttgaattggtggcagaagatgcttttaaaacctttacccgaatgtgcgtgatgcaaatcgccgatttagctaaggatatttatgctgaatttaatgtaatgaaagaagatgtggatgctattctacgtaagtttggttcattgataactactttacttgatgaaagtaaagcgaattttgaggcatctaaaagacgtaatcagttagcaaaaaatattattgctgagccagaacggttattaaactataccccggaggctaaggggattttactgtatctgctaacccgccatggtaaatgggaccatgccgatttggataaccgtggcagcctgttactggatatctacttcgagcgtaaagaggcggtgattcaggtgttgaacagtattcagacccagcgcgaatggcttaaggtgatgtgccatcgcagtaaggatggctctgatttggtaatgggggagtcggagcagcaggtggtggccgagcaggagctgcaattgcgagaatttctccaggaaggctttaatcgtgaccaggatatgaatcgcagggctgcggaacttgcggttctggaactatcagaaatctatggccgcctgaagagtgaacgggaactttcttggggttatgcgctggcgatgaataacacctcttggtataacctgaatcgtgcgccgaatccccacttcccgcagcgctgtgagtttggtccttgtgaagcaacaataacgaaaattgcttaa

SEQ ID NO: 456412 - DNA, 2532 bp, Serratia marcescens
atggattttattaataatgcacagggaaccctctctgggattatatcaaaaggacttaatcgttacggcttggatatcccttcttgctcagctccgctagatgtagagagttttagtggtacggaaggcatgagtgctatctacgaatatcttatccgctttaccagttcggaaaaagatatcgccgcgaaaacgttgcttaataagtcagcctgtttaaccatgaattcaggaggattggggagtttaaccgagcgcaaagtggttcatggcgtaattactcattttgagcgaataaaaagctcggcagatcaaactcagtatctcattatcgtaaaacccttcctggctctgctggataatcaatttcgcactcaccgattttttatcaataaatcggtgccggaggtcgtagagttggtgctgcaggagcacggcctggaaggatgggaatatgccttcacgctcaaaaatgtgtatccgcagcgtgagcagatcaaccagtatcaggaaagtgacctgacgtttatccagcgtttactggcggaagtggggatattttacttctttacccttcaacctgacacgcagacggaagtggtgcattttgctgaccagcagagtgcgtggcaatttggcaagatcctgccgctgaacagcccgtcgggcgcggatgataacggagtggaaagcgtctgggggatcgctgtccggcagtatgttgccgagcgctcggtgacggccaatgattacaaccaccggcaggctcagagggtgctgctgtcggcgccggcggatatgacgtacggtgaggacgaggaggtgaactacggtgacgtttatcactaccgtccgcgccatctggaaagcggtgacaaggccgagccggccgcagaaagcggcaatttttgggcgcgtctggagcatgagcgttttctgtctggccagaccgtggtcagcggcagcagcagcgacgccacgctggcgccggggcaggtgctgaggattagcgaactgacgctgccgcccacgctgccgacggagaccgccgcgggtgtcattatcctgaataccgtgtttaccgccagccgtcaggcggcgctgcaggttgcctggacggcgatgccttacagtgaaacccgctgctggcgtccggcgctgctgccgcgcccgacggtgagcggcacgatgacggcgcgggtgaccagcgcgaagcacaacgacgagtacgcccacctgagccagagcgggttgtactgggtgaagtttgacgccgaccgcgacgacaagccgcagggctatgaaagcatgccggtgcgtctggcgaaaccctacggcggtgatacttacggcatgcatttcccgctgatacagggcacggaagtggcgatagccttccatgagggcgacccggaccggccgtatatcgcgcatgcgctgcatgattcgcgccacccggaccacgtaacggcggacaataatacgcgcaacgtgctgcgcactgcggggctgaacaaactgcggatggaggacaagcgcggcgaagagcatatcaagctgagcaccgagtacggcggcaagacgcagctgaacctggggcacaatgtggatgcgcagcgggcgttgcgcggcgagggggtggagctgcgcaccgacgactgggtgagtatccgcggtggtaaaggggtgtttatcacggcggatctgcagccgaaagcgcagggcgacatgctgaatatgaatgcggcaatcgcgcagcttcagggggcgttacagttggttaccgctctggcgcaaagcgccggcacctccggcgcgttggatgcggatcttgattctcagcagcaacttgcccagacgctgaatcagcttaaaaaggcgggtttgctcttgtcggctcctgcaggtattggcgtcgctacgccagaaaatattcagttttccgcagggcgtaccctgacggcaactgcaggtgaaaatgcggatatgacaattttcaaacgcttgacagttgctgccggcgaggcaatcagtctgtttgcccaaaagatggggctgaaaattcttgccgcccaagggcgggtggatatccaggcgcagtcagacgccatgcagcttcagtccgatcaacagatggcgattaatagcgttaacggtgaaattgtgctcaatgcggcccggggaattacgctgaccagcaccggtggtgcctacataaaaatcaaggatggggcggtcgaaatcggcgcgccggggcagattaacctgaaaagcgccagcattgactggggaggcggcgcttcccttgaacaggcgctggcaccggccgtcattgcggatccgcagtatcagttcccgatgagcggcggttttcagatcgttgacgaggtgactcagcagcctaaagcctggatcgcttatcgtatagaaacggcagacggcaaaattatccgcggcagaaccgataaagatggttatacgcaaaaacactatggtattgattcgcaaaatattaagctgttttttgaatga

SEQ ID NO: 456413 - DNA, 1533 bp, Serratia marcescens
atggtcggtaacgaatatggcggcagcgtacaagattctattaatgcgatcactccggagatgtttggcgccaagggtgatggcaagactgacgacgcagcatccctgcaggcagccattgactacgcgctgaacaatgataaacgccgagtcgttggaatggggaactacacaattaaaactcctctgcggatcggcggcagcgctggtattggcactggcggtgttagcatcaatctcgcccgcctgcgcgcagacgacacttggccggataatacagggctgttcgatgcgaccccgatgatcattatgggaaacgctgcgggaaacgataccaatattgagttgtctattggctacctcgacggcgcaggaaaagccgacggcctgcagccgactggcttcggtttctccctgactcgcatccacttcggtcacgcaactaactgcatccgcgttatcggaaccggcaagcaacaatggtctaacgcctctgtctacatcactggcaatagctggcgcgtgaactggctgggcctgcatcttgagcgcggtacatcaggcacatccccaatcaatgaaggctggaacatcgacgtaggctttacttggtcgaaccgatacggcggtttccttatgcgcggcggcagccagtacgcgaaaattgcgggggatttcgacttcaacggaaactatgtgtctctcctcgaagttaactctttcgccggcgttacgcgaggcatgaccctgaccaacggaactaccgcatgcccagtgctgtcgttctatagttaccggggtaaaaactatatcgcgctggccgagaacaaagttaccgccagaaaccagagttcctacgctgccggggacaccttgacgggtgcgccatccgcgatcaatgtcgtggcggttaccacgccgcaaactaacgccaccgaaaacaactattttgatatttggcacgactttcaaggtgaaccgtttgccgcaatcaatatccgagcgggctattgtggtggggtgtacggcgctctccaacatacttcacgcattttctacaacaataacttcgatggccgaccagataactggcgtgggcttggtgtagcgcattcaggtcagacgctgactatgtatgataaggcgcgcagcgattcagcgctcataacctccgacggtgaaagttttaacattgaccgcaggctatatatgaagctgcgtctatacgaaggcgtgccagttgctaagaccgttccgcgttccgccaccgaatttgtgcacttttatacgttcggtgacgcgtcttatgacaaatatatcgatgaggggtcgatgtatgagatcacactcaaaggtaactttgcgggggtatatggccgctggcttatctttatcaaaggaactaatttacagattgtcgaggaaaaatataacgatactgtgattgcgtatcggttcgacgggctgaactttagtctacgccaagcggcgcagcccaacattaacatgaccattaacatcaggcgagtataa

SEQ ID NO: 456414 - DNA, 2493 bp, Serratia marcescens
atgccgttaatcgaagttcagcgcgtcccgggattaccgaaagagcggtataggctgccagctggatcaagcttctacgattggcttgagcgatcaggtgttcaccgagatgtggaaattctgagaaatggtaaccggatagatgataactcagaactagatttcccacttctagacaacgacgtgatcatcatttatgaccagccaaagtcgggcgccatcggcaccatccttaatccgctagagcacttcaaccccattaaatccacacagaagatcatgtcttcgctgattaagcagcctaatgccaatgctgctagcggtaactcgaagacatcaccgaataacagcttaaaggggcagacgaacatcgctcgcaacggagaagccaagcctgataactacggacaagtacgtgcattccccgacctaattcaagagtcgctttttgaatacattgacaacaacaagcgcgttacggagtggatgaacttcggtctggggaaatatgacatcacatcagttaggtactccgagtcaaacctaggttccctggctggcgcgtcatatcaggtataccaacctggtgaaaacattccgctgatctacgagggtttctcattcgatgacatcgacgggcaagaaattcctggcccgaatgaaagcggggaaataccgatagagacagctacaactcacgacgttgtcagtggtacatacctgaatggcgaagttctgatgaagataaagcagagcagtgacttcgattatttcatggacttatccttgcctcactctgtcactttcatcattaatgtcacgtacaacacaaccggaggtccggttacgcgggatatcactgtttctggtgacatcatcaaaacagaaatcacggacgatggcgctgtaatagaccctgagcacttttacaacttcaccatgggtaacctgaccggcgcggacatatcttcactgccagccgatacggtcatcaacaacacgatattcacactgaatgataacgagtctttagttattggcccgtcgttttctcccgttgctggcgaagagttgtggttgcacttccaagcgttgcttggtgataacgccgctgtttactcattcacaatcaaaaaagttgatgacgacaacgttgtaattcctggcactgagcagacattcactggctctatcgtcaaccctaaagcccctgattcagatacacgctactacacgcataaggtcgtacctgctgcagggtatgggcgttactcagtgagtatcattaagacgaacaactctggaaacgacagtactttgaaaatcgaggcgatacacatcgtcagaaaaaggactgacgttgtgtaccccaatgacacgctggttaccgtcagcgttcgagcgactgaaatagcaacaacgcagcgtgagcgtaaatacaacgctctaatcacccggcatgtcattgggtatgacattggctcgatgtctgtgaattacactccgcgcccatcccgttcttttgctgacgcggtggcacacacgtggctggtcatgggcaagcaaccagagagtagcatcgatctattcgaactctactcaattgctgaaaaccttcctgatgataggctcggatacttcgactacacgtttgatgacgaagacatatcccttggcgatcgggtgcagacaatctgcgatgcggccacggtgacagcatattgggacgatggagtgctgtcattttctagagaccagaagcgtgaagcgccggtgacagtattcaaccgtgcaaacatgaaaactgatggttatagcttgtcttacgacatgacgatgcctggagggtttgatggtgttgagatcacatatcgtaacccagtaacgaacaagcaggcattcatccgctatcgcattgtaggtgatcggattgaagagggggcagcagttaagcccaagaagttcagcatgctttatgtgcgtgactcttatcaggcacgagacagagccatcaaagaagtccgtcgactgctttattctcggataactatggggattacggccctggcagacggagagtggatcaacgtcggtcagatggttcaagttgctgacatttacgataaaaaccagcaatcaggttacatcgttaatcgaaccggaaatgatttcgatacaaacgagcagattgaatggctcggggagatgtacgtcgttgtcactgactcaatcggaaaccctactgcgaaatatcttgcatcaccacgccaggacacgaagtttggtttcacagccgcagttcctaacattccactaaatatctgggatggagaaggtgttcaatcaccgtctcgctacataattgccacgcaagtagaaatggacgccacagaatgggttgttacggaaaagcaacctaatactaacggcacaacatcacttacagtggttgaatacaatgaagaaatgtatgaatacggagttacattataa

SEQ ID NO: 456415 - DNA, 339 bp, Serratia marcescens
gtgctgttctatcgtcacgtgctgggcattgagattcaccagaccccggactacgaagcagggggagatttcataacctgctttgccagtgatgttgagttctggtcgctgaccgggaagccagttgatggcgggatattcgtcgcgtattacggcaacgatcccaagcatgtcggacttgtgctgaatggacaggcttttcacagccgtggcgagggtgggcacattcgcatggataagatgcggacgatagagaaagttttcacaaaagtggagttttacgaatatgccgttaatcgaagttcagcgcgtcccgggattaccgaaagagcggtatag

SEQ ID NO: 456416 - DNA, 471 bp, Serratia marcescens
atgccaacattccgtgaatttaaatctcagcgcccgaaccgtgtgctgtacgacacgatgacattctatcacccgacatttggcagtgttcggcttgttaatcggcagatattccccaagacatttgccggacaggtttatacgccgtgcagaatggatgtgtcggaaagtcaacagagcaatacaccggtaataaacgccacagcaaaattcagccaactggcgaacgacttcaaacagcagttgaaattatggcgaacgtattcacgaattaccccaatcacagccacttatcagagattcgatgcagcagatatggacacaccgctcaaaccatggacgctgtatgtgaaagatgtatcgatggatgatgctgacgtcacgtgcacactgtcgctgcagaatcctatcaataacaatatcgcgtttctctacaacaccacagacttccctggccttgccaatgcttaa

SEQ ID NO: 456417 - DNA, 297 bp, Serratia marcescens
atgtggctgcgtagcccgaactatctcaataatggtgttcactggttcacgatgccactcaacctcggcggatcagggctgcaggagcaggaactccacttcacccagccaccggttcagactagcgacaatgatggggtgataacctggacaggcactgtaattgctcgccacataaaaaactctgatgacgattacgacgatgtcatcgtcgaattagatccgagatgggctggatggcttgacgaaatcgtcacagtaattctcccggaggtcgataatgccaacattccgtga

SEQ ID NO: 456418 - DNA, 3171 bp, Serratia marcescens
atggctggtgattcgcaaattgggaacattgtctatcaagtcgagatggatgttgccaagctggttgacgctcagagaaaggttaacgatcgactagacggcatggatgagcgattcaggaaatcggcccagtcatcagataagttatcatcatccatgaccagactggcaggcgctgttagtgctgcgatatctgtgcagcaggttgcaaaatatgccgacgcgtggacgacggtaaacaacaagctagcaaactcggtcagggttaatgagcagcttgcgcaagtaacccagagggtatttgatctggcacaggataccagagcaggtcttgatgcaacggcgtcactgtacgcgagacttgaacgagcaactcgaagctatgggacgagtgtcgacgacatcgcgagactgacgaagatcatcaaccagggttttgttgtatctggcgccacggctgaagaggccagcaatgccgttattcagttatctcaaggtctagcagctggcgctctgcgtggtgaggagttcaactcagtcacagagcagggtagtcgattggcaaacgccctagcggattccctgggtgtgaatataggccaattacgcgccatggcggccgaagggaagctgacaactgatgtagtggttaaaggccttttgtcacaaggagacgctatcggaaaggagtttgccaacacgacaacaactatcgggcaggctcttcaggtagcaagcaacaacattacaaagttcattggcagttccaccacggttcagtctactgttgccatatttaatagctcagtgatttctctgagcgaaaatcttgattctgtagctgctgtgattgggactgtggcggctgtggttggatcgcgctatgtatccgcactgacacttgcggttgccggccaagtcaggctggcggcatcagcgttcgctgcatcaacatcactttcagcatttggtgcagcagcatcccttgctcgcggtgcacttggtctgattggtggcccggcaggagccgcaatgttggcagcctccgccatcttctatttctatcagaaggcgcaagaggctcgtaaggaggcaatatcacttgctgacagcgtagattcgttgacgagcaagatgaaggatatgtctgccaccgaaatggccgccagtattgccaagttgcgcggtgcaattcctgagttaacagatgtcgttgccgatgctagcgatgcgtatgacaaggccagtgagcgggttgctaacctgcagagggagatcgacaactgggggtatggaactaaacgcgggaggcaagccgctgacgcactaacttctgctatcgacaatcagagcatagctgctgctgatctagaaaaagcccagcggaaccttagccagacacagagcgccataggcattgtcactgcagaaatgaacggccagttcaggcaggggattgacctcctgaagcgccacggcgaagaggctggggtagcatcaggcatgatgaatcagctgggcaaacagattgggtttgccactagagagcaggaaaaatttaatgccgcaagtctgaagatagaaagaccgaaaggtgtacaggattacctggataaactgcaagagcaggtagagctgcagtcagagctgaatgacaaaaagagagctcagctaaaggccgagcaggacgtaagaaagttaggtggaactgatgatgacattcggcttgcaagagatagagccgctgcagagtatgattatctacaggctcagcagaagcagaaaaatgcatcaaaagagtcaactgcagaaggaaagaaagcagcaacacaggctgaatctgttgcacaaaaactttctcacctgaagcaacaagcagagctagccgcaacctctactcaggagcttagccgagagcaggcgatgctccgggcggagcagtcacttggtaaagctgcgtcatcaacccaaatacagcaagcgagggactatgccgctgccatctgggataccgccgctgctataaaagccaggaacgcaatacccgaacttaaggaaactgctgaatataacgctcaaaaatcccagcttgaaatgctcaaaaatgcaaaagacgcgcagggtaatctgctcattagccaacagcagtataaccaggcatcagagcaacttgagcaagagcatcaggttaaccttgcgaagattcgagctggtcaggcagttactccgtcgcaagaggcaaaaggcgctattgacccagtccagcagttagctaatgaaaacgctcagaagctagctctgattcagcagtttgagacagagaaggggcaaatcacccagcgcggacttgagctgatgaaggccgctaacacacagtacgagcagcagaggatagctgcccaatgggaaatatggcgcaatcagaatgctggtaatgaagcgctagctacatcattcgactcccttgccggaaacgcgtcaaacgcattcactggcatggttactggcagcatgactgcggaggatgctatggcgtcgctggctagcaatgccataaatagcctaattaacagttttgtgcagatgggagcagagtgggtaaaatctgcggtcatgggtagcactgctcagatatcggcaacagcagcaacaacgtcggcgtccgtggccgggacggcaaccacaacggcagcaagcacaactgccgcggcagccacaactgccgcttggactcctgctgcaatagttgcgtccatcggctcatttggtggtgcggcggccattggtatcggtgcggtagtggcggcaatggctctgtcatctagtctcgctgggaaacgcaaaaatggtggcccagtatctgctggcagcatgtatcaggtaggcgagggcggactgcctgagatttaccaagctagcaacggcagccagtacatgatccccggcgacaatggcaaggtgatcagcaataaagacatgacgtctggcggaggaagtggcggagttgttatcaatatccaaaactacacatcagggactgttgatgcgcaaacatcaagttccggtggtcaattgactgttgatatcgtcgtagctgattttgataacggcggccccatgagccaggcagtgtcgaggaatcaccaggcgccaagaaaggcaaccagctaa

SEQ ID NO: 456419 - DNA, 246 bp, Serratia marcescens
atggatgaaatgactagtttttggatgataacgattatctcttgggtcattggacttgcaatatcgttctttttggttcgaatggcagtgcgtgcgaatgaccaaataaatctactaaaggaaatcagcgataaacagacgagggttattgaagccctgaccgatagaaacggttcaactgaaaataaaaccacaaagactgacgacgaatacttagaagaggccaggaaaagggccggtatttaa

SEQ ID NO: 456420 - DNA, 669 bp, Serratia marcescens
atgacgccattaactgaaatcggcgagatggtcatcacagacggcgaccgcgattatttcttccggccatcgttggcgaatatgactcgcataggaactcctggcgagattgtggagcgttttactgaacttcaccatagcgacgcaccacgactaattcaggccgccatggaggcatatggcgtcgttcctgaatggctcgttagacacatcaacaccatgggcggcgagtcgataaaggcggccatgtgcgtaatgcaggcgtgctgcgatgaagatgtcggtcatctggtcggcgagctgcgaccgggcaaaacaggcaagcgagcgttcgtgtatcggctcgggaaaataccggtgcacgacatcatcatcttggctcaatcgctcatcacccacggcatcatcggcaaagctaaagttcgccggctgcagcgtcacgaatccaattctttcgtgtcagagttcaacgcgttcgagtacatcagcgcagccaggaaccacttcagcatgcctcgcgcagaggctgaacaactctcgatgacagaattccagcaacttcttgcggcaaaatacccagaccagaaaggcttcactcgagaagagtacgactcggttgctgatgactatctggcgaagaaagccagacgattggccaaggcatcttaa

SEQ ID NO: 456421 - DNA, 918 bp, Serratia marcescens
atgtctaatctgacactggaaattagaccgcaagcctcttgtgattaccatcgtctagttctgccatttaatcacatcaccgttcgtcccaaagtccccgtttacatgttcaaccgcatcccgggacacgggcgagatttatccaagatgaagcgcgacggatggcgcattgtgtgcgacgtcgatgattattggcatcttgactcagaccattacctgtacggctcttttcagaagagcggcatggggaggcgcattgaagaggctatcagagtggcggacgtcgtgactacaaccaccgcagaacttgccgataaaattaagcctctcaataagaatgtccacatcatcccaaatgctctacctttcgacacgggacaattcacacgttctactgacaaatcatccggtagatattttgtgtgggccggaggcgccagccataagcatgacctatctcagctatccggcctgttttggaacgttgagattgccggttacaactcgagatgtagcgaatggagtgcaataaaaaacattgccacaggtgctctattcactcacgagcgacaaaacacgcgttacatgtcggcatatgacggacacaaggtggcactggctccgctgatgcaatcaggcttcaactcctgcaaaagcaacctgaagaccctcgaggcaggagccaagggaattccgttaatcgcgtcagctgttaagccttacttaaacggagtagataggcatgtagtcacatattgcgccagcaggagtgaatggcatgacgctatgaagaggttaaaaagtagtgcaaccatggcgcatgacatgggagagcgcctagccgagcatgttcgcaatcactaccacctcaacgacgctaatcgtatgcggcggcaactactggagtctttcacatga

SEQ ID NO: 456422 - DNA, 633 bp, Serratia marcescens
gtgaaagtcggcgttggtgttatcactatggggcttcgtgacataaatcaaaaaatgaaagagaacacctctcacgaagtttttgtctatacggaccacgacagaaaaggtccagggcacgctagaaatcaggttcttaagcatttcgacggttacgatcacgtattcatcttcgacgatgattgctacccaacaatgaaagggtgggaggagcatttcatcgctgccgggcaggcacagaatattcactacatggctcttcccgaggggttcaagggtcggtacgttggctcccattgtgagattacattctgggacagcgcgctaggctgctttatctaccagagcaaaaaggccatggagacgatcggcggctacaacaccaaatataaccgttatggttatgaggatgcaggcaggtctcggcgagcagttaaggctggactaacaggcaatgcgaactattttggattcccactgcgcgggctgatgtacattcattcagaagatgtatgcggagagaatccagcaccaaacatcagtcatgaagacaagctggcatacattgagcagaaccgcgccgtgtggcttgaagaaatcaacggcagcgaggtcttttacccatatgtctaa

SEQ ID NO: 456423 - DNA, 546 bp, Serratia marcescens
atgaccaccgtctactactcaaccccgtaccgccagggagatataggcggtggcattaacgatttcatttccctgcttcctgatgatgcgtgggtatgcattagggatgcagacacaatgtttctaacatctagcgctcaaagacagataggcgaaatagccaactccaaccctgcatacgatgtaattggttgcatgacaaacaggctccgatcaccatctcagacattcatgagagatgacatgttcgactgtgctgatattgggaggcatcaaaaagtggccgagatgctggagagccaacgatggtgcgaactgtcacctatgccacacggagaagccattgctgggatgttcatgttgtttcgagtatctctgtggcggctcatcaagttccagaaaaaaagcgtctatttcgacaagcgattttgcgaggctgtcgtatcaagtggtgggcgcttagggctggctaatggcatttaccttttccatatgtaccgatggggtcaacctgacccgtttaactacacggagcatttaaagtga

SEQ ID NO: 456424 - DNA, 384 bp, Serratia marcescens
atgagcccagcaatgcatcgccgggtacgggattggttctttgattccggactgactgcaggattcaaaacgcagatgctgcagtggcgagacacgggaacattgacagactcgttcatcgtattccgaccgtcaggcggcaccgccatccaactagacttgggcagcgagtattttgtgctggtcgatgtcatcggcggaaagaacgaagacgaagcagcagacaacgcagtgcagcgcatcatcagctatgtgcaggaaaatccgatgccgaacgactgcatcggccacatccagaatctcggcaacatcccatcaccagtaacaacaaccgagggccggatggtctacaggttgcaattcgttatcacttacggcgagtag

SEQ ID NO: 456425 - DNA, 369 bp, Serratia marcescens
atggccgtgaaagttaaaggcgtcagagaggcgaaggagaacctgaacaggctaatcggcgacatccaaggccgaaaagcggttagggcaattcagtcagcactactcatcggcggcgcccaagctgctctgtacaccccaatcgacacatcgacactcatcaatagccagtatcgcgaactatcagtgagcggcacaatgctgaccgggcgtgttgggtattctgcgaattacgcggtttacgtgcatgaccctaacattccgcagaacttccgccgggcaaccgccaggaaagagttcttgacgaaaggcttcgaggatacgcgtgcgcaaatcgaccgagtcatcaagaaggagatgcaactatga

SEQ ID NO: 456426 - DNA, 174 bp, Serratia marcescens
atggtagaaatgagcatcagaagctcgaaagggtttgagcctgagaaagcggaagttattgctgaaagattaaatgaaatcgcagaggctatccgaaaagacccatcaaaaattatcagatttgaagcggttatttccgaaggtgaagaaactatctgcgttacgctcaggtaa

SEQ ID NO: 456427 - DNA, 348 bp, Serratia marcescens
atgagcagcgtagcgaactggagttacaccgctgtggccacgctatggcgcaaaaccggtgaggatgattacggcaaagcgacgttcgcgacacctatccaaatcatgtgcgattacggcggcgatgctacggctcggttgggcgatatcggtctggagttcgtcgtcaaaaacacgcactggacggagtatgctgaggcgaagcagggtgactacatcctgattggtgcgtctaccgccgagagtccgctggatattgatggtgctgacgaggtgcgtcacatcatccgctatgctgatacgtttgagcgcatcgcagacgacttcgctattattaccggcgtataa

SEQ ID NO: 456428 - DNA, 171 bp, Serratia marcescens
atggcatgggttaacgcatccgaacggttgccgaagccgtttgcctgtgtgtgggtgaaaaccagcaccggcagacaggcgacggcatacgtcaaaagcaacggtgagtgggtcatcaactgtccgaaggtggccgcagataatccaacagtgatggagtggcgagaatga

SEQ ID NO: 456429 - DNA, 381 bp, Serratia marcescens
atggtcgatcctattaatcctgaagatgtaaaagcttttctggcggaacttggatattcaatccctgacgctctactcacccccatcttgtgccgcgttaactcgattatcgactgtatggacggggcaggctatgacgattgtacgcagcaattaatcctgctgtacgcggccgcgctaatgtctgcctcgtccggggctcggaaaattaaatcgcagggtgctccgtccggtgcctcacgctcgttcgagtacggtgatgatgctgtgaagtggctaagaaactcactacttgcgctggacacaagtgggtgcactgatgacctgcctatcacagccggcaacaccgtgggcttctttgatgtcgtgggcggttgctga

SEQ ID NO: 456430 - DNA, 198 bp, Serratia marcescens
atggcactggtaaaagttatttcgaaaaaccttttcgccggtgccaatttccaacggctggggattggctccaatgttgaggtttctgacgaagtcgccgatagatgggtggcagctggtctcgctgagttaatgccagagagaaggatggaggtggccacccctaaacgtgggcggaaaccgaaatcagagggatag

SEQ ID NO: 456431 - DNA, 1092 bp, Serratia marcescens
atgtttgtatactcaaccaataaggccaaagaaactggcaacctggaagttaaccaggcacagttccgcgcgctgaccgctgagcgtaatgcatcagctcaggctgcagctgatttcatttcccgcgctcgtttccgtggcgaggcagaaaatgcccctcaactggatgcagttaatgccgtcgatgatattcggcgcctgtatcgcgcatttgatagcactgtgctgcaggagttcgagccgaacaccgagttcactctactgaacgatctgatgccactgtcacgatccgtccgcatcgagcaatctcgctacgattacgcacgcacaggcggtcgtggctgggcgcacacctcaatgtccgggcagattggcgctgcgctggatgcgcggagctacacgttcgacggcacgatggttcctgtgcacgacagcggcttcaagttcacctggcgagacccaatctttaatagcccgtcagctcttcagtcacagtcggatgctcaggctggcacagtgaaggatgtccagcgtcagtacgtgaattacatctgggatggcttcctagattctgccggcgactatgcggtatttgatgacctgacgtggaaaggtctgcgtaatgatgagcgcgtcgctcaggtagacctgaacgttgacttcacatcgagcgaagaccccgcagcaatgcgcgcagaagcaattcggcttcgtgatgttctgaagttgcagaactatcagtacggcgaacagacatggtatgtgtcatctgcgatcatctccaacctggagcagtacttctccaccaactaccagtcacgcacggtgctgcaggagctgatgctgctgaacggtatcgctgcgatcaaagaagatgctcagttgcaaggaaacgaaatcctgattgtgcccctgcgtgctggcgtaatcgccccaattgtcggccaggctatcggtaccgttgcagacccgcgcccgttctataacagcgactacgtctggcgcacttggggcgccatggggctgatggtcaagcaagacatcaacgagcactactctgtcgtctacgctagcggcggctcaacaacctaa

SEQ ID NO: 456432 - DNA, 429 bp, Serratia marcescens
atggctaaagacggtaagcacgtaatccacgccggtggcgtattccccaacccactcctcaaccgtgaaggcggtgcggctgccagcactcagccaggcactatcggcgtattcactgacggcaaattcacagcatcagcggacggaagcgaaagcgcaatcctgtatgtagctaacttcgactacctgcgctgcctgactgttgacgacgccatcccagaaaaagaactggtggttggcattcacccgctgcccggcatgttcctgaacgttcgtgctgcagccggcacatacaacaaggggcagcccctggcgatcgctaatggccgtgtaacttccggcggtacagctgatgctgtcctgttcgtggaagaagacaaggcaacaactgtagccgcaggtgatctgctgcgcgtagtggtcaagtaa

SEQ ID NO: 456433 - DNA, 1380 bp, Serratia marcescens
atgaagctatcaagcgttcatgttaagtctctcgccatcaattccgccaacatctcaacagaaaccatcgacggtgacgagcatatcgtcattcgtggcgtcgtgcctgtcgtggatgacgttgtgatgaatggcgggctgtatccggcagaagagattaacaagggttttccgagcatagaggggaatccaatgccccttgctcacccaaaaattggcggagaatacgtcagtgccaataacccgagagcggtaaacaaatttcacatcggcgcatgggctgaaaacgtcagaaaagatgccgatcgcgtcgttatggatatgaaactgaataaacgctttgctggtgccagtgatggcgggaggagacttcttgaacgaatcgaaaacctgcaatcagaccctgaatcaaaacctatccacgtttcaactgggctattactcacccgcgagcagagcatcgggaagtcaaagggtaaaaagtattcgtgggttgccaggaatatgcgctttgaccacgtcgcgatccttcttgatgagcctggcgcagcaacacctgacgagggggtgggaattttcgttaatgccgacaacacatctgaaactgtcgatattgaaaatgttgaccttaattcagcggctgattgcacccgcgagggattggttaataaaacgaagttctttttcaccaatgcctccaatttctcatttgacgacattaaccgagcgctgagtcagaaactgcgcgaggggaaaggtgatgactattacgcatggcctgagtctgtatggccagacaaattcatctatagcgaacacggtaaaacctatcaacagaagtacctcatcgacgatgaaggcgaagccgaattcgttggcgaacctgtagaagtcgtgcgcaaaccaactgagtacgaaattaaaacaaacggagattcaaacccgatgaaagacatgatcatcaatgcgctgaaagccgccggtaagccgactgatggcctgaccgatgagcagttgctgacggcgtacaacgaacagttggctaaagataaagagccggaaggtaagccagaagacaacaccgaaggcaagaaagaaaaagagcaggcgcagaacagcgaagaagcaccagtatggttcggcccgttcgctgccaaactggcaagtatcgaagccggcatgaccgctaacgcggacaaagaaaagtccgtcaaacgtgacgctgttaaggccaagttcggcctggatgagaccgcagttaacgcgctggatggcgccgctctggatggtctgtatgcgcaatgcgctacatcacacggcctgtctggtgcattcaaccattcagcagacaacaaatcattctcagaaatgccggagtaa

SEQ ID NO: 456434 - DNA, 720 bp, Serratia marcescens
atgtcagcagcgcaactggctgacctgctggagcgtgtacagtcgattcttgatgaatatctgctggatggtggcagtgcaaacctgtgggtgctggattacatcgccgctgagtatgagcgagggacgcacaaggcgttcaccaatttgtctgcacagtctgactattacgcatcacaaaccacgatggcgcaactgcttggcagccctgcgctacagaaccagattgcagcggcatatgtggcgacatacagcgactggaaagggttgagcgatgctgctcgtgctgacctggctggcatcatttctgatgcgatcggtcgtggcgttaacccgagggaaactgcagcgttaatcagcaagcgactgggtgtgtcgatgtcgcgggcaaagagcatcgctcaggcagagcaggtaggggcgctaagaaaggcgcaatggcttgagaatgactggtcacgcgagcggctagggctaaacaccgctctgctctggcaatctgccctgaaagctacaaccaggcaatggcatgcatcacgccacggcagaacatacaccaccgaagaggtggaagcgttctattccaccaacggcaatcgctataactgctactgctctcagataccggtcattctcgatgaaagcgggcagatcgttaacaagggtctgactgagaggatggcggaagagcgcagccagtggagtaaaggtgacggttaa

SEQ ID NO: 456435 - DNA, 1458 bp, Serratia marcescens
gtgagtgaactaactaatggcgagcagttcctcgtcaacgcccttgctgatgctatagggcggcagcgcatgctgtatgcctacgggcagaacggcaacacgaagcgtacgaagctgtgggaagagttcggctatccgcagaacgtcggttttgaccagtattaccgtgcttacgagcgtaacgccgtggctcatgctgcagtgcataagttgctggattcgtgctgggcggataacccgaccatcgtagacggagatgagaaagaagaatcgaaagaaactagcccgtgggaggcctccgtcactaaactgatgcagcgacactggccgaaaatcaaagacgccgaccgtagaaatctggttggcaggtactctgcgattctgctacagctaaaagacggcaaagagtggtttgagccagtcgatgaggttgccgttcgtcgtctgggcgataaggcactagttaagctaatccccgcgtgggagacgcaaatcaggccgggtaactacgacactgacaccatgtcagatacttatggtcagcccgtcagctacaacttcaacgagcagcctgttggcgatgatggtgcatatgggcctgtgagaagcgtccaggttcacccgtcgcgagtcatcattctgtgtgagggttcggaagatgaaaacatgctgtctggtgttccgctgcttcgtgccggattcaacaagctgctcgacctggaaaaaacttcaggcggcagcgctgaagggttcctgaaaaacgccagccgacagctcggcatccagttcgacgacaagacggatatgggtttcatcgccgaacaggccaagaaagccggttatagcgacctcggcgaagcgatgaacgacaaaatcagcaaactgaatcgcggcactgattcggcgctggttacccaatcaggcgctacatcggtgctatctgtagcggccgccgacccgacgccgacttggactgtcaccgcaaatgagttcagcgccacgattcagtgtccgttcaccatcctgttcggtcagcagaccgggcgcctggcatctgatgaagataaaacggactgggctaagcggtgcaacggtcgtcgctggggtttccaaagtgacgtggttaggcgtgtcatcgagcgattctggacaatcggcatgattgaccctcctaaatctggcgaaatcactctcgcctggtctgaccttcttgcgcctagtgagaaagataagatcgctaacatgcaggcgatggctgacgttgccaccaagacagccacagcgtttggccgctcggctatcactgagaacgagttgcgtgccgttggtgagctggagccgataaaggaagaggaattaccgaatgttccaggcgttgacccgctcaccggagaagctacgaagtccgatagttccgaggaacaaagccgatccgacgcaaagcagcaagcaggttaa

SEQ ID NO: 456436 - DNA, 1011 bp, Serratia marcescens
atgcaggaggtgaagcaggcgattctgtccgtaccttggctggcggctaatttcgacatcggcgagaagtacatccgcaccatcgacaagagcgtgaattacgtgttttgtggcctgcggcataacctagacagcattaagtcaaaagctagaatcctactgtgctgggtggatgaggctgagtcggtaagcgaaaatgcatggcagaagcttagtcctacggtacgcgaagaaggctctgaaatctgggtgacgtggaacccggagcgcgacggtagcgccactgataaacggttccgcaaagaggctggtgacgactgcatcactgtcgagatgaactacacggataacccgtggttccccgacgtcctggaaggtgagcgactgaatgaccagcgccgccttgaccctgcaacgtatgcctgggtgtgggagggcgcttatctcgaaaactccgacaagcaggtgctggccggtaaataccggatcgctgaattccatgatgacctgtggaagcaggcagagcgcattttctttggtgccgacttcggctttgccaaagacccgaatacgctcatccgaaactttatcatcggcaacacactgtatatcgagtatgaggcatacggcgttcataccgagcttgaccacatgccggcactctacgacacagtgccaggctcacgtaattggcccatcaaagcagactcagccagacctgagacgattagttatctcaagcgccaaggattcaagatatccgccgctgaaaagtggcagggcagtgttgaggatggaatcgcccatctgcgcgggttcgatgaaatcatcatccaccctcgctgcaagaacgtggctcgcgaggctcgtctgtggtcgtataaaaccgacagaattaccggcgaggtgttgcctaaactggccgacggtaacgagcactgctgggacggcattcgatacagcctagacggacacattaagcgcaagtcaaaaggcgcaatcttcttctaa

SEQ ID NO: 456437 - DNA, 531 bp, Serratia marcescens
atggcactcaccgacaaacaagaaatgttctgtcgcgagtacctcatcgatttaaatgccactcaggcagctattcgggcggggtacagcgaaaagaccgcccgtgcgttaggttgcgaaaacttaacgaaacctgacatccagagcaggatcgccgaacttaaatctgaacgcaataaccgcgtggaaattgatgcttcttacgtgttgcgcaggctggttgagatagaccagatggatgttctggatattctgacggaagacggcgacctaaagccagttgcatgctggccggcagtatggcgtaccacgctatccgggctggacgtaatggcaatggccggtgatggcgactccaccgcattactgaaaaaaattaaatggccggacaaggtgaagaaccttgaattgttaggtaagcacatcgatgtcaacgccttcaaggagaatgttgaccataagtcatcagacggcagcatgtcacctaagccaacaaccatccagctgttacctgttgagccgaaaccatga

SEQ ID NO: 456438 - DNA, 159 bp, Serratia marcescens
atggcgaccaaaaaggaaactgatcgccataaagaattagccgcgagcttcgcgaccatcctcatcttcattgacgcgataacgccaatatttatcaggctttacccaaacaacatcctctccactatcaaccctaaatttgcttgtgactcgtgttga

SEQ ID NO: 456439 - DNA, 198 bp, Serratia marcescens
atggctaagttaaccgcagaagagaccatgagcagattgacgctgctcggcgccatctctcagctaagtgatgacgagcaagcggagatataccatttgcgagattccattaaggcattatgcaaacaggcctcacgaggcgagtttgcttttattgcgcttggtcttctttcagtagacctgcaggaagaagagtaa

SEQ ID NO: 456440 - DNA, 243 bp, Serratia marcescens
atgaagaattcctccgacaaggataagactgtacctaacaaagaggtggtaatgacaaaacactggaagatcacctgcacaactcaagcgggcgagacatacatcggcaagatgacgcggcagcagcctgagattgttaacggcttcattgcactggcgttagacgatggcgcctggatttacctacaaccggaaaccgtggtcagtatgcactacgagccggtgacagaagagacgacatag

SEQ ID NO: 456441 - DNA, 210 bp, Serratia marcescens
atgactactatcactatctcttacgaagttcctgccgctaaatttgctgagatccaagctctagttgagagccagtccgttaacaacgcaaaccacaacggcgaggtttttaatatcgagcgaggcgatttcaccagcatcgacaaggatgacgctgagtacgtggttttgctcggaaaaattcaagacgtcattcacggatataattaa

SEQ ID NO: 456442 - DNA, 528 bp, Serratia marcescens
atgaaagatcaaatcagcgtgacagaagttccgttccacggggaaacaatccctacgataatcagagatggaaagcagtatgttgcaatgaagccaatatctgaatcgttggggctgcgatggggctctcagtacaaccgcctcatgagggacgacgtcttaaagtcagttgtcttcatcatgaagatgactgcgaaggatgggaaatcctacgacagtgttttcatcccatcgagcatgctaaacggatggctgttcggcgtagcagtgaaaagagtgctccctgaattgcgcgagaaactgacgcaatacaagcgggaatgctacgaggttctccacgaccattttgtaggccagcagcaatcggttatgcaggccatgaactccgtgctttatgagtacaaggttcagaaaagcatcgctagccagtctgggcgcaatctgaataggtggaagaagataaagccatcactgctgacgacaatggagcgactgcaagatgagtcgcaactgaagctgatagcgtaa

SEQ ID NO: 456443 - DNA, 456 bp, Serratia marcescens
atgagtttcccgttaccgcactggaaagccgcaattgtggcgttggtactcggcctgctggcgtatttcgcaatcagcaaccaggggttgcgccgcgagcgtgacgaactgcagtctgcaaacggtcaactatccggacaacttgactggcagaacaaaacccagctggctgttgccgcaatcgacgagagcagaacgagagagctgaacgatgcgaaacgtaaaattgatgatctgcagcgtgatgttgagtctggccgccagcggctgcgcatcagcgccaaatgcccagcgagcaaatcctccaccgccgccggcgtggttgatgcagccaccgccgaactcactgcagacgctcgacaaaattatttccgtctccgacgtcaactagagacatcagacaggcagatcctcggtctgcaggactacatcaggaaagtgtgcttagaaaattaa

SEQ ID NO: 456444 - DNA, 321 bp, Serratia marcescens
atggctaaacatatgcaagataaagaaagcgttgccggtatcagctggctcctgctgctcgttctcgcgtgctggggtggcatcgtccgctatctcatcgacgtcaagcagaaccgggcgtcgtggagttgggtgaatgctatcgctcaaatcgcggtatccgggttcactggcgtaatcagcgggctaatcagtatcgaaagcggcttgagcatttacatgacgctagcggccgccggcatcagcggcgcgatgggttccgtggctctgacatatttctgggagcgcctgacggggattaaaacaaatgcaaatcagtaa

SEQ ID NO: 456445 - DNA, 300 bp, Serratia marcescens
atggggcttgatgcgttaatcaccgcgttcgagttctattttgaagataaccaaaaagtaccactgcctggtgatgtggcgggcgattacgtggatgttccgcttagcgtggcatccaaggttctgatgcttaatgcgttcattgagtccggcttaacccgtgttgagctggccgatcgcattggcattaagaagcaggaagtgaatcgtctaattgatctgcaacacgcaacgaaaatcgatgccatacagcgagcaatgaaggcgcttggcaagcgactagaactcttggttatctaa

SEQ ID NO: 456446 - DNA, 615 bp, Serratia marcescens
atgaggaaaatagacgcaatctacctcctgccgagcgttctacgccaatctgatttgcgtcgggtgtggtgcaggggcaggaaggtgataacgccgtcacagcgtgtgtgggtgcgctatctgctcactttgtggggtggccatctcggcggtgatgattcacctggcggctgcgttaacgtcatcgggcgcctgatggttcgctctgaatggagtgaggacaggtctaagcgtatcgttgagattgtccagcagttgcacgacgaggggtatcggggtgacgagttatttaaacgctcgcgcgatattgtcattcccggggcatcaacaagcaacatcatcgctctcgccaaagaatcagatgatgccgctttcgttgaatcagtgatgagcaagaccattaagcgcgacagcccgatccgctcagttgccattaaacgatattgcgagcgcaaatgcgcgcaagatattgcccggatgatagccaaagaaacctgcgctgacattcaggcagcaagaaagcgcgttatttggtgtgagcagatactcgaagaggaaatgtattatgcgattaagcgtgaaatggagaaagaaaatccaaccaaatccacctag

SEQ ID NO: 456447 - DNA, 192 bp, Serratia marcescens
atgttcaccaatatcccggcggccatagaagaggctcgatttatgaaggcaatcaccggcaagtgtcacgttgtcgtgcagcgcccgggtggagtgatgttcgtcaggcagcacagaagcagagatgtccattttctatatgcgactacgcaagacaaattcggcacagtaaacacagaggtgagtgtatga

SEQ ID NO: 456448 - DNA, 630 bp, Serratia marcescens
atggcgaagcaagcacgacgacgatgcaagatatgccgtgagtggttccatcctcgcaactttaacgagtggtggtgcagtcctgagcatggtgcagtgttcggtattcaggaaagggataaacaacgaaagaaggccatacaaaaagctgagcagcaacgcaaagagcaagtccaagccgagaggcgcagcatcaaaatccgcaagcaagccctcaagactaaatccgactggaacaaagaagcccaagcagccgttaaccggttcatctactggcgtgaccatggggacccatgtatcgcctgtggtaggccgcttcactatggggttcgaggcggcgcggtagatgccagtcattaccgatccagaggtgcagctccacacttgcgctttaacgtattcaacaatcacgccggatgcgtccactgcaaccgcgacttatccgggaacctaattccctaccgaataaacctcatcaagaagattggcgcattccgcgttgaacgaatagagcacgacaacacaccacgtaaattcgatatcgcatacctgcagcgagtgaagtcaatcttcacgcgccgggcgaaacattacgaaaaactacgcaagcgaagactggaggcagactaa

SEQ ID NO: 456449 - DNA, 180 bp, Serratia marcescens
atgaaatgcgctgactgtagacaggagttgatggacgacgaaatttacgtttgcgagtcatgcgaccgccgtcaccagcagcgcgccgacgaagtgtgcggcactgagtttgagattatcgaagcagtgaggagggaagatggcgaagcaagcacgacgacgatgcaagatatgccgtga

SEQ ID NO: 456450 - DNA, 585 bp, Serratia marcescens
atgagagaagaaatatggaggaaagtccatttatcacctcattacgaagtaagcaacttgggaagatttagatccatcgaccacgctgtagagagagaaggttacaaatcaagcttcaagggtcaagaggttaatccattcaaagtcaaaggcaccggctaccttcaggttaaaatcggcagtaaaaaatactcggcccatcgattagttgccatcgccttctgtgaaggaaatagtgaaggatttgtagttaatcacaaaaatggtaagcgtgatgacaacagagcagagaacctagagtgggtttctcaatctgaaaatgtcaaacacgggtacagccataatggaagaaagcctacatccttggggaaattcagtggcgaacacccaacgagcaaggatgtaatatctaccgacatgattactggcgaggaaaggcactacgaggccgcaatggatgcggtaagggaaggatttgatagttcagcgattagcaggtgttgccacggagaaacaagatatcacaaggggagatattggcgatttgcatccaccaaggagggaagccatgagccgccggcgtaa

SEQ ID NO: 456451 - DNA, 438 bp, Serratia marcescens
atgcaaaagcaggtcttctacttacgaagcccacagatacgccagaacctgatagagcaccttaaaaacctaccgctagacgactcaagaccaatcacagtaactatcaacgattccagccgaactttgccacagaacgatttgttccatgcgctatgcactgacgtatctatgcagttgctatggcagcagaagaaattatcgatgatggactggaaagccttgtttgtgtctggtcatgcaatggcaaccggtcgcccgggggaagttattccaggtcttgagggtgagttttgcagcatcagggaaagcacggcgagcatgggcattaagcgtatgaacagcctgattgagtactctcaggcgttggctataagcaatggcgtgaagttgagagacgtaaagtatacaggcgattattttgggaggtcatcatga

SEQ ID NO: 456452 - DNA, 489 bp, Serratia marcescens
atgaaagaactggaccaattcacagtagggcgtttacaggaattcatcgacaagccgatggacaacggttttacacgtaacgaacagatggcgctagccaggatagttctagcagcaaagacggcagaaccgattgcagaggttaggctaggcgattatgacgatgacggctggcaccctgatgccgcacctcacatcctcattgacgggccggactgggctaatttccccgaaggatttaagttgtacggctctcctgttttgaactctccggaaattccggatggttgggtatcgtgcgatgaacagatgccagagttagacaagcgagtgctactacatttcggaacgtacgacggccacatcgaagacggattcatagctgacgatggcaatggcgtatatcactatcttttcgatggagattcgctggctgtaatgccgacccactggatgccactgccagccccaccaaaacaggataaatga

SEQ ID NO: 456453 - DNA, 294 bp, Serratia marcescens
atggataagcaacgagaagaatttgaggaaaaaatctcgcacgattacggtgatgaagcgctgatgaaaaacagcgatggggattatgtctgttggcttacagaggatctttgggattattggcaggccagccgagcggcgattgtcgttgaacttccacatcgccagtctccatgcgcatcaagttatggtgaaggattgtatcttttcccaagcgaatctggagagtgcttggaatatgacgaaacagtcgaggctatccgcgccgccggcctatcgattaaaggggagtag

SEQ ID NO: 456454 - DNA, 264 bp, Serratia marcescens
atggataagctaacaaagatttacgtgactaagtacgcgctgactgatggccctttttctgtcgaagcccgtgtcgatatggaaaagaaaatggctacctgggggcctgttaggaatcggcaatatgcatttggcaaagacttctggtttaccgaatttgaagcacggtcagactgcgagcgccgaagaaccgcgaaacttgcatctatcgagaagcagaccaagaagataaaggcaatgacattcgaaatcaaggagaggtga

SEQ ID NO: 456455 - DNA, 1404 bp, Serratia marcescens
atgatgtctgattaccggcaaacaccaagcagcatcgagtccgagcagtcggtgcttggctcaatctttctggacgcgcagagcgacagggtgcagcgagtattttcatttctgaccccggagatgttctacagccgacagcacgccgtgatttaccgcacggcgcgtgacatgaacggcaagagccaggttatcgacctgctgaccgtagctgaccggatggaatcatctggtgatatcgccaacgtcggcggattcgcgtacctcgcggagctgtgcaaaaacacaccgagcacagcgaacgtaatcgcctatgcaaaccgcgtcaaagacacggcactggagcgtttcgcaatcgagcaggcgaacaagatgctcgaagtgttctacacaccgtcatcactcagcactgccgaaaagttggaaagtatgcagtcactggcaatgcagacggcagagaaatcacgctcaggctcaacacgtggcgcggttccgtttgctgatgcgttcgactcatggctgcaggttgtcgagaaacgactgggtaacgacccgtcggcagttggcatctcaacaggaatcccgtcactggatgagctactggcaccgaagaggctggttaagggatcgttgttcgttgttggcgcccgtccgaagatgggcaagacgacgctctacatgaaaatggctctgcactgtgcgctggaagaaaacatgccagccatcgcattcagtctggaaatgccgcaggagcagctcgttgagcgctcactgtctcaggcatccggagttagctcatcgaatttctacctcgacgggtatgacgacacgcggttctctctggcatccgcaaagggcatggcaatcgcacagagcggcaacctatacatcgatgacactgcaggtctgtcactgtctcacatcgtcgcagaaagtcgcaggattaagcgtgagcgtggctgcgtggggatgattctcgtcgattacctgacgctgatgaaagccgagaaggctgaacgaaacgacttggcatacgggatgatcacaaaggggctaaagaacctagccaaagaacttagctgcgttgtcgttctgctgacccagcttaaccgcgaccttgagaagcgaaccaacaaacggccgctaccgagcgactcccgcgataccgggcagattgagcaggactgtgattattggctggggatttatcgcgaaggcgcttatgacgaaaacgcgaaccagcaggacaccgagttgctgctccgcctaaaccggcacggtcagtctggcgttgtgttcgttgatcagcgacacggggcaatctacgactgtgaccaggcagttgcgagagcgcgtgtggcggaaactgagcgccgaacatcgaagcagaagggcggtttctga

SEQ ID NO: 456456 - DNA, 900 bp, Serratia marcescens
atgagcaacgttagcaatcttgccgaagccagacaggccagaaggcaacaggagacgactagagaggtcggtaaggggtatgccttgctgcatcgtaaagttaaggatttgcccttctacagaacggattctgaggccgtgcacctttgggttcacatcattcttaccgcaaaccatgcaccggcagtagttggcactgaatttggagatatgttgctccgccgtggtgagttcatcacgggcagaagcaagctggaacttgaaaccgggatatctgataaccgcatcaaatatctgctcaacaagtttgagaagttggggatgatcacccgggaatcgaacaggaaatttaccaagattttggtcgtgaaatacgacgattatcagccaaattttgtgccaacagaatgccagcaaagtgccagcggaaatgcagagccagaacggcatagagagaattttgtgccaacagaatgccagcaaagtgccacaaacaatgaattaaataataactcattacctaaaggtaatgagagtgcatcagcagttgaaaaatcagggcagaaaaaaccatcccactcatgccaagacgttgtcgatgcttatcatcgaatcctacctgaatgccctggcgttagagctctgagtgataagcgtaaaaacctgataaaaactttctgggtgaaagccgggaaaattacccgacagcttgacggcgagccattcagcatgaaggcgtgggaagaatacctgacgtatatctcgattaactgccggtggatgctgggagcgcgacctgatgcgaagacaggaaagacgtggcgctgcaagaacctagaatacctgctgagtgacgaggtttatctgaaggttcgggagggtaatagcgatgatgtctga

SEQ ID NO: 456457 - DNA, 153 bp, Serratia marcescens
atggcaaaactaaccccggttgaacaggggaaaacacataaacatatcgttcgtgatcgtttccttggcagctttgcgcagccgtcccggtttcgtatcgagtgggaaaaggttaagcagattatccgaggtaaagaacatgagcaacgttag

SEQ ID NO: 456458 - DNA, 282 bp, Serratia marcescens
atggaaactgcaagcacacgcaagacggcgatgcgcattcactcatcgctactgaacaagatcgccgtaatggggcagcgcaaatttgccgaggcaatgggcgtacatgagtcccaggtgagccgatggaagggcgggatgctcgagacaatgagcatggcgttggcggttctgaattacgggattgctgatggcgagatggcagaactggcgcggcgggttgccgctgtgttggcaccaaatgaaacggccccgaactgcgggaacagtatcgaggcctga

SEQ ID NO: 456459 - DNA, 231 bp, Serratia marcescens
atggatctgaaaaagtacatagacagccttgagaggggtgaagcaaagaagcttgcatcagcactgaaagtatccagttcatacctatctcagatggcgtcaggtagatgctcaatctctccactccgatgcgtcgagattgagaaggcaacaaaaggcaaggtaagccgtaaagacctaaggccaaaagattacctgaaaatctggccggaactcggcttagcagcctaa

SEQ ID NO: 456460 - DNA, 504 bp, Serratia marcescens
atgcctgaagggtctctagacacagaagaaatcgtagttgatgtaaaagaagggaaaggcgaagaagagccttcaaagtacagagtggatgtattggatattgaggcaagcgctgggcctggcatgattgtggctagcgatgtggcagagactgttagccacattgtctatgaaagcaaagaagctcttgagatgtttgggcatcggccagcatcgagcataaaggtgataacagtcaccggcgacagcatggctggaacgattgatcttggcgactacatctttgtggatgtgtccaaagactactttgtcagtgatggtatttacgtgttcatgtacaaagggaagctgctcgttaaacgcctacagatgactggaaacagcctgttggttcgatctgacaacccaagctatgcagactgggaaatcaatgaagacaacgagcagcacctaaaagttgttggcaaggttctttacagccattccatcagaaggcacggctag

SEQ ID NO: 456461 - DNA, 927 bp, Serratia marcescens
atgcctaatttccctacaaatggatcgcagggcaatcttaacctttatccagctgtcgaggtcgttgtcgatggcattcctatgggggttttaagcgatggcactccatatttaactttgtatggattagctaagttatgcggtattgatgaagctccattacgcttatttacttcaaattgggagtcagagagaaataagcctcgcggaaggaaggtagaatcatatctagaacttcgaggtcgtaaaaacgtagaaaaactgttcaccaggactactaataaacagggggtggaaacccacgcttaccctgattatgtttgtatgtcaatattgcaatactacgcctttgatgccaccgggtttgacaatacactagcaaggaatacattcgtcaggctggctgactacaccttaaagcgaatgatctatgagcaatctggttatcagcagccaaatgcagctgtaattagtaattcgtggaatgtatttcagcaaaggataatagccaacgatgctataccaatagggtatttttctatattcagagagatggcggatctaactgtgagactgatcaatagcgagtttaagcttgaccctcactccataccagacataagcgttggtcagcgatgggccgcatactggaaatcaaataagctagcagaatcccatggcgaaagaacgctccatccacacaactatcctgatgatttcccgcaaagcaggggcacccaaaaagaggcatatatttaccctaactcagcacttggtattttccgagattggctgtatacaacatatgtgaacattcatcttaaaacatacctatccaataaagttcagcagaaagctctaccagcaccgcaggctgaacgagtaatccaggcgctacaaaagcctaccctacccactaaaaattag

SEQ ID NO: 456462 - DNA, 177 bp, Serratia marcescens
atgaatatggaaatggcacacgatgcgatgtgcagagtgatcggcgaggcagtgattcagaaccgggtggagggtagggaagtgacggaagactcaatcatcgcgatgatgacgaagcagcagggcggcgagttcgatatggcggtggagttcgctgtggatctgctgctggagtag

SEQ ID NO: 456463 - DNA, 339 bp, Serratia marcescens
atgtcacgcataacagcatttactggcaccgcagcaggtcgccgtcgtgagcgcagagctaatttgcagacgtcagcagcaagcagcgcagaagtgatgcaccgacctactccaagtcgtgcggtgttgacgttgaagcgcagcagcaatcgcgttgagaaggccgtgacgccactcgatttaactgccctgctcgcatatcaggaacagatagataacgcggcagagaagattgagcgcaagaatcagcgcgttcgatatagcaggccgaaaacagagtttggggtgatggcttacggccgccagaagatgcgcgggaagagcattgcactgatttaa

SEQ ID NO: 456464 - DNA, 213 bp, Serratia marcescens
atggaacgatattatgttcgccaaattaaagacgggaaagtcaacggcccttacgcccaatttcccgcaaatgataaagctcaatccctagagcagggcgcacgccacgctaaagcactcggaatacctgctgacgagatggtaatagcatatatcggtaagtggaagggtatggatatcgatccagaagaatttaccgcaagagccagttaa

SEQ ID NO: 456465 - DNA, 315 bp, Serratia marcescens
atgagtgaatttagcggaacgccggggccgtggaagtggtttacaagcaatagccacatgagactgtccagtctgaccacggggcgtgatggtgatgttgtgggcgcatataaggcggctgacggcatggctgtggttaacgttaaaaaggctgatgcagatttaatcgaagccgcgccagacctgctagatgcgctgcaggacatgttagaaaagctaaaagaggaagggatgcaatctggtacatggttcggtccaatttgtcaccgatccgcactggccatcaataaagctctaggggtgagtgatgagtga

SEQ ID NO: 456466 - DNA, 210 bp, Serratia marcescens
atgagtgaatggattaagtgcagtgagcggatgccggataaggatagcaaggttatcgcgtacacaagcttcgggcagattattttcgacatgcactacagatggaaaaagtatgagttagaaggccttgacccatgggtgagcgaatgcactcgctggcaaggcagcgtaacccactggatgccactacctgaaccacccacagattaa

SEQ ID NO: 456467 - DNA, 291 bp, Serratia marcescens
atgaacccattcatgaattacgaccgcacggaagaggcgcgggaaagcaacgcagattatcagcacgctcgcgatgagtgggtgcgtgataaagctgatgaactttcgaagaaatggcctgagcagttgagtatgttcgccaacccgtttttacggatggggttgagcctgcatggcgatgatgcgcaggaagcatacgcggaaatggtcgaaaaagtatgcctggcacaggccgagaaaatggccggagagaatgagtttctgcacggaacatttagagaggtggcatga

SEQ ID NO: 456468 - DNA, 933 bp, Serratia marcescens
atgaatcagcagttagtaactcaggtacacagcctgattaacccgctgaaagctgaatttgagcagatgtgctcagagccgagcataacattcaagcgtgaggcggagtttgcaatgcagattttcgccaacaacgactatcttgccggcgttgccgttcaaaacccagtatcaacttgcagcgcaattaagaacatcgcagccatagggataacgcttaacccagcgcaaaagctggcgtacatggtgccacgaaaaggagctatttgcctcgacataagctacatgggactgatgcacattgcacagcaatcaggcgcgattaagtggtgccagtcggcaatcgtgcgcaagaacgacaagtttatgcgagtaggtatcgataaagctccgcagcatgaatttaacgagttcgacaccatggagcagcgtggtgatgttgttggggcttatacggtagtcaaaacggacgaaggagactatttgacccacacaatgagggctgaagatatctattcgatacgtgaccgctcagaggcttggaaggcgtttaaatcgaaaggcaaatcctgcccatgggttaccgacgaagagcagatgatattgaaaactgtagtcaagcaggcggcgaagtattggcctcgccgtgagcgtctggatgctgcaattgactacgtgaataccgaaagcggagaaggtatcaatttcaatcaggaacgcagccaagagcgcgacgtatcccccgctactctggaaacgctgcaaaccatcaccgacctactcactcacatggataaaacatgggaagaggacatgcttccgttgtgctcaaaaatatttcgtcgccctattgccaaggctgaagaacttacggaggccgaagctatcaaggcccatgattttctttccaaaaaagccaaggtggcagcatga

SEQ ID NO: 456469 - DNA, 684 bp, Serratia marcescens
atgaacccagaaataattctggatcgcactggaattgatgtgctccacgcagagcaaggaagcaatgattggctcaggttaaggcttggcgttatcaccgcctctgaggtttccaacgtcatatccaagccacgcagcgggaagaagtggtcagacatgaagatgtcctacttccatacactgcttggcgaggtatgcaccggcgttgctccggatgtaaatgccaaggcgctggcgtggggcaaggagcacgaagagtcagcacggatgctgtttgagtttaccaccggcgttaacgtggctcaggcctctattctgttcaaggatgacacgctacgtactgcctgctcgccagatggcctttgcagtaacggctacggcctagagcttaaatgccccttcacctcccgcgacttcatgaaattccgcctaggcgggttcgacgccatcaagtcggcttacatggctcaggtgcaattcagtatgtgggtaacgggaaaggatgcctggttctttgcgaactatgaccctcgcatgaaacgtgagggtattcaccacgttgtcgtagaacgcgacgaaaagtatatggccgattttaacgaaatggtgccggagtttatcgagaaaatggacgaagctctggcagaaattggctttgtctttggcgaacagtggaggcgctga

SEQ ID NO: 456470 - DNA, 414 bp, Serratia marcescens
atgaccaagatgacatatgacgaaatggccgcgcagcttgctgcggtggttgctgagcgtgatgcgctggctgaacgagccgatgcgctgaaagcagcagagcagacgctggaacgtgagcgagaaaaatcccggcgggttatgtcggagaatcatcagcaggcgcagcgcatcgcagagctggggcggtatgcgaaagagcgtgatgcggagaatgaaagtctcgccatgaccgtcggaaaactgcgttcaaagctggctacgccggtgcagcctcccgatgacggccgggatgattgcatcgatatgtggccggggaattgctctgacgattttgatactggctacaagttcgggctttggcgctacgagcagaatattcgcgatgcaggcttcacggtaaaggaaggataa

SEQ ID NO: 456471 - DNA, 543 bp, Serratia marcescens
atgaatataccgctgccaagtcgtgaatatttatcatctagactcacttaccacccagagtctggtgaatttatttggaagtttaagaatgaaagtaattggagagataaatcatggaacaaaaaacatgcaggaaatatagcggggataatatgcaagatatatggctatcggagaatattcatcgatggtgttcattatcgtgcaaatagagttgcatggatgatggctacaggtgaagacccgggggattattgtatcgaccacatagatggagacaagtcaaatgattcgctcgcaaaccttaggctcgccactcatgctgagaacatgagaaatcgagaggcgcagaaaaataactcttcaggaatgaaaggaatttactggcataagcgagacaagaaatggatagcgaggatatttgttaaccgaaaagctaagaacctcggacgattcaatacgccagaagaagcgtttgatgcatataaaaaaatggccggtaaatatcacggtgagttcgccaagcatggagatgaagcatga

SEQ ID NO: 456472 - DNA, 537 bp, Serratia marcescens
atgacaatcacaactaaagaattgcagcatatcgtagaaaccgatcatgtcctgtgtggcgatgctgctgcaatggcaaaagaactgctggccgcgcgagaggcggtgccggtgtatcagatgcgcttactcgacggcagcccagagcaaaacatctgggcggaagtaacccatgacgaatttaacacgccgcttaaaaacccggatgaatgggagaagcgagttctgtatacctccccgccagcgccagcagtgccggatatatctgagcttgaggcaacactcgcttggattctcgaactgccggtgccgacctatcgggccgcacattttgcaaaacgcttgagcgcagtgatagacacctgccgcgccgccatgctggggaatggcgactctccggaaatcctggaaggttggaagatggttccggaagagccgacagaatcgatgttgctcgttctcggaatgacaggctcgtttgaatcgatgactgcaaagtaccagaagatgctggcagcagcgccggaggtgaattga

SEQ ID NO: 456473 - DNA, 237 bp, Serratia marcescens
atgtcatacaacctcggcaatctgccaaaagatgagatggacaaggtaaacgtggatatggctgcatccggcgtggcgtacaaagagcgcatgaacatgccggtcattccggtgcgggtcgaagagcaacagcctgagcatctgcgtgaatacttccgcgaacggctgatgcactatcgtggagtcagcaagcagttcccgggcccagcattctacccagcggaggaaactaaatga

SEQ ID NO: 456474 - DNA, 288 bp, Serratia marcescens
atgattatggattttgttgtctttgggcatggttacgacggtgagaggaaagaagatgactatgaagggggaggaactgttgaattcttccgccccattggtgttggagctctgcgtgttggcggcggcgggttcgttggccaaccgttagagaaggtttccttcttagtccgcgagcacgaatcatctatcaatggagaggtgtatatgctggcgatagaggatggtcttatcccagaagatgtggatataaaaatattgcaatccatggcaaacccaaagccgtag

SEQ ID NO: 456475 - DNA, 186 bp, Serratia marcescens
atgattaaagagcatgaattacgccttggtgcgtttagcgtttacgcaatagccgatgggcgggaagctgcgcagatgaacctggatgggataatcgaggcggtgaagacaggccagccatgctacgtaactggtgacacgctggaagggttcggcgaaataagtctggacgacctggtgaattag

SEQ ID NO: 456476 - DNA, 927 bp, Serratia marcescens
atggcaataacggaggctattgcagcaaatttggaactaatgccaaggtcggggccgactctgcatcagagaataatggatgatgaaactgttacattccacaaatggctagataagtacgatagcatcgttcaagcgagaaacctcaagccatcaaccatgtcaaatcacagaagcaagttgcgaatcttccgcgatcacttcgatgataaagctgtcagcgatttttccacaaaagacattgcggcgtttataaatagctacgtagaacaaggaaaggctgcaagcgcgaggctaatgcgtgggacgcttctcgatgtattcaaggaagctattgctgacggtgtcattgactccaacccggtggaggcgacgcgtaacccaaggtcggaggtgaagcgatcaaggctatctcttgatgattttttatccatcaaacagagcgcatctgcccttcccctctggttttccacggcaatggatatcgccgtcattaccggacagaggatgggggacatatgcaacatggggtggggagatatttctaacgacaggcttctagtcaagcagaggaagacaggtgcgatgatagccatccctttgaatctggcaattgcagatttgtccctgcgcgatgtgatagcgtcctgcgataagaatggagatcatatcgtaactgccaggggtggcggaaaagttgcagaacgaacaatgtcggattatttcacgaaatcgcgtaaactatccggcttgtcgtggcccggcgaacctccatcgttccacgaaataagaagcctttcggcacggttgcatactgaagcgcgagggagcgaatttgcacagcgtctgctaggacataaaacagcagaaatgacagcccgctatcaggactcgcgcggcagtgaatggcaagagcttcagttgtga

SEQ ID NO: 456477 - DNA, 201 bp, Serratia marcescens
atgattggccatatctacggtctggccaatgatttgcccattctggagcaggttgaatttaatcatgaccattttaatttcgtggtcggtagtattggtgccagtaccggtaatatttctcagtccatttgccgtttcagcgaatgtaagaccagtaacttcaacgtctttgctaatgttttctgcgaggacagaacctga

SEQ ID NO: 456478 - DNA, 381 bp, Serratia marcescens
atgaatacgcaaattaacttccgcactaatgttttcgacctcaagacgtcacaggacgtgcttttctacctttgcgcgattgaaagcgagctctataccgcaagagcctatcgacgactcggactctgccaggaacggaaagcgccttgtgagctgaccgacctggaaaacatcgttgtcagtgtcggtgaggcttttggtttcttcctctacttcctgcagagggatgttttgccgacgttgtctgaagctggccgggaagtattgagcaacctggaccgtcttggcaacgacgccggcaaagaagcgtgggcgtggagcatgtccaacggcaaggttaacggtgaagccgatgaagccattgcggcgctcggcttctga

SEQ ID NO: 456479 - DNA, 417 bp, Serratia marcescens
atgcgtgatgatattttgatgacggtagtatcgattaaacctgtttatgaaatcattctgggaagtgatgagtgtagtgaatttgtcattaattttaaatgtgtaacaccgttgggtgaatccgatacatgtgcaatgttggcaagatattttggcgatatttattttgaggagggaaacgatgacgcttttatccctaaaggcggtgtatttgatatgcacggtgtaatcagagttccgccctcagagaagacggaactgattgctggtactgagttctcgatccctatttcagcgacattgctgcaatccctgaaatcacagacatacagtgcagatgataatggcgagagtatggataattggtttggtgacttgtttgatgaaaacaataacttgataattaaggataagtag

SEQ ID NO: 456480 - DNA, 921 bp, Serratia marcescens
atgagcagaaagacggcgcgttcgaaggtcgaacaattcagacgtgattttatcacccaggctcgcgaagcatcgggagggtatgccagtactgcagatagaatgaggatcgccagatactttttgaattatttacgagaaaacggtatccagctgcgtcataccgacagtattaagacccgtcattttgtcggttacttgcaaagtcgaaaggagcaagggatctccgtcagaaccatacagaatgaacggtctgcaattcggggcgttttattgcgtgggggacgttacaaacttgcagatcctgaaaatcccttgttaagtaataaagcactcggtcttgagccggcaagtcgtgacgggacaaagttagcattgacacctgatgaatttaataaagcctttcaggccgtggaaaaaaagaatcccggagtagctgctgccatgcaactttcttatgcactggggctacgtacaaaagaagcagttgaagcctgcaaatctgtacctacctggaagcgtgcattggaatcaggtcaaaattcggtgcgggtagtttttggtactaaggggggacgtccaagagatactgttatccttaatcgtgaattggtcaggtcagcaatcagctacgctgaaaaaataatggataagcaagacgggaaacttgttgatcgccctgatataagaaaagcaattgatacttatcgctaccaggttcgtcaagttggtttgacaggaaaaaaagcaccacacagcatgcggtatcatttttcacaagaggcaaaatcattttatgagcgacagggatataccgaaaaggaaatttttgcgcaagtctcaatggatttaggccatggtgatggacgaggtaaatatgtcaggcaagtctacttcaaaggcgcacctgatgatgaataa

SEQ ID NO: 456481 - DNA, 888 bp, Serratia marcescens
atgaaaaaaatcggattggcgattgcgttagggaaagatgccaatagccatactcaaacctttattgaggctattaattatagcctcaagtatttccctgaattcaaaaaaaacacgttgaaaattgtcaacgatgaaaaatcgaaaacaggaggagaacgtgccgctattgaattaattgaatggggtgcagaggtggttgttggtcatttttccagttttgcagcactggcggcattaccattatacgtccgtcaatccatccctttgatattaccggcctcgacagcatgtgagttttacgagttcaacaaaattaacaaaaccgaggtgttgaaataccaaaaagatgatgcagccttgatggcctattgcattgatgacagcattattaacagtcagggcggaaacgtttatgcggtggtgcagaataacccttatgcaaatcggatgatgggccacttccctcaattggtcgatgttcggattatccgagaactacctgctcgagccgaaaaaggagacacgtttattatcattggattcagtgagtttgcgtcgagcatcatcaaacaactgtctcaaacacaggtctataggatcctgctggttgatgactcagatagtgttgaagcacataaatcatgtattctacggcctcaacgactgtcgcgtgttcgctcggtatcacatatttctcagcatagtatgaaacgcccgtactggaacgaaactttgctcgcactatcgctggctagcggcattacgccgcagcccgaagctgcaaacggagggagattaagtttcaatacctaccttggattacaggacttcgataagcacaactgctacgacgattgcatactgatatccgaagatgtggactag

SEQ ID NO: 456482 - DNA, 1056 bp, Serratia marcescens
atgcgtcctaacatcgccatcatcggtgccggtattaccggcgtcatgaccgcgctggcttgcgctcgtaagggcgcaagcgttgagctgtatgatgccgcggcaattccgaacgccaccaatctgtcgtgggcgcatggtcgcctgtggaaacatgtacacgaaaacaatgccgcgttgcaatcgctggcagcccactcgcttactttctggcgccaattcatcggcactggccataagacgtttggttgccagacacaatccattcgtgtggtagatgacgctgattgtcgtcgcttagcgcagctttatgacaccttgtcgataggttacgacattcaggatcctgtgttgtcggtacaaaacagcctgttgcgcttgcccaaagccaatcggcggatatttgtcggccatgatgccattctcctcgatgcacaaaaggtatatgcacatttgtgtcaggcgttggcaaacacagatacgatcgtgttgaaaccgcatacgcgcgtggagctcaacaccattcgagaggggagacattttagcgttaacggcgagcgtaaaagttacactgcagtgatttgcacggcgagtcgccctctcatccgacacattagccgatcaggttccgttccggtaccgcaataccaggtacaccttgacgtgcacctcaacgatgcccgggcgtacttgttaaagccagtgctgacgatgggggatgagcatcgttcatggtgtgtgccgtcgccggagcgccgggtgctgaaagtgagcgcaagtcgattttcctacccgatgccaccagacagtaacggcctgcaggcgtgtaagcagtatttgcttgaccggttgcgcgtcaaatatgaccaggtgggtgttgccgtatcgccctactttgaattgccgactgaaaagcggcaaaacaccgcttattggggtcggcatgacatcaccggatgcattgccgttgaagcgtgcgatgcctctattttcaagatcgccccggcgttgtccgagcagatcagtcagtatgtcattcacggagttaacgaatga

SEQ ID NO: 456483 - DNA, 1245 bp, Serratia marcescens
atgcaacacatcgacctattaatgatcggctgcggcccgtcaaacctctctgtgggtgtcgctcttgaagagtgtactgaagcccataatattagatcttcccttattattgaaaaagatgcttctgtttgctggcatcgaggaatgttatttcccgaagcacagtctcaggtctcctttctgaaagatttggtcacgcagcgcgatccaaccagtcgattcagttttctcaattacctgcataaatcgaaacgcctggacagctttataaatctgcagacgtttaacccctatcgtaaagagatttcggattatttgcagtgggtggcagataacttggaaaaaactcaggtcgtctacaacagtaaagtgacagaggtgttgcctgaactaacgccggaagggaaaataaccggctggcaggtgtttgttgaagatggagaatgttaccgcgcaaatcgccttattttcggggcaggtcgcgacctcaatgtaccagccgtttttgaaaatgtctcacaggataatgtgatccacagcgctaatttcttgacggctcttgaacatatgagtagtcaaagaattaataacatcgcagtgatcggtggcgcgcaaagcagcgccgaaatgtatcaatcctgcatagagaatttcccgacggccaatatcaccatgatcatgcgttctattggattggtgaattatgaaggaagtcaattcaccaacacgttattccagaatgactacatcaacacgtatttcaattgcgataatacgacccgtgaaaaaaccttggcggccatgcataccaccaattattccggtgtggcgccatcaaccttgtcagggctctaccgttttcattatttgcaagatatgcgcggtgaaaaccgagttgcaatgttgacgcaatgcgatcttttacatgcggtagacgatgacggaggtgtgttgatcacctggcaagataacaaaacgggccacactcattctgcacgttttgacgtggtgttgttggggacgggatataagaataagacaccgacactattcgaaaatttgtcaaatcaactcgatatcgaacagatctgtgtcgaccgtaattaccgtgctgtcctgccatatgcccccggcgtctctctgcatctgcaaggggttaacgaaaatacacacggtattgcggattctttgctgagtgtcctggctttccgttcaaaagaaataattgacgacatcacggactga

SEQ ID NO: 456484 - DNA, 198 bp, Serratia marcescens
atgatgcgctgtcctttctgccgcagcggcgcacatacccgcaccagcagctatttaacagaacaaaccaaagaggcctactaccagtgccagaatatcgactgctccagtacgtttaaaacacgggagagcattgaatacgtgatccgacagccactgccgctaaaccgttacggaaaccagcaccacgtacattga

SEQ ID NO: 456485 - DNA, 144 bp, Serratia marcescens
atgaggctgaactttgtgcctgaagagccgcgccggcagctgcaggatcgctatgcacgggcttttatcgccaggtttaagatcatcgagcaaaacgggcagcggcggcttgataatctgcctgttgaaaatgggaagccgtga

SEQ ID NO: 456486 - DNA, 258 bp, Serratia marcescens
atgctgcctaatcgtttaaaagaagcgcgcctcagagcaggtctttctcagcaaaaattaggaattctctcgggcattgatgaagctaccgccagcgctcgaatgaaccaatatgagcgaggaattcacatgccggattttgctttaacttgtaagttagccgaagtactaaatgtcccagcttgctatttttatactattgaagatgatttagccgaggttgtgatgagttggtttaaaggaacaagaaaatactaa

SEQ ID NO: 456487 - DNA, 1146 bp, Serratia marcescens
atgattacctgcgtttcattaccggcgggggggcgcgtcgctcctgcgttttccctggcgttgcaaggcaaggatatcacgcaaaatatcagcaagcgcctgttgtcgttgtcgctgacggacaatcggggttttgctgctgaccaactcgacattgagctggacgacagtgacgggcttgtggtgatgccgcagcgtaatgcggtgttgtcgttgtccctgggctgggagggttcaccgctgacgccgaagggtaagtttaccgttgacgaggttgaacaccggggggcgccggatacgctaactatccgcgcccggagcgctgattttaccggttcgctgaatatgcgccgggaaacgtcgtatcacgacaccaccctgggcaacattgtgacgcaggtagctgggcgcaataaactgcgggcaaaagtcgccgccgagctggacgcggtaaaggtcagccatattgaccagacccaggagagtgacgcggcatttttaacgcgcctggccgggcttaatggtgcggtggcagcggttaaaaatggctatttgctgtttatgaagccggggaacgggttaagcgtgaacggcaagcccatgccgatgtttacgattagccgccgggatggcgacagccacactttcagcattgccgatcgggatgcttacaccggtgtgacggcgagctggttgaataccaaaaagcccaagcctaaaaaggtgaagctaaaacgcaaggctaagcaggagcatttacgggcattgcagcacccgaaggccaaaccggcggggaagaaggcgacgaaaccggctgaggaagcgaaaggcgattacctggcaggctctgcggataacgtttttactatcacgacgttgtatgcaaccaaagccgccgccatgcgcgccgcgcaggctaaatgggaaaagttacagcggggtgttgctgagttctcgttgtccctggcgatgggctgcgccgacatcgtgccggaaaccccggtacaggtcagcggctttaaggcggtgatagacgcgcaaggctggttagtcagcaaagtgacacataacgtcagcggtagcggctttacgactgatttggagttggaggttttactgtctgatgtggattttgatatctcataa

SEQ ID NO: 456488 - DNA, 465 bp, Serratia marcescens
atgatgttaacccttgggctattcgtttttatgctgcaaaccttgccctatcagacgatgacgcggcaggttgaataccgctggccgagtaatgcccgcattggcctgcggcctgcgatgcagtttattggggtggataatgaaacggtgacgctgtccggcgtactgatgccggaaatcaccggcgggcgctggtcgttgatgtcgttgcaactgctggccgaccaggggcgcgcctggccgctggtcggcggtgacggcaccatttacggcatgtttgtgattgagtcgttaaccgaagatagcgcggagttttttgccgatggcagcgcgcgccgcactgagtttacgctcacgctgaaacgggtggacgagtcattgagcgccatgttcggcgatctgcgtcagcaggccagcgctatttatgattcggcatcgcaacgcgttggggggcttttctcatga

SEQ ID NO: 456489 - DNA, 2592 bp, Serratia marcescens
atgagtaatagcctcaagttacaggttttgctacaggccgttgataaggctacccgccctctaaagagtatccaaacggccagtaaaaccctggccggtgacatcaaaaccacccagcaaaccctaagaaccctggacgcgcaggtggccaaaattgaggggttccgcaaggcgaacggccaattagccgtgactaagcagaacctggcggcggccaaacgcgaagccgccgagctggcggccaagttcaaggccactgaaaagccgacggcgcagcaggcgcggctattggcggcggccaaaagccaggccgccgcactgcaaaccaaatataacgggctgcgccagacggtgcagcggcagcgcaatgccctgcatgccgatggcatcgctacccgtaacctggcgactgaacagcggcgcctgaaacagagtgccggtgaggccacggcaaccttgaaccgccagcgcagcgagctggaaaggctgagcaaaaaacaggcgtcgctaggccgtatccagcggtatgcgcaggcgggcaaaggggcggcggcgtcagtgcgcaatcaaagtgcggttggcctgggtgttgcgactgcggcaggctatgccgaaagccggtttattgcgcccggtatccagtttgaccggcagatgtcagacacccaggcgacgctgggattagccaaggacgccaagcaactggcggcaatccgccagcaggcgcgagacatcggcgcaaccacggcattctcgccgacggacgttgcccgcacgcagtccgtattagcgaaatccgggtttaacggtgatgccattctcaaatcgacggaaagcaccgttaacctggcgctggcgtcagatttggatattgccgacgcggcggacattatcaccaacatgcaatcatcgtttaacttgccgatcggggagatccagcgcgttgcggacgtgatgaccaaagggttcaccagttcgaacagtaacttgatggattttggcgaggcgatgaaatacgttgcgccgatcgcggaggccgccggggcaagtattgaggacaccacggcgatgctgggcgtgctggcagataacggcattaagggcagtatggcagggacggcggcgagcgcgatgtttacccgactccaggcaccggtcggccaggcgcaagacgcgctgaatgagctgggggtaagaaccaaggataaaaaaggcaacatgttgccgatcgcggacattctcaaaagtattgataagtcgttccgcaaaaacaggctgggcaccgcgcagcaggccgaatacctgaaaaccattttcggcgaagaggcgatgaaaggtgctatcaagctgattgacgccgccggtaacggcaagttagccgacaaacacggcacggtaagcaacgtaaaaggcgcaaccgaggcgattgccaagaccaaaaccgacaacctggacggcgacctgaaaaacctgtcttccgcgtatgaagatattcagattgaggttttcgacaaacaaaacagcgggctgcggcagctaacccaaagcgccactggctggctgggcgtggcgggtgcctgggcaaagaaaaacccggaattggccgcaacgttgtttaaggtcgctatgggcgtgacggcggcgatcggcggcatggcgttgctgggctttttggccgcgccggtgattgccgggtttagcctgttgctgttgcccgttcgcaagctgggcggcgggttgtggtggcttaccaaggtttccagcaagttgtcgtttaaaggcataacccaaggtgcccgtggcctggggcgtctgatggctgccgttgggcgtatctcattaggcggcctggtaaaaggcattcgccttgtgggttcggcgctgctctggatgggacgggcgctgatggctaaccccattctggccgttatcggcctgatagcgatggcggggatctacatctggcagaactgggacacgctcgcgccgaagttccaagccgcctgggaaacgattaaagacgccaccctgggggcgtgggacacaattacgacggccaccgcgcaagcctgggaaagtgtcaaagcctcgacaaaaaacgcttgggacaatctcaagtcctggctgggtggcaagtggggggaattggtcagcgatgtaaaagccctgccgggtaagttcaaggaagccggtttaaacatgataaacggcatcattgacgggattagcgagcgttggcaggcgctgaaagataagttttccagcctcacggatatgctgccggactggatgaaacccggcgcagacaaggcggaaatcagcgccacggtaacgaagaacgacgcgcccgccggtgcgcgcgtgacgcctgcagcgctgtccgctgcggtgttgtcgttgtcgtcgccggtgatggcctcacaaccggcaccggcgcaaccggcggccaatcctgcgccggtctacttcacgatccacgccgcaccggggcaggatgagaagggcatagcgcgggaggtggcgcgccagttggccagtgaacaacgtaaacaggctgcggcacgccgtagccggatgagtgacggagaataa

SEQ ID NO: 456490 - DNA, 285 bp, Serratia marcescens
atgaatgacatgaaaaacgaaaatagcgtaaccctggattacccgattaagcgcggtgataccaccattacagacgtgcagatcatcaagcccaatgcaggcagtttgcgcggcgttggcctggccgccgtggcgaatgccgatgttgatgcgctgttggttattctgccccgcgtgacctatccgaacctaaccaaagaagaatgcgcgcgcctggagttgccggactttgtcgcgctggccggtcaggtgattggttttttgtcgccgaagtcggaagcctga

SEQ ID NO: 456491 - DNA, 420 bp, Serratia marcescens
atgtataaatttagcccaacaacaaccagtttttaccctgtggcgttgcttgatgattatcgtaaggcggggacattacccgatgatttagtggaggtttctgaatctgtgtatcaggaattcagcggccagccaccgttaggaaagcggcgcggcgtggttgcaggggtgctcgcttgggtagatattccgccaccttcacgggaagaatgccgtcagttggcggagtttcgtaaacaacgcgagatccgtgaggcacaagaggctatcgccccattgcaggatgcagacgacttagggatggcgacagcagaagaaaaagcggcgttgattgcctggaaaacttaccgggtacagcttaaccgtattactccacaggatgcgccggatatcgaatggccgcacatgccagacgcataa

SEQ ID NO: 456492 - DNA, 2211 bp, Serratia marcescens
atgaccaaatataaagcgatagtaaccaccgccggggcgacaaagattgccgcagcgtcagcgggtggcaaacagttgaagattgtacaaatggccgtaggcgacggtgggggcaaactgccaacgccaaccccgacgcaaaccaagcttgttaacgagcgctaccgtgccgcgctgaatggcttggatatcgtgaaaacgtcgaaaaacagcattgtggccgaactgattattcccgcgacggtgggcggcttctggctgcgtgaaatggggttatatgacgaagacggcgcactgattgccgtcggcaatatggcggagagctacaagcccaaactggaagagggcagcgggcgcacgcaaacgctgcgcatgatcctgattgtcagcagtaccgacgcgatccaggtgattgcgggggatgataccgtgttggcgacaaaagattttgtcgcgggcgcgattgccgagcatgagcaaagccgcaaccacccggacgccagcaccacggcaaagggctttgttatgctgtccagcgcgaccaatagcccggatgaaaccaaggcagtaaccccggcggcgctgaaaaaggtcaatgatgccacgctaaagaaaacggctaacctgtccgacgtgcaaaacaaggaaacagcccgccgtaatctggcgttaggcacggcggcaacgcgcaatgtcggtgcagctgccgggcaactgatgaccgcggacgatatcgaacggcgctacctgaaactgaccggcggcactgtcaataaactggtggtaaatagcgggagcagtaacggcgacggcaccccgttgatggtagagggggcggagcatacgccgcttgtactgagccgaaccaatgaccagcccaatctggcgatcggctttcagcgcgcaggcttgccgtttttgcgttttggagtgggtacggataacgagccgcgttggggggttaatgcgaacaataccagcaatgcccgcatctatacgacggacaacccgccgacggcgcaggaaaccggcgcacttaccgatggcgaggctgtgaaaaaatatgccctgcgctccattaaagtgaacggtaaaccgctatccgctgatgttaatttattggccggtgacgtgaatgcatggaataaaaccgaggcggacgctcgctatttgcaagttacgggcgccaaggcaaccggtgcggtgaattttacggcgggcattgagttagggaacacgaaaaatacgcttgagccgggtaacgatggggcgagttataacaactgcaacgtactgttaaaaagctggcaggggatcggtttttataatacctgccagttgggcacccagggaattacgggatatatcaatgtccggggcggcgatttacgcatggtacgtaacatcactgcggacggccagatgatagaggcgggcaagcgcgtttattcgccgaataatccgccgtcgcctggcgacattggggcagtagccaaaagcggtgacactatagactcattgaacgtcaccaaaggcttatatgtaggggaggatattacttcaaacaggacgctatatataaatggcactgatttcacacataaacgcggcgtacatgatattggtaacaatacccgtcaaacaaatggacacaggattataggggcgggtgatttatttgccgatctctatcaatgtgaacgtattgggcaacaccattttttcggcattcacgttgccaatggcggtgccgatgggtggtatgagttccgtaataatggtgagctgcatttaggtggaaactggccgtcactgcatatcggcgacggcactattgtgcattctgatggcaatctacagggggcggcttggggcggtggttatctcagtaattggcttgccgatcgcattcgagaatccgcgcaaatgtccattaacgggacgcaatggtggtacaaagaccatcgtaccggcttgatttttcaggggggatattgggaagggcaaaacactgaaaccacggagcgcgtgccgtttaatatcgcgttacctaaccgagtgcttcacgtatctatcattaacaaaaacttttcgcagggctaccccacgtataacccgcaggtcattgacttgggcggcgagcatgacggcttcagttatgtgcatggcggcaaagaacgcatgatgtattggcaagcggtaggatattaa

SEQ ID NO: 456493 - DNA, 531 bp, Serratia marcescens
atgagtgaccgcctattgcctgtaggttcctcaccgttggaggtggccgccgcagaggcttgcgcggcgttggagcgggtgccggtgccgctgcgcgagctatggaacccggcaacctgcccggtcagtctgctgccgtatttagcctgggcgttttcggttgaccattgggacgagtcttggccggaggataccaagcgcagcgtgattacctctgcttttttcgttcaccggcataagggcaccattggcgcggtgcggcgtgtggtagagccgctgggctacctgattaacgttgcagaatggtggcagggtggcgacgacccgccgggcacgtttcgactggaaattggtgtattagaaagcggcatcacggaagacatgtatctcgaaatggagcgcatgattgccgatgccaaacccgtcagccgccacctgatcggcctaacaatttcccaggtgattgcgggctatgcctatgttggcgcggcctccaccgatggcgatgtgattaccgtttaccccggatag

SEQ ID NO: 456494 - DNA, 909 bp, Serratia marcescens
atgccgactattgacctcagtttgttgcctgccccggacgtggttgaggcgctcgactatgaaagcctccttgcggagcgcaaggccacgttattgtcgctgtacccggaagaacagcgcgaagcaatgagccgcaccctgtcgctggaatcggaaccgattgtgaagctgttgcaggaaaacgcctatcgcgaagtgattttgcgccagcgcgttaatgatgcggcgcgttctgtcatgttggggtttgccaccggtgccgacctcgaccaattgggcgcaaatttcaatacggtgcgcctggttattaccccggaagataacagcacccttccgcccaccccggcggttatggaggaagatggcgattatcgggtgcgtatccagcaagcctttgaagggatgagcgtagccggttcatccggtgcctatcaatatcacgggcgatctgccgatgggcgtgtggccgatgtgaaagcgattagccctagtccggcgtctgtcaccgtcgccgtgctggggcgtgagggcaatggcaccgccagcgccgacctgttggccgtggtggcgaaagcgctcaacgatgaggacgtgaggccggttggcgaccgcgttacggtggtgtcggctgaaatcgtgaattacaccattgacgccgtactctatctgtttccgacgccggaagcctcgccgatccgtgccgcagccgaagcgcagttaaagcgctatatcactgcccagcaccgcctggggcgcgacattcgtctatccgcgatttatgccgctctgcatgccgaaggggtgcaacgcgtggagctgaaaagcccggcggctgacatcgtgttaagcgacacccaggcatcctactgtagccaatacacaatcaccgtcgggggttctgatgagtga

SEQ ID NO: 456495 - DNA, 633 bp, Serratia marcescens
atgagcacacaacccgatattttgcgccgcgtgcgcaacctgatccgcattggcaccgttgccgccgttgacctggaaaacggcgcgtgccgcgttgccaccggtgagaacacaacaggctggttgcactggctgacctgccgcgccgggcgcgcacgtacctggtgggcaccgtccgaaggcgaacaggtgttaatcctggcgctgggtggcgaactggataccgcctttgtgctgccgggtattttttccgatgacttccccgcgccatcggcctctgcggatgcgctgcatatcgcgttcccggatggggcggtgttggagtatgaaccggccagcggcgcactgtcggccagcggcattaaaacggcctatgtgcaggcggctgaggcaatcaccgccgacaccaaggtggtcacggttaccgcccggcagcgcattaccctggatagcccggaagtggtttgcaccaacaaactgaccaccggcacgctggaagtgcagcagggcggggcgatgcgcggcagcattgcgcacagcggcggcaacttttcatcaaatggcattacgctgcatacccacacccacggcggtgtccagaacggcggcggcaagacggataaaccggcatga

SEQ ID NO: 456496 - DNA, 762 bp, Serratia marcescens
atgcctgagataaacccagcagtcattgaactagcaaaaatagcaatctgttttattttgattattttcgttatcgcaagagttggtggaatttcgtttatacttcgactaatcatgcaaccatttaaaattagatttaacgataaagatctcagtgaactggacgaagaaagaagagatattcaactttttagattattaaacggtataaacgtaaaaaataaaaaagatgcaaaggtagtactaaaagcgataaacaatggagatataaaatcatcagacaaattcctaactggattcctcggggtagttggagataaaaaactatcaaaagctgatatatttttcttttcagcaatgacagccattttcttgtcagtctctgtattttttgtacacctcatcccgccatacaagccagggcatgcacttttagaatcaagcaataattcattttttgcatccacaaatgaaataatagataacaaaagaaacataaaagtatccaaagaggattgtcaaaagccaatcacaggaccagaaaataatatcatcaaagagttttgcgagatggtaaattcaaataatgggacttacaaatacaaaattgaaagagccattaatgagactgaaaaagcctggagagtcactgtcagtttctcagccatcatgatattatcaaccatattcatgattatatccggaacgaattacatgagggttaataagaaaatattagaattaaaagaatcaagcaactaa

SEQ ID NO: 456497 - DNA, 447 bp, Serratia marcescens
atgaacgaacttagcccctttgatactcgattggcggggctgctcgccaagctgtcaccgcagtcgcgtaaatcgctggcggtggcagtctccaagcgcctgcgcgccagccagcaacagcatatcaagcgccagcaagcgccggacggcacgccgtatgcgccgcgtaaaaccgccttgcgtaacaaaaagcggctacgcgatcgggcgatgtttaccaagctgcgcacggcgcgctacctgaaagccaagggcggcagcgatgccgccgtggtggagtttgtcggacgtgtccggcgtatggccgaggtgcatcactacggcctgcgggataaacccacgccgcacagcgaggtggtgaaatatgaggcgcgcccgctgttaggctttagtcatgaggacatcaaacagattgaaaatgtagtcattgaacatttagcctcctaa

SEQ ID NO: 456498 - DNA, 477 bp, Serratia marcescens
atgataaaaccgcaacaactccgcgctgagctaacgcgctgcctgccctggctggcacggaaccccggtaatttaaaggtgcaggtcggcaacggcagcgttgcggccacgctggccgcgtcactgtcgcatgagtaccgttacacgctgagcctgttgtttttggactataccggcgacacggatttaatcatggtgccgatccaggcgtggctacgggaaaaccagcccgatattttcgccactgaagaaaagcgctgcaccgggctgacgttcgcgaccgactttaacaacgatgactcgtatgattttaacgtcaatatccagttaactgagcgggtgatcgtgaaggaacagcccgacggtgcgctacacgtcgaacatgtgcccgaacccccgttaccggagaacgtgaccaggccggtaaaactgtatgtgcacaatgagttagtgagcgaatggcatgaacgaacttag

SEQ ID NO: 456499 - DNA, 282 bp, Serratia marcescens
atgaaaaccaggtgttacgtgattggtttaacactgctttgcctgctgacgttgcccggctgcaccagcgccccgcattcagcggcgccgcagattatttacgttggctgtccgaaagtcaccccatgccagataccggccagccagccgcgcactaacggcgacctgagcgacgatgtgcgccagcttgagggcgcgttagcaacctgcgcgctacaggtcgatatgattaagcaatgccaggataaacacgatgataaaaccgcaacaactccgcgctga

SEQ ID NO: 456500 - DNA, 516 bp, Serratia marcescens
atgaactcaaccgctaaacgctgcgccgtcgccgccgtgctggcgctggccgcgctgctaccgcaatacagcgccgtgcagacgtctccggcaggcttgcggctgctggccgattttgagggctgccagctatcgccgtatcagtgccaggcgggcgtctggacaagcggcatcggccacacgtcgggtgtgtcgccagggaaagccattagcgagcgccaggccgccgttaacctggtgggcgatgtctaccgggtagagcgcggaatagggcgctgcatgggcgttacgatgccgcagcccgtttatgatgctgtggtgtcctttgcgtttaatgtcggcgtgacggcggcgtgtcgttcgaccctggccgggtttatcaaccagcagcagtgggcacaagcctgccgtcagttgccgcgttgggtgtacgtgaacggcgttaaatctgccgggctggagcgccgccgcgcggcggaaatggcttattgtctacggggtgcccgccatgaataa

SEQ ID NO: 456501 - DNA, 210 bp, Serratia marcescens
atggagaaacttacctcatgggcggcctatatcgtggcgggtttcctcgcctgggttggccgctacagcccgcaggacattgcgtttatggtcggtgccgccgtgggtgtcggcacttttttagtgaattggtactaccggcgcaaaagctatcagctactcaagcgcctggacgttaaacgggggttttacgatgaactcaaccgctaa

SEQ ID NO: 456502 - DNA, 204 bp, Serratia marcescens
atgaacgtctacgccgagcagggcgacacggtagacgccatgtgttggcgctactttggccgcaccgagggcgttgtggagcaggtttattcgctcaatgagggattggccgacctgggcgcagtgttgccccacggccacccggtaacgctgccggacgcgaccgccgccccgcagcgcgaaaccgtcaatttatgggattaa

SEQ ID NO: 456503 - DNA, 486 bp, Serratia marcescens
atgagcaccgtcattttaacgccacgaccggacgcccccgccgcgcgcccggagagtgagcctgtgattaaaaacagctttttctggccggacatcgaccccgccgaggtgcgcgacctgatgcgcattgaaggaacgataaccgcgccacggctgcgccaggctatcaaaagcgccattgccgaagttaacgccgagttgcacgactaccggcgggcgcaaatggacgacggctatcaccgcctggaggatgccccagcggaaaaaatcgacggcgaaagcgtccgggtaagcgagtaccgcaacgccgtcagcgccatgagcgccgcgctgttgtcggagcaataccgcagcctggacaccaccgccgccggtgcccggaaagccgacgtgatcgaattcgccattgatgaactctggcgcaatgcccgcaacgcgatcagcaatgtggccgagcgcggccactgcatcattgggctgctctga

SEQ ID NO: 456504 - DNA, 279 bp, Serratia marcescens
atggaaattaagattggtactgagttcgttatcactagcgataacctgcaattcattcttaacactgtaaaagtaggaaagacaggaaaaagcgaagggcagcaacgctatgaggtagttggttattatccgaatattagccagttggtgaacggccttattcatcatggtgtccgtaattctactgtaaacagcatagcgtcgttagctgctgaaattggtcggattggcaacttgtgccaagaggctttcgcagcatgtgaagttgcgacagcctaa

SEQ ID NO: 456505 - DNA, 243 bp, Serratia marcescens
atgtcgaatatggttttgataggaatagatccagcgcaggaaggtagtgaagtttcacaggtggtcgtgttgcttgataacgcccgccgtgatgaacgtaaacaccaggccgaccttgcagctacgcgccttgtacgtttggccgcgcatattgcacaaaacggcttgagtgcggcggaagcggtggagctgttgcggcaggaagcagaaaacattgagcaccaggcacaggagctgcattag

SEQ ID NO: 456506 - DNA, 573 bp, Serratia marcescens
atggaatttaatcaaggtgctaaagcggcgatcgaaaggatggttgaggcctatggggttaagacaaagcttgccttgtgtgatgcattgggtgtaactgctagcgctctatctaaccgacaagttcgcgattcatttcctgctgagtacgttctaaagtgtgctttagatacaggggcatcattgcggtggctaacttatggccaaggtgagatgtatgagaaaaacgttgttacagtatcatcggcactttctgtccccagcaaaatactgttagatcgccagcttcataacaaggagactctattaatagatgaaaaattccttcctgaaggaatcaagaagccactaattataattgatggtgacattcaatacatcgcaacccagacttatgaagaaatttatgatggcacttggctaattgatattgatggaaacatgagcatcagagaattagttcgcataccaggaaacaagctaaatgtttccgataaaaagcactcatttgactgctcccttgaagatataaatgcaattgccaaaatactattaatttgtaggacggcatag

SEQ ID NO: 456507 - DNA, 1494 bp, Serratia marcescens
atgagtactatgagtaataaaaagctggaagagctgctctggggagctgccgaatttcttcgtggccaaattgacgcatcagactacaagcagtatgtcttcccgttgctgttttacaaacgcctgtcagatgtctatctggaagaatataacgaagcactggaactccatgaaggtgatgcagaatacgccgccatgccgatgtttcaccgtttcaacattccctcagaggcagcttgggaaaaggtccgtaataccagtaaaaacattggtgaagctatccagaatgcgcttcgactaatcgaagccaataacccgcgtttacatggcgtcttcggtgatgcacagtggaccaataaagagcgcctgcccgatcatctgctggctgatcttatcgagcatttcagtaaaattcctcttggcattaaatctgttgcccaggatgatctcggtgaagcctacgaatacctgattaaaaagttcgctgacgattccggccacacggcggcagagttctacaccaaccgaacagtggtgcatttaatgacgcgcattatgggcttaaaacctggtgaaaccgcctacgatccaacatgcggcactggcgggatgttgctaaatgcagtgatggatctccgcgcaagaggggaagagtggcgctcggtacacctttatggccaggaagtgaacctgctgacctccgctatcgcgcgtatgaatatgttcctgcacgatatcgaagaatttgatgtgctgcgtggcgacaccttggctgagccaaagtttattgaaaacgatcggcttaagcagtttgatgtaatttttgccaacccgccgtactccatcaaaaaatggaatcgtgacaagtttgccgccgatccatatggtcgtaatctttatggtgtaccaccacagggctgcgctgattatgcgttttacacccatatcattaaaagcctgaagccagatactggtcgtgccgctatgctctggccacacggtgttctgttccgcgattctgagcaagccattcgtaaacaggtgattgaatccgacatcatcgaagcggtgattggtttggggccgaacctattttacaactcgccaatggaatcttgtgtagttgtgcttaattgcaataaacctgttgagcgcaaaaacaaagtgttatttatcaacggggttgagtatgttacccgtgaacgtgcccatagccgcctgtctgcagataatttagctgtattatatgaagcttattttagccctgaaaatcaggagcacatcactgcactggtggatttcgccgttattaaagaaaatctctacaatttgtctattccattgtatgttcaagcaagtaattctactgaagagaaggatgcagaggatgcattagaaacttggaaaataaaccgtataaaattaaaaaaacaatgtaataatttatttattaacctcgcaaagttgggttatgaggtgagggaaaatgactaa

SEQ ID NO: 456508 - DNA, 243 bp, Serratia marcescens
atggcgagaacaaccagtgttaccctcggggagcaacttgaggtttttattaaccgactggtcaacagcggtcgttatggctcaacaagcgaagttatgcgttcagcattacggctgttggagcaacaagaaacccatgatgaggttgtaaggcaagctgttactgctgggttggatagtggggtaagccctttatcattaaaggatattgcagcccagaggaagcaaaaacttcgtgtataa

SEQ ID NO: 456509 - DNA, 750 bp, Serratia marcescens
ttgggtcgttttttccatagaagattttcattaaaagcaccagatacgcatgatgtcattaagaacagatttgaagatgaactaaaaaatgacttcaatgagttgactgtaaatataatcccaaaaccatcaagcgttgatcagttatcaaaaaatacatcggaaatatttaacgcattcggtttaaacttaagagactcaataagaaacaccgacagattcattgatttaatcaaaagaaaaagcttcaagaaaaaaatagactacatagctcttgttgctttaatggttatgtacgacaaagatcatgaattgctgcagaaaatattaggcttcgccgttggcaataacacaattgataaattgatagatgatagcaagtctataaaaagcttccctctagcaaaattaaacattattctggactgcagcaaaaacaacattgagttaaattacctaagaacaagcaataacacaaccagagacaaccccctgcaaattgagaatgttaaagtaaatacaaaggattatataaaaaacttcacttcatttgtaaatacatatccatcgttaaaaaaaacattcacaacatcagggcaaaataattactttacgttcaaaggttctctatcagatatggaaaaaatacaaatgcatttcggggctttaatcgaacgtgaacacattgtacaagtttattcaatagacaaatatttgaattttatagaacttgcaacttcatttgaatga

SEQ ID NO: 456510 - DNA, 870 bp, Serratia marcescens
atgataatattcgaaccagaaattggcattaaagactatataaaagaccaaatggttgcttttgggtattcctataaggactccagttcatatgaagacaatttaattaaagtattctcgctaaaaagaaaaatacctgaaagtatacctagaacaattattgaattacccaacatagccatccccaatgaattgcgagcaggctatgattctttaaagaaaaaaataacatccggagagtcaatcaaaggacatctgtcaaaaagtattgtaaagacagattacaatgatctgctactgaactcatggaacattcatcacttacatctatcaaatattcctagtacgagtggtttttttgagaggactggaccagtactgtttgcaatattttttaaaaatgttgctgtcttcatagacatattatcacatggaattggttgctctgatgtctgggttaatacaaatttaatagaaaaacttcacaagtacctaccgcaatcaatagccaactttaaacttaacaatatcagaggcgaatcatactcaccttcagaaatgagagccctgcgaagtaaacattgtaactttacgattcaagtagaggatggaacagtttatggcattatggggcttatgagtaacggaaactcattttttgatatatatgcagttatgaagatcaaatctaggattgattattacaatcaagtaattaatcaagaacctgatacatttaaaaaggcattaaacataccaatagattctgaactgctgctcactattgccatggacgataacgatataatgttatacgcacctgcttataagacagctattaatatcaataatccattgataggcagctaa

SEQ ID NO: 456511 - DNA, 492 bp, Serratia marcescens
atggcaactgatatcacgcgagtctatccccggcttaaaacactcggcaaatatctgctggaggcgggttccctggctgaacatcaccggccgggcgcgttagcattgctgacgcatccggagctgatgagtattgcctgcattgggattcctcagcaattcaacccctgcccggcagcgtcctgttctgatatcagctatgtgcaccatttgcagatcattgaatatctgtgtcgttctgatgccagcgccatgatgatgttaccgggtgcctctctcagcacccgtgccattctcaccctgggaacaccgtcacagcaggcacgattcttctcctgtttcgctcagcgtcccgcctggactttttttgccgttactgaacctgaaaaaggttcagatgccaccgccatccagtgtgaacttaccctgcagcaggaaaatggatggattaacggcacaaaaatgaaccgtaccgggtttccgggagactaa

SEQ ID NO: 456512 - DNA, 498 bp, Serratia marcescens
atgaaaaaaatgcttatggggatagctttcttgatcacccctgtgatggctcttgctgggggggctgggtacggtaatacaaaatgggacatgaatccgacagaggttatcgctgctcagggaaatggggcgcaccttatttctcctgagaaatttaaaaatagtgttgggaaagtaaagattgatagcgtatcaatcggcagcggtctttactctgttacattcctttttgattcctctgaccgccttatccaaacgaatgtatctagcctcgagaagaaaaatgaaggtattgttgctgggcagtttggcacgttgagtcaattgttaacccagaagtatggtaagcctgaattttcggatgcagataaagtaacttggaaacttaaagacacgactgttgagttaaataagatgataatccccggagtcatggctcagacagtagttcgttatattccaaatagtcaggtcaagagcgatacttcaaatctctaa

SEQ ID NO: 456513 - DNA, 192 bp, Serratia marcescens
atggctacgaccctcaccccgactcgtcctgaattctgtttcctgtttgcggccattcgccgtaatacgctgaccgcagcgccgcgcatggtgcgcaccgtggcagataccgaacgcaatgcccgccgcctgctggcccgtgaatacgtgctgtcctttgccggtcgcctgccggttaaggcggtggcatga

SEQ ID NO: 456514 - DNA, 246 bp, Serratia marcescens
atgatgcagttaactttgggccagcacagctttaccctgaacgacaacgacgcgctgtttgttgcagagtccatcctgctgcaacgcaagcaaccggatattgtcttgcctgagcatcgcagcgaaaaacacggtgtgatccgtttggcgagtcgccaggccgaaccgcgtctgttccgtgccgggttggtgccgctgaccagcgctgccgccgattctcgcaacgaccagctgaccgactgttga

SEQ ID NO: 456515 - DNA, 783 bp, Serratia marcescens
atgttgtgtggcagtcagcagaataaccccacattgactgacaccggagacaccaccatgaacaccaccgctttaccgcaagatatcaccgacaaactgcaagccctgcgtgacgcccgcgacgctcacaacaaaaactatcaggcgttgaccgacgttgtagcaggcattgcccgctgccaccaacagaagaaagacaccgaagtggagagccatgaggcggaaggtcagtggcgcaccctgttccgtaagctgcgcggggaaatgaccccggagctgcaagcgcagcaccacaaccggattgccaagcgggagttggcgaaggagttcgacggcctgattgaagagatggagctggataaaatgcagcttcacctcaattgcggcggcacagccccgaaggtcgtcgcagcccatgaggcagccctcacggcctttgcaaatcatgcgatgcgccaggcagtagacgcgctgagcacgacacttatcaaccctgacgttatcaaggcttgcacattggctgtacaggcttacggcgtctacggggataacccgatgaaaaccattgaacaacacctgctgaaaacgttacaaggccatatcctggctgctatcgcacagcaaaatatcgaccacccggtgctcaatgatattggcctgacgataccagaagaaaccggcgtattgccggaactgcaagaaagcccagcgcgacgtatgagcctggcaacagaattaaaggaaaaacgccaccgtatgcagcagaaaggggccaaatcatga

SEQ ID NO: 456516 - DNA, 243 bp, Serratia marcescens
atgatgcgctgcccgctgtgcacccatgcgtcctatacccgcaccagccgctatatcaaccggacgaaagaggcgtattaccagtgccaaaacctgggctgttcatgcacgttcaagacggtagagcgcgtcaataaaatcctgagccaaccgcgacaggcgcagacgaccgacggaaacgacttgccaccgccggaaaaacaaacgttaaatcgctacagccatcatcacacccaacactaa

SEQ ID NO: 456517 - DNA, 285 bp, Serratia marcescens
atgaaggcgacaacgctctgtcatgctgcgttgatgaaggagtacgtccagatcacctatctctgcccgctcgattgcgccggcgacataccgcgtattaagacggccaatgccaccatcaaagtcttcagtgaagcagaactgaatgtattgctgaattctcccgagcatcagcgacaatcaggcttcaaggccgcagagaccaataggttgtcgcaattttggttctgtcgcattaaggcgcggtcaggtaacatactgttttttttttgcaatgttgcctga

SEQ ID NO: 456518 - DNA, 333 bp, Serratia marcescens
atggctgaaatcaccacagaacggccattgaaggtgtttgatctgacccggttagggcctcatctgaggcagcctgtcggcgatttgatggcgcccaaggcgacctatccgttgacgcaggaactggcaacggagatggcacagcatgcagatggcgttgagtatttgtccagacacaccggtaagccgtgcctggctctttggtcagacaaggtagacggggatggcatcctgccgacagcatcagtgacaccgctgagtcagtatgagcaccgggggagaaccgcaaggcagatcctgagagctgattgcaatatccggatcgccggataa

SEQ ID NO: 456519 - DNA, 123 bp, Serratia marcescens
atgtccaaaatatttttcattaacttaatccataatatcaatacgttaaaaaggaacaccagaaaagaccacaaagagaacttaataagttccttttattcgcatttaatatccctgtactga

SEQ ID NO: 456520 - DNA, 126 bp, Serratia marcescens
gtggtgggcgtcggtctggacgtgccgctgacgcgttcgacgcgggtcggggtgtcctatcagggacagtacggctctcagcagcaggccaactcggtcaatgcacagctgacggtctcgttctaa

SEQ ID NO: 456521 - DNA, 951 bp, Serratia marcescens
atgttgggaggtgatggatttaataaccaaatacttttagctttgtggaagactaaaagtgtaagagagcatgatgtcgagaatgaagtggtcatatattgcatcgaagagccagaggcgcacttgtatcctcaccaacagagaaaagtttcaagttatctaattaatgatttaccagggcaatcaatagttactacccattccccgcagattgctgtaaattactccccagactcgatagtgaaaattcattcttacaatggttcttcagaggctgctagtgaaggatgctcagaatgtattagtgacgcatgggatggcatgggatacagaatgagtatcattcctgcagaagcattttttgctaacgttgtctttttggttgaaggtccttctgaagttttgttttatgaacagttggctaatacacttaaaattgatttggatttctataatatcagtattatatctgttgatggtgtccagtttgatgtttataaaaaaatactcgatgcttttaatattagctgggtagcaagaacagataatgatggttctaaagttcctaaaaaacaggagtggcaatactctggaataaatagagctttgaaattgtgtgatttggcaagtaaagataatcaacaatcagaaataactttgccagagttgattacagcttggggagattattctccaatagtaaatagacatggggtttatttatcgtttagtgatcttgaaggtgatttaagcaatgagtttactctcgaggttatggattatagtggaaaggatgatatcgattctgcagctaactacttgagatcaaaaaaagcaataaggatgcgtgagttacttaaactctacaaacaaaacctgattaaactggaaagtggcgatcttgcgaggccactctatcattgcgagagattagctagaggtgaggaatga

SEQ ID NO: 456522 - DNA, 615 bp, Serratia marcescens
atgcataaccaagaactgctggttgagcattatcataaaacttatgatctaacgttttcagtatgggaaagcaggaatcagacgctgcttattttactagctgttgtcggcttttcgacacttctgaccttcaatgtctctgaagcacaaccattacttgttgatattattgcaaagttatgcggaattacgagtgatgatcggataaaggagcttaagaaaagctttccctatggaatcatacaaagcatattcataattgtagttttttatcttacaataaatctttaccataaaacctgttttataagacgcagttaccagtacttaattggccttgaagctgatataagaacagcattaaatctaccgaaaggtagcgtaacttttacacgagaaggtgatttttataataaacatcgtacattttcttctttcatgacaggcctgagttatgtcattattctgggagcattactgctctcctttctcggtatgcgtctgttaaatgacttgcttgtgcaagattactttattctcataacagatgcatgcctgtcattaggtatattgtatttcttttctgtttatgctcattcttcattaaaaaagtga

SEQ ID NO: 456523 - DNA, 669 bp, Serratia marcescens
atgagtatggtatggggtaattttgcgtatcaactgttgcaaacacggcatgaagaggcggcgattgacgttttgtgttcggttttcagcgcccaggagccgctggcaaaagcgttggccgcacaacccgatgaactgcggcctttcgtcagtgatttggtgcgtcatgcgacagatggcggactttcctgggtggcgatcgaagaaaaaagcgcccggttggcgggcatccgaatattgaccgatacccgccgcgactttgttccggcggagtatccgagcagtaaggtaaaaaccatattcaagtttcttcattctctttatgacgatgaaagtgaaagcatgatggcggtaggcccgcctttgctgcattgctggatggtggcggtattgccggcgtttcagcgtcagggtgtgttgcgcagtctataccgggccggcggcgaatgggcggcacaacgaggttttattgagggcatcgaagaggtgaccaataggcataatctggctttcctgaacaacgaaacggacgttacggtgctaaagtcacttgattatgcagactacgaattccacggcgcgtatcctttccgtaacgctgaagacagtcagtattgtgcattatgccgctatccgttaattcgtcaggaaacaaggccgcctgtttga

SEQ ID NO: 456524 - DNA, 1404 bp, Serratia marcescens
atgtttaatcctgaagaattaaacgttttgggacggcagattgccggcctggcgtccagttttgccgcactacctgcgtaccgggaaaatgacaacctggcgcaaatagagacggtgctccaggagctgtccgcgaaaatggcggacaactatccctattttcacccattctatctggggcagatgttaaagccgccgcatcctgtcgctcgtctggcctattcactttgcctgtatatcaaccccaataatcatgcgctggatggcggcagggcgacgtccgcgttggaaaaggaagcggtggcggatattgcgcgtatgtttggctggcttgatcatattggccacctgaccagcggcggaacttttgctaatttggaagcgttgtgggttgcaaaaaatattgcgccgggtaaatcggtagccgcctctgagcttgcccactatacccatgaacgcatcagccgggtattagacatcaagtttgacaaaattccctgcgatgcccgcggacgtatggatgtgacggcgctggaggcgcagctgcgggagggggagatcggcaccgtcgtcgtcacattgggcaccactctggccggaacgctcgatcctctggacgccattctggcgttgaaaaaaacctatggttttcgaatccatattgacgccgcttacggcggttatttttcgctgtgcaagatggagactgcggacagtcgcagggcaatggcgtccatctctcaggccgactccatcgtggttgatccgcataagcatggtctgcagccatacggctgcggatgcgtactgtttcgcgatcctgccgtcgggatctattacaaacatgattccccctacacctatttcagttcggacgaactgcacctgggtgagatcagtctggaatgttcgcgcccaggcgcctccgccggcgcgttgtgggccacgcaaaaacttctgccgttaacgccagacggtgagtttgccgccgcgctgcagtgttccagggacgcggcgatgtcgttgtttcagtggctggcgcagaatgaagattgcgtcaccgtatttgaacccacgctggatatcgtgctgtggttgatggttagcgacagtgcccggaaaagttctgccttatcgcaggcggtgtttgacaacgcggcggcgatgaaccttcatttggcattggcgcgcgtaccgaaaaaactgctggttgataaaattgcgcccgacagcgcgttttgggatgacgatgacgtgatgtgtttacgcgtgtgtctgatgaagccagcccataaaacctggttgccgaccattcagcaacatttgcgtgcagcaatgacggctgcgcatgccgatgttcaaaccaaacagccggcagtagccggacaggatggcgttcgatga

SEQ ID NO: 456525 - DNA, 516 bp, Serratia marcescens
atggaaaaaccagaactgagacgctggaaaaccggccataaactgttcttcgcttttatacaggcggcgctcttgtctttacacaaggttgaggaggattacctcacaaaaagccggcaagccggtatcacatcattaaaaaacgcggcaaagatgatgcgggcctcggcgctggcgatgaggtacagcgccgactttcagaaagggaaatatgaaagtattatccggccgtcaatgccggataaattcagcgggttagggagtatggatcatgctcagctggttaaaatgatggcaaaaataaaaaagaataaagacgccatgcgttcattttttggcctggcttatgatgattttgtgacttcagtgcaacaggcttacgatgcgcatatttttgtctgcgaacgttttgttgcggcacagcgcagtttacgtggcgcagagattcctcatgcggcaacggatattctggctgactttaaaatcaaacgtctgtcttttattcagccccggtag

SEQ ID NO: 456526 - DNA, 417 bp, Serratia marcescens
atgagcgtgctatcaattccaacggtattaatcaataataaaaacgctatccctcgggatggtctggtattatctatcctgcagtcagtcgatgaacttgagatgagtaatattgacactgcagaatctatttgtcggcaggcattgttgagtgtaaataatacccatccccataaagaaacaatttctaacgaaatatttcatatctttgacgactattttgatatctcccgtactgcggagaaaagtctggaggtttatagccgttatctgcttcagtgcatagtaatgtttcgtgaggagattaaagacttcaacacgacattaagtagacatgagcaggaagatctgctgcacgccatggttgacgcactgcgtatcggtgtcgaatatctctcccatccagatgaaaaataa

SEQ ID NO: 456527 - DNA, 189 bp, Serratia marcescens
atgattatttcaatttttgttctgctgtatgccattctgatgatctccgtcggtatcaacgagatctacttcacctccaccggtgaatccgccttctttatcagcctgctgctgaccttcttcggcgccttggtgctgctgggcctgatctggggtctggtcggccggcgacctaatagtaaaaaataa

SEQ ID NO: 456528 - DNA, 801 bp, Serratia marcescens
atgcagcgtcaatttaacttaagtcacaaatattatattaaacgcgccgctaatagagaactgattggcggcttgtgcatcaatgataataaagagattgccattgtcggtaaaaggtcgaaagcattgggtcttgaccgttttccgttcaataaagacgagatgattttaccaataagcgaacaggtaaaaacggtcataccttaccgttcgaaaatactctcatccattaacggccgttcggtattgaactcaaccttttcgctgaacagtcaccgggaaatatgcctcgccaaaagctgcgggaaaggcggattctcatcatcaaccaaaaacagccggaaccgtgaattgaaaaagttcctcaagtctggcggtgaggccgttgagcaatcccagctcacgccggcacagctggttgatatttacttcaatttacacggcaagcgctggggcaaagacccgggtaaccaaagccagatgctcgccatgctcacggacctgcgcgacatgatcttcggctacgtgctgttctatcacggtaagccgtgcgcgtaccagctgataacgaagaccgaaagcccacgctggatctgcttcgattatgtcaacggcggttacgatcgccaacatgacgagttttgccccgggactatcgtcacctggttaaacgtgcgggctgcctatgaactatgcgaacaggcgggaaaagagatgcgctattcatttggcaagccgacggcagcctacaaggacagatggtgcaaacgcgcgccgctggggcgtacgctggcgatataa

SEQ ID NO: 456529 - DNA, 618 bp, Serratia marcescens
atgagtaggtatcatgtatccaatagtgaaggccggtatgaggaagactctgacgagcaagttttggctaacaaactggggatcgcctcttccgatgagatggatgaggctgagcttgttctgttggaacagctctaccagtttgtgtttgaacaacagtttccggaagggcaactcaagatatccatgctgaaaaactggcatcgccgctggttaggtaacatctacgcatgggcaggacaagaaagaacggtgaatatcagcaagggtgactttatgtttgccccctcaacacaattgccaaaactgctgaatgaattcgacacgaagtatcttgctcattacacaccatgcagcggtatggacgaagagcaggtcatcaccgctatcgccatcacccatgtcgagctgatactcatccacccgtttagagaaggaaacgggcgcctgtcgcgattgttagccgacgtaatggccgttcagggaggacacaaaccactgaactatcaaagctgggagcaaaacaaaacccagtatatctcggctatccatgcaggcatatcaatggattacgagccgatgaaacactgggtgagagaagcactgagaagcgattaa

SEQ ID NO: 456530 - DNA, 171 bp, Serratia marcescens
atgagtaacaataaaaaaatgcaggcaagctacgccaagccatctcgtgctgacatcgttcgttctgtaacaacttctacggcggttgaaaccgggcagtcttccgcaaagatcgaagcctctcttgaggctacgcgtaaaaaattcgcgcatttacgccttgcggtttaa

SEQ ID NO: 456531 - DNA, 156 bp, Serratia marcescens
atgctcgacgattatccgcaggccgtgcaaaatgccgtaatcgaaagcatgggggcgtttgagaaacattccgttgcttacctgtctgacaaggatgttgctcgcttggccaaccgctttatacttgatgtattgctaaaaggacttggtcgatga

SEQ ID NO: 456532 - DNA, 759 bp, Serratia marcescens
atgattaaattgattagaccacctgaaccacagattttatgtgacaatcgagcagcatggacccagagtattatggaactggtcgataagtataatgagtacaagaaaataccagcccctgaaaaagaggcagcattaaagcactatcgtcatgatgatatacgtaacacactgaaagaaagttcttttcataaatgtgctttttgcgaaggcattcctgctgaaactggttttgctgaggttgaacacttccatccaaaatctatatatacgaataaaacctttgagtggacaaacctcctttatagttgtaaggcatgtaataacaaaaaacttaatcacgatacgcagcaacaaccaataataaacccttatgaccttgacccctgtgattgttttacgtatacagatataatgattgagcccaaagcaggggtcaaccatgacattgcaaaaaaaacaattgaagtgtgtggattgtcggataaaagacttttttcggcaagaggagatatcttagtaagctttcgcatttttgaagctgacatccgtgaggcgatggaagaatttgacctagcacgtactttaccaaataagcagaaacgagcaggaaagataaacgatgcgctacgcacgattgaagagctgtcgcagcctagtgcgagactctcaaacttttgtgcctatctgctcgctaattctgaaatatatcaggaagccaagcaacgtctgcaggaatacactagcgaaaacttgtga

SEQ ID NO: 456533 - DNA, 1239 bp, Serratia marcescens
atgccgatagaacgactgcatgttaaaagtattaaactatttcctgaagttaatgttaaatttaatgaccgatttaactttattacaggccctaatggttgcggtaagacatctattcttgcagccattgcgcactgtttaagctggaatggtgaatattccaggcaccaagatgatagtgagtactggatagatgtaagtgaatatgatgaaagatatagattcggtttaggtccgggttttttacgagccagaaaatatagaggtgatcagctacgtatttatataaccccgccttctgaagagggtcgtcagtcattacatattagtgatgttaaaactagatacaaactaccgcccttagttatcggtgcacagagaaaaatttcctataaaaccatagacggtgttaccagggagaaagacagccagggaagcattaacgaatattgtaataatgcattaggctctctttacaataaatcttcgcgagacgtaaagcaatggcttattaatcgatactttgttattgataaatcttgggcagaagaggaaaaggcaaactgggagcacttgatcaaatcgttaccaataattggaccattcaacagtgaattccagtatttagagacaggtcgtgatcttgaacctgtattttcaatttatggaaaagaatgcttccttgaggaactttcatcagggtttcaggccattttatacattattattgcaatatttgaatggatagaagcttgcttaccagtaggtgaaagagatgtaacaacagcgtgtggaactgtgctaatagatgagctggacaaccaccttcacccggaatggcagttgactgtaaggcaaggcattgcggcaatattccctaatatacaattcattgtgacaactcactctccccatcttttggcctcagcgaaagaaaatgaaatcatcatgcttccaccatcatatccggacgaaatatatgaatttcaaccttcggataaagcatattcaggttggagtaccgatttaattttgactgagctaatgggcgtaagaagtcttgacaacaaagattatgaaatattggtgaaatcttgctatgaaaacatcaaggagaataaccttgatgctctcaaagaaaactacgcccgccttgaatctatcagccacccgggtgatgcggtgttaatcatactcaagacccgcatagcaggcatggaggcaaaagaaaatgattaa

SEQ ID NO: 456534 - DNA, 480 bp, Serratia marcescens
atgaaagaactacctgttattttaaaagaaatttcgtcccttgcgactgaactgggatatcccaaaaaccctggatttaatgatgccgaaccaaaacacgacttcggtcgtttaattggctatggccctcaagatttttggcaccaatatatggctttcgtcagggggattgatggatttagcattgatggatatagtgtttatggcctaaaaaactatagtgacgaacataatgaattattcgcgtacaatgacgaactaacgataatatcacaaaaggcccccaatgcttatgttgattcatatgacagcttgatcgttattggacataatggaacagatacctttgtatacgacatccagtccaaaaaatgggatatgcgggaccgcattgccattgatgaggcttacgagtcccacgactcatttgaaagttttctgtcctcagtagtaaagacgattatggaaaacaattcctaa

SEQ ID NO: 456535 - DNA, 528 bp, Serratia marcescens
atggcactatacgggaaatttataattaataatgcggattactcaccgctaacaatttatggtatcggtacgtttatggcattttcagggaaaggcgcatacagaaacgccccgggctgtggaatgatacccaacgcagggccgatacccgccgggaaatactggatagtcgaccggccgacaggcggcagcatgtggcacgttaagacgtttgcatacgacacatggaaccggatagcgcgcagcgtaccaacgcctagtcgtgactggtttgggctatatcgagacgatggattgatagacgattacacgtggataaacggagtaaggcggggaaatttcagattgcaccctggaacaaactctctcggttgcattacactaaaacatcattctgattttactgtaatacgcaatgcattgctaagaacacgcggagtaaaattaaagggaaacatcaagtcttacggagttatagacgtgattagtaacgggaattgtgaggttggcaatgcggaagggatttaa

SEQ ID NO: 456536 - DNA, 942 bp, Serratia marcescens
atgaataaaattgataatgctcagcatgctagcgatattatccgcaattttggccttccttcagcagatgtgatcgcggactctgctctttccggatggcgaagcctctttacggtgttgcataaacagcgattcgataccgatcagtgtcaacgacctgccacggcacagcatcagttagtgctgtattgtggtgggggagaaagcggagaggtcagttttaatcaggagccatggaaaaaatacactaaaagaaataatgagtggtatatcgctcctgccggtggttcaggaagcgtttggcgctggaagaatatggcggaggcagatcaggactcgcatatttttcgcatcctgctgtctgcacaatctttgacagatacggctttacagctaaataccggttcttcggcaagcttgagcccacgaatcggtgttgtcgatgattttatgctacagcttgcccgacagcttcgagacgaaatagtaacgcctagcctctatggctgttcgtatggggaggcattgtccgcggtactgtcgatacatatcttaaaaaattacgcagatctgaaggcaatagaggtgtccggaaacggcattttatccatgcgtaaaagggagcttgtgcgagagtatattgcagaaaacctggatggggcattgtcgctggatgagatggccgcacttgtatcactcagtaagtttcatttctcaagattattcaaaagtacgtttggtatggctccttaccgttatatatatcacgccaggatgagcatgcttgcccgattgctggccgatggcgatgaacccttatattctctggctgataaagtcggatttagttatagcaccaatttgattagggcatttagacgatttaaaggcgtaacgccaatggaatatcgtaaagcgatgagagtgaagagcattagctaa

SEQ ID NO: 456537 - DNA, 1179 bp, Serratia marcescens
atgtgttccagaatttctgatgaaagaagtattttaatcctgatgattgcagtagcaattattggctgtaatgctttcctgctcagccctatcctgaatgacatcgccgcaagcctctccgtttcggtagcacaaatatccagagccattgcggcttatggtggggcaaccgcgctttcctcgctattcctggctccctatgcggcgatgattggtgtaacaaggtctatgcgttatgccaccatgttgatggtgacgggaatggcgctgagtgcgggagctacgacaggatggatgcttattcttgcccaggcgttgactggagttgccgctgggctgatgttgccagcgacctatgccattacagcgtatgtcgcaccagaggggggatcatcggccgctctcggcaaggtgatagcggggtggtcgctggcgatggtggcgggcgtccctctctcagctgtcatttctgacatggcaaactggcgtattgcatatggcatgctggctataatgggagggatattcttattcttcagcataaagctgccggaaatagacgcatcaaatgagaaatcaggtttttcatttaatgagtatcgctcgaatccagagttgttgatgatgtttatgattaccttactctatatgatatcattttatggggtgtactcgtttattggtacttttgccaggaacagtttctatgataacgctacgttagccgggggcgttaccctgtgttatggcataggtttcggtttggcaagtttaaaatctggcttaattgaccgctgtagccctcagtcgatagccgtactaatattcattgctatgtctttggtgtacttcgccatcgctcaagatagttctaatttattttttctgtttgttttctgttttctatggggtgtggtaaataattttggcttaaatgttattgttagcttgataatacaacttagccctggtcacaagacgacttcattaggtatttatagtgcactatcatatggaggcacgatggtcggcagttttgtatatggatatatttttaatcggtggggtttttcttttacggctattgtctcgttggttttgtgtcttatatctgcgttgcttgcctggattaacatgaactatgtcggaaaggtacggagccatggcgtgaaaaaatag

SEQ ID NO: 456538 - DNA, 270 bp, Serratia marcescens
atgctgaggttggagtgtagtacccaggtaggaacaaaaatgacggcagtgatggatggcggctcgcaaacggtaattattaaaggtgcggtatttcgttttgttgacagggatgatacgagaggagccgatactctggtctttgagagaagcgtaaatggtattacgagctgggtattcgtgaatatgggctccgttgacacggtacggcttgctattcttagacagaagacactattgaaatttacgtgcagcgcttttggggaataa

SEQ ID NO: 456539 - DNA, 336 bp, Serratia marcescens
atgaaagtgagcgaagaggaactcttaagagcaggattcagccgcgccgatctccagaaaattaaaaacaatgtggcaagccacggaggtacccttggcggggctattcatgatcttgcaaaccgttttagggtcgtactgtgggtatcctacggctgtctggcagtgttcatctgggtcatgttctcaagtaaccctatctatgttgcctctacggccatcggtctgctaatcaccatcctcatcaccctattcgtacagccgccagtcctgtcttacaagtcctggcgatactggaaaatcaacaggaaggctagccagcgctctgatcaatag

SEQ ID NO: 456540 - DNA, 816 bp, Serratia marcescens
atggatgctgcactacttgatatgatgcactctggtaggaataaatactgggcagaaacaatgatcaaccttgaagcgaggagattaattaatatcgccaatacgatgtcatcgtttcatctcagggatggattaaccaggattaaatttgtccaggaaataaaagacgttgttgagcagcaatttgctgcggcgcgacgcgcaaagtcaaacgaaaactacacggaatgtattaaaaatttgaggacggaaatagagaaccttcaagaacaggatcggatgttgcgcacacgggcggcaaaactttacgctaaggtggagtttatccgggaaaataacaaaattgtgggttacgttatctcagcggtcaatatagttatatccggacttgttattaccggcggtgtagcaatgatgtcgacaatgaccccgttaggcgtgcttgccggtgctattttggtggtggatggtgccaacgggataaccaaagaaataataaatcttagccttggtgcccagggtcattccgagggtgtgatggcggatgccgccatggatatcgcgcagtttatggggtttaaggctgagtcgggcctggctttctaccgggcgggaacgctcagcgccagtgtttacggtatcttcgggttagcaagaaagtctgcggcctggcgattattccgttggatcccccacgactattatcgaaaaatggagacgatgagtagacctaagctcaccatgaaaattgtgggtgatggccttaaagccaaggtgctcattgatctattatctattgatcagagcgctggctag

SEQ ID NO: 456541 - DNA, 528 bp, Serratia marcescens
atgcaaaaaactcgctttagcgatgcaccttgcccggtcgcgcgttcattggatcgcgttggcgagtggtggagcatcttgattctgcgcgatgcctttcaggggctatccagatttgatgaatttcaacaaagtttggggatatcgcctacgcttctgacccgacgcctgaaggatctggtcgcccacggcattctgtataaacaacgctatcaaactcgaccgtcgcgctaccgctacctgctcaccgaacgtggcaacgattttttacccgtgctggtggctctttcacagtggggtaacggtcatctgttcgacggcgacattagtgcgctgttggtcgacagccgtaccggccaaccgattcaggttcagttgatcaatcgcgacacccagcagccggtgccgcagcagtttattacgctggcgccagggccggcggcaagcgaaggcatccatcagcgcgccgagctgatgcggcttcggcgcctcactgattttcccgaacttaccaaggaaccatcatga

SEQ ID NO: 456542 - DNA, 240 bp, Serratia marcescens
atgggaactaccactgttaataaactactggatacttatattttcactaatgacaagccttcccgagtgaagtatgaggtgtacattaatgatgctaaattgaccgcagacgtaacgatatatcgtgccgatcccgtagggatcgcatctcgtgacttcattattttaaatacttctcgggaacaccctgaacttgcttgtgaagaggttatggggcactttgagaaaaactatgcgtaa

SEQ ID NO: 456543 - DNA, 780 bp, Serratia marcescens
atggataatcctttacgacacaatcagcgactcaatgcttacacccagataatggcgcgccaacaaggccgttctttgctagaactggcggagcgtatcagccgcaatcacctgaaagatcccactaccgttgcctcgtttcggcatgagctgttttgtttcgtggaagatagattgcagaaatgccaaaaaccagggcctgccgccaacatagccatacaagagataaaacaagaatatctagctctagtcgagcaagatcgacagcttctggcgcacactatcacgccttatgctgtattgaaaaaaaatagctatgccgataaaaccgctacttatgtactttatggcgttggtattttgtcaggaattagtcaggtgattttaggtcttggactcgattggaccggtgttggagttgttcctggcacattactgatggtcaatggtatcaataatatctatgaaaatggttatgcgctcttgctaggtaaaacaacagtcggcccaggcagaatgctatatcgcagcgccacatccatcgcaggctttgataaccgtgcagccgatataatttacggtggaatagacctaacgttatcggtttatggtgtaaccaaactcgcgttaaaacctgaagcatggcgcctatttcgctacatcaatactgattatattagaaggtggcggcaaatgggggcatactcaatggtccttgaagctggtgctgatgtagccacgctgcaaaatatttatagaaatggcaaagggaaagagtga

SEQ ID NO: 456544 - DNA, 1170 bp, Serratia marcescens
atgccttggcctgtgcgtataatccttcccggagaaccagtaaaaaaaataagatggaagttgtgggggatttcattgtctatgatgatattggttatcttcgtcattgtttacttgctggtttactcatcggctatagaaagcagagaggccttcggttttgcatcggatttgattttatttggttctgccggatatctgttgtgtttggcaatacgggtttattattatggtatgtgcctgtcggcgtataatgcttatgaaaaagaatcaatgttgttacagaagcagtggataaattgggcgggacagtcagtggttattcctgcccaccgtctctttgttccctctggagtctcattggcaaacattgcatccgggagggttgctgacatatacgctgggcaggcgttgaagtttcatgataatcatagttcagtatatactgaagagcggattttctgtgaactactttcttctgttcggtcggaagtaaagaaactttccaaaagctgtacatttgatgtggcttttgcctatgagagtagtcatctgtcattctcaatatttaaacattgttggtccgctatggggcttgcaggtgaaagacttaatgaacacttggttatattaaaagaaaatcatgaggatgttttcgaagagataataagtcagcgagataataaaattctccttattatttcaattaatattgaaggggtaagctcagggggtgttacaggtactgaatttgcctcggttatattaatgacttccgatgtctgttcagaggaaccagatggatatgaggcagtttttcgcccgatggtatgtgataaaaaaaacttcaaggaagagtttataaaaatgaaggtttatcaacctgacgtgcttgaagtatccaagatcttctttagcggtatggatgttgggagtatctcgacgattagtgaggaactggggcagttattgaatagagatcatcagtcacagaatcttaatatgtttttgggacagttgggagatcatcatttttggctttccatggcgctttcactttattactctcagatcactaggaaatcaacgctgatgatgcatagtgccgataataaatatgtccttaaccggttgagttttgttgatattagaaaggagatcggcaattga

SEQ ID NO: 456545 - DNA, 849 bp, Serratia marcescens
atgaacagaggcaaagaacaggcggatgtcagggaaataatcaggcaggaagttttcggcagtgacggaaaggggtttctgctgatagatccaacattggaacgctatcattcagacaaaaaaatctataattttttgactcaacatgtcgtctcccctataacattcccccatccagatctcgacggcgctttggttttgtggcttgtagcattggatatgactcagtcaaaagataaagaactatttgatgccagtataaccgattcattaatcgaattgcatccagacaatcttaatgctggtgcagggcggagcatatgcgcgtggatctcgacagaactaaatgctgaacaactttcgttatatatatctgaaatggctgttcaatatattcagtcgcaaggtcatgtgcttatgcgtttttttgacccttccgtcttgggtttattaacgagatgtcttgatgcctggcagaacgaacaattgtttaataatattaacatatggtgctatattgatggtgatggttcgcctcaatttatcagtggcagtggtgaaaattataaaaaattaaattattctctgggattatccaagtctgacttattgggttttggttatattacttatattaataaagtgttgaggaaatatagagaattagatgtttctgaaagagtcagtgagctacgggcagcagagttattattccctgccttacgttacttttcatcaaggttttcatttacagataatagctatgttgactttggcattaatatattgaatgcaggaaatcttttctatttggagtcggatggtgaaaaaaatacagcggacaattaa

SEQ ID NO: 456546 - DNA, 213 bp, Serratia marcescens
atgaatggcaggccgtggacacgggagctgccaccaccgccggtactgccgccgtatggcccgctggaaaaaatcagcgggcggctggaatctttcagtaaggagtgcttcagggagtactttgacgtaaaggcctatctcagaagtttggtcgttcgtattaaggatgtttttaatattaatactttatttaattatgagagtaatctataa

SEQ ID NO: 456547 - DNA, 180 bp, Serratia marcescens
gtgttgatgagctgggaagcgatggtggcaattacattgctgcaggtgattaccgcctggatatcggatgatgaacttcagctgtggtgtcagaaatgcgtgtttggtaccgcgccattaaaccgtagcctggaaacgcagaataaagcgctggaagcggcaataagggatatcttatga

SEQ ID NO: 456548 - DNA, 957 bp, Serratia marcescens
atgacctcagtggaacaaaaacagatctgttcacggtttattgaaccggaaaaactcgccaggttacgtacaaagcgggaaatcgaactgacgcatggcaggccgtggacacgggagctgccgccaccgccggtactgccgccgtatggcgcgctggaaaaaatcagcgggcggctggaatccttcagtaaggagtgcttcagggagtacttcgacgtaaaggcctatcgaaccagcaccctgccggatatctctgatggccagcgtggcgccgcagcggcggtggccattgcagcgggtagtcccggcatcggggcaacgattatggccgaaagtgagtcttcaaatgatacggctgaatatgtgcaggggaccattaacggcagaccatttcggggctgggtgggcatcacccgcttacaggctggggatgatgtggatatgatcgcagagtggcaacatgatcattaccaggtctatgccattgcgttaccggaagaacggattgtttcgatttgccctaaatgtgatatggggcgtatctcgcatatgcggtggcgaattaaaaatatgtttattctcaccgcgatattattgtttatgtttatgtttatgcttgtgctgcgagttttttttaatgatggtgagtattctagttattggaacaattatcatggccctatatatatggtcttggctgtttcattaggtatgtctggtatgatcgcatattttgcctataaatcctgcgcgcctacacgttgtaaactagcagaggaaatattttctttgctgggaatgaacaatgttaaaagtgtaaatattaataaagtaacaaaaaaacgagaaagacaattgattactgaaggtaagtggcatgatcctggcgataaggatatgcctgcctgccccagcgcgaattttatttattcgggagagagctggttttactactaa

SEQ ID NO: 456549 - DNA, 1995 bp, Serratia marcescens
atgaagacgcttatcctgccactctgggacccggtagggatcgtacatgagctgaatggttggagtcaggacgtgctggggcgacagacgcaatttttaaaagaacgggagctggaattttcaactaaaaccaacctggatgcgttgaaaaccgtgctggaagacagagcgcaggctgccggtgaggctatagtggaacgcgttgcgcagccgggaaataccttgttgtctgataaatatcttgatatgcgtttaaagacgctggagcagcgttatcagaacaagcctgatgtgctgacgcaaatcagatctgatgacaaattagtcaggtcatggcatgcgcagaacgtgacagcatcctaccccgaaaatgtattaatgagtccgccagagcctctgggggcccatcagcgacgggttgcagcgataaaagcgcaggtagataaggaactgacagagcgcccgcaaaatttcactaatgccaaagcaagaagctgggcgccttatcaggctaaactgaatgcaacccggcaggccaattttgatgcctgctataagagtctgggcgacagggttaacgaaatctttcagaagagaatcgccagcgttgtgagctggcttagtgcgccgctgttggtgacagttcttgacgattttcattgtacggaacagcgggccgggctgttctaccagtcggcggtgggaatggcgataaatggtatcaacagttgccctgccggtgccgcaaagctggataactggtggaatgagtacagcataaaaagcaataccaaccttttgtggcggcacgttgccgccaataatccggagctgatggcggcgctggagccgttcctggcaacggtaaaagcgaaaaaagatgaagaggtgactccgttaacggctaccgccgtgacggcgtttttgatgcaacaggccggaaacctgaaaaagctggaagggtattaccagaaatccctgaatagtgtcctgaaagggttacgggaaaatgccagtaaaatagaaacggaagtcttcaggacagatgcttttatcgttacggtgggggaccgggtaagccgtattctgatggtcgataaggcgggggaaaaactgtcgaccacggcgttccggatggtatttatgataagggcgggtatcccgtcagaaaaggttcacgccctggtaaatgaatatctgcatgatgctccggcattgcgcagtgcggtgttggcaggcattcgcaacagtaaacgctttatggcaagccagagtgaagtggtgaccatccggcagacgttaagcggtaagctggaagagcattttgcgacagaggaaggcagaaaggaattccgactggcggcaataaacagcctattactggtgctgaatgcgctggattttatttatctgtgcggccaggttcgggatgacaagaagccgttgtcaagcctggtggccagcggtctggcgatggtaagccagggaacaacggtgctgttacctgcaatagaaaaagggctggaagcccggccgttaacggtggcatggattaagggagcgggtgcagctgcgggaagcgcggcctctctgttttcggcgtatgtggatgcaaactttgttgcagatgaatttgaaaataataggtttttccttgccggtattatctcaattaaaatgctggttaatggattaggggcgttgaaatctgtaggtttacttcttgagcttatcggtaaacctcttactaaaaaatatgccggaaaaattactagtttcctggcatacgactttttagggatccgggtgcttgccgtactgatgacttgggaagcgatggtagcgattacattgctgcaggtggttgccacctggatatcggatgatgaacttcagctgtggtgtcagaaatgcgtgtttggtaccgcgccattaaaccgtagcctggaaacgcagaataaagcgctggaagcagcaataaaggatatctcatga

SEQ ID NO: 456550 - DNA, 2376 bp, Serratia marcescens
atggcaaatccgcttgcggtgattttcagccatagccaccacctgctgcaggtggcggactgcgacgcgctgctggacgtgctggcctttgaggggcaggaggaactaagtaaaccgttcagctaccggattgaatttaccagcgccgatcacggtattcatcggcaggcgatgctgatgaaggcggcgtcgctgacgctgcaggcgccgttcaatcagggcgccgcgattaaactgcagcagccgctgcgggtgatccagggcgtggtcaccggcttcgagcgtctgggaaccaccaacgatgagagtcgctacgcgctgaccctgtcgccgcggctggcgctgctggcccacagccggcagaacgccatctatcaggatatgtctgcgccgcagatcgtggagaaaatcctgcgcgagcgccacggcatgcgcggtcaggatttcctgttctcactgacgcaggactacccgcggcgcgagcaggtgatgcagtacggcgaggacgacctgcgttttatcacccggctgctgggggagctgggcatctggttccgctttaccgccgacacccggctgaatatcgacgtggtggagttttgcgacggccgtcagggctacggcgcggggctgacgctgccgtcggtgccgccctccggccagcatgaccagggcgtagagtcgtgctgggggctggagagccgccatcaggtggtggaaaaacaggtcagcctgcgggattacaactaccggcaggcgctggaggcgatggatgcgcaggcggagattggcgccggcgacggcaccacctatggcgatgcctatcattatgcggataactacctgacggctgacagcggcgacgggcgcaacccggccgcagagagcggcgcgttttatgcccgtatccgccatgaacgctacctgaaccgtcagacccggctgttcggcgtcagcagcagcatcgcgctggtgccaggcgaagtcgtcagggtcagcggcggcgcggaggtggcggaggtattccgccggggcgtggcgatcgtccggacgatcagcacggcgcggcgcgacaggagcctggaaatcggctttgaggcgatcccggacggtgcggagtatgcttaccggccggtcgagccgctgcggccggtgatggccggcacgctgccggcgcgggtcaccagcaccaccgagaacgacagctacgggcatatcgaccgcgacggccgctaccgggtcaacatgctgtttgaccgggcgggctgggaaaccggttttgaaagcctgtgggtgcgccagtcgcggccctacgccggtgacacctacggcctgcacctgccgctgctggcgggcaccgaggtggcgatcggctttgaggacggcaacccggaccggccgtacattgccggcgtgctgcacgattcggcgcacccggacccggtcaccatccgcaactacaaacgcaacgtgctgcgcacgccggcgaacaacaaaatccgcctggacgacagccggggccaggagcatatcaaggtctccaccgagtacggcggcaagagccagctgaacctcggtcatttggtcgatgcggaaaagcagcagcgcggcgagggctttgagctgcgcaccgacagctggggcgccatccgggcgcagaaggggctgttcatcagcgccgacggccagccaaaggcgcagggcgaagtgctggcgatggaagcggcattgcaggcgttggaggctgcgcagaaaacaactgccggcctacgtcatgcggcagagactgcgcgtgcggagctggcggatatagctaggcaaacggtgttgatgaatcaaacgctgaacagcttgaaacagcaggctttactaatgtctgctccggcaggcattgctcaggtgacgcctgccagtttgcagttgtccgcgggtgaaaatctgattgctacaagcggtaaacatgccgacttcagcattgctaaaaaattcactttggcagttggcgaggcgctgagtctattcgctcacaaaatggggattaaaatatttgcctcggaagggaaggtagatatccaggcacaatctgatgcgttgaatttattttcgcaaaagcagctcagcgtcgccagtgctgatgacagtattgtgatttcagcgaaaaaagagattcagctaaattgtggcggttcatacattcgtttgagcagtgccggtgtggagattggaacggcgaaaaacgtcacgttgaaatgccttgccgttcagaaggtagcgactgcaacgcaggattcccggctcgagttgccgtcagggtgtaggccaggcgtgatagctgcagcacaagagcagggcgccgtggttgtactcgataaataa

SEQ ID NO: 456551 - DNA, 351 bp, Serratia marcescens
atgaacaacgcaaaatatctcggcatgaaccgcgccagcggcgaagcgataacggatatcgaccacatccgccagtcggtggccgatattctgataaccccgcagggttcgtgcccgatgcgccgcacctatggttcgctgctgtctgcgctgcttgaccagccgcagaacgacgcgctgcgcctgcaaattatggccgcctgctacagcgcgatccttgcctggaagccacgcgtaaaactgaccggcatcacgtttaacacgacctacaacggcaagatggtgatcgacatcaccggcacccgtaccgatgcccccggcgcgctggcgctgtctattcctgtgagctga

SEQ ID NO: 456552 - DNA, 759 bp, Serratia marcescens
atgtttgcaatagatcagatacttcccgacaggatcaagttattcgtatcccttgggtttattctcttaattatcttacgatgtggtggaatatcagttttatttagaaccttgttaagaagtgctggccttaagtttaatcgcgggattttaggaaaggccgatgatgaaatttttcacactcaaacatttgcattacttaatggtgttaaagtagataatgtccgagatgcaaagttactatcaaaagggttactcactggggaaatatcaaaaaaacaattttatttcgcatctctttttggtgcaattggaaaaaagaaaagatcaagatatgaaacctggcttattgttctcacagggttaggtatactatcattctcattcgccatgctgggagatttaccaaaaaatggatatgcgaattatcgcatggataaattatccgtgcaaatttcagaaagcaatgttttggttaacaatgaattctttaaccccggcaccgtgatgagcgagagtgattgtataaaaataataaaaacccaccctcatgacatatatcgctcagcatgtgagtatatatcacttgacgacaaagtaaaaaaagcagagctaatcgacgcgattaactcctggaattacatgagaaacatgtcatttatcgttttcttatcaataatttttttcttcaccgccttcacaatcggctcaataaaccatagagcattaagcaactatctatttcagtttaggagatga

SEQ ID NO: 456553 - DNA, 1152 bp, Serratia marcescens
gtgaaaaaattacccggtaatctgtatcacctgttttatgatgagctaccgccagaacgctatgacaggatcatcagcccctataatgcatggcgcgagatatgccaaaattatgtgttagatactggctgctccttcgggtttaatatgttcggtgatgatatacagctacgttcgcgatgggataatcgtgtggtgaatgatactggtcgctacgcccgcaagttaaagggcgatatagaatgcggcaatgttgtttacattgatgatgacgaaatgtggagcagcacccgttttgctttttatatcaatggagcaggccgtttggtgagcagtgatgaatttaacttttttgcgttgaacggtagcaaccgcatcattgactactacgagcaggcgataaggcgcaggggggaacgttcgcgacctttgccaacgtcaaagcctgcggaatattacacgccaccccagcacgctcaagcagcaaaaaagccgcttagcacgctgaacagtaaagccgttgggcggttgctggccgctggtgggatatacaatcagaacgtggaaggtttcgcacagacggctaagcagcttggcggcgatgcggccgaaggttttatccaggtggctaaccctcagtcgataggttcgctggttgcattatcttctatagctgccgttactcgtatgcccggcggcaacattgctaacatgaaatcgttagaagaacttcagcactttctaggaacttacaagggtgataaaaagttactcaacaatattgatgttattaaaatggattatattcagaggccgagaggtgagttagtggcgttacgctctgaatttgataataaagtaagaggtaaatttataaagagcattgccgatagtcctgatgttatttctaggttcgataatgatgttagagctaatatgctaaaaggcattgttccaaaaggctatcaggttcatcataaactaccgttggatgatagtgggacaaataaccttgataatcttgtgttgattgatagggcgcatgaacatgcggtgtttacgactgcgcaaataagagtaacaaaggctcttggtacattagaaagcaaatctattttatggcctgttccaaagggtatagtctatccttaa

SEQ ID NO: 456554 - DNA, 3573 bp, Serratia marcescens
atgattagtattttcttaccttctttcccgtttcgtggcgtaaaagcgccttacctatggtttttttatcgcgtgttgtcgtcaataaaagaacctgtgcattttattctgggagaggattacctttcatcttgtgaggcgtggcaggcggatgaacgctgggaaatgaccgatgacgcccaaaaacgtctgggctatagtcttcctgattttcggcagatgaacgatcacaaattcagcgtcattgatgagtcttttttgaatgagcgtttgaagcaatgccatcacaatccagatcttctctttaaaacgtttattactgaagagatccccgcgcttgttcaggagattgacagtgcattgggcctggtggataacaccgaatgtgtactgacttggtgtaactgcccgtcattaaataaggctgcatcggaaagaaatattagggttgtaaatttagaattaggacctctgcgtcctcttgaatatctggctactgcatatttcgactttagcggtgtaaatggaaacacagaagctgaacagcgttatttgacagcaaaaaatgccggaatagcgtttggggacgcgcgtaatgtggcgcaaatgcgcagcttttttgctagcgaacctgttccggaatttgaggctccggaatatgatgttgggatagttttgcaggttgaaaacgattctaacattttggcatttagcaatacatttaataaccagtcattattagattatgctgactatcataatttagggcgaaaactgatccgcagccaccctggtagccgctttgccttaaataaatgtatggataccatcgatcactctccgagcagcattgagtttattacccgatgcaagcatatattaaccattaattctagtgttgggctagaagctatgctaatggatgtgcctgtcacagttcttggggattgttcttatgctttctgtaatgtagaggatgaggcggagagaaatgagcggttagcattttatctattttcgtatctggtcccatttaatcttctctttgatattgattatattcgttttcgtctgtctacgccgtcggaaacggagataatcaaggaacatgtaaattattatattgaacatggtgattttatgcgcaactttggtaaggatacaaaggcgtcttccattattgacggtgggatctctgaacgcaatcttgagaaagaagccgagttaatgaaggaaaccgtgcagaagttaagtactgacttaaccagtaaggaaaactatatatttgagttggaagaaaagttaagcatgttagaaaaaacgttagaggctcgttcggaatatattgttgatgtgattgttcctgtttacgctggactacaagagacgcaggagtgtattgagtctgcattggaaacgctcccgcattgggccgacttagtggtgatcaatgacgcatcgccggagcctgagttgacgcagtggctgcgggagcgttctaaaacgggtgggtttaccttgttggaaaatcaggaaaacctcggctttgtcgctacggttaaccgtggtatgaagcttaatccaaagcgtgacgttttgttgttgaatagtgacgttgaagttgctaatgattggttagagcgtatccgtgaagcggcgtatagccgcccgcgcgtgggcagtattacgccgttttcgaacaatgcgacaatttgtagcttcccgcgtttttgtgaagataatgaattgttcttgggaatgaacgtacaacagcttgacgatcagtttgaaacctatgggcgtgaaaataatttaatcgaaatacctacaggcgttgggttctgtatgtacattcgtcgcgattgtctgaatgaagtgggttattttgacgttgagacttttggccgcggttatggcgaagaaaacgactggtgccaacgcgcagctaaagcaggatggcctaactttcatcagcttaatgtttttgtctatcacaaaggcggcgtaagttttgctggggagcaaagcccacgtaaaacccgggctcttgaattgttgaatgaattgcatcctaattatacaaaggatgtgatggattttattgcgcaagacccggcgaaaaaagcacgtcagcagctattgctgcgcattttagcgaaaaaaaatctaagtaaagtgctcttggtgactcataaaatgagcggcggagtcacacagcacatcaaagaactcgccgatttttataatcaacaggcccatttccttgtgttgaaacctgaggtggatggccaatctgttgctctgttgttagacgtgagcggtagcgaatgtcgtgagaaatttgtaatcgatatttctcatggttatgagactttggttaatctgctgcgttttatcggcgttgggcatatccattaccatcacttgattggcgtgccaagtcaggtgcttgagttaagcaacagccttggttgccagtatgacattactatccacgattattatttcattaatgctaatccaacattaacgaagaaaaatggtatgttcgccggggaagaggcggatacccgcgatcggttatgtaatgaacactatccgaaaccggaaggtatgtcggcgatccagtggcgtaatatctatttggcttggttggaaggtgctgagcgagttatttttccttctgcagatacccaagtgcgctttattacggcgtttcctactgtagcgaagaacagtattattgcttggcaccctgattatgaaaatcatgcaccataccctgatgtaaaaagtgattatcaagcagggaacacacttaaggtactggttttaggggctattagccgtgaaaaaggtgccttgctgctggatgaggttgctaatgagctgaaacacgacaatatcgaattccatttgcttgggtatgctttccgaccattgaatggcggagtgaaatgtcatggtgcttatagcagtagtgatcttgctgataaattagccgagattcagccagatatcgtttggtttccggccagatggcctgaaacctatagttatacgttgagtatagccttggagcagggattaccggttgtagtaccaaaccttggtgcttttgttgaacgcgtgagtggacgaggtttcagccgagtggttgcttgggatagctcagttcaacaaatgtgtacactctggcgtagtttgctaaatgacccggctgcttttttctctgttgaaaatgtctcgtcaacgcttgatatctcaatgacgcagcggacagctgatttctatcgtcatgggtatttgcaagataattggctgcgtgagaacgagctgggcacggttgattacaaggaactgagcgagtcgttttgttcgtccgagagtatagagattattccagtaatagaggtagctcctcaagggcgtaaagaaaagttactggccattctctggaaattgactaggcatccggcgttggcgtgggccgtcaagctcattccttatcgtgtacaacgctatgtaaagcgctgcttgtcgcggcgggcaattcatgaagtggtcagataa

SEQ ID NO: 456555 - DNA, 852 bp, Serratia marcescens
atggctgtagaacaaaaaaaattcaagatagttgcatccattgttttatatcaccatagctacgctcaggtggaaaacacgctgatctcgttgcttaatgaacagagtgtagatcgtatcatattggtcgataatggtggttctgagtgggtatcatcattggataatgaccgtatcgattatatctcctgtggggaaaacaccggcttcggacatggtcataacttggccatggcccagtatcttactgattgtcattactttttaatttgtaatcctgatattagtttttctcctacgtcgttggaggggctttatcgttttgcttatgaaggacagcatcagtttgttgctccgcgtattcactatacatgcggtcgttttcaatacagttgtcgcttgttgccgacaccagctaaccttttactgcgccgttttgttcctaaattaggagccaaaatggatataaattatgagttgcagcgagctgattatactcagacctttgccgttccttctgtttcagggtgtttcatgctgataaaatccgagcttttagaaacacttaaagggtttgatgaacgctattttatgtatttagaagatgtcgacttgtgccgcagagcatcgcaacttactgatatatattacttttcaggcgctacagttacacatgtttttggcaagggctcatataagaatctgactatgttgagatatcatgtccgttctgccatttcatattttaacaagtgggggtggttgtttgataaagataggcgccattataatcagcgatacttgaaaagtattcctatgatcgacagcggggataagatgtcgcaatcatga

SEQ ID NO: 456556 - DNA, 657 bp, Serratia marcescens
atgaatggggcaaggcccattacccacaagcgggcttaccaggttacaaatgacctgctgacagtgtcagacagcatttccgcaccgatgatatttatggcaggcgccgacctcgtcagttcacaccgttcaatacagtcaatcgcaggtaaaacacaaagcattagcgcaagacgaatcacgacccaagcaggttttgagttgctttgcgctaattttttgccccataggtgccccatccataagcaatgcttgggtttctctgtcaatttactatacaattcccaacctaaggataatcctataaaacagggagaagtgatgagtaaaaaatttagtaattatgtaattctattcgttttattcatggttgttggctgtgatcagtcccctccttcatacgcaaccaatgcaaatgaaataattaaaaaggaaatgttttcgctaacaggaacagatgccacctgcacgcttgcagaagatggtctatcgtggttatcgtcatgcaatgtcaatgcagatcacccgaatcctacattctccattaaagaaatcgaaggggttatgcaagcgagtgacaacctgtcatttacgattcgtcccaaaaattctgacgctgaatatttttatagtcagaaaaaattcgcctccaattaa

SEQ ID NO: 456557 - DNA, 360 bp, Serratia marcescens
atgaaagatattccagcttcagttatccagggcctggttgccgctaaaattggtgaaaccgttgcgggcaactatataaagctgcaggagggatggagtgtcgacaacgtgcaaaatcaagccgatggctctgttaagatggctgtgttctattccatattatttttagatttggcagagcagaagtattattccgtcatgcaggtaggtacggtgttgtcaaaggaccagtatggatacactttggttgttcagcagccttttgattactccggatcggactttatgatggacgccctcgactcatggccggttaatgttccctatccaacgttccaggcggaaagggctgatggctga

SEQ ID NO: 456558 - DNA, 186 bp, Serratia marcescens
atgccatctcttcaagaaaacaacaaaatgctgaagacagaactcgtgagacaacggcgcaataccccgcaggataaaacctaccgcgacaccttgggtgacgcgcagtttgccgttttggtgctgcttattgcatcgggcgcactgatttttttcactttggcggccacgctatggctgatgtga

SEQ ID NO: 456559 - DNA, 486 bp, Serratia marcescens
atgaataaaaaaagggctgaagatagcggccatgtgatgacgttaaaccggcaatttgaagaagcgttggggaatctgcagtgcgtcctcgttgcgcggcgtatgctggtgaacccggacggcattagctggccgcaatacgatacgctggacatgttacgtcagcatcaaccaatgacgccgagtgcgatcggcgataaattgggctttgcgcgcagtaaaatgtccaagattttgcgctcactgaaagatcagcagtttgttgaacaagctcccggtaacagcgataaacgggaaatgttgacgcaactgacggaaaagggagcaaaattcctgaagacggccgaggccaaccggcatttaatggctgaacaggtggcctcaagtatgtcgccaggtgagatcgctatttttaccgagctttgtgttaaggccgccagtgcgctgctcgaagaaaatgttaaaagcgttgacggggaaaaataa

SEQ ID NO: 456560 - DNA, 2271 bp, Serratia marcescens
atgaatctgcgggcagatgacaccatcagaattattggcgcaaaacaaaataacctgaagaatatcagtctggaagtgccaaaaaataaaataacggcgtttaccggtgtttcaggctcaggtaaaagctctttggtattcggcaccattgcggcagaatctcagcgccagttgaacgacactttcccgcctttcattcgtcatcgcctgccgcattatggccagcctgaggttgatgagatagataatctgtcggtggctattgtcattgatcaaaagcgtatcggcggtaatgcgcgttccacggtaggaactgcttcggatatttatactttactgaggctgcttttttcccgcgttgctcacccctttgttggctattcgaatgtgttttcctttaatcatccactgggaatgtgcccggaatgtgatggtttgggtgtggccaacgttgtcgatatcgagaagctgatcgatcagaacctgtcgttgaatgagggagcaatccgctattcgtcttttgctcccggcacctggcgttggaaacgctacgtttattcgggattctttgatgcggataaaaagattgcagattattccagtgaagaaaaagcgctgttgctgtatgccgatggtctgacgccgaaggcgcctttgcccggctggcccaaaagcgcaaagtttgaaggcgtgatcacgcgttttacccgtagttatgtaaaacatgagtcaaaagaaacccatagagaagagtttcagcagttggttttcagacaaacctgtccttcttgtggcggtatgagattaagtgcgaagatactttccagccgaattgcagggaaaaatattggtgaatgcgccacgatgccgatcgtcgaactcgtgtcattcattgagaaactggattatcccgcagtgaaaccgctgcttgaggcgttgatggaacggctggaagccatgcgtgccgtagggttgggatacctggatctaaaccgcgcgactcctagtctgtccggtggcgaatcccagaggctgaagatggtcaggcacctaggcagcagtttaaccggtatgctttacatcatcgatgaacccagcaccggtctgcaccccgcggacattgtcagactgaatgggttaatcaaacagttacgggataaaggcaataccattctgatggtggaacatgacccggatatgattgctatcgctgagcatatcattgacttgggaccgggggcgggcgctcagggggggaatgtcgtgtttcaaggcgatctgtctgcactacagcgaagtaagacgctgacgggaagttatttctttgcgcggacgcagatcaatacacgacccaggcgtgcgaaagggtttatttcggtgaaaaatgccaggctgcataatttgcagcatgtgtcggtagatgtgccgttaaatgttatgactgtcgtgaccggggtggccggttcaggtaaaagttctctgattctgggggagttggcgccgcgttgtcctgatgcgatagtcattgatcaaaaagctattcatacctcaacgcgctcgcatatcgcttcttggtgtggggcctttgacactctacgctcattgtttgccgcaaagaatcatgtctccgcttcctggttcagcgccaataatgtaaaaggctcatgtccggaatgcaaagggttaggcgtgattcaaaccgatctggcctttatggattcagtagtgctgccttgcgatgcgtgtcaggggcagcgctacaacccgcaggcgctaggttatcgttatcgaggaaagaatattgctgaaacgctcgctatgccagtgagtgaggccgctgatttttttcatgatgatccgccactgtcgcatatcctgcataatctggttgacgtaggcttagggtatctgcagttgggagagtcgttgaaccatctttctggtggcgaatgccagcgacttaagctggcatcgcatttaaataaagacggagatgtgtatatttttgatgaacccactaccggattgcatcccagcgacgcggcttctttgatcaaactgtttaatcaactggttgataacggtaattcggtcattattattgaacacaatatcgaactgatcgcacaggctgactggattattgacatggggccatatgctggccaagagggcgggaagttactgttcagcggcacgccggaaacaatgctggcctgccattattcgttgaccgcagactggttgcgaaaacattgccaattattgtga

SEQ ID NO: 456561 - DNA, 219 bp, Serratia marcescens
atgagccgcaatgccgcctttccgcccagcgccgccgatttcctgctggcgtcgaaacgctgtgaaattaccgtcctgcaacagctgctgcacatggggcaactggtgggagaggtaagccaactgatccatatgctgcagcgtgagcggggcacggtgaatatttatctctgctcacagggcgcgctgttctgtgagcatattcctgtttcccactga

SEQ ID NO: 456562 - DNA, 591 bp, Serratia marcescens
gtggtaaaggcgcagaaagcagcgcaggttggaacatcaaagaaaaccgcgaagcttaatcgctttcaacagatgtccctctttgagggacatctgcccaccaaggagaaaaggatgaaacggccttcatttcagcaagcttggcaacgattctctgagattaacgtagatatatccgaagtcggaaagaaaattggcggtaatgttaacttaaacattcaattaggtattgatgatccgctacaaggattcactaacgcatgtgcaatacgcatgagctacacattgaattactcaggttttaaagttgaacgaggtagttggaaaaccgtctccgggaaagataagaactggtatatttatcgcgttcaggacatcattaaatttcttacttataaatttggccgcccagataaaaccgttagaaatcctacaccttctgattttgccaatgataaaggggttcttgtcttcactgtaccggggtggaatgacgcaagtggacatgcaacactgtgggatggcaaagcttgctccgaccattgttatttccccaaggcaagtgaggcatcaatatggcaattaaagtaa

SEQ ID NO: 456563 - DNA, 267 bp, Serratia marcescens
atgatcacattaaatatcgaagaaatagctaacaaagaaaacggattcaataaagcttttgataatgacggcttaaaagtttcatcggataaatgtataccaacatacaactatccgtttaaagcaggtcatgcttacaccgtttcaatcaccctgcaatcacgagataaagagaaaaaaggaatcgtacctgcagggcgagcatacggtgttggtttcaccttaacgggtaaggatgatgagctggttataagctctatcaattaa

SEQ ID NO: 456564 - DNA, 267 bp, Serratia marcescens
atgacctcactcagtattgatgaacccggtaacgaagaaagcatattcaacaaaatttatgatgctggcggcgtagcagtttcatctgataaatgtataccaacatacaactatccgtttaaatctggccatacttataacgtttccatcaccctgcgttcgcaagataaaaagagaaagggcatcgtgccggcagctcgcttatacgacatcagcttcaccttaacgggtaaggatgatgagctggtgataagttccatgcattaa

SEQ ID NO: 456565 - DNA, 516 bp, Serratia marcescens
atgaaccttaagcatggtattttacttttatccatgatcgcgtcttgttctgcgttcgcatcaacatggaaggtatcgtatggacacgatgaaatgcgtgggacaactcaaaaacaggcttatacaacttctgataacgtggttcattttgacgctccgtacaatggtgggtcacgtctttggataatgactgcatctgcaaggactaagctggataaaggtcaaaaacctgacagtctgcctatcgacaaagcaatgttgtttatccataagggacagttccagtgtaacccgtatgatgattgccacatttcagccaagtttgatgatggggagatacaaacattcccgatgaaggaggttagtgccgggaagactgatcttataatgttctcaggtgcggaagagtttataaacaatctcaaaagccacaaaacggttattattgaagctgaattttacggctcaggtagaaggcaatttaaattcaatttagataatttccctggtcaataa

SEQ ID NO: 456566 - DNA, 1149 bp, Serratia marcescens
atggggttcttctcagaatccatagttgattttattgatcgtgaaaagttgatcaagttatgggtaaatacatattcaagtgttagctcagaattacctacgtttagtttagcgccattgccatcaattaatgggatagatgaagcgtatttagcagttgtaaaagcagaggattatgtcaaaaatcttcttattacggaagatggtacattgcgtggtcatgtgttttttgaaaacgtacgatcatttttaggtgtggataatagtgttaatgctaaaattattgaaacaattaaaagtaaagatgcatcctcgcgctttcctgtattgaataatgggatcactatagtgagccctgatgtaagggtacaaaataataatattcatcttgagaattttcaagtggttaatggatgccagacttcgaatgttttatatgagtgtagggatgtgttagatagtagcatgatgctcaatcttaaaattgttgagacgtcaaatgaagatgttttttccgagttagtaagggcaacaaacagccagacacgagttgatgaaaatcaattcttatcccttaaacctattgccaaaaaggttgaagcatattttgactcttttgaggggcaggatgcacgtttgtattttgaacggcgggatagacagtttgcagggaaggatattccagcgattagggtttttccactcaatcaagctgtaaaatgtgtatcagcggtattttttagacggcctgacttatcttatagatatcctaagagtatgtacgagcagttaggtaataaaatatttgcagatgatattcgagaagttgttttctatacggcctgtttggttttataccgatttaatcttttggcttctaatgctgaaataccatcgagtgttagaaaatataaatggcatatcataaccttaactgtggccttagtcgctggtaaggtaatacctaagctaaataataaaaaaatagaaacatattgcaataaagtaaccgtggcattctctaagcatgattctaatgtggttgatgtgtttaaaaaggctgcagatatagttttgggtttggatggtttatcggatgataaaatgaagaggcaaacaacattagatgacctgctaaataaagtttga

SEQ ID NO: 456567 - DNA, 933 bp, Serratia marcescens
atggaacttctaaattatatttctaacggtctttttctcagtgacacagaggcaaggagatatatttcaactattcctcggcgttataaaaaatatcatatcttaaaacgaaatggtaaagactttagattaatcgctcaacctgcaaggcaggttaagtcgttacaatctgctgttttgaatcatatatctgatgtgctacaagtgcatgggagcgctttcgcatatgaatcttcaaaaggcattaaagccaatgctttaatacattgtagaaatgactatttgcttaaaatggatttcaaaaatttctttttaagcattaagccgttcaactttttgagaagcttaaaagagttcggcattgaactaagtgaaactgatgtatttgtaattgaaaacctttttttctggaagttgagaagaagtagtcctcttcgactgagtataggcgcgccttcatccccgaagatttcgaacgttgttatgtatttttttgatgaagaaatgacaaaaaaatgtgcagcgcttggaataacttattcgcgttatgcagatgatttgacattcagtactaaagtaaaaggtgtgttgttcaatgtgcctaagatagtgcgtgaaatacttaatgaagtaaatttaagaaatataaaaataaatcatgaaaaaacggtgttttcatctagaaaatttaatcgccatattacaggtgtaacgatcactccagatggtcacctttcattggggcgagagagaaagcgccttcttagaagtaaaatacatcactacgttagtggcgtattgtcttcaaaagaaattcttactcttaaaggggagatgggttatgcaaaattcatcgagcatagcttttatcaatcaatgattaatcgctatggtgtagcagtggttgatgcaatagctaagtacgaaatctga

SEQ ID NO: 456568 - DNA, 876 bp, Serratia marcescens
atgaatgcgctccctatgagtgtccgagaccatatatttacatatgtggctggaaataatcctggtttgtccgactcccttgtattggctgaaaacttccatgattattttaaagatggagcttattctgatttaatgagttttgaggacgatattgcaaatatatcaactcttgttgttatttgtctggaaagtgctggatctttagtcgagttggggctgtttgtaaacaaaaaatctcttgctcagaaattacatattgtagctcccttggcggaaattgaagggaatgaagagaaaaaaatcccaccaaggtcttcttttatatatttaggccctttggaatatctaaaaagaatcgatgatgcttcagtatctgtctacccatggccaaaatctgagagtatgaattacgatgaagttgagttgatctatcacgatatatactccagactgaaacgagttaaaaaaacagagcgttataatactgaaaatactggacacctcgcaatattaatatatgaaataatacttttatcagagcctattaagaaaacagaaatagagtgggctctatattgtatggacatagatgtacctcaaaaaatcatctctcggttactttatttattgggtaaaatgaatttgacatcgtctctgtcatatagtggtaccgactattattattcccgcggacgcagagaaagcaaactcaaatttggtattagcgctagtggcaagattaaagactctatgaatattaaagtcgctattcgtcagtcttaccttagcatggatgctagggatatggatgagacagccaaaaaaagaaaaaatgtgcttagtcaaataaatattgtacggggaggtgcttga

SEQ ID NO: 456569 - DNA, 1068 bp, Serratia marcescens
atgaacgaaggttttcatgtcgatcataggttacgtaatcttggggcgactgagcgctatgcatggttaatagaccctggcagtccaaaacatttcacgcttgctgcagaggttacaggcagcaccacgattgatagatggggagaggcgctaaaatcggtacagggcagacatcctataattaatgcttttgttaatactaataataatggtcatcaatatttttcttatagttcgtctgttaacatcccactgcgaattgtttttcttgatagaataaatgatatagatcatgaaattaaaagagagttctcagccccatttggtgttggcgatacttcttttatcaaggttgccttactatacagtaaagagcacagtataattattgtcacttctcatcattccattgccgatggattatctttgcttcactttatgcgtgacctactggataccatggctgggaagcctttacctcctctggagctacagccaacgatagacgatctatgtatacgcggtggtgttcccgtagctgatatcgattctccgcctgcggcagaggagtttcggccttataccggacgaagtctggcgaagctggtcattcaccgaaaacgtctttcccctgaattgacatccagactgcgtgaacatgcccggcgagaagagacaacagttcacggcgctctgtcagcagcttttgccattgctttgttcaagtcgaaaagatggtctgaaagggctgttcgcatctgcacgccggtagatgtgcgtaaaatattttctctcgattatgggctaagtttttccgttgtatttccaacctatagttatgatgttaaaaattattcttatttttgggatcttgcccgcgcgattattgatgatttaaaacctgtccgaacccgggagggggtatccgcctctattcatgcttttcatgattttatggagggggccagtctgaatgagttgatggagtttgataaaaaacctgtgcaccagatattctcatctctaaccttggggttgtccccttctctgcagatatcggtgagttaa

SEQ ID NO: 456570 - DNA, 741 bp, Serratia marcescens
atgaatgatttatataatcgggtggtttttattaccggagccagcagcggaattggccgggctattgctatcaatttagccaggaaaaaactttcggttgttctggtggcccgcaggttggcacatatcaatagtctggctgatgaaattacagcgtcaggtggtcatgcattggcagtccaggcggatgtgacaaattttgacgacgttaaaaatgccatggcgagagcaatatcgttctatggccatattgatattgtcattaataatgctggttttatggctatagcaccgttgaatatgctgaaggttgaagagtgggagaaaatggttgatgtgaatatcaaaggggtcctttatggtattgctgccgcacttcccttattcgaacgtcagcagtcagggcattttattaacattgcttccgttgccggcattaaggttctttgccccggcggcgtggtgtacagcgctaccaagtttgccgtccgggcgctaagtgagggtgtacgctatgagtcagggaaaaatataagaacaacaatcatttcccctggcgttgttgaaagtgaacttatattgggcagttcggatgcagagagtaaaaagtttttaaatgaattctataaacaggctattccggcagagagcgtcgccaacgccgtaagttacgccatcgaacaacccgaagacgttgatattaatgagatagttattcgtccgacatgtgaggatttttag

SEQ ID NO: 456571 - DNA, 300 bp, Serratia marcescens
atgcagagtacccggaagaaggcactatcgcattggagggagcgcagtgagcaagtacacattattgtcgagtatgaagacgagaatgagcctgcggtcggctttggcacgaaaattctcggtggccgcctgtgtatggtggcgttcgaagatattcggaagtaccagttcgaagagaaagaagcttataccctgaagtcattccttgacgagaaccagagcgacttccgggactgctgcgaagagcacgaagtatccgtggaaaccattcacgaaaaactctatcagcaaaccgtgtga

SEQ ID NO: 456572 - DNA, 843 bp, Serratia marcescens
atgctgttttgtttgcattctggacttgggttttcccagccagataaatttcctgctggtaaatttgagcttaacataggagccagaccctcagctccgtactcagccttgcggaattataatgcagatttaacggctcagggtagtggcccgtcattttctgttactgtttcacggcatcatataattccatttaatttgttaaggagtttttataatcgtgttgcagaaagggagcgattgagaaacctaagcggatttcttaatacctactcgagtaatttatacctgtatgccagtagcaacggggttgattgtggtcggttaggtaatgatctcgtcgatgctggtaatttgggcttagctcaaggctatggtatggcaacggcaggagggagtaatcctgctctaggatttgatactttcgaacagttttatgcttggctgccaggaaatctattcattggcccaaacaatcgctccgatgacccccatgaaggttttgaaacaaacgccgctgttgttgtaggtacggataactttgatattatatctagagtataccgagatataagtttatatttatccaacaatgacgatgcattgttgaattctatttcggctaacttaagtagaatatcgaataggaaaacaatctacaatctcaatccaaatgattgggagtttgttaatggccagtatagactttccaagtcaaaaaaatcactaagagaacttgcacctagtgataatataaaaacctcggatgaatgtaaggaactcactccgacttttatgaacactttatctgctgtattaattctaaatagagaaacaaattga

SEQ ID NO: 456573 - DNA, 159 bp, Serratia marcescens
atgagctacaacaaaaaagtttggctagcgatgctgttgctgtgcaccctgttttggacggcggtcatcggctcggcctgcgcgctgtatggctaccaacatcggccagcccattccgcagaacaaaagtgcgacgcggccagccatccgtaccaataa

SEQ ID NO: 456574 - DNA, 483 bp, Serratia marcescens
atggaacggctacctttcccgccgcgcgcaagccggccgatggttcaggcgcgcaccaaaggcggcggtcaggtgataccggtgtcgccggaatgttcgattaaccagggcaacgttattgaggcgaacttccatacgctgcagacggatcaggtggtcagccatagcgatggcgagcgctacagtaaggatattgccttgcgctttagctgtaatagcagcctgacgcaggatatcaaggtgcagctagtggcggatagcgccggtttttcatcagacctgatccgtaccgataataacgccttagggtttgcgctcaagcatcaggggcagttggtgaagccgatggcgactttccccgcccggcttgaggcggggacgggcaatgcgacgattaccctgacgccggtcaaggatccgcaagcgccattgccgagcggtgcgtttaacgcctcggcgacgctggttattgcctcgctttag

SEQ ID NO: 456575 - DNA, 1005 bp, Serratia marcescens
atgaaatggacggtatggcttaccctgttatttttctggctgcccgctcatgcggaaccggataatacctgctggggcgatccggtaaatcttgccgtggtggatattgcctccgcgccttttaccagtaataaaaaaggggcggaagcaacaatgaattatcggacaaaaccttctgagtttagtgggatttgtaatagaaatgtagaatttgactcaatgacccactatgtagatatgggggcgacgcttataccttcagaggttaattctgggtattttaaattaaccgatgatgttgatgttcggatagggagcggaacgtacgtagtgaagtattttcctttggaaccgtctgattcattgattggctcgtttaccccttcatatgggcataataccaagactgacgggtttaccgtagctggtgagggtgtcataaaaataaagttaaggcgggatattattggcggcgctattgtcgtaccgccaaataccgaacttttttcggcctaccgggttatgaataagcaaccttacccgccgcgcccaagccggccgttggttcaagcgcgcaccaaaggcggcgggcaggtgataccggtgtcgccggaatgttcgattaaccagggcaacgttattgaggcgaacttccatacgctgcagacggatctggtggcaggccgcagcgatggcgagcgctacagtaaggatattgccttgcgctttagctgtaatagcagcctgacgcaggatatcaaggtgcagatggtggcggatagcgccggtttttcatcagacctgatccgtaccgataataacgccttagggtttgcgctccagcatcaggggcagttggtgaagccgatggcgaccttccccgcccgacttgaagcgggggcgggcaatgcgacgattaccctgacgccggtcaaggatccgcaagcggcattaccgagcggtgcgtttaacgcctcggcgacgctggtgattttgtcgctttag

SEQ ID NO: 456576 - DNA, 1017 bp, Serratia marcescens
atgaagttgttaatcggtttgccattgatttttttatccttctctgtttttgcggagcctgccgatacctgctggggtgagccggtcggtagcgccagcatcacgctcggcaagctgccatttaccagtaataaaaagggtaagactgcaacggtcagtttttctgccaaaccggggtcatttacaggtttttgccattttagtgaggagacgcgcattgtcggcaatacaactctgattggagatgcattaacccgttcagacgttaatccgggttacttgaaattaacggatgatgtagatatcaatatagaaataagtggtaactatgttccatttaactttggaaacaccggggcaacgggcgttactgatatattggataattttgttcctctcccggccggagagcgtgtcccagccaagaattttaaatattcgacgttcggtgaaatgcattttaagttacgccgggacgttatcggcggcgcggtaattattcctggtgacgttgaactgtattcggtgtatgccagcgtacgtcgcccgacacttgccagcagaccggtgtatcgggtgaaaacgcaatcatcttcgcaaattataacggtgccgccagaatgcagtattaatcagggaaagaccattgaggttaactttgacaacgtaaaaacaacctcaattcctgacgatattgctaaaagtgaaacgggctacgtcagggacttggcgttgaattttagctgtaataccagcctgacgcaggatattcaggtgcgattggtggccgacgccagcaacttttcgtcagcgttgatccgctcgaataaaccaaggttgggatttgtgatgaagcataatggtcaggtgattaaaccttggggatcgttccggtctcggctggaaggcggtaaaagcaatgaaaccattacgctgtcgccggtcaaagctcctgaacttaccttagaaggtggcccgtttagcgcgtcggctacgttgattattcagtcgctgtaa

SEQ ID NO: 456577 - DNA, 612 bp, Serratia marcescens
atgaatcagaccatttccgtttttatcgatgacccggaccacttttttgtcatggggctaagactggcgctggagcaacactttaccgccaggaacgttgcggtgtgtcacctatacagtgcggcttcaccggccgatttggtgattatcgccgccggcgagggggtggcggggcagttctgccgtctgccgcgcccggattactggatgcccacggcatacctgactctgcgtgagcggccggaggtaccgttgctgacgctgccggcctgccagcgggaaaccggccgcctgtaccgctgcgatccgctggaaaaaattatgcatcagattgatgtcgccctgaaggacagtgaaatgcatcatgctcgtatgcatcgctgttattggtgtgaccagcatgcattaacgcagcgtgaatatgagattgtgcggcgtttcggccgtggcgatctgccgcaggatattgcggcgcagctacagctcagcatcaaaaccgtcagcctgcacaaacgcgcgatgatgcgcaagatgcacctgaagaacaacgccgatttgtatcactggttgcagaatggtggtttaaacaaccagccggtttcatcgcgataa

SEQ ID NO: 456578 - DNA, 174 bp, Serratia marcescens
atgcgcttcccgattgataatttttcttttttattattttccatcactaagctctttctctacaagatccagaatctgattgaatgctgcctctccttctcaatgcttcataacaataaagtaaaggaagtcataataacaatgaactgcccccggaaatactggagaaaatga

SEQ ID NO: 456579 - DNA, 255 bp, Serratia marcescens
atggccatcatcaccgccgccggtattaccatcatcaccgccaccggtatggccatcatcaccgccaccggtattgccgccgccgttgtggctgccgtcatcgccaccgccggtatggccgtcgtcaccgccggcgcctttctgccggataatcagatcgacagatttatcgtcgtttgccaacgatgcatccaggaaggcagagtccagcacggccttgccaaatgtgccgttgagatttttttcggaggttaa

SEQ ID NO: 456580 - DNA, 366 bp, Serratia marcescens
atgaaaaacgtatttatcttatcggcgcttggcctgtctctgctggcttctgccaacgttatggcagcaaataattttccacgcgattctaggttctcaagcaccacaggcggcgaaaaaatcctgcttgaaggtgatgacggttaccgaacatccacctatacgcagcgggatctcgatgaacttatcaatcaacagaaaaatcatggaagggagctacaacagctgcgggatggaaacagggataaggagcgtgagatcaatgagctaaaacgttcgctgcaggaagaaaacaggaataaggatcgtcagatcgatgagctaaaacgttcgttgcaggaactgagcaataaggtgaaaggctag

SEQ ID NO: 456581 - DNA, 723 bp, Serratia marcescens
atggcggtagggatgaagaacaaaggcgtgatgcgctggttggcgccgatcgtagcattattggtggtgatgcagctggctggctgcggcgataaagagccggagcagcgcaaggcatttatcgactatctgcaaaacaccgtaatgcgtagcggcgtaaaaacacccatgctgagcgaagaccagaagcggaaattcggtaactatgccggtgattacgcgattttattcacattttcacaacagttagacaaatccgtcgacgccagcctggcgcctgcgttcgatcagataagccagatccatactccgcaggactatatcagcaagcgcgacgggttacagcagtcgcttggcacgctcaatctgttggggcaacaggtacagaccgccaagtcgcaggcggacagcgccaaggcggcgctgaagcagccggacgatctgaaggcggtgtataaccaggcttatgacaaaatcgttaccgcacaagctaatgtgttgatgccgaccatcccggccgccgccggctttatccaggagctggtgcaggtgggcgacttcctgcgggcacagggggatcaggtcagctttaacaacggcggtgtgcagttccgcaatcagcagcaggtgacgcagtacaacgccatggtggccagtctgggggcgaagctgcagaacctgcagaatgcacagaaagccatccgtgaggtggtgttgcgctaa

SEQ ID NO: 456582 - DNA, 330 bp, Serratia marcescens
atggcgctcgcgatcgtcatttccatcctgattttcggcggcttttttagctaccttggctacctgttttaccgcgatcgcaagatagacgcccagggacgggagctgttggcgcacgtggaagaggtgcattaccgcagctccaacgataacggcagcatcaatatccgctaccggctgtcgtggcaggagggcgacgccaccaaagaggtggaaggcaaggagaccatcccggccttctattcgtcgaaggtgcagcaaggcagcgacgtgacgatccgctacctggacgacgaccatattgcgtttgtgttcgatcgagaccgttag

SEQ ID NO: 456583 - DNA, 669 bp, Serratia marcescens
atgaaattaaagatttttctacctgtcgcgatttttggttctttttcaagtttagctatggctgacagttttaatttagaaaatccagatggtttgagctatcagctaaaatatggagagactgttgtcaaagagggcaaagacacaagattctatgatgcacgaaatcctgaatcttcacagagcagcatttcaatcttagtcaaagatgaagatggtactaacattgctgaaaagtcagtaccttcctcatcccaagatggaaatagtcatggatgtaactattcaatgattgttacatcacatcatggctggagaatcactgggaactgcattgaaactgaaggtaactacaaacctgatgcaccctctatctatactttagaaaaccattcaaagaaaaaagtttacccagctttttcagtggataagcccaatgatttttcttcagattctgtcttgggatatctaaatccccatgaaaaaaggttgtactcagtaaatactgattactggaaggcaacatccatcaaaaatcattcaatgattcaagttggcttttataatcctttcacaacaaaatacattccgtgcggtgataaaactgaggagattgataaggatagagttttcacactcaatgaggatttgacctgttctataaaataa

SEQ ID NO: 456584 - DNA, 741 bp, Serratia marcescens
ttgagtagtgtattttctataattgaaatattcagtgacgagggtgtaaaatcaaccgtagatctactaggggggatcattggaatatttggcagccttttcgcagcagtattgttttcaataaaatttttcagaaagcctataggagataagcaggagtttttcagtggagctggtgtaccaagttggttgattaagttattcttcatctcaatccccttgaaaaaggttcctcaaaatacactcactgataaaatatcatcagggctaatcatttcaatattaatttcaggcttagtttttttctcctatatgcatattcagacactacgtattcagaaagggtggacactattaacactgacaactacgcaggaaagtttttttatcactcatgactcagccaaggattcatctttatttaatcgtcatccttggtcaattaacaaagaaatgtgtgaaaaaaataacattggggagatttggaaagaaaacaacatatcaagtgatctggcaaacttaatttgcaaatcatttattgatgagaattatcagaaaaaaataaataattacatcagtaatgtagataaagagaaaagtatcctttatcccatcatcatcattgcagaagtattcatgctgtggttattaaccagtataatatgcactttattatttaaaataaaagttaggaattacattatttcacaacaggaaaaagcacatgaatatataacttaa

SEQ ID NO: 456585 - DNA, 1413 bp, Serratia marcescens
atgttaagcaagaagaaaaccaaaaatctttctgccttcggagtactaatcctggtcatgggacaggtattaccgcaaatagacttctcaatagttaatgttgctcttgacgtaataggtaaggcactaaaaaccgatgagacagggctcattttcattgtttcattatatggcttaagtttcgcgtcgctcattgccaccggagggcggctaggcgataagtatggcagaaagcgtctgtttttggtgggtattatcgggttttgtcttgcttcagcaatttgcgggttcgctacgggtattatctcaatgctcatagggcgtgcactccaaggtttttttgccgctctcctgttgccacagatactcgctaccatccatacaacattagagggtgaacgccatcgctacgccgtaggaatatatacatcaattgccggtctttctgtcgttataggtcaagtggtaggaggctggttagtttcggcaaatctatggggtttaggctggcgcattgccttttttattaatgtgcctatttgtattctcatatttgcctttggttgttttttcatccctgaaaccaaatcagatgaaccccagcaacatatggacgttggtgggatcgtattgttcattttgtgcctgctatttgtcatgaccccggtatctttaggaaaacactggcctgaactatggtggttattgttaggtaccttgccttgtggagcactattatggaaggtagagaagtcacatgaactggcaggccgcaaggccatcttaccgccgtcgctgttcaagaccccgatggtgatcaatggatttgtcagtcaaatgatcgtgacattcgcctatcctggatacctgtttgtcacggctttatgcttgcaaagtgaaataggattcacaccttttgcatcaggcaatacgtttctggcactcggagtaatgttctttatcggttcgttgaccagtaaaaaattaagccagcggattggtgatcataaatgttatgccctaggggcaatgattactgctatcggatttttggcaacgatcttgctatttcatcgtttcagttatgacctgaagttttatgacttatggatagccacgggcatagtcggattcggtaacgctattatgttgacctcagcttacaggctggcattatcacgggttgagaaacaccatgccagtgaagcaagtagcgcattggcaaccgtacaacagggatgttttgcgttaggaacggcatttaccggtgcaatctattcattggcgttaactcagggatatttatattccatcacagtatcaatcggtgtgttatcattggttgtgctctttgtcggcgtccctatttatatcaaaaccacgcgcgaaatgtcagaaatagtgcataactaa

SEQ ID NO: 456586 - DNA, 840 bp, Serratia marcescens
atgaatcaagataaccgaaaattgatgggcgatttcttacgtgcaaaaagagaaagtatttctcctgaaatgattggtttgacaaaaccatccagaacccgaactcgcggattaagaagagaggatgtagccgatctttcagggattagtacaatctggtacagtaaaattgaacgtggtcaagttgcaggtatttcaccgcaggtgctgagggctatttcgaagactttgcggttgactacattggaatatgaatacttatgcaatttgatttcaccacgagaaagacttcaaaaagatccctgctgtacggtttctgagcatgcatcccagttactattgcaactgaatccattgccttcattactgatgaatgattatttggacatcatcgcgtgtaattccgcgtttgagattatggttggttttagtattgatgcgcttcctcttagcgaaaaaaattacctttgtctgacaattggcaatgttgcctggcaaaaattcttatgtatcgatgatgatgaacagctggaactgcaaataacgcgcatggccggcttcctgagagacacattggcccgattgccggatgacgaaatactgaagaaaaaaattaatcgctttagagagttatcacccgtttttgatcgggtctgggcggagaataccgtattaaaacctgagggggtgatatatgtctatcatcatgaaaaactgggtaaaatatcgctggataaacagctgtggtggaatttcagtggtgatgccagtagcagattaaatatttaccatcctcaagacgaggttgatcgtcaacgcttgttgcaaataatgccataa

SEQ ID NO: 456587 - DNA, 1050 bp, Serratia marcescens
atggccaaccgccaccccgcctcaaaccgtcttctcagcgttgatgacatctaccgccagccggtcggcccggcgagccatccgaaaagcctgtatcacctgctgctgcggttcgtgcggtggcggcgggagcgtaactggtcggaaacgacgctgaaggtgcagacgcatcacagctaccggttcatcctgtgggcggcggagcgcgggctgcaccatgcgggggacatcagccggccggtgctggagagctaccagcgttacctgtacggctaccggaaagcgaacggcgagccgctgaccacgcggacgcaacgcacgacgctgcagccgctgcaggtgtggttcagctggatgacgaaacagggagtgatactggcgaacccggcggcggaccttgagctgccgaggctggagaaacggctgccgcgtaccctcctgagcgtggagcaggtggaagatatcctgagccggtgcgacctgacgacggctcaggggatacgcgaccgtgcgctgatggagctgctgtggtcaacgggtatccggcggggtgaggcggcagggcttgagatatacagcgcggacttcgggcggcagatactgaccgtggtgcagggcaaggggaagcaggaccgggtggtgccggtgggggagcggtcgctgtggtggctggagcgctatatcgttgacgtcaggccggaaatactggtcagcccggactgcaaggcgctgttcgtggcgatggacggtgtggcggggctgacggcgaacggcataaccggcgcagtgtcgccgtacctgcgggcggcgggcatcgacaagggaagctgccacctgttccggcacgcgatggcgacgcagatgctggagaacggggcggacctgcggtggatacaggcgatgctgggacaccggagcgtggagagcacgcagctttacacgcaggtgagcatccgtgcgctgcaggcggtgcatgcgagtacgcatccggcggagcagcgggagaagccggagccggatgccgctgcggagccgccggacagggcgtaa

SEQ ID NO: 456588 - DNA, 690 bp, Serratia marcescens
atgtcacaggaagaaaagtaccagaaagcgcaggatgcactggttaaggcggctgaagagtttaaggcgaagaactgtgccggactcagtgcagaagcctgtggcgctaaaatggatgcacaccggaatgagttgttggccggggctgcggaatttggtagcgactttatccctgtctatggcgatatcaaaagctttgctgaagctaagagtgctctggattatctggttgctacagtaggtctgttgcctgtcttaggagatgcggcggccaagaccatcaaggcagcagagaaggcgctggcgaagggagatattgccgaggcatcgcggctgataaatgaaagcagtcagcagatatcagctaaagctaaagacgttcagatttggtcagagaccaagaaaaaagaacctgtttcaaatgtttatggccattgggataaacacaaaagagagtttcctgagtatcacaattcgaagcagtatgtggaagctgcccatagttttgttaataatccaccaccaggaacattaactaaggtccgtagcaatggggaaactgtttattacaatccttcaactaatacatttgcggtaaaaaggactgatggggtgcctcggacgatgtttagaccagacccagcagaccatggttataaaacaaacttggattattttaatgcacaatga

SEQ ID NO: 456589 - DNA, 135 bp, Serratia marcescens
atgccgggttgcccggtgttcaccgcccaagagccggaacttatgcaggcactgcgcaagctctgtaagctccctgcccacaagcaaccccaggcaactgattttatcgaggtgatcagtaagccacaaaggtag

SEQ ID NO: 456590 - DNA, 270 bp, Serratia marcescens
atggctgggatttttgttttacaggtcagttggttatgtctcttccgccagccggacgatcggctgtcccggttcggcgagcacctctatcttctggccggtggtaaagcccagcggctcgagccatttaccggtgagggtgagctgcgggagcggatggggcctgccgccgttggggtgatagccgacaatatgcctgcgggctggaacgcatcagcggacgtcagcgccagccgcgacaaaccgtacagcaactacggtagcgcgtag

SEQ ID NO: 456591 - DNA, 744 bp, Serratia marcescens
atggagataagggattttagaatggatacttcgttattggcagcgttggataaggacggtcaggacaaattcaagaaagcaattgctgcattgcagggcgacatcagcgtggcggcgacagtgatgtacgttgaccctaaacttcgcctcgagtactcccgtagaatcaaaatgatgtcggatgatttgtatggcaaggcatcacgcggagtgattacctgggagcaggctgcggcagaagcaaacctgacgcgaaacaccattatggagttaatccgtggtcgaagcacgccgataggtcaatctttagcccaaaggcttaaggtacagggaaaaacgtttaatgaactcattgcgtataaaaccagggcgttgtatggccgccaggctaattttcgaaacctctcagaaacgcagaaaaatcgggtttatgcggcggtagttgagtcggctggtaagtccaaccatcaggttaatagtagaatgcagcgtctttctgctgcgggtaaaggattagcttttctgacgttggcgattgcggtgtacgagatttatgatgctgatgacaaagtaaaagaaacgaaacgccaggtggcgattggtggtgcaggtattgccggtggctgggccggcggcgcaattgctggtttgatatgtggaccaggagcgccggtctgtgctgttgttggcgcttttgctggcggcgcattagccgcatgggaaatgagcggcatctggaggtag

SEQ ID NO: 456592 - DNA, 477 bp, Serratia marcescens
atgttcagcgaagcaacatttgtttctcttggagagaggaataacgtcgccggtatcgatggcggttatgaggttctgctgtcagggcagggaagcggtatttttgttcccttccagatgttggaagccgccgtcagcattgatgaatggcgcttattgctgtttctcacggatgatgtgccttacgaagaaatactcaatatctcgttgttggaccggcgtcatggcatcctggaaacgttgtcgcttggcggtgcttatcttaacgggacgttcagtgaactgcggattttatccgatgccgtgtcgttccgttttattggcgatacgacgtggaaagttggcgttgctgagaagccctttttcaaatttcccttgatcggcgatccgcgtggcgtttcacgcccgatagcattatcacattatctgcgtatttttgccgatccggcccccgcgagagcgtatggcggtcggtaa

SEQ ID NO: 456593 - DNA, 219 bp, Serratia marcescens
atgcgtggagagggaaactttcactggttagacaaatttggtgccatactgtcagcccccttaactatcctttttgtatctctatcttctttaaagatcataggtgaagaaaattcatttatagatgtttttttgtctgttgttattttcatcggtttctttggctcttttaaaatagtaaaaagggttcttacctggttttttagcaacgttaaatga

SEQ ID NO: 456594 - DNA, 216 bp, Serratia marcescens
atgaaccggagcgacggcaaaggcgtcgcggcctgcttcgccactgaagcagaaaaacgtgcggcggtggcaaaactttccggcctgctgcctgcaccggcgtatacggaaaaggagtcacaaatggcctcctcactgctggcgctgaaccgggtatcagccgccatgcaactgtcggtggccggactacggctcaacagaatagtattggtttga

SEQ ID NO: 456595 - DNA, 564 bp, Serratia marcescens
atgctgaccttacaggaagttggagagcaaacccgcaatgcgctacagttattaatcgatagaatggggctggggttggcagtaggcccactcaaggaaacggattaccggttgctctcatcagggatgtttggtgagctgaattgggagtgggggatcagtcagtacacggggcatccaaacagcattgagctttgcttcaaaatattagcggagaaagagggatacccggcagggattgctttatgtgcgtttcgctcagatacgagatttttcgaaatctacatgattgaaaactttgtcagggatgatgaaagccatcctctttataaacgaatggctttatttacctttatgggcgccttcattttcactgatgcggttcaaggaacacatatcgttattgtggaacccgatgctgagttacgcgatttttattcgacgtttggatttgctgacgatccagaatgttcttaccgtatggtctgtacgcttgaaatgttaaagagtgtgatgactactccagaaatttggggagggtcgtcagagcagatacaagtttag

SEQ ID NO: 456596 - DNA, 645 bp, Serratia marcescens
atggactatcaagctattgctaaaaggattgtacaagtaatcgtatcacctgacacagtggtgggctttgctcatggggtagtgtctgtaccggttgatcttggttatcttgcctactcatatcttgatacaggcaatcggtacaacaaccaaacagaaaccatcagattagctaatgccataaagaaaggcatactagaaaaccctaaccttagtaagaccatcaagacaatatttgatcagttcaactcatatgtacctactgatacgcagaactcgatatacagcaagaccattgcttctataccgggacgcatgattaccaactctataatagcagccaaaataaccacagcagttatgcagacaacagagtacagctaccttatccagatgcgtagtgcgctcttgggtactgttttgcttatgggtggtatggcacaaagaagtatatacaaatcaagggcattgagtgaaaagaatcgtgctgtctatatctctttaaggacacagggcgatttggacttcatgtacttcttgatacagccgtttgttgatccgttcattgatgctattactattcggcaaaggcatggacaagaagcattcaacagattgttgtctatggtagaggaaaggttatga

SEQ ID NO: 456597 - DNA, 189 bp, Serratia marcescens
gtgatcgatgacggcaccagcgtttctaccgcaccggcggacaacggctgggcttatcaggcgatgtatcccaacccgtacctgtggggcgcgctgtttgcggtgatcctggcgtttttcctgcgcaatacgctgattgtggtggtgctcagcctgctgatgtttatcaccctgcgcgggctgctgtga

SEQ ID NO: 456598 - DNA, 2712 bp, Serratia marcescens
atggtttcgatccagatgggcggtgaggacaagaccacgaagattagcggctggaggatttactggagcgacaagtacgaagccttgcaactgacctgttactacccctccaagaaaacgtacacgcgcccgctcagcgactgttgcgtttctcccacccgcgagttgggtgaaatgttgctgaccaaacccggtagcacaatcgtcacgtccattgccaaagctacgatctacgacgagcgatatgccgtcgtgtactatccgaacgccaacaagccctatgtttacaaaatggacagcatcggttttgccacgccgacagcgatgaaggatgcgacagtcttccactatttctcggccgtagcgaatgctcgacaagagcacgccgagtcgaagactgaccgtgagattgccgccaatgtcgtgcgccagttggagaaactgcctcccagcgccgacacagccttgcaggcctactgtacggggcgtaacggcaccctgacgcaggggcagggactgatctatccgttcgggctaaacgagagccagctcgccgcagtcgagcaagccttcctcgcgcaggttagcgtgatcgaaggcccgccgggaactggcaagacccagaccatcctcaatatcctcgccaatatcctgctgcgtgggcagacagtggcagtgctatccaacaataatgcggctgtggagaacgtctacgagaaactggagaaatgcggcctgggccacctgatagccaaactaggcaaccaggacaaccgcaaagacttcttcgctgacctgccgccttggccatcgagcgaacccaacccagctacaacgctggacgagattcaagccttgctggcccgagtgaagcagcacttgcacgaccacaatcgggcagcgcaactgcaggttaagttcaatgagctaaccattgaacggcgctacttgcagcagtggcaggccgacagcggcatacaggctgccagttcgctggacaggtacggactgtctccgcgcacaactgcggacctgatggcctacctggcccatctaggtgagcagcgcattcgcctcaaggatcgcatcgagttgctgttcaacttcaggattttccgcactaagccatttggccaaggcgatgcgcgcctttctatctttcacgccctgcagatgcactattacgacaaggcgttgcaagatacggaagtagagttgcaggcatgtcgcgaatcgctggctcgcggaaatttcacagccttgctagatgaattgaaaacggcatcgatgcgtcatctgaagcagcagttacaacgccaagcgccgccgacgaacagcttcgatgccaagacgtaccgtcaacagttcgacgccttcgttcagcgcttccccatcctaggcagcggcacgcactccatcgtcaattcgatcgcgccgggagcaatccttgactacgtgatcatcgacgaagcctcgcagcaggacatcgtaccgggtattttagcgctgggttgcgcgaggaatctgatcgtcgtcggtgacaaccgtcagttagcgcacattcccgtgacactaggtctgcaggcacccgccgaggcctacgattgcgagcgctacagtctgcttgattcgtgcatcagtgtgttcaaggatgcgctgccgagaactctgttgaaagaacattaccgctgccatcccagaatcatccaattttgcaatcagcagttctacgacaacgcgctggtgcccatgacggaggacaagggcgatgctccactgcgcctggtagtgaccgccaaaggcaaccatacccgccaaaacaccaacctgcgagagttggactctctgctcaaactgcttgacgacgagagtgagccggtcgagctggacggcgacggtcgcggtttcattgcaccgtttcgtgcacaggtcaacctttccgacaagcatctgccagcggatttcgtcagggacaccgtgcataagttccagggacgagagtgcgacgagatcgttttctccaccgtattggacaagaagcgctacaaccaagagcgtacacgcctggatttcgttgatgacccacgcatgatcaacgtagcggtgtcgcgggccaagcaccgtttcaccctggtgacgggcgacgacgtgttcaccggcaacaacggccacatcgcagccctgatgcgctatgttacttactacgcgcaggaggagcagatcgtgcgtgctcccgtagtatcggcatttgacttgttgtatcgagaatttgacctatctttggcgcgcttggacgctcgcttgcagcgtgaagactcacgctacaaatccgagcagatagtggcacaactgctgcgcgaggcgatgtccgccccggcgtgccagtcgttgatgtaccacacacagatcaagctggatcagatcgcatcaccgagtaacccggattggacagaccgcgaacaggccttcatggctcgcgccagttgcgatttcgtgatctattttaaggtaggcaaaatcccggtgggagtgattgaggtcgatggcggttctcacgaccgacccgaccaagcggcgcgggacgccttaaagaatggcatcctagcgaaaagtagcattcccattctgcgcctgcgtactgtcgagagccgtatcacggaaagaatcggcaattttatcgcccagtgggccagaccgacatctggtgtatag

SEQ ID NO: 456599 - DNA, 2427 bp, Serratia marcescens
atgagtggaaatggtggtgataatgcccacaataaccaattcggtggtgggggacgcggccctacagggggtgttaatggtgggccaactggcataggtggtagcggtggcggggggaattgggggtggaaatataacccaggaacagatgcgaattatatcgactccaacggggtgccgcatatcgttatcaatggtggatgggaacgtgttcctagtgtttcttctggaaatgggggggatagtaacgccccgacaggaggaggtggcactcctggtcaaccatcaaataagcctgcttttgggcctgatggtaaatttatggctgatgtcgatggttatgcttatcaaattaccatcaacagtgaaggtaaaaccagtagcttgaaacgcgtgggggagccagctcctactgatgatgaaaaaattagccttttccgtcagggattgtatcagctccagaccccagcagagatgttgccctatctcaaagcagagcgtgacaagggggaagcattacggcaggacaaagccaaacagcaggcagaacaggcatggcgaaacctgccggaaaattccaaaagccttaacgtcaatgttgacaactatggctacaaggtcagcgtcgatacttttgggaaaacagcctcgattgagcgtaccggccaacctcccgttactgatgaagaagccttgatgctgttcaagaaggggatacgtcctcctactcgtcaagaaatgctgccttatgttcaggatgagagaaacaaaagtgaagcaggacgtcaggcacgggctaaacagcaggcagaacagcaatggcaaaatctgccggggaatgtccgtaattttgatatgaaggtggatagctacagctataaggtcacgctttccgatatgggggaggttaagtccgtcacccgcacagctcaacccccaactaccgctgaagaacggctatcgctgttcaagcaaggacactggcaccccacagaagagcaggctcttaaccttcttcaacctgaacggaataaaggcgagccaacccgtcaggagcgagccaaacagcaggcagttgctcagtttatgagttcccctgtcaatcaagcacggattaagcgtgccgaggaaattcgccagcaggaagaaaatattcgtaaacagcaggaagcagaaaatcaacgcctggaggctgagaagaaaaaggccgaagaagagcggaaaaaactggaagcggagcgcaaggctgccgagagtaaactccaatctactgcggtcatggcggtgcgcggatttcctgctgctgataaggtcagtctggctcctgttcgttattctgtcgcgggtactggcagcattacgctggatgaaccaatggctaaccagacacgtagtgccatcaagaatgtgttgtcagaattgagtcgtctggcgacgctaaacccggcggggccgattggcctagctatcagtttgttgtttcattcaaaatatgtgggcgaaggcagtgccagtgtccccgaaaacatcttctccgttaccatgcctgcggataccctgtcgttgccggatgaaactacattgcgtactgcggcaaatcagggcaaaaccgtcaatatgtcggtacgcggcattttgacaatccataatggtgctattgttacgcaattagtcagaacgaccaccccaacggcagttagggtagtcaatgcggtacgtgatccagctacggggtactatggttttaccacgccgcaagaggccggtgtgccttcacgcacgatcctcaccagcccggcagatgctcctggcgctatagggccgaccatactgacggggcctgtgccattgccggaagtggtcacccataccgggggcgttgttcagacggtcaataccccgacaacgacaacgttccctgcgccagagaaaataggcttccgggatactgttatcgtgttcccggcggaatcgggactgaaacccctgtatgcggtatacaataagccgtatggtgagaccaatgccaaggggcaatacagtggccggaactacaataaggacaaagcaggtgggccgattcaaaatctggactggaaatcagcaaaaattgatcgcgcaggtatcgataaagtgaagttacacaccgggcgctttgagacgtctcctgcaaacgaggttatgctagaccgtctagataaaattttgaagggcgaattggccgtcacggacactgacaagcgtttctatacccatgaaatcagagagctggaacgctatcggaatctgggtataaaggatgggcaacttcctgaaaatacagcagaggtatggaacaatacacatacagcaacgctggaagactataaagtgaatgaaaaatcacatcctttatatacggatgacgccattaaagcatcagaataa

SEQ ID NO: 456600 - DNA, 273 bp, Serratia marcescens
atgattgactataaaagcatgtttgaaaaagagactgtaagtgacattattgccttttttgccggaaaagaaaaaggaataggttatccccaattagataatttttttgttagataccggtttgatgcagttggaaccggaaatcttttaaaaacatttgaggatatgagtaaggtcggaacagtgaagttgggggacaagatgttggtgacaaaaggcccaaactggaaggcaccaaaattcatgaccgataaaaaatatggcatcgtataa

SEQ ID NO: 456601 - DNA, 441 bp, Serratia marcescens
atgagtataaagacaagattagctctaccttctgatatagaaggtatttttgacgtcaggacttcggttaaagaaaatcatctgagtcgtgaagaaatggagcagatgggtattaccgagatcgttgtcaccgatatgattgaaaaaattcgttgcgcgtgggttgcagtggaagatggtaaggtgattggtttctcaatgattttaccagatgaaggatgcctttttgcggcctttgttcttccagagtatgaaggcagaggtgtaggtcgcagcctggtcttactcgccgagcaggaactattcaaacatcatgaactcgcctggcttgaaactgacaaaaacagtcgtgcggcaaaattttacatgcaactgggctgggttaaaaaagaaaatgttagcgaatctgatattagattagagaaattccgccacgtttaa

SEQ ID NO: 456602 - DNA, 237 bp, Serratia marcescens
atgaagcatgtctttgtggatggtaaaataccgtgcgaggaattcgacaagtggctgagcccaaccttccaacgaaatactggcaactgccgattgattgtcgaagtcaatatttacgaacaagatgatctccctttccccgtagctggcaccgacgaccttcgccatggtgatctgcaaattctcaataagtctaccgttagccaaatcgcaggcggttcaaggaaccgcccttaa

SEQ ID NO: 456603 - DNA, 501 bp, Serratia marcescens
atgacaggtatgaaacacatcagcatgatttattacgtaattgcttttgccgcaggtctcggtatcaccctgcaaacaacgctgaacagccagctggcgagaggacttgggggcgacccggtcgccgccgcgctgttttccttcgcagtcggggcgttcagccttgggatttattcgctgctgcgcggggggggattcacctcgctggcggccattccgtctcagcctctgtggagtctggcaggaggcctgattggagcctgcgcgttgttcagctatgtcgtgctcgcaccgaaaatcggtttttcagccctgctcgggctggcggttgccggacagttactgtcatcacaaatgattgaccattttggtctgctgggcgtcatgcggaggccggtttcgctgcttaagctgggtggaatggtggtcatgctggccggactcgtcattatgcttttcggcgatcggctgtctgagcgctttctccaactggcaaaatga

SEQ ID NO: 456604 - DNA, 891 bp, Serratia marcescens
atggatcgtattcaggctatgcagatttttatgcgggttgccgaagccggaagcttcgtacgtgcggcggaaacgctttcactgcccgcttcaacggtaaccagcaccgttaaaagccttgagaaatatctgcaggtgcgtctgcttaacagaaccaccagacgagtgagtctcactcctgaaggtttgcagtatcttgtacgatgccgagaaatactgtcgttaatcgaacacgcagaatccagcctgacggattcagtcaggcgaccgcaggggcgtctgcgggttgatatgccaggtggaattgcccattttatcgtcatgccgaatctgcaagacttttaccggctttacccggatatctacctgatgattggggtgaacgatcggccggtcgatctcgttcaggagggcgtggactgcgtgatcagaacgggggaactgaataactcgacgctggtggctcgcccgctggggcggtttcgttggataacctgcgcctctccggactatctcagggaaaacggtgttccgcagtcgcccgaagcgctgtcccagcatcgggcgattcactatttttccggccagaacagaggcgcgaatgaaatgcgctttgcccacggcggcaagacacggtcagtgccagtgggcggcgcggcagccgtaaatgaaacggggctctatatcaaaatgtgccttgcaggtttcgggctggcacagctggctgagaatgtggttgcagagcatctgcaggaagggcggttaatcgaggttctgtcagattggcagccgccatcagtcccggtcacgttgctttatccccatcagcgttttctttcccccgccgtgcgcgcatttgctgattggatggccgggattatccgtagctaa

SEQ ID NO: 456605 - DNA, 795 bp, Serratia marcescens
atgttgcacgtgaagtttttcgaaaaaaatgaagttcatgccagtcatgttgtcaacttactcagcgatctgcacgaaaaaatattcgccactcccgataacatcacatccgatgacattatctctgcatatatccaccccggtgcggccatcagtaaaattgccatttattatgataatacggttcctgttggatttatctgtatgcaacgatacgagatggaaatagaaaaagaaaagttaaacatttttcgcagtcaggttgggttattacaaaactacagaaataaaaatatccttagattcaccctcttaaaatttttgatttcagaaatgttacgtaccccaagaaaatcactcttctttgaactatgcgtccacccctctagctactgtgcaatactcaagaaaggttgtaacagaaaaaaagcatggccaaccaaggaaaatgcacagcaaaacatgccgatgaaggatctctgtgagacattactcaataagtttgatctggaaataagaaaagaaaatggcgtatttattcataacgatgggctagggccaacccgtatcgaaaaaaaaccgaagggcggaataagtagcgacgctcaattctttatagagtcaaaccccggttatgtaaatagcgacggacttgccatcattttaagcctttcagtgaaagatatactggttaacatcttccaccagatgctgagtaaaataaatcgtagcttgatgatgaaaccggcccgtggtcgagaggaatcccctcaagagaaacctaatgaaatataa

SEQ ID NO: 456606 - DNA, 456 bp, Serratia marcescens
atgaacgtaaaaaataaaaaaataattttaattataggatcggctgttgttttttataccctatggttgctactacgcccggttaaagttgttgcggttcatgaaaataggcactttagctcagtgttggtcaataacttcccatttaccaccagggggaaaatagagtggtggttgcagaataaggatatgctaaaagagcgctatggtatccccaagccggcatcctacggtgatttcagcatcactttctggctgtttggtgacggctataaagaggaaggtaagtacgacaggcgctgttttaatgatatgaagaccaaggttaactgtattgaaaaggatatcgttttaaatgtgcgcaatagcaaaaatatgggagttgtattttttgctaatggaggaatataccgaatcgataaaaacggtaagataacaaaggtaaatatagactaa

SEQ ID NO: 456607 - DNA, 864 bp, Serratia marcescens
atgaaagtattgttaaccggttcaaaaggacagttaggcagctgtttccaggatcgtcttcctcagggctgggaggtttgggcgacggattcggatcaacttgatattacagatagtgcgaaagtcagtgaggctgtgttacgttttaggccagatatgatcgttaatgcagcggcttataccgctgttgataaggcggaatccgaacatgaattagcggccttaattaatgaaatcgggccacgtaatctggcttttgcagcgaaagaggttggggcgcgtttagttcacgtatcgactgattatgtatttgatggcactgctacatcaccctatcttgaaagcgtggaaaccaaccctctgagcgtttacggcaaaaccaagctggcgggtgagcaggctgtgatcgacgttttaccagaagccattattattcgtacggcttgggtttatagcgagtacggaaataattttgtcaagaccatgctgcgcttagggcaagagcgagactccctgggcgtcgtatcggatcaatatggttgcccaacttatgcgggcgatattgctgccgcaattattgaacttttaaagaagaatgccaaaggcggtgtttatcattattgtggttctgaggaaatgagctggtttgatttcgccaagcagatttttgcattggcgaatgaaactcagcttctggaaaaggatgttgttgttaacagtataggtacgaaggactttaaaaccttagctgtaagaccacagtattctgttttatcaaacgaaaaaattgccaaaattggcgtgcgtagtgtcgggctgtcaacaagtctcatatacgttttaaatagaatcaaaaacaattaa

SEQ ID NO: 456608 - DNA, 873 bp, Serratia marcescens
atgagcattaataatagcgtagagactatggccaaagatatgcctaaggttagtgtttatatttcaacctttaaccggttggagcgtttgaaaagggctattagctcggttaaagcgcaagactaccctaatatagagctccttatttgtgacgatgcttctacagatggtacgcaggcgtttatgaatgacctggtcaaacaggatagtgacattatttatttgcgtaatgagagtaataaaggagcctgtgctacgagaaatcttgggatattccgtgctacaggctattttattaccggactggatgatgatgatgagttctcccccgaccgtatcagctatttagttagtcgatgggacgataaatatgcttttatttgttgtgatttcatagaacaattttctgatggcaagcagaaggcgttttacaataaaagcgaggacgtctacttcactgattacaaatcaatactttttgagaatgtggcttccaaccaaatctttacactgacatcgcgcttaagagatattgatgggtttaatccagaggtaaggcgtttacaggattgggacacatggttgcgattgtcgtttaaatatggtggttttttacgtagccaagacaaaaaatatgttatgcaccatgatcatggtatcaatgatgagagggtatcgaaaagttatccgttggggcgagcattgacggatttattgacaaggaatagtcatatgtatcaaggggttgataaagaatttatgcatttccttatcgatatgagtgataaaaatgtgtcattgtctcgtgctgcttactggagtctaattaaacggaatcccaagtttattgtgaagaaattgataaacagataa

SEQ ID NO: 456609 - DNA, 447 bp, Serratia marcescens
atgaactctgaatataaaagaaatattatttttaggaaggctcaaggtaaaattgtaatggagtcttatttaaataagataactgagattacgggtcaggctcgcgatgagttaacgttattgagtctggaggaaacagatttaataattaataagctgaaggcgattaatccgatggataaaatagaggtaattgtaaagaatatgcctgagttatgtgattttatgacaagtaaaacacatgatggtgatttttatcttttaattgatgaggattggaaaaactgtggtgtgtgttttattaaatctggcgttatatttaatggtaagtatgactttgataaaatggttagtgatgagataagagttataagcagtgacttttcgtttcaaatccagagtgattatgaatctggtgatatttattgtgagtttatcaggtattga

SEQ ID NO: 456610 - DNA, 303 bp, Serratia marcescens
atgagtttggaattgttttcagagttgaagtctcaaatatctaaagaaacattagatgaaatattattagaattgcaagctaagtatcaaaaagcgtatgtgtcagaatctggaggctacggttttgttaggcatggcgagaattataagattaaagaaccaccgttatttgatctgttcattttaaatgataaggtgattttatctgtatatggtgatttaaatgatcaaaatacaatcaaagaccaagttagtaatatatttgttaaaaaaaacatccctgttgattttgtagaagaataa

SEQ ID NO: 456611 - DNA, 1737 bp, Serratia marcescens
atgcttcgtacagaacagaaaaaaacgtttgtcagccgtgagggtgataatatcgcgtaccgatatttccccgtagaatccactggtgaaattgccgcttccccctttgttatcttgtatcagcggaacagtgatttatcctgcgaagcctcaggatacgttgagaaacttggtttgccaaattatagtattttatcgttagacatggacgacagcgatatccctgtcgctaaagcaccggatggatccgatatttctcgtcaggtcgattactttcaacagtttattgaacatatcaaacaggaatatggtgtcagggaaaaagacatcgccattatatctcacggcgatcgtgctgttgttatcgctgcctggctcgttgattatgccgccaacataagctccgtgattttttattccccgatgatattatcaaataaatatagtggtttatattcggagtgtaagaaaaggatttttaatttcgttaataaacgcctccctggacgaactgcggcatcctctgaattgaataaggattatccgttaaaagacgccgcgctggttactgactctctttcccggcgacagcggtgggacctgatttataccggcgagcgtattctcagaagctcatcgtcatacttcgttcctactcaaattattcttgccaataagtttttggcgtgtgatgttcgttccctgctgcgtttttatgcgaatatttcaagtcgtgataaagccgtgtttatcccgccagatttgtaccatgaaaatgttgatgatgagatgttacgtagagaaagggattttattacagcccattttcaacagccgtatcgggtcccttcactgtttgactcacacgttaaaggcgttaccaaagatgagtatgaaaaactacgattgccggaaagtaatgcgctaaagaagctcttctgggccgtcaataagcttgccctgcggcatgtaggcaggttgtctacgggaattaagttagggctggcaaccggtttcgattctggtgcctcgctggattatatctacaggaatgaaccttctggcgataatctgatagggaaaaaaattgaccagtattacttggccaacattggctggcgctgtacccggatgcggaagatacacgtcgaggcgttgattttactggccgctgaacggctggccgaaaacggacagaaaatcaggctgcttgatgttgctgccggtcatggcagctatatacttaatacggtggggaaaatcgctcatcccattgagcatgtgctgatgcgggattttgtcgagtccaacgtccacgatgggaatgtattaattcagcaacataaattagcccagagggtgacttttgaacaaggcaatgccttttcttcggcggatttggccacgttgccacgggaccgaacgctgaccattgtttccgggttctatgagctgtttagtgataatagtttggtgctgacatctctggaaggcattgctaatgcgacgcaggacggtggttatctaatttatacaaccaagctatggaacccgaaactggaatatatggcgcgagtgctaataagccacaaaccgggggagcactggctgttacgccgccggactcagggcgagattgaccagttggtcaatcaggctggctttgtgaaggtaacgcagagaatggatccgtgggggatgtttagcgtgacgttggcgcaaaagaaggccggttag

SEQ ID NO: 456612 - DNA, 942 bp, Serratia marcescens
atggaaatgaaattcagaaccgtacccaatgaagtttatcgtgtaatggaattgaatgaaaaattcaattatctttggaatccggatccggtatcttcgctgcttggcttaggcagttcttacgtcctggagttttttgagttctatggcgagaaagttggcgattattatgatgagtttattgacgatcccgttcagaaagatgaaagattcaatgtctttgtcgatcaagagaaacgacatgctgctgcacaccggaaactgaataactttattaccaaagggataacctcgcctgccagggagaaatatcacccacgcgtttatgactttatgtacggagcctataaagaattagccgagccgatattggcgggtattgagcaagataaggcggcaggcaaaaaggctgaaggacaattttttaaagactctatacgtagtatcggtatttttgaaagtgatgtctgcatggccagcattgcattctttgataacctgtttgataacggtcggtttgatattgtaagcaacatgtcaggtaatttaggcgtgctttatttattaggctatcactatgctgaagagatggaacactgctgtatttcaatcgaagcatttgaaactgtttaccaagagaaattatggactcaagagcttgttgattctcatgcaagcaacaacggcctgacgtccaagcacgttataaatgcaacgctacatgtggcaagaatgttggggcaggagatcaccgttaagcagattgccgagagcattggcgctcaatacaaaatgcagctgagtaaaaagtatataaaagaagggtttaacgcacgtgaaccagaaatattggcgaagagagagtatctggttaatcgttgggataatgagtgggagccgcgactgcttgagcagataaagcacaagattaaccagggataa

SEQ ID NO: 456613 - DNA, 741 bp, Serratia marcescens
atgggtgataaaaaattagtattaataaccgcaggtagtcgcggtatcggcgcggcaatcgtgaaagagttggtgcaacaaggctaccgcgtggtgtttacctatagggaaaatcgcgaggctgccgagagtttggcgaaatctctgaatattaaaggcgacgtctgctggtgttacccctgcgacgccggcaacgttaatgaggtgaaaaatctgtgtgaagtcttactggcccagcacggtgtcccctacggaattataaataacgcggggaaaatcaaagatactcttcattttgatatgaagattgatgactggcttgatgttataaatactaatttaaactccattgtttatttaaaccactatttgttaaacgccatgatgctcaacaaagatggctgcattatcaatattaactcaatcgccgggttaagagggaatgtgggccagaccaactatgccgcatcaaaatctgcccagtatggtctgaccaagagcttggccagagaggtcggcaactttaatatccgggttaactgtattgctcctggccccgttgcgacagatatgatttcgtcggtaccgaaaaaaactatggaccaactgataaaactcacgccgctaagaaaaatgggcgagcctgaagatattgccatgatggtgacattcttattgggcgccggtgggcgccatattaccgggcaaaccctggttgtggatggcggattatcaatttaa

SEQ ID NO: 456614 - DNA, 414 bp, Serratia marcescens
atgcagttcccgattaactccgactttattaaaggcaatatcgaagcgcagattgacttactaaaaaaaagttatccgcatatcgtcgataactggttgctcatggatacgctgttattttgcctctgctttaacatgcgtaaagatgactacttccgtcggcaggctgaaaaaatagccggccaccctggtaacatcgccacctatcatgtggcgcataatatatttgtttccaaatggcttttagaacggaaggaggtagacttttacagcttatcttactcgtttggtgaaaaggatatttacatcaatgatgattctgcctatagcacgtttattattaatgccaataaaggtgacaatgtcatttatcaatcctccattggatgcatgacaaaggcatattctgtttga

SEQ ID NO: 456615 - DNA, 1269 bp, Serratia marcescens
atgatggcgggccagttacatcgggtggtgatcacaggctatggcggtatttgtccactcggtgaaaataccgcagaaatctggcagggcgtgcttgataagcaattgggttatgacatttgggataagccgggaagaaacatttcggcaaaagtgttcggtaagattaaatttccgctagaactcagtaaattcaccaaacgcattctgaaaaacacccctcgctttgcagagttgggtctgatcgctaccgatgaagccattaccatggcgtttggtgaagaacaaaacatttcagagcattatgcccccctcgactgtggcgttatttttggtaccggatgggcgggatacgatttgtctaccagtaacagcatcgcctacgatgacccggagattgcatcagcaacgccgcatagctgttttaattccatgcccagcatcgcaacctcggttatttcggtcaactggcagctgaggggttatcagaatacccccattgcggcctgtgcgacgggcaatatcgccatcggcgatgcctatgaaattgttaaaagcggtaaggcgaagatgatgatagccggcggcggggagagcttaatgcatccgttcaccgtctggtcagtcgatgtcttaggcgcgctgtcaaaagagcagacggacctggttaaggcgtgctgtcctttcagcctggacagaagtggcttcgttctttcagaaggtgctgccgttgtctgtttggagcgccttgatgacgcactggcaagaaatgcgaccatttatggtgaaatcatcggatacgccaaccacagcgacgcctatatcaacttaaccgcaccggcgccggatctgctcggccgggtaacgaccattgaaaaagccatggaatatgcggaagtaacgcatgatgatattgattatatcaatgcgcatggcacctctacgccgatgaatgaccataatgaaacgctggtgctgaaggaagtgtttggcgaacaagcctataacatccctgtctcaagcaccaaatcgtataccgggcatctcattgccgccgcgggtggaatggaaacgattttttgtttgaaagggatggagaatcaggttattcctgcgacgattaatctcaataatccggatccgaaatgcgatctggactatgtgccaaatgaacatcgctacgcgcaaaaccttaaccacgttattaatatcaactatggttttggtggagcaaacagctgcctggtattgaagaggttcgccaagtga

SEQ ID NO: 456616 - DNA, 255 bp, Serratia marcescens
atgagaaaggaattaaatgtatttctgaaggatataatagacaggttgacggacgttgacgttgataccattactgatgagagcaaactggaggatctcgaacttgtcagtctggattttgtcacgataaaggtggaggcaaaaaatcatttcggcattgatgtggatttaaacgccatggctgaggaaaatatagagacctttggccagttaatggattatctggaagagtatcatgcaaaggaggtgcaatga

SEQ ID NO: 456617 - DNA, 990 bp, Serratia marcescens
atgttgaataaagtcattttaagcgtcctctgcatactggtattcggcggtattgctgcgggcagcgtttattattatcagacgcagcaagtacggacgctgatgctatatggcaatgtcgatattcgcaccgtcaatctgagcttccgcgttgggggacgcctggcgtcattaaatgtggatgaaggcgatagtattcaacctggagatattctaggcgcattggatcatgttccttatatcaacgcgcaaaatgaggccaatgcgaacgtcgcagcagcgcaggcgcaattagacttattattggcaggttaccgggaagaagaaattgcacaagctcgcgccgaagtcactcagcagcaagccgcgtttaactatgccgacagtttctacaaacgtcagcaacgcctgtggcgctcactatcgattgccgtcaacgatcttgataacgcgaaaaacgcgcgccaacaggccaaggccgctctgcaatctgccaaagacaaactgaatcagtatctgaatggtcaccgtatacagcaaatcgatcaggcgaaagccagcgtggcgcaggttcaggcgcgcgccgatcaggccgcgctcaatctgacggatacccaactgtatgcgcctgcggcaggcgttattctgacccgggccgtagagccgggaacgatgttgtccgcgggttcaaccgtcttcagcgtctcgttaacgcacccggtttggatccgggcttacatcgacggaattaacctgcatcaggcggttcccggcactgaggtgcacatttataccgatgggcgccccgataagccctatcgcggcaagatcggttttgtctctcccaccgccgaatttacccctaaaagtgtggaaaccccggagttacgcaccgatctggtttatcgcctgagaattattgtcaccgaccctgacgaatcattacgtcagggaatgccggtaactctgcgcctggccaagggggagtaa

SEQ ID NO: 456618 - DNA, 1749 bp, Serratia marcescens
atgccggaatcgtcctgccaatgtgacatcgtcattgaaaacgtggagaagcgctttcccggtatgccgatgccggcggtgtccggcataaaggccagcatccgtagtggttgcgtgacgggtttggtgggccctgacggcgcagggaaaaccactttgctgcgtatgctggcagggttgttaaaggcaaacaccggcacgctgcgcgttgacgggctggatcccatgctgcaggctcgccagttgcacggaattttgggttatatgccgcaaaaattcggtctttacgaagacctgaccgtaatggaaaacctgactctgtatgccgaactgcgcgacgtggccattcaggaccgtcagccaatgttcgaacgcctgctgatgtttaccggcttgacgaacttcactcatcgactggccggcaaactctccggcggcatgaaacagaaactgggattggcctgcaccctgcttggacagccgaaagtgttgctgcttgatgagcccagcgtcggtgtcgaccccatatcccgacgcgagctctggcaaatggtcaatacgctggcgggtgacggcatgctgatcatgtggagcacttcttatctggaggaggcggaacattgcagagaagtcctgctgatgaacgaagggaagctgctgtacagcggaccgccgcatgagctcacgcaacgtatggctggccgcgcggtgttgcttcacacggccggagctggcaaccgccaactgtttcaacacgcaatctctctggcacaggtgagtgacggatcgctgcaggggaaatacatccgcctaatcctgcgtgagggcgccgatcgcgcccagttacgccgcgcattagcccggcctcaggtaacaatacgcgacatacagccgcgtttcgaagacgcctttatcgatctgttgggcggtagcccgagtcagtctaccttggcaaacatcttatcccagaggcccgtaaacccggacgaaacggttattgaggcacgccagctcaccaaaaaattcggcgactttatcgcgaccgataacgttaactttcaggtcaaaaggggcgaaatatttgggcttctggggccgaacggcgccggaaagtcgacgaccttcaaaatgatgtgcggcctgctgctgccatctgacggtaaggcgctggtcttagacatggatctgaaaacagatcgcggccacgcacgccaatgcctgggttacatggcgcagaaattttctctctacggcaacctgaccgttttgcaaaacctgaagttcttttccggcatctatggcctgagaggggaaaagcagcgtgaaaagatcaggaacatggttaacacctttaatttcaccgccatcctgcaccaggctgcggatgtactgccgcttggtttcaagcagcgtctggcgctggcatgttcgctgatgcatgagccggatattttattccttgatgagccgacctctggcgtagacccgctgacgcggcgtgaattctggcttcatatcaacggtatggtcaataagggggtcaccgtaatggtaaccacgcattttatggatgaggcggaatactgcgatcgtatcgggctggtataccgtgggaaaatcattgcctccggcactccggacgagctgaaacaccaggttgccaacgacagatcgtccgagctgaccatggagcaggccttcgtcagtctggtacaagactatgaccgccaacttgagggcggacgatga

SEQ ID NO: 456619 - DNA, 1149 bp, Serratia marcescens
atgaaatccccccgtccgccgcatcgctttttctcctggcgtcggttgcgtgccttgtgccataaagaaatacgccagatcctgagggatccgagcaacggtttgatcgcattcgtcattccgatcatgctgttatttattttcggctatggcgtcaatcttgataccaataatctgcgggtcggcattttattggagcaacaaagcgaggaagcccacgagctgacgcaggcttatatcggttccccttatctggaaccgatcgtcagcagcgaccgccaggcattaatagatatgctgcaggcgggcaagatccgcggcttgatcgtcatccccatgaactttgctcaacagctggcgcgtcaggcagagcaagcgccgattcaggttattaccgacggcagtgaacccaacactgccaatttcgtgcagaggtacgcgctgggcgtcttgcaggtctggatgcagcagcgcgccgacgaccggggtgaacgcgttgagtcgttgattgaggttcagccgcgttactggttcaacgctgccgtgatgagtcagcactttatcattcccggtgccatcagcattattatgacggtcatcggggctatcctcacctctttggttattgcccgcgaatgggagcgcggcaccatggaggctctgctctctacccaggttacgcggacggaactgctgctgtccaaactgcttccctattactttcttggcatgatcgccatgagcgtctgtatggccgtagcggtatttattatgcaggttccctaccgtggctcgttgtggattctattggcattaagcagcctatttcttgccagcacgctgggtatggggttactgatttccaccctgacccgcaaccagttcaatgccgcattagttgctctcaatgccgcctttctgcctgccatcatgctatccggttttattttcgagatcgccagtatgccgtccgtagtgcgggccgtgacctatatcatcccggcccgctatttcgtcagcacgctgcaaactctgtttctggccggcaatgtcggcagcatctttttaattaataccctttttttagcggcggcgagcgttttctttattggactcaccgcctggaagacccgcacgcatcttgaataa

SEQ ID NO: 456620 - DNA, 1107 bp, Serratia marcescens
gtgttgcatcgagtgctgacattgataatgaaagagctgcgggccctgctgcgcgatccgcaaacccgcatgctgctggtgatgcccgttatctttcaggtattgctgtttccctttgccgctactctggaagtgacgaatgccaccatcgccgtttacagcgaggacaacggccccgcctcgattgaactgacccaacggtttgccaaagccaaagcattttcccagctgttgcagctgcacaatcctcaggaaattagctcggtgattgaaaaccagcaggcgctgctactgatacgttttccggctgatttttcacgcagcctgctcagcggggaacaaagcgtcatgcaggtgattctggacggacgtaactccaatagcgcccagatcgccgccaactatatcgagcaaatagccaatgactatcagcgtgaactgttgcagtcatccccgcagcgcaacaataacgaactgatagtccgtaattggtataacgctaatctggattataaatggttcgtgattccgtccctgatcgccatgattgccactattggcgtgctcaccgtgacctcgctgtcggtcacccgtgagcgcgagcagggaaccctggaccaactgctggtgtcaccgctcaacacctggccgatctttatcgggaaagcggtgccggcactgattgtggcgatctttcaggcctctttggtgctgttgattggcatcttcggctatcagatcccttttgccggctctttgttactgttttactttgccatgctggtctacggagtatcactggtgggcattggtctgctgatttccgcgttctgtatgactcaacagcaggcgtttatcggcgtattcgtgtttctgatgcccgccgttttgctttccggctatgtctctccggtggaaaacatgccggaatggctgcaaaaactgagctggattaacccgatcaggcacttcaccgatatttctaaacagctctacctcaaagatgccggactctttaccgtttgggacagcctatggccgcagctgctggtgacgctaatcacgggcgccatagcgtattggatgttcaagaagaaggtgacctga

SEQ ID NO: 456621 - DNA, 225 bp, Serratia marcescens
atggcgctgaacctttttggctggcttgacgcggcgacagagaaagttgaccgcagccgacgtttcccccgttcactccctgaattgaccttagccggcggccatctgtcttctacggtcaagtttttcccggttcggcgggccattatcaacatgccagcgttaatggcatcacatttcttctatgacaccgacggggaatgcagtgatgaaaaagacacttaa

SEQ ID NO: 456622 - DNA, 516 bp, Serratia marcescens
atggaaaaagtaaccgaccagtattcacccgaaattgcgcggcataagctcaatgcttatttttcaggtaatttcatcatgcttgacgtgataaaacgtttgcaaaaatcaagcctgtgcgtatttgcagccttatgtgatggaaaaacgatcactactgcagggtatgaaattaatgccgattttagcgttaaacgagcctctgcggtcattcactccttgaagctgaagaatctccctgtctcaacaaagtccgtttcaacgggctctgatgttggtggaatcaccaatcaggcggtttttttcatcagtaaagaggatcttcattctctgaagtccgatccggagaagattatgagaaaatgcgcaaggctacacgcgcaacataaacgctcacatgcacaaagggacattgctcgtctatgcaaggagtttggcaaggaagcgatacttaaattagtaaaccaagctgcagccaaccctaagatgcctcctgatgggatgagtgcatgttaa

SEQ ID NO: 456623 - DNA, 1314 bp, Serratia marcescens
atgactgattggaaaaaaaccaccttaggtcaagtcgctcaagtgtttacagggtttccatttaagagtaatggctactctgaagatcctcatgatattaagttattgagaggggataacatcgctcagggaattcttagatgggatgatgctaagaagtggccaaaaagtgaatacgaaaaatacgatcagtatcagcttaaagaagatgatgttgtgcttgcaatggatcgtccttggattggtgctggattaaaatatagtgccgtccggaaaaaggatctgccctcattgttagttcagcgtacagcaaggctacgtggcagcgcggaattggatatcatttatttaaagtatattattgctagcccttggttctgtaaatatatccaatcaataaatacaggatcattagttccacatattagttctaaacaaatcaaggatttccctgtcactttaccgagtgttcaacagcaaaagagattatcttctgttctggcggcaattgataataaaatcgatataaacaatcgcataaatgcagaactggaggcgatggcgaagacgctgtacgactactggtttgtacagttcgatttccctaacgcgaacggaaaaccgtataaaacatccggtggaaagatggtgtataacgccacactgaaacatgaaattccggcgggttggagtgtagatactttatcgggttggattgctgatgataaaactggagattggggaaaagaaaatagagaaggaaactatacacttcagattaattgtatcagaggtgctgatattaatggtctgaatggttatggcattacatcgatgccagtcagatacatctccgcaaaaaacgaaaaaaaattgttatccgcttacgattttgttattgaaatctctggtggaagtcctacacaatcaactggacgcatgacctttatcacaaaggaaatgttagaccgtttcgctcacccagttatatgttctaatttttgtaaggcaataactctcagagataatttgtatttctataactttgcgtacgcatggaatgacatttataacaaaggaatattatttggttgggaaggtaagaccagtggtataaaaaatttactttttgattcttttgtcgataaacatcatttatgtattccacataaagatctagtaaaggtctttcatgatgttatggtaccgctccaccaaaaaaaacaaaaaaatcttaaggagaatgcggaattggaaaaactccgcgactggctccttccgctgctgataaacgggcaggtcacggtcaaataa

SEQ ID NO: 456624 - DNA, 810 bp, Serratia marcescens
atggagtcatccgggcgtctcgaagttgcggctcgtttgcaacagcgaactaccgcgattatgcgctctgctgtgcagagcggtttaatcgactacaaccccgcgcaagatattgccggtgcggttgctacggcgaaaagacagcatcgtgctgcattagaacttaaccacattcctgaattacttcaccgtatcgatcactactctggcagactgttaacccgactggctgtcgaactgacgttgttggttttcatccgttcaagcgagttgcgttttgcccgctggtcagaagtcgattttgaaacggccatgtggacgattccaggtgagcgtgaaccgctggaaggagtcaagcattctcagcgtggctcaaagatgcggacacctcaccttgttcctttgtcgcggcaggcgttagccattttggaaaagatcaaaggcatgagtgggaatcgagagctgatttttgttggtgatcatgatccgcgtaaacccctgagcgagaatacggtgaacaaggctttgcgagtgatgggctatgacacgaaaacagaagtctgtgggcatggttttaggacgatggcgtgtagttcgttgattgagtcggggctgtggtcgagggatgcagtagagcgtcagatgagtcatcaggaacgtaactctgtgcgtgcggcttacatccataaggcggaacatcttggggagcgtaggttgatgttacagtggtgggcggattatctggatgcgaatatgcaagaagttatctctccctttgactatgccaaaactaacaacccattgagataa

SEQ ID NO: 456625 - DNA, 225 bp, Serratia marcescens
atggttctgagttatgtgaaggttcgttcggctaggccggaagcaaaagcttataagctgactgacggtgaaggtatggttttgctggttcaccctaatggttctaaatactggcggcttcgttatcgtttcggcggtaaggagaagatgctggcgctgggaaagtaccccgaagtctcgctggcggatgccagggccgcagggatgaagcccgtaagctgttag

SEQ ID NO: 456626 - DNA, 429 bp, Serratia marcescens
atgaataattttctaaaaatcaccatatttatcattgccgctttcgccgctgtactggcttacttttggccgatgataaaaatgaattttgctgggagtgcgcattataccgaacaggatcggcgagagtatgaattttataccccggaaatattgcgggacatgccgcggatatctcagcgatatgatttcaactttgcgaatgttacaggcccggccatgcatgtaaatgctgtcaggttttatgacacgcgcgacacaagcaagattgatagctatttgatctcaaaggattacaagaagcaggagacctgtgatctggaggccacatgctggaaagcctctgatccacaggagacaatttatgttgggacattgacggcagaggacaccgtactggtgcaggtggcttacagcttttacaagtaa

SEQ ID NO: 456627 - DNA, 1032 bp, Serratia marcescens
atgtctagtttgtgtatcaacaatccagttgttgatgctatcggtaatgcggcagtttttgatgtggcaaagttattgttaaaaaaaatagatggtgtcgcgctgattgatttgttggagaaggatgactcatctgtatttaaggttttttctaatgatgaacatttagtgtatgaatggatgtttttatttaaaaagcttttggaaaatgatgaggtaaaatcacattatctatccaagcagatctatttcccaattggtggtaaccagtaccatcttctgagcccattgttttcctcctcgttggcgcaggcgctgcatcagcgtttggcactggcgcattttagcgagcaggcaaaagagatttctgccgccgtcagggaaggaaaatggcatgaggaaaagcgagtgatctatcccaatctggcgataaaaaaattcggcggtaaaaataagcagaatatttcttatcttaatagtgtacgcaatggtcaaattcggttgttgaactgcgccgcgccgcagtgggtgacacagagcaaaccgccgttaaagcatacctctattttttaccgcagcagcgagttcagtgcgatggcacgcgatgccgtacggcaactgcgtgcctatctgctcagcgtccagccacgggacagcactatggagatccgtcagcgacgcgcggccggcgttgatgaggtgattgatatgctgttcagctacgccgccggcatccagaacctggaagcacaggccggctggagcgcgggggccgaatgccgcctgaagcgatcccagcagttgtggctggatccgttaagagggcgcgacgatccggatttccgcgcggaacgtgaggccggcgactggcagcgagagatcgcgctggactttggcgtctggcttaacagacagctggagcatgaacagatgctgtttagcgaagtggaacgcagggaatggtcgacggcaccgctatttaagcagcggttgcgtgagtttgaggcggagtgggcggaggcggcgctatga

SEQ ID NO: 456628 - DNA, 864 bp, Serratia marcescens
atgccgcgtatccttattactttcatgatcctgatctttgcgccgcagagtcaggcctccatatggtcgtttatcaactccacgtcaacctccgggcgcgatattgtctacgactataccatcagcagctgggactatgatgacgccaccccaaatccctgctttaacaccacctgtatcgtcggtatcagccaccgccataccaacagcggctccggtggtaataacagtggcgccgggtggaccgaagcctggtacgcctccgcctcttccggcgtcgcctgcgtgcgcgccagccgcacgattggtgagttggggcagtgtctgcgcgataacccgtccaataaaggcatcacggggaggcagctgatcacgccgtactccggcactcccgtgcaccatagcggcgatacgataacgcaggagtgcgtcgggattttttataaaatcggcaccgccaacctcaatggcggtattccgatgcccggctcgatctgcggtattgcgccgccgccggtcggggcgtgcgggatgccggacaatgtcgagatcaatcatggttcgctctctgcggcggaggtggcgggtaatcagcgcacggtgcagtttgttatcgactgtaaccaaaagctcagtgcaaaacttttcctgaccaatatggaaaacgatcgtctgaaactcggcgacagcgggataaccagttccctgttgatcaacggacggcctttaaccaatcagggcgtccccctgacgttggcggccagcgttaacaccatcaacgttagctccacgctggcgaccagcggcaatacgcccagcggcgcttttcagggggagggggttctgctgttggcgatggattga

SEQ ID NO: 456629 - DNA, 546 bp, Serratia marcescens
atgaaggtcaaaacaatgcccggccgattgacgctggcggcgctggttctggcgatcgtgggaggcggcgtcagcgatgcggctgataacaatgtctacctgcatggcgccctggtggccgagccgtgcgttatacctcccggcgatgaagagatcgcgctggacttcggcaccatcatcgacaagtacctgtaccagaacacccgcacgttgagtcagccgtttgcgatacatctggaggagtgcgatctgagcatcggcaagacggtgaaagtgaagtttaccggaaccgagaacgtcgccctgccgggactgttggcgattgatgccgcaagcgaggcgagcggcattgccgtcgggctggagaccggcgaaggacaggcgttgccgttaaaccagaacagcggcagctacgtgctgcaggatggcagcaccatcctgacgatgaaggcgtatgtgcagggcgagccgcaggcgattgcgcagcagcgtatcggcaggggcgtgttcagcgcggttgcgacctttaatctggaatatgagtaa

SEQ ID NO: 456630 - DNA, 501 bp, Serratia marcescens
atgaagacaaccaatatgcgaaatctcctgctgctggccggcctgttggcgctggccgggggcgcgtgggcggcaggcgatgtcgatatgacgtttcacggcacgctggtagagccgccgccgtgcaccatcaataacgacgaccagatagaggtggacttcggcaaccgggtggggatcaacaaggtggatggcgtgaactaccgcaccgcgctgaactaccagataacctgccaggatcgcggcgcccacaattgggcgctgacgctgagtctgacggggacgcaggcgggatttgataatgaagccctgaaaaccaacatggacaatttggggatccgcatataccgcgacgatattccctttacgccaaatcaagcgttggagattgacgtgaataatccgccgagattggaggcggtgccggtaaagcagagcggtgcgacgttgaccgagggggcatttgaagcctgggcgacgctgcgggcggactatcagtga

SEQ ID NO: 456631 - DNA, 498 bp, Serratia marcescens
atgtcggggatcaggatgaggtgccggtattgccgtctgttgttgtccgtcattgccgcagtgacgccgctgctggccagcgcgacctccaccatgacggtcaaggtgacggtaatcgccccgccgccgtgcaccattaacggcgataaaccgatcgaggtggagtttggcgaagtgatgaccacccgggtagacggtacgaattatcgcatgccggtggattacaccctggagtgtacgcagggggagggcaagggcctgaaattgcaggtgcagggcaacggcgccagctttgacggtcaggtgctgaaaaccaatatcgccgcgctgggtatcgaactgcaacgggagaacgccaggctggcggtgaatgactggctgaacttcacctacccgaataaaccggcgctgtatgcggtgccggtgatgcaaagcggcgccaccttgccgggcggcgagttcacggcgggcgcgaccatgaaaatcgcctatcagtaa

SEQ ID NO: 456632 - DNA, 675 bp, Serratia marcescens
atgagacaggaagatcggcaacgacaaacggacgcctcagcggagggggcgttatgggcagatgaactgcgctattacggcacgttgggcggattggcgctgatggtgccgctgacgctgggcgcgatgctgtggttgttgccgtcggcacaggcaacggtggacaactgggacgtggagggcgccaacggcacgctgtatgtgcatggcgcgctgacggaaagcgcctgccgcctggaaatggagagcgtgcgtcaggatattgcgctgggcgaggtcagcaccggtcggctgtcgcagatcggcagccggggcgaaccggtgcgttttgaactgcgtctggccgattgtctgcacagcccggcgggcagccgcgacctgcgcaccggcgggctgagctgggctgccagccagccggcggtaacggtgagttttaacgcgcttcgcgatgcggacaacccgcagctggccagggcgcagggcgtttccggcctgggtttacggctgctggacgccaaaggcgaagatgtgcgcctgggaagccggggaaaaccgttgctgttgattccgggcagcaacacgctgacttataccgtcgcgcctgagcggacgccggccagcctgatggcgggcagctatcgggcggtggttaattttcatttgagctatgactga

SEQ ID NO: 456633 - DNA, 309 bp, Serratia marcescens
atgaatatgccaattcaaggaaaaaaactggaacaacgacggctacagcaaaagttgctgcatgtcttgcgccaatgttctctacattcttctgcacaatctcccgaacatgctgactggccgtcaacccggcagctggccgacgcgctcggcatcagtatttataaagcccgtcatatgttactggagatggccaaccacaatttggtactggttgcccgtcagggcaaacaccacgccctgcactggtatcccgtcacgccaaaccccggatcagtgctcggctatcactttaatcggacgccataa

SEQ ID NO: 456634 - DNA, 1509 bp, Serratia marcescens
ttgcttgccctgcctctgctgtataccccatcggtctggcttcctcatgccgcctggcgctttgccggcctggccgccgggctgctgttcctcttctcctgtctgcaggggaaatacacacgccgacgtctgagtattctgctggggataatactgctgattatcggcatccaagcggcggcggcgctgctccagctgtttatgcctgacggcggggttccgctgtacggcaaacgcgtatatggtttcttctttcagcccaacctgctcgccagctttgtcgctaccggcctggcattagcgctgatgctgatggtactgcccgcctttgcccttccccgctttgaacctctgcggcagggaatgctgttactagtgttagtggtcttttccgcactgttggtttgtatacaatcccgcgtcggctggttaggaggcgtgaccgtcgccatactgtttttatggcgttttgcccggcattttccacgccattgcctgtgggcaggcgctgcgctactgagcggcgtgctgttggggatggctggattactggccgagcacacgctaatcgccacggtcagtcacgacgccagtaatctggcgcgctggactatgctgcgggatacactgtacatgatcgccgataagccttggctgggatggggatacgggggtttcgaatacagcttccaacattttcgcatcaaccaggcggttcctacggctgtcaccgaaattgcccgccatcctcataacgaaattctgatgtggcttgttgagggcggcatggtggtcctgcccggcgtgatactgatggtgctgggcggcgtggccgtggtacggcaagcctggcgttatgaccgccgggcatttgatcgcggcagatggtcagccggtgtgcctggtgcattatgtattgccctgttgccgatggccctgcatacgcaactggagtttcccttctatctgtcagcacagcattttattgtctttttgctgttgctcgcactggcggaccgtgtgagtagcgacagtatgtgccgccgctgtctgcctccccgcagtcagcgggcagctcgtaccgtcatgccgctgttggcggtcggggtcgcgctggtgatggggtttacctttaaagcgcagcgggccatcgcacaagcggaacgctttggcatggaggacatcactccgctgaaaagtctcccggcagcgtcacgttggacgctgcaagagcggattgcctttgatgaacatctcaatcttctgctgacctataaccatacccaggatgaaaccttactggacgcgtaccgccaatgggcatcaggctacctggcccgccgtgttgataaaaacgtctatgccagcctaatccagattttacaacaccggggggatagcgctcaggctgagcgctatcgatgcgatgccgcgcgtctctttcccaaagacgcccgttttcaacccagcacgcccctgctctccgttcacgataaggagtcattatga

SEQ ID NO: 456635 - DNA, 615 bp, Serratia marcescens
atgacgcagaacataaaaatcactatccagacgaccgaccgctatctctacctggggctggccaatttgttacaggcgtccttcaacaataaacagcggaacgtgacatttctgccggaacagcaaagcgcacaggccgacctggtcattcaaagcgatgcgggattctgcgtgcagcaatgcggcaaacaaacgctgacgagtctccagcagcacacgaaccgcttacataacaaagccgcccgttatcgacaccggcaccgacaggcgcgagtctgcctgtgcaaacggatcgtcaacttttatcagcaatgcagcccaacaccgttgcagctgcttgataactggctggcatcgctggaggacgcagtccgccccgtcgtcagctgcccgcaacatatgatgcagctaacctctcgcgagcataaggtgctgtcggatatgcaacgagaactgacccccgccgaaatcgccgcagaccttgggatcaacataaaaaccgtcagtcatcataaacgtaacgccatgcataaactgggattttctcgcaacagcgagctgtatcactggttgcggcaaggcggtctgtcatttaataaccaggagttaatgtga

SEQ ID NO: 456636 - DNA, 402 bp, Serratia marcescens
gtgaacgttaagcgtgacaaacaccctattaccctgcagacgctgatcgcctgcgcggctatcttgctgagcggttgccagaacgctcgccataccgtcccgcaggacgcgcatacggccgacaacgatagcggacaaacacaaacgacgcggctgaatcaatgtcagcaggcgctcgacgcattagaggatattcaaccgcagcagtacgccacatttcatcaagagtttgaccggctgatgagcggcgcagcccaatatgccgctttgcgtaaccgggtcaccgaagaaacacaggaaaccgtcgatgcgctatatcgttacaaggtcaaccgcctgtgcgcaaatatcctccaggcaacgctgaccgggctggccgaacgcgccgagcagcaacaatga

SEQ ID NO: 456637 - DNA, 1263 bp, Serratia marcescens
atgacaaccgttcgcggcggcagacgccgccttttcataccgatcttgctatcagcgccatggtggccgttcgtcgcggcgacggcgtacgccgaaccgcccgccgtactgcagtttgccgagcaatatcaccctaaaccggcgacgctccgcgaccagcctcagacgtcccgcgccgagaacggaaaacttaggcaagtcgagccaaaaaggcggcctcaaaaagcagcgcaaaaaaaagcgccgcgcccccagccgctcgaccgaacgccggtacgtcaggaagtaccatcagcacaggcgcaaccaccaaatattgtgttgaacaaccgtcataccgaaccagcccaaacaccattgccgctgcgccgcctgtggagcacgctgcaagacgcggcgctgggtacgccggatgagcgcaaactgcggataatgctgcgcggcctgcaaacgcagctcaacgaaaaagaccgcctgctgcgaaccctacaggccagcaatacggaaactaaagccgtgctgacgcgcgcagagacagaacgccaaaaccagttggcggaaacggccgccattaagcaggacaaccgggtactgcaacaacgccttagcaccctgcaggccacgccagatctggacaattcagcgagccggctggcttacgccgctggcagcgccatgggacgcgatatgatcgccctgttgaatgagcgccaggcctggggagtatccgtcgaccggcagcgggtactacagggtattatcgacagctttttggggcagtatcgtctgtcaccagcacagctgaccgccgcgctggccgaagctgaaacccagatgaatcaggcgcatgccggcatcatcaaaaaacaacggcgcgccggtgaacggtttatcacccagttcagcaaactaccgggcgcacaccaatcccccagcggattctggtatcgcattacttacgccggcgatgagcgcctgacggacgaagctcggttggatgtggtggtcaaggagtcactcacggacggcacggtcattcaggatatggatgtacagggaaacgtgttatcccaaccattaaatgattacccaccgttgttcagggaggccctgggctaccttcgcaatcatggcgccatcacactggtggtgccggcgcaattggcctatggcgatagcggttctccgcccaaaataccgcccggcgccacgatggtctatgaactgcgtcttgacggcgtgcgcagtcacaagacgcgatag

SEQ ID NO: 456638 - DNA, 435 bp, Serratia marcescens
atgggccatacccgctatgaacatgatgttgtcgcctgggctaatgaacaggctgctctgctgcgctccggaaaattatctgagatcgatgttatcaagatcgccgaggagattgaggatgtgggcaaaagcgagcaaagggaacttgcaagccgtatgaccgtgctgattgcacatttgctgaaatggaaatatcagccggcacggcgaggaaacagctgggatagaacgattaaagcgcagcgtaaagaggtgctttatcacctgaaagaatcaccaagcctgaaggacaagctgagcgatgccgattggcttgatgtggtatgggcaaaggcggtggcgttagcgactacggaaaccggcttggatatctttccggacaacggtatttgggatattgagcaggttcttgctcatgagttctacccagactga

SEQ ID NO: 456639 - DNA, 198 bp, Serratia marcescens
atgagcaacccatttgaaaatgaaaagttagttttttgcgttttggtcaatgatgagaaccaacactctctgtggcctgagtttatccaaatcccaagcggatggaagcaggttttcggcccggaagatcgtcagtcgtgtattaattacatcaatgaaaattggtctgatatcaaacctaactcattagcccgttaa

SEQ ID NO: 456640 - DNA, 10857 bp, Serratia marcescens
atgtacgcatctaatgagcgtgagtatttccccctgacctcagcacaattagggatgtggttaaaaaatgaaatatcactgaacccgggcaacaacaatatctgtgagtatgtgatgattgatggcgctgtagacccagcgctttttacatcagcgattcataaaacaattgttgaagcagaatcaatgcatagtcgcttcctgtatgttgataatgaaataaaacaatacctgcacagtgctgatgattataacgtcgagttttatgacttcagtcacgaggcggatcctgaggcgacattccacaaccatatacacacccgcgccgccagagttttttccctgaaagcagatgagcatgcatttgaattttcactcattaaactctctcccttcaaatacgcttactatcattgctgccaccatattctccaggacggatttggcggttcactccttcttggccggacggtggcgatttataatagtttaacctccggggagcccctgcccccgtctccatttgggagcttcaaacgactgattgccgaagatacggcgtaccgcagctccgaccgttttcttcgcgatcgtgactactggctgtccggtttcagtgatatgccagaaccggtcagccttaccgaacgctctgcgcctgcggagaacctcattttctatcgaaaaaatatcgacgacaaaaccgaccaggccctgcgagagaaggcaaaagcgctgggttacacgctaccgcagctattaacaaccctgagctgcatttatctttaccgcatgacgggtaacgacgatctgattatcggcatgccggtaacggcaagagtcggacgggaactgcgcaccattcccggcctgttatccaatattatgccgctacgcataaagttatcgcccgccctgtccttaaccgacgttctgacgctcaccgcgaaagagatgaggaacgttttacgccaccagcagtaccgcaacgacgacttacaacgggatctgaatttaacgcacccgctgtaccacaccaccatcaacattgaactgtttggtgaggatctcaaggtcgatggctgccgtacaacgccaaccaattactgcagcggcccgactgacgatttaaatattttcttctttggttatggcgaggaacatacgctagttctggggtttgacgctaacgaggcgctatacagccaggcgtcattactgcaacaccaccgcagaatgatgtcgctgtttaacgaattgcttgagcaaccggaccacgcgataggcttaccttcactgttacatccggctgaagcgcaacggctgacggcgctgaatgcgcaacagcagacgcctgtttcaccattgacgctgccggagctgttcgaagcgcaagcgttaaaaacgccggacagcgtcgcctgctatcaggccgagaacgcggtgagctatgcccgcctgaatgccagagtcaaccagcttagccgctatctgttggagcaggggatctctgacggcgatattgtcgccgtgctgttgccgcgtgacataaatcttattgttgcactgctggccatcgtgaaggtcggggcaacctatctgcctttagaccctgaccacccgcctgaacgcctgaagcacattctggcaacggcagaaccaacgctgattttaaacgcccagtcaaccgccaacacggttgactgggctgcgcaaatacggctagatgacgcaaacatcctcaccgccatacgcgcccagccggaaacatcccctcggcgggcggcgcccaaaccgcagcaggcggcctatgtgctctttacttcgggttcaacaggccagccaaagggcgtgctgatctcacatcacgggttgagcaacttcctggccgcaatgcagcagcatattgcgctggacgccggacaccgcatgctggccacgaccaccatcggcttcgacattgcggcgcttgagattttcctgccgctggtgaacggtgcggcgaccgtgatggtttcccgcgatgttacccgcgatccgacgctgctggcacaggaaatcgccgccagacaggtcacccacatgcagggaacccccgccctctggcaaggactgactgaataccagccgcaggcaatggcggggcttaccgcgctggttggcggcgactcgctggcggtcaatctggctgaacgcatggtggcgcttgccgcggacgttatccaggtctacgggccaacagaaaccacggtgtggtctacgctcggcaaactcacgccggatcacatacagccagcccttatcgggcaacccgtcagcaacacccaggtttatatcctcgacgctgcactgcagccggcgcctgtcggccaagccggcgaactctatatcgccggtgatggtctggcgtttggctacctcaagcgcccggatctgaccggcgaacgctttgtggcaaacccctttggccgcagcggtgagcgcatgtatcgcaccggtgatatggcctgctgggatgaaatgttccgcctctgcttcctcgggcgtattgataaccaagttaaaattcgcggttaccgcattgaactgggcgagattgaacacgctctgatgcaacttccgacggtaaagcatgcgctggtgatggcccatgacgaccacatttcgcagcaaaaacgcctgatcgcctgggtcattaccgagggcgaggcctgcgcgccggatagcctgcgggccgagctggaggcgcagctgccggaatatatgatcccatcggcaatcgtgccgctagagagctaccctctgaccgccaatggtaaaattgatcgccgtgcgttacccgtcccgacattgacgccggcggcaccggtgcaccccgtcaccgagacggaaaagacgctgtgtcagctctttgccgactgcctcggcattgcattgccgggcattaaccataacttcttccagctgggcgggaactcgctactggcgctgcagctgatcggccggctgcgtgcaaccttcaatgtcgatctctcgctcaaaacgatttttgatgccccgaccgtcgcgcagctttgcgatgaactcgtaaattcccatacgccatctctgcgccccgcgttggttgcacagcctcgtccggcgcttctgcccatgtcgtttgcccaacagcgcctgtggctacaggaacaaattgcgcccagcagcgcctataacatgccgctcattctgcaactgaacggcccgctgaacccgtcggcgctggaagaagcgctgcatgacgtggtggcgcgccatgaaagcctgcgtaccctgctgatacagcaaagcgagctgccttgtcagtcaccgctccccgcgggacagacgcctttcatgctacagcgccagcggacagacagcacacggttgccccagctgctgacgcagcagtgcggacacgtgttcgatctggcgcacgaaattccgctaaaggcctgcctctatcagttggctgaggagcagcacgtcttgctgctgctcattcaccacacggcgggcgacggcggttcactggtgccgctgatgcaggatttgagtctggcctatcgcgcgcgtctggacggcgcggcgccgacactaccgcctctgccgattcagtatgccgactacgcgctttggcaacggacgttgctggaagatgagctgactcctgatgggttgttcgctcagcaaatgcgctactggaaaaaacaactggccgacctgccggatgaagtcacgctggccggcgatcgccagcgcccggcgcatccggttaatacggcggcgcgtatcagctttgatctggcaacgcctgcctaccagcggatcaaaacgctttgcgcacggacgggcgcgagtctgtttatggtgctgcaggctgcgctggccgccatgctgcaccgcctgggcgcaggcgaggacatcgttaccggaatgccggtactgggccgtaccgaagcgccgcagatgcccctgattggctattttgtcaatacgctggtgctgcgcaccgatctgtcaggcaacccgacgctgaatgcgttgatagagcaggtgcgcgccaatgttcttgcggcttacgatcaccaggatattccttttgacaggctggtggaaacgctgtctcccgaacgctccgtcgcccgtaacccgctgttccaggtaatgatgacgctggacacgccgctgccgtccgggattcatttacccaatctgactgttgagcagatcgcgtcccccgccacaacggcaaaattcgatttactctttaatttccatgaagatgagcggcaagagcgcctgtcggggaatattgagtttgcaacggacttatataatgcagataccgtcgccggctttgcccgctggataagcaatattctgacggcgatgggcgagcggccggaaatgcgggtcagcgaaatggcgctgttggataagcgggaaaaaaaccggctcacgacagtctggaacgatacggcggcgccgctgcctcagcgcacgcttgacgtactgtttgaacagcaggtgcttcgttcccctgatgcgctcgccgtaagcgcaggggacgagtctctcacttatgcccagctaaacagcgccgcaaatcgcctggcgcataaactgcgtgaggccgcaggcggcaagtcattccgcgccggaatattaatgccgcaccgcatagaagaagttattaccattttagccattgttaaggcggggggaacctacctgccgctgcgcccggccgatccgcctgagcgtcagcaaatgatgatcgatgatgcctgcgcaacgctattgattaccgactccgcagagcagtatccggagatggaatgcgtcattcggctcgctgaattaccagcgctgcattatccggacaccaatccgcaggtcggcattcagccgcaaaatctggcgtacattatgtatacctcaggctcaaccggaaagccgaagggtatcgccattgaacatcagagcgtcgccgccctggcccttgatcgtcgctggcagccagaggatcaccagcgggttctgctccattcgcccggcgctttcgacgcttcaacctatgaactgtgggcaacgctgctgggcggcggcgaggtggtgatagcgcctaacggcgagatagatattgatgtgctggccagcacgctcgtggataaaaaaatcacctcggtgtttctcagctccggactctttcggttaatggcggaagagcacgtccatgcgctggcggggctccatcagctgctgaccggaggtgatgccatgcctcaatcggccttggccacggtgatgaataagtgccccaatctggttgtcgtccactgctatggccccacagaggccacgacattcaccaccacgcatgccttacgcaatatgcccgcaaccgccacggcaccgattggcgcgccgcttgataatatgcaggtttacgtgctggacgcttaccttaaccccgtgccggcggggatcccaggtgagctctatattgcaggtatgggcctggcgtggggatatatcaaccagcccgccctgacgtcagcgcactttgtcgccaacccattcagcggcaacggagaacgtatgtatcgttccggcgattgggtgcgctggcagcctggcggcgtgctggagcacctcaaccgcggcgatcagcaaattaagattcgtggttttcgcgttgagctcgccgaaattgaagccgccttgctgcagctggagataatcagtcaatcgttggttattctgcacgaagcgcgcaagggcgataaacagctggtcgcttacgttgtggtaaaagaaaacgccgcgttccatcccgaacagatacgccagttattaagtcagcatctgccggactttatggtgcccgccgttcttattccggtggcctctttcccgataaacagtaacggtaaagtggatgtccgcgcgctgccggcgccggttttcgccagcgtcagccgacgagaggcgcgcaacgcgcaagaaaaaatgctgtgcgatctgttcgccgacattctggggatcgacagcctcggcattgatgataacttcttccaacttggcggccattcgctgatggcctcgcgcttaatcagccaggtacgcaagacgcttaacgccaatccgcgcatgcgcgacctgtttgaagcgccgacggtcgcccagtttgccgaacgcttaaatcacgacgccgcaccgcgcccgccgttatgcagcaaagagcgcccggtgcacataccgctgtccgccacccagcgccgactgtggatcgtggataatattgagggcggcaaatttacctacaatatgccgctgatgctggaactgcagggcgaacttaacaccgccgcgctggcggcggcgcttaacgatctgctcttacgccatgaaagtctgcgtacccgctttcatacgatggcggacggcacggtgtaccagcatatcgccgatgacgacgatgcccgctgtacgctggtgatgcatcgcgtatcggccgccgagctggaggcggcggtgcagaaaacgtctgagcatctgttcgatttagccaccgaaaacccttgcagggcctggctattcaacgttgatgcgcagcgcaatgtgctgctgttcctgatgcaccacattgccagcgacggcgcctccctggcgccgctgctcaacgatctggccatcgcctacaacgcccgcctgaacggcatgatgccggactgggcgccgctgccgctgcagtatgccgactatacgctctggcagcatgaactgttgggcgcggcggacgatccgaccagtcgtcagaaccaacagctggcctggtggcgcgatgcgctaagagcgctgccggaagagcttgagttgataaccgaccgcccccgtccaccgcaaccaagctatcagggccggcagtgtctgttctccgttgacgacgacgtctactcacgcctgcgtgagatcgcacaacagcggcaggcgagcctgtttatggtgctgcaggccgcgcttgccctgctgttgagccgccttggcgcgggtaacgatatcccgctgggtaccgcgatagccggacgtacggatgacctcctcgagccgttggtcggctttttcaccaacacgctggtgttacgcaccgatgtctccggcaacccgcgctttaacgacttgctggagcgggtgcgcaaccacaccctgcagatgttcgatcaccaggatttgccgtttgaaacgctggttgaggcgctcaatcctgcacgctccctggcgcgtcatccgcttttccaggttatgctggtgctgcaaaatcacccgcgcaacgcctatcggtttaacggtctgacgagccgggcaacgactccgcccctcccggtcgcgaagttcgacttaacattcaaccttgatgaaggcccggacgggctgacgggatgcgtagagtacgccaccgatctgtttgatgatgcgacagcggaacgtattgcccgctacttcaaccagcttctgcatgcaatcagccgggatccgcatgcccgcatcagcaccttgacgctatttagcgacagcgaacgcgcgcagctcctccacggttggaacgagacccgccgcgccgtctcggcacaaacctttgccgaacagtttgaagagcgggtacgggcagcgccggataatctggcgctgctgggtgaggatgaacgcctgacctacggcgaactgaaccaccgggctaaccgtctggcaaatctgatgatggccgatggcgtcggcgccgagcagattgtcgctatcgccctgccgcgctctgtcgatctgattgtcgccctgctcgccacgctaaaagcaggagcagcctatttgccgctggacccggattatcctgccgaacggctgaactatatgctggagcatgcgcagccgacgctggtgatcaccgactccgcattcgcgcagcaatcagggctatgccgccccagcctgcagcttgacacgccggaagtacagactcgtcttgctcggcagccggcgcacgctctcaccatcgcgcgtcgtctgagccttgataatgcggcctacattatctacacctccggctccaccgggttgccgaaaggggtgctggtcacgcaccgggggatcagccatctggtggccagcatggcggaacggctgcacgttacgccgcaaagccgggtgctgcagttcgcctcgccaagctttgacgcctcattctgggatatcagcatggggctgctcaatggtgcggcgctggtggtcgcaagcaaagagacgctctctcccggagaatcgctgtacgcgctgatgctgcgcgagggcgtaactcatgccacgctgccgccggttgggctggccgtgatgccgcaaaaaccgctgccgcagctgcaaacgctggtggtggccggtgaagcctgtccgccggagctggtcgccttctggcgtcagggccgccggatgataaacgcctatggccccagcgagtccaccgtttgcgccaccatgagccagcccctgcttgcccatgccgcgccgccgatcggcacgccgatcctcaatatgcaggcctatgtgctggataacggcctgcagcccgtaccgccgggagtaaaaggcgagctttatattgccggagagagcctggcccgcggctacctcaatcggcccgatctgagcgccgagcgttttgtggctaacccattcggtacgccgggcagccgcatgtaccgcaccggcgatgtggcctgctggcgcgctgatggtgaactgctgtttatgggacgcgcggatcatcaggtcaagatccgtggtttccgtattgaaccgggtgaaatcgagtccgtactgctcaggcacccgcagctcagccaggcgacggtgattgtccgtgaggacaagccagggctgccccagttggtcgggtatgccgtcgccagcgaagcaggcgtcgatcccgcgcagcttcgccgctctctgcgcgagtacctgccggaatatatggtgcccgtcgccattatcctgctgccggcaattccggtgacgccgaacggtaaaatcgaccggcgcgcgctgccggcgccaacgttccaggcaacctcttaccgggagccggccaacgatcgcgagcggctgctggcgacgctcttcggtgaactgctgaacattgaacaggtggatattgaccagagcttcttcgaaatgggcggcgacagtattacggcaatccagctggtggcccgcgcacgccagtcggggtggatactaacgccacgccaggtgtttgagcacaagagggtctcggccctggccaacgttatggaggctacgccaaccgccgacgacggcaacctgatcgccgccacgggggaattcccggcaacgccggttatccagtggctgatggataaccccggaaatattgacagctttaaccaaggcacgctgctgcaaacgccggccgagatggatgagacgatgctgcgccggctgctgacgcagctgcttgagcagcatgatgctctgcgcatggtcgcggcgcgcgcaaaaaacggcgcggcccggctgagcattgcgtctgccgacggcgttgcaacggagaatctgctgcgggttatcgacggtagcgccttctccctcagcgatcttcacgacgtcatccgggaggagagccggaacgcgaagcagcggctcaatccggcggccggcaatatggtgcaggcagtctggttccgcatgccgcacggcaagccgggacggttgatgctgatgctgcaccacctggtggtcgacggcgtttcctggcgtttgctgggggccgacctccgctatttgtgggacaggatgaaggcgggtaaaacggcgcaactgccgccggcgggcacctctttccgcgcctgggcgcatcggttacggcatgaagccaacgagcggcaccgcgagatcgcgtactggtccggcgtcctggataagccggatgctctcctgacgtcgcgccggctggacggcgcacaggatcggatggcgaccggcgacaggctgcaaatgacgctgcctgcggcagtgacgcagccgctgctcggaaccattcctgcactgttccacgcgggcatcaacgatgtgctgctgtgcgcctttacgctggcggtgaacgcctggcgacagggagcacaaacagaagtgctgatcgatctggaaggacacggacgcgaagcgctgccgggcaccgaaccgtcgcgtaccgtcggctggtttaccagcctgtatccggtacgcctcgatccgggcagcccgccggttaccgatgcccacgcattgggccatgtactcatgcgcatcaaagagcagctgcgtcaggtgccggataacggccttggctatggattactgcgctatctcaacccgcagacgcgttccgtgctcgccgccaggcctcagccgcaaatcggctttaactatctgggcagggtcgctgccggccgcgcaggcgactggcagccgacgcaggaagcaagcctgctggacaccgacgcgcatcctgatttcgcgctgccgcacgcgctgtcgctgaacgccatggtcgaagaacgcccggaagggccggtgctggtcgccaactggagctgggccgcggcgctgcatacgccgcacagcatcagggtgcttggcgatcactggttccgctggctcagcgagctatccagactcaccacctcccccgaagcgggcggcttcacgccatccgacctcacgatggtgacgcttaaccaagataatctggccaagctccagtcaaaatggaagaaaaaataa

SEQ ID NO: 456641 - DNA, 7110 bp, Serratia marcescens
atggaaattaaagatatactgccattatccccgcttcagaaggggctgctgttccagatgctttacgacacccggggcagtgatgcctatcaggtacagcaggttttccagctggatggcgcgttggacggagaaaaactaaaacaggcggccgcgaccctgctgttacgtcatccgcatctgtgcgccggctttgaatatgaaaacgtggatacgccggtgcagttgatcctggcggggcttgagctgccctggcgggagcgcgatctgagcggcattgaagcaccacagcgggagcaggcgtttacggccctgctgcaggacgattaccatgagcgtttcgatcctgaagatcccccgttgctgcgctttacgctggtcaaatatgcagctgaaaaatactttttgattttcaccaatcaccatttgctgctggacggctggtcggtaccccttctgctgcaggagtttttcacgctctatacagaagacgtcagcggtcagacgctggcgcctgccgtatcctatcgcgactatctgcagtggataacctcgcgcaacgagcaagagatgcgcgcaatatggcgcgatacgctccacgaccttgaggcgccgaccctcatcgcccaagggcgcgtgacggacaacctgcagcctgacctgcggtataaaaaactgaatgcggcccgcactcagcgccttaatcagcgcgccagacagctgggcattaccatcaacacgttgcttcagggcgcctggggcgtactgctcggcgagataaccgggcgcagcgatatcgttttcggcattaccgtttcaggccggccaggggaattgcccggcgtagagcgtctcgtcggcctgctgatcaatacggtaccgctgcggctgacctttagcctggcggaaaccttcggtgatatgctgcagagactgcaggcggaacaaacccgcctgctcgattaccaatacctcgatttgacgacgatccagacggacgcaggctacggcgatctgtttgataccctgatggtgtttgaaaactacccgcaaatgggacaaggcggcgaacagccggagagtgaactggctatttccatgtcctcacaccgcggcggcgacgcttcgcactatccgctggggctggtcgcaatcccgggggaaagcctcacaatgcgtttcagctcactgccggatttgctggacgacagcaccgtggccgccgtggcggatcgctatatggatattgtcgacgcgatcattgataacccgcacgccgtcattggccgactgccgctgatgccggctccgccgcagccgcagccgcagccgcggcctgagccgccgccggcggcctggtcgacacagacgctgcacggcgtgtttgagcagcgcgtgcagcaaaccccggacgccatcgcgctaagttttgcggataacagcctgagctaccgccaactcaaccaacgggcaaaccagttggcgcgcctgctggtcagccagggcgtaggcgctgaagacctggtggcgctggccctgccacgctccatcgatatggtggtcgcgttgctggcgattcttaaatccggcgccgcctatctgccgctcgatatacataacccggcggagcgcctgacctatatcgtcaccgacgccaggcccgcggcgatcattaccgatgccgagcacgcaggcatgctgggcggcgcggtgagcgagctgcttatcgacacgccggagtgccggcaacgtctggccgcgctgagccggagtaaccttcagccgctggaacgggttcgcccggtaagcgccaaaagcctggcctacgtcatctacacctccggttcgaccggtaatccgaaaggggtgatgatcccccatgaaaacgtgctgcgcctgttcacctcaacccagacgtggttcgacttcgaccgccacgatgtctggacgctcttccacgccagctccttcgacttctcggtctgggaaatctgggggccattactctacggcggcgaattggtggtcgtgccctatatcgtcagccgcgatccccaggcgtttctgcgcctgctgagcgagaaaaaagtcacggtgctaaaccagacgccttccgcgttttatcagctgatcgaagcagactgcgccaatacgcaccaacgctacccgctccggctgcgcaaggtcatctttggcggtgaagcgctggatctgaaacagcttgaacgctggtatcagcgccatgaggccaacgcccctacgctgatcaatatgtacggcatcaccgaaaccaccgtccacgtcagctatcaggcgctgacgccggaaatggtacggcacgccgcgggcagcccgatcggcgtcggcatccccgatcagcacatctacctgctggacggcgcgctgcgtcaggtcccgcccggcgttgagggggagatgtacatcggcggcgccggactggcacgcggctacctgaaccgggtcagcctgagcagcgagcgctttgttgccgatccgtttggtgaaccgggcgcacgcatgtaccgctccggcgatctggccgtcagacatcacgacggcgggctgcggtatctgggacgcgccgaccaacaggtaaaaatacgcggtttccgcattgagctgggagaaattgagaacacgctggccggctaccccgccgtgactcaggccgtggtgctggtgcgggaagatacccccggcaacccgcagctggtgggatatgtcaccagtgataatcacgacgatgttgatactgcagcgctgcatgcctttgcgacggcaaggctgccggattacatgctgcctgcggcgattgtgcacctggcgcgttttccgctgaccatcaacggcaagctggataagcgggcgctgcccgcgccggcgttcagccatagtcagagccgccgctcgccgcgtacagcgcaggaggcgatcctggcgggactgtttgccgaagtgctgggctgcgacaacgtcggcattgacgacaacttctttatgcttggcggccactccctgctggcaatgcgtcttatcgccagggtagccagcgttctggaggcggagctgccgatccgtacgctgtttgaaagcccgacggtcgctcagtttgccgaacggctggcagagagcacgcagcaaaaccgcgaacaactgaccagccagcctcgcgaggcattcttaccgctctcctgcgcccaacagcgcatgtggctgctggataatctcgacaacaaccatgcggcctataacatgccgctggcgctgaggctacgcggcgcgatcgacgatgaggcgctgcaccaggcgctgcacgatctcgtgcagcgtcatgaaatcttacgcaccacctaccctcgccaccgcgatgaaccttaccagcatattgtggcgccggaggacgcccggcccgcgttccaggtgcgccatgtcggcagcgaggcgctgatggcgcacattgatcgggcggcagcccggccgtttgaccttgccggcgagttgccgctgcgcggctggctcttccatctggaagaaacgcaggagcacgtactgctgctggtggtgcaccatatcgcctgcgatggcggctcactgacaccgctgtttcacgacctgtccgtcgcctatcaggctcgctgcgcaaaccacgctccggactgggcgccgctgccggttcagtacgccgactatgcgctctggcagcggaaagtgctgggcgatatgcaggacagcgctacgccgggtggtcgccaactggccttctggcgcgaggcgctggccggcatcccgcaggagacagatctgccaaccgaccgcccccgtcctgcagtaccgagctaccgcggagagcgcatcgattttgcaatcgacacagcctgttaccggcagctaaaacagctggcgcgcgatgagggcgtcactccctttatgctgatccaggccgtcgttgcggtattacttaaccggatgggcgccgggcacgacattacgctgggcaccggcgttgccgggcgcaccaacgaggcgatgaacgcgctcatcggtttcttcgtcaatacgctggtgttgagggtggactgcgccggtaacccgaaattcagcgcgctgctggccagcgtccgtgaatttatgctgtcggcatacggccatcaggacgtgccgtttgaccgggtggttgaagagctgaacccggatcgctcatcgtcccggcatccgctgttccaggtgatgctggtattgcaaaacaatgccggtgccgaacggcagtttgcagatttgaccatggcccctcagccggtcggctttgcgcccgcgaagttcgacctgacatttaacttcgacgaacgctacgacgagagtggcgatgtttgcatgctggacgcccagctggaatatgccgtcgatcttttcgatcgccaaaccgcagagatgctggttcacaccttccaacgcctgctgtcatttattctcgacgcgccgcatacgccggtgctgaatattccgctgctggccgataaacagcgtcgctatctgctgcaagagctgaacgatactgaacgcagcgtacctgccgccacgctgagcagtctgtttgcccggcgggtcagtgagcatcctgagcgcattgccgtcagctgcggcgaggagcagctgacctatgcgcagctggacgcccgggcgaacagcctggcgcgacgcttgcggcagcacggcgtccgtttggaacacggcgttgcgctgctgatggaacgctcgctgtcgctggtggtcagcgtgttggccgttgccaaagcaggcggtttctatgttccgctgcgcacgcacgatccggcggaacgctggcggaatatcctccgggagaccggcgccaacgtcgcgattgtggatgaaggttaccggcacgccgcgcttcctgcggagctggccgtggaagtggtgagccatacggatgaacaggataatggccacgcggatgaactgcccgtcagcccgcatcatctggcctacgtcatgtttacctccggctccacggggcaaccgaaagggattgccaccacccaggataacgtggtggctctggcgctggacgaacgctggcagggcgaccatcaccagcgtatgctgctgcattccgcctacgctttcgatgcttcaacctacgagatctgggccgcgctgttgaacggacaccacgcggtcatggtgcccggcgatgagctggatctgccgacgctgacggcaacgctggctgacaaacaggttaccgcagcatttttaacctccggactgttccggctgattagcgaagagttcccgcagtcgctggcatcgctgcgcaaactgtataccggcggcgaaagaatttccgccagtgcggtgcaaacggtgcgggagaactggccggagctgtcgctaatgaacatctacgggccaacggagaccacaacgtttgccgcggattatccgattgccgacgcggatgccccttatctggatgtgccgataggcatggctttcaataacacccggctttacgtgctggatgaattcttacaaccggttcccgtcggagtgcccggcgagttgtatattgcagggcgcgggctggcgcgcggctatataaaccgtccggcgttgacggccagccactttgtggccgagccgttcggcccgcccggcagccggatgtatcgtaccggcgatgttgtgcagtggcgacgcgacggcgccctgaagtttgtcggacgccaggatcagcaggtgaaaatccgcggcttccgtatcgaacccggcgaaatagaaagcgtcctgacgcgccaccctgacatactgcaggcggcagtcatgccatgggaagagagcgcgggtaataaacagctggttgcctgggtcgttgccactacgcgcgatgatgcgctgcctgcacggctacagcagtatgtacgccagtacctgcctgactttatggtaccggcggccatcatgctgctcgacgcgctgccgatcaatgccaacggcaagaccgatctggccgcgctgccgaaacccagcttcagcacacggccgggacgccagccgcagacggacaacgaacgctggctggcggctaaattcagcgaactgctgggcgttgagcgcatcgggatcgacgacagcttcttctctctgggcgggcactccctgctggctgcccggctgatcgcccaaattgataatgcgctgcaggtaacgctgacgctgcgcgatctgtttgaatcgccaacggtcgccctgctggcccagagactggacagcagcagcgacagcagcgtgctggatgtcatgctgccgctacagccacagggcacaaactcgccgctgttctgtttacaccccggcggcggcctgagctgggcctattcagggttgattcctttcctcgggacgcagcagccgctttacggcatccaggctcagcgactcagcagcggactggcgccacgctcgattcacgcaatggccgaggcctacctggctgaaatctaccgcgtgcagccgaacgggccttattcgctgttgggatggtcatttggctgccatctcgcccatgaggtggcgacgctgctgcaaaaggataaccagaccgtgaaatccctgatctttatggacggctatccgctgtggtcaaagtataaaaacagcgtgcgaacggatacacagagcctgcgtgcgatgtttgaagcgctaaccggcacggtgccgcaggacgacaatgcgctaaacatcaacacgctgcagcggaaattggcgcaggtgggccacccactggcggatgtcgggccggagatctttgcacgcatccttgccgagttccgcgatgcgccacggctgctggctgaattctcaccgggggtttatcaaggtgatgttctgttcctgaaagccgcgcacctctccgccgacggagaagattacgacccgcagctttggcgtgattacgtgacagggaagatagtcgcgcataacgtcccctgcacccacgacggcatgctcagcgccgcggcgttaaacactgtcggccccatcgttaaaacatgggtgatagattaa

SEQ ID NO: 456642 - DNA, 381 bp, Serratia marcescens
atgagaaataaatatattctgatcgttagttcactgctgctctccggcatcgccatgccgactcaggcctcctccatcagttgcgaaagcaaaaaaagcgagctgcgcacgcagatcgactatgccagatccaacggcaatgcttatcaggtccgcggactggaaaaggcgctgcgcgaagtgacggcacactgcagtgatgaactgctgcagcaggaaaaacagcttaaggtgctggaaaaggagcataaggtcgccgaacgccggcgcgaactggatgaagcgcgccaatccggcagcctgaagaaaatagataaaaaacgggaaaaactcagggaagcggaagaagaattggcggaagccagaggtaacgccgcttaa

SEQ ID NO: 456643 - DNA, 732 bp, Serratia marcescens
atgcacaaaataatcgccgtctcactgcttgccctgtccacaaccgcatcggcagatattacgccgcactggacctatgagggcaaggccggcccggaaaactggggggatctcagtagcgaattcgccatctgcaagaccggtaaatttcagtcgccgattgatatccgccaccccattgaagccaaactacccccgctgcgactggatttccgcaccgcagccgaaagcctgatcaacaacggccattcgctgcaggttaccgtcgatgatgaagacgactttaagctggatggcgacacctttacgctgcgccaataccactttcatgcacccagcgaaaacctgatcgacggcaaacgctacccgctggaagcgcacttcgtgcataccaataagcagggagagatggcggtgattgccgtaatgtttaccgtcggaaaagagaatacggcgctgaaacccattatcgacaacatcccggcgcaggaaaaccgcgtggtggcggtggaacaaaggttcgacctgactccactgttcccggccgatcgccattattaccgcttcagcggttccctgaccaccccgccctgcagcgaagggctgcgctggctggtgatgaaaaacccggtgacgctgtccagcaaacagctgtacatattccagcaggcgctgaagcatagcaacaaccgcccggtacagccgcttaacggtcggattatcgttgaataa

SEQ ID NO: 456644 - DNA, 444 bp, Serratia marcescens
atgttgatggcagtgagagcaatggcttttttcgtgctggcgatgctgccatggcccgcctctcaggcatcatcggtattgccttatcaggctgccattggcagttcgccggataatcagctgttgtgccataactgcggggggagcggaaaacagaccctgattcagggtgggggcgacgtcaggcaatatcattttgtcatcgaaacgccttattacacgtttctggcccgtcagagcaagggggcttgcccctatacggcgtggattgccgtcaataaaatgcggacggcgccttatgccgagcatttcaccgttggctgctacccggtgaaagatttccgcgccgcagatggacagaacgcaacaacatttagcgtgtactttcgccgtggtgtgactgaaaccatcgagtttaatcatcaacagggtgatgcgcgctga

SEQ ID NO: 456645 - DNA, 3039 bp, Serratia marcescens
atggcctcttttactctttcattcctttcccgcagctgcctgctggcgctggcagccgccattcccgtcgacgctgcagcagcatcgtcgtggcgggttaccgacggctccacgctggacgtcaccagcggctatgtcagcgatacggcgaacgattatccgctgttggcctccggcgcaggcagcctgctgcagaccaccgccgacggcctgaatttccgcaccacgggggatgtactgtatgccgccaacgcgctggcaggcggcggtattcacctgacgggggcgacgctggccaccaacggcgtgatggcgcacggcgccaatgttgacggcggcagtctgctgatgaacggtggcaatattaccgtcgcgggggctaacagcgccggggtgttcggcgcgaataacgccgatatctcactgagcaatttagccattgcggccgacggcgtcggcagcagcggcgtaacgctcaccgacggcacgctgaatatcgccaatagctccattctggcgacgggagccggcagccgcggcattgtgctggcctattccacggcgggagacgccagcgccacgctgaacaacgtcaatattattctgcgcggcgaggggactcaggccgggctgatgctgggtaacggccaggtgacaggtaatattgtcaatatctcaaccatcgggcgcaaccgaggtgtcgatatctataacgccggcggcggccacggcagcctgaacctgacggacagtaccattagtacgcaggacggcgacggcatctatattctgggcggtgacgtaacgctgacgaataccaacgtcaatacgcaaggcggtatggcggttaatgtcaacaaggccgcgcgggcggagattagcggcggcgaatttaccacccaaagcgaccatgccgatgcgctgtggatcgcaaccgccgactcctcggcggcggtcagcggcgcgcgtttcactacccagggagctggctcgcacgcctttaacgcccagttcggcaacgccgtgctgcgggacagtacgctgtcgacccgtggtgtcggcagctacggcctgtacagtgaagcgcaggtgcaggcggataacgtcagcatcgacacgcagggcgacagtggcattggcgtgttcgccgcgcgcggcggggtgattaacctgcagcgcgttgccgtcagtaccgccggtcgcgccgccgccgggctgctggcctatccgggctcaaccatcaacggcgacgggctgacggtgcagacccgcggcgctgacggccatgcgctgtgggcgcgtgccggcacgttgaatatcagcaacagccggctggctgcgcagggggaaaatgcggcaggtctgtatgtcagcagtatcccggcgggggacggcagccgggtgacgctggataacgtgataatgagcagcgcgcaggggccggcaatccgcaccaatggcgcggcgctggatatggcggtgaagaacggctcgcagcttagcggcggtaacggcgtgttactggataatctggcgggcaacctcgccgacccgaattacaacggcgatgtgaccttaagtgcggataaccaggtgacattaaccggcgatatccgcgcggcggcggaaaaccgggtgaatgtggcgctgagccgcgcctcgcagttgacgggcgcggtacagaacgtcgatgccctgcaactggatggcagcagcggctgggtgatgaccggcagctccagtgtcgatcggctggccagcgatggcgtggtctccttccaccatgatggcgcggcgttcagcaccctgtcgctgggcacgctgacggggaatggcgcatttgccatgaataccgatatcgccgccctgaacggcgacctgattgcggttgccggcagcgccagcggcgaccatctgttgtcgattaaaaactcggggcgcgagccgggcagaagcgaagacgcgctgacggtggtgaccaccggcggcggggatggccgctttagcctgaacggcggcgcggtggatgccggcgcttaccagtacgaactgcagcagcgcggcgatgactgggtgctggcgcagaagttcagcgacccgggcaacggcgacggcggcgacccggtaccgacgccgagcaccctgaccgcgctggggttgttcaacgccgcgccgacggcctggtatggcgaactgaccaccttgcgcacccgtctgggcgaagtgcgccagggcaagcagcagggcggcgcctgggcgcgggtgctgggcaatcagtatgacgtcaatgaccgcgccggcgcaggttaccggcagcggcaaagcggtatctccgtcggcgttgacagcgcccatgaactgcacgacggacagttgctggcgggggtgttcagcggaaccagccgcagcacgctggcatttaacggcggcagccgcggcacgatcaacagcttctttatcggcggttacggcacctggctgatggactccggctggtttgttgatgcgctggtcaaggccaataacttcaccagtcaggccgacgtgcgcatgagcgacggtgaaaaggcgcatggcggctacagcgtgccggcgctgggagcatcgctggaggtagggcgtcagtatgcgctggccgacggttggtttgttgaaccttcggcgcagctgtctgcggtatgggttaaagggcagtcttatacctacagtaaccagttgcaggcggacagcggcagcgtcacctcccagcaggcggcgctgaacggcgtggtagggaaaaacctgacgctggataacggcatgacgctgcaaccgtggctgcgtgcggcgctgattcaggagttcagcgaccgcgaccgagtcagcatcaacggccacgggttcgataatgatctgtcgggcacgcgcggcgagtttggagcaggcctggccgcgcaggtgaccaacgatgtacagatctacaccgatgcgcgctatgccaagggcgataaaatcgaatcgccgtggggggcgaatctgggcgtgcgctggacgtggtaa

SEQ ID NO: 456646 - DNA, 591 bp, Serratia marcescens
atgaaattactgtttaccacgctgacgctcggcgtcgcgttatgtctggcgaacgcggcgcgcgccgccttgcccgcagccgacggcggcatgacaccaccgccggataaccgttgcagcctgtcggccggcgcgccggtgattgactacggcgtgcagtcgcgctggcagctgcaggatgcgggcggcccgcagcgggttacgccgggcaagcgtttactgcagttgaacgtggtctgcccccatagccagacgatgcgcctgatgctgcgcggcgagcgggccggcaacggcgaactgcgctacggcgagcgtggcagcgtagcgctgcggctgctggatgcgcagctggacggccagggcgtgcagctcgcggccacgacgtcggacggcgtgctcagcggcggcggacaagacagcctgcggctgttgccgggcaacggttttgcggcggtgcagaacggccggctgctcaagggcaaaagctttaccgcacgcattgagctggagccggtgatgccggaaagcgccgcccgggtttccgcccgtcaggtcagcgaagccaatctgacgctggagttgatgaattaa

SEQ ID NO: 456647 - DNA, 2415 bp, Serratia marcescens
gtgcaatactttaactatcctactcgtgatgccgcgccggcccgctcactgttatcgctggcgttgctggcggctttaagcgtgccggcactggcggcggacgaaaccgaattcgatatccagaccatgcaggcgcgcggcgtcgacccaaaaattgccgagtggtttcgccaggcaccgcgctttatgccggggcaggccaccatctccctgacggtaaacggcagcgcccgcggcaaggtcaaggcgcgctttgacgaacagggccggctgtgcgccgacccggacttcctgcggcaggccggcgtgctgacgccgccgggatttgacgaaaaagcggcctgttttgatctgcaacaggcctggccgcaaaccgagctgcacttggaccccggcgaagagcgggtcgatctggtgttgccgcagcaggcggtggccgcgtcaggcaccgccagcggcaactggagccacggcggcgtggccggcatgctcaactacgatgcgcagtatatggactccgccggcggcacggctggcgtcaattttatgcagttggacagcgaagccggcttcaacattgacgactggattgtgcgcagccgtcagactttctcacgctttaacggcgagcagcggatgcagcatcaggcggcctacgcccagcgcagctttaccgagatgaaaaaggtgctgcaggtcgggcaggtgagcctgtccaactcaatgttcggcgccggccaggtgttgggtttccagatgttcccggaagcagcgctgcagggcaaccgtggcggtcccggtctggtggaaggcatcgccgacagccagtcggtggtggaggtgcgccagtccggcgtgctgatttacagcactacggtacccgccgggccgttccgtctgcaggggctgccgctgcttaatacccgttccgatctggcggtaacgctgaccggcagcggcggtgagcgacgtcagttcaccgtaccggcctccgcgctgctgcttaacggcatcgccgtggcgccggggctgtcgttcggcgccggcaagctggatcagcagggcagcagcgaagagccagtgctgggcaccatcgccaacggctggacgctgacgccgtacaccacgctgaacgccggcctgctgggttccacgccgtatcgcgccggtgcattggggctggacagccagctgttcaacgccaccctgctgtcgctgcagaccagcgtggcgcaggacggcaaacatggtgacagcggtgtgtctgcgctggccgtggttacgcatcagctcagtgagcgtattggactgagtgcaaacgccagccagcaaagcagcggctaccgtgaactgagcgatgcgctgcaggaagagaatacggattatcgtgaccgcatccgcaaccagtacggcgccggggtcagctggtctgaagagacgctgggcaacctgacgttgtcggtggcgcgcagcaccacctttgccggcgacaacaccagctatgtacgcggcggctggagccgtacgtttggtcgtacctacgtcggcgccagtctggagcacgataccggcacccgcaataccgatgcggaaaaccgtttttacctgacggtgagtgtgccgttcggcagcggcggtaacttcaatagttacctcaacagcgccagccagggcagtcgcgccggggtgcgctacagccagcgcggcagtcaggaccgcggctggagcctgtccagcgatcgcgacttccgcaatcaccgtaccaccaacggcggcacgctggatctggtgacgccggtcagccagctgagcggcagcctgagccacagttctgataactatacctcctggtcggcgcgcgccaccggtgcggtggtcgcccatggcggcggtgtcacgctggcgccgtatcgcgtcggcgacaccttcggcatcgccaaggtgggggaagagagcggggtgcggctggatacgccggcggggccgacctggaccgacggacgcggctacgcggtgctgccgtcgctgagcggctacaaacgctcaacgatccaggtagatacccgcagcctggcgaaaaacgtcgatatcggcaacgcctggcaggaaaccgaggcggcgcgcggcgcggtcagccgggttgattttgatgtggtgcgcacgcgccgggtgctggcggatgtgaaagatgcgcagggccggcctttaccgcacggcgccagcgtgtttgatgccgccggcaactttgtcaccgtggtcggcgaccggggcagcgtatttatcccggacgccggccagcccggcaggctggacgtgcaggcttcgggcgtgaccatttgctcgtttacgctggccctgccggaaaaagcggcggtggacggactgtatgaagaggcggcggcggtgtgccgctga

SEQ ID NO: 456648 - DNA, 702 bp, Serratia marcescens
atgaaaatctcttccctgtttaaagtcgggacggccgccctgtgtctgttatccgccggcgcccacgccaccggcatggtgccggaaacctcggtagtgattgtcgagcaggccgacggtgaaggcgccatcaatattaagaacaccgacgcctttccggtgttgctgctgacgacgctggtggacaccgcggatgataaagaaaatctgctggcggtgacgccaccggcggcgcgcgtcgagccgggcaaaacccagcgggtacggtttattgttaccagcaaaacgccgctgaaaaccgaacgcctcaagcgcgtcacctttgaaggggtgccgccacagcaaaaaggcaaaaatgaagtgcgcatgaccgtgcgccagaacctgccggtgattatccgtcctgccgggctggagaaggatttggcgccgtggaaacgccttaagtggacactgtccggcgacgcgctgaccgtcagcaacccatccccctacgtggtgcgactggggcagggggtgcagacccgaccggacaacacggcatggacattgcctaacagctatgtgctgccgggccagacgctgaccctcaagccggacggcggcaataaaaaaccgggtgcgccgcagcaggtacgcatctccccggccaccacctggggttacaccgtcgacagttatgacgctaccttgagccgctga

SEQ ID NO: 456649 - DNA, 708 bp, Serratia marcescens
atgatgaaacaaatgcaacaaagcgtctgcgcgctggcggtgctggccgcaaccaccctgccggcgatggcggaatccgtagatgtccgtgttatcggcaccattaccccgacggcctgtacgccgacgctgtccggtggcggtactattgactacggtgcgattaacccaactacgttgagtgcagcagattatactgttcttccaatgaaaacagtagatatggctatcacttgtgatgctccggccaaagtggcaattaagaccataaatggccgcccaaatactgttgctggagcgactgagaatgcgtctaccggttttgccactggacctgttccattgacagaactcaacaatactcgtgctgttgccggattaggattagatggtgcagcaaaaattggtggatacgccatacaaaacgtaaatgctgttgctgatggagcttctgttgatgtaatcgcttctctcgtaggccctggagctacatggacgaaagtaggcgctggtaacttattccgtgctgatgggaccgttggttggcagttctcttgggctgcaacggggacaaccgctccactagcatttactaccttgtctgcgccattgaacgttcaggcttatctgaacaaagcgtcagagcttgacctgaccaagccggtcacgctggatggcctgaccaccatcgaactggtttacctgtaa

SEQ ID NO: 456650 - DNA, 126 bp, Serratia marcescens
atgaacatttttgccgattggtggaatagacattttgtcactctggtttggctgatggccattgtctttagcattgtgttctggagcggattaaccggcggcgctattgctgcgctgctgaagtaa

SEQ ID NO: 456651 - DNA, 627 bp, Serratia marcescens
atggataaagcggaaccgaaaataaagggtttattaaaaaaagcgcaaaagcacgtagtgatattcgatagttgccaattcacgatgcagggattgatcctgctgtgtgaacgccacgcaggatggcggatgtgcgggacggccgactctttttcacaactgctgcagctgcttgcaaggcagcgcgtcgatatggtgttgtgcggtattggcaggcaggcggaggacttttcccgcttgctcagattgccgaactattttcctgggcgctgtattttattgaccgacaaaagttccgccgttttgcgtgcggcctttttaagcgcagggtttgacgccgtgaccagtaaacaggcgtcgctgcaggcattggacagccttttacattacaccatgtattttccacaggaggccggacagtccgagaaagcgctaacacattatagccctatggagcgggaagtgttgagcgccctgttaagggggcgtcagcctgagcatattgccggagaactgggcatttcataccgcgcggtcagccgctataaaaaaaatggcttgaaacgggcgggcttacatagcctgaatgagatcctggcctgtcagaatagctatgtgtcgaggtga

SEQ ID NO: 456652 - DNA, 627 bp, Serratia marcescens
atgaataatgtattgatcgtggatgaccacccggtagcccggctggccgttaagatgttactggaacaagctaaactgacggtggtcggcgaaaccgacgatggcctggaagcgctgcgtctgaccaaacagctcgcgccggatctggtggtggtggatattgatattccctccctcaacggcattgaggtggtgcaacggctgcgaaaaagcggctacagcggcggcattctggtgttgacgggcaaagacgacgaccactacgtcaaacgctgcgccagcgccggtgcggatgggtttatcagcaaacgcaacaacctgacggaactgcacgacgcggtgcgcgccctgcgcggcggctacggctatttccccattcagcgcgctcgtctgggggccgccggcactgtgccgggagacgataaaagtaaaatcgccggactctccgccaaagagctgcaggtgctgcattacctggccaaagggatcaaagtggtcgatatcggcgtacatatgcagatcagcgataaaaccgtcagcacctataagcgccggctgatgcaaaaactggagctgggcaatatggtggagctgtacgacttcacccagcgtaataatctggactga

SEQ ID NO: 456653 - DNA, 3618 bp, Serratia marcescens
atgcgtatattccggcttatctgttgcctgttctgcgttatcgcctgtagcgtggcatccgccagcgccccccagcaaatgcgcatgttcagccgggaaaccctctccccgctcaaatttgaactcagcgacagcgactggcgctggctggggaaaaaacatgcggtgaagatcgccgtctactcgccggagaacccgccgtttgatctggtgccggactccagcaccgtagaggggatctccgccgattacagcctgctgatctcgcgttatctcagtctcagaatgaatatcctgcgttatcctgaccgtaaggctgccctcagcgcgctgcacagcggccaggtcgatatgctgattgacgacgccgggccgcaggacaacgaacctgacggcgtaatcgccagccaatattttgctccgagcaaaaccgcgctggtgacgcgggaaacctcgctggcgcgtccgatacgtatgaaccccgacgcgcgcattgcactggttcgcggctacctgagcgaccactggctggccgctaattaccccaatgcaaaaatagcccgttacggctccgcacaaagcgcactctcctccgtcgccttcggtgaaaacgactactttatcggcaacctgaccgtcgccagctttctgatcgagcgcaactacgccaatcagctgtcggtggcggatatcctgccaaccctggatagcggcccacgctttgtgttccgtcaggatgaaacgaccttacgacgtattgtcgacaccgtgctacaggcaataacaccgctccagcacaagctgattttccgccagtggagccaggggccggacttatggcaattccagtcgccgctggtactcaccaaaagagaacaacgctggctggagcaacatcgcgagctgcgcgtggtgatgaatcccctgtatgccccgttcaccatgtttgacgacaacggcgtgtttcacggcatcagcgccgacattctgcgcgttattcacttgcgcaccggcttaaacttcattcccgtcgaatccgacacggtcactgatatgttcagtctggtgcagcataaacaaggggatatgatcgctgccatgagctacagcagcgcgcgtgacgatcggctgacgttcacccggccttacgtccagcccccttttgtgctggtggtgcaaaaccgcctcggtgcaccggccaatctgtctgccatcaagacgctggccatcaccgacgacaatactctgatcgcctggatacgggcgcaataccccgatatcacgctgattaccgccaaaaacgccagcgtggcgatgcagatggtcaacgaaggcaaggctaacggcgcagtgcacaacctgatcggcgccaactatatgattgaccgttatttccgtaacagtctgaaaatcaccgcctgcatcggcgaagcgccggcgcggattggttttgccgtcggacgcgatcagcccgagctgtacagcatcctgaataaagcgctggcggatattccgccgggcgacatttccattatcgccaacaaatggcagggcacgccggacgtcaagctggatacctgggcggtctaccgcagtcagttttactggctggcgggcattttcgccattctggtgctgacctcgctggtgtggaattactatttgcgccgcgaaatccgcatgcgtcaggaggcgcaggccaaactgcaggaacaggcggcattccgcaccaccctattcaacggctcgccggtgccgatgtacgtcattgacaataagttaaatattatcggccacaaccagacatgggcagcattcttcacgcaggaagaacaggatctggaggcgctgccgctcacctcggcaacccatccgctggcgaagcttgcgccggcgctcagagagatgctcacggctcccgaccatcaaccgccgcagcgctaccagatcaataacggcgaagaagagcgcaccatcgtgcaccaggcggtgccttttaccgaccaccaaggcgcggtcgccggcctcatctgcagctggcaggacttcaccgagcacgaacagctgcttacggcgctctcatccgcccgggagcacgcggaacaggccaaccgcgccaagagcaccttcctggccaccatgagccacgaaatccgcacgccgatcagcgccatcatcggcctgctggagctgacggtcaccaataaacacccgtcggcggcggaccacgaatccgtacgggtcgcctatgagtccgcccagtcgctgatggggctgattggcgatattctcgatctggcgaaaattgaatccggcaatctggagctgacgccgcagtgggtggcgtttgacacgctggcggcgccggtagtgcgggtgtttgacggcctggcacggcaaaaaagcctgacgctgagcagccatatcgacgtcctgcatccggacgaagtgtatatcgacccgatgcgcctgcatcaggtgttgtccaacctgatcagcaatgcgattaaatttaccgaacagggcaccgtcgacgtacagatcaactgtctgccgcagcaggatcgacaactgacgctggagctgatcgttaccgatagcggcgttggcatcaagccgcaggatcagctgcaaatcttcagcccctacaaacagtcggaagccggcaaacaacaaaccggcaccgggctgggactggcgatctgttcacagctggtgaccatgatgggcggcaccatcgatctgcacagccagccggggcgcggtacgcgggtggtggtccatattccggttacccatcgccagtacacggcatcgccggcagaagtcattgaggaagaaaaccacggcatccagccgctgcgcattctggcggttgacgatcatccggctaaccgtctgctgttgaaacgccagctgacgcgcctgggccattgggtgatcggcgcggaggatggcgaacaggcgctgcgcctgtggcgtgaacacgatatcgatctggtgatcaccgactgcagcatgccggtgatggatggcctgacgctggccggccgtctgcgccaggcgcagacccggccgctgaccattctcggcctgaccgccaacgctcagccggaagagcgcgcgcgctgcatcgccgccggcatggatgactgcctgttcaaaccgctgcgcctgccgcagctggaagccctgctgcgtaaggtgccgcgcatcgccgcagccgccgatgaggtgacgctggagaagctggttgatctcaacgccctgtatcagctgacgcaaaacgatgccgatctgctgcacaggctgctgcacaccacgcatgatgaaaacctgcgcgacagcgaactggcgcgcagcaagctgcaggaacagaactgggatgaactggcgcgttgtctgcaccggctgtccagcgccgcgcaaatcataggcgccaacggtgccgggcagctgtgtcgcgagctggaaaaatactgcgaggcaacgccggaggccagcgtggtggaggtacgcctgcaggcggcgctgcaggcaattgcggagtttaatcaggccattgagcagtttctccatcggcctgatgccgcagctgcgggaggctccccggcgtaa

SEQ ID NO: 456654 - DNA, 681 bp, Serratia marcescens
atgaaaatcaggactctgtttgcagccatgtcattggctatggctgccacttccgtgtgggcggcggacgatcaggggtattacgccgcggcgagtctgcagcgtgcggaacaaacggcgaaagagatggacaccagcgcgcgcccgggcgtcggcgagtttgttaacggcatcgataaaaatacccactataacggttcgatcgccgccggttaccaatacggcaacggctggcgtaccgaaggcgagtatgtgtttaagaagaagtcggaatacacctcgggttcgacgctgtttgccaacagcttcaaccaccataaggttgcagcccagcggctgatgctgaatgtgtatcgcgattatcagcttggctacaacgttgctgtttacggcacattgggtctgggtatcgccaaggtggagtccagcggctggcagggcaataccagccgtgaatacgcctcggccagccagaataacctggcgtactcgctgggcgcaggcatcagctatacgccggttgagcgcgtcagcgtggatttgggctaccgctatgtggatatggggaaaattgaaagcggctacaacaacttcgttaacgcccgcggcctgaaggatgagcagatgaaggcgcgcctggtgtccagcgaggtggagctcggcgtgcgctatttgttctga

SEQ ID NO: 456655 - DNA, 525 bp, Serratia marcescens
atgttcaccaaggaagtaaaaatcatgaaacctcttgctgccgtactcccgttattttttgccgttgccgcgtcgcccgccgttgccggcggggggctgaacgaaactaacctctctctggaacaggccaacaaactggcgcagggcgccgttcaggcctgcggcgccaataattatcaggtagccgtcacggtggtcgaccgagccggcgtcgttaaggcggtgcagcgcatggacaatgccgggccgcatacggtcgaggcgagcagaatgaaggcctacaccgcgctgaccaccaaaaacaccacggaaaatgtgatgaaaagcgcccagagcaatgccggcgcggaaaatctgcgcgatatccccggcttcctgctgttggccggcggcgtgccggtgaaggtcggcgagcagaccatcggcgccattggcgtcggcggcgcgccgggtgggcatctggatcagcagtgcgcacaggcggcgctcgacaatgttaaggctgaactacagccgatcaaataa

SEQ ID NO: 456656 - DNA, 522 bp, Serratia marcescens
atgcagataaaatgttacttacatgagaaagcaaagtacgacttaaatgacactgtcagaaattatatacgtgaagcttctattttttatagaaatccgaatgagatagttaatttgaactatcaggagataaaagatcaatgtgatgatttttccggtgatgagggatgtggtgaaatattttcttttgatttccctctatccgatgagcatttcttagaactgaagttgtattataatcgcaagacgttctttggtgatgcaattttcatacatggcgaagggttggattatagtgattttataaaaatcactaaagaagaaaatttaaagtacgatatgtatgtatataatgatgtcgatgatgaaggtctttttgtttttgagaatggtgtggtgtcaagatttagagttattaatgagaagaatgttatttatcagattgagtgtgatttttctttatatccggatttttcaaatggtatcaaaaaaataataaatgaaaaaatgagattaatttaa

SEQ ID NO: 456657 - DNA, 1005 bp, Serratia marcescens
atgaaaaaattgatgatctatggtgcagccggttacaccggtgccatggcggcggaacgtgcggcttcggccgggcttaacctcgtacttgcgggtcgtgcgcagaaccggacgaagctggaggctttggccgggcgtctcggtgcggaggtgcggctattctcacttgacgagccgggggctattggtgactcgcttgtcgatatcaacgtgttgctgaacgccgccggcccatttattcacacggctaaccctctgatgcaagcggcaatctgcgccgatacacactacctcgatttctcggctgaactcgatacttatcgacaggcgttagcgcttgacgggccggcgcgaacggcgggcgtgatgctcttgccgggctgcggaggcagcgtggcgatgctggggtgcctggccgcccgagccgtagctcgggttgccgcgccgcgtacgctgagtattgcgcttcatgtggcagggccgatgtcgcggggatcgctcaccagcgccagccagaatttggtaacgaaaaccttccggttgctcgatggtgaactggtggcgcgaagccccgcagaggtgcgagattttgactttggtgaggggccgcgaccgtcatttccgataacgctgcccgatcttttaactcttcaccaggcgacaggcgtaccggatatcgaaacctttgtacatatcagcgcgggggcgtttccgtccggggagttgcaggcgctgccggccggtccggatgcgcaagaaagggcaaaaaaccgctatcatgcggtcgttgaggtcactgagtccgatggccgtatggcgtgtgcgtggcttgaaacggtaaacggttatacctttaccgctatggcggccgcagaggcagcccgacgggtgatcaccggcgaagtgcgtgccggcttccagacgcctgtcgggctgtttggccaaggttttgccgagagcattgctgacacgcgcatcgtcgatactgtctccgggcaggtttaa

SEQ ID NO: 456658 - DNA, 402 bp, Serratia marcescens
atgctcgaccatcttttcctgacggtcggcgataccgagcgttcaattgcattttacgcaagggtgctgcccattgtggggatcgtcaaccgtcttgactatgacggccaagatggcccgacaggtcaccctgatctgaaaggttttgggtcgcaggggcgggttttcttctggctgaggcagggaacggctgtgcctgatgctgtgcacatcggttttgtcgccgactcggaggatatcgtcaatgcagcttatgccgaggctctggcggcgggcgccacaccgattcatccgcctgggccgcagcttcactacgaccctcgctattacgccgcgcaggtcagggatccggatggctatagccttgagtttgtttacaaaagctggcagcacggacattga

SEQ ID NO: 456659 - DNA, 888 bp, Serratia marcescens
atggaacaacagttaaacgaactgcgaacgctagctgcccacgcccagagccaccgcaccgagacgggtattccgcgcgtagcaatgattcagggcgccattcctgaacaccagcttaccgccgtctacgatccgatggtcaacctgatcctgcaaggcagcaaatccatgaccgtgggcggacagaccctgcactacgatcccgccacctatttcgtgatgtcggtcggcctgccagcgacgggcgtgatccacagtagtcgttcaggcgccccttacctcgcggtaagtctgacgctcgacaccggcctgctggccgatatgttgtcgaagttgcctaatactgccggcggggaaaagaagggaaacgggttttctgtcgctgctgtgacgtcggagctgctggacgcctggcttcgcatgctgcgcctgataaaacagccggacgatattcccgcgttggcgccggtctatgagcgcgagatattctaccgggtgctgcaggggccgatgggctggatgctgcgggatattgcaacgccggataccgccctcgccagagtgaaccgcgccatccagcgtattcggcgcgaatacgccaggcctttgcgggtggaagaactggccgccgacgccgccatgagcacatcaactttccatcgccattttaaggcggcaacggcgctcagcccgttacagtatcagaaacaaacccgtctactgcaggcgcgtacgctgctgattaccgccggccgcagcgtaacctcggccgcatacgaagtcggttatgaaagcccgacgcagttcagccgggaatactcacgtgttttcggcctgtcccccgccaaggatgcggcgcgcattattgccgatataaaaaaccgctga

SEQ ID NO: 456660 - DNA, 417 bp, Serratia marcescens
atgcaaaacgtagcgggttttaacaagaagcgctgggctagtgtcctggcactggcgattactgcgtatgtggcatggaaagccattggtttttcactctttttcggttttgaagaatccatcattcgtagagagaaaatcaacaataatcatatgctgtacatcaccgagggcagcgcaggaacaaccactgcattcgtttaccagtattatgtggtgccagcgggaattacagacaaagagtttctgaaaggggtcaatgatgaatacccatcgtttttatccacgtcagatcgtgacgccaaggtagagattgaaggcagcagcatacgactgtcagtgccgggcaatgtctacaaattccacaatggcaccagctacgcaataaccatccacctgaatgctgccccatactga

SEQ ID NO: 456661 - DNA, 2592 bp, Serratia marcescens
atgaacacagaagattcaaaagaatatagatatgtgattggtgcattaggcaagggttgggttgattcagtagaagggaagtcgcgagggaaattggatgtaataattgaagaatttagaagtgagaacggaaaaaaagaatatgctccaattaataaaaaagaacacttttgtgatactgagaaggtttttataaccggtccttttgatgagttggaaaaaaaatacaacccaaatcaattgctattagcggaagtgactcgcgctaataagtcagaaggtaaccagcaaagctatatagcatattataaggctgtacaacctgttaaaaatgtagacttacttgaagtactgatagcacatagcgagtttacccctgatgaaccagtgctttactcgacacacattccttcaacaaatcttataatgctttctactaaagttgatggagatgactttattcaggggccattctcttacgattcgacagctcagggtgaagatggttacaaacttagtttgagctacccatcaacacctttaccaggaaaaaacatcggtgctcacttgattggtcgactacccaaatcacaatgtagaggccaaattattgagataacattcggggaacgtctaataacatttttaacaaatgcacctgattttctaagtaaactaacgcataaagattacgtggatataatggactctgaaacattgcttcgtaactatgttgagccattactgaaagattccgtctttcgctcttctggaggtcgactaactaaaaaaggtattgaagtattacgaaataacgtaaaaaacagtaggcaattcgagaaagagcgaccacgatatcttcgtaccatagggttactcgctgaagcagccgagtttgatgcgaacatgacgaaatttaaagatgaactactatccatgcctgaaggtcaaaggttcttagaggagtttctcaacaaaaacgagtcagaattctatgaaaagtaccgagctgatcatctccaaaatatcgagaaagatgctaatacaaaacgaatagaagttgaacgtttagaaaggaagagacagagtcttcttgatgaactcaaaactatagcacagcaacgaagtgaaaaagaagatgaacttcgacagatggaagaaaagaaaaaagcagagcttgaggaacgagtattacacgatcttaagcgacgccatgctgagcttcaaaaagaaattggcgatagagaaacacttttatcagaattgaaatctcaacattcagagtatgaaacttaccaagagttactgagtgcaatagaacaaaagagaagtgactatcgctcgttagatagaatgatacaggaaagtgaaaactctcttgacaacttaaaaactcaaataaaagaatcttcagcaaaacttactgaacagtttgtaagcataaaggctggttttgaggctatgacacaatccaacaaagtttcaaataccaaatggaattttcgttctcctcagataaaacgtcttgaaacaagtaatacggtaaaagcacaacaagagtacattgaacgtttagacgaggctctttgtagttatggtagacaactcgatacagagcagttagtaaaccttgttacgacaatagctcaaagtcaatttactatttgctctggtttaccaggaactgggaaaacaagcttaattaagcgacttggtcaagcaatgaatctaggatacaggcaacatactatttcagtatctagggggtggatgtcatctaacgatattttaggctactacaatggtctttctcacacttatcagccagccgctactggcttatgggagctactgttaacaatgcaggatgaaaaccctgatgaagtaacgccttcgatattgcttctcgatgaaatgaaccttagctctccagagcactacttcagcagcttcttggatttagctgatggagaaagcagaagagaaatttttactgggtatccaaataaagagcgcttaattgtaccagagtaccttcgttttgtcggtacaattaacagtgacgagaccgtacaacctttatcaccacgtatgcttgatagagcggctgtcataccttttgatgatctgattagtgacgcgtattttgcaaacaaagctcaccaaaatgaaaaaccgatagagccaacatctgcaaaagattggctatctctatttgaaggaaaaggatcagtactttctggagagcctcaatcaatatttaatgaaatagtaagcattcttgaagatgagcatgaggaattgggtaagcgagtgcttatttcctacagaaaacgtcgtctcatcgcagactttgtagatgttgcgggatctttattagtcgaatatgaagggccagttacagccttagatcgagctattcttcaacatgtattgccaagtttaaacggttatggtagtggttttgccgaaaggttaagtagattacatcaagtattgaagaaatatggtctcgatatgtcagcaaaatgtctacgtaaaatcattcttgaaggtgacgaagcgcttaatagctatcgctatatagcttaa

SEQ ID NO: 456662 - DNA, 1890 bp, Serratia marcescens
atgttggatttaactattaaagtaggttctggacgtacatttgaaagctacaattgtgaacttataagccaaggtgaagctgttcatggtggttggtcaatacctgaagatgcccagataggtattcagttagtcacaacagataaagcatttggatttggagagccgaaactatatatcggagatgttcttcatgaatttgcactaacttcatcaggtgatggtaagcgctactggaaagtattatttgacgaagatgatttttttggtgtgccatttcgtaattttgtaggtagaagtgagatcattctcacttttcaaagctctgacatccgcattagaaacttgattgatatacaggcaaatgccgtgaatgctgagttagctgaggggatgctgcagtatttaaatgcccattatgacagcatagtatctatctgcttttcacgttcaaaaattagtggggacacaggaaaaggagatgaggactcattaaatagcttaatcgaagaagcacaaaatggtattgaactatgtgaatccgtttggcctgaacttttatctaggattcgggagcgatgggagacagagctaaatccacaatcaaactcattaccaaattcaccacaaagcatagcttggctcacccaaaacccagagagtattcatttttgtaaccaagaagaacagatgtttaaacttggttgctatcccgtaagagtctcaaaaggggtccgtgaaaacgtaattcataatagagacctccttgagaatagggttatccatggttacttagcgcaccttgaaaaaaaactgagccaagctagagctttattggtagatagtccagtcgaaaaaggccgtaaaggactaaattttgatttcggcgaatatgtaagtttagattatatactaagcaagtatcggactcctattttaatcgggttaactcatcgactggataatcttatctttcgggtaaagttattacgtaagagatttagttacaaagttgaaacaccacaaaatttaaaacccattcctccgtgtgtaacaccatttgtggctcgaacaccgagttacttgagagtatatgagaaaatatccaagtggtatgacttgggcaagatgaagataggtgtgggaaatttactctttggcttgcgtcatttgagcactctttatgaatttactgtattaactcaattaatttcggctttagggaaaactggtttatcactaatagagagtagttggagagattacaaccatgccaaattcggaggaaaggtaaaaacacggcctgcgagtgaaattaacaattatttttacttttcaggatcatcaagaaaaatggagatagagcttttttatgagcctaagatatggacaaagcacaaagctcaatgtggtgatcctgtagatgtgtgtatagagcatcaaggtaaagattggcagcatagaaagccagactacttattgcgagtatggtttgaagaagttgatgaaccagttttgataattattgatgctaagttttcatcagcttatcgagtcaagcatgagaaattgccagagctcgtcaacaagtatctacttggtcttcatcaaaagaaggccgatggatgttacgggcaactaccaatccaagctgtttgggctatttatcctaaaggtaaagccgaaaaaatcgacttttatgcttcttatcattccttaggtggcaaggattgtattttaccatcattgggaggactcagagtcaaacctgatgaagaagaccgactggtaggaatgttagataagttgctaaaacaactagagaacgagtttcgtaaagctgagtctgtaccgcatattcgagagataccagaacttcaaattgcataa

SEQ ID NO: 456663 - DNA, 147 bp, Serratia marcescens
atgcgtacagcccgttttattgagtataagatcatcaccgtaattaagtcggttgaagccggacgaactgttaaggatgtcaaccgcgaggccagtatctctgaagcgacctactacaattgcaaatctaaacatggtggcatgtaa

SEQ ID NO: 456664 - DNA, 924 bp, Serratia marcescens
atgtttgattttattaaagaaatattttcagcctttaaacagtcatctgctgaaagaataaaaaacccattcataggtgcgtttgccttttcatggattgggtttaactggcaagtcgtcgcaatagttttgttcagcaagaaggatgttattgacagaattgactatatcaagaataactatgatgccgggggcttcatcctcgcccctgtgctaactgcaattgtgatttgtatagtcttaccagaagcaaacaaattattcaccaggttacagaaaaaaccactagatgatacaacaaagatattaatggaatccaaaattgctattgctaaagaacaattgcaaattgcagacattgaagcaaagaaaaagctcgcccaaaaaagagaagagcgaaatattgaagaaaacattgattcaataaagttaagactagatgcctaccaagaaaaaacaagtcttcttaatgatgaaatctctaacttgaaagggaagaatgagttggaaatagggcatgtaaattccttaacaaaatccaacagtgaactatcatcacaaatagcaacattaaacgatttaaaagatagattgttattagatataaaagaaagatcggatgatatatcaagtttaaaaagtaaaataaagaaacaaacatcaaacgacttagagttaatgaaactaataggtgaactaaaagaggaaattaacacccttaaagaggaaatcaatacagaacagaagaagctttttgaaatcaggacatactgtgactacctaattgaccagtacccatcaatatttagcagcactgcggttggtgctgttaaagttagaggttacgcaaaaggtgccttgcgacttttagatgaaaagatggatgtaatgaacgagactacgtatacgggccataatcaataa

SEQ ID NO: 456665 - DNA, 141 bp, Serratia marcescens
atgaattttatcacatcatgcgtgaaattagtgttccgttacatatcagacgcggtattgatgttgttgcgtatggaaactctttacatgatgctgacagtttctatctcatacgtgtttttgacagtgaagagcagatga

SEQ ID NO: 456666 - DNA, 399 bp, Serratia marcescens
atgacgaatacaggaagttgctatccatctctttctcagcttatcgattttttgcgtgattttacccggaatcgtcgtacgccaatcactgcgcagacatatcttgaagaagatcttggcattaccggtgatgacggtgcggagcttttagaggaggttgcgcaaaggtttgatgtggtcttacatacagacgaggacggttatcagaccacgttcggtttgggagataacgagtatctttttcattcagaagggtttgacccactttgtatcggtaggttgataggttggctgcgtaataaaccccgtcctgttattcgcgatctgtcagtgggtgagttgcataacgttctgattgaagcacataggaaaaaacagataggtaacagcgtgaagtga

SEQ ID NO: 456667 - DNA, 903 bp, Serratia marcescens
atgatgaatcaacaaaataaaatttttgacagtgagataccattacctgacggttttcttttctctcgacagaagacattgctgggtttcgaaaatcgatacagtaaaatccacaatcagttacgtttactgttgaacctagggaaacttgaatcctggggcgtgaagtttcatcagaataatttacctatctgtagccttgtatcagaccagtacccgctcgttatttttcatggggatgtggggactggcaaaactgcaactgcagaatgtatcgcaaacatgcttgccaaagattctggagcggaagactccattctctttaaaatcagtaacagagtcagggggagtggtaaagtcggtgagatgagcactctcataaaccaggcatttgcagaggttataaagtcagctggaaaaaatcgccgtggaatactgataattgatgaaggcgattcacttgcttcatcgcgaacgcaagagcatagccatcatgaagataaggttgcggtgaacaccctcattcagtgcattgacgacctgagaaaatatcaggggcgcatcgtcgttttcctgtgtacgaaccgtttatccgtactggacgcagcccttatccgtcgtgctgctgtcgtggaggagttttctcgtcccagtgatgcagaacgactggcactatttgatatggatttacagggtttaggtttatcacctcagcaaaaaggtgtcttggtaaaggctacgggtcctaatgaaggaaaacccggatggaccttttccgacattcgtacacgattgtatccagctgcactggcaaaagcttttccagataagcctttatcatacgagattatccttcagacagctctttcactaaaatcatcacctgttatggaggatcggtaa

SEQ ID NO: 456668 - DNA, 951 bp, Serratia marcescens
atgccgctcagtaatacagaactccgctactatgacagtaatgtcctgaggcttccctcggataaaagaactgagtaccatgctcaggttgatcgactgattgccgagctaaaaaaatccgtgaaagagcaggacgagatcaaaataacaaaagttgttaaggcaggttcctttgcaaaatttacaattctgcgtaaaacacatgaagatcctgtcgatgtagatgtggttttttatatttccggtaaggatgttactcaggaaaccctcgcgagtctcagtgaaaaaatcttcaacgctctggtaaaactctaccccaacaaatctgttgaagatttccagctccagcgaaaagcagcaaccgtgacctttgtaaaatctgggctgaatgttgacgttgttcctgtgatagaagacaccgacaaagccggatatggatggcaattcgacatccatgaggggacaaaacttcacacctgtgcgccatgtcaaataaagtttattcgcgacagaaaagatacagataatgacttcagaacgcttgttcgactggctaaaaagtggcgaaatcatgccggattaacacatctaaaatcatttgttattgagcttattctggctaatctgcttgataagaatggtaaagatggaagtattgagagccgcttcaggcagtttctgctttacatagctcagtcaggactgaaagagaaaatattttttcctgagaacggaaatgatattcctgagttttcagacccagttgtgattatcgacccggtttgcgtgaccaacaatgttgccagtcgtttgagcgaggacgaaagacttgagattgtggatgctgctgccaaagcctgggagatagcacatcatgcttcagtagaggacgatttggctatctggaaagagctctttggtccacgtttaaaagtaagggaagaagcatga

SEQ ID NO: 456669 - DNA, 459 bp, Serratia marcescens
gtgcagactgcagttacctggcataaagggcctttccatatcagtacagatccatccagtctcgatattgatgctattcacgcctatctttcccgctctgattgggcagagaatattgatgtcgaaactgtgcgcatggccatcgcgcatagtttaaactttggcctgtatctggataacaaacaaatcgggtttgcgcggcttgcaaccgatttcgccacttttggttatctctgcgatgtgtatattcttgaagagcaccagcatcaaggactaggcagctggctgatagagtgttgtcagtcacacccgataatgcaacgtctgcgtagaatcatgttggtcacctcatcagccccttggctatataaaaaatttggttacgagccggttaatcgccctgattttgtctggcagatagccaaaaaagatatttacaagcaggctgcagatgcctga

SEQ ID NO: 456670 - DNA, 894 bp, Serratia marcescens
atgaaaagacgctacgtcattgcggatgtttttacggatcggccttttcttggcaatcctgttgccgttgtattagacgcagtgggaatgagcacagagcaaatgcaacgggttgccgttgaatttggttatagtgaaacgacgtttgtccttcctcctgaggagccgtctaatacggcacaggttcgaatatttacgccatcacgtgaaattccgttcgccggccatcccaatgtcggtaccgcttttgtgctggcaagctatgctgccgccaatggtgaggcacttcctgatactttactgttcgaagaaggtgccggtctggtgccggtcgaactgataaaaagcggcgggatggttaccggcgctgaactcgtggcacccgaggcattgtcacgtcgttctgaagtcagtctggaaaaggtggccgcctgtctatcattgacaacggaagatatttgtacggacgtgcataggccgcttatcgcctcggttggactgccatttcttgtggtggaactgacctctcgagatgcgcttcgccgctgtgtgcctaatctccagggatttcaggccgttctgccgctcgatggtgcggtatcgatctacgcctatacgccggacgtcaaccacgaagagcagtgtgacctgcaggcgcgcatgtttacaccccgtatgactgaagatccagcgacaggcagtgcgactgcggcggtgacggccctgttggcgcagaccctcggtaaaacacagctgtctctgcgggtcagacagggggtggacatggggcgtgcaagtttactttgtgcaagctatgacgccgcgtcggcaaagccgtgtatccgggtaggaggcaacagcgtcatcacgatggaagggacatttaacgtgtga

SEQ ID NO: 456671 - DNA, 201 bp, Serratia marcescens
atgaaaaaagtaactctgctggcagcggaagcggtgattggcggcaagtgcaaaaaaaattgcactgacagttttgagtggattggaacgaaaccaaacgatgtatgcaccctggtgcgtacctgcactgacaaatatggtaagatacaccaaacctctatgccggcagttgacagtaagcaatgtcgcgtagatggctaa

SEQ ID NO: 456672 - DNA, 513 bp, Serratia marcescens
atgacaaaagtttttcggttttcagtcctggaaatcataagcgtcatgctattgataccccgttacgccgacttccccctccgcagccggatatgccgcccagccgttgctccccagtgccagaatgtggaacaaccggcccctgaagccgtatcactgcttatccggagtatgggcgacgatcgacactcgtcggttaagaaggcaattcccgttcggtcgattacccgctgtaaatcggaattattattttatttatacaaagaaaagaatatttattttatctggcaaggatcacagaaccgggtcggaaatatgcccatactgccttccgccggtcgggcattttttttacccccacatgcacacgtgtgcaatactaagaaaacgacatacgaccacagaattgcccacggaaatcgccaccgaaatagcgcgacgttatcaatgtcctgtatcaccgccgctattgttatccgacgcaacagtctcaggcactccgtcagcgactga

SEQ ID NO: 456673 - DNA, 1308 bp, Serratia marcescens
atggcacgctttgtgctttatttcgtgcagataccattaaacgagtacaccgggatggatgtcagaaggacactaaagaaaaagcgcattaagccactctggatcggaaccgccgtggccgtcgcaactatcgtcggctacggcatgtggaactttaacccaggtggctacgccgttgccgcctccagcctgctgaccggtcaggtcacacagggtgatatgacggtagaagttcgcggcaacggtattttagcaccgcgcaacgccacctggattgccaccagcgtagagggaacggtagagacggtcaacgtgaagccaggcaccggagtcgaaccaggccaaattatcgcacagctggtcaacccggaactgaaccagaccgctgaagagctacgctgggaactgagcgcccagcaggcagaacataaggcgttgcaaagccgccaggaaaatgacttgctgatcgcccaaatcgccatcgtcgaagcgcagcaacgctatcggcacgccaagctagagtatgatgcggcaaaaattctgaataagcgccaggacggttcagtaccaatgctgctctaccgccgttccaagctggcaacggaacagaacagccagagcctcgcctacacccgccagcagttagaaaagcttaagtcagtgcaggccgaagaactggaagccagtgaagcccgcatcagcaaactgaaaaatatgctcgcacgcgcggaataccaagtcagctcgctgaacgtaaaggccaccagcgcgggtatcgtgcaggtggtcgatattgaagcaggtcagcgtatcagtatgggccagagcatcgcccgggtggcacgcaaggatcagctgatagccgaactcaaggtgccagagcggcagatccgtgacgttgcacccgatcaaccggtgctgatcagcacccacataaatcagttccacggcagggtatcacgcatcgatcctgcggtgatcgcaggcactgtgcaggtggatgtcgaatttaccgacccgctgcccgacgaggctcgtccagatctgagtattgaaggcagcgtgcaggtcgccagcctgaaaaatgtgttgcacgtaccacgcccgatatatgcacaaagtaatatgccgggagtggtgtataaaatctctgccgatggtaaaagtgctcataaagtcccagtcgtattcggtaaaggatcggccagtaaaatcgctatcacacagggtctggcggcaaacgaccgtatcgtactctccagctaccaggcctgggaacaactcgatcaaatcagtatcactcgctaa

SEQ ID NO: 456674 - DNA, 708 bp, Serratia marcescens
atgtccgcaattgtagagcttaataatattaagaaagtgttctttactgaggaaatggaaacccacgcgctgagtgatatctgcttcacgattaataaaggtgagtatgtatcgatatccgggccatccggctgcggcaaatcgacgttactttccattcttggcctgctggataccccgaccgatggccgctataaaatcaacggacacgacgtcagcgccctcagcgccagcgagcaggcagcgatccgcaaccaggagatcggttttgtattccagtccttcaacctgatcagcgatatgaccgttgaagaaaacgtcatgctgccgctgacctaccgtaagggagtcagcaagcgggagatgaaaacgctggttggctccgcgctggagaaggtggatatgaagcatcgcggcaaacacttccctggacagctctctggcggtcagcagcagcgcgttgccgtggcccgtgccattgtcggcagcccggcactgctattggcggatgaacctaccggtaatctggattcgcgcaatgctgactccgtgatggggctgttcgatcagcttcatcagaacggttccaccatctgcatcgtcacccacgatccccgctcggcggcgcgtgccctgcgacagatcgaactctttgacggcacggtgatcgatgaccggcagctgcaacatctcaacccgatgagctga

SEQ ID NO: 456675 - DNA, 2433 bp, Serratia marcescens
atgtcactcttttttgatttacgttacgtctgccgcctactgcttaagcgccctggcttcaccattttcacaaccctaatcatggccgtaggtctcgggctgtgtatctatatgtactcgctgatcaacggcctggcgctgaagccgttgccgtttgccgatggtgacagaatggtggttgtcagccccagtatcaacggcgtacggctgggagaatcgccgctcagctttacagattttgaggatatcaaaacccgaagccagcgcctggaacaggtagggtattactatggagaagtggcgaacattaatcttgacggtcaggcctcccgctatattgccattcgtgcggagccggatctgttcagctataccggttcaggaccgctgatgggccgcctgtttaatccgcaggacaccggtgaaggtgccaatccggtcgcggttatcggctacgagatgtggcaaaactacttcggcggacgtcaggacattctgtcacagaccgtactgatcaacagcgttaaaacacagatcatcggcgtaatgccgcaacacttcgccttcccgctgaacaatcaggtctggcaaccgtcggcgatcaaccgccagcatattactccggaaaatgcccctaaagttcaggtcattgccaagatccgtcctggtttctcgctgtcggatgtggatgctgaactgaaaaatatcatggccgaccgcgcccagcgctacccagagataaacggtggtcattcggcctttgctattacctttatggacagctttatcggtgaggactcacgacctatttttatggtgatgctgctggctgtagcgctggtattgctgctggcctgctgcaatgttggcaacatgctgctggtgcgggcgattgaacgcagcaaagagacggcgatccgtattgctcatggcgcaccggcgttgcgcgtggtggttcagatgatgtgggaaagtattctgctgtgcagcgcgggcggtatgatcggcctgctgctggctggctgggggctatcactgaccaatcagctgatcacaaccatcgtgccggatcagacgccattctggtggaatctcgagctaagcggcgcaatgatactgaaaacgctgatactggtgttgctggccagtatcattaccggctctttacccgcgtggaaagtacttaacagcaacattaatgatgtactacgtgacggtacacgcggaacacaaagccgtagcagcagtcgcatcagccgcggtctggtgatattcgaagtagcgctctcctgcacggtgctgtgcatcggcgcgctgctgtctttggtcgtagcgcaggcatcgcgggtggattatggtgtcgatcctgccagtcgctggacggcaaaaatcagcctgccacaacgcacctatcccgatccaacggcgatggttaactttgataaccgtctgattgatgagttggaatcgcagccagtagtggagcgtaccggactgatcagccgcctgccaggcgagttcacgcccgccaatagtgtagaggtggaaggggtcaactttacccgttccagccgcaatcagcatccgcgtaccaatgacgtggtcacctaccctggcacgctggaaaccttgggcataagggctgaatccggtcgtctgctgaccaagcaggacgacagcagctcacagagggtggtggtggtaacccgatcattcgttgaccgctacctaccgggcgaagcacagccactgggcaaacgcctgcgctggatagacggtaaggacaccaactggtacaccatcgttggggtgatcccgcacgtgattcagggccgtccgttcggacacagcaagctgatgccaacggtctatcgctccatgctgcaggtaccgcaggaaacgatgacggtgatagtcaaaagccagcctcatgaggacctcagccacgtcatccagaattcagtgagccgcattgataccgagctttctgcctaccaggaaaaaacgttgcaggcggtgatcaaccggaataccgccagcttgagttatatttctattttatttaacgttttcggtattatggccgtactgctggcaggcagcggtatctacggggtgatggccaaaaccatctatcagcgctatgccgagtttggtacacgccgtgcgctgggcgccacccgtggcgatattatcagcctgatcatgaaacagggaggctggcagttagcagcgggactggcgatcagcgtaccggtggtggccactgtaacaccaatgctgctggctatctttggccgtcaggggttcggcatgattgcactgtttttcgctatcgccgtcctgattacgctggtcgtcgccgtcgctaccctgcttcctgccagccgcgccgtacgggtacagccaatggatgcgctgcgccaccattaa

SEQ ID NO: 456676 - DNA, 1392 bp, Serratia marcescens
atgggaacaccgtatcggatactggttgcagatgatgatgtcagcatcgtcagcacgctcaagctgatgctgaaagttcaccagtttgacgtcattactgcgacccagccggaagaagccctcatgcaggtgagggaaggcaaacccgatattgcactggtcgatctcaactatcagcgcgacaccacctccggcagagagggtatcgaacttatcaggcagatcaggcagttggacgccgacctgccggttattgtgatgaccggctggggatcgattgacatcgcagtaaaggcgatgaaaaacggcgcggcggattttatccagaaaccctgggacaatgaactgctgctgcacgtgctgaacacccagttgcagctgatggaaagccgccagcgcgaacgctcgctgcagcaacaaaacgatctgctgcacgagcagctgcacccgtgtctacagcaagaaatggtggccctttcccggccaatgcgcgatctgctggcgatgctggagcaggtgatcccaagcgatgccagcattctgctgaccggcgaaaatggcaccgggaaaagtatgctggcgaattatatccatcagcgttcacagcggcatcagcagagttttgtgtcggtcaatatgggctgtatcccagatagcctgtttgaaagtgaaatgttcggccacgttaaaggcgcattcactgatgccaaacagcaacgcatcgggcgctttgaactggccgatggcggtagcctgttcctggatgaagtgggcaatacgccgcttaaccaacaggccaagctgctgcggatgctggaagagcgccagtttgaaaaggtcggtgccagtaaaacacagaccgccgatgtgcgcattatttcggccactaatgcggacttcaataccatgttggagagcgggctgtttcgtcgtgatttgtactaccggctgaacacttttgaactgcgtctgcccgcgttgcgcgagcgtccggaagacctgccggttctcgccggacggatgctcagcagtctggcagcaaagtatcgcaagccactgctgaccgtaacgccgcaggtgctggacatgatgctgtgctacccgtggccgggcaatattcgtgaattgaaccatattctggaacgtgcagtgctactgagtaatggcaaagagctggatccgaccctgctgcagctggtgctgccaggtcagatgccggaagtggtcacgccaagggcgatgccggacctcctgaacggcacgctggaggatatcgaacaagaggtgctggcgcagcgcctacgccagtttgcaggcaacgccagcgatgccgctgagtcgctgggactgagccgcagcgccttctaccgccgtctgaaaaagacatactga

SEQ ID NO: 456677 - DNA, 1317 bp, Serratia marcescens
atgagccggttacgtacgtcactcgaatccctgcagagccggttaattttactggcttctctgccgccatcgctagcaacgctcgggctgatgatctggcagggctgttccggctatctggtggcgctggtggcgctggtgctgctgatgtcaacaggctactgcatgttgatcactcggcaggcgcttagctaccaggtcagcacactggttaaccttgtggaggcgattatccacggcgatttcagtctgcgcggtaaacggcagaaaaacaacggcgcaatgaacgagctaatagatatgatcaatgaactggcagcgtcaatgaaccaccaacgcctgacggtgaagcaacagcaatatctggtaaaaagcgtcattaacaacattgatgtagctatcgtggcgctgaatgcgcgccaagaagtggcttttatcaacgagacagcggtaacactgctgaggacatcagcgcaggagattcagggcacccggttggacgatctatcattccggtcattattcgatttgccggaaaacagagtggtcgagtttcagttcccggagcgcagcggcaagttcaaaatcgtgcaagacagctattttgaacagggccagcgccagcaactgctgtttatcactgatgtcagtcagctgttgcgtgaagaagagtaccgtgcctggcgtaacctgttacgcgtgatgagccatgagatcaacaacacgctgacgccgattgcctcgcttagccaggtgctctccaccttgctgtgccaggagagcacaggtaatgtcgacgatattcgcgacggtctgaatatcatcagcgagcgggcgcttaacctgaaaagcttcgtggagagctaccgtaaactgatctcgctgccaccacccaaaaaagcgctgcataacgttgacgaactgatccgcaacatcgtggcgctgtttgaacaacgcacaatccgcattaacgcggacgccgttcagatgacggtgagaattgacgccatccagattgaacagatgctgattaatattttgaagaacgccgatgaatccatgtcgtcagcggatggcgttattacactgagctggcagattaaagaaaataaattttaccttgaggtactggatgaggggtgtggtataggcaacccagaaaatatctttgtgccactctacagcacaaaaaagaacggcagcggtattggcctgatgctgtcacgacaaattgttgaatctcacggcggttatttctctctggaaaatcgcacggacgtaccaggctgtaaggtaggtattacgctgccggtataa

SEQ ID NO: 456678 - DNA, 393 bp, Serratia marcescens
atgattattacaacacaaaaactcaatgcactcttgcgtgatgacgcctgtattatttatatgcaggtaccctcagcggcattacataacgagcagcagacgttctcagaacgtattctggcaaaaaggctattacataatattttaagccggctgacagcaacggaaatcaatgacaaatctattgtcagaggccgctatggcaaaccagaattaaaaaataatagaacactgtatttcaatctttcacatacccgcggcgcgctggttattttgctgtcacgcagtggcgaagtcggcgtggatattgaaagtaagctgaccagacgtttttgcagcgccactgtgagcgtagcaatggaagcggaagccaatgaaacaggtgagcgataa

SEQ ID NO: 456679 - DNA, 423 bp, Serratia marcescens
atgactgatatcaccaaaacgtatcaatcgctggaagaacgcttcccgatggaagaaatgcgccggttgtatctggccaaattcggcgaaaccgttgacggccgtctgcgcctctacggcgactgggaaattagtaacagaggtgcccttacaactgctgagggcgaagtactgcccttcattactctgcgctgctggtttaccttcgcagagggtaccggccccttcaatatttacggggtttcctgctcggtcaatctcaccacatacgaaggtcaaaatgtcgatggctcaaaaaggcttaatttcagaccgttaagccccttcactgctgagtcaacaagttacagcgtggactatgcctactcacactctaggaaccccgccaccatctatgattttacaaagcgccctgtcggttaa

SEQ ID NO: 456680 - DNA, 948 bp, Serratia marcescens
atgtcattgtttcatctgcgcactgccgttgcgcccgccctgctgctgggcgccagctttaccgccggcgcggcttacgacgttaccaccgttaacgcggcatccaatgtaaccattgacgtcgcgggaaccgccagcaaggggttagtcgccagctttgtcattgaagccgcaaccgtatccggcgacgtcaattgtggcgatcgtaatattcacagtgcttatggcaggcaccgtttgtttttcaacctgcctcaggatctcgttaccgggcgctttaaaattaacgagaacctttcaatgcaggtgacctccagtgtatcgacggataaatgggttcaaaacggcatgctgacagcctgttctgcaggtgcggctcagaccgctcccgccagtaatttgctcgcggctttcccgataacgctggatttttatctggatcgggaaacaattgacggtaccgtgacgattccagcaatggaattaggcggatactcacgccgatttgatctggccgaacctgggaactacaaaccggcaaaatatactattccgataaagctaaccggcggacaaattaccataccggcgtattgtaacgcctatccaaacgcgatagaattagatcacgggatgttatcttcagataatacctacgacacggcgtttgccgatcttacctatacctgtgtagccccggttaatacaacggtaaccattaaccaccaaaaaaataccgacggggatttagatctcttacatacggacggcagcgttggcgccagcagtaaattaaccatcagcgataccagcagcggattgcagggaaaagaaatatccacgcatatcgacggcagcaaaacgttccgcatcaccagcgaactgaacaaactcagcggtgaaggaactatacagggcagcgcctggattatcgcctatctggattaa

SEQ ID NO: 456681 - DNA, 579 bp, Serratia marcescens
atgtcaggaaaagatcatttccgcagcagacgtccgttagcctggtgcggcctcgggctgcttttctggtgcgccggcgttctggcggacgtgccggtcaccgttaaggcgacgctggtcaccccggcctgctacatcatggggaatacggtgggggagtgggacggaaacggcggtttgaaagatgatcaactggccattgattttggcgaagtgccgattggcgatctgggcaccggcaatgcggaaaaaaccgcctacctttggtttgagtgtggcaagagtagtaagacattggctctttacgttaaacctacggcgtatggcacgctgccgtcactcggtaaccatgtgttggccacctcaaaagagaatctgggcatcgccatcagcatcggcggccacaatatcgcgctggatcaatgggtgccgctgccagatgaggttctcttgccgggcgatggcatctcgcaaaataaaatcatcgtgacggcgcgactggtggcgcagggcgataaggatgcgttgagcggcggccagtttcaggcctcggccaactttattctgcactatttgtaa

SEQ ID NO: 456682 - DNA, 957 bp, Serratia marcescens
atgaatgagatattaagccaaccggcacagactgaggatatcgccgcggagggccgtccgcgcgacgccgccgcgccgcgcctgtcgcgcctggcggtggagctggactactccggcattatcaagctggcgtcctatgtacagcggcagattgacgacggacggcggatctgcgacctgattatcggtgattttgatccggcgcgtttcccgctgcccggcgttctgcgccaggccatttatcaggcctacgcggataatcagcatgattacccgccgctggaaggcgtactgccgctgcgcgaggcgatcgccggcctgtgcaaacgcagcttcgacgttgagtacgatccggcgagtgaaattattatttccggcggcgcgcgccctttactgtacctggcgctgttggccgtggctgaccccggcgacacggtggtttatcccgcgccctcctggaacaatatgtactatgcgaccctgtgcggcgccaagggcgtggcagtggaaaccacggcggaaaatcagttcctgccgacggcgcaggatttcttgccctatctgcgggaggcgcgggccatcgccctgtgctcaccgcaaaacccggtgggcaccatgttctcccggcaggcgctggaggagatttgcgatctggtggcggcggaaaaccggcggcggcacggccggcagaagccgctgtacatcgtgtttgaccaggtctactggatgctgagctatcaggcattgccgcactatcagccggtgcagctccggccggagctgcaccggctgatagtgcggcaatgcctgatagctcagcatccagtagacctggtcaaacacgatgtacagcggcttctgccggccgtgccgccgccggttttccgccgccaccagatcgcaaatctcctccagcgcctgccgggagaacatggtgcccaccgggttttgcggtga

SEQ ID NO: 456683 - DNA, 1191 bp, Serratia marcescens
atgtccgtaaataaaccgcaacctaaaaatatgccgctgtatctggattataatgcgaccacgccctgcgatgaattggtgctggcggagatgctgccgtttttttgtcagcattttggcaacgccgccagtatttccagtcagcaggggtttaaagcgcatttggcggttgagcgcagccgggaacagatcgcgcaattacttcatgcgcaggctaacgagatcatttttacctccggcgctaccgaaagtaataatctggggctgcgcggcgtctacgcggcctgccgcgccggcggcaatcatattatttcctcctcgatagaacatcccgcgacgctggcaaccctgaaggagctggagcgtgagggcgcccgggtgtctttaatcaagcccctgccggacggcggtttcgatctcgatgcgctgcaggcgctgattacgccggaaaccatactgatcagcgtgatgtacgccaacaatgagctgggggtggtgaacccgatcgcggagatcgccgccatcgccgagcggcacaacattctgctgatgtcggatgccacgcaggccgcggggaaagtcccgattgatgtgcggcagtgcccgatcgatattctcacctgctccgcgcacaagatatatgggccgaaaggcatcggcgcgttatatctgcggcggaaaaacggcaaaaaaattgtcgatctgcatccgcagatcaccggcggcaatagcgagcagggcatgcgcggcggcacgctgaatgtgccgggcatcgtcggctttggcaaggcggcggagctggcggcccagcgtctgccgcaggcgatggccaaggcgcaggcccagcgcgaccggctggaacaggcgctggcgcagtgggataacgtgcagatcaacggccgcggctgcctccgtttgccgcacgtctcgaatatctctttcaaacagaccgacggcgccaggctgcttagcctgctgaaaaagagcgtgtcggtcagtaccggctcggcctgttcatccagcagcctgtcgcccagccacgtgctcaccgagctggggctgtcggaagagctggcgcaggccacgctgcgcttcagcctgggctggccgaccagcgatgaagacatcgacgttgccctggcggcggtgaatcaggcgctgcacacgctgtcttccgcctatgccgaataa

SEQ ID NO: 456684 - DNA, 870 bp, Serratia marcescens
atgaaactgaatggtcatacattaaatgaaatagaagaaaaggcgctggcgattattcatcgtgaggtggatgagcacacgccgaaaataccggtaatgtatcttgaaggcggccattacgatccccgttatccggttaatgagtttgcgcagaaatcattgcgccacgcgttggatattgccaataacgcgatcgcccggcataagaaagacctgaagatatcgctgggcatcttaattgacgatctggggctgcaatgcggcgttgaatcctgcgagatagcgccggagctgccggagaatagcgatggcgcggaggaacacggcgaactgcccaacgcgctggcggcgattttggcgcagtataaaatcgtcaagcgggagcggatggtgatacagggtgaaagggcctgtaagaaccgggggatacagacgctaaaacgcattcttgagcgccataaaaccacgccgtttccggaactggagatagaagaatcagcagcgctgacgaggatatttttcgtgaatgaagaggggcagcgggtactgctcgccgagtcgaaagcgaaagacgtatggacggcaaagtgcccggtgattatggcccagcactacagcgacgtttatgaccgggtggcaaaactgcatccgcagagccacgcgctgcatattatcgacttttcagaaaccgatgattacaacaaagtgatcaacggcgcggacgtggcgatgaaacttttcctgcgtaataaatcggtcggcaaccgggcggtaaaaatcaccaatatcttcctgtcatcatttgatgatgaagattacatcattcactcgacgtctcactgcgccgattctgtggcggtggaagcgtaa

SEQ ID NO: 456685 - DNA, 909 bp, Serratia marcescens
atgaggaaggtaatcagcacggcggtggcattgggtttactctgcggtgcgctgtcggcgcatgccgcgcagacgctggagcagcagccgcagctgaaaattatcagctataacgcctactggggcatgaagtccgatacctcgaaggggaaacagaagtttgccgaatgggccaggcagcaggatgccgatattattgcctggcaggagatgaaccactttacccgcgaaacgctggaagcctttgcccagagctatggtcaccgctatgcggtgctgctgaaagagccgaaggtggtgggcgacgatgagtttttcccgacggcgatcacctccaaatacccgatcgtcaacgtgcacaaggtggtggataacctctggcacggcgcgctgtttgccgacgtgggccgctatcactttgtcgtcacccatatgaacccgttccgcacctcgcagcggattgatgagatgaacctgattctggactccatcaaatacggcgcggatccggacggcaaatggatcatcgccggcgacctcaactcgttctcaccgctggataaaagcggctataacgaaagcgagatggtgaaagacctgcaggacaaagaggccaaacggccggtgctgcacaatctggtgaacggcaagatggactacaccgtgcagcaaaatatcttgtcgcgcggctttattgacgtgctgaagctgaagtatccgaatacgttcgtcgccaccgcgccgacgaaaatcttctacgaccaggccaaaacgccgctgcgctatgactacatttatgtctcaccggcgctgaaaaacgacgtggcggaggtcaaggtgctgcgggatgcgtttaccgaccaatactcggaccactatccggtgcagatgatcattaacaaccgctaa

SEQ ID NO: 456686 - DNA, 915 bp, Serratia marcescens
atgaaaggggccgattatgccgagctggccgtctttatggcggtggcgaaagagcgaagtttccgtcgggcggcgcagcggctgggactgtcgccatcggcggcgagccatgcgatccgcgcgctggagcagcggctgcacgtccggctgtttaaccgcaccacgcgcagcgtcgcgccgacggaggccggcgcacggctgatggcgcagctggaaccggcgatggcggcgctggaaagcgcggtgcagggggcgggagaagcgcagctgacgccgcgcggcacgctgcgcatcagcatgccgcgcctggccggccatctggtgatggtgccggcgatcgaacgctttatggcgcgctatccagatattcagctggagctgctgctggatgacaatctgcaggatattgtcgcggcagggttcgacgccggtattcgcgccggcgatcgggtgccgagggatatgattgcggtcaggctgacggcggagctgcagatggtggtggtcgctgcgccgagctgttttcagacgcagccgccgccggcgacgccggaggaactaggccgccaccgctgcatcaactaccgctggagcggcaacggcgcccagtatcgctggcgcctcagtcgtgccggcgagagcgttgaggtggatatcgcgcccgccctgacggtcaacgatatcgatctgttgctggccgccgccgagcagggggcggggctggcgctgctggaatcgcagtgcgtggcgccggcgctgcgccggggtacgctggtgcgggtgctgccgcagtggtgtaaaccggtggcggggttccacctgtattacccgcgcaacgggtttatgacgccgcagatgcgggcgtttgttgattttatgcggctggatgcggcggcaggagcgcggcaagagtag

SEQ ID NO: 456687 - DNA, 1029 bp, Serratia marcescens
atgaacacgatgcgacgttgggaaatgaacggcttcgggcgccaggcgctggcgctgcaaacggcggcgctgccccgccccgcagaggatgaggtgctggtgcaggtgatgtcggtcgccctgaaccaccgcgataattgggtgatcgacagtggccgcggcctgccgctgcgctttccgtttacccccggttccgatctctcgggccgcgtggtggcggccggcagccgggtcagccgctttgcgccgggggatgaggtgatttcggtctttgcgccggagtggctggacggcgcgcgccccggcaacgcacgcgagctggcctaccgcaccctgggcggcttttaccccggcgtactggcggaatatgtggcgatgaaggcagactggctggtggcgaaacccgcctcgctcagccatgacgccgccagcacgctgccctgtgcggcgctgaccgcctggtttgcgctggtagagcgcggcaaactgcagccgggggaaagcgtgctgatcgaaggcagcggcggcgtggcgctgtttggcctgcaaatcgccaatatgctgggcgcccgcgcccttgtcgccaccagcgccggcaaaatggcggcggtaaaacagctgggcgccgatgcggtgatcgatcgcaacgcagaaggcatggtcgacgccgttctgcagctgaccgccgatcgcggcgtggatcatgtgctcgagctggcgggcggcgcgcacctggggcaggcggcggcgatgtgcgccatcggcgggaaaatccacctgatcggcgcgctggaaggctttaccgtatcgtcgccgctggagccgattctgtttaaggatctggcgatttacggcatcggcaccggccaccgccgggcattaagtgagatgtgcgccgccttcgacgccggcggcctcacgccggtgatcgacagcgtctatccgctggaagagctgccgcaggcgctggcgcgtctggagagcggcgccttcggtaaagtggtggtcagaatcagcgaggcggcgtag

SEQ ID NO: 456688 - DNA, 534 bp, Serratia marcescens
atgaaattatcacacgtctcgctggccgctctgatggccgctgctactctgtctttcggcgcaaacgctgctgcttacgaaggtaactccggtaaagttactttccacggtcaggttgtagattccccatgtaacctggctccaggccaggacggtatggacgttaaggttgatttcggtcagctgtctcagtctcagctgaacaaaaaccaaaccaccgctcagacttttgaactgaaactgcagaactgcggcctggcggacggtgcgggtggcaagaaaaccgctgaaatcaccttcaacagcgccgaccagatttctggtaaaaacctgctgaaaaccaacggtctggctaccggcctggctatcggcatcaccgacattaccttcggtactccagcggctatcgccggcctggttgacggcgacaacaccctggtttacaccgcggttgctcagaaagccgacgttgctaccgacgttaccccgggtgacttcagcgcatcaaccaacttcctgattagctacaagtaa

SEQ ID NO: 456689 - DNA, 519 bp, Serratia marcescens
atgcaacgctggctgggaagtttgttactgttgctcgccgcatccaacggctatgccgatgtgttggcgctcagtaggcaggataacggttacctcctgccgctgcgcgggcgggcaacgctcagcggcacggtactggctgcaggatgcaccattgccttggataccccatcccaatcgctgtatgtcgacccgcagccattaaataacggtcagcgaacgctcaattatcctttatccattcgtttcgataattgcacgctgccgggacagagcagtgaatatgcagaagataaagcgattaaaatcagttttcaaaaaaaatcggcgccagggaatatttttattattaaaaatgcggaaaacaaaacgctaaccaacggggaagattatccggtctattatcgcaaggctgaacgacacagcgcctacccggcaaccgccatctatcgtctggaactgacgccgaaggcgcccccctattacgccgtattagggctgaagatgcgctacgagtag

SEQ ID NO: 456690 - DNA, 2514 bp, Serratia marcescens
atgtctcaacaacgttttataatcagtcgcatagcctccgcaatacttgccgctttggtaagctgggaggctaacgctgttgagtttaatacggacgtattagatctggaagacagagcgaatattgacttctcccgtttttcgcaggccggctatattatgcccggcgtttatcatatgtcgctacatattaacggcgaaagcgtcggctatgaaggggatattccgttttatccgcgcgacgacgccccttcggataacgcatcctcccccgctctgcccgaagcctgtttgtcgcaggaagtggtcggccggctgggattaacgaaaaaagccgccgcccagctgacaagctggcaccaaggccagtgcgtggatttcagcccgttgcccggcgtaacgttaatgccgcgcctcggtaacggtgcgctggccattaacgtgccgcaggcgctgctggagtacaccgactcttcctggctgccgccttcccgctgggaccacggcctgcccggctttttgctggattacaacatcaccggcacctttaccagtaaccgcagttcgggacgccggcagaccctcagcgccaacggtacgctcggcatgaacctgggcgcctggcgcctgcgcggcgattatcagggccgcttcagccgcagcggttcacggcaaaagagccgtcataacctggactttagccgcgtctacctgtaccgcccgattcccagcctgagttcgacgctgaccatcggtgaaaactacgtcaactcgccgatgtttgactcctggcgctatgcgggcatcgccatggccagcgacgaacgtatgctgccgccgcggctgcgcggctatgcgccggagattatcggcatcgcccaaaccaacgccaaggtgaccgtcacgcagcaggatcgcgtgatctatgaaactaccgtggcggccgggccgttccgcattcagaacctggacagcgccatccgcggcacgctggacgtcaaagtcaccgagcaaaacggcgaggagcacaccttcagcctctccaccgcgtcggtgccttatctgacgcggccgggccagctgcgctatcaggcgatcgtcggccgccccaccacctgggatcacgatctggaagggccgatattcgcctcgggcgaggcgtcctgggggctgtccaatatctggacgctgtacggcggctcaacgctttccgccgattaccagtcgctggcgctgggcagcgggcgcgacctgttcgggcttggcaccgtggccgttgacgtgacccagtccgtcgccaaagtgcgcaatgacagcaaaaaacagggtaagtcctggcgtctgagctactccaaattctttgacgagatgcaggccgacgtgaccttcgccggttaccgcttctcggaaaagaactatatgagcatgcagcagtttctggaccagcgctatcgcggctacgacgccaaccaccagaaagagcgttaccagctcaacgtcaacaagcggtttgacaacgtttcactggggctgaactacgagcatcagacctactgggatcgcggcaacaccaagcagtacggcgccaatatcggcaccacctttgacctgccggcgctgaagatgcgcaacgcctcgctgaccgccacggccatgcgcagccaataccgcgggcagaatgaaaaccggttcagcctgatgctgtcgctgccgctgggcagcggcaccgtcagctacaacagcagctacacccggggccagtacggacaccggatcggctattacgaccggctggggctggacagctacagcatcaacaccggcttcgatcacggcggcgatcaaaaatcgcgcgcccagctcagcggcatgtatacccataacggcgcgcgcagcaaggtgagcatcaacggcgcgatcgacggcgcgcagtaccgctcgctggggcttagcgccaccggcggcatcaccgccacgccgcgcggcgtagcgctgcacgccggcggctacaacggcagcacccggctgatggtggataccgacggcatcagcggcgtaccgatcaacggcggccgcgtggtcagcaacgcctgggggatcggcgtcgttaccgacgtcaacagttactaccgcaccaccacccgcatcgatgtcagcaggctggctgacgatgtcgaggcgaaaaagagcgtggtggaaaccgcgctgaccgacggcgccatcggctaccagcgctttggcctgctgcagggcagcaaggcctttgccaccttccgtctggccggcggcggcacgccgccattcggcgccgtggtgcgcaatagcaaaaatcaggaagtcggcatcgttggcgacgcaggcatcgcctggctgagcggcattgcgccgcaagagacgctgaatctggtctggaacgatagcgttcagtgccgggccacgctgccgtcggccatcaatgagcaaaatctgttgctgccgtgccggcagaacgccgccgcaggcggcaaacattaa

SEQ ID NO: 456691 - DNA, 732 bp, Serratia marcescens
atgcaagcattcaacaaacaggttgccggcattgtcctgatgggcggccttttattcagcgccgtcaacgcgcaggccgccgtcgccctggacagaacccgggtagtgtttaacggcgatcagaaggccatcagcctgaacatcagcaatgaaaataaaaacttgccttacctggcccaggcctggctggaagatgagcagcagaagaagataaccaccggcgcgctggtgatgacgccgccggtacagcggctggagccgggcgccaaaagcatgctgcgcatttccgccacgccgctggcgcagcagctgccgcaggatcgggaatcgctgttctatgtgaacctgcgtgaagtgccgccgcgcagcgaaaaaccgaatgtgctgcagattgcgctgcagtcgaagatcaagctgttctaccggccgaaaggcatcatcccttccgccaacgcggtctggcaggaagaactggtgctgcacgccgaaggcaacggctacaaggttgaaaacccgacgccgtactacatcacggtgatcggcctggccggcagcaaagatcagtctctcaaaggcgaattcaagtcggtgatgatcgcgccgaagagcagcgtcaaggtggccggccagcactacgccacgccttatctgacctatatcaacgattacggcggccgcccgacgctggcgttcagctgcagcgccgcacagtgcacggtgaaaaagggttaa

SEQ ID NO: 456692 - DNA, 537 bp, Serratia marcescens
gtgaaccggtatctgggaatctgtatcgcgctgttatcggccatcggctttatggggaaggctatggcggaaaaacccatcgagctgatgttcagcggtacgctgctggaaaaacagtgtatccacgattcggcggaggacgcatatcgtgtcgaactgccgctgctgtcggtgaagtatttccagcactacggccgcggcccgaccacccgctttgccctgcgttttaaagactgcagcaccgcaacgctgaacaagcaggtgcagatggtgttccacagtccgcaggtggtgaacgtcgacggcgtgagcatgctgcccaccgaaggcggcaccggcgtggtgctggggctgaataacgccgacggccagccgatcgtgctggaaacgccgttcaaggcgggcgtgattacccagaccggcatcggcagcagcaacgaactgttttttgaagtctatccgctggtcgtcgaccgcaacgacgttaaccccggggagtacagcgccacggtgacgtttgaaatgagctatctgtga

SEQ ID NO: 456693 - DNA, 579 bp, Serratia marcescens; identical to SEQ ID NO: 456681

SEQ ID NO: 456694 - DNA, 948 bp, Serratia marcescens; identical to SEQ ID NO: 456680

SEQ ID NO: 456695 - DNA, 633 bp, Serratia marcescens
atgaagaagatcttaatctttgatgagaatagctacttccggcaggccattatccagttattattagccaagggtaaaacgccgctgtctattctggaagccggcaataaggcagagctggaaagtattctgtcgaccaccaacgtcgatacgctgctgttctcccctgacggcagccaggcggatattcaggacaactttgtgctgatcagagaatgcctgaagcactgccgcaggctgagtatcgacctttggctgatggtagaccaagccactgatttttatcaccaactttgctgcagccacccacactacaagggcgttatcagcaaacggcagccgttggaacagctaagctactatattttcaatacgctgaaagaggagctgagctggaaatcaccgccaaaaggcacgctgtcttatcgcgaaagccaaatattacttgacgtgctgtgtggcgattccagtaaccggctgacgatacgctatggcattcagtcgaaaaccatcagcgcacataaacttaacgcattagcaaaactgggattgaaaaacatcagcgacatttttaaacgaatgaaaggcattcaggaactgccggtaaaaggtgagttgatcggcgtatattaa

SEQ ID NO: 456696 - DNA, 387 bp, Serratia marcescens
atgcggaaatatgttttgctgacgtgcgcgctgttattgccattttcttctctggcgatgtcttcggcttcgtccttgcaaaaaaataaggatgcggcggcggcttattgcgatgcgcagcttgcggtggtgaaaaatgcctggtcggagagcaacgacgatgaaaatattgcgcgctcgattgttcagctggaagataaaggttatcagttagccgattttggtattgataaggaagagtatgcgcgtgatttgaaaacggcgattgccggaatgcgtgataataaggccgcctatcataatcagcaggaagagtttaatcgttcattggttgctcaggttgaagcctgtaaagtacaagccgagcatcggttaaacgctaaataa

SEQ ID NO: 456697 - DNA, 1281 bp, Serratia marcescens
atgctggaaatcaactcagcgaataatattatgaaattcttatcctttcgtgtgaaaaagtcccatcttctgctggtgggcatactgctggtggccgccaacctgcgggcgcccttcaccagcctggcgccgctgctggacgccatccgcctcgatttctccctgagcgcggtacaggcgggcctgatacagaccctgccgctgttggcgttcgcgctgttttcgccgctggccggcagcattgccgttaagtatggcattgaacgggtgatctttgcggcgctgctgctgattgccgccggcatcggctaccgctcttacggcggcctgatcggcgtgtatggcggcacggtgctgattggcctgggcatcgccatgggcaacgtgctgttgcccagtttgttaaaacgcgatttcccccaacgggtggcgagtatgaccggcctgtacgccctgattatgggggttggcgccgcactggggtcggcggcggtggtgccgctgtcgcaggtgtcggcgctgggctggaacggcgcgctgttcgccacgctgctgtttccgctattagcggcggcgatctggtttccgcagctttcccacggggcagcgcggcaggcgcgcgccggtggtgcgtcgcagccgcattccggcggggtatggcgcgccgcgctggcctggcaggtgacgctgttcctggggcttaactcgctgatttattacgtggtggtcgcctggctgccgtccattttgcgctatcagggcttcagcgccgaacaggccggctcgctgcacggcatcctgcagctggcgaccgcgctaccggggctgtttaccggccatctgctggcgcggatgaaggaccagcgggcgattgccgtgacggtatcgctgctggccgccgccggcctgctggggctgctggcgctgcccgctttcgccacgctgtgggtggtgctcttcggtatcggttccggcagcaccattatcctggggctggcgtttatcggcctgcgttccggctcgccggcacaggccgcgtcgctctccggtatggcgcagtgcgttggttacctgctggcggtcggcgggccgcccggcgtcgggctgctgtatgacgccacccacagctggcatggcccgctgctgatctgcgcggcgctggcgctggtgatggcgctggtgggttacctggccggtcgcgaccgctgtctggcgccggcggagaaccacgcgcaggaggtaccgctgaacgcaggctgcctgtctgacgagaaacgttaa

SEQ ID NO: 456698 - DNA, 780 bp, Serratia marcescens
atgtcgctactgcaaagctacgaggagttcgatcccgacgccaacgccagccaggcggtggcgctccatatctcagccacggaaacgcgtcgggacatgccgtttcatcaccaccgcaaaggccaactgatcctgccgctgcgcggcggtctggtgtgtgaggtcgccaaggcctactggatggtgccgaccggccacgccgtctggatccccggcggaatggagcacagcaaccgggcgatgggcgacgtggatatttatctgctgttcgtcgagccggactatcccggcatgccggacgagtgctgtacgttgcaaatcagtccgatgctgcgtgaaatcatcaaacacttcgccacgctgccggaggattacgccgccgacagtccgaccggccgtctggcggcggtgatgatgcacgaactggcgcagatgccggttgaacatctgcatgtgcccatcagcggcaatgccaagatcaaacagctggcggacgaaattatgctggcgcccggcagccgcagtacgctgcacgaatgggcgcagaagctggcgatgagcgatcgcagctttgagcggtttatacggcgggaaacggggatgacgttcggcaaatggcgccaccagctgcagctgatggtcgccgtacggatgctggtgctgggggaatcggtgcagaacgtcgcttatgaactcggctacgactcccccaccgcctttatcaccatgtttaaaaaagcgttgggcaaaacgccgggccgctatctgctgcaggattag

SEQ ID NO: 456699 - DNA, 447 bp, Serratia marcescens
atgaataagttaaccagagccgcgctggtgtggggagggctgtgcgccctcctgctttatcgcacgctgcctgcggatgcgattatgtcgtggcagatgttccggcaatacggggttccggtgagccagctggcggccaacggactggtgcagctgctgcccgcgctggtgccgttgggctgttttttcgcattacgcgccaacgcggcggaacgccgactggcggtgctgaccctgccggtagtcgcctggctggtcagccatgtgattctgattacgctgctctatgccatcgcggtgaaaagcggcggcgtgccgccgtattccgaagggctgtcggccatgatgctgcgcatgctgaatatcggctggctgagcaacgtgctggtcgccgcgctgacgatcgtcgcctgcggctatgcgttctggcgtgaaagccgacgctaa

SEQ ID NO: 456700 - DNA, 621 bp, Serratia marcescens
atggctgcagcgcctgcacgccggcgtttatcgcgggaagcgcgtcacgcccagctgatagacgcggcatggcggattattcgggaagaaggtacacaagcgctgaccctcggccatctggcgctgcaggccggcgtcaccaagccggtggtctacgaccatttttccaaccgttccggtttattcgccatactgtacaaagagtttgaccgccgtcagaccgcgctgatggatgagaatatccgccgcgcggcgccgacgctggaggcgcgggcggcggtgatcgctgcgtcctacattgagtgcgtgctgcagcagggacgcgagatgcccagcgtcatggcggcgttgaccggcacgccggagctggagcagatccggcaggaatacgccgtcggctttacggaaaaatgccgcgcgctgttcgccccgttctgcggcggccagccgctgcacgacgcggcgctgcgggggatgctcggcgcggcggaagggctgtcttatgccgtggtgaacggcgttgtgagcgaacggcaggccaaggatgagctgtttcaggtgattatcgccatggtgcagcgctgccgcaccctgccggggagaggagaacaggatgaataa

SEQ ID NO: 456701 - DNA, 591 bp, Serratia marcescens
atgcatgcactgatcgtggtctctcatcctctgcagcactccctgacgcacggcagcgccgccgccatcgcccagggcatcgccgcggccaatccggcacacagcgttgaaatcgccgacctgacgcaggaaggcttcaacccgacgttttccgccgcagatatggcggcgtttcagcaaaccggcgccgtgccgcccgacgtgctcgccgagcaggcgcgcatcgaccgcgccgatgcgctggtgctggtgttccccgtttattggtggtccatgccgggcctgttgaaaggctggatcgatcgggtgtttaccaacggctgggcctatgacgacacctccggcgagcgcgtggtgaaaaaactgacccacctgccggtacacctggtggcgctgggggcggttaatcagcacaccttcgtcaaacacggctacgccgacgcctttaacacccagatcgggcacggtattttcgattattgcggcgcgccgctgcggagttgcgaagtgctgctgatgccggagatgggcagccctgagggctgcctggagaaggcgcacgcgatcggtcgcgccattttccgcgaataa

SEQ ID NO: 456702 - DNA, 306 bp, Serratia marcescens
atggccaatatcaatatcacctttacggtgacggagttttgtctgcacgccggcgtatcgcaggatgaactggttgaaatcgtcgggctgggggtgatcgagccttgccggccggccggcgatgagtggctgtttgacgatggcgcgctggcggcgctccaccgtgcgcagcggctgcaccgcgagctggcgctggattggccgggtatcgcggtggcgctgacgttgctggatgaggttgaacagctgcgcggggagaaccggcagctgcggcagcggctggcgcgttttatggaaaacgtctga

SEQ ID NO: 456703 - DNA, 924 bp, Serratia marcescens
atggaatttaaggactattacaccattttaggcgttaagcccgaagatgacctcaaggcgataaaaaccgcctaccgccgcctggcgcgtaaataccatcctgacgtcagcaaagagccggacgccgaggcaaagtttaaggaagttgccgaagcctatgaggtgctgaaggatgacgagagccgcgccgaatatgaccagctgcgtctgcaccgcaacgatccgcactttggccggcaggcgcagcacaacgacagttacaacgccgaagacttttccgacatcttctcttccatgttcggcgaacgggcgcgggcgcgccaacagcgtcagcaccatgccatgcgcgggcagaacctggagattgaagtggcggtgttcctggaggacatttttgccgagcagacgcgcaccatcatctatcacgtgccggtatataacgtgtttggcctggtagagcaggaaattccgaaaacgctcaacgtgaaaataccggccggggtcagagaaggggagcgcatccgcctgaaagggcagggatcgccggggatcgacggcggcgccaacggcgatctctatctgatcgtccgcatcgcgccgcatccgcggtttgatatcgtcggcgataatctggaggtcgtcctgccgctgtcgccgtgggaagcggcgctgggggccaaagtgcccgtgccgaccgtccagcagcagattttgctgaccgttcccgccggcacgcagagcggccagcggctgcgtataaaaggcaaagggctgccgggcaaggggcagaaggccggcggcgacctgtatgcggtggtgaaagtggtgatgccgccgaagccggacgaacggagcgcggcgctgtggcagcagctggcggaagcgcagtcggatttcgacccgcgtaaagagtggagtaagtaa

SEQ ID NO: 456704 - DNA, 570 bp, Serratia marcescens
atgttgaatataggaaatagtcatttacccgcgctcgatccgcagctggtgaaaaagcagcgcaggctgctgcaggtactcgcgttgctgttgctggtggcggggctgttctgtctgttcagtcctttcgcgtccggcgcggcgctcagcgcggtgatggggatctttttgctgctgagcgggatcgggatgattgtcggcatgatcgttaaccgagcgcaaaatacctggccgatgatcggcggtattctattgggcatcgcctatctgattatcggctatgtgtttgtcacccgccccgccgtcggcatttttaccatggcggtttatctggcggcgctgtttgcgctggggggcgtcttccgtctgctggccggttatcagctgcgcgcgatcccgggcagttggatccattatgtgattggcgtgctggatctggcgatcgcctggatgctgctcagcgccgatgcggcaacctcggtgatcctggtgaccaccattgtcgggattgaaatgctgttcagcgcctttggcctgtttatggtgacgcgacgcgtccgcgtcggctga

SEQ ID NO: 456705 - DNA, 1356 bp, Serratia marcescens
atgattaacatgggctacgatatgcatttaatcaaaggattgttcccccttaaaccgctgttactggctgccgttctattcccctgcggcgttaacgccaccaccctgctggaggcgatccgcaacgccggcgccgtcaacccggaactgcaagcggcgatgtaccgccagttggcaggcagtgaaaagagcagccagggcctggccggcctgctgccgaccattcagctgagcggcggttacaaccagcaggatcagccgaaggcgacctacgccgccaaagtaacgcgccataattacgccatctcgctcaaccagccgctgttcgatctgtccaaatatgccgactatctgcgcggcagggcgatagccgacagcgccgatatcgacctgctgcgcgcgcaggagacgctggcctatgacgtcgccgaagcctatgccggcgtgctgtaccagaatgaggtgcaccaggccgcgcgggcggccacgcaggtttacgaaaacgagctgcagcaaaccacgctggcgatctcgctgggcaacgccacccgcgtcgacgtcgatgaagcgcaggccaatcgcgatctgttccgtgccaaagagatcgaggcgcacaataatctgagcgccgccgccaccaaataccgccggctgaccggcctggagcacgacgccatcacgccaatcagcgccgcctgcctgctgcagggcgcacaggcggggaaagagcaggatctctaccagcgcgcactggcccacaacagccagatccgcagcgcgcgcgcccagtgggaaatcgccaaaaccggcgtctatcaggcgcacagcgcccatctgccgacggtcaacttccaggcctcgtacggcaccaactggagccgggccgaagacagcaacctgcttgacgaaatgttcggcacaacctcgaaaaccaccaacacccatctcggcgtctccgtctcggtaccgattttcagcggcggccagcagatgtcgcagtcgcgcgaggcggtctacacccgcgaacagatgcgctacagcctgatcgacgcccagcagaaggtgaaggaagagctgcacaacgccctgctgaacatgaccaacagccgctcgctggtcacctcgacccagcagatgatccgctcggaacagaacaaaatccgctccaccgccaccggcaagaagctggggctgcgcaccaaaatggatgagctgaacgcctaccaaagttactacgaagcggtaaaaaacaacgccgaagcgcgctacaagctgctgatggccaaggtttcccaggccagggcaaccggcgatctcggccataacgccatcgcgcagattagctgctcgcaataa

SEQ ID NO: 456706 - DNA, 1254 bp, Serratia marcescens
atgacacagtcactttttcgccaggaagcgctggatgccaataacaacaaggtcatggggaccgtttccctctattcgccaccgtatcgctggctggtcatctccctggcgagctgtctggtgacgctgatcgtcttgtttatcgtcttcggcagctacaccaggaaagagaccgcaacgggcaacctgctgcccagcaaaggcatttacaacattaccgcgccggtggccggcaccatcaccgacatgcaggtggaaaaaggcagcgaggtcgagcagaacagcgtgctgatgaccatctcctcggaactgtccaccgccatggggcaaacccgccagttcgtgcacgatcagctgacgctgcaaaatgagcggctgcagtccgagcgggaaagcgaacaccgcatgcacgccgagaccatgagcggcctgaaaaagcagctcggctcgctggaatcgcagatcgggctgttgaaaaagcagcaggtcaagcgtcagcagcagctgaacctggccagcaatcagctgcacaagctgcagcagatgcgcagccagggcttcgcctctaaccagcaggtggatgaacagcagaacaccgtgctggaggtcggcgcccggctgcaggacgccgaccggctggtgatggatctggagcagaagattatcgccctgcgccagcagctgcgcgagctgccgctcgccctctccaagcggcagaatgaaatcgaccgcagccaggcggatgtggatcgcgctctggcggaaaacgagtcgcaccgcgccgtctacatcaaggcgacggaaaccggcaccatcggcgccacgctggtcaagcagggccaggtggtcgccagcggccagccgctgctctacatcctgccgcagggcagccggctgcaggccagaattatggtcagcagccgcgccatcggctttatcaatccggggcaacaggtgatgttgcgctatgaagcctacccctatcaaaaattcggcgtccagcgcgggcgggtggtcgaggtgtcgaccgccgcgctctctccgcaggaggtgatggccatcaccggcgacccaaacgtgcatgagcggctgtatcaggtggtggtcgaactcgacaagcaatccatcaacctgtacggcaaagacgttgcgctgcgctcgggcatcaagctggaggcggattttttgattgagaagcgacggatcatcgagtgggtatttgagcctctctacgctttgggccaccgcttgtaa

SEQ ID NO: 456707 - DNA, 2136 bp, Serratia marcescens
atggaatttttaaagaaccttcacttcggcttcggccggcggctgccggtgatccagcagtcgcaggcggccgaatgcggcctggcctgcgtcgcgatggtggtcaattactataaatacaacatcgacatgatcagcctgcgccgccgcttctccacctcgatgaaaggcgccacgctggccgacgtgatgcgcgtcgccggcagcctgggcatggcgggccgcgcgctgcgcctggagattgaagagctgaacaagctgcgccgtccctgcattctgcactggaacctgaaccactttgtggtgctgaagaaggtgaagaaaaacgccatcgtcattcacgatcccgccagcggagtgcgcgtggtgtcgatgaaggaagtgtccaacagcttcaccggcgtggcgctggagctgctgccgtcggcgtcgttcaagccggcggtagagaaacagtcgctgtcgatgttccgcctgatcggcagcgtcaccggcatcggctctgcgttaacccagatattactgctgtccgtggcgctggaggtgttcggcgtgattacgccgttctacatgcagtgggtgatggaccaggtgctggtctccgacgaccgcgatctgctgacgctgctgagcgtcggctttattttcgtcttcctgttccagaacctgatcaccgccctgcgttcctgggtgatgacctggttctccagcctgctgaacgtgcagtggaccaccaacgtctgctcgcacctgctggggctgccgctgtcgtttttcgagtcgcgccacgtgggcgatattatttcccgcttcggctcggtcagcaccattcaggagacgctgacgacgcgctttatcagctcggtgctggacggcatcatggcggtggtgacgctcggcgtgctgttcacctataacaggatgctcgccgcggtggtggtgctgcagtttctgctgtatgccgccatccgctggatcgcctatcgtccgtttcgcaacgccaacgaagaccacatcatcaccgccgccaaggcacagtcgattctgctggagtcggtgcgcggcgccaaaaccctgaagctgaataaccgccaggatatccgcgtcagcagctacgccaacgcgctggtggaaaccaccaacaaaaacatcgtcgtgcagcgactgagcatcagcttcagcaccatccacggcattatcgccggtatcgggcgtatcgcgctggtgtggctggccgcgctgcaggtgctggacggcaacttctccgccggcatgctgatcggctttatgtcgttcgccgaccagtttatctcacgcggctccggcctggtggacgcctggatcgatttccgcatgctgcggctgcacggtgagcgtctggcggatatcgtcctgaccgaacaggaaaaagacggccgccacgatgcggaaaccgcgggcagtatcgcgcgtacctcgccgaccatcacgctggacaacgtatcgttccgctatgccgagaccgagccgatgattctggacagttgctcgttcgaaattaagtccggggagtccgtggcgctgatcgggccgtccggtcagggcaaaaccacgctggccaagctgctgctggggttgctgacgccggagtccgggcgcattctgatcgacggcgtcgatattcaggacgtcgggctgtaccaataccgcgagcgcatcggctgcgtgatgcaggatgacatcctgttcgccggctccatcgccgataatatctgcttcttcagccaggaagccgatcaggaacgcatcgagcaggcggctaaaatcgcgcagatccatgatgacattatgaaaatgccgatggcctatcagagcctggtgggcgatatgggctcatcgctgtccggcgggcagaaccagcgcgtgctgctggcgcgcgcgctgtaccgcaatccgtcgatcctggtgctggatgaagcctccagccacctggacgtggaaaaagagatgctgattaacgacgccattcgcaatatgtcggtcacccgcatcatcatcgcccatcgtccggaaaccatccgcagcgccgagcgcatcgtgatgctgtccggcggcaaggcgcagccggtcaacccggagacgctggcgccgttttaa

SEQ ID NO: 456708 - DNA, 2148 bp, Serratia marcescens
atgcccaccctttcgcgcagaaaactgttacaggcggcggccgtcggttcggcattttcgctgctgccggcctcgattcgcaaagcgctggcgatccccgccaacaaccgcaccggcagcctgcaggatgtggagcacgtggtgattctgatgcaggaaaaccgcgccttcgaccactactttggcacgctgcccggcgtccgcggctttagcgaccgctttaccatcccgctgccggacggtcgcagcgtgtggcagcagcaggggccggagcggctggtgctgccctatcatctggatgcgcagcgcggcaacgcccagcgcgtcagcggcacgccgcatacctggcccgacgcgcatgccgcctgggacagcggccgcatgagcgcctggccgagccacaaaacgccgacctccatgggctattaccgcgagccggagctgccgtttcagttcgcgctggccaatgcctttacgctgtgcgacgcctatcactgctcgatgcacgccggcaccaaccctaaccgactctttctgtggaccggcagcaacggccccggcccggataacagcgccgtggtgctcaacgagtgggatcatcccggcagcgaagacaaaggctaccgctggaagacctacccggaacgtttggaagagagcggcgtcagctggaagatctaccagtacctgccggataactacggcgataacccgctggccggcttccgccagtaccgcgccgctagcatcaaggccggcaacccggccaatccgccgaaagagttcagggactttgtgccgtacagcgagcacatcaacaccgtcgtgccgctgtataaaggcaacggcaacaccctgccggccggcggcgacggcgatctggaggcgatgctggccgggttccgcaacgacgtacggcagggccagctgccgcaggtcagctggctgatcgcgccggcggcctactccgagcaccctgacccttccagcccggtgcagggcggctggtttactcaggaggtgctgaatgcgttaaccgaacggccggaggtgtggagtaaaaccgtgctgttcgtcacctacgatgaaaacgacggctttttcgatcacctgccttcgccgtccgcgccgtcgctgcgcagcgacggcagcttcgccggtaaatccaccgtgccttttgaaacggaaatattccagcacccggcgccgccgggcagcacggatcagcctccgccggacgccggcatttacggccccggcccgcgggtgccgatgctggtgctgtcgccgtggagccgcggcggctgggttaattcccaggtctttgaccatacctcggtgctgcaatttctggaaaagcgttttcaggtgcgtgagcccaatatcagcgactggcggcggacggtctgcggcgatctgacctcggccttcaactttgtcgatcccaaccatgaaacactgccggcgctgcacaccaccagccgccacgccgccgacgcgctgcgtcagcgtcaggaacagctgccgccggtgccgctgcctgccgccggacagcagcagctgccgcaacaaaaacgccaggcgcgtccgtcacgcgcgctgccctatcagctgcaggtagaagcgaacggctacccccagcagcagttgctggcgttgaatatgatcaatagcggcagccagggcgcggtgttccacgtttacgaccggctgcggctggatgagattccgcgccgctttaccgtagaagcgggtaaagcgctgagtgacgagtggcagattgcgggagattacgatctgtggctgctggggccgaacggtttccaccgcgctttgcgcggcaacctgcagcattctcaggcggaggtgcggttggaaagccagccggacggcctgcgcctgaccctgctgaaccccggcgcgcaggcgcaggaaataacgctggcgcgctgcccctacggcagccgggaagcgcaacgcatcccgctggcggccggcgcaacgcatacgctgtcgctcgacgtcggcgccagcggcggctggtacgatattagcctgacggataaacggggctggctacgccggctggccggacggcttgagaacggccggcacagcatcagcgacccgctgatgggtcagccctga

SEQ ID NO: 456709 - DNA, 549 bp, Serratia marcescens
atgaaaaaatcagcactgcttggcgctatcgttgtcgctttatctacgcttatgccggcacaggcagaaagccacaccgtaatttttgattatgcgcgcgccaagcttgataatttcaacgacctggacggcattaatatcaagtatcgttatgagtggggttccgccctgagtctgatgaactctttcagcgcgctgggtggcgataaccacagcgcgaacggcggtaaaaccgagctgaattattatgcctacagcgtggggccagcctactacctgaaccgctatatggtgatttacggtctggtggggctgagccacagcaatgtgaaaaactccgccgcctgggcgacggagcagaacagcggcagagcgcgcggcagtcgcggcgccagctccgcctcagcctttgcctacggcgccggcctgctgtttaccccccgggaaaatatcgtgctggacgtcggttatgaaggatcgcagatcgatatcggcggcctgaaccgcgacgtgaatctgtttaccgtcggcgtcggctaccgtttctga

SEQ ID NO: 456710 - DNA, 936 bp, Serratia marcescens
atggcaaaccgagtctgggttctgggagacgccgttgtcgatctggttcctgaaaattcaaacagttatctgaagtgtcccggcggcgcgccggccaacgtcgcggtcggcgtcgcccgtctgggcggcgacagcggctttatcggccgcgtcggtgacgacagcttcggcgcctttctgcgccaggtgctgaacagcgaaggggtcgacaccacgcagatgttcgccgacgccgagcaccatacctcgaccgtggtggtggatctggccggcgacggcgagcgctccttcacctttatggtgacccccagcgccgacctgtttctgcagcccgccgatctgccggcctttcaggccggcgaatggctgcacgcctgctcgatcgccctgtcgcaggagccgagccgcagcaccacgctggcggccatggccagcatccgcgccgccggcggctgggtcagcttcgaccccaatatccgcgccgacgtctggcgacagccggaagaactccgcccctgcctgatgcaggcgctgctgctggccgacgtggtgaaaatctcactggacgaactgctctttatcagcaacctcaatgagatgcacgccgcgattgactggatgctggcccacttcccgctgcgcctgctgctggtcacccagggcggagacggcgtttgcgtccatgacggccgtgaactgcgccacttcccggccacgccggtcgtcccggtggacaccaccggcgccggcgacgcctttgtcgccggtttgttggccgcgctgtcggccctcggccgcctgccgcaggccgacgagtggccgggcgtgattgcccaggcgcaggcctgcggcgcgctggccaccaccgccaaaggagcgatgaccgccttgccgcacgccgacgaactggcgacgctgctgttacaacctgtctga

SEQ ID NO: 456711 - DNA, 1446 bp, Serratia marcescens
atgaaaaaactacgctatctggctgtaacgacaggattattcatcaccgcccccgcgctggccgtcagcgccaacgacagcatcgaagcccgcctcagcgcgctggaacagcgcctgcagcaggcggaacggcgggccacgcaggcggaaaaacgcgccgttgacgccgagcagcgggctcagcgtctggaacaacgcagcgaacgcgccgaacaacaggcccagcgcctggaacagcgcaccgcccgcgtcgagcagcaacgcgctcagtcggcccccgcgccgcagcccgccgccgctgcgccggccaccggcctccagctcagccatttcagcgatctgaaactgtatggcgatgtggaattcaacctcgacggcgccagccgcagcggccagctgacctcgctgaaaacccgcgataacaaaaactggaagcccggcgataacgagcgctgggacattaacggccgcattctggtcgggctggacggctaccgccgcaacccggacggccgcttctccggctttcgcgttcagccgctggcggacatgagcggtaaaatgaacctggatgacgccgcgttcttcttcggcaaggagcaggactggcaggccaaaatcggccgttttgaagcctacgatatgttcccgctcaatcaggacacctttatcgaatattccggcaataccgccaacgatctgtatgccgacggcttcggctatatctacatgatgaaagagggacgcggccgcagcagcagcggcggcaacctgatgctgagcaaaaccgccggcgactggtatttcgaactcaacaccctggtggaggacggcacctcgctgttccaggaaaacagctatcacggcaacacgctggaaaacaaaaagaatgttgcctatctgcgcccggtgatagcctggaaaaaagatcgcttcagcgccgcgctggcgatggagagcaacgtggtcagcaacgcctacggctatcaggatgcgcgcggccagtgggtcgaccagtccaaacgtaacggctacggcatgacgctcagctggaacaacctggccgacgacgccgaaaacggcatcgtcgccaacctcagcaccgcctatctggacgccgccggcgagcaggatttttccgccggcgccaacgtactgtggcgccgcttcgagctgggctatatctacgcccacaataccatcaaagagttttccaccgacggcatggcggcgcagatcgacaacccgctcagcgagccggggcgctatgacattcacaccattcacgcgtcataccaaatccccaacattatggcgatgccgaacttcaatctgtatctcggcgcctatgcctccatgctggaggccgacgccgacaataagatcgccaacggcgataacgataaacgctacggcctgcgcgccagattcaaatactttttctga

SEQ ID NO: 456712 - DNA, 1371 bp, Serratia marcescens
atgaacgtcaccgcaaccgcacaggcgctgctgccgctactcggcggaaaagacaatatcgccagcgcggcccactgcgccacgcgcctgcgcctggtgctgctggacgacagccgggtcgataccgccgccatcgggcaactggagggggtgaaaggctgcttccgcaacgccgggcaaattcaggtgattttcggcaccggcctggtgaacaaggtgcatgccgaatttatcaaggcggcggacgtcaatgaatccagcaaagcggaagccgccgatctggcagcgaaaaagctcaatccgctgcagcgcatcgcccgcctgctgtcgaatattttcgtgccgatcattcccgccatcgtcgcctccggcctgctgatggggctgctcggcatgatgaaaacctacggctgggccagccctgataatgcgctgttcgtgatgctcgatatgtttagctcggcggcgtttatcatcctgccgatcctgattggcttcaccgccgcgcgtgaattcggcggcaacccttacctcggcgccacgctgggcggcattctgactcatccggcgctgaccaacgcctggggcgtggccgagggcttctccaccatgaacttcttcgggctggagatcgcgatgatcggctatcagggcacggtgttcccggtgctgctggcggtgtggtttatgagcacgctggaaaagcagctgcgcaaagcgatccctgatgcgctcgatctgatcctgacgccgttcctgacggtgattatctccggcttcgtcgccatgctgtttatcggcccggcggggcgcgcgctcggcgacggcatctcgctgctgctcagcacgctgatcgcccacgccggctggctggccgggctgctgttcggcggcctgtattcggtgatcgtcatcaccggcatccaccacagcttccacgccatcgaggccgggctgctgggcaacccgaatatcggcgtcaacttcctgctgccaatctggtcaatggccaacatcgcgcagggcggcgcctgtctggcggtgtactttaaaacccgcgacgccaaaatcaaggcgatcgcggtgccttccggcttctccgccatgctcggcatcaccgaggcggcgctgttcggcatcaacctgcgctttgtcaaacccttcctcgccgcgctggccggcggcgcgctcggcggcgcctgggtggtcgccaatcacgtcggcatgaacgccgtcggcctgaccgccattcccggcatggccatcgtacaggccagcgcgctgctcagctatatcatcgggctggcgatcgccttcggcagcgcctttggcctttccctgctgctgaaatatcagacggacgataaataa

SEQ ID NO: 456713 - DNA, 1410 bp, Serratia marcescens
atggatgcgctgagcctgatgaaacacaccgcgctggcgctgatgcagggccagacgcgcgccgccgccgatcctcaccgcccgcggtggcacctggcgcccagcgtcgggctgctcaacgatcccaacgggtttattcagcacaacggcgtgtaccatctgttctatcagtggaacccgctggcctgcgaccacggccgcaaatgctggggccactggcagtcccgcgatctgctgcactggcagcaccagccggtggcgctgctgcccgacgcctgctacgacagccacggctgctattccggctcggcggtggcggcggacggcaagatcatgctggtctataccggcaatgtgaaataccccgacggttcgcgcaccgcctaccaatgtctggcgcaggaggatgagcgcggcgaataccgcaagctcggcccggtgctgccgctgcccgacggctacagcggccacgtgcgcgacccgaaggtctggtgccatgagcagagctggtacatggtgctgggcgcacgcgacctgcaggatcgcggcaaggtgctgctgctacgctccgctgatctgcgtcagtggacactgctgggagagatcgcgggcgcgcacctgaacggcctgggcgacttcggctatatgtgggagtgtccggatctgttccaccttgccgggcgcgaggtgctgatttgctgcccgcaggggctggcggcgcagccggagcgctatctcaacgtctatcaggccggttatttcgtcggcgagctggattacccggcggcacgcttcagccacggtgacttccacgagctggatgccggcttcgagttttatgcgccgcaaaccacgctggcggaagatggccgccggctgctggtgggctggatgggggtgccggaacaggacgaacagctgcagccgacgacgcgctacggctggctgcataccatgacctgcctgcgcgagctgacgctgcgcgacggccggctgtatcagcagccggtcgccgaactgcagcagctgcgcggggatctgacccgctggcagggggcggccgacgacgcgccgccgctggcgctcggcagcgccgaactgtggttaacgccgcacggcccgttccgcgccggcttcggcgacgccatgcagctgacctgggacggcgaacggctgacgctgacgcgcactaacctgcgcagcggcgcgacggagcaccgctactggcgcggcgatctccgggagctgcagctgctgtttgaccgctccagcgtggagatctttatcaaccgcggcgccgcggtgatgagctcgcgctacttccctgccgcgccgccagacctgcggctgcacggcgccgcgccgctggcgctgcaatactggccgctgcggccatgcatgttagaataa

SEQ ID NO: 456714 - DNA, 1044 bp, Serratia marcescens
atgccgttagtgaaaaagaataaacgcataaccatcagtgatattgccgggctggccggcgtgtcgaaatcgaccgccagcctggtgcttaatggccgcagcaagcaataccgcgtctccgacgatacccgcgatcgcatcctggcgctggctaacgagcaccactaccaacccagcattcacgcccgctcgctgcgctcgacccgcagccataccctcgggctggtagtgccggaaatgaccaactacggctttgcggttatcgcccgtgaactggaaaccctgtgccgcgaggccggcctgcagctgctgattgcctgctcggatgaaaacccggcgcaggagatgatggcggtgaacaatctggtgcagcgccaggttgacgggctgatcgtcgcctccagccagctaaacgacgcggaataccagaagattaacgccagcctgccggtggtgcagatggaccgggtgattaacggttcgtcgctgccgctggtgatcaccgattcggtgtcatcgaccgcgcagctggtggaaacggtcgcccggcagcaccccgacgagttctatttcctcggcggccagccgcgcctgtcgccgacgcgcgatcgcctggccggcttccgtcaggggctggaaaacgccggcgtcagcgcccaggatgagtggatcatcagcggcaactatcaccccagctccggctatgaaatgatcgccggcctgtgcgcgcgcctcggccgcccgccgaaggcgctgtttaccgccgcctgcggcctgctggaaggggtgctgcgctatctcacccagcatcagctgatggacagcgatatccacctgtgcagctttgacgaccactacctgttcgactgcatgacgctgaaaatcgacaccgtggcgcaggactgccgcgggctggcgcagcacagcttcgagctggcgacgcagctgattgacgagcgtccgccggaacacaacaccctgtacctgcccggcagcattcactggcgccacgccggttcgctggcgctgcttggccaacgctaa

SEQ ID NO: 456715 - DNA, 819 bp, Serratia marcescens
atgtcgcaagaaattaacaaagatacccagctgtgcatgtcgctggccggccgtcccggcaatttcggcacccgctttcacaactacctgtatcagcagctggggctgaactttatctacaaggcattcaccacccaggatattcaggcggcggtcggcggcgtgcgtgcgctgggcatccgcggctgcgcggtgtccatgccgttcaaagagagctgcatcccgttcctcgatgagctggatccctccgccacggccatcgattcggttaacaccatcgtcaacgacggtggcctgctgcgcgcctacaacaccgactatatcgccgttgccaaactgctggcgcagcatcaggtcgcgccctccacctcgtttgccctgcgcggcagcggcggcatggccaaagcggtgaccgccgcgctgcgcgacgccggcctgcgcaacggccatattatcgcgcgtaacgagcgcgccggccgggcgctggcgcagcagtacggctatgcgtggcagccggagatgggcagcctgcggccgcagatggtgattaacgtcacgccgatcggcatggcgggcggcgccgaggcgcaacagctggcctttgagccggactgcatcgccgccgccgagcgggtgtttgacgtggtggcgctgccggcggagacgccgctgattcgccacgcccgccagcagggcaaagcggtgattaccggcgcggaggtgattgcgctgcaggcgctggagcagttcgttctctacaccggcgtacgccccagcgatgagcaggttgcccgcgcggcggcgcatgcgcgcgcttag

SEQ ID NO: 456716 - DNA, 423 bp, Serratia marcescens
atggcgatgcgcttaaatgaagatttggacgacagcggcgaactgcacgaaatcaacgtaacgccgtttatcgacgttatgctggtgctgttgatcatctttatggtggcggcgcctctggctacggtggatatccgtgtcgatctgccggcttcgacggccaagccgcagccgcgcccggaaaaaccggtgttcctgtcggtgaaggctgacaagcagctgtatgtcggcgaccagccggtgacggcggcgcagctgacctcggtgctggacagccgcacccagtccaacaaggaaaccaccatcttcttccaggcggataaaagcgtggattacgccacgctgatgagcgtgatggatacgctacgcaacgccggctacctgaaagtggggctggtggggatggaaggggcagcgaagtaa

SEQ ID NO: 456717 - DNA, 978 bp, Serratia marcescens
gtgaaaacggctggcaagactatgaatcaaagagcccgcggcgctggccggggacagtggggcgccgcattcgggcgcggtttgatcgcgtccatggtgctggtggccgggctggccggcagtgcgcaggccgcgccggaaactcagccggctgctaccgagagcgcctctgcggcagcaacgccggcgccggccagcgccgcgccgcagtccgtgacgccggttaacccggcgccgaccgttcaaccaccggaaacgcgcggtatggatctgtccgtctggggcatgtatcagcacgccgatgcggtggtgaaaaccgtaatgatcggcctggtgctggcatcgatcatcacctggaccattctgtttgccaaaggcagcgagctgacgcgcgccaagcgccgcctgcgccgtgagcatcagcagctggccgaagcccgctcgctggatgaagccagccagatggcgcagagcttccagccggagagcatcagcgccgtgctgctgaatgacgcgcagaacgagctggagctgtcggcggaatccaacgacaacaacgggattaaagagcgcgccggtttccgctttgagcgccgggtggcggcctacgggcgtcagctgggcaaaggcaacggcttcctggccaccatcggcgcgatttcgccgtttgtcggcctgttcggcaccgtttggggcattatgaatagctttatcggcatcgcgcattcgcagaccaccaacctggcggtggtggctcccggtatcgcagaagcgctgctggctaccgcgctgggcctggtcgccgctatcccggcggtggtgatttacaacatctttgcccgcgtgatcggcggccaccgcgcgcaggttggcgacgtggcggcgcaggtgctgctgctgctgagccgtgacctggatctggcggcgacggcggaagccaagcgcgcacagcacgcacaccagctgcgggcggggtga

SEQ ID NO: 456718 - DNA, 978 bp, Serratia marcescens
atgaaactgccccacgccctatcaggtttgtgcctctcgctctgcacgttactgtgcagccaggccgcactggcgcaacaaatcaaagccgccgacgtccacccggaaggctaccccaatgtcgttgcggtccaacatctgggcgacaagctgaaggccgccacgcaggatcgcctggagctgaaatccttccccggcggcatgctcggcgatgaaaagcagatgatcgagcaggcgcagattggcgcgattgatatgatccgcgtctccatggcgccggtggcggcgattctgccggagatcgaggtgttcaccctgccgtatatcttccgtgacgaaacgcatctgcataaggtgctggacggtgaaatcggcaaggagatcggcgacaagatcaccaacgaccccacctcgcgtttggtgttcctcggctggatggattccggcacccgcaatctgatcaccaaaaagccggtggtgaagccgcaggatctgcaggggatgaaaatccgcgtgcagggcagcccgattgcgctggcgacgctgaaagccatgggcgccaacgccgtcagcatgggggtcagcgaagtgttcagcggcctgcagaccggcgttatcgacggcgcggagaacaacccgccgacctttatcgcccacaactatctgccggtaaccaaaaactacaccctgagccgccactttattattcccgagctgttcctctactccaaagtcaaatgggacaaactgaccccggccgaccagcagctgatcctcaagctggcaaaagaggcgcaggccgaacagcgcaccctgtgggccgcctataaccagcaggcgctggaaaaaatgaaggccggcggcgtgcagttccacgacatcgaccgcgaagcgttctacaagatgacccagccggtgcgcgaccagtacggcaaggcgcatcaggatctgatcgcccgcattaacgcggtgcaataa

SEQ ID NO: 456719 - DNA, 507 bp, Serratia marcescens
atggcgcacgtttatcatcaggcgatggatctgctgtaccgcctcgccatgtggctggccggtgcggcgctgctggtgatggtcaccgtaataccggtgggcatcttcagccgctacgtgctcaatgagggcgcggcctggccggagccgatcgccatcctgtgcatggtgacctttacctttatcggcgccgccgtcagctaccgcgccggcgcgcatatcgccgtcaatatgctgaccgaccgcctgccgccgttctggcagcgctgctgcggccggctggcggacctgctgatgacggtaatctgcctgtttattctctattacggctacggcctgtgcagccagctgtggctgcagccggtggcggagttcccgctgctgagcgccggccaggcctatctgccgctgccgattggctcagccgtgacgctgctgttcgtgattgagcggttactcttcggcccgcagcaccaccgtccgctggtgatgctcggcaatacctga

SEQ ID NO: 456720 - DNA, 1293 bp, Serratia marcescens
atggacgcctttattctgcttgcctctctcgccctgctgctggccatcggcgtgccggtggcctacgccgtggggctgagcgccatcgccggcgcgctgtggatcgatctgccgctggaggcgctgatgattcagatgaccagcggcgtcaacaagttctccctgctggcgatcccgttctttatcctggccggcgccattatggcggaaggcggcatcgcccgccggctggtcagcttcgcctatatcttcgtcggctttgtgcgcggcggcctgtcgctggtcaatattgtcgcctccaccttcttcggcgcgatctccggctcttcggtggcggataccgcctcgatcggctcggtgatggtgccggagatggagaaaaagggctacccgcgcgactacgccgcctcggtcaccgccagcggttcggtacaggcgatcctgatcccgccaagccataacgcggtgatctattcgctggccgccggcggtacggtgtcgatcgccgcgctgttcgtcgccggtattctgccgggactgctgctgtgcgtctcgctgatggtgatgtgcgtcggcttcgcccacaaacgcggctacccgaagggggaagccatcccgctgcgtcaggcgctgaaaatctgcctcgacacgctgtgggggctgatgaccgtggtgatcatcatgggcggcatcatgtccggtatctttaccgccaccgaatccgcggcggtggcctgcctgtgggcgttcttcgtcaccatgtttatctaccgcgactaccgctggtctgagctgcccaacctgatgtaccgcactatcaagaccgtcaccatcgtgatgatcctgataggcttcgccgcctgcttcggcgcggtgatgacctacatgcagctgccgctgcgcatcaccgagttcttcaccgccatttcccacaacaaatacgtcattctaatctgcatcaatatcatgctgctggcgctcggcacgctgatggatatggcgccgctgatcctgatcctgacgccggtgctgctgccggtcaccaacgcgctgggcatcgacccggtgcatttcggcatgattatgatggtcaacctgggcatcggcctgatcaccccgccggtcggctcggtgctgtttgtcgccagcgcggtcagcaagcagaaaatcgaggcggtggtcaaagccatgctgccgttttactgcgtgctgtttatggtgctgctgctggtgacctatattcccgccatttcgctgtggctgccgcatctgtttggcgtaatgggcggctga

SEQ ID NO: 456721 - DNA, 1272 bp, Serratia marcescens
atggctatttaccaacatgctaacgtagtgcgcatcaccgttttcactatgcataaccagcaggtaagccgtatgacgtccaaaaatctcgataccgcgctgatcggcgccggccgcagcaagcgctatacccacggcgcggtcaacccggtgacgcagcgcgcctcctcgctggtgttcgacagcgtggccgataaaaagcacgccacggcgcagcgcgcccacggcgaactgttctacggccgccgcggcaccctgacccatttcgcctttcaggaggcgatgaccgagctggagggcggcgccggctgcgtgctctatccctgcggcgccgccgcggtctccaacgccattttgtcgttcgtcagcgccggcgaccacgtgctggtgaccggctcggtgtatgagcccacgcaggatttctgcacgcatattctcggccggatgaatgtcgccaccacctatttcgatccgctgctgggcgaggccatcgccgagctgatccagccgaacacccgcgtggtgttcctggagtcgccggggtcgatcaccctggaaatacaggatattccggctatcgtgcgcgccgtgcgcgcggtgaatccggagattgtcattatgatcgacaacacctgggccgccggcgtgctgttcaaggcgctggaattcgacattgatatttccattcaggccggcaccaaatacatcatcggccactccgattacatgctcggcaccgcggtcgccaacgcccgctgctgggaacagctgcgtgaatactcttacctgatgggccagatggtggatgccgataccgcctatatggccagccgcggcctgcgcacgctgagcgtacggctgaaacagcatgagcagagcagcatcgccgtcgcccgctggctggccgagcggccggaagtcgcccgcgtcaaccacccggcgctgcccgcctgcaaaggacatgaattttaccggcgcgacttcagcggctgtaacgggctgttctcctttgtcctgaaacagcgcctgagcgaggcgcagctggccgactatctcgaccacttccgccatttcaccatggcctactcctggggcggctatgagtccctgatcctggcgaatcagccggaagaactggaggcgatccgcccggccggcggcgtagacttttccggcacgctggtgcggctgcatatcggcctggaaaacgtgcaggacctgatcgacgatctggcagcgggctttgagcgtctgcaggccggcaaccgataa

SEQ ID NO: 456722 - DNA, 660 bp, Serratia marcescens
atggatgtattaaaagagattgttcacgcgctttggcaacaggattttacggctctggccgatcccagcgtgatttgggtggtttatacggtgctttttatcaccctgtttttggaaaatggcctgctgccggcgtcttttctacccggcgacagcctgctgctgctggcgggcgccttaatcgccaagggcgtgatgtcctttgtaccgaccctgatgattctgacgctggccgccagcctcggctgttggctcagctatctacaggggcgctggctggggcatacccggctggttaaggggtggctgctgcagctgcccgcgcagtaccaccagcgcgcgcacgtgctgtttcaccgccacggcctgacggcgctgctggtaggacgctttctggcgtttgtgcgcacgctgctgccgaccatggcgggcatctccggcctgagcaatacccgctttcagtttttcaactggctgagcgccttgctgtgggtggtgtcggtggtcgggctgggcttcgccttcagccagattcccctcgttaaacgctatgaggatcaggtgatggccggcctgatgatcctgccgctggcgctgctggtgttcgggctgatcggcgccatgctggtgatctggcgtaaaaagcgccggacttcctga

SEQ ID NO: 456723 - DNA, 906 bp, Serratia marcescens
gtgagcgacattgacgaacttcggcgccggatggcgcagcaggcggcgtgctttgccgtgggcaacggctttacgtcgtcgccggtgccgcaggtggatattctgtatgccgaccggcactacccgcgccagccggtgatgtacgatcccagcattgtgattatttttcagggacacaaggtcggttactgcggcagtaaggtgttccgctacgatccgcgcaactatctgctgatgacgctgccgctgccgtttgagtgtgaaaccttcgccagccctgagcagccgctggtggggatttcggtgcggattgatacccagatgctgcaggatctgctgatcgatatcggcgacgacaactatctgacggcgccgcacggcgagagcagcggcatcaactgtgcgtcgcagaatgatgagatgctgtgcgctaccgagcgtttgctggacgtgatggaaaaaccgctggatgcgcgggtgctggggccgcagatcgtgcgtgaacttctctattacgtgttgtgcggacgcagcggcgcgtcgctgcaggagctggtcagccgccatacccacttcagccagatcgccagggcgctgcggcgtattgaaaagcagtatgcggagagcctgagcgtggaggcgctggccagcgaggtgaatatgagcgtgtcggcgtttcaccataactttaaggcggtgaccaacacctcgccgctgcagtacgtgaaatcctaccgtctgcataaggcgcggctgctgatgctgcacgacggtctgaaggccagcacggcggcaatgcgggtgggttatgaaagcgcttcgcagttcagccgcgagtttaagcgtttcttcggcgtcacgccgagcgatgaagtggcgcgggtgcgggataactacgctgcctga

SEQ ID NO: 456724 - DNA, 741 bp, Serratia marcescens
atgaaccagaccattgacctgctgacgtcgcaccgcagcgagcgcagctatctcgacctgccgatcgccgatgaggtgctcgacagtattatcgccgccgcccatctggcgccgacctcggtcaactcccagcaggtttcgctggttgtcacccgcgaccccgttcagcgcgcgcgcatcgccgaaattgccggcggccaggcgtggatcgcccaagcgccggtgtttatcaccgtggtgctggatatgcacaaaacccggctgggcatcgccatgggcggccagcagcaaacggcacaccagagcattgagagcctgatttccggcagcaccgacgtcggcatcgcgctcggcgcgctgatgaccgccgcccgctcgcacgggctgggcatcgtgccgatcggcggcatccgtcgcgatcctcaggcgttgatcgaactgctgcagctgccggaactgaccttcccggtcgccgggctggtgatcggccatgtcgatcggggcgcgcagcagaaaccgcgcctgccgatcggcagcttccgccatgaggagcgctatcagcgcgaaaccctgccggacgctatcaaggcctataaccagacgctgagcgactactggcagcagaccggccgcgcggacggcgacgactggagccgcaacaccgccagctattaccagcatatctatttcccgaatgtgcttccggccattcagcaacaaggctttaaactggacaaataa

SEQ ID NO: 456725 - DNA, 1164 bp, Serratia marcescens
atgcaaaactttattctccataccccaaccaaaattctgttcggtaaagatcaaattgccgaactgggccaacaaattccggccgacgcccgcattctgattacctacggcggcggcagcgtgaaaaaaaacggcgttctggatcaggtgcacgccgcgctgcaggggcgcagcgtcagcgagttcggcggcattgagccgaacccgacctttgaaacgctgatgaaggcggtcgacgtggtgcgcgccgagaagattgacttcctgctggcggtcggcggcggttccgtggtggacggcaccaaatttatcgccgccgcggcggactacagcgcctccccggacgcctggcacatcatgcagaccgtaggcagtgaaatcacccgcgcggtgccgatgggctgcgtactgaccctgccggccaccggttcggaatccaacagcggcgcggtgatcacccgtaaaagcagcggcgacaagcagcacttcttctcgccgctggtacagccgcagtttgccgtgctggatccgcaggtcacctattcgctgccgccgcgccagatcgccaacggcgtggtggacgcctttgtgcacacgctggagcagtatctgacctacccggtcgatgctaaagtgcaggaccgcttcgccgaaggcctgctgctgacgctgctggaagacggcccgcgcgcgctggcggaaccggaaaattatgcggtgcgcgccaacgtgatgtggagcgccaccatggcattgaacggcctgatcggcgccggcgtgccgcaggactgggcgacccatatgctcggccacgagctgacggcgatgcacggcctggatcatgcgcagacgctggcgatcgttctgccgtcgctgctgcgggagaaaaaggcgcaaaaacgcgacaaactgctgcagtacgccgagcgcgtctggggactacgcgacggtgatgacgatcagcgcatcgacgccgccattgccgccaccgccgagttcttcgaaaaaatgggcgtgccgacccggatggccgactaccagctcgacggcagcagcatccccgcgctgctggaaaagctgcgtgagcacggcatgaccgcgctgggcgagcatcaggacatcacgctcgaggtcagcgagcgcatctatcaggcagcgcgttaa

SEQ ID NO: 456726 - DNA, 822 bp, Serratia marcescens
atgacaacgcaacccatcatcaaactccacgacggtaatctgatgccgcagttgggtctcggcgtttggcaggcgagcattgaagagacagccaatgccgtggcgaaagccctggaggttggttatcgctccattgataccgctgctatttacaaaaacgaggaaggcgtcggcagtgcgctgcagtcagcctcggtaccgcgcagtgaactgtttgtcaccactaaactgtgggatgacgatcagggtgacccgcaggccgcgttggagaccagcctgaaaaaactggggctggactatgtcgatctgtacctgatccactggccgcggccggcgcaggatcagtatgtcgacgcctggcgcagcctgatcaagctgcgcgaacagggcctgacgaagagcatcggcgtctgtaacttcaatatcccgcacctgcagcgcctgcaggatgaaaccggcgtcacgccggtgatcaaccaggtcgagctgcatccgctgctgcagcagcgccagctgcacgcctggaacgccatgcatcacatcgccaccgaatcctggagcccgctggcgcagggcggcgaaggcgtgttcgaccaggcggtgatcaagcatctggcggaaaaatatgagaaaaccccggcgcagatcgtggtgcgctggcacctggataacggcctggtggtgattccgaaatccgtcacgccgtcgcgcatccgcgaaaactttgcggtgttcgactttaagctggataaggatgagctgggccagattgccaaactggacagcggcaagcgtctggggccggatcccgccgcccgctga

SEQ ID NO: 456727 - DNA, 603 bp, Serratia marcescens
atgaaattttcgatcgccgcctgctcgcgcctggccatcccgctggcgctactgatcctcgccggctgttccagcaagcacaaatccgtcagctacgaccgccacagctttgatagcgccatcgccgacgccgccgacgagtatgacgtcgacgccaaactgatcgccgcgatgattcaggtagagtccggctttaacccggcggcggtcagccgctccaacgccgtcggcctgatgcagctgaaggcttccaccgccggctgcgacgcctaccagtttaaggggaaaagcggctgcccggacgatgatgacctgctcgacccgcagaccaatatcgatctgggcgccgcctatctggcttcgctgcagcggcagctgcgggggattgataacccggtgacgctgcgctacgccaccgaagtggcctacgtaaacggcgccggcgcgctgctgcgcaccttttccgccaaccgtcgtcaggcggtcagcatgattaacagcctgtctcccgaggcgttctggtggcacgtgcgccagcatcatccgtcggcgcaggcgccgcgctacctggcgaaggtggaagcggcctacgcccggctgtaa

SEQ ID NO: 456728 - DNA, 2178 bp, Serratia marcescens
atgagcaccaccagcctgatccaaccggatcgcgaactgttttcctataagccttactgggccgaatgttacggcaccgcgccgtttttgccgatgtcgcgcgaagagatggatcaactgggctgggacagctgcgatgtaattattgtcagcggcgacgcttacgtcgaccaccccagcttcggcatggcgattatcggccgcatgctggaagcgcaggggttccgcgtcggcattattgcccagccggactggagcaataaagacgactttatgcgtcttggcaaaccgaacctgtttttcggcattaccgccggcaatatggattcgatgatcaaccgctataccgccgaccgtaaactgcgtcacgatgacgcctacacgccgggcaacgtcggcggcaagcgtcccgatcgcgccacgctggtgtatacccagcgctgtaaggaagcctataaggacgtgccgatcgtactcggcggcatcgaggccagcctgcgccgcatcgcccactatgattactggtcggataccgtgcgccgctcggtgttggtggattccaaggccgatatgctgatctacggcaacggtgagcgtccgctggtggaggtggcgcaccgcctggccgccggcgagcagatcgccgatatccatgatatccgcaacaccgcggtgatgcgcaaggcgccgctgccgggctggagcggggtggattccacccgtctggataagccggggcgcattgagccgatccccaacccttacggcgaagacctgccctgcaccgacggcgcccagccggcgccggaagccaagccggttaccgtgcgcgccgccaagccgaagccgtgggaaaaaacctatgtgctgctgccgtcctttgagaaggtcaaggcggataaagtgctgtacgcccacgcttcgcgcattttgcaccatgaaaccaacccgggctgcgcccgcgccctgatgcagaagcacggcgaccgctacgtgtggatcaacccgccggcgatcccgctgaaaaccgaagagatggacagcgtgttcgcgctgccgtaccagcgggtgccgcacccgtcctacggcgaggcgcgcattccggcttacgatatgatccgtttctcggtcaatatcatgcgcggctgctacggcggctgttcgttctgctcgatcaccgagcacgaagggcgcattatccagagccgttccgaagattcgatcattcgcgaaattgaagaaattcgcgacaaggtgccgggctttaccggcgtgatctccgatctgggcggcccgaccgccaatatgtatatgctgcgctgcaccaacccgcgcgccgagcagacctgccgccgcgcctcctgcgtgtatccggaaatctgcacctatatggataccaaccacgagccgaccattaagctgtaccgccgcgcgcgtgaattggcaggggtgaagaagatcctgatcgcctccggggtgcgttacgatctggcggtggaagatccgcgctatatcaaagagctggccagccaccacgtgggcggctatctgaagattgcgccggagcataccgaaagcgggccgctgtcgaagatgatgaagccgggcatgggcagctacgatcgtttcaaacagctgttcgaccactactccaagcaggccggcaaagagcagtacctgatcccgtactttatctcctcgcatcccggcacgcaggacgaggatatggtcaatctggcgctgtggctgaagaaaaaccgcttccgtctcgatcaggtgcagaacttctatccgtcgccgatggcgaactccaccaccatgtattacagcggtaagaacccgctgggcaaggtgggctataagtcggaagaggtgtttatcccgcgcggcgatcgccagcgccgcctgcacaaggctctgctgcgctatcacgatccggccaactggccgctgatccgcggcgcgctggaagagatgggcctgaagcacctgatcggcagccgccgcgactgtctggtgccggcgccgagcattgacgagcagcgcgagagcaaacgcctgcagcgccgtacgcgtccggcgctgaccaagcacagcgatattcagcgccagcgctcaccgtccaataagccgccgcgcaagccgatccgcagcgctggcgccaaaggcaaggcgtaa

SEQ ID NO: 456729 - DNA, 735 bp, Serratia marcescens
atgagtgattttaatgtgtggctgcgtcagcagctggcgcaggcggttgccgcaccgcgctatatgcagttggcggccacgctggagacggcgatcaaacagcgggtgctggccgccggcgattttctgccgcctgaacgcgtgctggccgaacagctggcggtgtcgcgggtgaccgtcagcaaggcattgaaattgttggaagagaaggcgctgatttcacgccagcagggcgtaggcacccgggtggcggtatatatggattattcgctgtcgcaggagcagggctttaccgctcaggtgacgcgcagcggcggcgccgccagcaatcagtggctgctgcgtacccgcgtaacgccgccgccggagattgcgcaggcgttaaatctggccgagcatgagccggcggtgaagctgcgccgtctgcggctggtggacggcaacccggtctcgctggaaaccacttacatcccgccgcgttttctgcccgaccccgagcggctggagcattcgctctacgcgctgtggcgcgagcgcggcatcgtaccggaagggaagcacttcctgctgaaggcgatcgcctgcagcgatgacatcgccgggctgcttaacgttgccagcggcgcgccgctgctgcaggtgacgcagaccagccgcaatgcgcagggcgaggtgctggaggtcagcgaagttctgtgccgcagcgacgtgtacgagtttgaagtcagcagctag

SEQ ID NO: 456730 - DNA, 948 bp, Serratia marcescens
atgacaataagaaaaaatcctcacctcgccattcttggcgcgctgtatggccaagctgccggcgatgcgatggggatgccgtcggaactgtggccgctacggcaggtacgcgattattttggttggatcgatcgctttctgccaggcccggatgagaatattgccgcgacgggttttgtcgccggcgaatacaccgacgacacgcagcaggcagtagcgctgatggaggcgctactcgccgctcacggcaaggttgaacccgaacgcatcgcccaccacatcatgctgtgggcagaacaggtcgacgccttcaataaaaacattctcggccccacctccaaagccgcgctgtacgccatccgcgccggcaaacccatcgcggaaatcaccgccaacggcgtaaccaacggcgccgccatgcgcatcgcaccgctgggatgtctgttatccaccaatgatttaggctactttatggatgccgtgcgtctggcctgtagcccgacgcataaatctgatatcgccgtggccggcgccttcgcgattgcctgggcggtcagccgcgccatcgacggcgacgactggcgcgcgattaaacaggcgctgccgccgcgggtggaacagatgcagcaacagcagatcaccaccttcagcccgtcgctgagccgccgcattcaatgggcgctggacgtggcagaacgcgtgcgcccgctgacggacagcgaggcgctggccgagctttaccacaccgtcggcgccggcatggacaccattgagtccatcccctgcgcgctggcgctggtcgagctggcggacggcgatccggtgcgttgtgcgctgctggccgccaaccttggcggcgataccgacaccatcggcgcgatggcgacggcaatctgcggcgcgctgcgcggcattgaagcatttccggcgcaatggattgaacactga

SEQ ID NO: 456731 - DNA, 1398 bp, Serratia marcescens
atgagtgacataaaccgcagtgaaacatggaaagttgaaagcaccggcatcgatctggtgcccgaggcggaacaaaccggtaagcccatcgagctgttttgggtatggtcagcggccaatatcggcatcctcggcgtggtttacggcgcgctgatcgtcggcttcggcctgtcgtttatccagtcggtgcttgccgcgctggtcggcgtcgccagctttgcgctggtcggctataccagctttgccggcaaacgcggccgcacctcgacgctgacgctgtcgcgggtcatcttcggcctaaaaggcaatatcgcccccaccgccttcagctggatcaacctgatgggctgggaggcggtgaacgtcattaccggcacgctgacgctggcggcgctgttccaggcgatggggctggcggaaagcccgctgctgaccggcgtcagcctgctgctgttcggcggcctgaccatcgtcgtcagcctgctcggacaaaacaccgtggtctggctgcagacctggttcagccgcatcttcggcagcatgacgctggtcgtggtgctgtatatcgccttcaccaccgaatggcagcgcgtgctggcgctgcccgccggcagctggctgaccggattcctgccggcggtatcgatcatcgccgccggcaccggcatcggctgggcgattgccggcgcggactacagccgctaccaaagcccgcaaagctcgaataaaagcatcttcgccgcggtgatgagcggcgcctgcctgccgctggtgctgctgatgtttaccggcattctgctgtcggtacagctgcccgatctggcctcttcggccaacccgatcgccctgattggctcggtgctaccgacttggatggcgatcccctatctgctgacggcgaccgccggtatcgtcaccattgcggtgctgagcctttactccgccagccttaacctgctgaccatcggcgtcaaggtcaaacagtcgctggcggtatcgctggatgcgctgctggtgctggccatcgccctctatgtgctgttcgtctccggcgattttatggggccgtttatcgccttcctggtgttctgcggcgtgtttctggccgcctgggaagcgatattcatcctcgactacctgcgcctgcgccgccatcatggttacgacggcaacgcgctgtacggcctgaacggccagaatcgcggcgtgcgtacggtgccgctgtgctgctggttcctcggcgccctcagcgggctgatggtcaccaaaagcggctttatcgacgggccgctggccaaaggcctgttcgcggattccagcctcgggctgtttgtttccttcctggttagccttatcgcctacggcctgtttctggccgcgggcggagaacgtaagtaa

SEQ ID NO: 456732 - DNA, 933 bp, Serratia marcescens
atgagtgaattttctgcagtcacgccggtgctggtgctgggcggcgccgtcggcgatctggttatgacgctgccgcgcctgcccgtcagcggcgaagatattgaagcccggccgcaggggcggcagattggcggctgcgcctttaacgtcgcccgcgtgctgtgccggctgggcgtgccggtggtgaacggtatgccggtcggcaacggcgaatggggcgtcgccgtagaggcggcgatgcaggcgctgggattgccggtgctgctgcggcacggacagatggataacggctggtgtctggcgctggccgagccgaacggcgaaagaacctttatcaccgtcagcggctgtgaagcgcagtggaacaaggcgcagctggcgaccctgccgctgacgccggagacgctggtttacgctaacggctatgagctggtgggcgagccgggcgccgcgctgcgcgaatggctgacccgcctgccgtttgaccagtaccggctgatcgatcccggcccgcgcgtcggcctgctcggcgaggagttctttgccatgctgagcgacagccataccctgctgacgctcaaccgcgacgaggtcgccaccctgtgcggcgacggtgatccggtcgaggcggcgcagcgctacgccgccgcccgcaattttaccctgatttgccgcctcgacagcgacggcgcctggatctgcgacggcaagcacccgccgcagcatatcgccgcctatccggtggaggtggtggatacgatcggcgccggcgacgcccactgcgccggcctgttggccgccctttccgccggctggccgctgccgcaggccgttgacctggccaaccgcgtcgccgcctgcgtggtggccagccgcggcgccgacgccgcgccggactgggcgcagctgcgccagcgcttcccggaggcataa

SEQ ID NO: 456733 - DNA, 210 bp, Serratia marcescens
atggctaaagcacattctacacccaaaaaccattcaaccaaaaccccgaccacaacacgcacctacacggttggttatcagaccggtcaacgagataatactacgccggccattcatcttaagggtaagtggctcagtgaagctgattttgataccgatgcttcgttagttattcgtattatggaggggggtttagtgatacaccactga

SEQ ID NO: 456734 - DNA, 546 bp, Serratia marcescens
atgagtaatcaactgaataaaacaagtaaattcttaagctatgttttaaggcatcaaccagaggctattgggatcacattagattctgatggttggattgatattgatggactaattatacaagctaatcaacatggtgaatccctaacgagggaactgatcgaacaagttgttaaaaaaaatgataaaaaacgttttacgctttcagatgatggcctaaaaattcgtgcagcacaggggcattcaactagacaagttgaagttaaccatgcagaacaggtaccaccagattttttatatcacggcacagcaactcgttttattgattcaattaaagaacaaggattagtggccggcgctcgccattatgtccatttatccgctgatgagcggacggctatttcagtagggcggcgacacggcaaacccgttgcacttaaaataaaagccctgttaatgtctcaacaaggctttaagttctacttagcagataatggggtttggttaactaaacaagtcccttttcattttttaataattgagtaa

SEQ ID NO: 456735 - DNA, 780 bp, Serratia marcescens
gtgtcaacaacatcggattatgatgcactgattgttaaacgcgttctcgatcgcgtggctgaaggggagagtgtgccccatagtcacccgcgggggcagtttgtattagtcaaacacggcgtgctgtatggacatgcgtcggaacagcattggctgatgaagtcaggcatggcggtatggataccgcctgatacgctgcattgggggctggcttataatcgtgtggatctcacggttttatacatttcacctgagctgtgccgctcgtttacctcctcgattaaattgatcgatgcctcttttctgatctctgcgctgtgtgaacgaatggcggatgtcgccaggccgttgtctgcaatacggcgtaataacatgctgcagatgctgtttgaggaggttgaagaaagccccacgagcaccttaaccctacctttgccgcaagatagccggttgaaaaaagtcaccgctagcctgattgataatccggctcagcatcacagcctggccgaatggggacggcaagttggcgcgacggaacgcacgctggcgcgtttattccgcaaggacaccgggctatgttacaccgaatggcacaaccgcctgttactggccgttgcctggcaagggttggcgagcggggcatcaaacgagcagctggccgttatgctgggattttcatccggcgattcttttggtcattggtttcgccgggtggccggtagttgcccagggaaaattcgtaaatgcctgcagaattaccgcctgaatgaggggaagtga

SEQ ID NO: 456736 - DNA, 1362 bp, Serratia marcescens
atgaaagaaaatgtgttagcggcgccggtagcgacgcagaagacgctgggcgtgatggcgataatgattgctctgtttctggcggcggtcgacagcaccattgtcagcacggtgctgccggatattcgtcatgaacttggccagccgactctctacccatgggttatgtccgcgttcctgttaccggtggcgctggtcgcgccattggcgggcgcctgtggtgacaaactgggcgtctccacgacgctgaaggcatgcctgttactgtttcttgctgcttctgttgctgcggctgtcagccacagcatgccgatgttaattgtggcgcgtgcgctacagggagccggggccggcggcattattgttctctcgtattcgctgctggcagcgctgttcgatgctgaaagacgcgggaaaatgcagggcatgctgagcggcgtgtgggggctttcggccattctgggaccgcttgttggcagcgtattggccggtacgctcggctggcgcaccattttctggttcaacattcccgtgggggcgttagcgctgctgttgctgttcgtcactccgtcggttggcaaggggacaggcaggcagcgtctcgacttactggcccagctgttactggtcgttctgacctgcagcctgctgttactgctgagtcagccggcagggctgaagggggagcagcatagcctgtgggcgttgatgctggcggcattgctgctgttaacgatccgcgtgcgccgacggccggaaagcagtcctataccgttacaatttctccagagcggttccctgttttccattattattttagtgctgctttcaagcgccgggctgtatgcgtcggtcacgttattaccgctggtgctcagccagcaggccggtacgctggcgtcaagcggcgtgttgattatgctggcggctctcggttgggtggcgggcgcagcattttgcggtagcaaactggccggcgtcggctatctgcgcatggcgttggtcggcatgctgatgctgtctggcggggcattcctgatggtccctgcggtgggacatcatgttatgtcgatgattgccgccgctttgttgttaatcggccttggcatgggctttaccgcgactacgacgctggtgtttacacagaacagcgcaccgcccgaacggctgggttcctggacggcaaccgtacagtttttacgtaacctgggagcggcgttggggatcaatgcgctggcaacggtgcagcttcgtctgggcggggccgaggcattccaggtctgttttattatcctcgggctgagtatgctggtggggctatgctttacgctactcttgccccgagcctatccggccagataa

SEQ ID NO: 456737 - DNA, 627 bp, Serratia marcescens
gtgtggtcggaacaatgcggggtctggggcgagccgggggtggtgcatgcagaccgggtggccaacccgttgcgcttccaggggcagtactttgatgcggaaacggggctgcactataaccgctaccgctactacgatccgcagatcgggagctatatcagtcaggatccaatagggctggctgggggggttaacccctatgcttacgtcaataatccagtcgtttggatcgacccaattggtttagctgggtgtgcgagtgttgatgcggatggcgttttaagtattaaaaataaattcgagcttggctccccagaagatttggcattgcgcaagcacgtcgctgattggaatacgcagattgaaataaacggagggtcaatgacaaggcaggcagtaacgcctgaaatgcgagctttggcgactgacgctgcgaataatgcgaaaaaagcaaatccaggatcatatcctaaaggtgtttctcctggacatactccagatgttggttggggaggcgctattgaaggaccaataattccccttaactctagggtaaatagctatataggcggtgcaacacaggctgttccagtagggactacatattccaaagttgttcttgtttaa

SEQ ID NO: 456738 - DNA, 528 bp, Serratia marcescens
atgataaaggaaaatattgaatctgtaattgttaaaagaaaatctttcagtagtcacgctgagttttcgccaaaccaccctgatctatcatttcagggaaatatacctaccttagaaaagggagtgtatcgggaagctagcccgatgctaatggaacgatttaaatattatgggcgatgggaaagtgcaacgcatggtaattggttaagtatcagtgatatgcaagaaatttggagtgatgatatacaagatgattttattgatttagttaagtttcaggcggattgtctaaaaacagactggccgaaccatgcttttggtttatttaaagataatcgactttctttattttctggtagtgatgtaggaaatgagtcaattttcttgttatggctagatgatgaagtcgagcctgagttatgggtttatgattctaacggggaatccagatataaaaatctgaatgaatatcttttagcatacttacaagatgatttaagcgcatctacacgctcatggcgagcttag

SEQ ID NO: 456739 - DNA, 603 bp, Serratia marcescens
gtgctactgactaaacaggaagatacttctatagtccagtacacggtgttgctgaccgacgtgcagggcgagccgggggtggtgcatgcagagcaggtggccaacccgttgcgcttccaggggcagtactttgatgcggaaacggggctgcactataaccgttactgctactacgatccgcagaccgggagctatttcagtcaggacccgattgggttagaaggtgggataaacctctatgcctattcgccgaatccgctgggttggatcgaccctcttggtctaagttgttctcctacatttaaccctcaaaagaaatttaaatataaagagggagagatgtcagttatgaagcatattttaagtgggcatgctaaagatgcactccaggaaagtacaagtaaattcttaacaaaaagtccaaagaaaataactaaatatatcaatgaggctttagaaaaagggactttatcttctaatggtaaagagttgatttataaattttccagagatataggaaaaaaccttgatggcaagacaacaaaaacaataaaactatttattgactcaaaaggttgggtaagaacagcatttcctttatga

SEQ ID NO: 456740 - DNA, 942 bp, Serratia marcescens
atgccagctgccgccagcggttctcgcactgcgtcagctgcccgtccgccgcatagcggtagcgcgtcagcagcgtgtcgccgctgcgtttttcctgcagccgtcccgcccggtcgtaggcgtacgtcagcgtcccccccagcgcatcggtgcgctgcagcaggctgccgcccgcatcccagcggtaaccggtcgcctgcccccagtagtcacgctcctccgtcacccgccccagcgcgtcgcgctgcagccgccacgcctgccccagcgggttcaccaccgccgtcaactggtcttcggtatcatactggtacgccacccgctcgccgtccgccgtccggcactccgtcaccatcccggtgccgttatagcgcagccgcgtctcacgtcccgcctcatcccggtagcacagcggctgatcttcccgatcgtagtcgatcgccacctgcgcctccgtggcggacagctgcgccgtcagccgatccttcgcatcatactcatagcgggtctgctgccccagcgcatcggttttcaaccgcaggttgccgcgcacgtcaaagcgtaactgcagcgtcccgctctggttgctggtcacccgccgcggaaagccgtagcggtcatattccagcgtctgccgttcgccgtcggcccccagatactcctccggctgccccgtcgcatcatagcgataacgccgggtcaccccggtcggatcgctctgcgacagcaggttgccccgcgcatcgtacgccatccgccactgtgcgccgttctcgtctatcaccgtctccggctgcgccagcgcgttatattccaggctcagccggctgccgtccggcccgatctccgccgcgatttgcccctgcggttcgtactcccactggtagcgtcgcccgtccggctgcgtcacgctcagcggccgcccgaggtcgtcataggtaa

SEQ ID NO: 456741 - DNA, 756 bp, Serratia marcescens
atgaagttgggagtaggtgattctttcctgacccgattggaaataccgatggattcggttgttcctattatgctttactttataactaaagatttaattcttggccggggtggtacaacaacgaaatttgttttcatcctgctgataatctcccttgcattaactttgtcacgtgctttctgggctcagggtgtattattcattggtttggcaattttacttgaggcgagtttctcaaagatagttaaaatatcagtgctatcaataatattcatcggtattcttctgttctttacgcctttaggtgatgtggtatatacacttatagattctcgtttaaataatcagagtataaatgcagcgtcagaccaggaacgtacattccagaaccgagctttacttgatgctatatctacacaccccttattagggcatggtatggggtactttattcccaatgcattgaggtcgacaactacgccatatttgtatgaaacgcagacactttcaattgtaatggacttcggaattattggtgcaagcgtactgttctttcttttcttgtatggatgtattactaatgcgttgaatgtcaatggtgtgaaaagtgtaaaaaatctatttatgcctttggtctgtttcactatctggttactttcaggctcgcttaatccatttttattcggcgcgtctggcggtattattattttcttgtttacaaggttccattttgttgatgacttccatagagattaa

SEQ ID NO: 456742 - DNA, 516 bp, Serratia marcescens
atggggaattattttgtggaggaaccattggagttactattttccaatggcatatttagtgggatatcagagaaaataaatgcgccttatattttagttagtgacttaaccgacgcttttaaaatggcatttgaccaaaacccacctgcaggatttaaagtatgggctgatgtgatagaaaatcatagaaaagaaatgagaaataaaaataaattttctgaggcagacgagttcgtgtcaaacttcttagagaaaaatcatgagaagcataaaaaaaacacattatcttacaggaagatgaaaataaataaaacaaacacagcatatgatgattttatattttcagacgctcgagaagatgctattttttctttaagcacagtatcaatcagtagatatttaggagaaaaaaacgaattgatggagtgggtttttgaaatatataaaaagggaggttgggtttgcggcatgacaaataaaaaattagcggtatttaatcctgatgtactaaaatag

SEQ ID NO: 456743 - DNA, 357 bp, Serratia marcescens
atggtgggcggcccgccgacggtcacctggctggggatcgccaggttgatagtcagcggcatcgtcagcgacagcggcttgggctcggcggcgcgcttcgggcggaacggcggcatcatgccgagcatgttgcagctcagcaccggcatggtgatacgggcaaatggttcgccatccgcccgcaccgtgcggctgcccataaacagctcgtcatcccccaactgcgggccgcccggcgcgcgcagcggcggcagccacacgccgccgatcgggatatgtactgacatgccgccggtgccggcgctggcgcgtttagcgccattcacccctaccgtggtgccgataaacggaatgtag

SEQ ID NO: 456744 - DNA, 1194 bp, Serratia marcescens
atgaaacagcaaaataataaatcattaaaaatagaaaaccactattcatccatgctagatgttaaatcagcagataacacacgcgcacgcaaacatatgcttacccacacagaatcatataacttaacaaacaccaataaatcactaaaaaacataagaaaagaaagaaacaaaaaagaacatggtgattatggcatgggtataaccataagtgccgcaataattattaaaaacgaagagcgttgcatcgctcgttgtattgatagcctactaccactatttgatgaagttgtaattcttgatactggctccacagacaacacaatcagaataataagagattacaaagacgaaaaaataaaaatatttttttcaaactgggaggataatttcgcaaaagcaagaaatgaagcaatgaaaaagtgcaattgcaaatatatatttttcatcgatgctgacgaatacatttcatccgacatcacagagttcacatgtgaacttaaaagaatagagctaagaaggaagggaaataaaaaaataatagataaggaaattaaaataaccatacagcacgatggatataaaaaagaaataataaaatcaaaagacaagcaaaaaagaaatgaaaatttaaatttaaaaaacttagatgccgaacccaaaaaccttaggtggatattcttccacttccgggactcatttgaaaatctccccccgaaaaaaatataccaatcactttatagtgaaatagtaatagacaaaaaaaacaaaataagcacaaagaatataagaaatgatctttacacattcggaatactagacttaatggcaagagcaaagttaaaatcaatgtgcggggattcagattttcacaatataataaatattatgagcgaattgatccctttcaatagcaattcattttactacgaattgatttatgatatttttaaatggaagatcaaggcaaaaaaaagaataaatgatattttttctttcaaaaagaatagaaagcaataccatgatggaatgataaattcagagggactgcatattgatgcagccctatcattttacctttatgaagttgggttattaactcaggcaaaagaattattggaaagcgttcaaaggagtgggttttcatctgaattaactcacctatattctctaaatgcaaaacatcaggaataa

SEQ ID NO: 456745 - DNA, 525 bp, Serratia marcescens
gtgaactacgggctgcagtcggaccgtgcgacggcgaaatacagcgcgcgcaccgagcagctgttcgcggaggcgggctacagcgtgcagagtgagtgggtgaacctggagccgttcgccaacctggcgtacatcaacttccggaacaacggcatcagcgagtcgggtggcgcagcggcgctgcacggcgacaagcagcatacggacgccacggtgtcgacgctggggctgcgtgcggaccaccagtggcagctgagccgtgaaacggcggtgacgctgcgcggtgaggcgggctggcagcatcagtacggcgagctggagcgcggcacggggctgaagttccgcggcggcaacgcggcgttcgtcagcaacagcgtgccggtctcgcgtgacggcctgctgctgaaggccagcgcggacgtggcggtgagccagaacgcgtcagtgtcgctgggctacggcggcctgctgtcggatcgccatcaggacaacagcgtcaacgccggcttcacctggcgcttctga

SEQ ID NO: 456746 - DNA, 582 bp, Serratia marcescens; identical to SEQ ID NO: 456362

SEQ ID NO: 456747 - DNA, 900 bp, Serratia marcescens; identical to SEQ ID NO: 456363

SEQ ID NO: 456748 - DNA, 3084 bp, Serratia marcescens
atgtctcagttttttattgagcggccgatctttgcctgggttatagcgttatttattattttcagcggtattctggcgatccctaaactcccggtggctcaatatccggctgtggctccgcctaccgtgtcgatatccgtcagttatcccggcgccacgccggaagcgatgaacacatcggttgtctctctgcttgagcgtgaaatttcaggcgttgataacctgctgtattttgagtcaaccagcgatacttccggttcggcctccattacggtgacgtttaagcctggtaccgatatcaaactcgcccaaatggatattcagaaccaaatcaaagtggttgaaccgcgccttccgcaagccgtgcggcagaatggcgtgagcgtagaagcggcaaattcaggttttctgatgatggtgggattgaaatcaccttccgggacctatcaggaagctgatttgagcgattattttgcccgccatgtgagtgatgagctacgtcgtgttcctggcgtcggtaaagtccagttatttggtgcggaaaaagccatccgcatctggctggacccgctgaagatgtacacgtttaagctgtcagttaatgaggtgatcgctgcgctcagccaacaaaacgttctggtttcaccgggccgtattggtgatgaacctgcggcatccggccagcgggtaacttatccgcttatagtgaaaggtcagctcgcttcgataaaggagttccgcaatattaccattagagccgaaaccagcggcgctcgcttaaagctggcagatattgcccgggtggagtccggcctgcaaagctatgcctttgcgatacgtgaaaatggtttgtccgcgacagcggcggcgatccaactcgctccgggggcgaatgccatcagtacggcagccggcattcgcgcgcggcttgcggaactttctgctaacttgccggcagggatggtgttctcggtcccctttgatacggccccctttgtcaaactgtcgattgataaagtcatccacacctttatcgaagcgatggttctggtttttctggtgatgctgctgttcctgcataagatccgctgtactctgatccctgccattgtggcgcccgtggcattattgggtacgttcaccatcatgctgctatgcggtttttctatcaacgttctgaccatgtttggcatggtgttagctatcggcatcattgtagatgatgcgatcgtcgtggtggaaaacgtcgaacggctgatggaagagaaaagattgacgccccgcgaggccactagtgaggcgatgaccgaaatgacccccgccattatcggcattactctggtgttaaccgccgtatttatccctatgggtttcgccagtggatcggtcggtgttatctatcgccagtttgcgctctctatggccgtatcaattctgttttcggcttttttggcgctgacgctgaccccggcgctcagcgcgtctttactaaagccgcatacccaacaaaatggcggtaaaaaaggtttttcgggttggtttaatcgtcatttcactgccttatcagtccattatgaatctgggctgcgatacgtactaaagcgtactggaaggatgctgctgttgtatgccgctctttgcggtttactgttgtttgccctgaaaaacctcccttcatcatttttgccgaatgaagaccaaggctacttcatgtcctctattcagctgccatctgatgccacgatggagcggacgctcgaagtcgtgcggcgctttgaggatgtcatcgggacgcgtaaggccgtcgagagcaatgtcatgatcctcgggtttggtttttcagggtcgggtcccaacaccgccatggcgtttactacattaaaggactggcaatctcgaaacggcgctactgctcagggcgaggctgactttatgcagactgctttgggggaagtctccgacgccactacccagagcctgttacctccggccatcgctgatatggggacgtcatccggctttacgctatatatcgaagaccgggcgggaaaaggttatcctgcgttgcaagcggcaacaaaaaagcttatcgccttggctaacaacagcgcagtgctgacggatgtctacattgacggacttcctcagggggtaagcgtgtctctggatgtggacagggaaaaggccgaagctttcggcgtgtcatttgatgagattaaccaggcgctctcagtctcttctggttcttattatgtcaatgactacacgaacgacggccgcgttcagcaggttatcgtccaggctgacaccgcctacagaatgcagctgactgacttactgaaagtatcggtaaaaaacaaaacgggcggaatggtcccgctttcctcttttgtctcgccgtcctgggtccaggccccacaacaattaaatcgctatcaaggctatcctgcaataagggtgacgggcagtgccgcaccagggcagtcaagcggcaatgccatggcggaaatggatcgccttacgagtgaattacctcagggattcagagccgagtgggcgggcagctcgctgcaggaaagagaatcagcgtctcaacttccggcgcttattttgttatccatcctggtggtgtttatggtgctggcggcactctatgaaagctggtcaatcccctttgcggtaatattagtcgttccattggggctggcgggcgccgtatgtgcggtaatgattgctgatatgtcgaatgacgtctttttccgggtgggcatgataactatcattgggctttcgacaaaaaacgccatattgattattgaattcgcccggcaattacgtttacaggggatggatactgtcgccgcgaccctgcaggcggccagacaacggttacggccaattatgatgacgtcgctggcctttacactgggcgtagtccccttgatgctcgccagcggcgccagtgataggactcagcatgccattggaacaggggtttttggcggcatgataagtgggaccttattagcaatattttttgtgcccgtattttttgttttagtcatgcggatgtataaaaaataa

SEQ ID NO: 456749 - DNA, 531 bp, Serratia marcescens
atgtccggacttattaaccatgaaaaagcgtttatctcactgttcaatgagacggcgcggtatcaccggcgcgccaaggtgtttgaggacttcgtcagctgcagcgtgatcgcgctggagaaccgtctttgcttcaatcaaaagcgggaagacaagtacctgcagatcgtcaaaggttatgagaaaacggacgtcagccgcatggcgcagctgcttgtcctggtgtcgacgagcatgatggatcaattcaatgacttcctgggaagggtcttcatgcagctggatcggggagacaaataccgcggccagtttttcacgccctgggacgtttgcaggatgatggcgcagatgtctctgggcgatgttgacaccgctttccaggataaaccgttcattactcttgccgagccggcgtgcggtgcaggctgtatggtactggtctacgccgatgagcttaatagcgtggtgggagcgaagatgcaaaatgcgacatttagaggcttacctgaaaaatggaatgtcccgcactaa

SEQ ID NO: 456750 - DNA, 420 bp, Serratia marcescens
atgctgatgttgatccccacgcgtctggcgacagagctgaacggggccggcggcgcgctgctgcgtgatgtgccggcaacggttgacctgtacgggcgtcagtatggcgttgaatggccgtgtggccacaacgtcggttgcgtgcgtgacagcatcaatgttctgacggtgcattttgattctccgtggtacgcgccggcaggcgaagttattggggagctgtcaaagcagtttagctgccaggttgaacactgctggcatatgttcgacgccggccgcagcggttacgaccgttacgaccatggtgaacatgttgatggcggccgaatggagccggaagtcctgggcggtgaggtgatccagtttacctatgccgacaaggactccttgccgttaccagccaacgccgtagcgagttaa

SEQ ID NO: 456751 - DNA, 1020 bp, Serratia marcescens
atgctgaacgcggccgaggcgcgggatgcgtttaaccagctgtccggcgagcagtatgcgtcggtgcaggcgagcctgcagcagagcggcacgctggtaggcagcgtggtgaaccagcatatgcagacgatgttcgacggcgacagcctgacggtgccgccgctggcgatgagcctggtgcagagcccggagcgcgagcgcaacggggcctggggtcagatgttcggcagctggacgcgcagcaagggcgacggcaacgtcggcaagctggacagcaacaccggcggtttcctggtgggggcagaccgtgagctgagcgacggggtgcgggcgggcgcgtacgcgggctacagccgcacgcgtttcgacgtagatagccgggcgtcgtcgggccacagcaacaactaccatctgggcctgtatggggcgggtcagcgcgatgcgctggcgctgcgcggcggtgtgggctacagctggcaccggatagagagcgagcgcaacgtgggcttcggcggctatcgcgaccgtctgacgggggattacgacggtaatacgttgcaggcgtttacggagctgggctaccggctgcgctatgaagcggcgagcgtggagccgttcgtcaacctgagctacgtgcgtctgcatacggatgcggtgcaagagcagggcggcgcggcggcgctgagcgtgaaggatgaaacgatgaacaccttctactcgacgctggggctgcgcggtgcgacggatatcccggtgtcaggggtagacgtaacgctgcacggcaaactgggctggcagcacgcgtatggcgatacggacacttcggcgcggatggcgttcgccagcggcgacagcttcaccagcaagggtgcgccggtggacaaggacgtggcggtggtgggcgttggtcttgatgtgccgctgacgcgttcaacgcggatcggggtatcctatcaggggcagtatggctctcagcagcaggccaactcggtcaatgcacagctgacggtctcgttctaa

SEQ ID NO: 456752 - DNA, 195 bp, Serratia marcescens
atgaaagaaatcgatgacttaataaataaactatcgtcaacaaaaaagcatgaggtgatgtggcttggtgctgcagacaaagagcaaatatctaggctagaacactatttatccctaaagttacctgaggattttaaatatttcttagaaaaaacggggggggggagttatagaacaagagatatctggcattga

SEQ ID NO: 456753 - DNA, 129 bp, Serratia marcescens
atgtggccatggatttggcatgcttgtgcaatctacggagcttataagttagtgattggtacaatgcattttctaggtcattacatctttatgcttgcagaagaagagcgacataaaaacgagaagtaa

SEQ ID NO: 456754 - DNA, 294 bp, Serratia marcescens
atgcggtacagcgacaggggagcgtcgccgcgcctgaacgatgacgcggcgaaagcgggtaatgcgttcggtgatggcgaattcctgattggacaattcgtgatgctaatgccgttcacggtgataggcgacgatttggtcagccaattgagaggacgtaggcttctctcggttattccccagtccaacgccgacggaagcaaaaagattatcgggtatatttcatcgccatttggtttcctgacggcgacagtatggcgcgaattgccaattggcggggatctgagcggataa

SEQ ID NO: 456755 - DNA, 2154 bp, Serratia marcescens
gtgaataaggggattaagtatggttttttgtttgctctgatgctgccgtttagcgttggggcaacaaacagcttcagtgatgagcaaacgttacagtcgctggatgccatcacccgcagagttgacgatgcgccagcattattattactgacgccagctcaactggaggcaattgattcgcctccggaacagaaaatggcaccgcaaactaaaagtagcaatcagttggataagcgagcggcgaagcaaggtgccgcttcgttacgtgagttgaagtctcagcaagcgaaaatcaaccagcttaatgctgctttggccaggcagaatagagaaataaaaaagctgcgtgaggctgcacaggcggacggtgattcacgtacagaagtcgaacgcttaaaaaaatcgttgcgggaaagcttacagaaaacagaaaacatgcagcagcagctgtcagtgatgaacgcggtgaaaagtaataaacaacaggatagcactaggttgcagcaggcgttggagaagagtcagcagcaaagttcagaattacaaaagcaggttgcggcgttaacggcagctcaggatgagcgcataaaacagcagaaatctatgcaggcgacgttgaatgaaagccggaagcatgctgaagagttggaaaagcggctgacggcattgaccgatcggcgtcaacgcagggataagggaaatgaggtgttgcagagtgctttggatgaaagcaagaaacacatcgcagcgttgcagaaacagcttacgtccctggaatcgcaaggtaaggagaaagaaaaagcggcagcggcgctgcaagcggcgttgaatgaaagcaacaaggggcagagtgaactgcaaaagcaactgaggacattgacggaacagtataacgcgcaaaataaaggcatagcggcgttacaggctgagctggacacgagcaagaagaacggtgcagaactgcaaaagcagcttacgacgctgatagctcaaggcaggacgaaagagaaagacgcggcggcattacaggctgagctggacgcgagcaagaagaacggtgcagaactgcaaaagcagcttacgacgctgatagctcaaggcaggacgaaagagaaagacgcggcggcattacaggctgagctggacacgagcaagaagaacggtgcagaactgcaaaagcagcttacgacgctgatagctcaaggcaagacgaaagagaaagacgcggcggtgttacaggctgagctggacacgagcaagaagaacggtgcagaactgcaaaagcagcttacggcactgatagctcaaggcaagacgaaagagaaagacgcggcggcgttgcaggtcgagctggacacgagcaaaaagcacgcactggcattgaaagaacagctggcaacgttgacggctcagaacaagacgcaagagaaagaccataatgcactacaacaggaattggccaggttaaaaaaagaacatacggtggataaaaatggcgtggctccgccgaaaacggctaatgagatccgcgattatgcgatcggcagttcgttggggaatgatgtcttagcattgctgcaagagaaaatcgcgcagggcattaaaatcaaccaacgtatggcgttttccggcgttcaggatgctttacagggtaagaacaaactggggcaggataagattgctaaggctctgtatgaaactgaagtcgcactgaatgagaaagagaagaagttaaaagcggaaactgagcaacaaggtttgcgttatatcgaacaattcaggaagaagaagggcgtcaagaaatcggcaaccggtttttattatcggattgattaccttggcgcaggaaaaatagacgatgctgatacggttgctgtcgttgtgaaggagagtctgaccagcggtaaagtgattaaggatatggatgtagccggcacctctatttcgcaaccgttgagcagttaccctgccatgtttcgtgatgcgattaagcaattacagaatcatggcacgatgattatggtggtgccgcctgaattagcatatggtgacaaggggctggcaccggacattccgccgggatcaaccatgatttataacatcagaattcttgatgtattgccagctgatagcgcagccggcaataaaaagtag

SEQ ID NO: 456756 - DNA, 276 bp, Serratia marcescens; identical to SEQ ID NO: 456012

SEQ ID NO: 456757 - DNA, 3120 bp, Serratia marcescens
atgctagcgaaattttttatacagcgccctgtcttcgctgctgtcgtcgcgatttgcattatggccctcggctcgctggcattattcactttacccgtggagcaatacccggatattgctcctcccggcgttaacatcaccgctaactaccctggcgcgtcagctaaaaccgttgaagatggcgttactcaggttattgaacagcagatcaaagggatcgatggcctgctctatttctcatcgaacagcagttcagcgggtcaggcgcggattagcctgagttttgcacaggataccgatcccgatattgctcaggttcaggtacaaaatgcggtaaatcaggccttaacgcgcctacctcaggaggttcagcagcaaggtatcaccgtgacaaaatcacagggcgacagtttgatggttgtggctttgtacgatacctcacgaagactcactaacattgacatcaacgattaccttatcagtaacctgcaggatccgcttagcagggtagatggcgttggagaaaccaccgtatttggctcgcaatacgcaatgcgtatctggttggatccttataaattaacccagttcggactcatgccatccgatatacaagccgccattgaagcgcagaacgttcaggttaccagcggtgaaattggctcccagcccacatctgaagaccaatatctgaatgcaaccgttacggttcaatcaagactggaaacgccagaacagtttgaaaatattctgttgcgtacaaacagtgatggctccgtggtatatttacgtgatgtggcacgcgttgaaattggggctgaaaactaccaaaacatcaccacacttaatggttaccccgccgctgggatctccatacaactcgcatcaggcgcaaatgctttggccacagctgaaaatgtccgagcggaaatagaacgactagaaccacagtttccggatggattaattgcagcctaccccagggatagcactccctttgtgcttgcttcaattgatggcgtggttaacaccctgattgaagccattttattggttattgtcgtcatgtatctattcctgcaaaactggagggcgacgttaatcccggcaattacagttcctatcgtaatgctgggaacattcggaattttgagcctgcttggctataacatcaacacgcttacgctttttgccatggtgctggccataggccttttagtggacgatgccatcgtggtggtagaaaatgttgaacgcatcatggtcagtgaaaaatgcagtcctatggaagcaaccatacgctcaatggaagaaatttccagtgcgctgattggtattaccctggtgctttctgcagtttttattccaatgggatttttaggcggttcggtgggtattatttatcggcaattcaccgccactattgtttcctcaatggtactctctgcacttgttgcgctgacactgactccgccactatgcgcgcatctgttaaaaccaggtcatcaatcatcaaaaaaatttttatcatacataaataaaacgctcgaaaaaaaacagtcatcctacctcatttttttgcaacgcggcataacacgtcctgttcgacttgctattttcgcctgtattgtgttgttaataactattgtaatctacagcaaactccctaccagctttttgcctgaggaggatcaagggtcaatcatgattcagtttactctccctacgggttcaccacttacgaaaactcaggcagtgggagatgaaataacaaagtattttctccaacaggaaaagaagaatattaacgttatttttatggttatgggtagaaataatgcaggcagcgggcagaatgtcggcatggctttcgctgagctaaaacattgggatcaacgcagtagtaaagagaacagtgctcagtcaattatttcccgagctaacaaacattttaaacaatattcgcaggcatccattagcatcactgcgccgcccagcattcgtggtctcggtcagtccagcggttttgaagtatggttacaggaccaggatgcgaagggttatgaggcgcttcaaaatgttcagcgtcaggtgcttacacttgcggctgaagatgagaatttaaccgccgttagaataaacagcctggacgaaaaagctcagttacaggtagatatcgacagacaaaaagcgcaggctcagggacttgagcagacagatattaataacacgttatccgctgcgtggggcggtgcgtatatcaacgactttatcgatcgcggccgtgtaaaacgggtttatatgcagagtgatgcacaatggcgtgcaacgcctgagaatatttccgcttggaacgttcggagtagtaacgatgctatggtaccattcaacagcttcagcactatgcgctggacgaccggtccacagatgctgcaaaggttcgatggactctccgccgttcaatttcaaggcaacgcagtagagggagtaagctcgggctccgccatggatgctattgaaaatatactaaataaatttgagggattcggcctacagtggagtggcctttcttatcaggaacaatcaacctcaggacaaacattgtggatttacctcgccaccagtctttttatcttcctgtgtcttgcggcgctttatgagagctggaccattccgctggccgtattattcatcatccctcttgcggtttccggtgctattttcgcaacctggatcacaggattgaataatgatatctattttcaggtcggtatactgaccaccatggggctgtccgcaaaaaatgcgatcctgattgtagaatttgcccaatcacagtatcagagcggcaaagagattgttgacgcaacgctgaaaggtgcgagtctgcgtttaaggcccatcttaatgacatcactggcatttgttgcaggcgtcattcctctggtactctcatcaggggctggggcatcgagtcgacaggagattggtattaccgtgattggtggaatgctttcgggaacttttttaacattgatcttcgttccactcttctttattgctatcaaccgggtagtaaacagagtgattaatgcaaaaatgataaggaaaaatagatga

SEQ ID NO: 456758 - DNA, 783 bp, Serratia marcescens
atgtcaacgagactctttttaagttggtcgggggaacgcagtaagttagtggctgatcttctcgatgagtgggttcagtgtgtgttacaagcttgtgagccatggatgtcaagcaaggatatcgatagaggggctttgtggtttacagaaattgcaagccagctccacacatcaactctcggcgtagtctgtctcacaaaagaaaacaaggaaaagccatggattctattcgaggcaggtgcgttggcaaaggggctttcttctagccgagtctgcgtttttctagttgaccttgacccaacagatgttggaaaccctctagctcaatttaatcatacactcccaaataaagagggtttatatagtttaattcgaacaattaattcatcattgggtgagttgatgttaaaggatcaggtgctggataaagtatttgaaacgtattggccacagtttgagcacgacttcaataagataattgctagtactccagatgcaggtcaagttgctgaacgtacggaaagtgatatccttagtgaggttttacaaactataagatctgttgacaggagagtcagataccttgagaaatccaaaagcaacatatctaactttgtttctttagatggagtggataaagatagtaaaataatcattgattctataaaaaaatcgatttcaaatatgagtagggaggatttaaataattttatcagtaatggctccaaattcaatttgaatattaaatataaaaatgatgatcctgatgaggatgttgagtaa

SEQ ID NO: 456759 - DNA, 300 bp, Serratia marcescens
atgatgggtgaacacgactctgagcaaccgcagcgcagcacccaatatctgtaccgggaagacagctacgagccgctggcccgcatcgaccgtcacgacgacagcagcgaggtgtactggtaccacagcgagctcaacggcctgccggagcgcatgaccgacgcgcaggggaaagtcgtctggcacggccgcttctccgcctggggcgccaccgacgccgaaagcggcaccctcgccacacagcagaacctgcgctatcagggccagtatctggacagggacaaatcagccttaggctga

SEQ ID NO: 456760 - DNA, 300 bp, Serratia marcescens
atggtgggtgaacacaatcccgaccagccgcagcgcagcacccaatatctctaccgggaagacagctacgagccgctggcgcgcgtcgaccgtcacggcgacagcagcgaggtgtactggtaccacagcgagctcaacggcctgccggagcgcatgaccgacgcgcagggtaaagtcgtctggcacggtcgtttctccgcctggggcgccaccgacgccgaaagcggcaccctcaccacacagcagaacctgcgctatcagggccagtatctggacagggacaaatcagccttaggctga

SEQ ID NO: 456761 - DNA, 351 bp, Serratia marcescens
  misc_feature (247)..(256): n is a, c, g, or t
atgaagtttacaggttttttccaaccgaacgagattgtcaacaccgttcgtaagcatagcaaggcattttggggaattgcttcatttactgccgtcatcaatattttaatgttagtgccctcattatacatgctgcaggtttatgatagagcactaccatcaggtaatggcatgacgttactgatgctgactttgattgtcctgttattgtttattctaatgggcttactcgagtatgtgcgtagcnnnnnnnnnntaataatatcgatgcgacactcaatgaccgcatttatacagcggcatttgaagctaatcttagaaataatagtacagacgcaggtcaaatgttga

SEQ ID NO: 456762 - DNA, 279 bp, Serratia marcescens
  misc_feature (263)..(272): n is a, c, g, or t
atgcgaaaccatgatgatatttttgggtatctgataaacaatgatgttttgtatgacatttatagcggcagactggtcaatataaatataaaaactaatattgttaaaggaattctattgagggaaacgatggcaagattgctatcatacctccttaacaacatatggagggatgagatcccttcagaagaactgctctttaacgtatgggataaatatggtttgcagtcatccaatcaaaggttatgtcaggtaataaatgnnnnnnnnnngcattaa

SEQ ID NO: 456763 - DNA, 1200 bp, Serratia marcescens
atgtcaaataaaaatatgtaccggcaggtgctcatactagcaagcgcacaggctatttttcagacggtctctgtactggtcatgactattggcggtcttgcaggtgggcttcttgcgccatcaccaggcctggcaactgctccaattgcagccatgttccttggaacggcctcagccacctttccggcctcaatgtggatggccagagttggacgtaaaaaagggttctgtacaggggctgtggcgggcatagtgggcggagctgttgccggggcaggaattatctcttcatcgtttattctgctctgtatcggcacttttatggttggggtctaccagtcatttgcacagttttaccgttttgcagccagtgaagtcgcaaatgaatcattccggcctcgtgcaatatcgcttgtcatggcaggcggaattgttgccgcgctggctggacctttactggcccggctaggtagcaatattctgacgcctgagtatcttgggtcattcattattcttgctgcgatttcagcagttgctgtgctgattctgtctcgcctgtccatgccggtcagcgttgaaaaaaccgttgagcaggtatcggctcgtccctggcagaaagtcataacccagcctgcctacctgacagctctgtttggtgcagcaaccggctacggcatcatgatactgataatgacggctacgccgctagccatgacccatcactctcattctctgtcggagacatcaactgtaattcagttacacgtactgggtatgttcctgccttcttttttcacggggaaactcatacatcgctttggcagtattcggataatgctgactgggatcgtactgtatgcttgtcacattgctctggctctcacaggtactggcttttactcctttgctggtgcgcttatcttcgttggtctgggttggaacttcctatacataggcggtactgctctagttacaacaacattcagttctgctgaaaaaggtgtggctcaggctgttaacgatatgaccatttttgcggtgggcctagcttgctcattaagtgccgggacactacttgatttgctgggatgggaaaagctgaacgagattctcataccttggcttgcagtttctgcctcagcacttgtctggctcgccttacgtaaccggtatcaggaaggaaaaaaagcgaatgcttag

SEQ ID NO: 456764 - DNA, 456 bp, Serratia marcescens
atgtcccgccgtgaaggtaagcacattttttaccgactgggcgatgggcctgtgagaagcgtcattgccagcctgcgatgctttgccgaatttaataatgaggcggtcagggacattactgcggactaccgcagtaacaaccagtgtctggaagcagtgagcagggaagaattgcttagtcgacttgaggccggtagtgtgaccctgttggatgtacggccggaagatgaatatattgacggtcatttgccgggggcattaaatatcccgctcaaagaacttgaatccagactggctgaattgccgaaagacagtgagatagtggcttactgccgcggtccacactgtattctttcggtggaagctgtggaatatctgcgccgacagggttatcgcattcgtcgtttcgatgaaggttatccggagtggttagcatcgggtcttaaaattgaatag

SEQ ID NO: 456765 - DNA, 225 bp, Serratia marcescens
atggaacagcatccggacctcacgcatctgggcggtcggcgtgacgctcccgcccatcaggcctgcgcacagctgtatcaggcggaaaaccggctgctgctgacggcggatacgcggctgcaggaagaggtgttcggcccggtcgccatcgtgacgacaatggacgacgacgacgcgcagctgctgcaggcgctgtacgatgacattaccgcgctatgccgttaa

SEQ ID NO: 456766 - DNA, 924 bp, Serratia marcescens
atgaaacgcaacctgaacgaccttctttattttgtcactgtcgcccgtgaaagcagttttacccgtgccgcagcacagctgggtgtcactcaacccgccctcagccaggcgatttctgcacttgaagaacgtatgcaaattcgccttctgacgcgaaccacgcgcagcgtatcgccgacgttagcgggagagcgacttctgttcgctataggtagtcgtattgatgaaattgaagccgaactggatattctgaccgaactgcgtgataaaccgggaggaacagtccgcatcacctgcggacccaatgttttgcacagcacgctgctgccaaaactgacaccactactacatgagtatccggatattaatatcgagttcgacgcgaatcatggttttcgcgacattgtggcagaccgctttgacgcaggcgttcgactgggtgacaccattgataaagacatgatagcggtccccattggccccaaactgcgtatggccgcagtggcatctccggattatttttcgaggtatccagtccctggtacaccctatgagctgacgcaacataaatgcataaatcaacggatggtcaggtcaggcgggttatatgtctgggattttgatcaggatggaggaaatcttaacgtgcgtgtcagcgggcagctcatttttaatacatctgagcatattgtcgatgcagcgctagcaggactaggaatagcttttttgccagaagaagagtttgaaactcatattgaagacggcaggctggttcgcgtactggaacaatggtgcaaaccatttcctggctactacttatattatcccagcaggaaacaaccttctccggcattctcactggtccttgaagcgctgcgggtaagtcgaaaacgcaaacctgccagtgagtcactgacattgtag

SEQ ID NO: 456767 - DNA, 1197 bp, Serratia marcescens
atgtccacatcgtcgagagactcatatcttcacaaagagcgcgcgtactggagcggcgtattagcaatgacattatgcgtctttgcgctaattgcttcggaatttatgcctgtcagtctgctaacgcctatatcgggagagttaggtgtcagtgagggactggttggccaggggatcgccatttccggcgtgtttgcggtaatgacgagtctctctatatctacactggccggggggatcaaccgcaagatattgctgttgagtatgactgcattgatggcgatttccggagctattgtcgcgttagcgcccagttatctgatttacatggtgggtcgtgcgctgatcggtattgttattggtggattctggtcgctgtctgccgccacggctattcgcctagttcctcagcatcaggttccccgtgcactggctatttttaacgggggcaacgcgctggcaactgttatagccgccccactggggagttatctgggatccgtcatcggctggcggggtgcattcttttgtatcgttccggtcgcggtgattgcttttatatggcagtggttcagcctgccgacaatgccagcggataaagaagataaacgtaccggcactgtttttcgcctttttgctaaccctgttgtggccgttgggcttgcagcctgcggattgttctttatggggcaattttctttgtttacctacctgcgtccgttccttgagacagtcacgcaggtgggtatcaccacgttgtcgttcatcctgctgaccatcggtgtcgctggctttattggcaccctgatgattggcatatttttgaaatccggcttttattcaacgcttattgctatccctttcctgatggcggttattgccgtcgccctgatcgcttttggtcacagcatatgggttgttgcaccgctgcttggcttatggggattaatcgccactgccgcgcctaccggttggtggacatggatcgccagaactttgccggaagatgcggaggctggcggtggtctgatggtcgccgtggtgcagttgtgcatcgcacttggctcaacaatcggcggattagcatttgaccacagcggctatcaaagcacttttaccatcagtagcctcttattagtgacagcggctgccttagctttattgacgtcacgtaaagatttccaccacacccgatga

SEQ ID NO: 456768 - DNA, 1029 bp, Serratia marcescens
atgagaatatttaccctgctgttagggctgttaatcagttcatttgctgccacaggagccgatatgtctaacggagcagataatttttacaaaagcgataaagttacgcagaaaaaagtgacttttaagaatcaatatcagatgaatgtagtcggcaatctgtttatgcctaaaggtatggatcagaacgctaaaaaaccggcaattgtcattggccacccaatgggagcagtaaaagagcaaagctcaaacctgtatgcacagaaacttgcggaacaagggtttgtcacgctggcgattgatctttccttctggggagaaagcgacggaaagccaggacatctggtttcaccggagatttattcagatgatttcagtgccgcagtcgattatctgagtactcagccttacgtagatccagataaaattggcgtgctgggtatttgtgggagcggaagttttgttatcagtgctgccaaaattgacccgagaatgaaagctattgccacggtcagcatgtatgacatggggtctgctttccggaatagacttcatcattcgtttacgcctgaacaacgtaatgcgtttattaaatccgcaacagaacaacgttttgatgagttcaaaggcggagaaattgcctatattccaggtactgttaacaagcttgatgactccacgcctgcaatacagcgagaattcttcgatttctaccgtacaacccgtggaggttatacgcctccgggtgagaaagaagagctgaccacaaaaccgatgttgagcagtattgggaaatttatgaacttctatccgttcaacgatatcgaaaccatttcaccacgtccgatgttgttcgtcaccggcgatcaggcgcattcgaaagaatttagcgaagatgcttacaaacgtgccggacagccgaaagagttgtatatcgtgccaggcgcaggccatgtcgatctgtatgaccgtaccgatctcatcccttttgctaagctgacatcattctttatagctaacctcaaataa

SEQ ID NO: 456769 - DNA, 609 bp, Serratia marcescens
atggacctggcgaagactgcgcctattctctgtgccggtatcaccaccttctctccgctgcgtacctggaatattggcccgggtagccgcgttggcgtgatcgggctaggtggtctgggccatgtggcagttaagctggccgtggcgatgggagccgaggtgaccgtcatcagccgtaccaaaaacaaagaggaagaggctaaagcgctgggcgcgaaaggcattctaccttcctttgatgcgcaggcattgcaggcttcgacctgcgcattcgatttgattattgatactgcgcccgttaagcacgacctgaatatctacactccgctgttagatattgatggctcattggtcatcgtcggccagattggtctgatggaggaaccgtttacggtccctctggtcatgggacgccgccgcgttgctggttcgctgatcgttggcattgcggaaacccaggaagttttggatttctgtgcgaagcataatgtctatcctgagtgcgaaatgattaatatcgatcagattaacgatgctttcgcccgtcttgaacagggagatatggcgcaccgttttgttattgatatggcatcactcagcgcagaataa

SEQ ID NO: 456770 - DNA, 354 bp, Serratia marcescens
atgaaattacgcatcattctcgacgataaaacgattaccgcgaccctgaatgactgtcagacaagccgtgagtttgcagcacttttaccgcttaccttgaagctgaaagattatgccggggaagagaaaataagcgatttacccggccaattgtctaccgcgggttccccgtcaggcacggccgcgaaaaaaggggatattacgatttatgccccgtggggaaatctggccattttctataaaccccatggctatgcgaacggcttaattaaattaggacagttagatgagccggacgctttgcccatccatcctgatatctatagcgccagatttgaactgctgactgagtaa

SEQ ID NO: 456771 - DNA, 498 bp, Serratia marcescens
atgattcgtttcacctctgtagccgcatcactattgttattcacaggtatgtccgcacacggcgaaactgccactgcagctcaaatgaaactgtcgcaaaccggtagtcgtgcaacgattgccgaacccgccgatcactttaccgggcgtgcttatattgacccgctcttttctccggtagcaccgcaaagagcgggggcggcctatgtcactttcgtacccggcgcgcgttctgactggcatactcacccgcttggacagacactggttattacctccggtaccggctgggtccaggagtggggaggggaacggaaaaccgtgcacgcaggggatgtcattcaatgcccgccaggggttaaacactggcatggtgcaacggacaaaaccaccatggtgcatatggccattcaggaatcgaatgacaaaggtgaaaacgtaaactggcttgaaaaagtcagcgataaacaatatctgctggcaggagaacatcaatga

SEQ ID NO: 456772 - DNA, 792 bp, Serratia marcescens
atgataaacaggatattcctggtcattgtgtctctgttattgatgagcggatgcgtttcccacactacgcaaaacaggagcccgaaaatgataccagaagatacccacgctgccgtggcagccgccacgcccgcaatggcggcttatgctgaacgatttattgaaaaggatctctggaatcgtccggaattgtcgcgtcgcgaccgcagcctggcgacgatggcggcactgatcagtcgtaatgataccgttgagctcccccactaccttaatgtggcgctggacagcggcgtgaagcctgcggaaatcgcagagaccatcacccacttagcattttacgctggctggccaaatgccacttctgcggctttggtggcgcgtgacgtctttgcgcagcgccatatcaatacggcatcattgccaggtgagaaggtggaatttcttcctctggataaagaggcggaaaacaaacgtgccaccatggtcgagtcaaactttggcaaagcatcgcctggcgtggtgaagtacacgacggatgcgctattccttgatctgtggctgcggccaggactggcaccacgagacagaagtctggtaaccatcagcgccctggtgaccgccggacaagtggcgcaggtgtcttatcatcttaatcgggcgatggataatggtctgacccagactcaggcctcagaggtgttgacccagctggcttttgtggcgggctggccaaacattttctccgcattacccgtatttaaagaggtgtttgccggcagaaatcctgcctga

SEQ ID NO: 456773 - DNA, 900 bp, Serratia marcescens
gtggcacgggaaaaccttaatgatttaaccgcgtttatcgtggtcgcacgtgaaaaaagctttaccaaggcagcagcgcaattaggcgtatcacagtctgccctgagtcacagcatgcgaaccctggaatcccgtctgggaatgaaactcctgacccgtaccacccgcagtatcgcgttgaccgatatcgggcaaaccatgctggatgatatagggccatacatcgatgggatccagggccgattacagtcgttgaaggatataaatagtaaagccgccggaaccgtgcgcatttccacatccgattatgcgataggctccgtcatctggcccaaacttgagccactcctcagggaatatccggagattactcttgaattgattgatgattatgccctgacagatatcgtgtccggtcgctttgatgcaggaacacgtctcggtgagcaaatatccaacggcatgatctcagtgcgcatcggcccggatgtgcgctttgccgtcgtgggttctcctgactatttttcccgccacccttatccgcagcaccctaacgatcttatcgatcataattgcatcaatctgcggtttcccacccacggtaatctgtatgtctgggaattcgaaaaagagggaaagagcctgaacgttaaggtcagcggtcagttggtgttcagtcgtatttatcagaaccttcaggctgcaacagaaggatacggactggcacatgttccccgcgatctcgctgaaaaacagattgccagtggcgaactgattagcgtccttgaagactggtgcccatattgggatggttactacatttactacccggaaaacagaaacctttcgaaatccttccagctcgttgttgacgcgctgcgccactacaaacatccctga

SEQ ID NO: 456774 - DNA, 126 bp, Serratia marcescens
atgccacatcttgatcttcattttaacccgcgcgagttatccgaagaagatatttcaaagatggctgacgagttctgcaaagtattggaaagctatctggcgactttagcccttaattgtgaatga

SEQ ID NO: 456775 - DNA, 870 bp, Serratia marcescens
gtggaatattcagtattaagtaacaatctgaaaatgccgatggagggatttggcgtttttcaggtaaccgataaagaagaatgtaaacaatctgtattgaatgcgattcgtatcggctatcggcttattgataccgccgcggtatacggcaatgaggacgcggttggtgacgccgttcgtgaagccattgctgaaggcttgtgtacccgcgaagagctgttcattacctcaaaactatgggtacaggacatggccagctacgagatggccaaagtaggtatcgacgcttcgctggaaaaatcggggctggaatactttgacctctacctactccaccaggcgatgcgtgactatttcagcgcctggcgggcgctggaagatgcttatgatgccggtaagcttaaagcgattggggtatccaatttttatgctcacgttttagcaaacttctgcgaaaccgtcaggatcagaccaatggtcaatcagattgaactgcatccttattttgcgcaacctgcggcgcttgaaaccatgaagtattacaacgttcagccggaagcctgggcaccgttaggcggtggaagacataagccgtatgaaaataagatgcttcagggaattgctgacgcccataaaaaaaccatagcccaagtcgttctgcgctggaacgttcagcgtggcgttacggtcatccctaaatccactcatcaggaacgtattgcagaaaacttcgccatctgggacttttcattgactgagagtgaaatggagcaaatcagttcgctggatttaggctatgttggtgatgccgtgaagcactttaaccctgaatttgtacgtggttgtcttgacgtaaaaattcatgattga

SEQ ID NO: 456776 - DNA, 477 bp, Serratia marcescens
atgcttcatactaccaatcccgttatcaaacacaaaacaggtttgctcaatctggctgaagaactcagcaatgtgtcaaaagcctgcgaaatcatgggtgtctcgcgtgatacattttatcgttatcgcgagctggctgatgaaggcggcgtagatgcgctgattaaccgcagccgacgtgcctccaatctcaaaaatcgtaccgatgatgtaactgaacaggctgttgttgattatgccatcgaattccctgcgcatggtcagcaccggaccagtaataagctgcgtcacggccttgagaacttcaaaaagcggctgaaggcactggaagaaaaagtggcccgtgacggtatcgaactgaccgaagctcagatagtcaccctggagcgtaaagccagtgatgacgaggcctgtggcgaaattcagtgtgccactacaatgtcaccaaaacgccgattactgcggctgatctgctga

SEQ ID NO: 456777 - DNA, 969 bp, Serratia marcescens
atgggcctttcaaggctgtactcgaataaccttcccgattatgacattgctcgtaaactaggtcttgtctcagaaaatgattttgattttgtatcgctagctaatcaattagactgttcgcgagatttctatcaagtcggtatcatctattcaaatggccgacgccaatggttagttcgtccttcaaggcgtatagcatctcctaatcaaagctctgtaagccacgtaattatcacgagagtaaataatcaaacaccacatgcagcaacccgatcattgactgaaacacttaatactccttcgttagctaatgagattacgtcgacagcaatttcttgcggagccgcggtcgttacggcgtttctcgctataggcgctagcgccgcggtacctcttactgccggagcatcaggaataattgcagcagttattactgcaggtggagttgctaccgggttacaatgtttcattggcgctggacggttgtttgctattggaacaggtaatgaagaaaaagtcgcttggttggatacccaagaatggtatacagcaacgagcaccgtgctagatcttgtctcacttgcaggtgcaggtgctggtttaaaaagcactctggaaacctataagttgatgaaaagcacatcctctgccggaggattaaattggcttaaaacactgagcagacccgaacgtaaacgcattacagaagaaattatacgtgctcaaaaccctgggatttctaatagcggtataaaagctgttatgaaagctggtgtgtatccgaaacgatatccaaccgaagctttacaaaaatcgctacagcgtgagttatcaaatgttcttgtaaatactacagcgtttgctggtagtgcgctaacaggcacaataaggaatccgcaaaatataaatcattccggcaagtatgttattggggtaattcaatcattttcatttacaggaagtaactaa

SEQ ID NO: 456778 - DNA, 3069 bp, Serratia marcescens
atgagcattcttaccttacagcaagacgtggcgctactctattacgccgctttaggaaaacacgccgatgaaagtgcactgttctattttgccaaacagctgagtaacggccactataacaccagccagttggtcagcgcgctgatcaactccgcggatggcgccaaacgctacgacggcctgagcaccgagcaaaaagtgcagtatatttatcagaacatcaccggtgcccagcccgacagcgccacactggacagcctggtgaagcaacaacttgccggcaaaacgttaggcaccctgaccaaccagattatcgatagcgtcaaaagcgccgacggtgaacacacgcaccagcagcatattcaggaagtcgtcaataacaccctgtatccttcatcgctggttgaggacggccaaatcgccgccgcgtccgacgtccaggggatctactacctgctgggcagcatgaccaatgccagagccgtcgactactggggcaaccagcttgcatccggtcaaaaaagtgcggtagagattgccaacctctttgtcgcggaaagaagttatatcaaccaactgagtaatgaggacttcgtcaagaccctgtatgccaatgcgttcggcacggcgatcagcgatggcgatctgcaaaaatacttgggcgggcttgacgacggaacgcaaactcacggcgacgtcatcatgcagatgatggccgacattcgtaacgatactgaccatgacgccgccaaagaaaattttgccgcagccactcatgtttacgcgccgggtgaaacacccgacgccaagtacgtcgaaaccgtgatgagcctgtacttggccgttgccggttcgggcaccaatgccaccgcacttgataccttcagccgtctacttgccagcggtacctcaacccaggatttgctaaaaaccctcgccaattcgcagcagttcagcggcgccggcgattaccagaaaatctattcgaaactctactccagcgagatgtccagcagcgttgcccaggcgttaatgctcaagaccgggaatgataaaatcgccgccagcgcattaattatcgatgcacttcgtaacggcgagtatccgctgggagggacgcattggacattagacgggcgactgtatagttttaaccggcagttggctgaccttttaggctaccagaaaaatttcaatagcgtatttaccttgtcagacgacggcaagctgatggccgagaccaacaactatggcaaccatacgcttagcagtgtcgaactgctcgcgctctcatctgggatgaaagccgtgtcgatcaacgtcgataagagcgttgcaattacgcttgacgcagcattggaaaatgtcacacacgtcgtgctttccggcaagtatgccgccagcgcattcgtcatcagctcattgcgtggacgttatgtcgaattatcgcttgatagtgacactctctcccatatcgacgcatcaagcacaccatattatgacaaggtttcggtagataacggcaccgaccttacccatgccaccctcaatctaataacaggcgaaggcggtttactctggcaaggcaatagcgtcgacggcggagccaaccacgtcagcgagacctttaccgctaaaggcggttacaacatatcagcaaactttatcaccaaatccgtttatctgaccaccgatgaaaacggtgagcgacacggtcaaatagtcagcaatatcgaccagtttgcaaactacagcatcatcgatctgacccactacgtcggcaccggcgaaatttacctggacggtaaactggtagcgaccgaaggacgtaacgtgtttgattttggcctgctcgataaaaatgcgacgatctttaaccccgattacgcgaacgcctcttcacttgagcaggatccacacacaaccggctggcacaacttcaaattcagcaacggtggcgctatgctttccgcctattccggcgatttgacgttgcttaacgtcaacaaaaaccgtttttccatcgatggcgaactgaccaatgacagtcacgtaactatcaatacctcagccaaagtcggaaactcattctcactgggcttcacggagaaagcttggttaattcgtacgttagatgctggtagcttcagctttaactccaagactttaaagacgctgacaattgatatgttaagtttcaatcatacggcccaaacccggaccttgaaactggaaagcggtgacaactcaatctccaaactggagttgagtggcttgatatataaaacgggtacaccgcaactacacctcaacctaacgataggcgctgattttggcgataacctgcataccatcattggcagtaatgcgaaggacgatcaacgttatgctaatctgaaactgaatcttaatgcggaaaaagggggtactggcggcggcagtttctataccaccctgaacgggctggctaacaaagagcagttcgccggtatcattgacgaccttgccggttatcagttatcggtgcaagacactggcctgactatactcaacgcacatgttcagggtaacacgacaattaatgcagcccaaaatctgagcttcgagcacagcagcattgataatctggtaacctttacaagaaattacatcagttccgttaacatcaaagctggcgatagcgctaatccatggattttctctcccaccggtgacaaaacggccacgctgtacggcagcgccaccaccgacagtgaactgaaggcggtattcagcggtctcaacgccagcaataacgcacaagacctgtttgcgcaggtgttggataaaatgtctaacggcgccagcaagagtaatcttgcggaagtcagcatggtgaaattggacaaggcggtgtatgtgattgtcgataacaaccacaaccaaagcttcgatgccgatgatattgttttctcgctcggcgatcgtgacccgtacctgagcgcagtaagcctgcactatcaggcgccaacgatcgaggccaacggcgtcgcaaccgccagccacaccggcgaagtcatcgctgcctga

SEQ ID NO: 456779 - DNA, 1029 bp, Serratia marcescens
atggctatggaagttcacgggtttattatttcgtctccgttcgtgttcgtctgcgatggtaaggtttatcgcagccaatcggggaaaaactggacggtcatatttagccgttacggtacgcaagcctgggggaatgatacctatgcttcccagcgcgttgaccgtgcttgcccgccaaatcgtaacgaagaagttcgtttggctttccgtggcgcagttatgcgccacttcaagctgaactacacccaaattgaggcattcttccagcgtcagatcgacgaggacaagcaaatcctggtcgaaggaaattcggttaaacgccatgtgggtggccgcagcagctacagcacaggcagtagcagcacgacgttatctgctcccgcgcccgctccagtcaaaaaggaatccccccatccagcgcttaaacatggttgtccagcaagtcgtttggaagaattcctggcctgggaaaaagcgcaccttgggattttgaatcgtgtcaaaatgccccagcgcgttgccatgttcctgggaacctgggaagaaccgaatgcggtcaaacctgaacccgtggtggccgaagaaccccaggctgaagaacctcgagccgaacggtcgctggctgaagaacgcgaacataaagaagatgtacccttctatggccgtcgccgtcgtgatcaggggaaattccgtgaagatgtgatgcttaactgcggtggccgttgcgtctacacgaatgccattgcggtacgctgcgaagccgcacaccttaaagcccacgctcgcaaaggtggcgcgagctttaaaaacggtctgctgctgcgcgctgatatccacaagctctttgacgcgggactatgtgccatcgatccgcacacgcttaaactctggttcgcgccagacctggtaaaaaaagacgcagatctcgcggccattgatgggataacgatgcgcaaaacgctgctccctatcaacaaagacaacatcgaagaccgctgggatgccttcgttaagatcttgctggcatga

SEQ ID NO: 456780 - DNA, 222 bp, Serratia marcescens
atgttgtcaatgagttcgtcatgggggagtatgcagattcggctgatacagaaggaatgcgtctgtttggtgagaaatataatgcacgtaaaacaggaagtattcgagacagagatgattattataaaaatgacatcactgcaactaagtactattttaatactgactgtactgggtgggggtgtgttgctgcattatattcaccggatgatgtatggataa

SEQ ID NO: 456781 - DNA, 1506 bp, Serratia marcescens
atgcaccgcgatcaggcggccgtggcgcgcgtcgtagctgagctcgacgtccagcgcctggttatcgctggagatggtgaccagctgcccggcgctgttccaggcgtagtggtggcagttctcgtggcggtcgtagatgcgcgcgatgcgccattcgccgacgcgggccggatccggctcatacagctggtgctcgccctcggcggtctgcagcagcatcacgccctgcagcgagcagtagagggtaaagccgtcctcggtaaagcgaatgacgtcgccgggggtgacgttgccgaggccggtctcgcggccggaggcgtcgcgcaggataaactgcggctggccgttgtcgtccagcatgcgcagcaggcgggtttcgaacggcagcatccagccgacgccgagcaggccggcggcgcggttgcggctgttgtacaggcgctgccagtaaagcgggatgcggtcggggagggtgaagtcaagctcctcctcgccggcgaggattttggcgccggtagggatatgcaccgggtggccggtctgggtggcggccaccagcgttgcgcctgcggcggcgccggcggcgttgcccgccagatcggcggcggccacggcggccagcgcgcagccggcgtccttcagcgcctggcggggcatcacgcggcggaacagcgcctggccgagtttcatgccctgtttgcccagagccccgaccaggccaccggcgaagtaggccagcgcatttttgccgctgcggatatcgcgcaccacgatgccgtcgccgccgatgcgcacgcgcgggttgtccgccacttcgatcttggcttcacaggtgctgcggtcgccgttgcgcgcggcggggtggccgttgatcagcaccttcttcgaaccttcggccaggaagttgacgttttccgccatatggcccttggtgcaggcgacggtgtccttactggccggggtggcgtacgggctggcgctttcgacggtgggctgggtgatatcgtcccagacgtcgccgagccagtttttgaccgattcgccgtcgatgctggcgaccttgtcgatcagtgggccgggatgcatcacgctggagatgatgcccccggccaccgccagggcgctgtcgataagatccgggctttcttcagcgccaacgtcgggactgttgagaaaattgtggtcgacggtgccggcggcgcgggccgccggcttgcctttcatatgcacgttgtcggagccgctggtgataaaggcgtcgggcgggccggtgccgatcagcgtatccaccagcgcgccggcggcggtgccgattttctccggaatgccggaaaccatggcgccggcgaccagggcgatgccgaccggtgcgccgagtccggaggagatcagcgcggtggcgccggcgtagatgccggcatagatggcgccctccaccaggccgctgacaaagtcggccagcagggagctgtgcaccagcgggtcgccgagacgcgcggcggttaa

SEQ ID NO: 456782 - DNA, 252 bp, Serratia marcescens
atgcggttgattgccgcgttccgtgagcggcaaatcaggaatatttggtcctttgctgtgtatacagggatgaggcatggtgagatatgctcactggcatgggaggatgtggacattgaggctggaacgataacggtgcgccgaaatcttgcaaaagacgagtttaccctacccaaaacggcggcagggacggggagggttattcagcttatcgccccgcagtggctacacttcgcgatcaaatggaactaa

SEQ ID NO: 456783 - DNA, 138 bp, Serratia marcescens
atgcagaacgatccctactttttacggggggctagaggcgaggttatcctgtcgacgatgctggatgatgccacggggccggcgaatgagtctatgagtcggcgtcatgatatgttgattaatagcgttaaattataa

SEQ ID NO: 456784 - DNA, 234 bp, Serratia marcescens
atgcctattccgttcccgttcgactttaaaaaaccggattacacccaggtgttcgagtggcggatggaacgcctgcagcgcatcagggcaaaccctgagtctttgccggctatacgtgagttctaccgcaccaacccggcacagttcattatcgactggggcatgacggtggttccgcgtaacgttgaacgtggattgccggcgcgcattccgtttttgctgttcccgaaatag

SEQ ID NO: 456785 - DNA, 147 bp, Serratia marcescens
atgtgcgaggtagtcaccgaagttaaggcgaatatcatcgcgaggtttatgatgaccgggttcgtattcattgcaagtggatctgccaccgaaattttcccgaatagaaacgagcaaagtgataactacatgattttattgaaatga

SEQ ID NO: 456786 - DNA, 129 bp, Serratia marcescens
atggatacggttgaacagctaggtggaacatacttctataaagggttcgcaaacctatcagcgcatgagttactgttctggatcacgattgatactgtcgaggaacagctaggcgttcaagatgtatga

SEQ ID NO: 456787 - DNA, 141 bp, Serratia marcescens
atggatcaagccggtatcattcgtgatctgcttagctggctggaaagccatttggaccaacctttggcgctggataacgtggcggccaaggcgatattcaaaatggcatctgcaacggatgttcaaagatattaccggtaa

SEQ ID NO: 456788 - DNA, 228 bp, Serratia marcescens
atgaaacagacccttatcacccctcatgatatcgagtgccttgagcatatgcgtaatctcggccagctcgttgacgagctgatgaaggtgcaggactcaacctccgtttgtcgcgacccggcgcagcagttgcagctcacctccgtgatttacctcatgaccgcccagctcgacggcgtggtcgagcgctgcaaaaagcgctggctgaccggggaggacaacgtatga

SEQ ID NO: 456789 - DNA, 552 bp, Serratia marcescens
atgatgatgaccgttcagcaaacagcccctttttctggcttgcttcctgtcgacgtttccaggtatagttttcccgctgtcgcaaaatcggcagccgggatttgcagcccgtgtaacttcaaggcgacacaacacgcgccatgcgtgtttttttatgtcgttgctcaggcacacctatttttcgggctgtggtgcttacaccgtggctcctgtcagataatggtggtccgggcggggcagccttcgggctggccggtttccttgaaggccggtactgcaaaccccgtccgggctaccacccatgagatttgcagctccggtggtggcgataaccgctacttcaaggaggttgccattatggctacgaccctcaccccgtctcatccgcagtttgtctttgtgtttgccgccgttcgtcgcgcagaccgtaaaccccgtatctgtatgctccgcaccgttgccggtgatgaacacgccgcacgcctgtccctcgttcgcgactacgttctgtcgttcgctggccgcctgccggttacggaggtgcgaccatga

SEQ ID NO: 456790 - DNA, 267 bp, Serratia marcescens
atgcacaccgctttttcttccccgtcttctgcccctgccgccccgatgatgccggtctctgatgccgttcaggaacgctttatccgcctgcccgaagtgatgcatctgtgcggtctgtcccggtcgaccatttacgacctcatcagccgggaggctttcccgaaacaaatctccctcggcggtaaaaacgtggcgtgggcgcactcagaaatcacggcatggatggcagatcgcattgccgagcgcaaccggggctgtgacgcatga

SEQ ID NO: 456791 - DNA, 744 bp, Serratia marcescens
atgaaacccgaaacagtcattaccgccctgcagaatgtagccgctcaacagtcagcagagagcagccagcgcatcaccgacaagctgagcgcattcactgcggccagagacacgcacgcggccagcatgcaggaactgaaagagattgatacgtccattgaacgctgtaagcaggagcggcagaccgccctcagtgagagtgcagaggcggagcgggactggcgcagtcgcttccgcaccctgcgcggcaatctctcccctgaaatgaaagctgaacacagcaagcgtatcgccagtcgcgagctggccgacgagttcaccggcctgattgcggagctggaaactgaccggacacgcgccatgctgaatgcctgctcgaccgccagtaaatacctgtcagcgcatgatgatgcctttaccgcttatgccggctcggaatgggctcaggcggtcaacacgctccccgtcgcgctcattcgtgctttcctgctgcgcattcgcgccctcgaaatgaaaggtgacagcgctccccagtccgtggccgtcggcgagctgcgcgatgcgctgaaccgtcagggcagcctgtatcacttcgatatgaagcaggagccggtattgtccgtaacgggcatgcaccggccgcagattaccggtgtggatatggagctgttacgcagcccggcgaagagaatgatgctcgccagaaaactggctgataatggcgagacaaaagcggaggtataa

SEQ ID NO: 456792 - DNA, 204 bp, Serratia marcescens
atgtttcactgcccgttctgcaaaaccagtgcgcacgcccgcaccagtcgctatctgtctgagaacgtcaaacagcgctatcaccagtgcgtgaacgtcgagtgctcggcaaccttccgtacacttgaatccgttgacggtattatccgctcaccggttactgagccggttatccctgtacccgcaccggcggccaccgtttaa

SEQ ID NO: 456793 - DNA, 681 bp, Serratia marcescens
atggaagatgaactatataaattcccgtccactccacatattttttaccatcctaacgtcagggatgacaaggtcatttcagataaagaacgattattgctttcaactaaaaaaaccataatagaagagaaaattgacggagctaatctaggcatttcctttaatggtaatgcagacttactccttcaaaataggggttcttttttacatcaaccttttaatggccaatggaaaatgcttcctgactggttaaattacaatcgcgacaacctttttgactgcattcgagaccaatacattatatttggggaatggtgttatgcgaaacattctattcactacacccgcttacctgactattttttagcatttgatgtattcgataagaaaagaaaaatatttttaccacttcctcaaagaaacgaaataatatcaaatgcaaaccttcattgcgttccttttctcgacgaaggtttctttgaactaaacaagttatcttcttatataaaaaaatcaaaattcagcgatgaaatatcagaaggaatatatctgagagtagaatctcttgaagcagtggactttagagcaaaaatagttcgtcccgacttcactcaaaacatcacagagcactggagtagacgagcaattaaaaaaaatcaaatcttgattaatcatttttaa

SEQ ID NO: 456794 - DNA, 540 bp, Serratia marcescens
atgaataaatcacctgctgcttttttaattgatacaaatgttgctgttacagctaatatgcacacagatataaaaaacattccagatgatatgctaagctgtgttttagagtgtgttgaaataatagaaaaggcaattgcaaatggggggttagttattgatgaagcacaagaaatagttgaagagtatcgctcaaatttaagcatgagtggagcccctggcgttggtgataaatttatgaaatggatttacactaaccaatggaaattccctgataaaaacatcgtaagaattacaaaaaccgaaactagctatgaggagttccctgtacatgaaggcctgacaaactttgatttatcggatagaaaatttgtagccacgtcatacgcacacgtagacaaaccgcctatttttcaagcaactgatagtaaatggtggggctggaaagaatctcttgctgatgtaggcataacggttcattttgctgacgaaaaactcataagtgatacatataataggaagtttccaaatggaagatga

SEQ ID NO: 456795 - DNA, 1386 bp, Serratia marcescens
atgtttaaaacattaaaagtagaaaattttaaggtttggactgatacaggtgaaatcaaaatgtcacctatcactcttttctttggaacaaatagctctggtaaatctagtattggccagcttctcatgatgcttaaacaaacggttgaatcatctgatagaaaaaccccattctacccaggaggtaaaaactcagcagtacaattgggctcatttcaagacatggttaacatgagagacgttaacaagaacatctcatttgagtactcttggtcaatagatgaattttactctaaatcatcattagacagcattatatccttatcggaaatatgccattttaaatctgagatatcttttaatgctgagaataatagcttatatgtcaatggattctcatatacattctatcagaaagaaaaagatgatgtatctataggacttgttcgtgacgctaagtcaaattataaaatcaaaactaacaatttcactctaactcgacagaagggtagggtttgggcgataaaagatgtagttagattttatggtttccctgaggaagtcgtagcttaccatcaaaatgctgattttgtgcaagacatcaatctaatgcatgaaaagctattccgttcagtatgttacttagggccaatgagaaataagcctgaacgattatatccatggactggaatttcaccagaaagcgtaggttatgcaggtgaaaatgcaatttccgccattctttcatcaaaagaaagaagaatcggccttgattataaaaagaaaaataaaccattagaagaaatcatcgctgaaaaattaaaacaaatggacttaattgatagtttttctgtaaaagcaatttcagaacatcgtcaagaatatgaagtcaaagttaaaacaaaaggctctaaacagtgggtagaccttccagatgttgggtttggggtttctcaggttcttccagttctagtacaatgcttttacgctcaaccaggctcaataattttgatggaacaacccgaaattcatttacacccaaaagcacaatcagtgcttgctgatgttatgatagatgttatccgttcacgagaaaatggaaaatcaagaggcatacagctaattatagaaactcactcagagcattttcttcgcagactgcaaaggagaatagcagaagacaaaataaaatccgaggaagtttccgcgtacttctctgacatttcatcttcaaccccaaaattaacaccgttgcaaatcgatacatttggaaatatcctcaactggccagataatttctttggtgatgaattaacagacattacagagcaagcaaaatcagcgttaaaaagaagaataaaagaaaaagaaggtacatctaaatga

SEQ ID NO: 456796 - DNA, 1218 bp, Serratia marcescens
atggcgcgcctcacacgccccctcactaacaacgaaatccttaaagccaaacctcgggaaaaagacttcacccttcatgatggtgacggcctgttcttgctcgtcaaaaccaccggtaaaaaactctggcgcttccgctatcaacgtccggtcagtggcagccgaactaatttgagtctcggctcataccctgcccttactctcgcagcagctcgtcagatacgcgaccagcacttaaccacactcgcgcagggtatggatccgcaacagcaacaagagcaggcatcagaacagcgtcagattgagctggatagcattttctcaactgtggccgccaactggttcaaaatgaagagcaaaagcgtcactgaagactacgcgaaagatatatggcgctctttagataaggacgtgttccccgcaataggcgcaatacctgttcaggaaattaaggccagaacgatagttgaagcattggagccaatcaaagcacgtggcgcattagagacggttcgccgcctggtacaacgtattaacgaaatcatgatctacgccgtcaacactggcctgattgatgcaaacccggcatcaggtgtcggaatggcatttgagaaaccaaaaaagcaaaacatgccgacgcttcggccggaagaattgccgaagctaatgcgctctttggtgatgtcgaatctgtctgtttcgactcgctgtcttattgaatggcagcttctgactctcgtgcgaccttctgaggcttcaggtacacgatgggcagagatcgatctcaatgccaaactctggacgatcccagccgaacggatgaaggcaaaacgggaacacatcgtacctctttctactcaagcattagagattctggaagtaatgaggccaatcagtgcacatagagaatatatttttccaagtagaaatgatccacagcaacctatgaatagccagacggctaatgccgctttgaagcgaataggttatggtggtaaattagtcgcacatggattacgttctatcgcgagtacaactatgaatgaagctggtttcaacgctgatataattgaatcatctttggcacatacagataaaaatgaagtcagaagagcatataaccgtgcaaattatttaaaacaacgttgtgatttattagcttggtggggtgatgaaatccaaaatgcttccatcataaaatctaaaagcaaaggataa

SEQ ID NO: 456797 - DNA, 1404 bp, Serratia marcescens; identical to SEQ ID NO: 246803

SEQ ID NO: 456798 - DNA, 570 bp, Serratia marcescens; identical to SEQ ID NO: 246802

SEQ ID NO: 456799 - DNA, 222 bp, Serratia marcescens
atgtataaagacaataggtgtaccgttattaccaccttcgacgtagtgaagtcgtacatcattaacatcaatatatcgactttcaagtccatgggaatatttatattgaccacggctttcactcttaaccagattaaattgttgttgcgatttttctgggggagtatcgatggatttcaatgtaggatcatactctgcatacgcgacattcagtgtatttaa

SEQ ID NO: 456800 - DNA, 1209 bp, Serratia marcescens
atgggtaacagcgcaagaaaccaatacttgtaccaacatgaaaccggtatttggatgtttcaaatagcggtgcctcggaatatgcggcatttaacaaacggccgcaggctgttcaggaaaagcaccgggcagcgtgatatacagaaagccagaacggttcgcgaccgactagttgttgagtggaaccacataaaggaaaagtatgtggttgatgccggagctatagcatttagtcgagcggttaacgcggtacaacaactagggaaagcttccgcggtagtttccggtcatcaggtaatgctgcaagctgttactttcgaatatctagcggagtacgagaaaacccgcagccccagcaccctcagcaagcacgcgctggcggttcgacttctgctcggccatttagccgtcgtcgatacagagataaccggcatcacccgtacatcggtgacacagttcatccgggcgctaaaaccgaagaaatccgtccagacgattcagaattacctgtccggcctgaactcggtgtatgagtacgcccggcgctgctatgacggcatccccgccacgtcaccattcacagggcaccgacttgaggctaagaggacagttgtcagctaccagccgttcacgcaggcagagattgcaaccctcttggataatgcgattgaggacgtttgggacgtgatttttattggcctgtactcagggatgcgtctgaacgaaatcgcttctctcggtgttgatgatgtgccggaaatcgacggtgtgcgttgcttccgtgttcaggcagccaaaacaaaagcaggcgttcggctggtgccggtgcatcccgctttgataggcatcatcgacaagtacaaacggcagaacacgaacggccagcacgggcggtacctgctacctaaagcaaacgctatcaaaagggctgacgctaagcgcgggccgtggttcagtcagcaattcacccgcctacggaataaggcgctgccgaacgccacagaccgccagtgtttccacagcctgcggggaatgttcatcactgcgcttgatcgggctggagttccagaggacaggatagcgctgattgtcggccacgaaagaggcaagacggaatctttcaggacatacagcggcggggctgagttagaggaactgcaacggatagttaacctcgcatgctacccagagatcgaacaggggctatag

SEQ ID NO: 456801 - DNA, 573 bp, Serratia marcescens
atgaggatattcgcgtactgccgggtttcaaccactgagcagacaacagaaaaccaagtgctagccattcgcaatgccgggtacgatgtgcaggatcaccgggtagtgcatgaacaagtgtccggcggtgtaccagcgatgcagcgtcagggatttaaagagctggtgcagcataagctggagccgggcgacaccttagtagtgctgaagctagatcgattaggccgagataatatcgacgtacagcagacggtgcaggagttaattcagaaggggatcagagttgtctctttagatttaccagtgcctgacctatcgagcgcggaaggaaagttgatgctccaaatgttttccgcgtttgcagagttcgagaaaaacaggattgttgagcgcacacaggaagggttacgccgtgcgaaagccgacggggttaagcttggccgcccagaagctgtaaagacgacagagcgagtcctagctatgagggtgaaaggcttgagtcagtcgcagacggccgaggcgttaaatctcggtatagcgaccgtgaagcgccactggaataagaaacaataa

SEQ ID NO: 456802 - DNA, 351 bp, Serratia marcescens
atgctcaaatttgagcagtgctacaaagcggggaatggacagacataccaccaatccttcctaccacgccggtacgtggaatgtctgcgcaccggatacagcccagtgctgcgtatgaaagtactcgaccgcctgcgcgagcttgagcagggcgctcagcagttcggtgggttcaaggtgcctcagactatgcacgacgcgctgcgcctcgctgctgacctatcagagcagaatcagtcgctggtgctgaaggtgcaggaggatgtgctgtcccgactctgggcgctgccagagcgggaggggtacggggggcaatgcaggctgtcagggtgcagggagggagtcgcatga

SEQ ID NO: 456803 - DNA, 834 bp, Serratia marcescens
atggatatccctttcccatttgtttataaattctctacccttaatataaattccctatcagccctcgctgaagggaaagcgtggttttctaaacttgctgatttcaacgatccatttgaaggacaatttatactaaatccgccggacttaaagaacgagcgagaaagattttttgaacacttagctaaaaacatcccaaactacccgctcaccgaaccggtattagaaacaatacggaagaaataccttaattctccgcaggagtttgatagaacaattacaagcattgtggatactacttataggcgattttatgaaagttatttaaatataggtgcttattgcctagctagtgatatccctgatgtagctgcatctcatgttagcaatgtgatgatgtggtcacactatgctgatggtatgaaagggttctgcataaaatacaaccccaacaaactcattaattctttaaatgaacttaacgacgacaaattttactgggcaaaggttgaataccaagacaataaacacacagtagacttttatgattcaatggatctggaaaatcatgcgacgatccgagcaatccaaacaaagcatacaggttgggaatatgagtacgaatgccgattattaacaaataattcagggctttataagtactcgcacgacgctattgaatgtatttacatcggaagtaaaatgcctgctccccatgagaaaatattacttgatatatgtgcagtaaatctccctgatgtagatattttcaaggtgaggacacatcagggtggttatgctgttgagttaggtagataccaaaaatataaataa

SEQ ID NO: 456804 - DNA, 1401 bp, Serratia marcescens
atggccgtgcgactgcacgttccaggccagttcgttgcgccacaccatgccgcgctcgccggacagcgacaattcaccgtcgaagccgcgtacggtgtaacggccgccgatcgccatccgctcctgcggcgtcagggcgttggcgctccactggccacgcaggctggtgtaatagcgccaaggctgctgccccaaggcgaatggctggttcaggctaagatcccccatggcgaagccgacgcgggcgctgccgctgtgcattgcctcttccggcgctggtttagcgccgaatgccccggtaccgcggtgccagttgaggttggcgtccagcgtagcgctaccgagataactgcgttggttaagacccagctcccagccggcagtgcggcgttcctgattatcaatgttgtagccgtcgaccgcgttggtggcgtggcgccggtaggcgcgcatattgagcgtcagcttatgggactggttgcggaacagcaggcgggacagcgtcagctgcaggttttcacttttaccgctgtagctcagcacctcgttggcattggggatattctggtgataggtgtaatcgttatagttggcggccaggctccagtaaccgatcgggaaaacgtagttcagcgtatgcgaacggttgccgaacggcccgtgttcaaacaggtttttgccgatattggcgtagaacagatcgttctgggcaaagggcgcgtcaatcgccagcgtggcggagcccagatagcggccggtgcttttcgaaccgctgtcgtccagccccaggctcaggcgcaccgggcgcccctctttccagttcaccagcagatcgctggtcgcctcccgttcgccgggggcgattttaatatcggcctcgacgctgggcacacgcttaaagttctccagcccctgctcaatagcgcgcaggttgagaatatcgccgctcgacgccggcagcgcattccacagccgcccgcgccaggaggtccccgcctcaaaacgtatatggtcgatacggccgggctgcagcgtcaacgtcagcacgccgcgggtcagatcctgctcctgcgccatcacccgcgtggtgacatagcctgcggccagaatacggttctgcactttatttattgccagcacgatgccctgctggcccagacagcggcctttggcgtcttccgtagcgtccagcgcccactgaaagcgctccgccgcttcgccgaccaactgcaggcggttaatggtaaaacagggatgttcatcagacggatagtcgggcagcgcgacgtcgggacggttcaggcgcacatcgctgtgcggcgcattctgctgctgcagcgcgcgttcacgctcctgctggcgctgctgttcctgcgcgtcccgcgcggcggcgttttgtaa

SEQ ID NO: 456805 - DNA, 1203 bp, Serratia marcescens
atgggctttatgataaagcctaccaaagaccgaaatggcacctactacatccgcaaagcggttcctcaggagctacgtccagctatcggcaaaggcgagctaaaacgttcccttgagacgaaagatcttgagcaagccaaactcaaagcccctgccgctctggctgaaatcaacgcgatcatccagaatgcccgagcagagcgaaccgtaacgcaggacgacacagaggtgatcgcttcagtatggatgacaagaatcctacagcagccggaactcatcaaagcacgttatgtacagaaatacgatgagggttatggactgaccgctgataacgggcagttaagcgagtgtctgcgtaaaggtgagcgggcagacgaagctgattttcggcttgtcacccaactaatgccgtcagaacttgaagaagcccttccgtggacgccagcagtactgactcctgcatggcgacaaaaactcgcatggcgtctggcggagcacaggctcagtacagcggaaatgtacatccttgatgaacttccatcatacgccgccattaccgccacacagaaacagaaaagcctgaccttcaatgatcttttcgagcattacaaagcacatatacggctaaccgacaaggacagagctgagtcacgtatacgggattacacttcatcggctaaccgcttcatcaaattcattggtgataagcccatccgggacatctcgaaaactgacctgtcggcgttccgcacacttatggagcaggccccggctaaccgcagtaaggccgtcaactcgctgtcgctggagaatcaggccaaagctcagggcaagaaactcagcaccagcaccgtgcggaacatcttcatacacctgtctgcaatgttcagggtcgcactcgaagacgacctgctggatgaacaccctttcgacagcttcaaaatgcgtaaaaaggtgcaggcaataaacgagcatactccgttcactgatgaagaaatcagggtgatgttccggctaccactgttccacggggagcaatctctctatggcgaaatggcctactggatgccgataatcctttactataccggtgctcgcgttgaggaaatcggacagctacgcagggccgatatcgtggatgctttcggtgttccctgcttcaaaatctgtagtcgtcaaacaccagcgcaggcacttttttga

SEQ ID NO: 456806 - DNA, 1374 bp, Serratia marcescens
atggctaagtatagggcgtatccggagtataaggagtctggggttgaatggttgggggggcttcctgagcactggaaactgagtaaacttcgttaccagtttatttttggtaaaggacttaccatcacgaaagaacatcttcaggatgaaggtattccgtgtgtaaattatggggaagtacactcaaaatatggtttcgaagttgacccagaaactcataatttaaagtgtgtgagtgataaatatcttaaagataactccaactcattgttagttaagggtgatattgtattcgctgatacatcagaagatatagatggatctggaaatttcacacaactagtgagcgatacaattacgtttgctggataccacacaattattgcgagaccatttgaaagagacaatagccggttttatgcttatctcttggattgcaaagagttaagaactcaaatacgacatgcagtaaaaggggtaaaggtatttagtatcactcaagcgatattacgaaatcttttgatatggcttccatcgaaggatgagcaagcgcaaattgctgcttttctcgatcacgaaaccgcaaaaatcgacaacctgatcgagaagcaacaacaactgattgaactgctgaaagaaaaatgtcaggcagtgattagccatgccgtaaccaaagggctaaaccctgatgttccgatgaaagattctggtgttgagtggctggggggattgcccagccattggcaagcactaccgactaaacgtctttttagacttgttgcagaaccagctgaaataaataatgactacgagcttttatccgtttatacagctatcggtgttgcccctagaaaagatttggaacctaagggtaataaagcatcaactactgatggatattggaaggttagacagggtgatattatcgttaataaattgcttgcctggatgggagctgtgggcttttctaattacgatggggtgactagccctgcgtatgatattttaagaaaagtgaaggacataagccccaagttctatcattatctcttcagactagagttgacacagcgagaattcaaacggtggtctaggggtattatggaaatgagacttcgcctttattttgaagagttaggaaggatcatcatgcctgtaccacccagacaagagcaggatgtgattgttgaagagattgaaaaaatagaacatcaatattctcaacttgaaactattgcttctcatcaaattgctcttcttcaagaacgtcgcaccgcccttatctccgccgccgttaccggaaaaattgacgtccgcgattgggtcgcccctgacacgcaggacattgaggtgctacaggaggtcaccgcatga

SEQ ID NO: 456807 - DNA, 453 bp, Serratia marcescens
atgaatgataatacgtttgtttttgatgaaagtaaatatccgattgcatggagattcaactctaatgattgtttattaccttttgtcgataagaaaagaatagtcttactcgatgaaatagaatccaggcatctttgggataacatatttccttttaatcatatgataaaactcccctcttcatttctatcaggcatagataaggtcgagttggattttgatgatgaaaatcagtcatctattttttttatagagagattaaagaatatcgagtttatttttttcttttgggggagaggggccggttctattgtgcctgtagatgtttttcttaaggcgtggagtgattttttttatcctagtgatgaatcaagtgtaatgtacatacctaatgtggctaaggtcatatattctttcgaagagcagtttttttatgcggatatatccaagtaa

SEQ ID NO: 456808 - DNA, 363 bp, Serratia marcescens
atgaatgaaaaatatattatagattttttgaatgactttgaggaaaaggtgggtgggactattcctttgtcctataagaaatttttgtcggaaaatgttaaggatagtgaagtctatgaaatagaaagtaagagtggtgattttatttatattttcaattataaggatttggaggaaaggaatgaaacctatgaaatacaaagtgttgaacctgatttcttattagttggtcaagatggagatgttggttattttgtacatctatcgggtgatgataatggcatttatagtttagaccttggtgcccttggtagtttaagtatggataaggaagctaataacatttacgcactcattaattaa

SEQ ID NO: 456809 - DNA, 159 bp, Serratia marcescens
atgaatgaaccagtgttgatcattagcattggctatggagaagtcttctttgaaatgtttgggcataaagtatatttcaccgttcggtgtgacggctgtgtcttcgttttgtcatccaaaggaaaattgctgccgttatggacccttacccgtgaataa

SEQ ID NO: 456810 - DNA, 1053 bp, Serratia marcescens
atgaacgatatggaacagcagtgcccggtacacaacaacaagcaccacgggggaaacgacatcagttccgaatactgccgcatcgacaggattaatccgcatgacctggacatgcttgcctacggctctgaccccaaggtgcgcgcccgtcatgcaatcttccaggttaatgcagacatgcggcagaactacgcggacctgaaggctgaacttatcgatcatctgacaccggttatcgtcgttaacaatgatgccaaagggggagaatacacgctaatccataacggtaagatcgaaacccttcagccgatatcggaaacgttcgagatggcgaaatctattgcacatataccgctgggtatcttctcaattatcgcgccctacctcaaaggatcagataccgacgcctgggttgaaaaactgaaagcattcgccgcaacgctgcgtaccgcacgtatgcagcttaagtacgccgacattcctgaagaactggagcgatcaagcgctcaaattattgatgcggccctgaggttcatcaagaagtcgatggagatgggctatttcagcatcaagtcgttccagatgttctcaagcagtgtgtacgatcacgttcgcaccaatatgaaatacgcttctgaagcgcagattgctggtgtgagcaagactatgaaacgctggagaaagaaagttggtgaacagcactggcaaaacctgtatgttgtggtgctgtcaatctggacaacctcagttttaaaccaaaactccatcatcattcgtaaatttatggatcctcgcaccgtcgacacgcatctcatcgacattcctacggcggaaacaccggacgactatatctacgttgccttagataatctcgcccgtatcgtacaggactacgtggccgctgagatgatcttcccaacggatcaccagactgccgatgctcttggcggaacccaggatctgctctcagagacgatcctgcaacagcttaactgcaccttccagggcgctcgccctgctgtggaacataagagcgcctgcccgcaagcctga

SEQ ID NO: 456811 - DNA, 2532 bp, Serratia marcescens
atgtttgaaattaacgggttatactctaagcttgttaaggttagtattaacagcattcttggggtgggtggtgatttaaagataagtgctgcgaatatttatcagttattatctcatgcctctatattatctttatcggagagtgattctgatataaaaaaagcatatgatattgtaagtagggtcttggaaattgatgaacaatacgatgcaaatattatcgccgcttgcgatctaattttatccagaataggaaatttcccagggagggggctattaagagataagtataacaatggaatgtctcccgagctaaatttatcgctttcactggaacgtataggtcgtgaagcagaaaatacatataacgaagtagcgttgacaaatttccagtgcaaattgtttaactcgttgaagcgaaataattatcttagtatctcggcaccaacgtctgctgggaaatcatttattctttccttggccgttattgataagatcaaagcttatggaaaggagtgtattgtttatgttgttccaactcgagctttaattagcgaggtgtcgaataggtttcgtcatgaatgcaaaaagtcgactcttaataatgtcattataagaactgcgcctgaagtaatagagagcgccagtgtagaacaagggttgatatatgttctaacacaagaaaggcttgttagcttactctctaattcttatgataatagccattttcatatagacacattgctaattgatgaggctcatgagatacaaaaaggaaagagagggataattctacagaatgctgttgaattagcacttgagaggcatccttatatgcaggttatgttttctagccctttgattagtaatcctgagtattttttctctatgttcagatggcgtaaggatggtaaatcatttattgaaacaatttcacctgtcacacagaatatattgcttgtcaatcaagtaaagaataatactagggctattagtataagcttgaataccgaagataatcccattgatttagggaagtacgagttagattttgttctgcgtggaagccgcaaggttcagaaagcaaaactagccgagtttatatctcgctcaggaggtgctgtaattgtatttgaaaatacgccatcaaatgctgagggtgtagccattaatatagcagcgattcttagtgaaacgcaactacaagatgatttcgatgagtttatatcttcgattgaagaggagatgcatgaacaatatacattgattacatgtttgaggtcgagagttgcctttcattatgggaatatgccatcaataataagaaatggtattgaatacttttttaaacgtggtgatattaggttcattgtttgtaccagtacattgctccaaggtgtaaatctaccagctaaacatcttattttagaaaatcctcacagtggtgatgaaccaatgtccagggctgacttcctgaatcttgcaggtagggctggtagattgaagtatgaatttcatggtaatgtttggtgtataagaagtaatttgtgggacaataaatcttttgagggggaagcccttcaaactataagttctgcaatgtcaaaagtaatggctgatggcggtggtgttatattgaatgccatcgataatatattttctcctactgatgatagagaactggctgacgtggcatttgctcgattttatcatgaggtgcaaagggatggttttcaattgtcttatttttctgaattgaaggaggaagatgcccgtgagatgttggaatataattacgatgaagtcaggagaatgaggataactatcccggaagaattgattaaattaaatttagggacgaggcctgattatattcaaaggctttatgattattttatcaagcaggatgatttagatgattatattctttatagcccttataagaaaggggggaaggcgagggttgatcgagccattgaggttattattgatatattctcttggcctgtaacattacagtatgcaaagttaataagtgttatggctcatcaatggatgacctcgcactctctgaagtcaatgattaattataagattagaagttctagtgagttatcaaatttaattaacaatgaagaatctatcgagaggataaggaaaaagacgtcctctcttattagagatgttcttaatacccttgaaaatcaagtcaggtataatctagttcgttatttgaaagtgtatagagaaacacttatgtttgttctgatggcgaaaggagaaaaagataaggctgaaaaggtagaaaatattagtgcctaccttgaatttggctcatgtaatccgattgagttgaatcttatgtcgttaggcctttcacgaagtactgctttatttctaaaaaataaatttaaattccgaggggattcctcacctgaagaattgatttattttttatcaacgaaaaatttgaattctagaaatatccctgggttcagactcagagaaattaaagatgttttggggatataa

SEQ ID NO: 456812 - DNA, 132 bp, Serratia marcescens
atgcgtgcttttttcgcgccgctcggcaactatctgcgcgcagggaaaaaagtgggggagcctgtggcggcgtatctccatcctcacggccacggtatggccgatcgacagacgaaaaaaaacctgccttaa

SEQ ID NO: 456813 - DNA, 366 bp, Serratia marcescens
atgttgacagaacaacagtatatggaaaggaaagatacacttgaagggttatcgatgggtaacttatggaaaaatattgatccggatagtgttgatggtcgaaaaacgctcaattttgatgaggaaaaagatattttcttatggtttctccataaattactgagtgatggcactgcaaggttagcaagtaatgatgtttttttacctggaactgtagaggaacaaataaataatttcaaaaatgtttttccaaaaaatcaggatgaaatggatgctggtgcattcgatgggtactggtttttgactgaaaagtgtccaggagggatagtctggatccacgaggatggatatcaagactggacctaa

SEQ ID NO: 456814 - DNA, 510 bp, Serratia marcescens
atgaatttatatccaatacctttcgattttattgataaaagtgctcatctttcatggtgtgatgtaaaatggggttatgaaaacaatcttattacctcagacgtgccaataaagaaagcagaaaagaatgtattatcagggagttatactaaccctgagcttgaattatcattcgttatacctagtgaagtaaatcagatggcttcttttttaaagaaactatgttcggaatctgagcggaaagatgatctgacgacccaaaaaaagtggctgtttattgttctaagttggctctggaataatcgtaatagctttgaagatccattagctgaagttgaaataatttatgcggattttgattatcctcctgaaatagagagttttattaaatatatgcctccttctgatggatatgacccatcaacgcactcacatatggaaaatattaatcatttaatggataagtgggaaaattatttagaaaaaggatctgctgtctttaagagttag

SEQ ID NO: 456815 - DNA, 660 bp, Serratia marcescens
atgagcgagctgagttatctggaaaaactgctggatggggtcggtgttgaatggaaaactttaggccacgtggctgatatcaagcgcggtacatcaattacaaaaaaaaatgtcgtcgatggaatcatacctgtgatcgcaggaggacgtactccagcctactaccacaatgccagtaatcgcgatgggcaaacaattgttattgcaggctctggagcttatgctggatttgtgagttggtgggagcagccaattttcgtatcagatgcttttaccgtaaagcctcacgatatcttgttaccaagatattgctatcatttcctgatgaatatgcaacaacaaattcatgaatttaaaagtggcggtggtgttccacatgtttacccgcgagatgtatctccaatccagatccccatcccttgcccggccaacccggaaaaatcccttgccatccaggctgaaatcgtgcggattctggataaatttaccgctcttaccgctgagcttaccgctgagcttaccgctgagcttaccatgcgtaaaaaacagtacaactactatcgcgaccagttgctgagttttgatgagggtgaggttgagtggaagactttaccagagatggcagttgattttggacgtgggaaatctaagtgtaaatag

SEQ ID NO: 456816 - DNA, 633 bp, Serratia marcescens
  misc_feature (609)..(618): n is a, c, g, or t
atgacaagcttgcaacaacgcgctgagttacaccgccagatatgggccattgctaacgatgtccgtggctctgtcgatggctgggatttcaaacaatacgtacttggcgcgctgttctatcgctttatcagcgaaaatttttccagttacatcgaagccggtgatgacagcatccactatgctgcgttggatgacagcatcattaccgatgacatcaaagacgatgccatcaaaaccaaaggttacttcatctacccgagccagctgttctgcaatgttgcagctaaagcgaacaccaacgacaggctgaacgccgatttaaacagcatctttgtcgccattgaaagttctgcctacggttatccgtctgaagctgacatcaaaggcctgttcgccgattttgacaccaccagtaaccgactgggcaacactgttaaagataaaaacagccgcctcgctgccgtgttgaaaggcgttgaaggcttaaaactgggcaactttgatgctcaccagattgacctgtttggcgatgcctatgagtttctgatttccaactatgcagctaatgccggtaagtcgggcggcgagttcttcacgccacagcacgtnnnnnnnnnnacagcacgtatctaa

SEQ ID NO: 456817 - DNA, 1926 bp, Serratia marcescens
gtgataggcagtacggcgacggcggacaagaaccggctggagacgggaacgctgggctttaaggatatccacaatcaggcggactttaagaccgagcaccagagcgtgagtgtgagcaccagcggcaacgttggcggtcagttcctggggaacgtggcgaacaacctgttggtgggcgcgaaccgcgaagggcatgccagctcgacgacgaaatcggcggtgagcgagggcgcgatagttatccgcgaccagggcaagcagcagcaggatgttaaggagctgagccgcgacgtggagcacgccaatcaggcgttaagcccgatatttgataaggagaaggaacagaaccggctgaaggaagcgcagctgattggcgaaattggcagccaactgatgaatattgcagagacggaaggtgcgatagcagcgacgaaagaagccagggagaaacagaaagacccggctgcattggcagcggccagggaaaaactggaaaaagaaggcaaaccggcgacggcggaagcgatccagaaacaggcctatgaaacggcatacaatcaggcgctgaatgactccggggttggtacgggcggcaaggtacagcgtgcgatgcaggcggcgacggcggtgatccaggggctggccggcggagacctgacgaaggcgatagcgggcggttcagcgccgtatattgcgaatatcatcggcagcagtggcctggatgatgcaggcaaggtactggcgcacgccgcagtgaatgccgcgttggcggcggcgcagggcaataatgcgctggttggtgcaggcggtgcggccacgggtgagcttatcgggatgatagcggttaatgcgtacggcaagccggtaagtgaactgagtgagacagaaaaacagacggtgtcggcactggccacgctggcgtcaggcctggcgggaggattgattggaggcagcacagctgatacgttggcaggagcgcagtctggtaagacgacggtagagaataactatctgagcagcacggagaagagccgtcagacggagctgaaccacaagcagaacctgacgccgcaggagcagaaagagaaagacatgctgaaccgcaaggatgcggaaaccagtaaggcgctggttgatgcctgtatgagtggcagcgctgcggcctgtagcgccgcccggcaggatgcgctggagaagcagggcacttatcagaatctgggttaccagaatcagaaggaagcgcaggaaggttatcagcagatacagcagttgctgaatggcaccagtccggaagcgaagcagacgcaggagctgtttaacggaatggtggcggcttatatgcgcaccggtatgagtgaagatgcggctaaatctgcggtgggctaccagcttagtgcgatgtatatcatcggagggatcgcgggtatcggcgccggtaaagcggttgatgaaggattaacaccgggagtgaaaccatcgacgccgtcgaagaagcccggagccggtggtactcaggtagaaagtaagccatcaagtggagcagagaacgccgcgacgtatccgaaactgaaagacgacctggtacaacagaatctgactaatatagcgaagcaggacccgagactggcggcagcggttcagggtaataacggcaaactgaattatggcgttggttccggcaccagagctgaagctgatcggttaggtaagatatgggttggcgatggtgcgacatctacaactgatggaaaagggttggttagtgctgatggtttaagggtatatcgttaccctgatacaaaaccaaatgctccagcacatttaaacccaacgggtatacaggctaattttgaaacatacaaaataaatccggcaaccggagagcgggtgcgtgttggtaacggtcatatgagtattgataaatga

SEQ ID NO: 456818 - DNA, 282 bp, Serratia marcescens
atgcaccgcgatcagacggccgtggcgcgcgtcgtagctgagctcgacgtccagcgcctggttgtcgctggagatggtgaccagctgcccggcgctgttccaggcgaaatggtggcagttctcgtggcggtcatagatgcgcgcgatgcgccattcgccgacgcgggccggatctggcccatacagctggtgctcgccctcggcggtctgcagcagctcacgccctgcagcgagcagggcaacatccagtcgacattgggtatgccggtggccaaagtgtag

SEQ ID NO: 456819 - DNA, 828 bp, Serratia marcescens
atggtgggtgaacacaatcccgaccagccgcagcgcagcacccaatatctctaccgggaagacagctacgagccgctggcgcgcgtcgaccgtcacggcgacagcagcgaggtgtactggtaccacagcgagctcaacggcctgccggagcgcatgaccgacgcgcagggtaaagtcgtctggcacggtcgtttctccgcctggggcgccaccgacgccgaaagcggcaccctcgccacacagcagaacctgcgctatcagggccagtatctggacagggaaaccgggcttcactacaatctgttccgctactacgatccgaactgcggcaggtttacccagtcagatccgatcgggctggcgggcggggtgaatacctatgcgtataccccagatccgattagctgggtggatccgttggggttggcaggatgtgctcccaaaattaatgctaaacatgtttttcatggtgaaataaaccgaagaggaaatgccgtaggtttccaccatgaagcaagtataggccatcaagggaaagcacgtattacggaaataactgatcctgtgaatgctcaaggcgtatatcgtggaaaagtagaggtatttaaccctcaaactggacagtgggtacaaaaaggtcctgagtcaacttttttccctaaatcttggaatcgacaaaaagtactaacagaaattaaaggtgcacataataatgcaactatcaatggtagtagatgggagggagtatcaccaagcggtgtgaaaattggtggttatttagatagcaatggaaatattaatacagcattccctgtttatgagcgttaa

SEQ ID NO: 456820 - DNA, 336 bp, Serratia marcescens
ttgcgcgaagcccgtaacctcagccaggtccggctttctgagatgcttggcgtggacccgcgagcctacaaccgctgggaaaaaggtgccaccgcacctcacctggagacggtgattaagattgccgatgtgttgcaggtaacgctggatgagctggtcggccgccaggccgtgtcggaagaggtgaagatccgcaaccatacgctgcatgccctgtggcagaaggcggatctgttgccggactccgatcagcaggcgctgatcgccgtgctggacagttttgtcaagaagtcgatggttgaacaggctataggttttaacagtaacagacgttaa

SEQ ID NO: 456821 - DNA, 336 bp, Serratia marcescens
atgcgaactgatcaagaaatttataatgatatcggttcaatactgctatctattgtgcctgaaaacgcatcaaaaattatcatgagagcagagatttcccctgaaggtgaccattgcaaatgtgaatttgactatataaatacagatacaggtgatactggttggttttcggctggggcacaagcgaacggtgatttatttgatttgcttgtagagctaaggaactattttgtagataactttaagtctcaggaaaagccgttctggcatggttgtgaagtcacggtggatgttgaaacgcttaagatcaatatcgattttaaatatgatgattaa

SEQ ID NO: 456822 - DNA, 489 bp, Serratia marcescens
atgaaaactgttgattatttgcgcgatatccagaaaacaaataccgacaaactggttatggattacgattccaatgagttgaaggtctttgagaagcagtttgagcgaatgttgcgtgagggaggaagtgcagggaaggggacgaagttagaacttgatcctaagaaatttgactatctctatggtaagtttaccagcggaactcataatacagatagatcaactcaattagctcaagtaatgagacgacttggtttgcaaacagatgaatcaggaacaaaagtattaacggaacacctaaataaggtggtcaatacaaaaggtaatgttatagatacctacaccaaaggtagccaaaaatttgaaattcgcgaatcattgttaatggggccgtctggcaaggcaacaaaactagaaacatcatttgaaatcatgccagatggttcacgaagatttgtgacaacaataccgaaagagggtaaaaaatag

SEQ ID NO: 456823 - DNA, 366 bp, Serratia marcescens
atgttgtatagcgaagaagaatataagttgtttagagatgagttagaaggttcctcaatggggaccatatggtctgccatgagagcagataactttggtaggaaagagctttcatataaagataaatgtgattatttcttagagctccttcagcgtcttctcttggaaggaaaagtaaaactaggcagtcatggtgagtttttgaatggaagtatcgaagaacaagttttacttttccgaaagatattccctaatactcaggatgaaatggatgctggcgcgttcgatgggtattggtttttgactgaacagtgccctggagggatcgtctggatccacgaagatggctatcaagactggacctaa

SEQ ID NO: 456824 - DNA, 405 bp, Serratia marcescens
gtgtcttacctgtccgggcgctcgttgctggctttactgttctggtgcgcgctttattttcttaccggctatatctctttgtatatggatgcgcccgtcagccgggtcgccgtcgtctggttccctgccggggtagcggtcagcgcattcctgatttttggccggggctattggccgctactgtttctggcgctgttcctgacccgggtgctgctggatgccgcgctgcggcatacgctggaaacctccctgattctatccgcgatttccctgagtaacagcctggcggtggcgtggtgcgtcaggcatttttcctcaccacaagatcagctgcgccgcgtgggcgtctggctgctggcgacgctgggtgtaaatagacccgctttagttccatacactttttga

SEQ ID NO: 456825 - DNA, 660 bp, Serratia marcescens
atgataaaaaaaaatgataataaaacaacgagtaaggttgacatgcgaagccatggtgtgcaggtcagaagcagagaacgcatagaaaatttactttctgcagctgaaactatcattattgaaaaaggaattgaaggcctaagaatgagagagttggccaggtgcgcaggattacccattgcatcagtatatcattactttccctcctccctatcagtggtgaatgctcttgctccgcgtcatttatcgttgctacgtgagcatattgagaaggccgtgaatgaagtcattattttagaagtgtcagaaaaagaaaaacctttatatatagcaaaacttgttcggtcaatagttgagttacttctgaattatcctgcatcagtcattgtttgggaaactttacggagaaacccagaacttcgacacctggaaaccgaacatacagagaaaaatactgatgcatttcaaaaactaatcgtctgggctgcccccacattacccaaagagcagatttatcccaacgcaattattatgttagaggccattcagggatgtattttaagaataattaacacgtcacaaccacaacaaaattacttaatgaaatctttagactccatcgtcatatcgatatttaatgggtttcaagaaaagaattaa

SEQ ID NO: 456826 - DNA, 1635 bp, Serratia marcescens
atgcagcaagtcgtaacgcgtacgcctttagccgtttttattaccggattgtttttttctgcgctgaatgtcagccaggcggctcaggtgcctgccggtattcaactggcaccgcagcaaactattgtggtgaataatggttcggaagtggcgtcactcgatccgcataaagtagagggcaacccggaaagcaacataattctcaatttactggaagggctggtgagttccgacgccaacggccatgtggtgccggcggttgcggagcgttgggagaatgagcagtttaaagtctggacttttcatctgcgtaatacggcacgctggagcgacggctccccggtgactgcggaagatttcgtctatagctggcgtcgtctggcggatcctaacgtcgcgtcgccttatgccagctacctgcagtacgccaagattgccaatgccgacgcgattctgagcggtaaaaagccgccgcaggacctgggcgtgaaagcccttgacgcacacaccctgcaggtgacgctgagcgagccggtgccttatttgctcagtatgctgacgcatacctcgatgaaaccggtcaagcagtcggtggtagagaagtttggcgataaatggacgctgccgcagcattacgtcggcaatggcgcctaccggctgaagcagtgggtggttaacgagcgcatcgtgctggaacgcagcaacacctattggaacaatgcggcgtcggtgattgagcaagccaccttcctgccgatcgcctcagaagtcagcgacgttaatcgctaccgcagcggtgagatcgatatcagtaacagcgccattccgccaacgctgtttggcaagatgaaacgtgaaatccctgagcaactgcacgtcaatccttacctgtgtacgttctattacgaaatcaataataagaaggcgccgtttaccgatccgcgggtgcgtgaagcggtgaagctgacgctggaccgcgacatcatcgccaacaaaattatggggcagggacagatcccggcttacgggtttacgccaacctttaccgagggtggcaacttcaccgtgcctgagtgggcgacatggacacaggcccagcgcaatcaacgcgccaggcaactgctgagcgaagccggctacggtgcggataacccgctgaaattctcgctgctgtacaacacttccgatcaaaacaaacagcaggcgatagccgctgcgtcgatgtggaaaaagaacctcggcgcagacgttaccctgagaaaccaggagtggaaaacgtcactggaaagtcgccatcagggggagtttgacgttgcacgtgccacctggtgcggcgattacaacgaaccgagcgccttcctgaatctggcgctctccaacagcagcaacaataccctgttctataaaaatgcacactttgacgcgctgatggccgccagcctgcaggcgccggacgccgccgcgcgcaccgcggtgtatcagcaggcggagacgcagctggatagagattcagcgctggtgccggtttattaccgcgtcagtgcgcgcctgatcaagccgacggtgggtgggttcaccggtaaagatccgctcgattatatcgatgtgaaaaatctgtacatgatcaagaagtaa

SEQ ID NO: 456827 - DNA, 267 bp, Serratia marcescens; identical to SEQ ID NO: 454793

SEQ ID NO: 456828 - DNA, 327 bp, Serratia marcescens
atgaccatgtttggtggtgtgtttgaggggcttcctgcggtcgtctcgcagtatgtcggtaatcagttgattctgatgaatgcaccagatgtttacctggctgacgaaggcggtgttgctgtggatatgtccagcgaagcgtcattggaaatggagtcatcgccgtcaagtgatagcgtgactcctactggtgtcgagctggtttccatgtggcagacaaatagcgtggccatccgggcagaacgctggatcaactggaaacgtcgccgcagtgctgccgtggcggttatcagtggcgtcaattacggatccagccaaagcagttaa

SEQ ID NO: 456829 - DNA, 1215 bp, Serratia marcescens
atgaatgaacgtgaattatctctgataaaggccatcagcgaggaatttggggcggtaattaagtctatgcgtcaggagtttacgagtgaattatccgctcaacagctggcgtttgaagagaaaattacccaactcaccctatctatcgcagaactgaaagaggcggcccccgatattgagacgcggatcggtgaggtcgttggccggctggaaattcccgcggcaccggagcttccggacattaaatcaatggtggatgaggctgttaccgcggcgatgcctccgccggcacaggatggacagagtgtcaccgttgacgatgtacggccgatgctggaagagttggtgagcactgcggttgctgacattccggtaccggtggcgccggagctgccggacattaaatcaatggtggatgaggctgttaccgcggcgatgcctccgccggcacaggatggacagagtgtcaccgttgacgatgtacggccgatgctggaagagttggtgagcactgcggttgctgacattccggtaccggtggcgccggagctgccggacattaaatcaatggtggatgaggctgttaccgcggcgatgcctccgccggcacaggatggacagagcgtcaccgttgacgatgtacggccgatgctggaagagatggtgagcactgcggttgcagaaattccggtaccggcggcaccggagttgccggacataaagtcgatggtggatgaagctgttatcgcggcggttcctccgccggcgcgcgatggtgaagatggtcgcgatgccatgcagattgaaatattgccagacattgacgcggaaaaaagctatccgcgcggaacctatgccactcatagcggcgggctttggcggtcatttgaaaagaccgcaggcatgcgcgggtgggaatgtctggtggatggcattactacagttgatattgagcaggatgatcatcgccactttactgtaacagttgaaagatcctcaggcgccagtaccagtaagtctttcgatgttcccgttatgatctaccgcggggtgtttaagtccggtgctgattatcgcccaggagatactgtgacgtggggcggttcattgtggcattgcgatgaaactacatctgataaacccggtgaaactggctccaaagggtggacattatcagtgaagcgaggccgtaatgcgtccgctggcgggagataa

SEQ ID NO: 456830 - DNA, 327 bp, Serratia marcescens
atgaaggatctgtgtgagacattactcaacaagtttgatctggagataaaaaaagaaaatggcgtcttgattcataacgatggactagggccaacccgtgtcgaaaaaaaaccgaaaggggatataagtagtgacgctaaattttttatagagacaaaccccggctatgtcaacggcgatggactagccatcattttaagcctttcagtgaaagatattctggttaacatcttccaccagacgttgagtaaaataaatcgtaaattgattatcagaccggctcatggtcaagaggaatcccctcaagagaaacctaatgaaatataa

SEQ ID NO: 456831 - DNA, 759 bp, Serratia marcescens
  misc_feature (683)..(692): n is a, c, g, or t
atggataataatattctatttatttcatcaattgagcggtttaatgatttcgaagaggttgtcagacggtttttacagcgaatgttcaatgcagatgcttatattacaaatggcccttatgacggaggaaaggacgtcgtttactcagtaagaggtcgtgaaataagagaggtaatacaggtatctattataaaaaaaggtttggaagataaacttgaagaagacttaatcaaaacagataatttaattcaaaaatataattaccctcctgtattgaatttcttttggagccacaaaatatctgaaagcaagcttgagactttaaaaagcaatgccagaaaaaattatgggataaccctagagttttatgacgcaaatagaatatctcaaaaaattaccaacgattatccggagatattaacctttcttcttgaggatgtacacaattatcaatcgtctaaaaaggatgagttggacataaaagaaatagcattttacgaatatctggtgttaagtaaagatgctgccaatttaaagaatgtaattattgattcatacatagtttcattacttacagtccaagggaaatcagagcatgatttaatcaatgaaactcaaattcttgggctacacaatgaaactcttaaaaatagattgtatcttttaaaacgagacaatcgaannnnnnnnnnattcttgatgaagatttatacagtctgtctgaggttgaaagtaagagaatcagaaaccttgagttaa

SEQ ID NO: 456832 - DNA, 480 bp, Serratia marcescens
atgagccagctgcaaaatttagtggccgcctgtcaggcggatgacggtgagctgatacagcaggcgcgtcgctatgtgcaagagtggcaaagctggctgctgccgctttctgccgaaaatcccacgggggaagaccctggctacgacgatgattttcagcgtatccgcgaggaggtcaatcagctgtccggcattgataccgacctgatttgccaactggcggaaaagctgttgacgcagcgctgcaaggatattcgcgttgtgaccttctacatctgggcgcgcctgcaccaggacggcgaggcggggctggcgcaggggctggaactgctggctgcgatgctgcagcagtttgacggcgggctgcacccgcagcgcgagcgcagccgtaaaagcgcgctggagtggctgggcagcggccggatgctcgacagtctgttcctgtacccgaggttgatccggccacgatgtggcgcgtga

SEQ ID NO: 456833 - DNA, 336 bp, Serratia marcescens
atgaccgtcatcaccaccgccggtatggccgtcatcaccgccgccggtatggccgtcatcaccgccaccggtattaccgtcatcaccgccgccggtattaccgtcatcaccgccgccggtattaccgtcatcaccgccgccggtattaccgtcatcaccgccgccggtattaccgtcatcaccgccgccggtatcgccatcatcgcccccgccagcgtctttttgccggataatcagatcgacagacttatcgtcgtttgccaacgaggcatccaagaaggcggagtccaacaccgctttgccaaatgtaccgtcgagatttttttcggaggttaa

SEQ ID NO: 456834 - DNA, 291 bp, Serratia marcescens
atgtccgaccgtatactttgctggagggtaaccaataagaaaattatgcgtcatgccatattttttggccattttaagctggaaatcaacctcagtaaaattggttggattaccctctttatctgcaacccggtgccaggcagtttccgcactacgcaagctattgacacctacccgcgacaacagctcaaaggctttttcgacatttttccgatcccgattagattttactgccggaatctccataccatgcacaccaaaatctacaccatcagtcgccgatgcacgtga

SEQ ID NO: 456835 - DNA, 1218 bp, Serratia marcescens; identical to SEQ ID NO: 454780

SEQ ID NO: 456836 - DNA, 690 bp, Serratia marcescens
atgaaaaaaattgaaccggaagaatactttacgggccaacagctggttttggccaaggccattgaggcgggtgacctggagagggtaaaacagctggcgccggaaacggatctgaatactccgggcgaacagagcttaaccccgctgtttttcgccctaaatgaaacctactacaacaataatcccaaaccacgtttgcaaattgtgactgcgttggttaaagcgggagccgatcctttgcaaccgcagtctaacgggatggccagccctgctgaaatggttaccatgggggataaggatatctggctacaggcgctattggatggtgggttatcagcaaatgcaaaaaataaacagtggggaaccgctattatctttgacacgctaagagcaaagaacacggcaactctggctctattaatagaacgtggagtaaatatagattcccgcaactcattagaagaaacaccgttaatggcagcctttcttcgcaaccgctttgaacacgtaaactatctgctggatcatggtgctgacccaaacccggtaaataaacagggctgggtatttgcttcgctggtgcaaaacgccatcaaagacagccggccggaaactgaataccaccagaactgtctgcagctgcgcgacaagatgatcgcgttgggcgtaaagtggccgccggaggcataa

SEQ ID NO: 456837 - DNA, 690 bp, Serratia marcescens
atgaagaaaattgaaccggaagactactttaccggccaacagctgatattggccaaggccattgaggcgggtgacctggagagggtaaaacagctggcgcaggaaacagatttaaacaccccgggtgaacaggatttaaccttattattcttcgctttgaatgagacgtactacaataataatcccaaaccacgtttgcaaattgtgaccgcgctggttaaagcaggggctgatcctttgcaaccactccccagagggatggccagcccggcggaaatggtctcaatgggggataaggatatctggctaaaggcattgctagatggtggtttggatccgaatgccagagatcgaaatcataatgaagcgattatttataatacgttacaagccaagaatacggatacgctagcattattgatcatgcgcggtgtcgatgttgatgcgcgagattctttaggccaaacgccgctaatggcagcttttttcagcaatagctttgagcacgccaattatttgttggaccacggcgcagacccaaatccggtaaataagaaggggtgggtatttgcttcactggtgcaagacgagatcaaggacagccggccggaaacggaataccaccagaactgtctgcggctgcgcgacaagatgattacgctgggggtgaagtggccgccggaggcgtaa

SEQ ID NO: 456838 - DNA, 339 bp, Serratia marcescens
gtgaagtacgaattagatactaccgatggccgcgcgcgtcgcggccgcctggtctttgagcgcggcgtggtggaaacgccggcctttatgccggtcggcacctacggcaccgtaaagggcatgacgccggaagaagtgaaagagaccggcgcgcagattttgctgggcaacactttccacctgtggctgcgtccggggcaggagatcatgaagctgcacggcgacctgcatgactttatgcagtggcccggcccgatcctcaccgactccggcggtttccaggtgttcagcctggggggcgatgcgcaaaatcaaggaagagggcgtttacttccgtaa

SEQ ID NO: 456839 - DNA, 372 bp, Serratia marcescens
atggttaaaattattattgccgcgcagcggccggaacggctcaacattggcttcaaaggcagtagcctgccgggcgtgtcgtcgcacgccggttattatttgagaataataatcattatttatacgaaaggggagcggtttattgccgacgggccgttgaatgaccgtctgcgcagcgctcaagggcggagaatcagctggccgtcggggggggttggcgagggaaaattcgtgggtatatttacgtcgctcacgatcgtgattaagcgagacgcccatcagcaccgtgtatttgcctgcccgtcatgcggcctgcgggtaggtgacgcaccggccgggctgcagtgccggcagcggaagaatgtcaggtga

SEQ ID NO: 456840 - DNA, 480 bp, Serratia marcescens; identical to SEQ ID NO: 456832

SEQ ID NO: 456841 - DNA, 411 bp, Serratia marcescens
  misc_feature (384)..(393): n is a, c, g, or t
atggaaagaatgcaagttttgaaagacaatttgtctgttattgaaaaggtggttcctcgtggtagtgagattatttatctggattacccgttacatttgaatgttggtgatttattaattcttaagggtgctgagcagttctttaaagaaaataactataaggttattacgcgccattcagataacaccagtatgcgttttgttgagaagacgaattccattcctgaacatgtcgttattgtactgcacggcgggggcaatttcggtgatttatacccagctcaccagcgcctgcgcgaagccgtcgtgaaaaagttcaagaataataaagttatcattttgccacagactgttcatttcaaagataaggctaatttgctcaannnnnnnnnnaaaaagcgatgtggatga

SEQ ID NO: 456842 - DNA, 690 bp, Serratia marcescens
atgaagaaaattgaaccggaagactactttaccggccaacagctgatattggccaaggccattgaggcgggtgacctggagagggtaaaacagctggcgcaggaaacagatttaaacaccccgggtgaacaggatttaaccttattattcttcgctttgaatgagacgtactacaataataatcccaaaccacgtttgcaaattgtgaccgtgctggttaaagcgggagctgatcctttgcaaccactccccagagggatggccagcccggcagaaatggtctcaatgggggataaggatatctggttaaaggcactattggatggtggtttggatccgaatgccagagatcgaaatcataatgaagcgattatttataatacgttacaagccaagaatacggatacgctagcattattgatcatgcgcggtgtcgatgttgatgcgcgagattctttaggccaaacgccgctaatggcagcttttttcagcaatagctttgagcacgccaattatttgttggaccacggcgcagacccaaatccggtaaataagaaggggtgggtatttgcttcactggtgcaagacgagatcaaggacagccggccggaaacggaataccaccagaactgtctgcggctgcgcgacaagatgattacgctgggggtgaagtggccgccggaggcgtaa

SEQ ID NO: 456843 - DNA, 690 bp, Serratia marcescens
atgaaaaaaattgaaccggaagactactttaccggccaacagctgatattggccaaggccattgaggcgggtgacctggagagggtaaaacagctggcgcaggaaacagatttaaacaccccgggtgaacaggatttaaccttattattcttcgctttgaatgagacgtactacaataataatcccaaaccacgtttgcaaattgtgaccgtgctggttaaagcgggagctgatcctttgcaaccactccccagagggatggccagcccggcagaaatggtctcaatgggggataaggatatctggttaaaggcactattggatggtggtttggatccgaatgccagagatcgaaatcataatgaagcgattatttataatacgttacaagccaagaatacggatacgctagcattattgatcatgcgcggggttgatgtcgatgcgcgagactctttaggtgaaacaccgctaatggcagccttttttagcaaccgttttgagcatgttaattacctgctggatcacggtgcggatcctaatccggtaaataaattgggctgggtatttgcttctctggtgcaagacggcatcaaggacagccggccggaaactgaataccaccagaactgtctgcagctgcgcgacaagatgatcgcgttgggcgtaaagtggccgccggaggcataa

SEQ ID NO: 456844 - DNA, 903 bp, Serratia marcescens
atgagcaagcgcgaacgctggcaggcccggcaaaacctgattggccgtggccagcgcagcatctaccccgatgcgcgcatcgccgcgacgcgtctgggcgagaacaatattgccgttgaaaaggccagactggcgcaaaatgtgtatggcattgatggacggccgattaacgcgttggaaacgatgccgaacgtgcccgaagggtggcgcgatattagtaatgatgacaaagcgctacaaaagctgggtttaaaatccacgatgttatatagcagtgtaaatgatcctgattttttctcccgagtatatgccccagataaatcggtatttggtaatgagatggcaccgaccgtggtattcagaggtacacggatggagaatataacggactggctgaacaatggtcagcaagggattggtgtgaactcaacctattatgaacaatcagtatctatcggtaatcatttaaaaaaggttcctagaaaggttggtgttgccgggcactcactaggcggcggccttgcctctgcggcggcgattgccagcggtaagcccgcctggacgtttaatgccgcggggcttaatgccggtacggtggaaaaatatggcggtaccgccatcggcgacggctcaaaaattgctgcctaccgggtgcagggcgaggtgttgacgcgcttgcaggagttccacctgttagaggatttaaagagcgtttattacaacattccgctgctgatggtgaaacatcagctctctgcactattgcccagcgcggcgggcaacgcgaaatggctgccgggcggggagggcggcaccgttgataaacacggtatgcagcaggtgatcgacagcctggagctacagaaagaggcggatatgaccaccattactaacaggttataa

SEQ ID NO: 456845 - DNA, 1065 bp, Serratia marcescens
atgaatattatcgttaccggtggtgctggttttataggttcagcggtggttcgccatattattaacgataccacggatgaaattctggttgtagacagtcttacttatgcggggaatctggaatcgctaaaaatagtcgccgacaacgcgcgttttaaatttgaacatgttgatatctgtaatcgtgctgaattggatcgcatctttagcgaatttaaaccagatgcggtgatgcacctggcggccgagagccacgtagaccgttcgatcgatggtccggcagcatttattgagaccaacgtagttggaacctatacactgctggaagcgacgcgtcagtattggaatacgctggatggcgatgcgaagcaggcgttccgcttccaccatatctctaccgatgaagtctacggcgatctgcacggcactgatgatttgtttacggaaaccacgccatacgcgccaagcagcccatattcagcgtcaaaagcctccagcgaccatctggttcgagcgtggctgcgtacttatgggttgccgactattgtgaccaactgctcgaataactatggcccttatcatttcccggaaaaactgattcctctggttatcctaaatgcgctggatggtaaaccgctgccagtatatggcaacggcgctcagatccgtgactggttgtatgtggaagaccatgcgcgtgcgctatacaaagtggtgaccgaaggcgaagtcggtgaaacctacaatatcggcgggcataacgagcgtaaaaatatcgaggttgtgcaaactatctgccgtctgttggatgagctggtgccgaacaagccagcaaacgtcaccctttatgaagacttgatcacctacgttgctgaccgtcctggtcacgatatgcgttatgcgatcgatgcgtccaaaattgaccgtgagttgggttggaaaccgcaggaaaccttcgaaagcggcatcaaaaaaactgtggaatggtatctggctaatgaagcctggtggagccgtgttaaagatggttcttatgccggtgaacgtttaggactgacccgctaa

SEQ ID NO: 456846 - DNA, 930 bp, Serratia marcescens
atgctgttggtaaaccccgttgcgccggctggtcaggttgccccagccgtcatagcggtaaaacatccgctgccagtattcgagacggttatcgaccaccggcgccggcggcagctcggcgtccggggcatggctgacgcgctgctcaccggtcaggttatccgccaggtcgtagcgcagccggtggcccggcttgccctgctgcgcttcgcggtgctgcagcaggcgtccttccgcgtcgtagccgtaatgaatctcgccgcgcagcgcgtcactgacaccttccagttcccctcgcccggtatagcggaacgtgcgccacagcacgccctcctccggtttgctgatgtgcccgaatgcgctgctctgcccactgcgccgccccagcacatcgtattggcgctgctgatgcagcgcgccctgcgtacgaccggtctcccggtgcagccggtcgcggctgaactcgcttaccagctgctggttgaacttgatggcgctggcgtggccggagccgtaacggagccactgcagttggtcgccctgcggcagcgtcagcgcctgcaggttggacagggcatcccattggtactgcagctcaccgttaataccctgctcgctcagcaggttgccggccctgtcgtagcgcagctgcacgctgtccggctcgatacccaattcgctgccggcggcggtcggcgtacgcgtcaggcagttcatacgcccggccgcatcgtaatgataatgccactcagcgctgtcgttggcgcgccagacaagctggccggcgtcgtcataacggaactgatgcaagcgttgtgcaggcggtgcctgcgggtcgagcggcccggtttcccgcagctccgccaactggccatcagggccgtaacgataatagcggtcggtgcggtccggacgccgttcagccgttaa

SEQ ID NO: 456847 - DNA, 480 bp, Serratia marcescens; identical to SEQ ID NO: 456832

SEQ ID NO: 456848 - DNA, 267 bp, Serratia marcescens; identical to SEQ ID NO: 454793

SEQ ID NO: 456849 - DNA, 267 bp, Serratia marcescens; identical to SEQ ID NO: 442389

SEQ ID NO: 456850 - DNA, 267 bp, Serratia marcescens; identical to SEQ ID NO: 454547

SEQ ID NO: 456851 - DNA, 795 bp, Serratia marcescens
atgagcgtacgccaggcatgcaggacgttatcgctgagcaggacggtgtatttttaccagcccgatacccggcacgatgagccggtgatccaggcgctgactgaactggcggagcgctatccgcgatacggctttaagaagctgttccagttgctgcgcaggcagggcaacaggtggaaccataaacgcgttcaccggatttactgcctgctgaaactgaattttcgccgtaagggaaagcaacgtctgccggtgcgcaatccggctccgctggcgacgccggaagcacttaaccagagctggtcgatagattttatgcatgatgcgctggtgtgtggcagacgcttccggaccttcaatgtggtggatgattttaaccgtgaagcgctggcgatagaaattgacctgaatatcccggcgcaacgcgtcgtgagagtgctggacaggatagtggcaaaccgcggctatccgcggaagatgcgtatggataacgggccagaactggtctcactggcactggcgcaatgggccgaagaacatggtgtgttgctggaattcatcaagccgggaaagccgacgcagaatgcgtttatcgagcgttttaaccggacataccggacagagatactggatttttatctgttcagaaccctgaatgaagcgcgggaaattacggagtgctggctggctaaatataacagcgagcggcctcatgaatccctgaacaacctgacgccagaagagtaccggttgatggctgaaaaaccggaaatctcaaaaagtgcctggaactaa

SEQ ID NO: 456852 - DNA, 552 bp, Serratia marcescens
atggcctatagaaacggaaactatatagctttcgatggattaggggaaactgacccaaccaagtctgattttcgctattatgcttcaatccaagcatgggcaaaaggaaaaggatttgattttaaatatgtcgatagccacgaaaaaacttatgcggtgcgcgattcaagtttaaggcaaactctcgaatctcgtattcgtgagcgactggcatcttcaaaaaatgtcgtaataatcttgagtgacaaaacccgtaagagtggaagtatgttgtcatatgaaatagagaaggcggttgatgtttatggacttccgctcatttgtgcttacaccaattataacaaggttatggatccatataaacttaataatcaatggcctctcgcactaaaagagcgcattgataatggtagtgcaaaggctatccatatcccgtttaaaaaggctgcattacttgatgcattaacccataccgtgcacagcaatagtttaaatagtggattgcactattatacactggaggcccatcgccagtttggatgtttagactaa

SEQ ID NO: 456853 - DNA, 879 bp, Serratia marcescens
atgaaatacttatgggaatcaattagaacaaccgcatattggaggtatgccctattttcaggtgaggcagttgctaaattcttttcggttcttggcatgttatatttgttaattaatttggctgatacttttaaaatttatgaaaaagggaaatatagtaattatggagtgatcattcttgtagtattagcaattttttttgtaatatttacacgacgccctgtttcacgtatttcttataaagttccaaaaaaagattactctttcgaggttaagataagtgatattttcaaggagcacggtgagataatcataagttcaaatactacatttgatactgatatgagtacagggttgatatcaacaggtagtttgcaaggacagttggcaacattattcttcaacggtcaaacagcagaaatagaccggcaaattgaagagtctctcgcacgtgaggaatttaatgaggttgacggtaagccgggcaagaaaaaacaatacccacttgggactgttgcgcgggtatcagcacatggtaaaaacttttattttgtcgcaatgtcacacattaattctgaaggaacggcatactcgacttctaggatgctggatgaagcactggaggggttatggaaaaatatggctcgcaaaggcgaattaggggatatggttatgccattgataggtacaggaagaggccgcgtggctatacccagaaaaaaaataattgaacgcatagcccagtcattcgctgatgctgctcaagatagagtgttttcaaacaagctttccattatagttcgcccagaagatgcatcaaaattttctttaaatctttttcaggtaagagattatttgagtcagagccttcatgcttga

SEQ ID NO: 456854 - DNA, 783 bp, Serratia marcescens
ttgagtacgtataggcagaagatttttttactcagcaacttggttaatgtcgagttaaaattacggcacaagaaaagtgtactgggtaatttgtggtatattgtaacgcccatggtatacgcagggttgtattattttgcatttagttacgtctttagtgctcgttctggccaggaagataatctcaccaatatggtgcttttattctggggggtgagtttacatgcataccttgctgaaattatgaataaatcgacatcgttgatcagtaataatatcaactatgtgaaaaaaataatattcccacttgagttactctgttttcgagatgtgatcaccggtttggttcctctcgctatcgctttaacaattagcatgatcgtgtttatttttgccgatattcaaattggctctgcggcgttagcgctgttaacggtaataccttatgtattaatttgtcttgggtttagtcttttctttgcagcactaggcgtatttgttaaagacttatctgcattatgcggcatgctgactacggtgattctttttgttagcccagtactttataacctcaaacagttacctgacgatcttgcatttttcttttatataaacccgcttacataccctatgcagacgctgcgtgaattagtgcagggcaaattgagctacagtgatttctttattggatatgcgtcatattcatttgtcgcagttttatttgcgagtattgcatactgcattttttccaaaatgaaaaaacattttgtggatgtgttatga

SEQ ID NO: 456855 - DNA, 1272 bp, Serratia marcescens
atgagtaataatattgcaatatcagttacgaacttaaataagtcatattttacatacggcaatccgtcagaaaaactcattgagattcttttcaataaaaagcgcggtttagaaaaacatgtgctgaaagatatcagtttcgaaattgaaaagggtaaaactgtcgcagttatcgggactaatggtgccggtaaatcaacattattgcagtgtattgcaggtacgcaaggatacagttctggagatattcaggttaatggaagactgacggcgttattagagttgggtgctggtttcaatggtgacttctccggtatggagaatatctatgtttcagccggtatcctcgggttgagtaaagaggaaatcgatgcccgcgtcgaaaaaatcgtcgcatttgcagatatcggcgaatatatttatcagcctgtctcaacatactcaagcggtatgtatgtgcgcttggcatttgcaatcgcatcccatacatcacccgatgtaatgatcgttgatgaagcgttatccgtgggagatgttttttttcagcagaaatgtaacctgttcatgaaaaatgagctaaaggatattactaagctgatagtatctcacgatctgagctatatatcccgcatggctgactcagtaattttattgcatgaaggggagatatttttcaatggtgacccacttaatgcgattgaacactatttgcgactgaaccaaagcgacgacagtattctgcgtggtgagatggccaaaaaatcaacgcgaaatgaaggtatagttcgtaaagagaagattaacttattggataaatcgaagctcagcggcaagcttgatgcgtacttttctgaaataagcgtacagattaatggtgataatcgacagaattcagctctggtgggcgatacggtggatattattgccactatttatgcagagaaagatattaatgagccgataataggttactttctcaatgacaagtttggaacaaccatttgtggtgaaaccaaccgagagtatggcacagagttgaaaagaatgcatgctgggaaaagctacacattatccctcagttttaaatggcctcatattaaagatgatgactattttttgaatatcggtcttggtgacggacatgagccatttaatcacgtcattcagtgctggaatatgaatttcatgaaaataaccggaattactcgcgagggttctacgcatggtattttcaataacaagatagaagagtttgttttttatgaatcataa

SEQ ID NO: 456856 - DNA, 3171 bp, Serratia marcescens
atgaatcataatattaaaccgtaccaggctgacgatgtttacctgcataagttggtgaactataaagatttattcgaaatcatatttgataatataaagttcgactccgtctgtgaaattggcattgaaactggtgagtttagttcaattctcgaagattatataaaagacggtgtgattaaagaatatcatggtgttgatgtttgcattactaaaaaaataggttttaacagccattatcatgaaatgacttcgttggaatatttaacctcggaggaacatttaggtcatgatctctatttagttgatggcgatcataactactatacggtgacggctgaactggaaaacattttttcagcagcatcaggaaaaaaaatctgcatcctgcatgatactaactggccttgcggccgtcgtgacttttattataatcctgctcagatcccggcggaggccactaacccattatcatgggataagaaattagtgcgtagcagttcagaaatgcaggagttggggttttacggaaatggcagcttcgcgatttctgaagtggaaaacacgcctaaaaatggcgtgatgactgcgattgaagattttatatcgtctaatgggaaatttaagactatttcttttcctcagtttttgggggtgacaatcctgttcaatgaagatttattgtcaccagaggaagtcgctgtcttttccgatatctctgcgttaatcaaacatgattttattgccaacagcttacatcagcttgaatacaatcgactcgatatttatacaaaattgctgtcggcctaccaggcacatgagaatagtgacaaaattaaagaccaggaaattttaaaactggctggggaactggatacgttaggtcagcagctccaaagaacagagtcagagttggagaagcgcatggatgataataataaagtacaggaagaaatggtaaggctcacagagacgattgaggacaaccgcaaacatagccgtttccagcgacgctatctgatttctgagatggaaaatgcgcatagaatcggtagtgggaaggtcggtaccgcctcaggaatgaataaactggctaactacgtaaagtttaaccatgcgtctctggggaaaaaatttgagaaagaccgccgtattcagcaattggccgatttctctgccaagacaggtggccataagttggttacctttgatttcttcgatacgttggttattcgccctgttgaaccgcctgaacgggtgaaggataagatcgcagaaattagctgcgatatattgtgcggcctgttgaaaatgcatattagcgtcgcttattaccatgaactgcgggcgttttatgaacgtaaactgcgggatgaaacgctgtatgtggcgctgaaggatcatgaaaccacgctgacactgatcgtggaagagctgctccggcacttggggatagatgagaccagcctcgttgaacgccttgttgaggctgagatccagctggaaatcgatgtgctgaaagcaaatgagggcgcgctcgaactgttgcgtatcctgaagcagaacgataaacgcattgtagtgatttccgacatgtatttacctcgtcgtgcattggttgcggttgccgaaaacctcgggatgtcggaatatatcgatgaattttatgtttccggtgatattggctacgctaaatactccagtcgtttatttactcatgttgccgaggttgagggtgttgcgactacggagatggtgcatttaggcgataattttactgcggattatgtcagtcctggaaacgttggcgttgcgtcatactggttacatcaaaaaccgaatctgacgcgacgttatctggctgaaaagaatatgaatggtgatatccattcggttattgatgggcttatctctcaagcaatgcctgccagcagtgtcaaacagcagctggttgccgcttattacaaagtttttgcgccggcggtattcagcatggcgtataaaaacctgaaagacggcatccgactgggcgtcaaaaacttttacttcctggcgcgtgaagggattgcttttaaaacggcttacgacctgctcctgacgacccatccagagtttcaggatatggacgttacaacgacggtgctttacgttagtcgcgccagcagtatctgttcgcgttatcagggtaaagacaaactgggcgtagtcattgggaccgtttatgagcgttttggctatctcagctatgacaatctcttgaatgcctggtccatccgtgaagatgagtttgattaccagccagcgcagcggccgaatatcaacacaccggaagacatctgtattctgtttgaggatgaggatttcttccgcagctttgaccgttaccagcgaaaagcgcaggaaaatctgcgtggctatttgcagcaagctggagtgtttgaacacccatgcttctttgttgatatcggttggggcggaaccatccagaaaaatattcagctgctggaaccggattgcgaactattgggagcctatattggtaccgatgcgcgttatggtctcaatagcatgaaggggtacttgtttaatgagtatgatccgcgaaccaagatgatcattaaatcagctccggttctggaagagttgctttctgtcggcagtgttaattctacgttatattatcagcaaagcgaggagggagtcattcctgtcttcaagtctggtcaagcggcggcatcagagttggagattatgcgtaatgacatttttaaacaatttgcgcaaatctttaagcaactgactcgcgattactgtgtgagcgccgatgaaatgctctctttcactaaagacaaactttatcggttcgttaccaagccggaaaaagcgttcattcgtgagattgaagaagttgattttgaattcaactggggcgacagtcagaagtataaactgattaagcctgttcaaaaacgaatgctgttaagaccccgtgcattttatcaccacgtgctctcatcaccatggctctttgctacactaaaagtgagcgggctgggtatgctaaatcgtctcgcatgtcaggttatgcatattgatccgcgcatcaccgcgaagctatccaatggcttcaaaggattatattacggactgcgtgccaagctgaaaaagtga

SEQ ID NO: 456857 - DNA, 798 bp, Serratia marcescens
atgatatttttctttgttccgtatttatattttcatcatactcgtgcaaaaggtgcattaaagcaaatttcatttgtcgcaatgtactttttgccgattatattcattgcgctatatgctatgccccctcagggggctacatatgtttcaacactgtggcttatcctgtttgggttctggaatgtctacagtgcctatgagatcggttatatatacaacgatctggaaaaaacaaagcaagaaatattcccgactaagaggttgtcggtcgaggaagttgcattttatgagcggaataagtctgctatatatatatcgcgatttcttctggtgttgataaatactgtagtggcttttgagttttcactaccggtgagcacagtgcttgcagcgttaactattctggttttattttatatttataacaggtgtgatggtgtgattaatctcccgttacacttttttttggttatggcgcgttatgtcggtcctttgatggtgtttggtatgcagtgggcgtttgtttttctgcccgcaatattttttgcattgccaaatatgatcgaaaggacgcgggaacctaaatttaccgtaattaacaacaaggtattttcctggttcaacaatgctcgagaagggcgttatcgctactatgccgtaatcgttgttattcatttgttactattaccatttacgcatagcgcaatttttatcttctcccttcttttgaacgtgtattttttactctatcgatatgcctccgttaagtttttgcagcggaacgatagggttacgtaa

SEQ ID NO: 456858 - DNA, 1149 bp, Serratia marcescens
atggcactcctttcgcagttgaaggcgagggaaacaatcctatttattattaatgctgattggtatttcgatttgcattggctgaatcgggcattgtttctacgagataacggctatgatatccacgtagcgacgagctttaacgacgaaaactttgtcaaaaagttcaccgctctgggttttcattgtcactcagtgtttctgaaacggcgttcgctgaacccaagcgatgacgtcagaacttgttacgccttctataaagtttataaaaaggtaaatccttcatttgttcattgcgttacgatcaaaccgaatctctatggcggtttggttgcagcaatgctcaagaaaaaaatcgttttcactatccccggtttggggaccgtgttcagtagcaaacagtttcgctttaagtttatgcggctatttgtgtcttatgcctataaacttattgcaaaaacaacacgctccattttcgtttttgaaaatcacgatgattacaatttctttgttactaaaaaaattattcataaatcacaagggatagtgataaacggcgcgggcgtgaataccgaacaattcccctattttgagttaacgggaagcaacactctcttatttgctgctcgaatgctgaaagagaaggggctatttgacttgcttgaagcggtcaaaaacctcagaaatcgcggacagaatgtcacgctgaatgttgccggtttattggatactgaatcggatgatgccatcagcgaagaacagctgtgtcaattgcatgaggatggtgtaataaactggcttggtgcctgtgacaatatgccggagcaaattcgtcagtctgccgtggtttgcttaccgacgacttatggtgaaggggtcccacggatcctgattgaggccgcgtcatgcggacgagccattgtgacgactgacgttagcggctgtcgggaaatagcgctggatggctacaatgccaaactggtttatccgggggatgtggaggctttgactcaggctttatccgaattgctgaccaatcgacagacgctattggaatatggtcgaaatggccgtcagttggttatcgacaaattcagcgacgacatcgttttacgcagtacgctaggtttgtacacgcaattcgtatga

SEQ ID NO: 456859 - DNA, 2358 bp, Serratia marcescens
atgaaaacctgtttccctgcccgtaagaaaaacggggagaactacgccacgctggatgaaatgatggctctgatcggccaggagcctcatggttcctggctggcgggcaccaataacatgtggcatggcgggatccatatctcggagatatcagccccgggttctgttcttaaaccaaacatgacggagacagcggttccgctgcagtgcatggcggacggtgaggtggtggcctggcgtctgaacaaggattaccagaagagcacctatctcgatcagcccgtgcaatatacgacgacgtttgtgctggtgaagtcaacctgcctgccggataagagcaaagagcaaacgcagctggatttttattcgctctatatggggctggcgccgctgtctgcgtttgagaaacgcaaatgcatggttgcccaaaaaaaggtgattaaaagggaagttggcaagtacgaaagcagccgacaagaaggggatgccccccatgcgcctaaggctatagggcggctcccaaagggagcgcggatccttatcctggaagagacagagttcctgaataagcctgtttcgccgaaggcgcgtccgggcacgaccgagctacagccgtttgggttggcacaggcgtttgacaaaaacggcaagctgacagaggaaaagttctgggtcactctgctgccgggatatatgacggaggagggtgagcagtatgcgcacctgccgttctggatgcagaaagcggttgagcagggcatctttgacgccgtgacgaaacccgcgacagcgctgaaaatcagcgcgggtgatgccatcggttttctgggtgaagatatcgccccgatgggcatggcaaaaaccagccgcagcacgtatgcccatatcgaggtgctcagtgccgacagccgcatgctggcgtttcttgataatccggggaaggtgacggcgggacgcaaatatattcgtgtccatccgactgcgaaactttacacgctctccggcagcacgtttagcaatacgggcaatccggtcgaaaaggataggcatatcatcctgccggtggataaatgcaacccgaagaagagcggcggcaagagctggtatcaggtcgggcagagctactggctgagccaggatgacgtggatctgatcgaccagtacaacctgaaggaactggggttcacggcgctggcggaagaaaccacgcctgatatgtcggcctcgctgcaagagggctggatgaagtccgggctcgggcggcttgccgagcaggtgaggcccgaacgcggtatccgggagcagcagatgtcgtccttttataaagggatgatcgacaagatggatactgacaaagacgggcaactgtcggagagagagctgtttgccgcgctgcagcatccagaaatgggtgttcgcgacatcgttgcccggatgatagtgaagcatcaaagcgagtggtttggcggcagcagccatcaaaaatggacggcgtttttccagaactacgacattctgcgcatcggctttgtgaagaagtggctggatgatatggagtggatgagccaggtggagccgtttagttcgggtcaggcggtatggcatatgcatccggtgatgtttttggatgcaataaaaactgtcgatagtggatttataacactgaacatggttttggccgcaaacttaggagcaaatgaagcacaatgtgagaaagtactgccttatttgaataaatatgcaaatgcttatggcatgcaagataaaagagaaatagctcactttttatctcaaataggtcatgagagtggttttaccataacagaagaaaatcttaactatagtagaaaaggtatgaggaggatatttggttgtaacaaaggtcccgaacaatataacaaagtgaatgatgactgtgatttagggcgcttaagaggaaaattatggacgcatgagtcgacatatgcatatcatcctgaaaatttagctaattatgtttatgcagatcgcatggggaataagagtgaagcttctggagatgggtataaatatcgtggtcgcggaatgattcagcttacaggtaaagatggttatcggtactttacaaatatgcacaacaaaaagaacccatcagataggcagaattttgtagcagaacctgatttggttatttcaaatttagagtatggtgtagagtctgcattctcattttgggtaagtaaaggtttgaatatgtcagctaaaagcctgagcgtttatgacgtcacgtacaaggttaacggtggttataacggctatgatgaccgccgcattaggtttaataaggttgcacaactattgggtattaacaaggactag

SEQ ID NO: 456860 - DNA, 876 bp, Serratia marcescens
atgaagtccgggctcgggcggcttgccgagcaggtgaggcccgaacgcggtatccgggagcagcagatgtcgtccttttataaagggatgatcgacaagatggatactgacaaagacgggcaactgtcgcagagagagctgtttgccgcgctgcagcatccagaaatgggtgttcgcgacatcgttgcccggatgatagtgaagcatcaaagcgagtggtttggcggcagcagccatcaaaaatggacggcgtttttccagaactacgataccttgcgcatcggctttgcgaagaagtggctggatgatatggagtggatgagccaggtggagccgtttagttcgggtcaggcggtatggcatatgcatccggtgatgtttttggattcgttgatccaaaattttaaaattaccaaagatatgctcagaagagtttgggttgactcaattagagtgcctgatgcattactaaatgtcgtagctgatgaactaaatactggttttgaacgatgtaggattaatacgagtaacagattaaatcactttatagcacaggtattccaagaagttggtccagggtttaaccttaatgaaaactttaattatagaccaaacgtacttgtctcaaaatttgcatactatgctaaccatgcttctgaagcagagaaagatggcttcatccctgggcgtcaggcggcaaacgctaaaaacatagccaacaaagcttatgccaatagagttaataacggtgggtatggaagcggtgatggttggagatatcgtggccgtggaatgaaacagttgacgtttagggggaactatagatctttttcaatatatcatgagcgaaaatggggggcaaaaagtcgattttga

SEQ ID NO: 456861 - DNA, 150 bp, Serratia marcescens
atggggggcaaaaagtcgattttgaagctgagcctgatttgttactcgaaactgtttatgccgttagatctgcactttatttttgggattttaataatttaccgactcgtgctgatcagggggtttctagggatgtttcatattcaataa

SEQ ID NO: 456862 - DNA, 861 bp, Serratia marcescens
atgaggttttttagtccactaattcttatttttatcactatgaatgcatgtgctgcggagttttatttaaaaccaggaacggaagatcttgatggtactaaatattatacactgacagctaaaaactcacatgggcaaaaagatattgatattgctttagaggggaatgcgaatacggcaactatcaatggtcacttgaacttttcttgcaaatggggaaggggcgacggtgtaagtgttgtaacgtcgtcgaaaacctctgatggtataatggctatttattcgtattatttttttgatgataaattgattaatattttcgccaaatcttatgctgtaatgaattcagaaaagccttattcaccgatttctcttaagcactcggtttgtgggcataagggggaaggagtaaaaaaagataaccggacaggtagagattacgtagaaaattatgaggttatcgctaatggtccatttgttttaaaaggtgtttcgaatacaaatataaaatatgttatagataatgggctaaatcttgttaaagaaagtgagttgggtgatgttgttgttgatacttataaaaacaaaggtgatctgtcgcctgtgaatttaactgtgttttttatgaaggtttcttctgaaatgaatattgtaaacttgatatcatgggggaatcatcatggtagccatgacatggggtgctataaagtttacgcgtatatttatgatggcaaaggcaatatatcaaagaacactgttataaataatgatgtgaatttatctggatgtgaaggtcagggggggcgattcaactacaaaaatgtttttgcgattaaatattatttaaataaaaattactga

SEQ ID NO: 456863 - DNA, 546 bp, Serratia marcescens
atgggattttttgaccggcttgaacgtgttgattctgcaataaatcggttttattcgcggcgtaaagtgtggctctggagtgtgatatcgctgccggtgctgtttgttctgggctggatggtgtgggtgatgttctgggcgccgccgatgggcggtgtgacgctgattatccacagtaaaattgacagacccattctgggattcagtgtgaacggggtcgctggcggtaattcctgggcttttgatcccaacaataaatatgcaggggagaatggaaaagcaacctgctgcggtagtatcaggggaaagaccgccgaggtgatctggacgctggatgttaccgggccacagtatgatgcaggaatgcggctggaacagcggcgggtggtaataccgttgccagagcgtaaacggggcgaggacgacctgcacgtccatttcttaccgggggacaaggtgctgctggggtggagtgacaacgccttttctccctatgatccccgcagtccgcactatacgccatcgccgcttctggcagaaaaataa

SEQ ID NO: 456864 - DNA, 171 bp, Serratia marcescens
atggcgaaatacgagttggaacaggccagcccggcgctgcgcggcgccacgctgcagctgaacgtcaacaacgtggcggacaagcactatgtcgcttcatgcggcaatacctcggcctgcttctacggcagcggccgcagcgttatcgcttcgctggcttacagctggtaa

SEQ ID NO: 456865 - DNA, 1092 bp, Serratia marcescens
atgggaatttatgttaggaaaagcattcgcgttggaccaatgaggtttaacctatccaaatcaggagtcggtgcatccattggtatgaaaggactgaggtttggtactggcccaagaggaaattacatccacataggtgctggcggagtctattatcgtacttcgctttcaccaaacctggtcccacagaaccgaaagaaggttctaaatgtatcagacgaatccagaatagaacatgacactacacatgcacctcttgaggaaatcgagtcatcccatatctcggaaatcgttgattcaagttctcgagaactgcttgaagagttgaacaacaaacgtaagaagtcacaaatatggcccttggtcatgtgcctttcgattgcgctattactttacggtttttcacaggcatggcctgagtggtgcctcgctataggatttattgtaggggtagcaatatctgtttttgcttacatgtacgatcagctaagaaagactactgttcttttttatgattttgatgatcaaatgatggcatgttaccagcaactccatgatagtggagccaagctcgcaagctgctcaaaagtttggcatatagaagcttctggagccgtttatgatcccaaatatcatgcaggggctggtaacttactacgcagaaaagtaacctctatcagcaaatcaaagcctccctttgttaaaacaaatattgagacgattactatcaatgtcggtcgccaaacattacatttttttccagatagagttctcgtttatgaccgtgaaggtgtaggcgctgttggttataaccagctcttcgttaatgttgccgacagtcgattcattgaaagcgaaggtgtacctggagatgccatagtcgttggcaggacatggaagtatgtgaacaagtctggaggcccagacagaagatttaaagacaattcagaacttcctatatgcctgtatgaaaatctttcgtttacaagtcattctggactaaatgagttattacaactgtctaaaactggctatggagaaagcttttcacattcaattgaaacacttagcaaaaaagtcatgtctgcttag

SEQ ID NO: 456866 - DNA, 600 bp, Serratia marcescens
atgaatttacactttacaatctttcctaaaagaacacaaaaagaaccctatttccttcgcgaatccacggtaaaacttaaccgggtgggcaataaccgagtaaaatcgcaattcatttttaagccttctttcaaccatatagccctcattctgggcctcgataaaagtgaagtagaccgggtcagaaaaataaaacaacggcttcctgatcataaattgataggtattgctcgctggagcattgcacctattgaaagcagccaatctgctttatgttatcttttcatctgtgaagacaatgtagcgtacctttctgcacctgagatggtttttactaatgacaccatatccatagactcaacgaccagacgttccgtctataaaacaacttacaatttgacaagccccaatacgaaatatgcgtatataaaccttcgatttcattctgaatacaaattggttacaaaaagacgtggtccgtcaaaaattaaaagattatccgaaggtgaaccgtcttctgcctatgcatctttgttggctgagaatgaagccttacgcaaggaagtagagcggttaaaaaaacaaaataatgccgaataa

SEQ ID NO: 456867 - DNA, 870 bp, Serratia marcescens
atgaaaaatatgaatcaaccatcaaccacaccatcatatattcaaaaacataaagatgtagtagcttcaaagtctaacactataaagggtaaccctaacactacaaaaactaatcttctgagtcttgagcagcaaattagtgctaggtataatcttttcgaaaatgctgtagctaataacaccctattcaatctgaatgaagatataaatcttattcgacataaagatgatcttttaagttgttacacaggaagaaccgctaaagtaaaagtaatatttaagaccattacagatgcacaacctcaacgttttttaaagcgctgcccttattgtggtataacattgcctaaaacatatgaccattatcttcccgagacaaaattccctgaactttcagttcatgcattgaatttaattccatgctgtggcacatgcaatcagactaaaaataatgattggaagaatgccacccacagaacatttctttacttctatactgacacaatcccaaacacaaactatctgcatattagtcttagccataatatagccgccagcacaataagtgctcatttttcaattcaaaggccagcgaacattcaaaataatgtttgggacatattgaaatcgcactatgataaactgagtttgattacatcatacaatgagtatgctaatgacgagattactgaaatttttaatgtttgcgtaagccatcttcggtacggaggaaaccaattaagtaattttataaacgacttagtctcaacggaagagcttttgtatggtctcaatcattggagagtagttctaatgaaagcgttagcatctaataaccactttcatactcttgttttagcagcggtttga

SEQ ID NO: 456868 - DNA, 1452 bp, Serratia marcescens
atgttcaaagtcaaagctttcaaaaatcaattaaagagtaatacttatccaatatttagcatttcaactgatagctgggatgattttggaactgtatgcacctttcatcttcgctatcatgaaagtatttcagaaagcatggaaatagggaaactaaaaatattacagatagatcaaaacagcacaaaattacccgatgaatttccttatttagataccgaatatattagcttaggtcagagccttaatttttacaaaagattattaaaggctgttggtcgcacagaatctaaaaaaactttagaagcattaaatgatatatcttggcagcctaataaaagcgaaaactttgaaagtaagtcccagtacagaaatgctttattcagagagaacagtgcacttaatgcctttagattcggaaaatctattattttgggtgaggaatttaatgaagagttttcattcaattatactaatttcatagaaggctcggaaagtcaatttactattaatgtagatttcgacgaatcagatgcattacctggaaggattgtcggaattattggtcgtaatgctgtaggaaaaacacaactaatgtcttccttagcaaaggatctagtacaagtaggtagagtttcgcaaaaaacaattgacgataaagacaataaatttaatgggaaacgaccgattttcaaccgcgtaataactatttcttatagcgcctttgatagatttattagacctaaaaacccacaggcaagttatgtatattgtggtataagaaatgataaaggtacattatccaagtcctcgcttattgaaaactacagatcaaatctatcgagaataattgatcttgaaagagctgaggaatggttttcatgtgtttctgaaattcttgaaaataccagcgatgtattaattacccaacttaaacaggacattgaaaaaagcaaagataatattgacccattatcatttttgagttcaggccaatcaattttagttcattttgtaacagctttagttgcaagaatacaagaaaatacattggttttatttgacgaacccgaaacacatttacatccgaatgctgtggctcatttatttaatgtactaaacaagatgctaaattaccacaactcatttgctattattgctacacattcacctatagtaattcaagagatccctcgaaaaagagttatactcctcactcgtgagggaaatagtacgatatctactccgatgaattttgaaactttcggtgaaaatatatcagaactaactcgacatgtttttgatacagtatccatacctaatcattataagaaggttttgaaaaaactatcgaaatcaatgagttttgatgaaataaacagccttttcgatgatggcttgggattcaacgctaaagcatatttattggctcaatatggtgatcgcaaatga

SEQ ID NO: 456869 - DNA, 1605 bp, Serratia marcescens
atgaaagggatgatttcactacagattgaaacagctaaaaattacagaggtaaggttgaagccattaagaaaaagctagcgacttttacagatgaatcgtttttttataatatgtaccatcatttccaagtaatcagaaatccaagagtaggtattgtttctaacttcccatggtgctgttttttagctcttaaatggaagtttacaagacctgtgcgttccaaaaaatatgaaatgaaagagaaggattatatcgatattattaataggatttataatcttcaaaatgaaatggaagggctatatgataatagcaagttcttgctcagtataagaaggatgattgttaatcaacaactatatcaagttcctatgaagtcggagattaatacaattgctcgccaatactattggtattctaattatgatggggggtattttgaacgtagttttaatgagttgtatgggattactcttgagcagtattataagcttagcgcctatttttcattggtttcgtgtgttgatgataaaaaagaatcgacttgtatatcaatgaatgtttacttgaaacatatagttccatattttagtgctgagactctaaaacgttatctagatcttgtttctattaattggggcgagttaagaaattttatgggggatttcaaagatgaacaacaaaaagaaattgaatattttctagatacgccgatgctgactaaaccatttatacgctatgatgataatttagttgttctcagcaagcatttgctcagagcatcgctttctgcattagttccttttctactaaaaaaagagctttcatcatcttataagaataagtttggaaaggtaatggaggattacattggggttctactaggtgaagcctttcatgatataactaaagaaaatgaaataatagatatgtaccgtagaaataaaatatcagcggaaaataaggtcgtagattttattattcatgaggttagtggtaatgtatatatagactctaaggctattgaaccggataaaactgtgaagtactctaatgcagctcttgttattaaacaaagattaggtaaaagctttatcaaaggagttattcaggggcaggattgtgctcgagctataaataaaattaatggaaatgtagcgtcaccaaaagattcattgttaataataactcatatggaccactatatatctaaaggtagcacaattgaaagtgttttagataatcaattctttgaagtaattaaggaaaaacatggggggttgtctattgacaaaaataggatttattatatgacaattgatgagtttgaatttatgatagagatatgtaaaataagaaatataacaataacatcaataatagattttttcagtaaagatgattcatctagcaccactcaaaagtttaacgtcatgatgcatttgcataagttacatccggaagggatccctgatagagatgttataaagaatactagagattacctattagatagttttactaatcctatgaaagaatctgatgattattgggatggaagaataagtgaatacttggaagtcagaaggtatctgttaagttag

SEQ ID NO: 456870 - DNA, 255 bp, Serratia marcescens
atgatctacccggacaatattggcaaaaacgatggcctgcagctgcgcgcgctggaacgtatctggctgcagggtaaattgaaaatgtgggggcgttggtcgggcatggagcagttcggcagcgccggcagtatgttcaatcagcttttatcgagccaaaaggtcacgaagtcagcgatcgcccaggcattgaggcaactgaaaaatcaggatgtgagaaagaagagctgcatcagtacctgctcgatattttag

SEQ ID NO: 456871 - DNA, 561 bp, Serratia marcescens
ttgaaaaatcacgttaatgctgttgtatcacgcgccagcggaaagccggcgccgatcgtctacgctggcgaaactgtcgggtttgggtgtgacgatctgcacgttgccacaatccccgtatggttggcccgcttggtgaacagccatttccactacagcaagcgcgtagtgaacaattcctatttgcatctggggattttcgacggccgcgatctggtgggcgtcatgcagtggggatacgcgatgaaccccagcagcggtgcgcgttgtggcgggcaccggcaaccgcgaatccccgctgttgaatgggtgcagacgtttgccgacgagcgctgcggctggttcggcgccgtatatcaggccagcaatttccattacgtcggcagtcataaaaccacgttttacgagctcggtggcgaatggtatcacaagatcgccatgacaatgaaagggcgcaaagccggaagtcgcggcaattttctgcaagagaacgcgcaccgggctaccgcctacacgttcaaccaattccgctttgaacaagcgggcgcgccggcggcttaa

SEQ ID NO: 456872 - DNA, 816 bp, Serratia marcescens
atgttccccatgaaggcaagaagggcgacagcagcccctccattaattaacatacaagcccttgaggcatttgctcctgcagtgattaccgttttaaaattttcaatgctcaccgctgtcaacaacttcattctttctagcttatggagattggtggctttgacattttctagattaaagtcatgtgatattggctcatgttctttaatgttggttaggtattccaacaacttatcagtgtctatttgttcgccaccgttgctttttaccttctgtacgctttctataatttcatctattgaagagttcacaaaaatctctcgtcgttgcgatgtgggggtgattgaccattatagcaatttaacttttttcccaaataaaaatttgggttttcatttcttacgcccggcgttcgctgagcgaacaaaggagcaaaagatggttgagcctgcaggtactactggggcagtgacaacagcattaaccggtgcgaccgttgtagggctgttatcaggcgtagattccggtgtattgatcggcgcgtttgctggcgccgtgatctttgttatgtctgcgggtgagtttttgtggctaaaaaagatggtgttatttgttgcctccttgctggtagggatcattactgcgccatttgccgcagacatcattacatgggcgacaccagccggaattgaagcgcatgagccggttggggcactggtggcctctgctatcgcagtccggcttctgatgtctgtcagccaaaaccctacagggttcttcgaccgatttcggcgaggtggaagcgatgctaaatga

SEQ ID NO: 456873 - DNA, 132 bp, Serratia marcescens
atgattttccaggccgtatatacgagtgccatctatctgaaaaccatccatcagacggataaactgcccatactgtacccaaaaatcatgttgctgagagccaattttcctaccgaaatcataatgcggtaa

SEQ ID NO: 456874 - DNA, 312 bp, Serratia marcescens
atggatacggtgaatgattcccatcagctacttaaaaaacacttctgggaaatggcgaatgatacttcgctgagcacaggaaaaaggagagtgctgcctgaagatacccacgattttctggcagagtatgtctatctactacatgttgatatgggcaattttgagtttcgccaatattttccaaacgcggggatttggttcctgcctaaagcaatgctccccaaacacatgcagacagataaccacaaacccgaagcgttaaccgtcgagatgctgattgagtccgccaaggctggccgctggctatattag

SEQ ID NO: 456875 - DNA, 951 bp, Serratia marcescens
atgggcgatcaaatatctattggtatcagcgcctgcttgctgggggcgtcggtacggtttgacggtggccataaacgcctggacttcgccgtcagccaactggcacctcatgtgcgctttgtaccgctgtgcccggagatggctattggtctgccggtgccgcgtccggcgttacgattggtgaaaaaatcggggcaggccgctctgtgccacagccagaatactgagattgatctgacggcggaaatgcgacagttttctgcccggcacgtggctgagctttcttcattgtgcggttatatcgtatgtgcgaaatcgccgagctgcggcatggagcgggtgcgggtatacgatgaaaatcatggcgcgcgcaagaacggcgtcgggttgtttaccgccgagctgatgcggcagatgccttggctgccggttgaggaagatggccgactgcaggatgcggagctgcgtgagaattttatcgagcgggtgtgtgcgctgcatgagttcaacacgttgtggcgcgatggtctgacgcgtgcgacgctgatcgcatttcacagtcgttacaaactctcgttgctggcgcactcccagactgagtatcgcgaactgggacgttttgtcgcggatatagcacactggtcatcgcttgagaggtttgcgtatgtgtatcgtcagcggctgatgacgctactaacgcacaaggcgacgcggcgtaaccacaccaatgtgctgatgcatgtgcaaggctactttcgccgttggctcagcccatctcaacgacaagagttgacgcagctgattgagcgttaccgacagggaacacagccgctgctggctcctatcacgttgctaaagcattatctggcggagttcccggacgtttatctggcgcagcagcgctattttgacccttacccggaagcgctgcgtctgcgttacggatattaa

SEQ ID NO: 456876 - DNA, 399 bp, Serratia marcescens
atgaaacggattttattggtgggtgggattttacttttggtgggatgtcctcgcggagatcatgtatcacctgaatatcctgcccatgctgcgttgagagagcaagttgtttgcatcaccgtcaccccagagaaggatgagcaagtacaaagtgtattgatcagtaagagtggtagtcacaaggcggaagcattcaaatattttgaatccacctataaggtcgtatccggtgagtgcgtggatatgcttggttatcgttttcagcacgatgagtcatataaggtctcgataaatctaaactccccggaaaaacgagcgcaaggtattcatccctcaagccgcacttttattgctgttttctccgttgaaaaaaataacgatatcctcgaaatttattaa

SEQ ID NO: 456877 - DNA, 291 bp, Serratia marcescens
atgtgtgtctacggaatccataccagccagacattggcaaattttgccggttttatcgttgcagtgtcgttcagcttctatgccaatgcacgcttcacgtttaaatcatcgacaaccgccatacgctacatactgtatgtggggtttatggggacgctgagcgtggcggtaggttgggtagcagataaatccgagcttcctccgctgctgacgctcgccattttctccggcatcagcctcatatgcggcttcatctattcaaagttcattgtctttaaggatacgaaatga

SEQ ID NO: 456878 - DNA, 921 bp, Serratia marcescens
atgaaaatttctctcgtcgttccggtcctcaatgaagaagacgccatacctattttctaccgagccgttcgtgaattcgaaacgttaaagcaatatgaggtagagatcgtcttcgtcaatgacggtagtaaagatgcaacagaatccataattaatgcactctccatctccgatccgctagtcatggcgctatcatttaccagaaatttcggcaaggaaccggcactgtttgccggccttaagcatgcgactggtgatgccattatcccgatcgatgtggatttacaagatcccattgaggtcataccgcgcatgattgaaaaatggcaggacggtgcagatgttgtactggcaaaacgtacggacagatcctccgatggacggctaaaacggctgatggccgaatggttttacaaactacacaacaaaataagttcaccaaaaatagagaaaaatgtgggcgacttccgtttaataactcgagaagtagtggaaattattaagttaatgcctgaaagaaatttattcatgaaagggatgctttcatggcccggcggccgagaggatattgttgaatacgtgcgtgtgaaacgcattgccggcaagacaaagtttaacggatggaaactgtggaatctggcgcttgaaggcctcaccagtttttcaacactaccgttacgtatatggacctatatcggattatttgtcgctgggatgtctttcctctatggcgtctggatgattattaatacattaattttcggcaacccaattcaaggttacccttcactactggtgtcaatccttttccttggaggcgtgcaacttgtaggaattggtgtattaggagagtatataggtagaatttacattgagaccaagagacgcccacgctatttaattaaatcgaaaaggaaataa

SEQ ID NO: 456879 - DNA, 1431 bp, Serratia marcescens
atgagctctcttaacaagaagttaattattttttctatttgcatatccgtaatttatagtttcccatttctgttaagcaaccatctttttattgacgatatgggaagaaatctttacggctatggatggaataatgatggcagattccttgccacagcactaatgaaattactctctctgggagtagtggtgacaggaatattcccctactcaacgatactatcctgcatggcatttttttcatcttgttacatattaacatcacagacaagcaaatttacacagcaaaccaacctcctgatcgcttcaacggtattcttctcaccttttattcttgaaaatatctcttaccgttacgattctctgccaatggccttgtctgtattggcatgctctataccctttatcttctataaacggagtatgagtactttttttctggtatccataccatgtttgctttttacgtgcctaacttaccaaccgtccattatcgcctatcctctatgcacactgattatcgcttctgcgatagccagggaaaaatccaaggcgtcaataaaattttgcctactgacgttagggtgttttatggttgcgaccggactatatttttcattaataaacgttgcaggcattaagttttacggccacagcgcgtctattgcaacctcatttgatgttataagcgagaggtttcacgtagcgtggggctatatcagaggttcattgaacatcccgcaaaaatcattaattataatctcatcaataacggcattactaagcgtgatatttaaatctggtattcgtgggttcacagaaaagttgctcatctgttgttttattatcattgctttcccgctatcggtatctttagcagttttgctgactaatactaatatcgtagcaagagtatttttaggttttccatttattttgatatttttgctgtgtatgtttaataaaagtaatgagaaagcggtaagaaccctctcggtcatcatgttcctatcatctctacctatggtatcagcttactcaacagcccttgacgatcaatataactttgaaaaaaatatagttgccagtgcattttataatatcgatacgacaggtaaaacaatcacctcagaaggaagtttgccttatgctacctctgttcagagcaaaataaaaaacttccctataatagggagtttaatactggttaccatgagagaagggtggccatggggggatcaattccttgaagggcaaggcatcattaaaagcggacaatatattagcggaccgaccgatgttaatggtgtagcccaaaggatgctaagagaaaaatgtacaatgataaaaataaagtcttcattgtattataacctctatatcaaagatgatatgatcttactagatttcagtaaaaacacatgccaataa

SEQ ID NO: 456880 - DNA, 228 bp, Serratia marcescens
atgaataagacaagagttttgtttttaaagggattatattgtcttctggacgatgactatagttcatctaaagttgcggaatatgcctatgaattttatctagatcatgatattcctgataaagagctttcatatgtggtagattatttaaaaggaattgatgctggcccagagtttgaaatgagtaaagatgaagtgatttctttcatcaatttaaatttgaaatga

SEQ ID NO: 456881 - DNA, 174 bp, Serratia marcescens
atgtacgggtataaaagcgattgggataaagtgttctccgttcttccgaatattaacaggagaatggcgatggataaaatttcacgctcagaaggcaatggcgtttcttttgatgaaaaaacaaaaaatgaaatcatagagcaatatctattcccttataaactcgataagtaa

SEQ ID NO: 456882 - DNA, 306 bp, Serratia marcescens
gtgcggcaattatcagaaatatcaaagattttgaaagaaaaacgccgtgaactagggtggagccaaaaagattttctgatgaaaattggtatgacccaacagcaatatcagcgtattgaatccggcagcgatattcggatgagtaccctgctacggatattggcggcgatggatttggaatatgttatcgtgccgaaaaggcatatcggtgacgtggaagtattgctgcaacaaaaagcagggaccgcgtcgaaaactgatacgttgcaggggtttgaaaaaaaactgcaagatctcgaggactag

SEQ ID NO: 456883 - DNA, 1263 bp, Serratia marcescens
atgaagggccaacggcaggttgaatcggtgcaggcattagcgttgattttgcatggcgtgcgtattggcgtgctggcacattacagcggtggtaaaaatatcctgacgttcgatccgcaatacctcgctttaccggagacgctccgcccgttgtttactctgcggcagcgggcgcatcaggggtatcttgaacaaattttacagtcatcgcagcgcctccctcccgttttatccaatttgttgcctgaaggggcgctgcgcagctggctggcgcaatcgttgaaagtgcatgttgatgaagaatttcctttgctggcatgggcgggagacaatctgccgggcgcgctggaagctcgcgcgcttgccgctaatgagatcccaagctgggcgctgacgtcgcgtggcgcgccggaagccgtgcacattgagtcggggccggatgtgcaaaaattttctctggcaggcgtacagatgaagttttcttctgtgcgtcaggatggccgcttcaatatctcttctttggtggggactgacagctggatcatcaaaacgccatctaccgtgcaccgtaacgttcctgaaaacgaatatacgtcgatgcggttggcgcaggcgataggagtggatattcctgatattgagctggttgcgttgaagcaactggacaatttacccgacatccgcctggccgacgagccttatgcctatgctatccgccgttttgatcgtggcgaaagcgggcgggtacatacggaagattttgctcagatatttgaactctacgcgcacgataaatatcgtgggaaaaattatgagcagatagcggcctatctgtatgagtggagcagcgagcctttgcgtgatgtacagcagatggcgcgtcggctgttggcaaacattatgctcgctaatggtgatgcgcatatcaaaaactggtcagttttctatccacagcagactgatgtacgcctctccccggcttatgacattgtcaccacacgggtttatatcccggatgagtcggaagcggcgctgaatatggcgaaggaaaagcgttggtcaatgatttccatgcagacgtttgagcgttgggccgagcgcgttggtattccctggccggcggtacgggtgcacctggcggacgcgactgataaggcgcgtaccctgtggccggaattattgaaaaacttaccgatggcggaagatcacaaagcggtattgcgccggcattgggccgcgttgtcaccggatttccgactgtag

SEQ ID NO: 456884 - DNA, 1539 bp, Serratia marcescens
atgacaaaatataaagcaatagtcaccaccgtcggcgcagctaaaattgccgccgcaacggcgggtgggacacagttaaaaattacacacatggccgttggtgacggcaatggcgtactgcctgaaccgacgcctgagcagacgcagctgctaaacgagcaatttcgtgccacgctaaatgcgttggatatcgtgccatcatcaaaaaacaatgtcgttgccgaactgatcataccggccgccgtcggcggtttctggctgcgtgaaatgggactgttcgacgaatccggcgaactgatcgccgttggcaatatggccgaaagctataaacctaaactggaagaaggcagcgggcggacgcaaacgctgcgtatggtcctggtcgtcaacagcaccgatgccattgaaattattgcgggtaacgataccgtattggcgacaaaggattttgtcgggaaagctattcaggaacatgagggttcacgtaatcaccccgatgccacccttacagaaaagggttttgtgatgctgtcaaacgccactaacagcccggacgaaaacaaggcggtaaccccggcggcgctgaaacaggtgagcgatgcaggattgaaaaaaacatcaaacctcggtgatgtgccaaacaaagaggccgcccgcagcaacctggccctgggcacagcggcaatacgtaatgtcggtacggaaaccggacagctgatggctgcggaagaaatagaccggcgctatttgaaaaaatctggcgatgcaatggatggatggttcgtgttaaaaagcacaatcaccgctaattactacgaatcgatgccagataaataccctgagggcagcggtgcatatgatgggcaactcaactcaaaagcaccgttttatcagccagatttttactggcaagtaactactggtggacattacgtaccattggtgaaaggacgcagtacgagaaaaaatagaggttggccgacagcggtcagttatggttatttgataccggagagagatatgcacgcccatccggttatccatgcacaaggtgatggcggcgtaaaatgtgcatgggaattcaacacggaatcgggaagaattaacagtaaggctggtgaattcacaccaattaatgaaacactaaacaccatctaccccattggaattgtcgttctgtttgcaaatacaactaatccaaacagtgctttccctggccaacgctgggaggatttaagcgctaaaggttatgacacgcgtgttctagctttggggtataccccgctagcaacagggggaagtaataatgtgactattcgtgctcataacttaccagaccacagccataaaggtggaatgaatgctcctggcaagtggtatgatactaccgtgactggcactgacaacagcgggaattataaattaggtttgacaataaacacatttaccgacggaacgggaaatgaaattgtcagaaatgaaccgctcaacgttagaaatgagtacgtccatatgcgtggctggatgagagttggataa

SEQ ID NO: 456885 - DNA, 1101 bp, Serratia marcescens
atgaataccaaatttattgccatattaaccaatcaaggtgcggccaagctggccaacgccaccgcgctgggtacccaattggagataacccagatggcggtcggtgacggcggcggcacgctgcccacccccaaccctgaacaaacggcgctggtggcggaaaagcgcagggccttactaaactccctcagcgttgatgccaataacagtgcgcaaatcattgccgaacagataatccccgaaaatgaaggcggctggtggatccgtgaaattggcctgttcgataaagaggatacgttggtggccatcgccaactgcccggaaacctacaaaccccagctacaagagggcagcggccgtacgcagaccatccgtatggcgctgattgtctccagcagcgatgccgtgacgttaaagatcgaccctgccgtcgttctggcgacgcgggcctatgtggatgatgaaattcaaaaacatgccaagacccgcaaccatcctgacgccagccttgccgataagggttttgtgcaactgagtaacgcaacggacagtaccgatgacaccttggcggcaacgccaaaagcgatcaaaacagtgaacgacgacgttgcaaaacgcctgctgagaacggatatgcccgtcggtattccactgccatggccaaccgacacgccgccagcaggctggcttaaatgcaacggcgcaacatttaataaaacgaaatatccgctgctggctcaggcttatcctacattgcaactgcctgacttacgtggggagtttattcggggctgggatgatgggaaaggcgttgatagtgatagaaatattttggcggcgcaaggcgatgcaataagaaatatcagtggagattatgggggagtgcaatttgctgaatctcgcgtcggcggcaacagcaagttgtacgataaaaaatttataaatgcgtatggtctttatttaagcaaactggtaagtgagtcgccggaaggtggtcagggaatattccaggtgtctcttgatgcgtcacgaattgttcccactgccaatgaaaatcgcccaagaaacattgcatttaactatatcgtgagggccgcataa

SEQ ID NO: 456886 - DNA, 312 bp, Serratia marcescens
atgaaaaacgtatttatcttatcggcgcttggcctgtctctgctggcttctgccaacgttatggcggcagataattttccacgcgattctaggtactcaagcaccacaggcggcgaaaaaattctgtttgaaggcaatgacggttaccgaacgtccaagtatacgctgcgggatttgaaaacgcttaccgagcagcagcagaagcatgaaagggagctaaaacagttgcgggaagaaaacaggaaaaaagatcgtcagatcgatgaactaaaacgttcgctgcgagagctgcgcagtaaggtgaaaggctaa

SEQ ID NO: 456887 - DNA, 255 bp, Serratia marcescens
atgccgtcggacgccctgaatgtgcgcagcctgtttatcaaggcgcgcaacgccgggatcggcattgcccccgggcatatttttgccaccgacgaccgttacgatcgctgcttccggctgaatgccgggtttggttacaacgccgacgttgaacaggcgatagcgcagctggcgcaatggtgtattcagtcgcagcagcagcagcagcagcagcagcagcagcagcaggacgagtcaggccagaacggacgttga

SEQ ID NO: 456888 - DNA, 177 bp, Serratia marcescens
atgaacgtcaccttcacaccccaaccgatcccggagctggcgatcggcgacggtatgctggccgggctggttttttcccccggcacaccgttgcagctcacgctgcggcccgatggcctgtggatcaccgccgtcaccgatgaagttacatgggaagccgtctgtgaggctagttaa

SEQ ID NO: 456889 - DNA, 246 bp, Serratia marcescens
atggccaagaccaccgcacaacgccaagcagagtaccgcgcacgccgtcgccaacaaggcgatattgtccgtctgaacacggaagtgagccttatcgcccatattgcgctcgaacgactggcgcgctatcacggcctgacccagcaccagatgctggaacggctgctcatcgaacccgataaggccctgtgcaagcgcctcgagggcggcgacttccgccgttatatcgacaagggggccgcatga

SEQ ID NO: 456890 - DNA, 900 bp, Serratia marcescens
atggcagagcgtccgggctggctgggtaagatccctggcgtggacgtaatgaccagcgatgaggcaaaggtttacgttcgggagtggaacggccaggatctgacgaatattgatgtaaacagtcctgactggacgaagtttgcagcgttcgcatctgacccggaaaatcaggcagcggtagcatctttggggatgttaggtaaagaccttgtttcgatagcaaaaaataccgttgtgacaaaatctttatttaaagaaatgacggctcaaggtattaaatttacacctgaaaatgttgttggagcagcaagagatagtagtggaaaaattattttccttgagaagggtaattctaaagcaggactacaacatattgtcaaagaacacggtagtcaattttcgcaaataggtgtatcagaggcgcgtattcctgatgtggtaatgaaggcagtcgctgatggtaaaatagttggttatcaagggactggcactggtcggccaatatatgaaactatgataaatggtaagaagtacaatatagccgtcactgtaggtaataacggatttattgtaggtgctaacttgcttgcgaggttcagtcaagtgaagacaataaaattgatggctgattatcattgtcacccattatggggaacaactccggaagacttgggtgatatatctcctgaagagctgccgatatcatcggagttaaaacacagtctcaggaaatgggctgagcggtatgatgccatacttaatatggatgatccgatgttgtctggtttcaaaaatgaaagggaagaaaaacaatttattgatgatggttataaactggctcttcttcttcaggaagagcttggggatagttataatattatttaccattctgagtattaa

SEQ ID NO: 456891 - DNA, 1077 bp, Serratia marcescens
atggacattcttgatgaattacacagcctttctgcgaagataagacaacagtctgaaattattcaaactgaagaggcgacaaaaagcgccttcgtaatgccttttatcagccgggtattggggtacgatgtttttgaccctacagaagttatccctgagtttatctgcgatgttggtatgaaaaaaggtgaaaaagttgattatgccatactgaagtctgatgatattcaaatattaatagagtgcaagaaaatcggtgagcctcttaacttgaatcatgcttcgcaactatttagatattttcatgtaaccaatgcgagaatatctgtgttaacgaatgggcaagtttataagttctttactgaccttgatgccccaaataaaatggatgaaaagccatttcttgaacttgatctgttggatatcgatgaaaatatcattccggaactgaataaattaactaagtctgcctttgatgtcgaatctgttgttaatgccgccggagagctaaagtatgtaagtcagataaaaaagatattttcggctcagtttaccaaccctgatgatgatttcgtaaagttgtttgcatccagagtgtatgatgggatgctaacgcaaaaagtaagagagcagttctatgcgctaacgaaaaaatctgcggcacaatggcttaatgatcaagttaacgagcgtctaaagtcggccttgaaaggcgtaactaaagagttgccgcatgaggaaggtaaggatcaagatgtgcttgtaggcaatgaagaggataagagcgaaatcattacgacggaacaggaaattgaaggtttccatattgtaaaatctattgtacgcattgccgtggagcctcatagaataacctatagagatacaaagagttattttggtgttttattggacgataataataggaaacctatatgtcgtcttcatttcaacagaacgcaattatatataggcgtatttgactcatcgaaaaaagaaactcggcacccgatagagacattggatgatatctatcaatatgccgagaatctaaaaaacacggtgcttaattatatatga

SEQ ID NO: 456892 - DNA, 1272 bp, Serratia marcescens
atggatgaaacaaaaagaatcatcataagtttcttaaaggaagatgcgaaaagtgaattattgaaaacaggagaaagcaaggctgaaataatacaaaaaatacaagatttgactgacacgctcatgaaggactctaaatcaaaaatagatgatcttctaaagcaggtatcagaatcttcatcatcagtttttccagggctagaacttgaattaaacatactgtctaaagaccccgtagatgcagatgttatggtttcagactctaatcttacagtaaaaatggatggagtaagtagctctcttctagagaaccaaggccacggcgttcgtcgatccgttttatggtccgctttgcaaatattgactcacgagtctcatactcgagataaaattaaaaaagccaaagggaaagaagtctctgttgagaaaaagcaatatattttattaatcgatgaacctgagtcatttcttcaccccccagtgattagagatgctagagaagcgctctataatttcgcagcgcaaaatgaaaactggcaggtgatggctacaactcactcacctatatttatagacttatctaaaaaacacactactattattaggatagaaaaagataaatctttaaacaaaacaatatccacagatgagttatctttttccgagaaagaaaaagataacatgaaaacaatcagattatgcaacccaatggtaaatgaatttttcttttacgacaatataatattagtcgaaggcccaactgaaaaaattgtgataaacaaaatatgtgaggttgtaggagttgattatcatataattgactgcctaggaaaaggaaacataaaaacctttgctaaaatattaaaccatttcgatgctagctatataacagtacacgattctgacatacccaaatgcataaaaaatggcaatattgcaggtaacggggcatggggtactaatgtgtccataatgaacgagtgtactaacagtaaaaaaccaatggtctttatacaaataccacacttcgaagggatgtttttggggaatttcaacccatcaaataaagttgaaaccgtcatatcaattctttctgacaattcatcagaagaatacaaaaacattttagaaaaatatagtagaatcctaaacaaagacccatcaatgttcatcaagtccaacgaagaaatggttgacatgtaccacgcattttacgccagtaataaagatcagattgagacgttaaagaaccctgaaacttggagcctctag

SEQ ID NO: 456893 - DNA, 537 bp, Serratia marcescens
atgggtaaacggctgaacgtgatggacgatcagcacctcgcccgcgtggttgagttttgcaccgatgcccggctgatcgtgcttgataccctgagccggattcattgtttggatgagaacagcaatggcgacatggcaaatcttgtcgccacacttgagtacgttgcagccagcaccggcgcatcagtcctgtacctgcatcatgtcagcaagggcagtgcccgcgaggggcagacggatcaacagcaggcagcacgaggcgcatccgctctaatcgacaatgcccgctggtgcggcttcgtcgcaaagatgaccgaggaagaggccaagagcctcaccgaccgcgcctatgaccgtcagcccatcggcaacgatcggcgcggcttctttgtccgttttggtgtcagcaaacagaattacgacgctactccgcacgaccgatggtatcaacggcgcgacggcggcgttttgctgccggtggagttgttggacgccaaacaggacagcggaaaggggcgtcaacgtgagcaagcatga

SEQ ID NO: 456894 - DNA, 225 bp, Serratia marcescens
atgcaggcaacgaagagcagaacgctcatcaacaagaaaaaactactgtcgatgatcccgctgtgcgagcgcaccatttacaacctggagcaacggggagaattcccccgccgtattgcgctaaccagccgaaatgtcgtttgggatttggccgacgtcgaggaatggattgaggcccgcaagttgtcgggcatccaggcccgtcgccccggaatggggggctga

SEQ ID NO: 456895 - DNA, 972 bp, Serratia marcescens
atgaaaattaaatcgaccataaccgtttgggaaggatgtgatcccacagtctcaggagccatcggcgagcttcaggatcgctggcagccgtactccaggtattcaaagcgctattccatcgttcggctgattgaggagctaatagaccccgctgtagccgcctatacggcgacgctgccacaacgctacttgggccacgtccctggcgcgggaacagggctgagcttcagcgagatcattcgattggtggggcttgacgcgatggttcgcgtacagcggcagttgttacgccagttcgtcaaaaccgtgggcagccaatccacgagggatgagcgatttgtggcgacgctggaaacgttgatcgaattggttggggactgcgcctgcaaacggccggcaaagtcccgagtacgcaccacaaggctgaatggcgaacgccgtcaaagcttttgcaggttctgtggttcactaacggaactcgccttgtacgctgacgggagcgacaccccgaaggccaatgatctggaagaagaacttcgactgagcagccaatactgcctggatcatcggccaaggttgccaagcggcacatggaatcccgcctatcggcaagcgaggcgatcagtcgctcaattcgatctcgaattgagcaggcttagccagcaatgcgcaaagcctgccaccccccaagcgaaatcgggcaatcagctagttgatagctacgtctttcactacgtggcgggtcaatgcttgcagccggcagacacaaacgaacttcgtaatcaagcacggcagatggtggacgcgaagctgtcggaccgtaaaaagcagatgctgatgctccagtggtcaggacacaatcagtcggagattgcacgaaggctgggcatcgaacgccaggccgtctctaaggcaattgccgcaatccccgagaagtttcacctgaagccgccgaagcggtctggccggtaa

SEQ ID NO: 456896 - DNA, 231 bp, Serratia marcescens
atgcgtgagcatcgtaactatggagcactgcataagcgtggcatgcgtcgtgtgggggagagattagaggccgaaacctccacgatgactgacaagcagaccatcaagcttttgcgagaaactctctccttgatactagcagggatattttatgatcatattcatgttgttagcaatagattggtaagagatttgtttcgaaatgtgagcgatactaatagtaaaaattag

SEQ ID NO: 456897 - DNA, 204 bp, Serratia marcescens
atgggtcgcaagacacgtaagaagtaccggactagcgttcagcaaacgttttgtgcgaaagaccattccagagtttttttcaagggtgtagccaagtatctgctcggtctactcatccgcgagatcatctcggaggtttttcattctgaaggagttgcttccgtctggtcatccatcaaggatttattccaatggaggccgtaa

SEQ ID NO: 456898 - DNA, 960 bp, Serratia marcescens
atgataagcacaaaacgttcctctagtcttcataattctcccaagctttaccctttgaaccaatcccctctttttaagctaaaaacaaaaagaaaattattagaaatcataggaatatcgaaaaaacaagcagataaactcatgcttgactctgcgtacaaacaattcgaaaacgatgcaggaaggacaatccaggagccaatcccccagctaaaagcagtgcataaacggattggtacattattgagtagaattgaattacccgcctatttgcattccggtcggaaaaagcattcaactctgacaaatgcagagtctcacaggcatgccactgagcttctaaagcttgatattcacaagtttttcccctcaactaaggcagcgaaagtctacaaagcatttactgaaaaatttgagatgtcgcctgatgtggcttacgtgatgactaatctcgtaacttttgctggaaaagtgcccacaggtagcccaataagcatggcaatggctttttgggctaatagaggcatgtttgatactctgagcgaactggctgcctcaaatgacctagtatttacagcatatgtcgacgatgtagcattctccgggtcaaaaataccaaaaggatttgctgcccaagctaaaaaatgcattacctctcatggccttacctcgaaagacaaaaaagaacgattttacccatcatcagagggaaaactccttacaggaatagtgattcaggatggagaactaaaggttcgctgggcacacaatgattcaattcgtaaagaatttgctgacttggctaaagtaaaggataactccgcaaaaattattcatttagagaagcttgcaggtaagttgcacgcagccggtcaagttgatttccgacaaaaagataaagcccgttttttcacacagcaactcaaagtagctaagaagcaatcaacagagagcagctag

SEQ ID NO: 456899 - DNA, 198 bp, Serratia marcescens
atgaaaaaagtaactctgctgacagcggaagctgtgattggcggcaagtgcaaaaagaattgcacggatagttatgagtggattggtacccgtccaaaccgggtgtgcaacttggttcgcacctgtactgataagtatggcaaggtgcatcagacatctctgccggttgctgacggtgaatgccggccaggtggttga

SEQ ID NO: 456900 - DNA, 672 bp, Serratia marcescens
atgtttaaaaagccattggcactgattgtatatacgttgtttattattgttatttcttcgctgattactacagcatatatccactattttgttttagatgggcaacatgaagatattccggcgttgacgtcgatcggtgacgagcagattaaaaacagcccgataaaagaggacaataccattgtcgaaattttctcttatggttgtcactactgcgcaattaatgaaggcaacgttaaaaatcttgagtcacaactgccgtctggcagcaagctggttcgtctgcatatcggcaatccgcaaaacagtggtctgtccgcctatgcgccgctgttcgccacgctgtcggtgatggggctggaagaaaaataccgcgaaagcgcctaccaggcgattatcaaagagcgccaggatctcagcgatccggcgcaactggggaaatggctgcaggataacggtatcgatcgtactgactatcgcagcgccagccagtcgcaggacgtcaaggatctgctggcctatatgacggcagttagcgagtactatcaggtaaatgctaccccgagctttatcgttaacaaaaaatggctggctcagcaggatagcgatttccctacctttagcaaaaagctgctgtcgctgctgaaaaacgatagcccgcaggaaccgtaa

SEQ ID NO: 456901 - DNA, 1068 bp, Serratia marcescens
atgacatttattgaactgtttaaaagattacccattatttctggactggctattttgggaatcggcgcagcttctcaggcgttggccgcacctatgccgggaacttgtgtgaacactaaagggacgaaagatttttatttcccgtttgatgcgcaatataccgatccggaaaacaacaggccaggtgtaattattcatgatgcctcgaagggaaagtggaatctatatgaaggatatatagctgagtgcggttgtgataacatgattgaagcatattttacagctgagtcattattgcgagcggttgatgctgaggtagatggttggacctattatgtattaaatgaatatctatcagtggctagtgccgtaacaattgcaggggggcatgatccaggtacgaagtttaaagtaccattttcaaatttatctaacatcatgccgtcacaatacaaagtcccctgtaattcagttaagaatgagtatgatagtggagctactggtactgtgaatttgatgtttcgccggccatttgttggtgttcaggtcattccacggactaatctgcttgagatttatatgtcatcgacatctggcgtgaggagtccggagccggtagcgcgtgtatccatgagcggaacggtaaccgtgccgcagaactgtgaaatcagcccgcaaccggtggtcattaactttggtgaaatcatgtcggccagatttaaagaaaaggggaagatgccgaaagactttactccgtatcatcaagagttaacgctggcatgccgaaatatctcggatggggtgaaagtcagtctttcatttaatggggaagccgacaccactgagttggatgcgttaaaaagcgataataaatcgatagccgttaaaatcgaagatgcagaaagaaatgttgttgcgccaaatggcggtaagcttcccgtagtcatgaactatgcggagcagactgggaaaacggaaatgacgctttatccagttaatactacgaataaaccaccggaagtcggggtgtttaactcgacggcaacgatccgggttgagattgaataa

SEQ ID NO: 456902 - DNA, 252 bp, Serratia marcescens
atgtcgcctccgatatctcgtatggaggcagatgtgacggtattgaaggggcttgtggtcggcgtgctgatgggatcagttctggtcggttgcggcgacgattccagctcggataagcggtacgacgcgagcgacgaaacatgcaaagcggactattggaaaaccttgccggcaggaaagtcacgcgacgacctggtagcgcaatgcttgcgccgaggcgaatacaagcagtcggaaccgaaaacctggtaa

SEQ ID NO: 456903 - DNA, 699 bp, Serratia marcescens
atgccggcgcgagcgggcatcccggtcttcgacggcaccaacctgtcgcaaacgaccgtgaccgcgattcagcaagtcgcgcaggttcagaaacaaatcgagcaatacgcgacgcagttgcagcagtatgaaaacatgctgcaaaacacggtcgcaccggctgcctacatttgggatcaagcgcagtccaccatcaacggtctgatgcagtccattgacagcctgaacagcctaaccaatcaagtcggcagcctggacgcctacctgggcaagttccaggacgtgtcctactacaagtcatcgccgtgcttcacctcggccggctgctccgacaccgagcgcgcggcgctggaaaaaacccgcgccctagcctcacagtcgcaaaaggccgcaaatgatgcgctgttcaagggcatcaaagatcagcaggaaagccttaagtcagatgcgcgccagctcgaacgtctgcaatcgcaggcgcagggcgcaaaagggcagatggaagctatcggctacgccaaccagattgccagccaacagtccaaccagctcctgcaaatccgtggcctgctgctcgcacagcagaatgctatcggtgcgcagatgcaggccaaggcggatctagacgccagagaggcggccgggtcagcacaattctggtccgaaaagcctgggaaaagtggcgacaaaggttggtaa

SEQ ID NO: 456904 - DNA, 225 bp, Serratia marcescens
atgagtgtcaaaatctatgttgccgtcatcactgtggttgtcttggtcgcaggtgccggcctctccattttcggcggctcacaagagcagatgccggaagtgaacgagcaaaattgtcagcctgagaaaatcagcacaatccaggatagcggcctgcgtgaagacttttcaggtaagtgcttctggcgtcacaaaccgggcaaaagctccgggaaaggctactaa

SEQ ID NO: 456905 - DNA, 1470 bp, Serratia marcescens
atgaacaatgttcggattggacccaataccgccgtgctgatttcggcgctgctgcttctgctgctgttctctttcaatgctcatgcggaagtcagcaacaccaacatgctgaatggcatcgttgagaaaattaacagctctactcaaggtatggccggcaagcttgttggctttgctactaccctgttttgggcgctcgcggtcatcaacatggtggtgacgttcggctttatgctgatccgtagggctgacattggcgagttcttcgccgagtttgcgcgctttatcattacgctcggattcttctggtggttgctatcaaacgccgtcaccgggatgaacatcgccggcacgatcatcgaatccatgcgcaacatgggtgcccaagccagcggtctaggccgcgaattatcgccgtccggcatcgtcgatgttggattcaatgtacttttcaccgtctctgaggccgatcttgggattgcagataagctgcttgcctatgccgtcgccgtcatcattctgctgatcttcgcggctgtcgccgtcaacatggtgctggtcctggcggaatcgtggttcctgctttactgcggcctgttcgttctcggcttaggaggcggccgttggacctcggatatggctatcggttactaccgccaggtcctcggcgttggcttcaagctgttcggcatggcggtgattgtcggggtgggtaagggattcattgacggcttcctggcggacctgtctggaaatccgggaatcctagaactggccgtaatccttgtggccgcttatgtgttctacaagctgtcggactgcatcccgtcaatgatggccggccttatctcgggcggcggtcccggcggctttgccggtggtggcggagccgtaagcgcgggtgccatcgcaggggcggcggccggcatggtgacggccgcagcgtccggtggtgcctctctggctgcatctgccgccggcggtgcgcaggctgtcatggcagcagcctcggcggcctcacaagccgccgatggcggcggcggtggcacgttgagcgcgggcggaagcagcgaagaatctggcggtagtagcggcggaatcgccggcgacgaaccaatggccgccgcatccggtggcggtggctccccgatggcccgcgccgcaggcgatggcgcatcgggcggtggcggtggttcgtccggtgttcaaagagccggccagatagcaaaagggaccgtctccaaccttgccaagggcatcggctcgatggcctcggctaaggccggcagcatggccgacgcggcaaaaaaccggattgcggaaacgactggcggcaagctcgccgcgacgatcaaggcggccagcagctcgaccactgacgacagcctttccggctcgaataacaatgcgccggccgacgccggcaatgatgaggtcgcggcgttcgtgaaccggccgcaggcgacctaa

SEQ ID NO: 456906 - DNA, 246 bp, Serratia marcescens
atggcaactgtatatcctaacgaattttctcaagtagttcagcacgcggcggcggaattaaacgccatcgactggctggaccaggcaaccgcccgcgagctggggccgctggctgaagccacggccaacatgttcatggtgctgttctatcaggccgaaacgggcctcgcgacgcgcgaggattttctaaaagccagggcgcagattcagaacgttctgagcacccacaacggtcatttccaataa

SEQ ID NO: 456907 - DNA, 261 bp, Serratia marcescens
atggatttcttcccccctcaatcgttttcggatttcctgcttgtcatgggactgctgttcctggtgttcgtgcctggcttctatcttctcggccggctcatctgggcgttgggtttcggcccccaggccaccgcgcttgcagacaagatggaacacatacagcagaccgtcatgcagccgaccggtcaaaggctgatccgaaccgctgacaagctctcaaaagtgcgcgtcgggccgttcaacggccgcaagcgcccctaa

SEQ ID NO: 456908 - DNA, 348 bp, Serratia marcescens
atggaaaagacaaagcgaaacatcgctgatgcccttgctatgccgggtaccgctgacattgaggttgagtttccgcgcgtcactatcggactcaagcctgctcaattcgatgcagacgatggagaaggcaagacacggaacatcgttgaagcgctttcgatgccggaagtcactgacattgaggttgagtttccgcgctctcgcgaacttccccggatcattgatttatccgacgaggcagaaagcgacggcgagctggccgatctggtgaacggcatcaccccggataacctgcctcctgaaatcaacacaggcccggaagtcggccgcgagcgagacaaaaaatag

SEQ ID NO: 456909 - DNA, 315 bp, Serratia marcescens
ttgacggcctatgttctcacggccgaggccgaagtcgatttacgcggcatcatccgctacacgcgcaaggaatggggcgctgcgcaggtacgccgctatatcgccaagctggaacaggggattgccggccttgcagctggacaggtccctttcaaggacatgagcgaaatctatcccgcgctgcggatggctcattgccaacatcattacgtcttttgcctgccacgcgagcgagcgcccgtattggtcgtggcgattcttcatgaacgcatggacctcatgacgcgattggcgggcaggctcaacggccaatga

SEQ ID NO: 456910 - DNA, 252 bp, Serratia marcescens
atgagtcgcctgacaatcgacataacggaccagcaacatcaaagcctgaaggcgctggccgcgttgcagggcaaaaccatcaagcaatacgccctcgaacgcctgttccccggcgatgctgatgccgaccaggcatggcaggagctgaaaaccttactggggaaccgaatcaacgatgggcttgcggggaaagtgtccaccaagaacatcaacgaaattcttgatgaagagctcgccaaggatcgcacttga

SEQ ID NO: 456911 - DNA, 852 bp, Serratia marcescens
atgagcacaaggaacgcacggcgtgtcggttcgatgctggccgggatcgcacgccaggcgggcgggctgaccgatgccgaagccgagcgcttcgaccagctccgtgacaggacgccggccgagccgatgaggtttgacgacgcccctgtcctcaaggtcgcccgcgtctatttgcgcgtcagcactgacgcgcaggacctggaacgccaggaaagcatcatcgagggcgctcgggcggccggttactacgtcgccggcgtctaccgtgagaaggcatccggcgcacgccccgaccgtcccgagttgctgcgcatggttgcggacctacagctcggcgaagtggtcattgcggagaagatcgaccgcctcagccgcttgccgctggccgaagccgagcgcttggttaccgcaatccgagccaagggcgcgcgcctggctgttcctggcgttgtagacctgtccgagctggcggcagaggcgcagggtgtcgccaaggtcgtgctggaatcagtccaggacatgcttttgaagctggccctacagatggcccacgacgactacgaggaccgccgcgagcggcagcgccagggcatcaagctagcgaaggatgccggcaagtaccagggccggcgagccgatccgaagcgccgcgctcaggtaatcgccttgcgccgatccggccacagtatcaccaggacggccgagctggccggctacagtcctgcccaggtcaagcggatatgggccgaggtcagcaaggacgaagcgaaacgcataggagccttccaggaggacgccttgggcgaagccgatgctctggctgcgcccggccaaagaggcacacgaccatga

SEQ ID NO: 456912 - DNA, 138 bp, Serratia marcescens
atgacgaacgaccgtgaaccgcgggtgcgagagctgtcgccggccgagattgaggcgctgcgccgggagatgagggagtctatcgaatgggccaaagccgagttggcacaccagcgcgttgttaatgcgggggaatga

SEQ ID NO: 456913 - DNA, 726 bp, Serratia marcescens
gtgaacgaagcggtagacttaatcgagaagttgttcgggaagactacgcctgtaccggctagcgataacatcaaggtgcgcgctgcggatcgagctatcgctaaggttgctccgtttcatcggcaaatgaacgggattggcgatgccatcattatcgagacctacattgatgcgctagccgcgcgtaaagacaaggacgtgttcgcctttgtgacccacaacatccacgacttcagccaaaaaggggccgacacccgtacccctcacgccgatttggcgccgctctttgatggtgtgatatcgcgatacgaaaccaatcttagcgcgctgctcagcgagttcgcgagcgacctgatcgaagagaccagatttgaacgcgaatacagccaagacccgaggcagctttccgagttgcttgaggcggagagcaagctcacaacgcaggtttggtacaacaggaaatggaacatcatcgctcgtgtcgaagacggtaaagaaaagctggtgcctaaagaggtttgggaccaagccaccccggaagaacgacgaaacctactcgtagatacgatttgggaaggaatgctcgccgctatgaagagggccgaagaagagttaggcaccgaagagctgggcccttggaccgacttcgagtgggggatgatcaatggcaagctgtctgccatacgctgggtgctaggtgatgagtgggacatgctcgatacgtag

SEQ ID NO: 456914 - DNA, 768 bp, Serratia marcescens
atgagcgggccagaagtagatgcatatttgcgtagcgttttagcggctcatgcagttcccaccggcctcttgtcacctgtcgggcacgtactggccgttctcgagcctgtgattaggaggtggggtaaccagttcatagtctcgatcaatccgagcggatcgttttcaaagggcaccgccgtacacggtgggacggacgtagatatcttcgtatcgttgacttcatcgctcactacgcctctgaaaaatatctatgacacattgttcaatgcgctctcaggtgctggctatgttccgcgtcggcagaacgtttcgataggcattactgtcgggaactataaggtcgatgtgacgccggcacgccgacatgatcagaccagcaactatcacagcctttacagcaacaagactggatcttggcttcaaacgaatgtcagtgaacacattcgaatcgtcagccaatcgggcaggttggaagaggttaggttattgaaggtctggcgcaatcggttaggattcgactttccttcgttttatctggagcttttcacgctcgatgctctttctggccggcgggtaggaaatctgtcttccaatatcgcgaccgtcttagaggcgattcgggacaatgttgctagcagaacgcttatcgatcctgccaatacaaacaatattgtctccaacacgctgaatgccgccgagaaggctatgctggcgcaagccgcgcgaaacgcactcgcaagtaactggaatcaggtgttcgtatga

SEQ ID NO: 456915 - DNA, 720 bp, Serratia marcescens
atgactgtaccgtggtctcttccagcgcttttagccgacttccacgccaaagtggaggcggagctgcgcagcgcacgcacgctcgcccatcctgtggataaaggcgacgcaagcgaggcggtctggatagaaatgctgaaccaatatctaccgcgacgctacgaagctcgaaaaggacatatcgtcgatagccaaggcaatttcagcgatcaaatcgacatcatcattcatgatcggcagtattcgcctttcgttttcggtttcaagggcacggaaatcgtgccagcagaaagcgtctatgccgttctggaggccaagcaggcgaccaacgcccagcagatcgcctatgcgggggcgaaggctgcgagcgtccgagcacttcaccgcaccacgatgccgatacagacgctcgacggactgcgtcagcctaagccactgcacaacatcattgcgggactggtcacgctgtcaaccgattggtcgaccgcaactgtcgaagaaaggatgcatgagcatcttgtgcgagacgaaggtgcaggccgccttgatatcggctgctttgccgataccggatggtttgttctcgatgagagtgcccgctatcaggtcagcatcgtcgacaaggccgcgacacgcttccttttcgagttgatcgcccaactacaggcaattggcactgtgccaatgctcgacatgcgcgcgtacgcggcgcaaatctga

SEQ ID NO: 456916 - DNA, 357 bp, Serratia marcescens
atgaaagatattccagcttcagttatccagagcctggttgccgctaaaattggtgaaaccgttgcgggcaactatgtaaaactgcaggagggatggagtgtcaccgacccgcaaaatcaagccgatggctctgttaagatggctgtgttctattccgtattatttttcgatctggcagagcagaagtactattccaaaatgcaggtaggtactgtgttgtcaaaggaccagcatggcgatttggttgttcgccggccttttgattactccggagcggactttatgatggacgccctcgactcatggccgcttaatgttcgctatccaacgtttctggcggaaaggcctcatggctga

SEQ ID NO: 456917 - DNA, 1005 bp, Serratia marcescens
atgtcacgtaacatcacccccggttattgtgtggtagaacaacctggttcattggcattgcaaacaggattgctgtttaatcgtcgcaatacacacgcagctcgtcacttcatgcaactcaatgcagatacaaactgggtaaaaccaggccagattcttattgtcgcagacccagacacccctatgaccgggcaaatgttacgctcactcagactagcaaaacagcgagtcaatgaaggtcttgttggtatcagcacggatgaatcgagttttttccagcgaaattacggcatgattgccggcctgacttttgctggtgataaaatttttggtgccattggtgatacaggtgaaaaatattttcgagctatagaacacacattaaaaaaaattgagacgacttatcaaaaccagtaccgaactcagggaacgcttatcggtcagcaattttttgtggaaagaaaccgcctttttgccgaactaaaagaattggttaataaacccattgtaaagtccatggtgaagaactctataaaattaaagccttacgataacatgcgacgtgcattgaatctttccagccgttccattgtgcacgagtggtctactgtcggcatcggcgctatccccggatattccacttatacagccaatgcagctaaagcagctcgtttccttaagaccggtgggtatatcggcatcgcattttcgttctcgggtgcaactaataacgtagtcaactcatgcactacaggaagagaaaatgaatgcggaaaggctgcctttaaagaatattctaaatttggattcagcactgcaggtggacttggagggggggcattaggagcaaccgcaggaggagctatttgcgttggtttaggaataataacagcgcctgctgccggtgctggagggttcgcatgtgctgccgtaggatcgctggtcggcggatacctgggtagcaagtcaggcgaaacttttattgactacctacttaaagactaa

SEQ ID NO: 456918 - DNA, 423 bp, Serratia marcescens
atgactgatatcatcaaaacgtatcaatcgctggaagaagaattcccaatggaagagatgcgccggttatatctggccaagttcggcgaaaccgttgacggccgcctgcggctctacggcaactgggaaattagtaacaaaggtgcccttacaactgctgagggcgaagtattgcccttcatttctatgtactactggtttaccttcactgaggggactggtcgtcgtgctacaacctatggcgtttcctgttatgtcgatctcaccatatacgatctattaggcaaaactcactttatgccattaagtcccttcaccgctgagtcaaagaattacagagtagactacgtccacacaaatcatgagttccatcccttcggccacaccaccacccgcgaattcacaaaacgtcctctaggttaa

SEQ ID NO: 456919 - DNA, 1251 bp, Serratia marcescens
atgcttcgtaagctaaacgccaaaaatctggctgcggttgcgtttttatttaccattatagcagcatcaaccagcttaaccgacagtaccattacccggaatgcattttatttggcggtatttttcgctattattgcgttcaccgtcagcaaggcacgaacgatttcctgtgatgctatcctcatatctggtgcagtatttttcgtcgggttcagtcaagccatttggctttggcgttttcccttatccggaaatctcacagcgcatagcgaatacttagtcagttcaacgcgtttactatgcggtgcagtacttattattacgcttggttcattgcagaataccatcagcgataaagtaaaatccttcaccaaaggattagtgatatttggtttcttttacgcatcaagcataggtctctttcttcacacccagaacccggacatgaggttagaaataaacaccgttgccacaaccaccgcgtacgtttatatattgcaatcattattaactgtatacataataattaatgagtcatggcgctataggctcataagcacaactatcgttatattattaagcatttgggttatttttttgacagaaacacgatcggcgctgcttatttatccggtgttattattgatactgttctgccgtcgccagcacctgaaggtgaaaaccattttggtattcagcctattatctatcattgtggtggcggcaagctgccatttatttaccacagcaaccgaacgactcacaaacacgattaatgaaatcagcaattaccaaaaaggcaatggcaattcttcactaggatcgcgtatcagcatgtggaaagcaggcatacatgctatagagcaagcaccggaagggcaaagctctactcaacgctttgatatcgcaacacagtacatcgaacaacatgaaggaggcaacccagaggcactgcgcaacatcgtctatcacctccataatgatttcattgaagccggctccttgcagggcatcgtcggcattctcgcattagtcattttcttttcgttgatatccattgccaatatcaagtacatgcatacacacgctatgttactgttgcttatcttgccaacgtttattattggtatggtagatacattatttatcgatcatcgctatgtaaccaacctgactctgatgttagttatctacctcaccctgcaaccttcccgacgaagcattccgggcgctagcattcaggaaaactga

SEQ ID NO: 456920 - DNA, 828 bp, Serratia marcescens
atgcctggacacattatttttctcacgctgttcgccgcgctgctgcatgccggatggaacactttgttacgcggcggcgccgaccggctgtggtcgatgaccatcatgtgcctgacgatcgccgtgacctgcatcgtcattgcgctgtttctgccactacccgcggtcgccagctggcgctacgcgctgctgtcggcgctgctgcacgtcggctataacctgtgtctggtgcgcagttatcagcacggggaactcgggcaaacctacccgattgcgcgcggctcttcgccgctgatggtgacctgtggggcggtgctcttcgccggggagagcatcgatgcgggcacccttggcggcattgcgctggtgtgcgcggggattttgctgctggcggtgaggcggggcaagccggcgatgccgggtctgcgctatgcgctggcaaccggggtttttatcgccgcgtacagcgtggtggatggcatgggcgtgcgggtatccggcaacgcgctcgcctataccgtgtggatgagcgcattatggggcgtgctgatgccgctactgtatatcgcgctgcgcgacggcaggagtttactgcgccggcggcccggtatgctccatgcggcggccggcggcctggtttcgctgctcgcttacggcatcatcatctatgccatgacgtcggcgccgatgggggcggtttcagcgctgcgtgaaaccagcgtgttgtttgccgccgtgctgggcgctctgtttctcggcgaagcgttaacgctgcaaaaagtattggcgtgctcccttattgccgttggcacgctgttgatcggttaa

SEQ ID NO: 456921 - DNA, 609 bp, Serratia marcescens
atgataaagaagatcagactaaccagcgtgttagcacttcccatggggaatgataaggcatggaaccataaccactattgtgaatttaatttcactatagtaaatttaagtgaactcatttgctatgtaatgacacaaagcaacgaccactttaaggtagagaacatgttaaaaatcagaatgtcacggccctctgaagcgccagaaatcatccaaatttggaaaaattctgtagatgccacgcacgatttcctgacagcccacgaccgccaagagatcgaaaaagaagttgtcggctttttttcagcaaccccggtattggtagcaacaaatcaggaagaccaaccgctaggattcatgtttttgcatgagggccatctggaggcgctttttgtagatgcttctgctcgcggacttggcgtcggaaaacggttgatctcacatgcactggccctgcatcctgatttaagcgtcgatgtaaatgaacaaaaccagcaggccgtagggttttatcagcatatgggctttcagcgttcagggcgttccgagcgggacaatcagggaaggccctaccccctattacatctcagcaaggcgaatgcgatgtaa

SEQ ID NO: 456922 - DNA, 213 bp, Serratia marcescens
atgagccgacgtggcaactgctgggataatgcggtggccgaatcgttcttcagttcgctgaaaaaagaacgcatcagaaagagaatatacaaaacccgggatctggcccgggccgatatcttcgattacattgaagtgttctacaaccgggcacggcgtcacagtcactttggcggcgtcagtccggtggcctttgaacaggccttgtcgtga

SEQ ID NO: 456923 - DNA, 261 bp, Serratia marcescens
atggaaaagaacacaatttctgattataccgaagccgaatttttaaattttgtcagaaaaatttgtcgagttgctgattttaaaacagaaaatgagcataccgatgccgttttggaattcgaaaagttatcagaacaccctgatggttctgacctaatttattatccgaaggatggtcaagatgacagtcccgaaggtatcgtaaaagaagtcaaagaatggcgcgcccaaaatggcaagccaggtttcagaaaagcctga

SEQ ID NO: 456924 - DNA, 1137 bp, Serratia marcescens
atggctgaacaaaagaaaaatgcccaggtacagagtggcgtcaacgatgacatcaccgaactaaagtcgctgactacactgcgcaaacgggtcgtcagcgacggtgaaatcgtctcaaaatctgccaacggctttcgactggccaacggcaacaccggcgtgatgttgcgtaacgacggcaaggatttttatgccctgaccacaccaaccgggcaggcgcaggacgggcagtggaacacgctgcgtcccttctcgttcaatctggcttccggtcggatggcgctgcgcaacggcgtagatatctccggcggggcaatggtgtcgcataatgccggcatctccaccgcgaccaccggcccggcgccacttatcaacgggcaggtctatgatgcggccgccgtacataccgacttcaccagcggtaacgtcactacgaccatgctgatggggtcgcgcgtggtcgccggcaaagaggattatggcctgctctcttaccgcgactggcaggggaactggaatgaacttcaagtcagggccaatgccgagctttcggtggggcaattaaccaagcgcaatcccgatggatggatttgggcgtcaggaaactggagcgctgacaatgataaaagtcgcattaccaacgggttgcatctgcaggggcgcgggaacctgtatgcaaacttctatcaccatgaatttgtcggctctcaccactctctggtattgaacgttgccaacggcggggcgcaaggctggtacgaattccgcaatggtggcaacgcttatgccaacggcacctggaacagcagctcagatgtccgcatgaaaacggaaatcatcccaatcgacggcgccctggacaaactggccaatatcggcggttacacctacctcaaacagggcgtgccggaagccggcgtgattgcccaggaggtggaagaggttctcccccaatccgtgacccagaccgagctgaagctcaatgatggcagcgtgctgaaagacgcccgcagcatcaatatcaacggcgtggtagcgttgctggttgaagcgttaaaggaagagcgtgaagcccgtatcgagctggaaatgcggctggctgttttggaaaaagcggcgaacgtgaaacaagactga

SEQ ID NO: 456925 - DNA, 504 bp, Serratia marcescens
atggccggagatatcgttcgaataaacttccaggccacagtgtacgtcgtcacaaatacgctgatagcgcgtaccgctatccagctccgcgcctacccccggaatattggcgacaaactgcgtaggaccataggccacgccctcggcatcagggatgcggaactcttgcgggatatcctgcgcggtgtaaaacatccccggcccgttgatcgccttgccgaggttaatcatcccccagccgtacagcgcatcaatccccggatcgcccatatcggtggcggtagttttcagcacgtcggcaatttgcgccgtcgacagataagggaaacgctgcagcagtacggcgaccgcaccggtcacgtgcggcgttgccatcgaggtgccgtttttattgccgtagtccgacgtcagttgctgcgggtcggagccgttggccaccgcgctgtatattttactgcccggcgaagcaacgcagaagctggcggtgtagccgcaacgggttga

SEQ ID NO: 456926 - DNA, 204 bp, Serratia marcescens
atggatatccccgtataccgcatccgttcggccatcccttgtgatatccaactcccgtgtggtacggccaaccagcttggccatattgtcatcatcgcagaatatctgaaagtggaaggcgttcacgccatcgaccataccggatgtacccagcgcatctttacgataaatcttttcaccacctttgactttcgatgtcagtga

SEQ ID NO: 456927 - DNA, 492 bp, Serratia marcescens; identical to SEQ ID NO: 455557

SEQ ID NO: 456928 - DNA, 1932 bp, Serratia marcescens
atgattatcagcccaccattattgaaaagcaaaacagaaccagagacagacaacgcctggattgcgagagtcatgaaggaagacggcgggagagaatttccggttaacgcggccggttcctggcatggtggcatacatatccgtcatacggatgatggaaccgggagagccgagagcatcagggcgatagctgatggcatcgtggtttcgtttcgtaaggcgtctggggatataaagagggattcggccccattgaatatgaatgccgataaggcgaaaagcaaaggcagtgatgatggctatatactgctaaaacacgagacagagattggtagcggcgacagcagcaaggttgctttttactctttgtatatgcatctgaagtcactgacatcgaaagtcaaaggtggtgaaaagatttatcgtaaagatgcgctgggtacatccggtatggtcgatggcgtgaacgccttccactttcagatattctgcgatgatgacaatatggccaagctggttggccgtaccacacgggagttggatatcacaagggatggccgaacggatgcggtatacggggatatccatttttatctgcctgctgggacgaagttctaccgtaatgcgcccgtgaacaatacgtcatcgacgacgggtctggcagaggtacacacttcctgcatgccgctgtatgtcagtatgacgctggagaagggaaactgcacgatggtcactcgtcagcaggagcctggcgcagagggggtattcacagccgttggcgcaccgctgattaacgccgatggcaaggattacgaatataacctttataaaacagccatgagactctatacacagagccccagcgccggttttgaactgctgcgttttggtcggattatcaatacggaacatgagactctggtgccggaggatgctccgctttggcgaacggttaattttccgggtggaaagggcatggtcaacctggcggtgccggagattaaaaagttcagcgatgcggattttccacactggacggggtggcaagccgtcgatgacgatcaggacagcaacagccagtgcaactcagctcgcattaaaaaatggcaggaagcgggtgtgtatgatgcactgaagaaccgtttgatctgccattttccgctggaatgggaaaaaagcacgatagatacacgtttttcctggctgagaacgaatgccgacgctccgatgagcgaagaggattatactaagtttaagttacatgcagaggcattgtgttttaacaccggtgacttagggaaaaagagagtgtggcattttaaccctatggaatttatagaacactttaggaaatgtggttggatagatcgtgaaaaaatcgagaaaattatgactttcgatatacggagttctgtaaaggtaaacaaaataaagtcagctgcgagagagtattattcttatttaaatataataatgaggaagtacaatatttccacacctaatagaattagtcattttttcgggcaaggggccgttgagtctggttatttaatttcaatgcaagaagtaagtcagcgtcagatagttaaagatggaaaaaaaataggcggacctatcattgctgaatcaacgtggaatgaaactctaaggcttggtcattggtatggagcactttcatctgaaaaagacaactacttctctgggataaaatataatagtaaagggaatgtgattgccggttcttatagctggaaaaatgggaattgtggagacagtgatgctcaaaagttccgtggtaggggctttaagatgttaacaggattggacacctattcgagttattgggtataccgtgggtggatatccaaacgtgattttgacatgtattggtgggatgatcccgagtataagaaaaaaatcttggtaagatga

SEQ ID NO: 456929 - DNA, 240 bp, Serratia marcescens; identical to SEQ ID NO: 442970

SEQ ID NO: 456930 - DNA, 204 bp, Serratia marcescens; identical to SEQ ID NO: 456926

SEQ ID NO: 456931 - DNA, 375 bp, Serratia marcescens
atgaatatgctccagcgcccgccagtcaaaattctggctgccgacaaacgcctgttcgccgtccaccagcaggtatttggcgtgcataatgccgccgctcagcggctgataatccagcacgcgcagcgccagctgcgggatcgccgccagctgttccagcgtatccgccgccgaattacgcagccctttgcgctccagcagcaggcggatttttattccgcgctcgccggcgcggcgcagttccgccaacaccgcatccagccggctaccgggctggttcatcacataaaactgggcgatatcaatgcgctgccgcgcctgggcgaacatctgccgccagacttcggcgctgtcgcgcaaatcgtcattctgtag

SEQ ID NO: 456932 - DNA, 177 bp, Serratia marcescens
atgaaacgcgctattttatggctgatacagtcgtttttttatttggttcccgctattgttatcatgttgggagtctatgtgtttataaaatttactcccgattacgcagcggttcttagcttatcttgggtcatgttggtttcttttgtttacattaaatataataaatggtactga

SEQ ID NO: 456933 - DNA, 504 bp, Serratia marcescens
gtggtggtcaaaggtgctggcttcctgctgaatgacgaaatggatgacttcagcgccaagcccggcgtcgccaatgcatttggcgtggtcggcagcaatgccaacgccatcgaaccgggcaaacgcatgctctcttcgatgagcccgactattgtcacccgcgacggcaatgtgacactggtgatcggcacgccgggcggctcgcggatcttcacctcaatcttccaggtgctgaacaatatttatgactaccacctgccgctgcagcaggcggtggcggcgcagcgggtacaccatcagctgctgccgaaagacaccatctacttcgacggcttcgcgccgttaaccggcgaagtggccgcacagctgaagacgatgggctatacgctggaagatcagggctggaatatgggggatattcaggtgattcggatcaataacgacacgccggaaaccgcctctgatccgcgcggacgcggcaccggcctggtggtcgccaggtaa

SEQ ID NO: 456934 - DNA, 2694 bp, Serratia marcescens
atgcaggccaatgagcgggtcggactggaagacggtgaaaaaggcagcggctttgcggtgagcgtatcgctcggcagccagaagtcttcatcgacgcagaagcaggagcagagcatggccagcggttcaacgctgaacgccggcaataatctgaaggtgaccgccacgggcaaacacggcgaggcgggcagcggcgatattgctatcggcggcagtcagctgaaggccgggggcgatgtaacgctggacgcccagcgcgacctgctgctgagcggcgcggcgaacatgcagaagaccgaaggcagcaacaagagcagtggtggcagcgtggggatgagcctgggcgtgggcaagaacagcggcctgagcatcttcgccaacgccaactcgagcaagggttcggaacacggtgatggcaccagttggaacgagaccactatagacagcggcaacaaggtcacgttgtacagcgggcgcgacaccacgctgaagggcgcgcaggtgagcggcgagcaggtgagcgcggacgtcgggcgcaacctgtcgctgacctcggagcgggacagcgaccgttacgacgccaaacagcagagcggcagcgccgggggcagcttcacctttggttcaatgaacgcatcggcgggtgtcagcgccagccgcgacaaactgcacagtaactacgacagcgtgcaggagcagacgggtatttttgccggcaagggcggttttgacgtcagggtgggcgagcatacgcagctggaaggcgcggtgataggcagtacggcgacggcggacaagaaccggctggagacgggaacgctgggctttaaggatatccacaatcaggcggactttaagaccgagcaccaaagcgtgagtgtgagcaccagcggcaacgttggcggccagttcctggggaacgtggcgaacaacctgttggtgggcgcgaaccgcgaagggcatgccagctcgacgacgaaatcggcagtgagcgagggcgcgatagttatccgcgaccagggcaagcagcagcaggatgttaacgacctgagccgcgacgtggagcacgccaatcagacgttaagcccgatatttgataaggagaaggagcagaaccggctgaaggaagcacagctgattggcgaaattggcagccaactgatgaatattgcagagacggaaggtgcgatagcagcgacgaaagaagccagggagaaacagaaagacccggctgcattggcagcggccagggaaaaactggagaaagaaggcaagccgacgacggcggaagcgattcagaaacaggcctatgaaacggcatacaatcaggcgctgaatgactctggttttggtacgggcggcaaggtacagcgtgcaatgcaggcggcgacagcggtcattcaggggctggccggcggagacctgacgaaggcgatagcgggcggttcagcgccgtatattgcgaatatcatcggcagcagcggtctggatgatgcaggcaaggtactggcgcacgccgcagtgaatgccgcattggcggcggcgcagggcaataatgcgctggttggtgcaggtggcgctgccacgggtgagcttatcgggatgatcgcggttaatggatacggcaggccggtaagtgaactgagtgagacagaaaaacagacggtgtcggcactggccacgctggcgtcaggcctggcgggagggttgattggcaacagcacagctgatacgttggcaggagctcagtctggtaagacgacggttgagaataactatctgagcagcacggagaagagccgtcagacggagctgaaccacaagcagaacctgacgccgcaggaacagaaagagaaagacatgctgaaccgcaaggatgcggaaaccagtaaggcgctggttgatgcctgtatgagtggcagcgctgcggcctgtagcgccgcccggcaggatgcgctggagaagcagggcacttatcagaatctgggttaccagaatcagaaggaagcgcaggaaggttatcagcagatacagcagttgctgaatggcaccagtctggaagcgaagcagacgcaggagctgtttaacggaatggtggcggcttatatgcgcaccggtatgagtgaagatgcggctaaatctgcggtgggctaccagcttagcgcgatgtatatcatcggagggatcgcgggtatcggggccggtaaagcggttgatgaaggattaacaccgggagtgaaaccatcgacgccgtcgaagaagcccggagccggtggtactcaggtagaaagtaagtcatcaagtggagcagagaacgccgcgacgtacccgaaactgaaagacgacctggtacaacagaatctgactaatatagcgaagcaggacccgagactggcggcagcggttcagggtaataacggcaaactgaattatggcgttggttccggcaccagagctgaagctgatcggttaggtaagatatgggttggcgatggtgcgacatctacaactgatggaaaagggttggttagtgctgatggtttaagggtatatcgttaccctgatacaaaaccaaatgctccagcacatttaaacccaacgggtatacaggctaattttgaaacatacaaaataaatccggcaaccggagagcgggtgcgtgttggtaacggtcatatgagtattgataaatga

SEQ ID NO: 456935 - DNA, 327 bp, Serratia marcescens
atggccgcactacagtttccctgcatcatattcaaaactcaaaagcggatggacgactacagcgccagtgatatgcgctatggcgacctgacagaagcacaactgaaaactctttacgggctggtggatgtttctaccagagccaatccatataccctgacgaaaatcactccgtttaatcagccacggtctatgttttacggctctcgtggagaaggtgagaaaattacccggaaaaagataaagatgaattgcaaaaagctattctcgaagggaaactcccaaaatttgaccgcttccaggataattttaacggcatgggtataa

SEQ ID NO: 456936 - DNA, 819 bp, Serratia marcescens
atggataacaccgcactactggcagcattgcctgagaatacggaggagaatatctgcctgttgtttgaggcgggagctcagccggaagaagattttctgacgtttaaaacgaaacacgaaaacaggctgcactcgctgtacatccacccacagctgacggaatttcagaactacggtccctggctgctggaagtggatgataaagagcagctaaagggctatctggagacacggcctggctgtgtggccgtgactatatccaggcgttatcctccctcgctcgccgtacagttgtcccgcggctgcaccctcgtgccgcctgaaggggcggcggtgctgacccgcttctatgccggccatgttattgaggtactggctgccggtgcaaagtatgactggcacgcttatctgttcaacggcatcacgcagtggtggctacccggagaaacgcagtggcagttacttgccataacgccctcagaagtggaaaacccagtcaatcacattatccgactggataacgtcacctggcagcagattgcggataagccggaagtaaccagtgtgttgcgcgaatggcaaaaaatgccgaccagtaaggcgtttccgccgtgtgcgcagcggctgatggtgattaaggcgcttaaaaaaagtgaagatgctggcctgttatctcctctggataagaaagtctatgcactttattacctcaatggtggaaagaaggttctggaatcggacgcattcagagtcgcattaccgacggtcataagtggagcaagatcgatggcagaagtgttggctccctatgatagttga

SEQ ID NO: 456937 - DNA, 522 bp, Serratia marcescens
atgggattttttaaaacctttaacaaagttgatagtgctgtaaatcgcagctatgcccgctggagaaaatggatctggggcagcctgttggcggttgtgctggcatacggtggttggttaatttgggcatcagtctggggaccacccaccggatcggtcacattaattattcacagtgaaattgacagacccattcttggatttagtgtgaatggcgtggctggctcaaatgcttttgcccatggtggtggtggtgcaacatgctgcggcagtatcagcgggaaaacggcggaagtaatatggacattaagcactacacgtgctcagtatgatgcaggactgcgcaaagaaactcgtcgtgttgtaatgcctttgccagaaagaaagtggggagaaaatgatttgcatgttcattttttacccggagataaagtcttactgggctggagcgataatgcctggtcaccttatgaaaaacgtcctgatgctccaggtaagactgcaaagcaggagaaaaattga

SEQ ID NO: 456938 - DNA, 1788 bp, Serratia marcescens
atggatatcgaaagtattattgctgctgccagtcgtgctcagcaggctgatgatgccgggttgggaaattgttcgcggacatggcatgtcggtttcttttttgatggtattcaccgaaatatagaccaggatgcaacagaggagcgccttagtaatgtggctcttttattcagagcgtttcctgatgaacagctagagacccactcaacaagctattcaaaattttatatatcaggacttggcacaccattcaatgaagagctctctgagaaactgcataccattatggacagtgcacaaagctctgtcctggatgatttgaacgaccaaccaaaagaaatagcgaaagatgccggtctggattatttgaaaggtggtaactggtgggaggttttaaaggactcagaaaaaaaactgagaagtccttcggaatggaaatccttgatgggaggggtagctaaaaacgcagcaaagaaatcaggtatcgaggcaaccccctggttgcgtgacaatcccgttattgccgatatgctggttacaggtgtcgatacacgaatcaattcggctaaattacgttttgagcgtttctttgaacgagctaaaacaaatagtccggtaccgattaaactaatcgctatttcactctttggatacgatgtcggagcaactcttgcacgtaaatttattgatacgctgcttgatgatattttcctgaagcagggtgataaatacacttatcaaggggtccccatagagattatttttacaggtttgtttgattgtgcccgtcatacacccgcaagcaataataatggtgtggactggtttatttctgctttcggggggccaataaaaggtattggcgtgctgatgggcgataagtctgttgatcaggaatcggcattgccggatacggtcaaaaacgcactgcacctggtcgcagcccatgaaaaccggccctggcgtagcgtctattgtcttggcggaagtaaccataaacatcaggaagaactgttacccggctgtgccgaggatgtggggggaggcctgaaaccaaatgaacaaaaaccgagtgctgaactttgccgggtagcccttcaccggatgtaccgtgccgcggtgatggctggcgttccttttcctgattttcaaacactagatcagacggatactgatgttgctgcctatttcattatgcaggataaggttaagaacaagtctgtcgctcaatggacgaagctgtatcagcaagcggtgccctttaatgccgttagtatcggagcgcagaaccgtcatctggacagctatatcgaatggctggggcgacaatattatcagtatcgtcgcgaatgtatgaaatatgaaaggcaacgtggcgatactttatcttcttctggcgcttctatcgggatgctgggtatttccccgcaggctaaagaagctgcgggccgatttcaggccgagcttaatgtgctccgaaaaaactggggctggctggaggaggtccatgacgctgcgataagaatgaaaaacagtatggaaaacgatcccaatgataaacgtatccagatcgtgcctgatatctataggcctgcattgaggcgagcgagaagattcctcgattatgcacatgcggcgtaccttggtcagcctgaaccttttcctgaagatactgctccgtcagaaatgtatgcctggtttattcatagcagacaagcaatgggaaaagacgcagggatttctcaggatttcctggttattcgttccttggaaaaacctgaggtgtaa

SEQ ID NO: 456939 - DNA, 546 bp, Serratia marcescens
atggatttttttaacaggctggaagcgatggataaaggtttcacccggttttatgctcgccggaaagtctggctctggagcgtgatgttattgccggtactgtttgttctgggctggatggtgtgggtgatgttctgggcgccgccgatgggcggtgtgacgctgattatccacagtaaaatcgacaggcctattctgggatttagtgtgaacggcatggcgggggggaatgccggagcttttgatcccaataataagtatgcaggtgagaatggggcaacaacctgctgcggcagtgtcaggggaaagaccgccgaggtgatctggacgctcagcgttaccggaccacagtatgaggcggggatacgaccggaacagcggcgggtggtaatcccattaccagagcgtaaacggggcgatgacgacctgcacgtccatttcttgccgggtgacaaggtgctgctggggtggagtgacaacgccttttctccctacgatccccgcagtccgcactatacgccatcgccgcttcaggcagaaaaataa

SEQ ID NO: 456940 - DNA, 603 bp, Serratia marcescens
  misc_feature (571)..(580): n is a, c, g, or t
atggaaaattcagctgtcctgttacgccgtcttaatccttattgcgcccgcgccctggaaggggcggcgtcgctgtgtcagacccgcgcccatgcgcagatcctgccggagcactggctgctgaagctgctggagcagggcgaaggggacctgacggtactggcgcggcgttacgaatggaatatggatgagatctggcaggcgctgctgaactggctggatcgtctgccgcgctcggtacgtgggcggccggaactggcggacagtctgctgacgctgttgcaggaggcctggctgctggcctcgctggccggcgagacgcagatccgcagcgttaacctgctgacggcgctggtaggcaagcccgcgctggcgcgctgcgacggcctgtggccgctgctgacgctggggcagagccagctggagcgcctgcgcccgctgctggatgcgcagtcggaagagcgtccggaggtgcagcaggaggccgggctggcgcagacttgcgccgaggtgacgcagcctgcggcggacaccgagctaaaggcgggcgaactctccccggcgctacagnnnnnnnnnngcgctacagggcgcgctggataa

SEQ ID NO: 456941 - DNA, 570 bp, Serratia marcescens
  misc_feature (551)..(560): n is a, c, g, or t
atgtcagacgagaaaaacagcacgctgctttacggtcttgaacaacgcattccgccgctgccggcattttttagcgcgttgcagcacgtgctggccgggctggtcagcattattaccccgccgctgctgatcggcgccacgctggggctggggccgtggatgccctacctgatcagcatgtcgctgctggcctccggcatcggcacctttttacagtctaaccggctgtgggggattggtgccggcatgatctgcatgcagggcaccagctttgcgtttcttggcgtgtcggtggccggcgggctgtgggtgaaacagcaggggggcgggcctgaggacatgatggcgatgctgttcggcgtcaattttgtcgccgcgctggtgccggtggtcgtcagccgttttattgaaccgctgaaaaaaatctttaccccggtgatcaccggcagcgtgattgcactgatcggcatcagcctgattaaggtgagcgtgatcaactggtgcggcggcgagggggcaaaggattttggcagcatgagcaatatcgggcnnnnnnnnnngtactgctga

SEQ ID NO: 456942 - DNA, 867 bp, Serratia marcescens
atgacggcgaaaaatatcttattgcacggtaaggtcctagatatcggcgataatatcaaggcgtcggaaaatatttctctgttagctgaggatagtattaaaactgcagctatgacgatgcaagcagggcaaagcgtgagcgtgacggctccgcaaaatattgaattgtggcaaagtgaactgaaggggaaagatgtcacggtcctcagccggcagggcgatattctttcacattccagcgtatttcctaaatttttccattccgacggatcgcgttggttaggaagtctggaggcatcaggcgatttgacgctgaatgcaggtaaaagtattaccttaattaataccttgttggcaccactgagtcgtgatgtcgcgatgacggcaaacggcggcatcggaatagtaagaaacagcactttgctggatccgcagcgttttggtgaaaaaatcccgcagggaaagcagcaggaaaactttaaccggctgtttcctatggggcagttgaatgcctccggatcggtattgctcaatagcggtggatacttggccttacgcggtgcgcagatcaatgccggtaaggatgtgacgctgttggcaggtcataatgccgatctgaattatcgtgagcttgataagcgttttagtcctctgttcccctccgtgcgtacgccggagctaggcagtaaagtccatgccggcggtaatttgttaatcaactcggcgcgggatctgggcacgcaaggcggagcgttctcagctgacggcaatattacactgttggcggggcaaacctgtggttggccgctttgggatattccgctattgatgctgataatgacaataacaaggacgatcgccatctga

SEQ ID NO: 456943 - DNA, 744 bp, Serratia marcescens
atgcgaaaaattattcctatatttctattaagtgttttaatgttaacggggtgtaacagagtgaatatagatccaacagagtattttactggtcaacagttaacgctggctaaagccattgaagccggtgataccgttgcggtagaaaaattagcgacaaacgccatattaaataagcctggcaatgatgatatgacgatattgttttttgccctctcgacagcaattgataacaacggcgacgaaaagcatctatcagtcattacccagttagttaaagcaggggccgatcccatgcaaaaacgaactaaaggtcaggccagtcccgcggttaccgtagctaaagccgatagagacatttggctgaaagcattgcttgccggtggtctttcccctgatgcaaaagaacgtgacgaaacgttgctatttgctgcgataaaagccgaaaaccttgatacaacccgactattactcacctccggcgcgaatatcaatgcaaaaaattcgctgggggacacccccctaatagctgccttgcatgatatggcccttgaacatgctctctatttgctggagcaaggtgccgatcccaccatcaaaaatgacagcggctggacatttgtccaactggttaaacgcaacataaaccatctcagcaagaatgccgatcctgatgtcaagctagcttacgacaagataaagaccaagttaatgcaagataacctctggtcgcagcaagattag

SEQ ID NO: 456944 - DNA, 588 bp, Serratia marcescens
atgccaacaacggttgctttaagaggtacaagagtcctatctggcaaggattgggccaataacttttcgcaaggcattaatttagattcatcctactaccgccaagcgtcaagcctaggcagtaaactcagtatgagtaaatctcctgtacacatcacaggacattctttaggtggggggctagcatcactaacatctattgtcagtggtcacccagcaacaactttcaatgccgctggactaaacccaaaaacacttgatcattatggagctatagcccttggaaatccggataatatccaggcctttcgattaaaaggcgatatattaacccgaggacaagaagttaatttactagatgactatgaagcgtttgggggcagtactgggatgcagatcgcaggaggtcctggtttgttgcttggtaaagagatgatctcatcattaatacctgatgctataggtcagaaaaaagttatacacacagacagcggttcctcagtaggaaaccacatgatcggtaaaactattgagagtattgagcaagaaaaagaagatgatatcgcaacaatcagccaccggttgtaa

SEQ ID NO: 456945 - DNA, 804 bp, Serratia marcescens
atgaatactggtaataattcaaaactagttgataacccttctcaaccatttgatataactaaattaattcctcagatagttcaggagtgctgttttgataatggcgacgactcatggggtaatgcagccacgcaagatttgagctattgttcttctcttttaaccagaatacaagccgtaacatatgcaagctcactgaaagcggtttttcatggagatgaaaacgtcgcaaaactgggagatatattagaagactttttaagttcaaataaaagagttcttcgtttatgcctaagcgatgttagctatgaattttttgcgagagaaatattagccaatgtaattggtagaaaattattaactctcgctaggcttgaaaaattcagagaaaagccacttctagtcatcgttgacgaggctcataacttcttgggtaaaagggttggatcagaagaccattctattaagcttgatgccttcgagatgattgcaaaggaaggaagaaaatatggcctaaatatttgtctaacaactcaaagacctagagatataaccgagggtgttttaagtcaaattggtacgttactagtacatagattaacaaacgatagagatcgagatgtagtagaaagagcatgtggtgaaatagataaatcagcggcttcatttttaccaagcttaaagcaaggtgaagttgcgcttgtaggagtagatttccctatccctatgacaattcaaatagcacagccgacttatccaccagagtccgattctccaggttaccgtaacgtttggaaaaaataa

SEQ ID NO: 456946 - DNA, 2196 bp, Serratia marcescens
gtgggcgaacaggcggttgatatcgccctgttcgccgaacgcatgcaggatcggcaggccgtcgatcggcccgtgttgtacttcgcgcggcggctgtcgctgcgccgtcagcggctgcatcgccttcgccatccgcgccggcgtaggctgcgcgaagatatcgcgcggccgcagcagatagccggcgcgccgcagcgcggtgcccagccccatcgccgagatgctgtcgccccccagcgcaaagaaatcatcgtcggcgccgacgcgcgccatgcccagcagctgcgccatcgcctgacagatcagccgctcggcgtcgttggccgcctcacggctgacgttgctcaccgcctgctgcggctgcggctgcggcagcgcctgacgatcgattttgccgttgacgttcagcggcagctcgtccatcaccaccagcagcgccggcaccatatagtccggcagacggcccgccagcgctgccaacagatcgctttgcagcgtcggcgacgcccgcagcgccgcatcctgcaccgaacagtagccgatcagccggtgggtggcgccgatcgcttcggcgatcaccaccgcgcgccccacctgcggcagcgccgccagcgcgctttccacctcgcccagctccacgcggaagccgcgcactttaatctggtgatcggtgcggccgataaataccagctgcccctcgttgctccagcgcatcaggtcgccgctgcggtacatcacctcgccgcggctgaacggattggcgacaaagcgcgccgcggtcagatccgggcggcgcaggtagccgcgcgcaatgcctttgccggcgatatacagctcgccggcaacgccgatcggcaccggctgcagctgtttatccagcagccacacttcggtgttggccaccgcacgccccaccaccggctgttcggcggcgtcaaccggcgcgcccagcgtatccacggtgtattccgacggcccgtaatagttgtggatttccacttccgggtgctgctgcatcaggttccacagcgtcggcgttgccgcctcgccgccgatcatcacaaacgacggccgcgggaagtcgccctgcagcagcccgcagtccaccatctgcgagaagaaggacggcgtgatatccagcagatccaccggcgtctggcgggtctgttccagcaacgcccaggcgtcgcgccgcagctcttcgtcgaagatatacagctcgcagcccatgatcatgcagaacagcggctcccaggaagagtcgaacgagaacgatgcggtgtgtccggcgcgcatgcgccgcccgtggcgggcctgatatttctcaatcgccgggccgaacagagacgcctgatgggacaggaacaggttcagcaggccgcgatgggtcgacatcacccctttcggccgtccggtcgaaccggaggtgtagatcatataggccagatgggcctcatgcagcggctcgcaccgttcggcatcgtcaagcggatgcgacgccgccgccgcgcacagcgcccggcagtgcgcatcatccagacaccatacctgcggcagttccggcatctgcggcagcgtgccgcgctgcgtcagcagcagcgccggcttggcgtcgtcacacatcagcgccagacgctcacgcgggtagtccagatcgagcggcatataggccgcgccgctggccagcaccgcaaacagcgccaccagcgtgtccaccgagcgcggaataccgatcgccaccacgtcttccgcgccgatgccgtgatcaatcagcacccgcgccagctgcatcacccgctccgacagctgacggtagctgaggctctggccgtcgcacgccaccgccgtttcctccggctgctgcgccacccgctgcagcagcgcgtcgatgatcgaggtcatgccggcaggcgccgtcagttcacgtccgcgcccccaagcggccagccgttgccgttccgcttcgccgatcagcggcagttcgccgttcggccgctgcggctgatgcgccagttgctgcagcagatggccgatgcgttcggcatgctgccgcagcgtggcggcggaatatttctgcgggttggccaccagcgagacgtacagcgcctcgttctggaagcccagttcaaactccagatcgtccaccggccccatcgccagcgtatgcgtcaccgccggctggccgtcaaaggataa

SEQ ID NO: 456947 - DNA, 861 bp, Serratia marcescens
gtgatacaccttgacgttgatcaccgggccgtacagctcctgctgctgccccaccagccccaaatcccgccggatctgctccgcctcatagcgctgatggcggcgcacctgtttgatctccgtcaccaccgcccggcaggtttccgccagcgacatctgcggcgtcaccgtcagctgcagcggcagcacattcaccaccggcccgatcgccgccagcgcctgcgatcccatgcggcgcataaacggaaaccctaccgacagacggctttcaccgctgatgcgcgccagatacaccaccagcgccgcggtgacgatgtcggccggctgcgcctgctgcaacgcatcatccgcctgcagcgcgtcgaacagcgccgccggcaacaccagcgactgcttgagcggccgcgcatcgtctgccacggcgcagctttcgtgcgacagcgacagcgtcggcggcagatcgctcagccgctgctgccagaacagcgccgcccgctccgccgccggcgagctttcccactggcggtactccgccaccacctcgccgaacggggtgaacggcgacggcgacggcgcttccccctgacgcaacgcgcgataaatatcggcgatacgccgggtcacggcgtcaaagctgaaaccgtccagcatgatatggtggaaacgctgataccagaaccagcgcccggcgccgacgcggatcaccgcctgacgatacagcgggcgctcgccgtcggcgggcagcggctgcgccaaatcctcctccatcagcgccagcgcggcctgcaccgcgtccggccgctggctgaagtccaaccactcggcgggcgcgacctgggccggatcggcccgcagcggtag

SEQ ID NO: 456948 - DNA, 1344 bp, Serratia marcescens
atgcatattttgccagccgcccgacagggagcggcagtcagcgcacagagcacggtagcggcagggacggtcagccggtggttgcaggctgaacaggccgggcaggcggcgtggtggcagcaggtcgcgcagcggggaacgccgatcgtcgaagagcatgatcggcagcaggcgcgcttcacctggctgtggcgcgatccgcacggggatgagccgcgttcgccgatccggcgggtgtatgtcgatatcaacggcgtgaccgaccaccacagcaccgatccaagcacgctgcagcgtctgccgggcacggatatctggcactggtcaaccctgctgccgcgcgactggcgcggcagttacagcctgatcccggtgcaggatgcgcagcttccccccgttttcagcgccgatcgggcgcagtgccgccagcagcagcgcgcctggtggatctctcttttcccgctggcaattgccgatccgctcaatccctatcccgccgcatcgacccgcatcggccagccgttgtcgctggctcaagggccggacgccgccgatcagcgcgcctggctgaccacgccgccgccgcttgatgcgtcgcggttacaccacttcctgtggcgcagcgaaacgctgggcaatcagcgccgcatctgggcctacgccagcggcgagggcgccgctgcggctgagcagccgctggtgatcctgctggacggtcagaactgggtggacggccagccgctgctgccggtgctggcgcgtgaaactgcggcgggtcgcctgccggccgcctgttatctgctggttgacgtgattgacgggcagcaccgcgagcgggagctgccctgcaatgccgacttctggctggcgctgcaggcggagttgctgccgctggtgcgccaacgcatggcgttcagcgacagcggcgcacgcaccgtagtggcagggcagagctacggcgggctggcggcgatgtacgcggggctgcactggccgcagcgtttcggccgggtgctgagccagtccggctcgttctggtggccgacggtgcagtacgtcactgatttcgcccggcgggcggagtttgacgaaggctggctgacgcagcaggtgcgtcagggccgggtggctgccggcacgctgacggtgtttcaggaggccggcagccgggaagaggatattgaattcgttaatcaacagatgcagcaggcgctgaaggccgccgggcatcgggtcaactaccgggtattttccggcggccatgacgcgctgtgctggcgcggcgggctgctggacggattgcactggctgctctccgctatggacgacatacatttcgactaa

SEQ ID NO: 456949 - DNA, 243 bp, Serratia marcescens
atggccatagtgagtggcggcaaaccgggggcgggttcccgaggcgggttgaaactgtgggggatatctcagggcgacgccgtgtcggcgggcaggcgtgaggccgcagagcgtatctgcggcaggatgggcgccgggccgatgccgaccgtgcgtcaggcgttgataaactcggcgatgaccgcaggcacgctggggcggccgttctccaggcaggtggcgacgaaggtggcgtcggcgtag

SEQ ID NO: 456950 - DNA, 243 bp, Serratia marcescens
gtggcattcaatggcgatgcgcagcgtggtctgatgcggttcatggcaggcctgcagcgcctgttggatctgcggcagcacctgttccgccagctgcagcaggatctccccctgcgcggtaaagcgcagcggttggcttttgcgaacgaacagcttgaagcccagacgttgctccagatcgctgaactgatgcgaaagggcagactgggtctggtggagttgggctgctgcggcggccaatga

SEQ ID NO: 456951 - DNA, 267 bp, Serratia marcescens
atgcctaaactccagttccggcttaacgcggagctggggtttttctatgagggccgttcacagggattcggtgccattgcagagggggcgggcgtcgccgacatcgtcaagaaaagtgaacactggacgccggtggcagggaaggattctgcgaggcaactctcgtttattgttaagcagttgttgcaaggatgggctattgttttctcacggtttattaatcggaacattgtttcatatttgaaactgtgcggagaaaacagatga

SEQ ID NO: 456952 - DNA, 2787 bp, Serratia marcescens
atgtgggatgtacaaaaagcagtccagcatctgaatgagcatgcagaggcatcgtccaaaggctattgtgcccgttatgttaaagctgcaatcaacgccggcggtggtataagcaactggccttcaatcgtatcggcgaaaaattatggccccgctcttattgaaagagggttcaatataatagctgttacaggcagttttttggccggcgacgtagtgattattcaggggataaagaaagcagactttcctgcgggggaaataaaaaaagaccaccctcatggacatatggctatgttcaatgggcggcaatgggtctcagatttcaagcaaaataacggttattatccaggtggtgattatcgcaaagcaaagccaacctttgttttttatcgtcacaaggatgttggtactcaaccttcggaaaaaaatacagctgcagataataaaccaatgaaaacctgtttccctgcccgtaagaaaaacggggagaactacgccacgctggatgaaatgatggctctgatcggccaggagcctcatggctcctggctggcgggcaccaataacatgtggcatggcgggatccatatctcggagatatcagccccgggttctgttcttaaaccaaacatgacggagacagcggtgccgctgcagtgcatggcggacggtgaggtggtggcctggcgtctgaacaaggattaccagaggagcacttatctcgatcagcccgtgcaatatacgacgacgtttgtgctggtgaagtcaacctgcctgccggataagagcaaggaacaaacgcagctggatttttattcgctctatatggggctggcgccgctgtctgcgtttgagaaacgcaaatgcatggttgcccaaaaaaaggtgattaaaagggaagctggcaagtacgaaagcagccgacaagaaggggatgccccccatgcgcctaaggctatagggcggctcccaaagggagcgcggatccttatcctggaagagacagagttcctgaataagcctgtttcgccgaaggcgcgtccgggtacgaccgagctacagccgtttgggttggcacaggcgtttgacaaaaacggcaagctgacagaggaaaagttctgggtcactctgctgccgggatatatgacggaggagggtgagcagtatgcgcacctgccgttctggatgcagaaagcggttgaacagggcatctttgatgccgtgacgaaacccgcgacagggctgaaaatcagcgcgggtgatgccatcggttttctgggtgaagacatcgccccgatgggccaggcaaaaaccagccgcagcacgtatgcccatatcgaggtgctcagtgccgacagccgcatgccggcgtttcttgataatccggggaaggtgacggcaggacgcaaatatattcgcgtccatccgactgcgaaactttacacgctctccggcggcacgtttagcaatacgggcaatccggtcgaaaaggacaggcatatcatcctgccggtggataaatgcaacccgaagaagagcggcggcaagagctggtatcaggtcgggcagagctactggctgagccaggatgacgtggatctgatcgatcagtacaacctgaaggaactggggttcacggcgctggcggaagaaaccacgcctgatatgtcggcctcgctgaaagaggcctggatgaagtccgggttcgggcggcttgccgagcaggtgaggcccgagcgcggtatccgggagcagcagatgtcgaccttttataaagggatgatcgacaagatggataccgacaaggacgggcaactgtcgcagagagagctgtttgccgcgctgcagcatccagaaatgggtgttcgcgacatcgttgcccggatgatagtgaagcatcaaagcgagtggtttggtggcagcagtcatcaaaaatggacggcgtttttccagaactacgataccttgcgcatcggctttgcgaagaagtggctggacgatatggagtggatgagccaggtggagccgtttagttcgggccaggcggtatggcatatgcatccggtggtgtttttggatgctttggctattgatagtgatggtgttacctatgagcaattaaaacaaatattcccgcaagcttcagatgcagacataactatagtggtcgatgaattacgtggcagacttaaaacattcaagttagatactccaacaaggttgaggcatttcttttcgcaaattaaaggtgaggttggaatatcgatgaaaggagtgactgaaaaatttcaattttctccagcggcactaaagtcatttagcaaatattatcggaatcatccatctgaagcggatcaggatggctataagaaaaatgcagctggaaaaataatacgccgagctgatgagcaagctattggtcgcaaacactaccttagactgaacgggaatcgacaaaataaccctggcgatggttataattttagaggcagggggttaattcaggtgacagggtatgaaaaatataatggttttatgagtgattatcctagttactggcaagataatccccctgatactgtttcagatccagaaaagatcaatgaaatgccatatgcaatacgtagtgccctttggttttgggtgaagtataaaccttataacgctgacaaagggatgggttatgatgatgttgttggcgttacccgtgtagtcaatggcgggaagatggggcttgcagaacggcaggccgcctacaaaatatgtgaaagggtatttttatga

SEQ ID NO: 456953 - DNA, 177 bp, Serratia marcescens
atggaaaattcagccgtcctgttacgccgccttaacccttattgcgcccgcgccctggaagggacggcgtcgcagcgccagacccgcacgcatgcgcagatcttgccggatgtcgagcaagtagaaaaagcgcagcgtaacaagatgaatctgtcagaggataaacgcgatgagtga

SEQ ID NO: 456954 - DNA, 717 bp, Serratia marcescens
atgacaacggatatggcatatgacattgcagagcaaaaagctccgccagccatttttatgtaccagacaggcgctaattattcggtagataaatatgaattagccatcggtatggctcagtgggagttttgcaaagcaaacgccaacgcttatctggtaacaccggcttatccgttccccgataaaggtgggcatttgacgtccaacggctaccgctggatggacatgcagtttgcaaaagtgatgcaccgagtgctcaacgaagggcaaggttgggaaccgctcggccctatccgcatcacccgtatcggcaaggtgatttatgtgctctatcacgtgcccagcccgccgttgcagttccgtccgtcatacgtggggcgagtgccaacgatatatgccgataaaggattccgtgtaaccgacagtgacggaacgataaccatcgagtctgtagagattgtggctgacaccatcatcaaaatcagcctggtacgcgaaccgacaggggctgccaagctgtggtacggagataaaaccgttcacaacggcaatggcaacgtttttgacagcgatacgttcgcgtcgctggcgaattacgaataccaggcaggttccggccaatatgcagatgaaaacattgctgacttggttggcaaaccgtacccactaaacaacgcatcggtgcaattctgcttgccgattgagactggagaataa

SEQ ID NO: 456955 - DNA, 744 bp, Serratia marcescens
atggtaatggtgcttaaatcaaacgtttctggcacatcaattgtgcgccctgatggctggaacccacctttcactgttgaagggctgaagtatgccaacatttttggccgtggcaacttaactgccaatctggctccggggggattacctgcggtggcccatgggaatccactacagaaaggagaggcagtagagttttctaccagtaattatctggatactcaggttccgaccagcgagaaagcaacattgattgctatcgcgaataatactgactcaacggcaactaaccgttgcttcttgatttccagctataaaggcagttccgatgcaggtaagtcactggtcactcagggggcaacaccatcagctctgtatgtgtacgcgcactataaaggcacggattctgaaggaaacccgtttagtaatgccgttagtttaggtatgaatacccgactcactgaccgaacacctgcattcttccatggacgtgacttggggaacgggttaaaaatcggtgacctgaccaacgagcagtccaaaaatgtaactcccagctatccagtagcatcgttcgctaatcctgccctcacgtattttatcggtcaaagccgggttgaggggtcttcaaaacacctaaactacgcgtctctcatttatgaccgagcactaagtgacgaggaagtaatggaaatttatgtgtacttccagggttattacggccgcagaggaattcagctatag

SEQ ID NO: 456956 - DNA, 762 bp, Serratia marcescens
gtgcgtcgcgtccagcttcgccccctgcaggcggatatcaccgccgctcaggctgatgtcattggcgctcatcgacgcctgacgcagcgcgtcctgcaggttggtgctcatggacagactgtcggcctgcacgtcaatactgccggctttgatgtcgccgccctgatgcaggaactgcccggcatccacagtcagcgccttgtcggcaaacaggttgccggcgttgtggaggctgtccgccgacagctgcaggtctccgccgccaatcaccgcgccatcgccggtcagacgcagcgtggtctgcgccagatacactttcggcacccacaccgtctgcgggccattggcggtctgtaccgtctcgctcaccagccagacgatatcctgttgcagcgccgcaatctgctctggacgcagcgccacgcccggcaccagttggaagtcctgcgccaccttgatgccgttgttcatcaggcgctgatactgcgccatcgcgtcttcaccgcgcaccgacggccggccggtcagcttcagcacctgctcgcgcaccaggcgctgctcgtaaaagccgtcgcccaggcgcttatgcacctgcgccggatcgtagcccacccgctgcagcatatagtcgctgctgataaatttgctgcggctggtgaaacgttcgtcggtcaccaccagatacgggctgccggttgccgtatgttgactcaacaagccgttattggggagggtggtcaccacattgtccagatgctgtaa

SEQ ID NO: 456957 - DNA, 888 bp, Serratia marcescens
gtgctcgcccggcgcaagcgccgtgtcgccatcctggaggccggcgccctctaccgtgaaggccagcgggttgcgctcaagctcggcacgttcggcatccaccgccttcaacgccgcatcaagttgactgatttgcgcctgattgaccgtggtattggtaatgcggactccgttgagggtgacagtgccgttgccggtgatcacgccgtcaacggtcgccagcgccgtggtttcgtcacggttaaacgtcggataccagtgatgcgtgtccttgtcatagtggtcaacgatcaccgcctgacgccgctcgttaaccgagtaaccgcggttgtccacgctgccgccgccgtcctgcgtcaggttgccgttggcggtaatgacgctggcgtcgttaagcaactgcccggtgatgcgcagcaccatgttgccgcccgccagaatgcgcgcgccgatcccctcggagaccagcctgtcgcgcgtcaccgtgccgctttcggtacgttcgcggaagttgttgtagtcggtgacaaaaggcgcgttgacgatatcaacgtgtttctccggatcccactgttccagacgcccaatcccagcctcacgccacaccgtattgtggtacggcgtcggcacgacgttctgccggaagccgcgcgtctcgtagaaggtcatggcgtaaccgccatcgtcgttcggcttcagcgccaggtagttcacccagagctccagcatctctccctgtgcgctttttacccgcacctgcgcgcgcttgcccgccgggtcaatcgccagcagggtgccgtaaggggtgtttgccgccgccgcgtcatcgcggaacgtcaggttctgcgtggtcggcgccatgggctctttatcggggttaaccggtga

SEQ ID NO: 456958 - DNA, 843 bp, Serratia marcescens
atggcaacattacttttagcagtgattttggttagtggttttatatatgtaaacctatcactttcaacacgttacagatataagcgttccaatggctgggacgcttatttttttgtcgccgcctggggaattgtgttctttctgctcggtggctttttaaccttcgtcctgaatattacaggcgggttccgctggctatccaatgagcttaatcttacgccggatagcttcaacggcatgttgtctacttcatccgacaaagcccagcgtatcaatgaaatcaagcagattgcatgggttgttatttcaattgtgctttctgcaatttctggcctgggtaataagttgcgtacaaagagcggtgatcgccgctgggatgcgctggctaaggctgtggggaataactcttttgagtcattgctgatggaagcatcagcacgacaatttccaatcatcgcgacactctcatcgcgaaaaatctatgttggcctggtgacgtgtccggcgctggagaatgggctgtcggaacacctggaaatactccctatgttaagtggctatcgtgataaagacgatctcacgataagcatcacgacgaactatcatcagcactatcttgaaagcggcgttatcggtgggatgtcgcgcctgaatatccaggatttccgtgtgctgatccctaaagatgaagttgaaaccatctcgttttttgacactgaaacgtataacaaatttaaagaagacgaagcgcgcgaccggaaagactgtcgcaagttgggtggtaaaaagccatcaacacgcaggagaaggactgctggcgatgcagagcagggtagtgcatga

SEQ ID NO: 456959 - DNA, 219 bp, Serratia marcescens; identical to SEQ ID NO: 79409

SEQ ID NO: 456960 - DNA, 2421 bp, Serratia marcescens
gtgacggatatcagcttgggccgtctcgtcgcgcctcttgcatctgaaatccccggtagcggaggtaaagctgccggggcgtatccatggaacgagcctaagaaggcggtaaacccctatctggacccggtgggcatttcaccggagtctgcgctttcaaacctgattactctctatgctgcggataacgagcaggaacagctgcgccgcgaggccctgagtaatgaggtctgggaacgctatttctacaatgaatcccgtgatcctgttcagcgagaaatggagcaggaccagctgataagccgcgccaaaatggcccgtgaacagcaacaattcaaccccgatctggtaatcgttgctgacgtgagcgtccagccagcgcatataagtaagccgctgcttgaacggattaaatacttcgagggcttgggcaaaccgaaggcatattcccgctatctgcgtgaaaccatcaggccgtgccttgaacgcctggagcgcgtgcgtaccagccaggtttctgcatcattccgttttatggcgagccacgacgggctggagggtttgctggttctgcccgaaatgagccaggaacaggtcaagcggttatctaccctggtggcggcacacatgagcatgtgtctggatgctgcctgcggtgagctgtttacggatgaagacgttacgccggaagagatccgccggtcatgggaaagggtggccgctgaggccatgcgccttgatgttatcccgcctgctttcgagcagctgtgccgtaaaaagcaccgccgtaacccggtcccctacgagcttattccgggctcgcttgcccgtatgctttgcgcggactggtggtatcgcaagctgtggcagatgcggtgtgaatggcgggaagaacagctgcgcgctgtctgcctggttaacaaaaaggcgtccccgtatgtcagctatgaggccgtgatccacaaacgcgaacagcgccgcaaatcactggagtttttccgctcgcatgagctggttaacgccgaaggtgacacgctggatatggaagaagtggtaaatgccagcagcagcaatccggcacaccggcgcaacgaaatgatggcctgcgttaaggggctggagctgatcgcagaaatgcgtggtgaatgcgccgtgttctataccatcacctgcccgtcacgctttcacgcgacgcttaataacggaaggccaaacccgaaatggaccagtgccacggtccgccagagcagcgattacctggtgaatatgttcgccgccttccgtaaggcgatgcacaaagccgggctgcgctggtatggcgtccgcgttgccgaaccacaccatgacggcaccgtgcactggcatctgctttgcttcatgcgcaaaaaagaccgcaaatccattaccgcgctactgcgtaaattcgccattcgtgaggaccgggaggagctgggcaccaataccgggccgcgattcaagtctgagcttatcaacccgcgcaagggtacaccgaccagctatatcgccaaatacatcagcaagaatatcgacgggcgcgggctggcgcaggaagtcagcaaagaaacaggcagatcactgcgcgataacgctgagaacgtaaacgcttgggcttcgctgcaccgtgtccagcaattccgcttctttggtattcctggccgccaggcgtaccgcgagctgcgcctgctggccggtcaggctgccagggcgcagagtgacaaaaaggcaggcgcgccggtactggaaaacccgcgtctggatgctgtgctggccgcagctgatgctggctgttttgccacctacatcatgaagcagggcggcgtcctggttccccgcaagcatcaccttgtcagaactgcctatgagctgaacgacgagccgagcgcctacggcgatcacggtgttcgtatttatggcatctggtccccgatcattgagggccggatctgcactcatgcagtgaagtggaaaatggttcgtaaagccgttgaccttcaggaggcgacagccgaccagggcgcttgcgccccttggactcgtggcaataactgtccccctgttgaaaatctgaacaaatcagggggtgatttacccgctattaaaaccatggatgagaaggagctgcaggaatatctccacaacatgggccagaaggaacggcgggagctgacagccaggttaaggctggtgaaaccgaagcggaaaaaagcatacaaacagactatttcggatcagcagcgcctgcaacttaaggcagagctaagttcaagagggttcgatggtagcgagtcagagattgacctgcttctgcgcggcggcagtattccgtcaggtgccgggctgcgtattttttaccgcaaccaccgcctgcaggaagatgacaaatggcgtcagtggtactga

SEQ ID NO: 456961 - DNA, 1011 bp, Serratia marcescens
gtgaatcatatcgatccgcgttgctttgccgccagcacaataaacaccattagtatttcaggcggcaaggatagccttgcccagtggctgcgggccattgaaaacgatgtacctcatatttctgtcttcgctgatacgggtcatgagcacccgcagacgatggagtatctggattatcttgaatctaggcttggcaaaataaaccgtgttaaggctgattttactcgccagatcgaaggtaaacggaaattcattgcagagaaatggcccgtttctctggtccaggaatgcggtatgtctgccgatgaggcggcagaacgtgtgcgccgtgccctggaaatattgaagcccaccggcattccttttctggacttgtgcatgtggaaaggccggttcccttccacaaaagcccgtttctgcacctttgacctcaaacatgaacccgtcaggactcaggttattgttcctgctctggaggagtatgacgaggttatcagctggcagggggtcagggctcaggaatccccggcgcgcgctttactgccggactgggaggaagatgcagacaatacgccaggcctgcacgtctatcgtccgatacttaactggctgcatgaggatgtctttgcgattgcaaagcgccatggcatcaagcctaacccgttgtatctgcagggctgcagccgtgtcggttgtatgccatgcatccacgcccgtaaatctgaacttgctgaaattttccagcgctggcccgaagaggttcgtcgggtcgctgaatgggaaagaatggttgcggactgttcgcgccgcggcaattcaactttctttccctccacgcatgatccacgccgcgctgaaaaacgtattgaggtcatcactgttgatgcgtatggcattgagacgtaccgagactgggcgctgacgacacgaggcggtgcgcagtttgatttactggcgagtgcaaacgacagcgcggtttgcagtagtgtttacgcaggagtttgtgagtga

SEQ ID NO: 456962 - DNA, 897 bp, Serratia marcescens
atgagcactatcctgaaatgggcgggaaacaaaaccgccatcatgtccgaactcaaaaagcacctcccagatggccctcgactggttgaacctttcgcaggttcctgcgctgtgatgatggcaacagactatcctcattatcttgtcgcagatataaatgctgaccttattaatttttataaaattgcgtcccagcatactgaagagttaattagttgctcgtgggggctgttcagcgaagataataatgctgaaagttattatgataaccgtctgcgttttaatgaggatgcatccctgaccgcgctggagcgcgccgcattatttctatatttaaatcgtcattgttatcgtggcttgtgtcgttataaccaaagtggaaagttcaatgttccctttggtaattacaaaaaaccttacttccctcatgcagaaatcctaacctttgctgaaaaggctgtgcgcgccacgttcatatgcgccagttatgccgaaacattagaaatgctgcaaataggcgatgtggtgtactgcgatccaccctatgacggtactttcgctgcatatcactctggaggttttagcgagaaggaccagtatcacttggcatctatccttgaacgccgttcttcagagggatatcaagttgttgtgtccaacagtgatacctcgctagttaattctctttaccataatttcacccgacaccgtattacggctaaacgtagcatgggcgtggaagctggagatgggaaatctgcagaggaaatcattgccatttctgagatggttgctcccgtgcctttgtatgggcatgcaataactttttatcaacgctttaaaagacaagggattcagtcaaaaagaaataaaaataatactgggggtgagctgtga

SEQ ID NO: 456963 - DNA, 228 bp, Serratia marcescens
atgcagaaagaattacgaaaaatgtttgtagccgaaaccgattcgcttatggctgtgatcgatattgccaaacgtgaggagcgcaaaggccgcgcgctcgcagtttcaatccgccttgaggcgctggcaacccacatcaccaacaaagggttaaacggtgttgaagcagctgaacttctgcgctgcgaagcaacccgctacgaaaacgaatctcaggagctccactaa

SEQ ID NO: 456964 - DNA, 201 bp, Serratia marcescens; identical to SEQ ID NO: 99516

SEQ ID NO: 456965 - DNA, 510 bp, Serratia marcescens
atgtttgattatcgcgtttccaaacatcctcactttgatgaagcctgccgcgctttcgcacagcgtcacaatatggcgaagctggcagaccgcgcaggcatgaatgtccagacgctgcgcaacaaactgaacccggagcaaccgcatcaacttacggcgccagaaatttggatgcttaccgatattacagaggattcaacactcgttgacggtttcctggctcaaatccattgcctgccatgtgtgccgctgaacgaagtagccagtgagaaaatgcctcattacgttttgaatgctacagcagagatcggtcgcgttgcagcaagcgctgtttctggcgaacaccagacaacaacggaacgccgccaggttatcgaaagcatcaattctgttactcgtttgatggcactaacagctgtttccctgcacgcgcgcctacagtacaacccggcaatggcaagtgctgttgatactgtgacgggcctcagcgcttcgtttggtctgatctga

SEQ ID NO: 456966 - DNA, 615 bp, Serratia marcescens
atgccaaacacaaaagagaccccgcaagcgatctcaaaatacaactttccatcacaaagtggtggaaaggaggcgataacccgcatccttaaagcctatggattcagtaccagacaggcattgtgcgatcacctcggggtatctcagagcacaatggcaaaccgctggatgcgtgatacttttcctcatgattggctaattgcatgccatcttgatacgggtgcatctatgctttggcttaccaccgggcaaggctcccccatgacaaaagcggacagtgatagcggattgcctttgcaattaaaagaaatctcaaatgggattctctcctctactgagcaagttcgttacgattctcgcctcatccctcaagacgcatcgtcaccattcattgtgaagtttgaaaattccttctatctagtggacgagttcaggggagaaatcaacgatggagtctggttgattgaaatcgatggctttatgagtatcagacaagtttatcgtcttcctggcggacgcttacgcgttgagaacggccccgcatcctttgaatgcacaccatcggatattaagaccaacggcagagtgattagcaaaataacgtttactgaataa

SEQ ID NO: 456967 - DNA, 900 bp, Serratia marcescens
atgactcaatttagcgctttcaactacacacaaaatagagataaagccattgctaacttaatcaacgtgattgagggaatgacctgtgatggaaatttaagcgaaaaagaaatgatattcctagatacatggctcatggaatcagacgttctttctcaaaactatttcgtaaattgcattagagaaaagatcagtgaaattctttctgatggtgtggttgaaaaggctgaactggatgagctgaaagacctgctccatgaaatgcagcgcggattgatggacactcctaacatagacctttactccgcagattctgacaagcacttgttagaaggtctctgtaaggggcttgcttccgactatcatttaagcgatgaagaaatccgctatttaaattggttcttatcgacaaatgcagctttaaaaagcaactatcccggtaaacatctttacgaactggttcaatcaatcctgagtgatggagtgataacagacgaagaacgcaccaaattattacaagaaattactgctttcactggctcaaatatttctgagggtattgtagatgggtattccacaacatcgcctgttgacctaattgatgagtttaactctacaaatagtaaagtctgtctcactggtaagtttctatgtggctcccgtagacaatgtgaaagtgaccttttaaagcttggctgccaaattgttgatcgtgttactcaagatttggactatctaattattggcgccctcagctctaaggattggaaatttcaaagcttcggaaggaagatagaacaggcaattgattatcgtgacaataaaggagttccgctcaagatcctcagtgaagaacactggcaaaccttaatgcgtgataataattctatatctcaatag

SEQ ID NO: 456968 - DNA, 525 bp, Serratia marcescens
atgtctagtaaaacacattttaattttagattctatagtggtgataatggattagatttcaaaagagggcggcatactatagatataggtgaattattaactgatgtgcctgaaagtataacgagtggtgatactgcagtatttcagcttgctagcgatgatgacggtatttctaaaggagtggtttgctattggtcaaaatatactagttcttatggggggtatggtatagcttatattaagtgggagttaaatttcaagcaacccagagcacattactcagtggattttttatatactaaagaccgcaaaacctattctcgagatacaggttattttattaaaattgataatgaaatgctaagggaagacccctatataggttttaatctagtagaaaatgaaatcctggatggctccttaggttctagtggtccatttttggtaggtgaaagtaataatgatgtggtgtttatggagaagttgaatactaacgaaataaatgctgatttatttaaagaataa

SEQ ID NO: 456969 - DNA, 633 bp, Serratia marcescens
atgacactatccctgacagcccctgtgcaacagcaactgactgccgccatcgaccttctcacccgccagcttggccgtaacctgatggccgtccacctgtacggctctgccgttaagggcggtctgcggccctatagcgatctcgatctgctggttactgtgcgcgcgccgttggacgacgcgctgcgggcgtccctgatgcaggcgctgctggcgctgtccgcgccgcccggcgcatcggatacacagcgggcgctggaagtcaccgtgctgggggttggcgatgaggcggcgcggctctatccccccgtgccaccgcgcgacctgcggcaaaccttgcaggatacgctggcgctgtggcaggaaacggcggatctgcagggggatgagcgcaatatcattctgacgctggcgcgcatctggtacagcgccaccaacggcggcatcgccggcaaggaagaagcggcggactggctgttgcctcagttacccgcctgccatgccgccacgctgcaggcggcacggcaggcgtacctggggctggcgacgcaggactgggcagcgctcatgccggcggtagaacgctttgttcactatgcccaagcgcagattggcgcccggctcggcggataa

SEQ ID NO: 456970 - DNA, 708 bp, Serratia marcescens
atgggaaggcggagagtaagagatccaaggctaaaagtattcacaactaattatgatttaacatttgagactgccgcatcagaattaggaatgatggttgtagatggactttcctatacaggcgtaagaaggttcgatggtaaatattttaattatgatgtagttcatagagatgaaaatgaacatgaattcatagatggagtattcaacttattcaaattacatggttctgttagctggataagaaaaaacggacaaatatacgaaaatcaaaacccatcagcaacaaatgcctgtttgatatatccagcgaaaggtaaatatcaacaagcttttattcaaccacatcttgaattactttcaagacttcttgatttcctcagaaaaaagaatagctgccttattatttctggctttggatttaatgatgaccatctttcagaacctatttattcagcaataaattctaatcctagcatgagattaattgtggtggattttaaatgcgccacacatataaacaacaatggtgagaatgggtctagtaaatattggagtttacttaaagagctttcattatcggggtatgatattcattttttgaatgcatcattcaaagatttcgttaatttaatacccaatttaagagcattgacacctgcagaacagttagcaaaagccatcaagcaagtaggaggaaataactaa

SEQ ID NO: 456971 - DNA, 426 bp, Serratia marcescens
atgcagcttggctggcagccgcaggccagcggcgtcttgctggcgctgatgacgctgggacaggtggcgggcgcactggcgctgccggcgctggcgcgtggtcacgatcgccgtccgctattgtgggcggcgctgatcatgcagctgatcgggtttatcggcctgatcggctggccgctgcagacgccgtggctgtgggcgctgctggccctgccacagccggcggcggccgggcggctggtggcctttatgcagggcattggctttttactggcgggcgttgcgccgtatatttccggcctgttgcgcgactacagcggcggcttcctgctcgactggcagctgcatacgctgttggtgttgctgctgatggcgctgacgacgcgcttccatccgtgcagctaccggcagagcggcggcgggtaa

SEQ ID NO: 456972 - DNA, 531 bp, Serratia marcescens
gtgtcttacctgtccgggcgctcgttgctggctttactgttctggtgcgcgctttattttcttaccggctatatctctttgtatatggatgcgcccgtcagccgggtcgccgtcgtctggttccctgccggggtagcggtcagcgcattcctgatttttggccggggttattggccgatgctgtttctggtgctgttccttacccgggtgctgctggatgtagcgctgcgacatacgctggaaacctcgctggccctctccgcgatttccctggctaacgatctggtcgtggcatggtgcgtcaggtatttcgccgccgcgcgcgatcaactgcgccgcgtgggcgtctggctgctggcgacgctgggcaccagcgtgatctccggcgtattgggcggcgactggctggcgttaagacacgagattgattttgtgcagactgtctggatgtggtgggcgtccaatgtggtcggcaccattttgctgaccaccatcctgatggggctgcgctggcgttccgcgccgttataa

SEQ ID NO: 456973 - DNA, 717 bp, Serratia marcescens
atgttgctggcggcgcggctcgctattgccggctgtaaaactaatcctgcgctgtgccttaatcaggcggggatctatgcggcggatattatcgcgccggatgctattataggtacaggcgctgttactgccggcagcacgttgatcgtagggaaaacccaggatagcgtgaagaagctggcgcagcaggtggtgaaagtcaccgatgagtcttttaaaaataaggcatttaacacccaacctgtcgctgagtttatcaaaggagagtcgacggcagggagcggtctgtcgacgaaaactgtcgattatctgcgtgatattcaaaaaacaaatactgaccagttggtgagggtatttgatcccaaacaagcggagagtaagttaaatgtgtttgggaagcagtttgagcaggttttaggggaaggtgggagtgataaaaaaggcaaagcaaaagtctttgcatcacaaacgttaactgaaaacgaaattattgactacgctcagtcattaataggtaacgtgccatttagaaaggtaataaaccctaaaggtactgtatattttgctaaatcaaatggtgtcactgtaaatcttaggaactactcaacctctggggagcttactaaagctcgttggacgattgatattattggtaatgatgacattaaaaatgctgtgggcatagcctctaacaaatatgaaataaaattccggtag

SEQ ID NO: 456974 - DNA, 549 bp, Serratia marcescens
gtgtgccactacattggcgacaatggcgaagtgttgggtatcgccggtaaaagcgtcagtcatgcggtcgtcgctggcgtcgcggcggagatcggacgtggtgacggcaagggcgcggcggcaggcgcgttagctgctgagctggccggggtgattatgcaaagctctctgtttgagcctgctaatctcaatgccaaagaacgtcagcttttacgtctgcaagaagcgctcaatggcaatgaagccaaggaacaaacggcccgcgtgcttggcgcattgaccggcgcgttaaccacccacacaccggaaggcgcatacagcgccgccgacagtgcgcaaacggtttatcgctataacatgaccgagcatatgctgcagcagtacgcgctggacaaccagcgcgatattctagctgcggacaagggggataaagaggcggcgaagcgggttgtcgcacgtcgtgaagctgcagcagccgttgccatagtgggcggtggcggcttggcgctgacggcgggcggttttactctgctgggcgctgctccgtag

SEQ ID NO: 456975 - DNA, 225 bp, Serratia marcescens
atgataggtaatattattcctttatctaaagaattaaatgagcgtgctggaaataaaaccttggaagagaaggttgcgatttatgaacagtcggaattcaaattaactgaagagtttgtatgtgagttgagggatatttatggtgggcattgggatgagcaaactataattttaaaaacagataggctagcaggtgaggcttatatgactatttggaatcactaa

SEQ ID NO: 456976 - DNA, 228 bp, Serratia marcescens
atgcctagggctttcccattcgacgcgataatcatcaaccttcagattaatatgttcttgattggttcctcccatcatataattacctttaggcaggacaaccatctcgcgacaatagaactcctgacaatctctgaacacttcaaattcattgagctgtctagcgggataaacaccatcagcccgcgaaatttttattttttcaattggcgtctttttttcatttag

SEQ ID NO: 456977 - DNA, 369 bp, Serratia marcescens
atggcgccgaaggccggcatgtacagcgcggcgtgccagtcgttgaaccaggccatgccgagcaggaacagcagtggcggcagaccgccgccgacgttatgggcgcagttccagacggagacgatctggccgcgttctttctgcgaccaccagtggaccatggtgcggccgcacggcggccagcccatgccctggaaccagccgcacaggaacagcagcacgaacatcacggcgatgctggaggtggcccacggaacgaagcccataaacagcatgacgcaggcggccaggatcagaccggcgggcaggaagacgcgcgggttagagcggtcagacaccgaacccatgataaatttggagaaaccgtaa

SEQ ID NO: 456978 - DNA, 123 bp, Serratia marcescens
atggaacttggactgcggttgaacatgttgctaacaaactcttatcgctcaattccgctgctgctggaaggccatagaaaaatatctatatatatcaactacaaaaaacatggatatagctga

SEQ ID NO: 456979 - DNA, 150 bp, Serratia marcescens
atgttctaccactacaactttatgtccctcagcatttctatattggtaaaatttcccatgttctgccgggttttcagaataaatataattactatacccttgctttctacgatcattacctatctgccaatgactttcatgttgctgtga

SEQ ID NO: 456980 - DNA, 1194 bp, Serratia marcescens
atggctgcaatgagattgattattggtcagtttactctggcatgtacggcacactatgccactatggccgtgttgcccgttttcctgctagaaaataaaacgattgattcctcagttgttggcgctatttttctgacagcatctgttacaggtaaatttgcaagaatatttttgtctggcattatagacagattcagagctggcaatgttctttctgtgtcgtgcttattttcagctattgtcttgttttgtcttccagaaattaactcctcagccttgattgcagtatttctttttattttcaacctctccaatggcgctaacagcatatctgtcagggccatgattgccacatatggtgcgaaaaaaggcggcactgctgctcattttacgaaactttctatagggtcaagcattgcctcactttccggcccgccgttaagtttttttatactgcacgcgatgggatggatcacaccttttcatgtcttttcggttatattgatttttacctcgttgataatatttactaaaaggaaaacactgcccgagattgcaacacaggccaatatcatttccggggttaaatcagcctgtcagactccgggatttgttaacttaatgattttcgtactgctgttttacttctgcaattctttgctttacacttcggttactgtatatgcggtatttcatcttaaccttctggcatggggcggcatcttgctggcgataagtgcaattacacttattttgttttcacttccggtaaacagattgtgtgaccgttgtaaactctcggactatggaagaattcgatcaggtgctgtgctctattttattgcctttcttcttattatcttaggacagaacatttactggcttgccattgcaatgatattttggggtttgggggaaggtattatggaccctaccatgaccaaaaaggtcaccagtctggtacccgccgagttttatattgcatcgttaacaatacaatcaattgttgtcgggctaggtgaaggtataggtagtttcttgggtatcccggcggctgcatccgcatcgaatagtggcctgacaggttttattgtcgccgcgataatatctgtattaatgtttcttttgtcgctacgggtgttgcaggaaaaaagaaaggtgatacaggagacaatcggtaaacaggccgattaa

SEQ ID NO: 456981 - DNA, 210 bp, Serratia marcescens
atgaagaactctaatgcaaaggtcgcagaagtggttaaaggtaattatgaattgaaatctgtggaaatcgcgcaaaataatactcgcgcagtgatttccatttcagcccgcgatctagatgcttcgcgcatgaatgccgcgccggtttcagcgtctaaattcggtctggaaatactgtgcggcgcaagctgcgctgtgggtgcgatgtaa

SEQ ID NO: 456982 - DNA, 1446 bp, Serratia marcescens
atgaaaaccgaaaataagttcatcgaaatcattagtgaattagctaaactggatcgcactcaggcaagtaacgtcacaaagaagtcatgccagttcctgattgactatgtaacatcctacgttccttcgtcttgctgccgcctgctggagttttccgccaagcctggcacccaccatctggggttttctgcgccgtctccatgggagctggtctctggcagcatttgtttttcagcgccggaacaggccgcttttacgctggatcacgccgttcgtcctatgttaattgccacccattctcacgcttttgttggcgatttgccagtatgtacccaggcagatcctgcacctgcgggaaagctggtactgctcaacgcccccagggaacagttctccgcccagcttaccgcagccatacagggaaatgcttatggtatcgcatctagcgccttctcccggtttgttggtcagaaccaggctcgcgggcgaatagaactcccatcctcgagcccggtgttcggtttaagtctcacccagtctgaacataacgatttggcatcgatgctgtcagttggggcgctgtctgctacggtatctatcgtgactgagcaatcgggtagtgttcccgttcttgagatccgcacacatcccgatgcggataaagaaatattgctatgcgcacacatctgccatctgcggcccggagcaaatgacaatgcctctggcgtggcagtactatgcgagttgctgcgtaattattccgattctttgccacccgttcgactcatttttgctcccgaatttacaggcatgtccgcctatctggcaaccaccggcgtaaaaccgatttttgccatcaatgtcgatatggttgggggggacccggcgctcacgggggcacaattagagcttgagtgttcgccgccgtatctacgccatccattgcaagacttgctcactgaactgtttcagaacgcccatgatctcgatgggcgtgtaacagcgttcagaggatattctgaccacgcgctgtttgcgtgcaaagccgttgcggttccggcagtgcttatcgggcaaagcggtgatgtctataaccacacggatttggatcgtctggataatctgagtctggatcagatggaaaatgtctgcaggctgcttgcgcgctttcttaacaaagccaggtcttactatgaacttccagactctcagcctgcttcagaacaggtaaaaaacaccttgcccttcaatatctataacttgctaaacgcctgcgatacagaaatggcagcggatatccgcctgcgactgtccagtgataagggaacttatgcgcgtctacaacgcgcatggcttgccacacagtggcatcaggaatcattgggagatgcatgggctgagaaggtgattggcagtttaaatcaaatgcgtctgcaaggtaagtga

SEQ ID NO: 456983 - DNA, 990 bp, Serratia marcescens
atgaatgcgtttcatcatcctcttttcctgacggccatgtatggccagcgctggcggcactatcacgccatatcgccgatgggtaacttttatcacgcaccggtgctgcagcctattggtaacagttgttaccactatgcagaagcatggcggggctatgcggaaccgctggctccgtcagaacggagccaaattcgcgatgctttcaccacttactccacgtggtgcagaaaacaatccctgatatgtgaactactgaggctcgatccgttaggcaagcttcgtcagttggttgacgacattccgaatgggcgggttgtagaaggtcaacccgttgctgttctggataagcccgactcaatggagcagtatcgggcgcaattgcctgctgcatgccagcgcaatctgcgttccgccaaaaaacaacttgaagttcggcttattgcagccggtgatcatcacaccctggcagaagctgccatgctccacagccagacgttacagcgggttcatgctgcagacaaatggttcgtacaggcggctaacctgcagttactcagttcagcaccagggttcttcaatgttggggtgtttaaccgttcagataatagcttagtcagcttcgctggctgcctgcacgaaggagggcggttgcatgttctgctggttggtaatggtctgcgggcagactgcaaaggagcatcagatctgctctatgaatctatcgtggcgcttgcggtagagcgttgcccgcgggattcagtcaacaggatttatttcggcggcggacgaagtctggacggcagcgattccctgatgcgctttaaattaaaattcagcctcggcagagcggtctcgtgtagctatctggcgctgatacatgatgccgaagctgcggccagtttatcgttatcgcaagtttcagaatctcccgttgaacccttatcggaactgcagcgtcagtgtttccctttcttaaatcaggagtag

SEQ ID NO: 456984 - DNA, 1209 bp, Serratia marcescens
atgaccgtagcctcaatcaatcgcaccccgaacgttatcttaatcactacccacggccgaataactattgcgccgttaaatgcaaacgaaaccctgtttgaactcatcaccagagccggcatcccctggagcgctatctccgctttttcatcgcagccagacggtgaactggtgttactgcccagtctgaacacgcctttttccagcatgcgcgatagcacagaaatcctgctgcacttcaacagaaacgttaaccctgagttatttaatatcctgaattacgatatcgccagagcggaaaacggtcctgaagtgagcagttatctctatcagcagattgataatgataccggtactgttcagcatattctgaaagggctgtcgcaggccgaatgccaggatctcgttcgccagcatgtccacgcattcatcgcagataacttttcacctggaacgtcttttgttatcgggatttctggcggtggcgacagcaatgccatgctgatggggatgacgtccttcgacgcgttcgatatttcgattcagcctgtcatccttaaaggggttgccgactgggatgcaggtgtaccccgtgcccaggcgctctgccaggcctatgggcttgacctgcgtgtggtgaatgaagaagaggttcgtacgatttgcggcattcgcaatgatcaagatttgttacagtcttatgaagccagttttcctggcgacgattttgagttccttggcactttcctgatccggcgggtattgagtcatgtggctgcggagacaggctcagttgtgtgcaccgggctcaattttgaagatattctggcggaatgcctctacaggctatgttcggggaagccgccattgccatttccggtgcgtcaactccagtcagttcaattctcatatccgctatggatgacaccaaagaaaattatcgatggctgttttcctaagttgtccgtggacaactatgacatgcgctatccgtgtttctctgccggacgaaatttgtattacatgatggcctacatgctgcaatcgaaatttccaggtagcgcagaacgtcttgtgaaagggatgcgtgagctggttgacgggcagagtgatgaccttgtggtaagcgaactgttcggctcgattttgaatgaaaatatttcccttggagcatttgaacgctttaaacgtcttatgaaccagaactag

SEQ ID NO: 456985 - DNA, 1923 bp, Serratia marcescens
atgacagaaattgcaatagttggaggcggggcgctgggcacctatgcgatggaacggcttgccgctcttgcctggcatgaggtgattgacgcatcgtctgtggaaatattgctttttgaacgtaccgggcgctttggcgatggcgaagtgtatgacatacatcagcctgcaacaaatcggcttaatactgcagccggcgagctggcgctcggtgctgacagtacggtagaaaaagcaaaatcgtggttgctgccagaatggaatacaagttttcaccactggtgtcgccggcaatacgaactcaccggtcatgcctgttatgacctggatgctagcgatgccgctggacgcgcagtatatggcgaagctttacgtgcagcgttgcaatattatattgagattattcgccaaaaaggcggaaccgtttgtcttattccggctgaagttaccgcgatcgagcctattgaaaacctgcgctttagcctatccgctgagctgaatggccagccccggctgttcttcgcgaatgaagtcttgcttgttactggccacgctcgccgtgccgcgccatcaggcaaaaataaccgctatcttgctaacccttatcctgtgagccatacatgtgcgtcttccgttgtaccgccgtcttcacaggttggcattcgtggcatggggttgagcgctattgatctcattcttgcgttgaccgaagggcgaggggggcattttacatctgacagcacctctccccgccgtacagcacttcactattcacctaacggcaacgaaccagacaggattgtggtcagtagccgctgcggcttgtttactcgcgcccgcagttggcttggcgcgggcaacacgcgtctgcgtaccagcccatggtttttaacccgtgaggcgatagaccagctgcgcaatgttgcaggtaacacgacagcctcacggaaaattgatgccaagcgcactttaatgcctttgatcgtgctggagatggctgccctgtttcatgccgccgccgctggagatgtcacaacctgcccctttcctgaacagggaaaagtcagccagttgtatcaggagtttttgcaaggggcgtcagttgaaatcgggaccatcactgcgctcgctaacgcagaagccgtcagtggcatgttatttaacccagaggagtttttcgcgcctctggtcagcatatgcgataaaaacattgattcgacagaggctttaatccggtttattgaatttgataatagccaggcattgcccggggctgcccgttcgccgtataaagctgcagctgaaggggtatggcgtgacctgcgcagcgtattttcgtacgcgacagataatggggggctgacaccggagagtcataagtactttgtcgaaaaactttatcgttatcacaaccatctgtctaatggcgcttcgctgtcctcaatggaaaaaatactggcgttattacgtgccggcatagttgatgccagtgtgagccaaaatccagtctggacgtacgacgacaatcgccagcaatggctggcaacgagtgcagcaggcctggttcggcaagtggatgtactgatcgaggccaatataccgtcgataggcgatgcccgttacgactctcggttgcataagcagttgtttcaatctggctttttgcagcgcttcgtcaacaaactcggcacagaaacctacatttcgggcggggtagcgacagatggcgacttccatcccgcaggttgcgcaaatccctggcgtaaggccgtaacggttttaggggcgcagctcgatggcgctgttttcttccagcccagcgccgcgaaactgaacggcaatgactctaatcttaacaaagttgctgcttgggcgaatggcgttgcggagcgcgcaaaggttaaagctgaggctgcgttatga

SEQ ID NO: 456986 - DNA, 1068 bp, Serratia marcescens
atgatccagacgttacttcctgatttgacgcgtatccgtcccttgatgcgagaattgttagcataccatgccagcaatgacaaaaaatctgtcgtgctgttagcggtggatggagtccgctatgctgatgcggaaaaaaactggcgttcagcacatcatctgcagcggatagcctctgtttttccgactacttcctccagttgctggcttagcgccttaacaggtacttcggtggccagacatggttgtgtgggggttgtttttcgcccagacgctactggcgaaacgataaacgttttcagccacgcggatggtttcactctggagggcgagcaaaccttgttccatgacgcagcgcagcatggttatcttcccgttgcgctgaccagcgatgtggggcacctgagctgcggttggcggcagcgtttgctcagcggcgcgcgcctgattgaatccgctctccattttcatgcgccgcatcgggcaaatggcgcgcttgatattgatagccttataaaccagcttcatcaggatatagcgcgtatcgccgcgctgccggttccctgtttcgcatggatttttgtggatcctgaccactatattcatcgccacggatacgacagtgcaatccatgaatatctgcaaaaactggatcagctggcgacgagatggacagagaaggggctagtgatggttgcacattcggatcacggtttagtcgccacagagcattcacctgaactggagcattatctacatcactacctcaagcggaaagggctgacaatgggtggtgcagggcgtactcgctggctttatgtgccgcgacagctgagcacagaacaaataatcagtgaactctctgctaatctgcccgcagatgtggaggttgcaaaacggtcagactattttccgccaacagaacctttagcagagcgggtaggggaaatactgctgatatcacgttcgggactttttctggcggagccggggataaaatatgagcatggttcactttgccgggatgaatgggaagttcccttcgcgatttggggggatgcctcatga

SEQ ID NO: 456987 - DNA, 1068 bp, Serratia marcescens
atgagcttgcaacttggcatcaatagttatggcagtgacttttccggtgacgatggcgaaggattaatgctcgcctggaccagtgatgagcaaagtcagctggacatcgaccttcatggactattaaccgcgaccttagcgaccgaagtcagcaaaggtgcaacattattgcgcagatatgccgtagacgatccctatggtgccggggtgatgcggccagcactcagggtcttgttcaataccgacttccagccagaacaaatcgtctgcgctgccggcgtggtgggcttattgcatggtctcgcgaacttgacgaagggaggactgtgccatgcaaatgatgtttatcgcgatctgcccgcatggtcacgtaaccggggattcagcgtctcatcgattcctggcataaaagattgtctgaagcaggactggcagatgctgttatttgagaatccccctttttttaatagcgcggaaatgaccgacgatcttctcacagagatatgcactttagcggagaagcggggaggttttgtcgtggtggatgagtctaatgccaattatctagcgccggataaaagcctgataaaaaaagttaataaaattagaagcttggttatattgcgcggattttcaaaaggctatgggctcggttcgcttcggctgggggtggctgtttgttcacacaatatagtggcgaagatccgtagcgcaattgcaccactggctgtttctcctctgagccttgaacttggcgccgccgtctggtcaaaaggcgatatcatgactcgattgcgcgaacgaattgcgactgaaaaagatgtgatgaaacagctaatggatcgtgctggcgcaggcaggcgtatggatgaacacccacagcttccttatctgctgttatctgcagacgatacatcaatcatccggcgcacagaaaatgcaggaatacgcgggaaatttcatttcacagcgggtatcgggcaagaaaatcgctattaccgtcttagcgtgccacttcatcctgaacgggcattccgtttctgtaatctgatcgccggatgttactaa

SEQ ID NO: 456988 - DNA, 168 bp, Serratia marcescens
atgctggtcctgctgcaggatgagttaaatgagtttgaaaacaaccatagccagagtctggatgcggtctatcaacaccgttatccattgggtctgcacttcgcctgcgtaaaagcgttctttgatatttttcgcgagcatacccaaaaaacgttgaaacgcagttaa

SEQ ID NO: 456989 - DNA, 687 bp, Serratia marcescens
atgcggcgcgtattatttccgagcagcagggctatcacgactacccgttctgatagtcacgccctgcacggcgcgaatgcccaacaacctgcctttacggcaggtttttttgtatttgccgttcccctgcgccatcggcgatccgcccgagaaccctctgattgtcggccgcttttctgcacgctagtatccttttcaaggagagcggcacagggagaggagcgacaaatggatacggttgaagagttgggtggcagctatttttatgcggggagatatcatctcagtgctagtgagcttcttttcatgattttttgtgaggaggttgctaagcagttgggggttcaggatattggtgcggttgctgctattttgagtgggcttaacgtttcaaaaacgcggggaaaatttagaggcaatattaccgatacctcctatgtttctcgaggggcgcgtagggtgttcggcaacaaaacttttcccggtaatataaaattaccgtcagttgttggaggatatccaccttccacaatgagaattattttaacgcgcaagctgggaaccttcatcgggcgtgctgtacctgttttggggtgggttattttggccaaagacattagcgagatttcttttcggacgatggttaagtacaacaccattgctcgtgggggcgacaagctatggtaa

SEQ ID NO: 456990 - DNA, 450 bp, Serratia marcescens
atggatactgtcgaagagttgcatggaacttacttttacaaagggatgtataacctaaatgccggtgaacttttcttttggatttttgttgaagaggctcaaaaacagctgagggtaagcgatatcgttgttttagcgttgatcattttaggtcaaccgttcaaaggtacgcgccggaagcccggcaacacgaccaagggtacgagcattctcagcgagaatctccgtcgctggataaatattgaaacgggtaaacagttgcccacactgacgaatggttctataaaaaggctgaaattcagctatgtgaccaaccttggcgcatttgttggccgctggatacctcttctggggagcgttttcattgctaatgacgtttcaacaatcgcatggaaaaccacaacgacctataatcttatcgccagaaaagaggataagctgtggggttag

SEQ ID NO: 456991 - DNA, 348 bp, Serratia marcescens
gtggggttagatgagagtaaggccttggcggtgtttgagtggtatgattcgaaatggaatcttcctacgcttttcagtaagaaacgtccactaaccctcaataccagcctatcaacagggaaatacccctgggccagagaagagggcgatcgcatcatgcgtgaattctttgacacctttcaggtagaacgcgccgagtttgattttctgaagtattggccctacgaaaaagggctgatccccaattttctgttaccaaaatcccaacgggttgacgctgctgagccagaaccactgactatcggtatgcttattgcatccgccagggcgggccgctggctgtattga

SEQ ID NO: 456992 - DNA, 501 bp, Serratia marcescens
atgacagtaatgacagcggcgaccgttcgcaatcagccggccggatgtcgtgctctggtcggcaaacatttagccgcgccgcgctggcgtggaacctgcgatttttacaatcaactgatggagcgcgatcgcctgaccatctgttttcatgcgcagttaaaacagcgtcacgcggtgatgcgtctggaagaaatgaacgaaagcgatcgggagcgtatcgtctgtgccattgacgagctgcgcagtgctttcgcgaaataccgtaaacacggaatcagcaaatcagggtttattggccgactgacagttagtcagcgccgtactttatttatgcatgccggattaacagaggttgaatttaatcagccttattggcgcatcgataatgaggcttgcacatggcgcgaggctttaattcgtgcgctgagagaattatttaatttatttgagtacgcgcccacgatattaacctcggttcgtcccgaagaatacttgcattaa

SEQ ID NO: 456993 - DNA, 282 bp, Serratia marcescens
atgttgcgtatcgcgatcggcaaggagtgggtcattaccagtgacgcccatcagtttattttgaaccagaaaaagcaggttaaaagcggcgccaaggcgggcgaggagtggctcgacgcggtcgggtattacccgacgattagccaattggtcaacggcctgattcatcatcatgttcgcagctcgacagcgaacagcatggccgggctggctgcggagattggccgcatcggtcaattgtgccagggggcgtttgcatcagtgagatctgaggacaagtga

SEQ ID NO: 456994 - DNA, 2316 bp, Serratia marcescens
gtgagcgtatccattcgggggcgtgttgccccctcaccaccaccgcagttttccaccaatgacgccgagccttttgtcggtgtttatccttggaacgcaccaaagtccgcgatcggcaaagaaagaccgcttacccgtgagcagttcgctcaggggcaagctgttttaaacaatatccactcgctgccgcacttcctcagcgcaattttcttgcagcgccatgcatatctgttgaaagagaaagggctgcatgatgccaataagtggcttgtgctccagtttcagcgccgcatctggccgcgtattgccattgttaacgctaagaattcaatgaatcgtgatgctgttttgcggttcgatgctgagttcgacaattatgcgcgcctgccggggatggaagataaagagctgcgccgctttgccgatcgcattgccgggcagctgatgcagaactatgaccgctattgcgaggagcttatcgcggaaaataacggtgataattccgggctgcttgaggatagcgtacaggctgaattttatggccgcattgccagcatggcgcgtgagttcaaagtcacgccgatgcactggcgtaaataccgtaaaggctcgctggatgctgattcggcgctcgcgagtattcacaggatggtcaacgcggagtggtgggagcgtcagctcaaggctctgcgcacgcgttggcgcgaggcgctgctgattgctgccggggaagtgaaccggaacaaatacccgtatgccagcaaacaggccatccgtgacgtgcaagcccgtcggctcgccaatatggaatacctgaaagggtgtgaactggagaacaccgagaccggcgagcgctttgacctcatcgacaaggtgatggcgagtatttccaatcccgaaattcgccgcatggagctgatgagcaccattgccggcattgagaaatatgctgccagcgagaagcatgtcggcatgtttatcaccatcactaccccgtcaaaataccacccgacgcgcgttgtaggtaagcagggcgccgagaaggttcagtttaaccacaattgggatttagaggcattcaccccgaaagacggccagcgctatcttgtgaacatttggagccggatgcgcacggcgtttaaagacaatggcctgagtgtctacgggatgcgcgttgtcgagccgcatcacgacggaacgccgcattggcacatgatgctgttttgcgagcgccgccagcgccaagacgttattgcgattatgcgtcgctacgctatgaaagaagacccggacgagcgcggcgcggcgaaaaaccgttttgactgtaagcacctgaaccggggcggcgcggccggttatatcgccaaatatatcgccaaaaatatcgacggctatgcgctcgacggccagctcgaccatgacaccggtaagccgttgcgtgatatggcggcggcggtgactgcgtgggcgtcgacgtggcgcattccacaatttaagccgatcggcgtgccgaccatgggcgcgtatcgcgagtgccgtgcgtcatgcctgcgtggcatcagtattgccgaccagttcgatgagcaggtcgaagccgtccgggcagctgccgacggcggtgatttttctgcgtatatcgccgcacagggcggtgctaacgttccgcgtgataatcagaccgtgcgtgtagcccgcaagactgccgacgaacaaaacgcctacggcgaagacgtgcaaaaggtttttgggatcttctcgcctcgccacggtagcaaccatgtatttgagacccggacaacagaatggcgcatcgtcagaaagtccccggccgttgacgttgaccttaatcttttgaccttaaaaagcgcctccggcgcgcctcggagtcctgtcaataactgtggggaggttcagcgagaaccggacgcagttatgcaagatacgccgcctgagtacgtcacggcggtgattaatttgatagagagtggcgcagtcagctgggacgacgctgacgtcgccaacacgattagagacgctctgagaatgcaatcaccgaagggcaacaaccaagaaatcactcagaatcgtagacccccccaaaatgatgcgccgtcggcacgattgacaccggcagaatgggaaagagttccgaaaatactgcttgagttggcgcgacagggcattactgccgagccctgggaacttaaagctctaacgagaggagcaacattaattttcggtgagcaaaaattttcatatccaccaccagatgaatggtctaatttctcgagcagttttgaatgttggggcaaataa

SEQ ID NO: 456995 - DNA, 342 bp, Serratia marcescens
atgctgcagtcagtcgatgagcttgagggcagtgatattgatgctgctgaatctatttgtcggcaggctctgctgcgtctaaataacgatagttttcgtaaggaaaccacggctaacgaaatatttcatgtctttgatgactatttcgatatttcccgtacggcggagaaatgcatggaggtttacagccgttatctgcttcagtgcatattaatttttcgtgaagagattaaagacttcaacacgacattaagtaggcatgagcaagaaaacctgctgcacgccatggttgacgccctgcgtatcggtgtcgaatacctctcctatccagatgataaataa

SEQ ID NO: 456996 - DNA, 843 bp, Serratia marcescens
atgagcatggccaaattcccacagcaaatctatgcaacacggaataatttcaatgactacggcgcagatgatatgcgtcatggtgatatctcggagatgcggctaaaacgggaatttcatctgacaactatctcaaatgttgtcaacccatacactttaacgcgattaacggcttttaataaccctcaaaaccgcttcttcggagtttacggaaagagcaacaccgggcagattagtgtccagcagtgtgcaaaattattatttgatgaaatgcaggtgacctctttacctttctccgtatatggtccatatcgccagcttatcaatcaaatgcttaaacacatgcaggaatctaatggttcacccttttggtccgccttgctcaatatggcatatcgtcaccagattatgtcagataactcacgcaacagttccagactcgccgttaaggctgttctcgatgcctatattgactatcaaaaacaaggcatcccgcaaagtaaggtccgcgcattttatgatgccgtcaatgatactgtgttacctaaatttgattcattaataatggataaaatcaatggattaggcattacagttcatgacgtttacgcaacacgtatcgacttgctgagcttggacgttatagggactcgctggcgagccagagtcaagtttatggggcaagatcattttggtctcgatgtgagtgacattcgcaagaaaaaattcagccagtttcagtttttcagaatttggtttatcctacagcgttttaaccggttcggttttcgcccttttttgaccaatatggaagctgttattgatattgagggaggccgttag

SEQ ID NO: 456997 - DNA, 333 bp, Serratia marcescens
atgagtaagcgttctactgaggatctaattagttttatctctagtggtcccatgacatacggatttgacgctgtggttaatatggatgccgagaaaaccaatcaattattagagaatgagtatatttcccggactaacggaaatacattgacagattccattgatgttaagttcgaagcggctgacattaaggcggaaatcattggcagcgatgccttatcagccgcccctagcttaaggtttgagcgctcctgtattgcccattcatctactaacggcgaccaggtagaaaacctggtcagtaaaaacgccgaaacggatatcgttaaataa

SEQ ID NO: 456998 - DNA, 435 bp, Serratia marcescens
atgaaaaaggtacagaagatcattgctgttattagctctattgttatcgttgctgtggccgctgtatttgcgtatttgtggccgacgatgaaaacagagtttgcaggcagcgcgcaatataccgagcaaaattctcgcctgtataatttctacacgccagaattgttcaaaaatatgccgcgcatttccgaccactatgatttcaattacgcaagcatctcaggtccagaagcgcaggctttcgcggtgacattttatggcacgactgatatcagtaatgtgaacgcgtatttggcaaacatgggctaccaaccgcaggctacctgcacggttgaggccaagtgttggcgcaccacagagtcgaaagatgtggtgatggtcgcacagttgccgaaaccggacagggtgtttatccagatttatcgcaggccttaa

SEQ ID NO: 456999 - DNA, 426 bp, Serratia marcescens
atgcgtcagagagtcatcgtgtgccctgtaatacaaaatgacggcgagttcctgctgtgcaaaatggccgccgatcggggcgttttcccagggcaatgggctttgcccggtggtggaatggaacccggtgaaacgatggaagccgcgctaaggcgcgaaatcatggaggaattaggcaaggaattgctgatcgttgacgttaagccgtggacttttcgcgatgacatccgtactaaaacctatccggatggcaccactgaagagatttatatgatttatctgatcttcgactgtatcagtgccaatcgagagattatgttcaacgaggagtttcaggcggttacctgggtgccacctgaaacgctaaaaagtatggatttaaatgaggcgaccaggatcacctttagccaaaaaggcatcatctaa

SEQ ID NO: 457000 - DNA, 1080 bp, Serratia marcescens
atgccagcacatcatttgcatacccaagggatgatggaaggtcatggcgcctataatcaatatgcaactgtccaggccagcggcaacatgatgcttattcccctgatagaacaactaattggcgacagcgcactaacgccgacaggttcgcccatatttctggcggactacggcgcctcacaagggaaaaattcgctattgccgatgggcacggcgatcaaggttctgcggcagcgctttcccaccttgccgattatcgtggcgcacaacgatcgatggaacaacgatttcaacacgctgttcaaagtgctagaacaggacgatgaccgatatatcgatcacttcgcccacgtatcctactgtgccatcggccgctcatttttcaacccgatcctccctgccggttcagtgttgttcggcctgtccgcctatgctgccatgtggctcagccagataccgtcaacctgttgggatcatattattccgtataagacctcgcccgtcatacggcagcaactggcgcaacaagcggccctcgactgggcagctttcctggccgctcgtgccgaagaactgcagccgggaggaaaattgctgatactgcaacccggcgttgacgacaataatgagtccggtttctgcagcattatggaacacgccgtcaacgtactagatagcatgttgcaggagaagtatttctctatcgctgaacgcgaacgcatgaaaattggcgtctacatgcgctgtgcccgtgaaattcttgctccattgatatccgaattacccgacgatgcattccctgcctttacggtcgcacatttctctacgcggctattacccgatcctgcttggcaacactacctgcatcatgccgatgcgccgacactggcgaaaaaacagagtctgtttttccgggcaaccttcatgcccagcctgatttccgcgttggatccgcagcgcgataacgcgcagcatcggcaaatcagtgacatctttgaagaaaaactcgccaaccgctgcgccactcatcctgcaccaatggaacaacgcgcacaaatcctgattctggtgaaaaactag

SEQ ID NO: 457001 - DNA, 330 bp, Serratia marcescens
atgaaaaatctgttcactttgtcagtggctgccggagctttatttttcaccgttcctgtgtctgccatggaagtttctgccgatacaagcaagaccgttcaggaatacagcggtaatgcccgaataatgttcaagccggatgaaaaattcgatattgccgcggacaaaacgtcaaagcttaatgacataaccgctttttccgggaatgtcgttgtcacattcaagggcggtacgctaaaaacggacgccattacggttaaaaaacaagcggacggcgctgcacttctggaggcaaaaaaattctcactggaacgtaccgatattaaataa

SEQ ID NO: 457002 - DNA, 681 bp, Serratia marcescens
atgaaaaaaattgaaccggaagactactttaccggccaacagctggttttggccaaggccattcaggcgggtgatctggagagggtaaaacaactggcgccggaaacggatttaaataccccgggcgagcagagcttaaccccgctgttttttgccatcaacgaggcgatgtataacgataatccggccaataggctggcaattattacgacgctggtcagcgttggcgcagatcctttaccgcaggggaaggacaaaccggctttgtggatggccaaggccagtaaggatatctggctgaaggcaatgctggacggtggtttatctccgaacgccagagataaagacagtgactatcccatgatctatgaaactatttatgcagggactaccgatacattagcattattagttatgcgcggtgctgatattaatacccgtaattccttaggtgaaacgccgctaacggtggcttttttcagcaacagctttgagcacgtcaattatttgctggaccacggtgctgatcctaatccggtggataaaaatgggcgggggtttgcagcattggtgcaaaggcgtattaaaaaaagccgaccagatactgaataccaccagaactgtctgcgactgcgcgacaagatgatcgcgctgggggtgaagtggccgccggagacctaa

SEQ ID NO: 457003 - DNA, 690 bp, Serratia marcescens
atgaaaaaaattgaaccggaagactactttacgggccaacagctgatattggccaaggccattgaggcaggcgacctggagagggtaaaacaactggcgtcggaaacggatctgaatactccaggcgaacaggacttaaccatactgtactttgccctgaatgaaacctactacaacaataatcccaaaccacgtttgcaaattgtgacggcgttggttagagcgggagccgatcccttgcaaccgcttcccaggggaatggcaagcccggcggaaatggtctcaatgggggataaggatatctggctaaaagcgttattggatggtggtttggatccgaatgccagagaccgaaatcataatgaagcgattatttataatacgttaaaagccaggaatacgaatacgctggcattgttgatcatgcgcggtgccgatgttgattcacgtgatattctagggcaaacgccgttagtggaagctttttttagcaaccgatttgaacacgttatttatctgcttgagcacgatgccaaccctgatccggtggataaaaatgggcgggggtttgcagcattggtgcaaagacgtattaaacaaagccagccagatactgaataccaccagaagtgtctgcagctgcgtgacaagatgatcgcgctgggggtgaagtggccgccggaggcataa

SEQ ID NO: 457004 - DNA, 1092 bp, Serratia marcescens
atgaacaccaaatttattgccatattaaccaatcaaggtgcggccaagctggccaacgccaccgcgctgggtacccaattggagataacccagatggcggtcggtgacggcggcggcacgctgcccacccccaaccctgaacaaacggcgctggtggcggaaaagcgccgggccttactaaactccctcagcgttgatgccaataacagtgcgcaaatcatcgccgaacagataatccccgaaaatgaaggcggctggtggatccgtgaaattggcctattcgataacgaggatacgttggtggccatcgccaactgcccggaaacctacaaaccccagttgcaagagggcagcggccgtacgcagaccatccgtatggcgctgattgtctccagcagcgatgccgtgacgttaaagatcgaccctgccgtcgttctggcgacgcgtgcctatgtggatgatgaaattcaaaaacatgccaagacccgcaaccatcctgacgccagccttgcggataaggggtttgtgcaactgagtaacgcaacagacagtaccgatgacaccttggcggcaacgccaaaagcgatcaaaacagtgaacgacgacgttgcaaaacgcctgctgagaacggatatgcccgtcggtattccactgccatggccaaccgacacgccgccagcaggctggcttaaatgcaatggcgcaacatttaataaaacgaaatatccgctgctggctcaggcttatcccacattgcaactgcctgacttacgtggggagtttattcgtggttgggatgatggtcgtggcgtggatgctgaacgttctttactatcttggcagaaaggttcctacctacttcaagaagcagcaccaacaatagatcgagtagtgcaattctcaactaacgatctaaccctgctgggatgggataaaacaaaagcaaacggtgatatctgccgagccaaaaccacgagtaacgccacaacgggaacatgggctccggaacctacaggtgcagacggggtgcaatacttgggatattcaagaccacgcaatatcgcatttaactatatcgtgagggccgcataa

SEQ ID NO: 457005 - DNA, 1266 bp, Serratia marcescens
atgcctatcaccaccctcagcggaaaacagtttatcggcggtcaacgcgtcgccagcggcgcggccgaacttatcagcctgcgcgccgataacggccagcccaccggctatcgtttccatccggccagccgccacgaggccgattgcgccgcgcgcgcggcacagtcggcgtttgctgcctacgcgcaaacctcctgccggcagcgcgcggactttctggacgccattgccgaccagcttgatgcgctggatgacgactttttcaccatcgtgcagcaggaaaccgcactgccgccggcgcgcctgcggggagaacgcgcccgcaccagcggccagatgcggctgttcgccgaactgctgcgccgcggcgacgttatcggcgcgcggattgacaccgcccaaccgcagcgtgtgccgctgccgcgtgcggatatacgtcagtaccacaccgccatcggcccggtcgcggtattcggcgccagcaatttcccgctggccttctccaccgccgggggcgataccgccgccgcgctggccgccggttgcccggtggtgttcaaagcgcacggcggccatatggccaccgccgaactgaccgccgccgcgatcgaacgcgcggtcactcagcagcaaatgccggccggcgtgttcaatatgatcttcggcgagcgtatcggcgccgatctggtgcagcatccggcgattcaggcggtcggctttaccggctcgctgcaaggcggccgcgcgctgttcgatctggcgcagcagcgcccacagccgatcccggtgttcgccgagatgtcgagcatcaacccggtgatcgcgctgccgcaggcgctggcgcagcgcggccggcacatcgcccagcagctggcggcctcgatcaccctgggctgcggccagttctgcaccaagcccggactgatcctcggggtacacagtccggcgttcagccagtttatcaccgagctgggccagcagattgaggccgccgagccgcaaaccatgcttaatgccgccaccttgcgccactaccggcagggcctgcgcgaactggatcaacatccgggcatcgcacatctggccggacgacgcacggccccggcgcagcaggccactgcgcagctgtatcaggcggaaggccggctgctgctggcggcggatacgcggctgcaggaggaagttttcggcccggtcgccatcgtggcggcgttggacgacgacacgcagctgttgcaggcgctgaacgcctgcaggggcagctga

SEQ ID NO: 457006 - DNA, 243 bp, Serratia marcescens
gtgtggcagaagttcggcgggcagagcgccagtcagatgatgaatcagtatcagcaggggcattatgagttgcagccgaccatggtttgggccgggccggagggagcggtggaaaaccgtcaggcggtgctgagcagtggtattggggccgtcacggaaatgacgacggcagacggtaaaacctcagctcagcactttccggatattaaaaaagttaatctgctgctgaataaggatatttga

SEQ ID NO: 457007 - DNA, 1788 bp, Serratia marcescens
atggacaagcaaacgccggttacttatgaagatgtgatgagccgcggtggatatacccccgttggttattttaaagacggctttaatgtggaatcacattatcaggcgttgtatttagaaagtagtaataaatatgttgcttggcggggcaatttgccacatgaattgaaatcaggtttgacgccagaaaccgatgggggttatggcccgacggcttgggcagatgtgagcaacctggaaccatctatccgttcggataatatggtgctggtggaagatttcttccatttggttactgacgatggcgactggacgccggcggcacaggctgcgcttaaccatgcgcgtgcaaatgacttgaataaagtttggtccttccaaaagttggtatttaaatcgcctttacgtatcgatgattggaagtacggattggaagtacgttttgcaaatgtagaagcgcataaaaatttccctgtttacacggactggaaaaacgcaacgccactgattctgattggcggaagttccgggggggggatggtagcgctcgaaatccatattggctatatggacggtaagacggtggcaaacggcgtatcagtgcaagggccgggctgcggcggttcacggattcatatcggcagagcgataaactgtaatattgtttatgactgcagccggcaaacgcatccttcagcctctaactttattaccggcgattattggaaccaggggaagatgggcgcctacttcgccagggggacgtccggcaagcaacctgttgcagaagggcataaactgtccgtcggttttattaccgggatgcactatggcggttctctgtggagaaatggttcgcagtatgggcagatttccggcgatgcggacttcaatggtcgatatttatcggaagtgaccctgtccggtaattcatttaccggtctggagcgcggcgccgaaatttctaacggtacggcaagcggtgaagtgctggccttctacgcacaaaccgcaggcgtctataaagtcctgattatcgaaaaagttaacgtatccggcggtaatagttcctttgccgcgggcgataagttgacctccggttcatggagcggtgaagtgtctgccgtacgcactgcagagcaggggcagcagttctattttgatatcatcctcgatttttatggcagcgcctttgccaaaattgatgtggactgtggttatctgggcggtattgttggccattctctgcatagttgctccctgaactataagagttcgtactcggcatataccaactcgatgaaaggcgcgcagtgggtgcattccggctcaacgatgacgctacgggacagttacctgaataaaaacgtcttggacagcaccgctgattttgtggcgccgggcggccatctgtttatgcgtaattatcggacctatggttccgagtttgccgcaacgtttgctccgggtaagccagtgactatccgtcagttcaaacgtattggcagtaccaatgccccgggtatgaaagatatttatgaggtgcaaatgtttggccctaatagccggctaaaggggctttgtgcaagttttaaagtggcggtatcggacgaagatttggaaatttttgagagtacagtcacggatgcttcccgggtgaaagttattcctgtcgtcaaaagggatgaggaagaaccgaacaatattgataaaattaagctgtttgtgcaggtacagcaggattcgccaaataccttcccgctctactttaccttcaacagaaagtag

SEQ ID NO: 457008 - DNA, 786 bp, Serratia marcescens
atgcctagcatcggaaacggtatcatcatcccaggcgataactacccgcgcctgtcaagtttcaccacgccattaatgacgccaccaggggcgaatattcttgccgcgtattttcttggtggtattgccaaaaaaggtgttttgcacaattacgcagagccgaccaagcccctgactatgcgcggcaaccctgcaatcttcaagaatttcgcccgttgtgatgtgaacaactgcttcgacaccgggcagttattcccagaaacagcggtacgcactattgctatcgttaaacttccttctgatgctacaaccaacgtaacccgtggtgtggtatttagtgactatgacgttaaccagtcatccactacagctaagggcatgtacctggatgcaactcgcgacggtactgatattgtgtcaaattggtacttcccggccgcatcgaatgggacaggtgttgttaccaagcgtattgctcaacctaatttggatgatttccagatgttatcttgcgggcatttccctcagcagcagagttacacgtctatgtataacttcaacactgagaagaacgacgggggcgcagcatcagctgctggggtaaacccgtatacacctacaggccgaactatgctgattggcggacaccatggtggtagcaatggcccattccaagggaccatagatattatgggcttcatgatcgtgtcgtggggaacgagtcttgatgacgcgatgggctggctctacaaaacgcaagggccacaactcggcatgtggaagtaa

SEQ ID NO: 457009 - DNA, 2181 bp, Serratia marcescens
atggctgtgattatcagcggtaaattaatcggtccgaatggcgacccgcgacctggcgtaacaattatgctcacggcgaccaggacatcatcagccgtagtaaagcttgcaccatcaatgtcaatgaccggaaatgacggaagttactcgatggctgtagaggttggcacacacagcgtaatgattgaagcgtatggccggccgtttgaaaaagtaggacagataacagtttatgctgactctgcccctgggaccctaaacgactttttgacaatgccaggagaaagcgatctaacaccggaaattattgctattgtcgaagagatgagaaacgcggccgctaattcggctaagaatgcaaaagactcagaagaagctgcgaaaaggtactctgaatcggctgaaaatatcgcagatgctaacacgtactacattactgaagaagatcctgatggcactattgctggtattgcaggaactccaaatggcaagagttttcgtgtcggccagggtattggtgagttaatctcatttatttattacgtgaatgttaatggcgttgcggttccgatagcatcagaaaatggaaatggtgtaataaagcttattcgtgataaccgcgaggccatagagtcagcgtttgagtccattgcagcaagtgtccctggcggtgtaatcgatggtgataacgtccctttggcgtgggatgactcagaggacccgaaagtaatcacggcgttacgcaatggggtgcttgaagtcttctctggcatttcgtttgataccgccgcgaaagtagatgatgcgctgggtcgagacccgcacgttagcgagctgatagggaaaaataacgcaacacctgttatttgggatagctcaaccgatcccaaagtacttatgtctatgctcgacgatgagctgaacatctacccaaatatctctttcggaagcgccatcaaggtcgatgatgtgctgggccgagaaacacgcattgatgcggtgtttaatccagagacagatacggcgctgttgtgggatgcctccgatgacccaaaagtcatcatgttcgctgacaaagacgggaaaattcaggctcctatggggttcggtgcggccggcggaacagcgccagtctcgtttgaaaccactgtaaacagttacgtcagccagaacgttcgggcgctgttgcattccgtcaagagcggtaaactacctaaccgtaacgttaaggtgctgctcaccggacactcctggacggacttccttgagatccccaaggcgtacagggatatgctccagccggtgtacggtgatggcggcatcggatatcagtcgtttaaccccacccgcgttcctgatggcatgacgtgcgtgagttccggctttacgaaacgaaccatatttgacgcggtaacagcagacggtacgggtatcaacggccgtagcttgtacgccacgtcagaaggcgcgaccgtcaagttcgacgggcttagcggtgagcaagccgtcatccactaccaggacctggcaggcagtttctccgttaaagtgggcgacgctgaacctgttcaggtggcgggtggtggcacgaacaagtacaaaacgctgactgttacagtgccaagctctccgacagcggtagaagtcacgaccacgtccgcaggcaaggtaaacctgtttggcgtcgcaatggagaacgcctccggcgtcagtgtgttcggcatcggcaatgccggctgtaacgcacatgactatgttaaccattgcattaaaaattacccggatgtggtccccgtagttaatcctgatgtggtgctaatcctgctgggaaccaatgaagtcatcaacaaggtgccgcctacggtatacaggtcttacctgaccaacctggtgagggcatggaaaaacaatgtcaaacccggcgttggcataaatattgtttcatgtgctcatacgctgaatacgtcaaattctgcacagcaggttctgtatcctcctgttgagcgaggtgtggcattagccgagggagttggctacgttgatggtttcgacatattccctcgaccaccggtttccggcgatgcgagattattcgcgaacactgagcatctgaacgcaaacggtgctgactacttttcagaatatgtgattaataaacttttggagattaaacatgcctag

SEQ ID NO: 457010 - DNA, 534 bp, Serratia marcescens
atggacgctgatttaatttcttacgaatcgatgcttgctgcgagagagtcagcaaagtgggcgttttggggggcaatcggggcatggggttcaggcatagcaactttctttgctgtcttgacatcgctttatattgctaacaggaggccaaagccaagaatcattggatccatttcgttttctcatgcagtaagaaaatcgccaataaaaggtattttaattgacatatcaaatattggatccgttccagtaaaaatatcagctttgatatggcatttcgaaggagacacaaccttgcttcctcgttttgaaccctatgcttcttctctacccacaaaactagaacacggggaatctgccgcatattttattcgagtggatgaaaattcaccttgggataagaatatgaaacatgaaattttgcaagccaacgggaaaataaaacgattgcggcttgctgttaatcttggaactaaggataaatttttcatcgctccccccaaagagatccttaaaatgttagaggaagcatga

SEQ ID NO: 457011 - DNA, 495 bp, Serratia marcescens
atgacaccacaactcaggaagaaaattatcgcagccattaccggcggcggtggtgctgtcgttatcgcgactgcgatgctcggcggccatgatggattagaggggcggcggtatgtggcctatcgcgatgtcgtcggcgttctgacagtctgcgatgggcataccggtgccgatattattcccggcaaacgctacagcgatgcagagtgtgatgcgttactgacagccgatctgcaaaatgtcgcccgcattgtcgatcccgccatcaaagttaaaaccacggaaacccagcgcgccgcgatttactcgttctcctacaacgtcggcccgaatgcgtttattcgctcgacgatgctgaaaaagctgaatgcaggcgatcacgctggcgcgtgcggtgaactgaagcgctggaagtacgccggcggcaaagagtggaaagggcttgtcacccgtcgcggggtggaaaataccgtttgcgcctgggggcatcgatga

SEQ ID NO: 457012 - DNA, 573 bp, Serratia marcescens
atgatcacaatgctcttttacgtgctttgtgttttagcgatattgcacttcatttacgaaaggatcgttttgccgtcagttaggcttcactaccgtaatgagcttttcaaaatccgagacacagtaagaaatgaaatgatttcaggtgttgaagggaaggatgtagagatagcgaagttggttcatgatgggttgaacaacactataaaccgactccattacctaactctaggcaacaaggttcgagctcaaatgaagttcgaaagcaacgaaagcatgagaaatcatgttaaaaaacacgttgatatgatgatgtcatcggataacaagactcttaaagcagcaatgaatgatactgtaaccgtaatggataaggttttgttattcaataacttatttttctttatctatacattgccgattgtgcccgtagttctaatgataagcttggtcgtatcagcggttaagaaagttgttagaacatacagatcgagactcaaatcaaaagagtttgaagaaactcttctattgatgaatgatggatttgtgaaaatggcagtagttccagcctaa

SEQ ID NO: 457013 - DNA, 345 bp, Serratia marcescens
atgaaaaaattaaccatcgacgttgacgtgtttgagagtgaccgcgttaacagcgggatccgcgcgctggtcaaggccggcaagctgaaggacaacccaaacagccagatttgccgagttcgcaatgctgcagccggcgccaaatggcacacactgcgcgatctggaattgttggtgctgcagatgtacggcatagcggacacgcagtcagcgattagtgcccgcctgcgggagttcagccgaccgcgtgatggcctggttaaggagcgacgcatggtcaaatcggagtccgggaagtgggtttttttctaccgtctggtggctgcagaggagctggtggcatga

SEQ ID NO: 457014 - DNA, 945 bp, Serratia marcescens
atgcagttgttggacaggcctattgcttaccagccttctttcgttggtctgggagtaggggttaccggtgcggttctgttgtcgcaactggtgtactggcacaaccgtatggatgctggttggttctacaaaacacaaaaagacattcgcgccgagacgggattaacgcgcgaagagcaggaaacggcaagaaagcggctggtgtccgctggagttctggaagagaagcgccgaggcgtaccagcgaagctttattttcgcgttaaggaagatgctttagaggcactcctgatgaagaaaataaagggtaaatctcagaatgcgggaaagccgcattccagtatgcgggaatcccgcattctagaaagagggaaagccgcaaacaagaatgcggagatcccgcaggcaagtttgcgggaaagccgctcgccagattgcgggaatcccgcagacattcatacagtagattacacagagactactacagatataaaaccttctcgtcaggatgctgcgcaacccgacgtctcagctgatgaagaatttatctcccgtcatccagaagccgtcgttttcagtgcgaagaaaaaactctggggcagcgctgatgacctgaagtgtgccgaatggatctggtcacgaatcatcgccatgtacgaacaagctgccgaaagcgatggggagatcagccgacctaaagagcctaactggacttcatgggcgaacgaagtacgcctgatgtgtagccaagacggccgaactcacaagcaaatctgccaactgtttggtcgagccaaccgcgacaagttctggtgccgcaacgttctcagcccttcaaagctgcgtgagcgttgggatgacctggtcatcaagctggcaccagccgcccacgttgaaaccaacaccgcatggaacactgccgaaggctggggggaaacgctgtga

SEQ ID NO: 457015 - DNA, 186 bp, Serratia marcescens
atggaaaacgaacagatcgtaccgtttgagatggattatcgcgataagaatggccgcctagtgcatgtaattggcgtagatcaggttaaccatcgggttattttccgccgtcctggttatccgtatgactgcgtagtgccgcgccgggattttggtacgaaatttaagaaggttgtcgaagaatga

SEQ ID NO: 457016 - DNA, 252 bp, Serratia marcescens
atggaaaactattgggactcattgagtaaagaagggcgtaccgccctagcagcccaggtaggaagaagccccggctatctccgcctggtttttaaaggccacaaaaaagcaggcttttcacttgctcaacgtatcgaggaagtaacgagcatgcaggttacgaaaaatgacctgcgaccagatatctacggcaagcctacatccgataagggtgatttaacagccacaacaacggagaaacattgtggataa

SEQ ID NO: 457017 - DNA, 669 bp, Serratia marcescens
atgaaaacaatcgacgaaatccggcgggaaaacgctagaaagctaagggatagcaccggaggaaatacctccttctcgtctatgattgacagagagccaacccaagtaagtcgagtgatcggcaaaaatcccacgaagaacatcggggacgacctcgcacgccatatagaaaaatgcttcgatcttccagctggttggctggatagagagcatcagcaaacgaatgtaacccaaccaagtgatgtgtcagacacagaactaaagatcaaaatggtcccagtaatatcttgggtccaagctggagcatggaaagagttgggttataccgaggttgatttgagcattactgagaactatccgtgccccgttccttgtgggccgatgacatatatacttcgcgtgatcggcgactcaatgattgaagagtaccggcccggcgacatgatttttgtagatccagaggttgccccagcaccaggtgatgacgttattgcgcttcttcacgactctggtgaagccacttttaaacgcctggtagaagaaggcggtaataaatttttgaaagcactcaacaaaggctggccagaacaatatctgcggatagatggtaactgttcaatcatagggacggttattttttccggaaaaccaagaagatacagagcttag

SEQ ID NO: 457018 - DNA, 801 bp, Serratia marcescens
atgaccatcgaacaatcaccaatcgcagccagtctggcaaccgatattgcaaagcactgtgccgcgtttgagcagtcgcctgaatatgctgaaatgatccgcgcccacgttaccaagctgtacgagaaagcgattgaagataccttcagttggggcgatttcccgcgcgccgtgaaaaaggcgctggaacaggcgctgcccgccaacatcagcgaaatggttgacctgccgcgctacaacctgctgatggcgaaggaactggccgcgcaatgggaaatgaacggtgtgagcgagcgcctggtcaccggcatgaaaaccatggtgctggatttcgtgaagtcccatgaggtgccgaaattcatcaaggcgtctgacctgtggagcgcttacgtcgatctgcataaagaggaagcagagcatgaaggatgggcgcgcccggaggtgctgatggagcacaccgaacacggaagcttcgttgttgggctggagaaagagccttacgaggaacacagcctctattccagccgcaaaaagacctatgcgcaccagttcaacaacaacctgtatttcaccaaggtacagacgcacgtagatcgagaagggtgggttgacgagctgcacgacggcaaaccggtatggcgtctctactccggcaagctcgatgacgacacacttgggaaagaggttgtccagttccgtagccacttcgacaagctggttgccgcgctctactacggcgacagcctgttaatcctcgatgcagacgacgccgacgacatctactacccgaacgactactaa

SEQ ID NO: 457019 - DNA, 639 bp, Serratia marcescens
atgatcaacacaatcacgattgatacagaaacaatggacgttcagccgtcggctgtgatcctctcaattggcggatttgcctttgatattgaagatatcgacagcgtgcaaaactcaatcattgacgtggctcgcgatccggagcttgccgactactcaaaaacggctttttacggccttgttgatactttcggtcaattaatgcagggccgaactgtcggcgccgaaacccagaaatggtggataaagcaatccgaggatgctcacgaagcgctgacaggccaccgcgagccactgagccagaccctggttaacctctcatcatggatccagcagcaccctggcgcccgagtgtttttccgtggaacggattttgatggctcaattctcgaaaatgcataccgcacctgcgggcttacttgcccgtggcattggggcggcaagcgcgacgtgcggacctatatcgatgccatgaccaaaggcaccaaaggctacctgccgaaaacccaccagccatgcttcgcgatggttaagcataactccctgcatgacgcgatgggcgacgctgagcaaatggctattgcctatcagctgaatagccggcaggtagccgcagagctgcaggagacaacaaagtga

SEQ ID NO: 457020 - DNA, 1065 bp, Serratia marcescens
gtgagcaaagtaggcgattactttttcgagttccctgcatcccgtggactgcaggggaaaacggtcactcttctgatgaccattccaggtcgcactttggcgcgtgtgctcgcatctgacaatgtcggccacacgctggaacgttcacagcgcgaaattaaccagggccgtgtcaaaaaattctacgagtaccttgttgctgcggaagagaataatgaaccgtttatcgttccaccactggttggcaactgcgattctgagatcgaattcgaggagttcggcaacactaacgttggcgttgtccgctttcccatggacgctgagattaagttgttcgacgggcagcaccgcgcagcaggcatccgcgaattttgtcgcaattctgatacgtcgttaatggtgccaattatgctcacccaccagttgcctctgaagacgcgccagcagtttttctcggacatcaacaacaacgtatcgaagccgtcggcagcgatcaacatggcatacaacggccgtgatgcacatgcccagggcatggtggcgttcctaacgtcgcatgatgtgttctctgcaataaccgactttgagcataacgcagtaccggccaaaagccgactctgggtgagctttaaggcactcagtgacgccacagcaaaatttaccaacgctggcggcaagcagctgcaacaggacgaaattgaagccatctgggaagcgtggattaacttcactgctatcagcgatattcgccatggcacgaatcaggccgaatacaaacgcgattacatccagttccacgcagtaatgattaacgccttcggttatgccgtaagcagactgctggaaaataacagcccgcgtgatgtgtcacggataattgacgatttcgccgttaataccgagacagcggagcgtgaagatctgttcctgatatcagcctggggtggcatctgcgcgaatacagagaaagagcgcccgacggtcattgctaacgtctctgcgcaaaaagcagcagctgaacgcctggtgcagatcattaccggccaggaggtagatcgtgggtaa

SEQ ID NO: 457021 - DNA, 432 bp, Serratia marcescens
gtgagcaacgaaacgaaaagcctggaagagctggcgcagccggtggcgtatgactatcagattgcgagtgcatgtattgcagatggacataataaaaatgggaaatgggtggactggaataataagttaactcgttattgcccgcccgactggatggttgaagaggggaaagtaacagctctcaaaccactctactcgcaaaattacatagacgcgctgctgcagcgcatcgcggagctggagcagcagcgcgataaatgggccggatgggcgaaagagcttggcgggaaactggatgcagcagaaaagcgcctggctacgccggtgcggttgcctgagtcgttttacatgactgccgacgatctagtggtcggcgttgacgagttggtcgtgttgctgcgagagcagggcttcaaggtcgagggggcgtga

SEQ ID NO: 457022 - DNA, 207 bp, Serratia marcescens
atggcactgatagcagaacgaatgactctagcgggctatgagattgagatttatcaatcaacagtaaaccccgatcaggcgctactgacgtttgatgatgttggtggtggtggtgagggggagggttgcgcgttgcgcctttctcggagtgaggcgtcaaaattatctgacgcgttgaacaagtttgtaaccgagggggatgcgtga

SEQ ID NO: 457023 - DNA, 258 bp, Serratia marcescens
gtgagcaaattaacggcagcagaacagaaatggatcaacgacgtgcagcgggtgctggataagtgcccgtccaagcgtctggggttcgcaacgatgggtggccgcgacgtcactgtttacgatacatcgttcgcgcgggacattgaaaagcacatttttagtagtggaacgggcgacttcatccctacggcccttagtatgggcgcagttctaggcgaaataacgttcccggcaaatgtcgagtcaacggcgggataa

SEQ ID NO: 457024 - DNA, 627 bp, Serratia marcescens
atgacaatcacaactgagcgcctgcgcactatcgctggctggcgcgaaaaatacggcaatggccacaacgtcgttattccggcagaagaagctgaagccatcgcccgcgaactgctggccgcgcgggaggcggtgccggtgtatcagatgcgtttgctcgatggcagcccagagcaacacacatgggcggaagtaacctatgacgaatttaacacgccgcttaaaaacccggatgaatgggagaagcgagttctgtacaccgccccgccagcgacagcagtgaccactgagctgttggaagcaatggaagaggtcatccgcatttccgaccgcgaccatgaggcatggagccgagcaaaagaagcccttgcgacctgccgcgccgcgatgctggggaatggcaactctccggaaattcaggatggttggaagttggtgccagttgagccggcagagagcatggtcattgatggctttgagtcagatgcgtttttatccctcgctgatgctgttaatgagtccaagggctggccctacggctgtgcagaagccgcagaatgcgtcacgggaatttttaaggcgatgattgccggcgtaccggcggcgccggaggtgaagggtggctga

SEQ ID NO: 457025 - DNA, 597 bp, Serratia marcescens
atgaaagtctatacctttcccaaaagtcgctcgttgcgcgtgttgtgggtgcttgaagaactgcgcctgaattacgagacggtgcgtgtcgatctgctggccgccgcgccgacagtcagttcaccgcatccgcagcataaagtgccggtgctggacgacgaagggtttgttatttttgaaagcgcggctatctgcaaatatctgtgcgccaagacggcgaggcagcgtttatatcctgccgaacttcgcgctaatgccggcgttgagcagtggctgagcttcacgctgaccgagctggaaccgccgctgtgggcgctgttgaaacacacggctctgttgcccgatgcgcgtaaggtggcagcggtggcggaggttgcccgtcaggaggcggatgtcgccatcacgtgcctggcgcgtcagccttttgcaccgtggataaccggggagacattcacacttgccgatatttttaccgcgcaaaacctgatgtgggcaacggcgtgcggcatctccctgccgccggcgctggaagcgtacctgcagcgttgtcaggcacgggaggcctatcagcaggccgtgatgcgcaataatggctga

SEQ ID NO: 457026 - DNA, 243 bp, Serratia marcescens
atgtgtggtgttacgatgagaacgagcctgtgcgtgactgtctttatcgtgctgacaatcctattcgcgtttatcctgcctgatggtttcatctatggttatgtattgaacaatatggcgattagcggtgatggtgaggtagcgatggataactatgagtttgtcgttctgctcatcaaactgggtatatcagcggtactctccttgcttatcgtctggctcggtaaccgtaggttcaagtag

SEQ ID NO: 457027 - DNA, 216 bp, Serratia marcescens
atgaaaaaaatgagcatgaaaaaagctgataaggttatcggcggttatattcgtttctgtggtcaggaaaaatttgaatggggcgcagggggaaataacagagtatgttattcggttgttgagtgccgtaataagtttggtgtgccgaataagacgataaactcggtagcgaataactactgtcctgccaaaccagatccaactccgacaccttaa

SEQ ID NO: 457028 - DNA, 150 bp, Serratia marcescens
atggaggggaaacccctccatttttttgtttgtttctcccgcctcgccctgcgtctgaagcggcaacacgcccgttgtttgagaatcgtcctgattatcgagcaaaaaatagggcttattgccgatcggctgaacctgccgacgcattga

SEQ ID NO: 457029 - DNA, 327 bp, Serratia marcescens
atgagcaatttattccttaatgatatgaaggataatttcattgttattttgaaagagaaagcgtcttttccggtagatagagaacagctgtccattgattacgaagtggatcttgatgagcagatggaaaagtatttaagacttttacgtgaacaagagaagttgttttctttggctaaaagtgaaggtgacgatatttcaatgttgtcatctttattgaaactgagaacccatgctatgagtttatccagcttttttgatgctattgtcgaagatacagaagttattcttcgattagataagtggccagaacttcctgaagaataa

SEQ ID NO: 457030 - DNA, 675 bp, Serratia marcescens
gtgactggtgccgcaatcaaggatgttgcggacaagatgacctccgatgaactggatcaccttgttaccctgaaaatgatgggtaacgatgagatcaccggtaagtatctgagttcgttgcaagataagtatgcaccttcgcatacaggtaataatgatggtcaggttaataccggaccaaatcatactggtaacaataatagtcaggctaatactgggtcgaatcatacaggtaataatgacggtcagattagtaccggtccaaatcacacaggtggtgatcagtccgtagaacaattaccgagcaatactggtaacacagaaggtgcacctgatttaccaagtcacatggaaaatcagggctatgaaccaaacaaaaatgctgttgggaatatgggcgaatttttcaagcaacccggctttggtagccaaatgaaagataatgctcagaaaactagtcagatatttcaggggcagagtgtttatcaggccaaaaaacctgtcggagattatatcgcaaaaggcgataagtattatcttgatgggctacataaagatcatattgaagtttttgacagtaaaggaaaagtcaaggctgttcttaatgttgatggttcttacaatcgttcaaaaacacaatccgcaattaaagaaggacggaggctacctaaataa

SEQ ID NO: 457031 - DNA, 255 bp, Serratia marcescens
atgtttgatataaaaatcaatgaattaggtaggttgcttgaggggcggttggatccggaactaattgagggtgccctggattacattcaatataatgaagaaccccttgcttttgagattctctgcgatcacataagtgagtatgacattaaaataactcaaagggagtatgaattaataagtcagcttatcgaagacatgaaattagatataaatgaagcaccattcaaatatttaaaagaattagtcgtttaa

SEQ ID NO: 457032 - DNA, 615 bp, Serratia marcescens
atgcttagtatttttgaaacgatcaaatcccgaatttcggcgaacagctatgacccggcccgtaaactgtctgacgaggagatttcagaattgattgaactggcgacgcaggctcccagcgcatttaatggtcaaaactggagatttgtcgcggtgcgcagcgaggaagcaaaaagacgtttactctctgcagcctatggccagcagaaggtggcagacgcagcggtgacattcatcgtatgcggcaaactggatacacaccacaccttggcggcagcgctcaaaccgtccctcgaccagcatatcctcagtgaggatctctatcagggttggataggtgcagcacaaagaatgtaccaggataatgcctcgttccagcgtgacgaagctgtgcgttcagcttcgctcgccgctatgacgcttatgctggccgctcaaggtaaaggcctcgtttcctgtccaatgattggcttcaatcctgaggccgttgctgaatcttttgatttaaaagccgaagatgtgcccgtcatgctggtgacagtaggccatcctggtccggacaattggccgaagaaaccgcgtaagcctgtagcggaggttctcagcttcacatga

SEQ ID NO: 457033 - DNA, 285 bp, Serratia marcescens
atggaggctatgcatgttcctggattcttggttttcccgaccgtcatttttgaggttggtggtggcctgctgatcatgttgggctatcgcacgcgaatcattgcgttactttttgccgttttctcactggtgacggcttttatcttccataaccaattcgccgatcccgcacagatgaacaactttctcaaaaatatttccatatcaggcggctttttgctgctggcgagcgttggcgccggcagtctcagccttgatgcaagaaaagtgtcatccttaacttaa

SEQ ID NO: 457034 - DNA, 891 bp, Serratia marcescens
atggatctcaacgcgattaagatttttgtcagcgtcgcccacacagggagcctgtcaggtgcatcggaaaaactgcagattccgctgcccacggtcagccggcacattagggagctggaaagccaattgaaagttcagctactggagagatcctctcgcggatccaagttgactgatgccggtactcgcctttatgagcacgcaagccgtggtattgagatgcttgatgaggctaagcgggcggtagtgagcgatcaggctcacctgaaaggcaggttgagactttcgctccctcccggattcgagccatggtgggaattgctttccgatttcaaaaccgcattccccgacgtttttcttcagatttatacgactgagcgacgggttgatcaccttgaagatggtatagatgtcgcgttgcgtatcggtgccgtcgtcaatgaatcaatgattgcacgccgtatgttggtctatcgccacgtcttggtggccagccccgagtttatcgcgcgcaacggtaggcctgccatacctgcccaccttagccgcttcccatgcggcttgtggagccctggggctaacgcccgaaactgttggacattaggggtagatgccgtaacgcccaactgggccatagttacgaatgattacgggcacctgcgtagttgcgcactggccggcgagatcattaccgaattgccaccctttatggcagcaaaggccatccgtgaagggaaactcattagtttgatgccgggacatccgatgcctgagcaacaagtaaatttggtgtatccatcgcatagatatccatcggctatcgttcgcgtttacctggatttttgccaatccaggattgattggttcgctgaaacttgcgcattcccctaa

SEQ ID NO: 457035 - DNA, 1929 bp, Serratia marcescens
atggcggtattgcaaacactgacgagccggtacgttcatctcggcgtcggaaaaaagctcaccctcggcttcctcctgatgctgctgctggccatcatcatcgccggcaccggcatccgctacctcacgcagatcgactcccgcgccgaccggattgatttcagcgataaactgaatgatgaaatcaaccaggcccgttacaaccgggtgatgtacctgcaggagtaccagaaagaatatctggaaaagaacgctgtccatatcaacaatgcggacaaactgcttgaacacggcaacagcctggactgggatccgcaaagccgcaaggatttgcagcggctggatactatgctcgacacctaccgcgagcaggaacagaaattcgtcgaggcggtcgccgccaaggacgccatccgccaaagctggaatatgtcggagatccagcagcagctggcgcagacagagcggcagcttggcagcggcgcactgcagctgccgttcatgcagctgaacaagcagctgatgcaggtgcgttatcgcgcgcgcggcctgctgctgaaccgcaaccgcgacgccgaagcgccgctgctggcggccattgacgaggtgcgccacaatgcgcaagcgctccaccagcagctgccggacagccaaaaatcactgctgcagcctctgctggacgagctggatggctaccagggccgtatcaaagcctttatgcccgcttacgaacacgagatggaaaccggcaaagtgctggaggagaccgccgccgccatcggctcgctggtcagggcctttttgcaggatgagctgacgcaaaccgaccacgatatcagcagcgcgcagttcagcatgggcctgaccacgctgatcgccattatcgccgggctgctggtgtcatggcggatgacgctgcagatcactcggccgctgaacagcacgctggccatcgcccagcgcatcgccaccggcgacctgcgccgggtggaggtccccgaacgccgcgacgaactgggcaaactgctgcaggcgatggcgaccatgaaccagaacctgcgcgatatgattgaaaaaatccagcagggcgtcggccaggtttacaccgccgccggtgaaatctccgccggcaataccgatctctcctcgcgcaccgagcaacaggcggcggcggtggaggaaaccgccgccagcatggagcagctgaccgccacggtgaaacagaatgcggacaacgcccaccacgccaaccagctggcctcgaacgcctctgataccgcccagcagggcggcaagctggtgggcagcgtggtcaccaccatgcgcgatatctccagcagttcgcaacgcattgccgaaatcaccaccctgattaacggcattgccttccagaccaatatcctggcgctgaatgccgccgtcgaggcggcgcgcgccggcgagcagggccgcggcttctcggtggtggccagcgaagtgcgcagcctggcgcagcgctgcgcgcaggcggccaaggagattgaagggctgatcggcgagtcggtcaaccgcgtgcagagcggcacccggctggtggaagagaccggcagcaccatggagcagatcgtacaggccgtcggccacgtgcgcgatatcatggcggagatcgcctccgcctccgatgagcagacgcgcggcatcgaccagatcggccaggcgatcgccgaaatggatcaaaccacgcagcaaaacgccgccctggtggaacagtccgccgccgccgccgactcgctggaagagcaggcagaaatcctgcagcaaagcgtggcggtgttccagctggcggatgcgccggcccccgacgttacgacagccgacgcgccgacgccgcgcccggccaagccggcggcccccgcccagaacgagcaggataactggaccaccttctga

SEQ ID NO: 457036 - DNA, 912 bp, Serratia marcescens
atgagaatcttattagcaggcgccacaggtgcgattgggttacccctgataagagtacttcggacacttggacataccgtagcgggcatgacgcgccaaggaaaaggcgttgatctcctgaaggaaatcggcgcagaggcgctgtgcgtggatgcgatggatcgcgatgctgtatttagcgccgtcaaaaacttcaggccggatgtcattatcgatcaactgacattattaccggctaatccagccgagattatccgttccattccggccgacacgcagttgcacaagatcgggggcagtaatctccttgaggcggcaaaagcgcatggcgttacccgttatattctccagtcccgaggcttctatctgaatgcggagccaggccacctggccgacgagcgcgcgccactgcgggttgatgcgccgggggttgtcggtgaaagctgccgggtgctgtcagattacgaaaataacgtcatggcatcaggtatcaatggcgttgtcctgcgctacggtttcttttatgggccgggcacctggtaccgccctgagggagccgtcgctgagcaggcccgcaggggcgagacagctatctttggagaaggcagcgcagtctggtcctttgtgcatatcgatgatgccgtcgcggccaccgtcgctgcactcggtgccttaccgggtaaatacaatattgtggataatgatccactgccggtgagcgaatggcttcccgcattttctcgctgggtaggtgctccagcacccgcacggctgaatatcgaagcgtcgctatcgctggctggcgaagaaggtctttactaccacactgtactgaccggcgcctcaaacaaggcggcgaagcaggaactcggtttctctccgcgtcctctgctctggaaacactccgcctga

SEQ ID NO: 457037 - DNA, 1410 bp, Serratia marcescens
atgaataaaaaaaatctgagattcaccatcgatcgtgcaggacgactgtctatcgcagaacagatccgaagggggattactgaagccatagcgagcggagtgctgcaacccggcgccaggttgccatcatggatagaccttgccacacagctgggcgtttcacgcggcacggtaaaaacagcttacgaacgcctgtcggatgaacaatttgtcgtgatgtcccgctcccggggaacctgtgtggtcgataacctgccggttaatactgccacccattccgtacctgaagcggtccccacctcagagctgtatcaggattttttatttcctaccggcgattttcagatgggtatccccgctggcgatgtgtttcccgtgccattactgtcgcgtctttttgcttcttccgcccgtaaggtcatgtctctcagacaagcctattgcgatccccggggagaaaatgaattacgtcgcgagattgcgggacagctgacgctttccagagggataaaatgccatccgtctcaggttttcatcacgacaggattcactggcggactgggtttggttctgcacgcactctctttgcatggcaaaccggcatgggttgaaaatccgggctttccgccggcgaggaaagcgctttcacttgccggtctgacaacgattccggtgccggttgatgcgcagggcatcgacgtagagtacggaattcgtcacgcacccgatgccgccgtggctctggttacccccggccagcaggccccgttggggatgacattaccgcttgaaagacgcaataggcttctcgagtgggccaatacaaacgcaagctggatcattgaggatgattatctgggtgaactgcagctgaaccggcgggcggcgcccgcgctagcatcacaggatactttcggccgggtgattcatatcggctctttcagtaaaactatcactccgggcctccggctgggctttgtggtggttccgccctcactggttgaagccgttgccgatgtcgccgcctgcctctcgcccgccccggacccggctattcaactcgcaaccctggcgtttttgaacgaaggtcactttttacgccatctgcgcaaaatgaaaagggtttataccaccagaagtaataaattggcgctaatgatgacagagatgggttacaaggcacatatccacggtttatcggttttgatagaccttcctgatggcgctcaggacaaaaccattgcccattatgcctataattacgggctggcgccgtcccctctttcaggctggtacctgccggataccccctcccgggcaggcctgctgcttggcgtgtccgggcaagaaggcgagtcgctattacaagcctgtcagcgcctccatcgtttaatagctaaattatcctga

SEQ ID NO: 457038 - DNA, 435 bp, Serratia marcescens
atgaatagaaaactgttttcattggctgcagttgcctttgggtttatcttctccggcgccgttttagctcatggggaagagcaacaccaggctggagaaacggtgaagcccaatttctcccgggtattaaccaatgttccgggtaaatccctcaccgcggtggaagtgatttacccgccaggcgcggcgtcttcccctcacacccatgcgccatctgcttttatctacgcctatgtggtcgaaggtgaaattaccagccaggtagccgggcagccgaaacgcacctataaggcgggcgaaagctggtatgaggatccgggggcgcatcatgtggtcagccgtaacgcaagcaaaacggccccggcgaaacttctggccgtgtttattgtggacactcaggacgcgccattaaccacgccggatagcaagaaataa

SEQ ID NO: 457039 - DNA, 468 bp, Serratia marcescens
atgggaaaccgcatcgactatggcaggacgtctccagatggcgtcctggcgttttgtgaggttgagacgtatcttagccagtgtggtctggatgaaacgcttattgacctggtatatctacgggttagccagattaacggctgcgcttactgcaccgatcttcatacccgtatgttgacgaaggagggattacccgccaataaactggcgctggtgcaggtttgggctttcacggaagaggtattttctttaaaagagaaagcggcgttagcctgggctgaacatgttaccctcatccagaaggcgtttttcaacgatgagggcttacctgagacggcgcaatgctttaccgagaaagagttgtttgacctcacgctggccgccagcctgatgaatgcatacaaccgcctggccgtaagcttccgcaatgcgccgcatgccgttgccgagcgccagggagggatgtga

SEQ ID NO: 457040 - DNA, 231 bp, Serratia marcescens
atgagaacagtcattgtgtttaacaacggtaatcaccgcgctatccgcctgccccgcgatatggattttgccggcgtcaacgaactggagatcgcccgtgaaggcgacaccatcatcctgcggccggtaaagccgagctggggatcgtttctactggaagacaaagccgatgcggactttatgacggaacgtggaaacatcatgaatgatcggggacgcgtcgagccataa

SEQ ID NO: 457041 - DNA, 159 bp, Serratia marcescens
atgagctacaaccaaaaagcctggctggtggtgctgttactgtgcaccctgttttggacagcggtcatcgggtcggcctgcacgctgtatggctatcagcaacggccagcccattccgcagaacaaaagtgtgacgcggccagccatctgcaacgataa

SEQ ID NO: 457042 - DNA, 1257 bp, Serratia marcescens
atgtcaaagtggcattggttgcttagcctgttaactcgtaagctctggtttcgcgcatgtttattcgcgcttttagcggttatttcagcgttagtttccatcgtcgttaagccatttatcccatccagtatcggcggtatggttggcgccgatgcggtggataatatcctcaatattttggcatcaagcatgttggcggtgacaacattttctttaaatatcatggtgtcagcctacagttcggcaacgaccagcgtgacgccgcgtgcaacacgtctggtgatggaagacagtacgacacaaaacgttttggcgacttttatcggttctttcctgttcagtctggtcggaattgtggcgttgagtatgggggcttatggagagcgagggcgggttgtattatttgttgttacgctgctggttattgcattaatcattatcacgctgttgcgctggatccagcatctttcattattgggacgcgtaggggaaacgacgtcgcgggtggaagaagctacgcgaaatgcgcttgagaaccgtatcggcatcccttacatgggggggagggcatggttgtcctatcagcatcctccagcggacgccactgcgctgtatccgtcagatattggctatattcaacatattgatatgcagatgctggataaccaactgagcgagattgacggcgtgctttatctcgcctgccagactggcgcgtttgtgcatccgggccatcccgtgggttggttctcttcatcagattctgatattgaaacggaagagttgttgagcgccatcaccattggaactgaacgttcatttgatcaagatccccgcttcggcctgtctgttttggctgagatagcctccagagcgctgtcaccggcagtgaatgacccgggaacggcgatcgatgttattggtcgtgcagtaaggttattggccgtatggggagcgaaaccggagtctgccgaggttatttatagcaatgtgtgggtcaaaccaatcatgacggcagatctgttcgacgacatttttaatcccattgcccgtgatggcgccgcattgattgaagtgcaactccgtttgctcaaaggattacaggcgctcgatcagatgaacacggctgtttttgcgcctgatgttcgccggtatatcgctattatccagtacctggctgagaaacaaatggtgtcgcagcaggattgctccagacttaatgcatggatacggcagtctggtttgggaaataactga

SEQ ID NO: 457043 - DNA, 1560 bp, Serratia marcescens
atgaagcgcagggtagtgattggcgtgctgggcaccacgctggataaacgtggcaaacgggcaaatcgttggagcaagtggcggccgacgatcgggttatgccaacaggccgggtttcctgtcgaccgtcttgagctgttacatcagccacgagataaaggtatggcgcagcaagtagcggaagatatcgtcgctgtgtcgcctgtcacgcaggtggtgctgcaacaggtcgcgctgagcgatccctgggatttggaagaggtatacggtgcttttctggattttgccagtcgctatccgtttgataccgagaatgaagagtatctggtacatatcacaaccggcacgcatgtggtgcaaatctgttggttcctgctgacagaagcgcgctatttccctgcccggttgttgcaaactgccccgggagaggatgccgggccgcaaggggtttattcggtgatcgatttggatttgagccgttatgccaccctgaccagccgttttttacatgaacaacagcattcggtgtcgttcttgaaatccggaattgaaacgcgcaatacgacatttaacatcttgattgatcgaatcgaacatgtcgccctgcgttccagcgcaccgttgctgcttacagggcctaccggagccggtaagtcagttttagcagagcgtatctatcagttacgacattcacgtcacctattgaaaggaaagtttgtggcggtgaactgcgccacattacgcggtgataatgcaatgtctacgctgtttggtcatgccaagggggcctttaccggagcgttgcaggctcgcggggggctgttgcgtgaggctgatggcggcgttctgtttctggatgagattgccgaattggggctggatgaacaggccatgctgctgaaggcaatagaggataaacggttttttcctttcggttctgataaggaggtcagtagcgattttcaactgatcgccggtacacaccgcaatatgcgggattggatcgctcaagggcgttttcgagaggatttatatacccgtatcaatatgtggacctttgcactgcccagtcttgcagagcgtcgtgaggatattgaaccgaacatcgattatgaattacagcgttttacacgtctccagcaaacgcaaatacgatttgataaagaagctcgccggcgctatctggattttgctttgtcgtcacaggcgctttggcgcggtaatttccgcgagttaggttcttcgatagcacgtatggcgacgctggcagagcaggggcgcattacccaggtactggttgatgaagaaatccttcggttgaaatacgactggcacgatgacaagaacgatggattacctgcggagttgaccggccttgatctgtttgagcaaagtcagttgcagagtgtgcttgccgtatgccgttcgtcatcatccctttcagaagcaggacggcggttgtttgccgtttcacgacagcagaaaaagcagcctaatgatgccgacagactgcggaaatatctggcgcgtttcggtttaagttgggatgaaattcgttaa

SEQ ID NO: 457044 - DNA, 1224 bp, Serratia marcescens
atgaaaattaattatgacttaatgacaccaattaacagcgcaccgatcaaaatgtggacacaaggtgtgcccgttgagccgaaagcacgtgaacaattgctgaacacggcaaaaatgccgtttatttttaaacacctggccgtgatgccagacgttcatctgggtaaaggttccaccattggcagcgttattcccacccgcggcgcaattatcccggcggcggtcggcgtggatatcggctgcggtatgattgcggtgcggacttctttggttgcggccgatctgccggataacctggcgcccctacgcagcgccatcgaacaggcggtgccccatggccgaagctcaacccggtcgaaaagggataaaggcgcatggagtacaccgccgcaaacggttgatcggcactgggctgaactggctccgcgctttaaacgcctgaccgataaatatccccagttgctgaaaaccaataactatcagcacctcggcacattaggaaccggtaaccactttatcgaaatctgcctggatgaagcgcaacaggtatgggtgatgttacatagcggctcccgaggcgtaggtaatgcgatcggttcgctgtttattgctttggcgcagcaggatatgcagcaacatattgccaacctgccggaccgcaatctcgcctacttcgaagaaggaagccgacactttgccgattatatggaagccgtaggttgggcacaggactttgcccgccataaccgggaagtgatgatggaacacgtattggctgcgctatcacgcagcgtaagcaaaccgttcactacccagcaagaggccgtgaactgtcaccataactatgtgcagcaagaagtacattttggtgaaccgatattagtgacgcgcaaaggtgcggtgtcggcgcagaagggacaaatggggattattcctggctctatgggggcaaaaagtttcattgtgcgcggtttaggtaacgaagaaagtttctgctcatgcagccatggcgcaggtcgaaccatgagccgtacagaagcgaagaaacgtttctccctcgccgatcaggtacgcgcaaccgagcatgtggaatgtcgtaaagacagcgatgtgatcgatgaaattccgatggcttataaagacattgatgcagtaatggccgctcagtcttcactggttgagatcgtccatactctgcggcaagtcgtctgtgtaaaaggataa

SEQ ID NO: 457045 - DNA, 831 bp, Serratia marcescens
atgatggaacaacaattacataacgtcagtgacgccatgcgagaaaaggttcgtcaaatgttgcgtcaggttgaacaacgttacaatgtgcgggtgctgtatgcctgcgaatccggtagccgcggctggggattctcctcccctgacagcgattacgacgtacgctttttgtatgttcatcctcccgaatggtatctgcgggtagaaccgcagcgtgatgtgatcgaactgcctatcgatcatgaattggatatctgcggttgggattggcgtaaagcgcttggtttgctgaagcgggccaatccgacgctgatcgaatggcttgactctccggtggtgtatcaggaactgcctgaaagcatcgcggcgttacgtcgtgtcacgcccgaatggttttccgcacaacgcgcgcgttggcactatttatccatggcgcggaaaaacttccgcggctacctgcagggcgaacacgtgcgactaaagaaatatttctacgtgttacgcccactgctggcggtacgctggatagatgcaggcaaagggataccgccgatgcggtttgatcaactgctggccgggacggtgaacgatccactattactggcggaaattgatgcgctactggcagcaaaacgccaagcgggagaagccgagtacggtccgcgcagaacggccattcatgcatttatcacgcaagagctcaatgctgaacagccgctggcagcgttgccaaaaagtccggccaaggatgacagttcgcttgatgagctgctatatcgcacggtcatgaactatcagccacagcaaaaaatgcgccttgttaatgactaa

SEQ ID NO: 457046 - DNA, 180 bp, Serratia marcescens
atgaactgcgtcttgacggcgtgcgcagtcacaagacgcgatagaaaggccttgataaaccgcttccgcccggcgctgacgcaaggctatctgacggaaaatgccggccgccggcagattaccgagcatggcaagctgttcctcaactcgctgctggagctgtttttagccgacgagtaa

SEQ ID NO: 457047 - DNA, 915 bp, Serratia marcescens
atgacgggcagcgtcgcagtcacgggcgcaaccggttttatcggccggcatatcgtccaggaactgctggcgcaggggtttaccgtacgcgccctgacgcggcgcgcgggaaaggctgccgccggcaatctgctgtgggtgccgggcgcgctggaagatcgggcatcgctcgccgaactggttcgcggcgcggactgcgtcgtgcactgtgcgggccaggtgcgcgggcatgcggaagcggttttcacccgctgcaacgtggacggcagcctgaacctgatgcaggcggcccaacagagcggcgcctgccggcgtttcttgtttatgtcctccctggcggcccgccatccgacgctgtcctggtacgccaactcaaagcatgtcgccgagcaacaattactcgctacggcatcggatatcgcgttgggcattttccggccgacggcggtttacgggccgggcgataaagaactgaaaccgctgttcaacggcctgctgcacggcgtgctccctcggctgggtgcgcctgaagcgaaactctcttttctgcacgtgagcgatttggccagagcggtcagccaatggttattggcgcagccggcgcagccggatatttacgaactgtgcgacggcgtggccgggggctataactggctgcgtctgcgcgaaataggcgccgcggtgcgcctggggcccgtgcgtctggtgggcattccactgccgctgctgacattcatggcggacgccggcacgttgtggagccgcctgacaaaacaggaaccaatgttgacccgcagcaaaatacgcgaactgacccatcgcgactggtccgccagcaatcaacgtctgtctcaacatattcattggtttccacagataagtttggaacgcgcactgcgtgaagggctgttttaa

SEQ ID NO: 457048 - DNA, 732 bp, Serratia marcescens
atgagtgcaaaatttccgccgctgattgcggtcatcggcagcgacggatcgggtaagtccaccgtgtgtgaacatctgatcgaacatgtgaaaacatacggtccggcggtcagggtgcatttgggcaaacaggcgggcaacgtcgggcgtgcggcgtcgaaacttcctctgttggggcgctcggtgggcaaggcgatcgagagcaataccaaaaaagtcaaaacgacaaaatcccgacttggcctgctgccgtccgtggtgatcatcgctttcgtcgtgcggcggctgctgcgctttcgccgcatgctggcctttcgccggcaagggtttatcgtgttgaccgaccgttttccgcaggcgcagattcccggcgcctacgacggcacggtatttcccgtcaacgtcgacgggaaccgcattgtccgatggctggcggagcaggagcggaaggcgttccaatggatggcggggcacaaaccggatttggttctcaagctgaatgtcagtctggaggtggcctgcgcgcgtaagcccgatcatcgtaggtcggcgctggagaaaaagatcgtcgtcacgccgttattgacttacgagggcgccgaaatcgtggatcttgatgccgatcggccgattgaggaggtgctggcgtcggcggaaaaggccattgagacatttatggcggcgcagggttatcgttacaagcgcgatgaagaatcggcggccgttcactga

SEQ ID NO: 457049 - DNA, 726 bp, Serratia marcescens
gtgagtcaacagataatccccgacgcacatcattcgaccgtgcgcgtaattgcgataacgggctgtgacggctcgggaaaatccacgttggccgccagtctggtcaacgcgttatcagcacaagagcctgcggaactgctttaccttggccagtcgtcaggccgtatcggtgaatggataagttcgctgccgattattggcgcgcccttcgggcgttatttgctggcaaagtcagaacgcgtgcatgagcgcccttccacaccgccggataacgccacggcgctggtgatatttttactctcctattggcgatgttataaatttcggcgcatgttgaagaaaagccgtcgcgggaaagtcttgatcaccgatcgttatccgcaggcggaggtagcaggttttcgtttcgacggcccgcagctggcgaaaacggtcggcggcaaccgctgggttcgcgggctgagaaagcgggaacagcgtttgtaccaatggatggcgtcttatcagcccctattattaattcggttagatattgacgagcacacggcgtattcacgtaaacccgatcactcgctgtccgcgttgcgtgaaaagatcgccgttatcccgcacctgacgtttaatggcgccaacatactggatttaaatggccgggacccggagagtaaaattctcgatgaatcactgcgcgcggttcgaatatcgctggcaacatcaacctcctag

SEQ ID NO: 457050 - DNA, 756 bp, Serratia marcescens
atgaaaaaaaataaactctttgccgaacaggatacccctgccgccgacatcaccgggcttatcgccgtagtgggcagcgatggcacgggtaaatctacgctgaccgccgatctggtcaaatatctgcagccgtatcgcgccacgcagcgacgttatttagggctgatctccggcgaagacggcgacaaaatcaaacgcctgccgtttatcggcgtgtggctggagcggcggctggcggccaaatccgataaaacccaacgcatgagcaataagccgccggcgctctgggcggcgctcatcatgtacggcttttcactgtggcgcgcatccaacctgcgcaaagtacggcggctggcgcagagcggcgtgctggtgataagcgatcgctatccgcaggcggaaatctcgggcttttattacgacgggcccggcatcggcgtggagcgtgcgaaaggctggctgctgacccgcctggcggcgcgcgaacgccgtttgtatcagcaaatggcccgctatcgcccggcgctgatcattcgcctcgatatcgacgtcgatacggcatttgcacgcaaacccgaccacagttatgaagagctgaaagacaaaatttccgccatggttcgtctgcaatacaacggttcaaaaattatcgaactggacgccagagccccctacgatgaagtgctgaacaacgcgctcaacgccatctccgccgtaacgctccccgagcagcaaacgaacagcgccttcgggtag

SEQ ID NO: 457051 - DNA, 837 bp, Serratia marcescens
atgaccgcaagcaataattggaaaaagttccccgctgaaaccatccaggcgctatttgtcgcggtggaagaggacgatctggttgaggcgaatatcagcctgccgcaacgcattgactggcactgttccccggagagcattcgcgacaactatgcgctgtgcctgcaattttgggaagacggcttttcccgccaagagttgctgcagctggtgaacggttttctgcaggatccgcaattggcggcggccacccgcatgcgctacaaatatattcgcgcacgctataagcattttcgcttcgcccaacagctttacggcggacaacatcgcgccaaccgcctgttccacaccacgaccgcggtgctcggccattttcaggacgcatttcgcaacggcaatcagaagaatttgcagatttacggcaatctgctgcgggtgctgctcagcaggccggtttggtcgtgcgtgcgctatgcgctgcgccatattcatctgacaagcgagcgcgactttatcgcctatcgccagacgcaaataggtttactgcgaacgttaatcgccaacccgcaactcaccggtaaacagtttcacgacgtgcggaaaataatcagccggcaggtctctttttacgacacgctgcgctccatcgctcccgacaaccgtgaggcgcggcaaatctcgcgtttcctggccgcgattaacggcctgatgggcgacaggcatgatgtgatggtggcggataagttggccggcggcgatctctacgatcggcccacgcccctggatatcgatatccgccagcgcctggagctgcttctctcgcgtttccccctatag

SEQ ID NO: 457052 - DNA, 567 bp, Serratia marcescens
atgagcttacgtcgatggctgataatgccactgctgctgtctccgctgttggcgtcagcacataatttcattcatggcgcgccggtcgcgcgggtcaacatcgccgatcgcggcgaactgctgctgcgcgatggcgatttcctctaccggccgtggaacagcgcggagctggccggcaaagtgcgcgtcatgcagtatatcgccgggcgcacctccgccaaaaagaaaaactcgctgctgatcgccgccgtcaaggaagccaatctgccgggcgatcgctttcagcccaccaccatcgtcaacaccgacgatgcgatccccggctccggctttttcgtgcgcggtaaaatagagaaaaataaacgtcactacccctgggcgcagtttatcgtcgatagcgacgggcaggggcgcagggcctggcggctgccggaagaaagctcctccatcgtagtgctggacaacgccgggcgcgtgcagtgggcgaaagacggcgcgctcaccccgcaagaagttgaccaggtgatcgccctgctgcgcgttctgatcgcgcggagccagtcatga

SEQ ID NO: 457053 - DNA, 1080 bp, Serratia marcescens
atgactatttttagccgttacctgatccgcaacgtgttcacaggctttgccgctgcggccggcctgctcatcccgctgttcaccacctttacgctgattaacgaactcgaggacgtcatcccgggcggctaccgctggacgcaggcgctgctggtcaccgtgatgaccctgccgcgcagcctggtcgatctggggccgtttatcgcgctgctcggcggtatcgtcgggttgggccagctttccaaaagcctggagctgacggcgatccgcgccgccggcctgtcgatattccgcatcgcgctggtgatgctcgccgccgggctgctgatgaacctttcgctcggcgcgatcgatgagtgggtcgcctccccgctgcagcaacgcgcgctgcagctgaagaacaacgccctggcgcagtcgaacgataacgacgttaccgtcaacccgctgtgggcgcggcacggcgacgagtttgtcacggtcaaaaccgtcgatgaaaatgatcagccccacgacattgaaatctttcgttaccgcgccgatcgttcgctagaatcttacctctacgcggagagcgccagcaccgccgccgacggcagctggctgctgcacaacgtgatgcggaaaagctggcaaggcagaaaagagacgcttcaacggcgagacagcctgccctggcaatcgctgttctccgtgccgagcctgaaggagctgaccctgccggccggcagtttctcgcttcgccaactggatcgctacatcgattacctgcacagttcagggcagcccagcattgaatatcgcctcgcgctgtggaaaaaactcggccagcccctgctggtgctggccatgattttactggctatcccgtttaccttcagcgccccgcgcgcccccggcctgggcagccgcctagccatcggcgcgatcgtagggttgctcacctatatcgcttatcagatcgtcctcaacctgggcttgctgttctctttcaacgcccccttcaccgccctcgccccaccgctgctgatcctgctgctggcgttgacgctggtttaccgcttcgatcggcagggttag

SEQ ID NO: 457054 - DNA, 936 bp, Serratia marcescens
atggccgagcgagtcggtgaccgccacttcattgagcacatcgtgatagacaaagcggtaatcatacagcccgccgtcgccccaggcgtgcaccacccgccagtcggcgtcgtagtcgtaataaaaacgctggccgttgcggtcctggtgctgcgtcatgcgccggcgctgatagccgaagcgccgcgccgcccccagcgcatcaatctgcgccgccagctgaccctcgccgtcatactcatagcgggtcagcggcgagtaggcatcgccggccgcctcgtacaggcgcatggcgacgatgcgcccgcactcgacggtgacatgcacctcgcgcccggtcgccgccacgccggcgtactccgccagccgcgtcagctgcccctgccggcgcacaaactgccaacggttgccgttgcggtcgcccagcgccgccagcggcatcgtgtcgccgtcgtcgtcatcaaaatgatgctgcacgccgtcgctgccttcgtagatccagcggcgctgccgttcctcctgctgccaccacagccgcccgccgtccggcaggcccaccgccgcgtgctcgcgccccggctgcgccggcaggtcgccaaaggcggtcataccctctgggcgaatcagcagcatcagcccgcccgcatcgcgcgtcagggtgatatccgccggcgtagcccagccgtggccgcaataaccggcctcgtcgatatccgccgacgagtagctgcgcgtccaggagagcggcaaccgccccggcagcaggaagtcctgctgcgccagcgccacgctgccatcgcggatatccaccggctcggcccgcagcaccttgcacttgaggaacccgggatccatgtttttaaacagcttctggcgaaactcctgaaacttcttcataaacttgccgtagccggcgcttttcttgagtttttttag

SEQ ID NO: 457055 - DNA, 360 bp, Serratia marcescens
gtgctggcggagctgtatgccgatcgcgagcgggccaagcaggggctgctggacgggttgcaccactacggctgcgtgccgcagaaggtgggcggcaaggcggcgcgtctggcgatgagcccgctgctgaaccggggattacagcgctatgtggcggacagcgccagcgcgttgctcggcctgcagccggaagactggctggatatggcgacgccggtgaatgtgccgggcaccagcacggaatacccgaactggcgacgtaagctgtcgcagacgctggaggagatgtttgccgatcggcgggtgacgctgttgctaaaagatctggaccgtcggcggcgcaacggttcggtggggtag

SEQ ID NO: 457056 - DNA, 135 bp, Serratia marcescens
atgcggaatagcggacgcgtgttttatcaggcggcgatggggcggcagggcatgcctctgtgtccggcgcggcgcatacatttcattcgcttaatcattagtaacgctcatgaaatatatcactttaacccatga

SEQ ID NO: 457057 - DNA, 351 bp, Serratia marcescens
atgcatatcgtattgtttaaattcaaaaaaccttacagctgggcttctatggaagccatcgtggcagaacgctcaacgcgggaacatgttcataatattgatgaaattaaaggatggacctgcggaaggaacacgacacgccgcgatatcgcttcggattttgtggtgatcggcctgtttgacaaccgccaggctctggacgcctacatcattcaccctgatcatcaggtgggggttgaaaagtggaaatctatctcagaatggcgtgtggttgatattgaactaaatagtgatttcactctaaatagtggcttactttccgtgttcaattcattccctgccgtgttttaa

SEQ ID NO: 457058 - DNA, 357 bp, Serratia marcescens
atgaaagatattccagcttcagttgtccagggcctggttgccgctaaaattggtgaaaccgttgcgggcaactatataaagctgcaggagggatggagtgtcctcagcccgaaaaatcaagccgatggctctgttaagatggatttgttatattccatattatttttcgatctggcagatcagaagtattattccaaaatgcaggtaggtacggtgctgtcaaaggatcagcatggctacgtggttgttgaccagccttttaaatactctggaccggactttatgagggacgccctcgattcatggccggttaatgttcgctatccaacgttccaggcggaaagggctcatggctga

SEQ ID NO: 457059 - DNA, 1578 bp, Serratia marcescens
gtgggaaatattgatgcaaagtccgttacgttaacgcaaggcggcacggtacaagatgcagtgaaatatattacaccggaaatgtttggtgcagtgggagacggaagtgctgatgattccggctcgattattgcagcgatgaattatgcaataaaaatcggtgtgaatgcggtgcgcggtgatgggatttaccgaattgataaaggtatcccttgtaagtccggcgttattaataatagtagtggtgcgctttatcgtttcggttttaacctttctttgaatgttgtcattgtcggtgataacttccctgctttacccgaaaagtggtgggatgcccaaggtgcattttattctgacggcaagggttcaactgagaactttaacttgagcgtcagtgagttcttcggtaattttagagcaacattttttaaagttcaaggtaatggattgtccacgagtagtatctcatgtgatgaaatgcgtgggcatattatcggctttaaaaattacgtggatcccgtacgtcaatcaggtatgaataagattcggggtaagaattggcaaactgggtatattgcctgtttgattggaggaaccggtaacggaggcggaaacagtgaatgccacaatattgatctcacctggtgtgcaacgcacagatttggtggtatttcactgcaggatcgcagccaatatgcgaatataaacaatggtacctatgattataacggcaagtatacgtccgttcttaccctgacagatgttgtcgcagaaaatgcatatagcattgagtttggttatgatatcacaagcgggaataaaaaatcagttgcgttatcgagcgtaatgaggggatatgaaaaccaatggcaacttgttgttgccgaggactccgatatcaccgatggagaatcgaaattttctgttggtgacgttatcactgcacctggtttttctgcaacggtttcaggtataaccgtacccagtaagaaaacaaccatctatatggatattattatcagcaacagaacgggggattttagcaaggttcatgtggctgccgattatgtcggtggtatctttggacataatcttttcactaacgatatctgggcgccaagttctgcacaaaatattagaaatatgtcatatcgtggcttaggtattggtggtacagcatcgaagttggagatgtattcgacacagcataatgtccggtcgccttttgcagcggtgacggatagtgatttccaggtaaataaaaatctgacaatcaacggtaccagtaaattacaggggactacgggcaatgtgcttgttccacataatacagcggtgtgggcattatcgcttaactctggctcaaatacgccggtgtcaatgtggaaaatttatgttaccagttcggatagcaatatctatggtgagttcacggttgccaatacgtcaacatttgccaaggtcattggtgagaactctggatatgttagcctcaaaactgagaatcatagaataatgttaagccaaagttcagggtcaaccagaacgctttactataatgccgttcgtttgatgtag

SEQ ID NO: 457060 - DNA, 453 bp, Serratia marcescens
atgaattttattgatgatagtgttatcaatgagtggctttgcaataacaatgcggtgattagcgactcattgtctgtttttttatttgataaattatcatctttgccttgggtggctgggcatgtagactattctaagctgaagcaccgcttcggtaatatacaggatatgttgagttgtgatggggaaatagaatattttaaagtcaaagattggttgaagggaagcaagtttgaatatggctctcacatattattttggtatgggaaagataaaccttgcgtggtgtgtcaagccaagtttggtttgagcaatattgactctgcatattggggggttccaggttggaattatatatttagttgtaattttgaaaacggtgaagttaaagtggattgcgataatgttttatcctttgatggtatgagtgaattggtattgttaataaactga

SEQ ID NO: 457061 - DNA, 351 bp, Serratia marcescens
atgcaagagctagagtatagggtgccttacagcctagacaatttgattactaaaatcgctcaagagggttatacaaaggataacttctgcctttataccaaagagtatgaggcaacagctactcccggactgacatgttatcttgagcgttatccggatgtgagcgatgatgatgaagaagtgtatcctgactatgtagagcaaaatgagttggagctgtttttttatggtgaccaatttatggatgtgctcagaagtgcgctgaatcaaaaacctaatgcaactgtggatgatattatctcgggggtgaattattacttggataatgatgcatttatcacgttttcatag

SEQ ID NO: 457062 - DNA, 2517 bp, Serratia marcescens
atgtctcagcaacgttttataatcagtcgcatagcatcatcaatacttgccgtattgatgagttgggaagctaacgctgttgagtttaatacggacgtgttggatgtcgaagatcgggcaaatattgatttctcccgcttttcacaggccggctatattatgccgggcgtttatcatatgtcgctgagtattaacggcgaaagcgtcggttacgaggctgatattccgttttatccgcgggaagatgcgccatcggctgacgccgacgccgcagctgcggcacagccggaagcctgtctgccgcacacggtgatcgaccgcctgggattgacggaaaaggcggcggcgcagctggggagctggcacaacgggcagtgcgtggatttcaacaccctgcccggcgtggcgttaacgcccaagatcggcaacgcaatgctgagtatcaacgtccctcaggcgctgcttgagtacaccgacgcctcctggctgccgccttcccgctgggatcacggtctgcccggctttttgctggactacaacctgaccggcacctttaccagcaaccgcaacagcggacgccagcaaaccctcagcgccaacggcacgctcggcatgaacctgggcgcctggcgcctgcgcggggattatcagggccgcttcagccactacagctcggggcaaaagagccgtcgctctctcgatttcagccgcgtctacctgtaccgcccgattcccagcctgagctcgacgctgaccatcggtgaaaactacgtcaactcgccgatgttcgactcctggcgctatgcgggcgtcgccatggccagcgacgaacgtatgctgccgccgcggctgcgcggctacgcgccggagattatcggcatcgccaaaaccaacgccaaggtgaccgtcacgcagcaggatcgcgtgatctatgaaaccaccgtggcggccgggccgttccgcattcagaacctggacagcgccatccgcggcacgctggacgtcaaggtcaccgagcaaaacggcgaagagcatactttcagcctctccaccgcggcggtgccttatctgacacgtccgggccagctgcgctatcaggcgatcgtcggccgccccaccacctgggatcacgatctggaagggccgatattcgcctcgggcgaagcatcctgggggttgtccaatatctggacgctgtacggcggctccacgctctccgccgattaccaggcgctggcgctgggcagcggccgcgacctgttcgggctcggcaccgtggccgtcgacgtcacccagtcggtcgccaaagtgcgcgataacagcaagaaacaggggaaatcctggcgtctgagctactccaaattcttcgacgagatgaaagccgacgtgacctttgccggttaccgcttctctgaaaagaactatctgagcatgcagcagtttctggaccggcgctatcgcggctacgaccacaatcaccagaaagagcgttaccagatcaacgtcaacaagagctttgacaagatttctctggggctgaactaccagcaccagacctactgggaccgcggcagcaccaggcagttcggcggcaatatcggcaccacgtttgacctgccggcgctgaacatacgcaccgcttcgctgactgccaccgccatgcgcagccaataccgcgggcaggaagagaacatgttcaacctgatgctgtcgctgccgatgggcagcggcaccgccagctataacagcagctacagcgacggccgctacggacaccggatcggctattacgaccggctgggtctggacagctacaacatcaacaccggcgtcgatcacggcggcgatcagaaatcgcgcgctcaggtcagcggcatgtatacccataacggcgcgcgcagcaagctgagcgtcaacggcgcgatcgacggcgatcaataccgctcgctggggatcagcgccaccggcggcattaccgccacgccgcgcggcgtggcgatgcacgccggcggttacaacggcagcacccggctgatggtggataccgacggcatcggcggcgtgccgatcaacggcggccgcgtggtcagtaacgcctgggggattggcgtcgtcaccgatgtcaacagttactaccgcaccaccacccgcatcgatctcaacacgatcgccgacgacgtcgaagcgaaaaccagcgtggtggaaaccgccctgaccgacggcgccatcggctatcagcgctttgtcctgatgcaaggcagtaaggctttcgccaccttccgcctggctaacggcggcacgccgccattcggcgccgtggtgcgcaatagcaaaaatcaggaaatggggatcgtcggcgatgcgggcatcgcctggctgagcggcattgcgccaaacgagacgctgcgcgttatctggaacgacgcccagtgccaggcggcgctgccgtcggccatcaatgagcaaaatctgctgctgccttgccggcagagcgccgccgcaggcggcaaacagtaa

SEQ ID NO: 457063 - DNA, 585 bp, Serratia marcescens
atgtcaggcaagacctctccccgcatcgcgcgtccgctatggctgtgcggcatcggactgcttttctggtgcgccggcagtcaggcggatgtgccgatcaccgtgaaggcgacgatcatcgagccgggctgctacatcatgggcaaagagggggcgtggaccggacggcctggggatctgcacgatgatattctggcgatcgattttggcgaagtgccgattgccgatctgggcaccagcaacgccgaaaaaagcgcctctctctggtttgaatgcggcgtcagcagcaccaataaaacgttgaatctttacgttaaacccacgacttttggcacgatgccgtcacttggcaaccatgtgttggcaacgtcgacagagaatctgggcatcgccctcagcatcagcggccacaatatcgcgctgaaccagtggatgccgatgacggctgagcacctcctgccgggagatgggatggcgcaaaataaaatcatcgtaacggcacggctggtcgcgcagggtaacccggatgagctcagcggcggccagtttcaggcctcggcaagtttcattctgcactatttgtaa

SEQ ID NO: 457064 - DNA, 957 bp, Serratia marcescens
atgacactgcttaatcttcgcgccgccgttgcgcacgccctgctgttcggcgccagctttgctgcctgcgccgccggttatgatgttactgccctgaccgccgagtccagggtgacaattgacactacgggcacgtcgaatctggggcttatcgccagttacacgatcgaccaatcaacagtcaccggtgatgtggactgcggcgatcgcaacctgcataacgtcacggttaaagaacggattttcttagatctgccgcaagatatcgtgaccgggcgtttcaaaattaacaaaaacctctcggtggaagttgactcctctgttcctagcgatagatgggggcgaggaaaaggggcagcaacggtctgtgatatggactatcccgttgcaaccgcgcccgccagttatctgctcgccgcatttccgattaagctgaatttttatttggagcgggaaaccattgacggcgtaattactattccatcaatgcagttagggggatactcacgtcggtttgacaccgttgaacccggcaattacaaaccggcgaaatatactattcccattcatctgttaggtgggaatattactattcccgcgcgttgtaatgtatacccgaatgcgatagaattagatcacggagtgttaacgcctaatgatacttatgacaggacgttcgccgaccttacctatacatgctcaaccccggttaatacgacaataactatcaactatcaagaaaatgccaccggggatttaagcctcacgcatacggatggcactatcggcgccagtagtaaattaaccattagcgatcccagcgacggacagcaaggaaaagaaatttccacgcgtattgatgccagtaaaacattccgcatcaccagcgaactgagcaacctcagcggcacagggaatatacaaggcagtgcctggattatcgcttatttagattaa

SEQ ID NO: 457065 - DNA, 711 bp, Serratia marcescens
atgctattgactgaccgtcagtcagttactagcatgccgttattaaccatgcacattgaagggaaaaccatgcgcatcatcaaaacgcctcaggaacgccgggccgacattattcaggccgcgcagcgtctgtttcacgcccagggctacgccgacacctccgtggatgaaatagtgcgtgaggcgcagatcgccaaggggacgttttactactacttcaaatcaaagcctgaggtgctggccgcgctggcgcagcagctgatcgccgagatggccgcacaggcgcaaaaaattgccgacgccccgtcgctggacgccgtcgaaaaactctgccggattatccgtaaacagaacgacatcaaggatggcggcgaggatatcgtgcaggggatacacgagcccgccaaccgtgaattacacgaccgcctgggcatcgaaaccgtgctgacgctcggcccggtgttcgcacaggtgatcgaacagggcaaccgcgaagggatcttccaggtagccgacccgctgagcaccatgcagttcattctggccggtgcagactccctgctgggacataacgcgttcaactggacgccagcgcagcagcacgctcgcctgcaggcgatgctgatcctgatcgaacgcgcgctgggcgccgccgccggctccgtggttccagccttaatgcgctgtctgtcagccccaacgccttcgtag

SEQ ID NO: 457066 - DNA, 759 bp, Serratia marcescens
atgcaaaccattcacatcctaccccgtctggcgctctgtctggccgctctcggcggctcccatacggcgctggcggaacgatgggccataggcgccggcgcgctttacgaacaactgccctaccgcgattatcgccaagtggtgacgcccgtaccgctgctcaactatgaaggcgagcagctctttctgcgtgatagcgccgtcgccggtttgttcctgctgaaaagtccggccgaccgcctgacgctgaacctgtattactcgccgctgcatttcaggccgtccaaaagcagtgatgcggcgttgaaacgactggacaaacgccgcgctaccgcgatggccggtatcggttatcgccacgatgcggactggggagcgctgcgcgcggaggccgcggcggatgtgctgggcaatagcaacggcgtagcgatcgacgccgcctaccaatacccgctgcggctcggccgactgtatatcgctcccggcgctggagtgacatggcacagccggcgccataacgattactacttcggcgtcagccagcgcgaatccctgcgcagcggcttgccggcctaccggcccgacagcggcgcgacgccctacgccagcctgacgctcagctacgccttcagcgacagctggcaggctttcgtactcggccgctatacccggctggataacggcgccagagacagcccgatgaccgcacgcaacggcaccgtattgatcggcggcggcatcgtttaccagttcaattaa

SEQ ID NO: 457067 - DNA, 426 bp, Serratia marcescens
atgactgatatcatcaaaacgtatcaatcgctggaagaacgcttcccgatggaagaaatgcgccggttgtatctggccaatttcggcgaaaccgttgacggccgcctgcggctctacggcgactgggaaattagtgacagaggtgcccttacaactgctgagggcgaagtattacccttcattactctgtactgctggtttacctttactgaaatgattggtcgccgcgctcaaacctatggagtttcctgttcggtagatctcaccacatacgatggattacaggggacttacttcaggccattaagccccttcaccgctgaggcaaagggttacagagtagactacgtccacacaaaccatgagaatccccctggtggtagtggcaccaccacccgcgacttcacaaagcgtcttccaggttaa

SEQ ID NO: 457068 - DNA, 378 bp, Serratia marcescens
atgatggataaaaataagattgttgaccacattttgtttgttaatgataaaaagccgacagaatatataattttcaattttcatacgtgggtggaaataataaaatccatcatggtgaaatatgctaataaatcagaagatgaagcagtgtctctcatgttttcttcgcctttagtaaataatgcactagatggctatatggcggttgttgttcggtgccatgagttggaatatcattgggcgatggagttagcctatggagagcagtattggcaaaaaggtattagctctcaggagccagaagattattttgaatgggaagaacagtatagaaaagatcacaatctagctgaagaaagctttgtatttagtgattga

SEQ ID NO: 457069 - DNA, 765 bp, Serratia marcescens
atgactgcaacacgccgttggactcgggaggaactactcctcgcttttaccctgtacagtcagattccctttggcaaactgcactccaaaaaccctgaaattattcattatgccaaacagattgggcgtacaccgtcagcactggcaatgaagctggttaaccttgccagtttggatccgttcattacagagtctggacgcagcggcctaaagggcgcttctaatgccgaccgcgaattatggcaagagatgcgtcaagatcccgaagccttcaatcaacactgtcaccaagccacagcacacctagcagggctaaacactacggctgctgatacagacattaaagattttacgggtaatgagcgcctcgcaatggttagaacacgcattgaccagaacttattccgtaaaaacgtcctggccgtttatgaatatcgctgttgccttacgggacttgaagaaccagctctactgattgccagccatatccgcccctggaaagatgccgttgaacatcgactaaaccccaataacggtctttgtctctctaacctacatgacaaggcctttgatcgcgggtttatcacctttaacgaacacctggaattgatgttatcgccacaactaaagaaactgaaaagttctgcctatcgggataattttgaaaagtatgaaggtcaagcaattcgaatgcccaccagctcaccgcctgatgcagaacatatggcataccatagaaaaaatatttttcttggtgccgcttaa

SEQ ID NO: 457070 - DNA, 1749 bp, Serratia marcescens
atgcgtcgtacagaacagaaaaaaacgtttatcagccgtgagggtgataatatcgcgtatcgatatctccccactgaatccgctggcgatatttcagctcctccttttgttatcctgtatcatcggaaaagtgatttcacctgtgaagcgtcaagttacattgagaggctcggtttaccaaattatagtatgttgttgttagacatggacgacagcgatatccgtgtagataaagtacgggaaggttccgacatttcccgacaggctgattactttcagcagtttattgaacatatcaagctggagtatggtgtcagggaaaaagatatttccattatctctcacggcgatcgtgctgttgttatcgctgcctggatagtcgattatgcagccaacataagctctgctgttttttactccccgatgattttatcaaagaaatataatgacctgtattcgtcgtgtaaaagaaggatttgtcacttcatcaataaacgcctccccgggcgggttaatccggtaacggctgtatcatctgaacagagcaagaactatccgttaaaagacggcgtgctggttacggattctctttcccggcagcaacgttgggatcttgtctataccggcgaacgtattctcagaagttcattctcatacttcgtgcctactcaagttattcttaccgataactttttaacgtgtgatgtccgctccctgctgcgtttctacgctaatatttccagtgatgataaagcggtgtttatcccgccggatttgtatcataaagatatcaatgatgagacgttgtatagagaacgggattttattgccgcccattttcagaagccgtatcgggtcccctccctgtttgactcacacgttaaaggcgttaccaaagatgagtatgaaaaactacgtctgccggaaagtcatgcgtttaaacgagtattctgggccgttaataagtttgccctgcggcatgtgggcaggttgtctacgggaattaagttagggctggcaaccggttttgattctggtgcctctctggattatatctacaggaatgagccttctggcgataatctgatagggaaaaaaattgaccagtattacttggccaacattggctggcgctgtacccgaatgcggaaaatacacgtcgaggcgttgattttactggccgctgagcggctggccgaaaacggacaaaaaatcaggctgcttgatgttgctgccggtcatggcagctatatacttaatacggtagggaaaatcactcatcccatcgagcatgtgctgatgcgggactttatagagtccaacgtccacgatgggaatatattaattcagcaacataaattagcccagaaggtgacttttgaacaaggtaatgccttttcttcggcggatttggccacgttgccacgggaccgaacgctgaccattgtttccgggttctatgagctgtttagtgataatagtttggtgctgacatctctggaaggcattgctaatgcgacgcaggacggtggttatctaatttatacaaccaaactatggaacccgaaactggaatatatggcgcgagtgctaataagccacaaaccgggtgagcactggctgttacgccgccggactcagggcgagattgaccagttggtcaatcaggctggctttgtgaaggtaacgcagagaatggatccgtgggggatgtttagcgtgacgttggcgcaaaagaaggccggttag

SEQ ID NO: 457071 - DNA, 1632 bp, Serratia marcescens
gtgctgaaacgcctgactaccgtccggataggtaaccgagaacaggcggccgctgttgcgggagtattgataggtggtggtgcgccccagcgggtcggtctcgctcagcaggcgaccgtaacggtcccactcgctctgacgctgcgcaccgcccggcagcaccacgccgcacagctcgccccgttcatagataaacgccgattttctgctgtcaaagtcggtgaactgtgccacgttgtcgtcgtcatccagcagccacagcgcctgcctgccgtcatcgcgcactgcccgccgcatgccgccggtaaaatcataatagagttccagctgttcgccggcgctgttgcggtaggccaccacccgcggcaggccgtcaagcgcctgccagcggtactcgttcagcaggccgttgtggtcctgatgactgaccatcagcccatcctgccagccaaagcgtcgggtgacctcgccggcgcggttgctgacggtcaccagttgcccttcctcatcgtaggcgtagtacaccagcggcagttcgccgtccggggtatgcagcagcaccgtgctcaggcgggacagcccgttggcggtggtcaggtagcgacacgccagccgctgaccggcgctgtcgaccagctcggtcagccggccatggtcgtcatggaacagggaaaccgcgttgccggcgaggtcagtcagcatctgcagcctgcctggctcttcactcaacgccgggtagtgccaggcctgctcgctgatgtcgaacacctgccagctgtcgtcggcgttatgcatcagccaacacttttccgcttcacaaaaggttttatggcctttgggcaccatcgggaaggagacatagtcgccggacggcgcacgccacaccaggccatcctggtaacgctgcaggctgctttcccagaacaggctccagccacggcccagcacgctctctgccgggttgccgctgcgccagtagcgctgccactcaaccggcaggcgcgacggcagcacaaagtccagttcgtcgtcgccggacaggaacttctggccgctgataatatcaaccggccgggcgataatgccggcggcggccgtggcggtcatcagcgtaccaaagcggcaggcgacccgccccagcttgttgatgccgggcgccttgctcagcattctgcccagtgcacccagcttgctggccgcgccgccgacgccgcccagcaggccggcaaacagcaacgtcaggtcggaaatcttatacagccagtccggcacttccggttttatcggcagggtggtgacggtgccgccgccgatgcgcacgttgggcgaaccttccatcaccttggcgtcgcagttggttttatcccccacgcgcgccgccggctggccgttgatatacaccttgtccgaaccctgcgccatctgcatgctggggccatcctggtcgcaggcgacctggctgacggtggcgatggccgccggcttgccattgatgcgcacatccggcgagccggtcactatcttgccggccggcgtcagactccctgcgccggcctccgcaatgccatctcgcgccttggtcgccagctccccggtgagatagcccaccgccaggctggcgcccaccagtaa

SEQ ID NO: 457072 - DNA, 1539 bp, Serratia marcescens
atgcatgatgttgttgaactatctcgcttacagtttgcattgacagcaatgtatcattttattttcgtaccattaacgcttggaatgacattcctacttgccataatggaaacactttacgttatcacaaggaaagtaatatataaggatatgacccagttttggggtaaactatttggcattaactttgccttgggtgtcacaacgggcttaacttttgagttccagttcggtactaactggtcttattattcccactacgtaggagatatttttggtgcgccactagcgattgaaggccttatggccttctttcttgaatctaccttgattggcatgtttttcttcggttgggaccgcctaagcaaaattcagcacctaagtgtaacctggttggtagctttggggtcaaatatgtctgcgctgtggatattggttggcaatgcatggatgcaaaacccagtcggagcgacatttaatttcaaaacattacgcatggaaatgacaagttttaacgatgtcatttttaatcctgtggcgcaggtgaagtttctacacactgtttcagcaggctatgttactggagcgatgtttgttttagctatcagcgccttttatatgttaaaaggtcgtgatactgcattcgccaaacgttcttatgctatcgctgctgcatttggcatcgcctctgtgctttccgtgattctacttggcgatgaatctggttatgaaatgggtgacgtacaacaaacaaaactcgcagcgatcgaggccgaatgggaaactcagccagcgccagctgatttcaccctttttgccctccctaaccagctcaagcagaaaaaccgtttcgcaatcactattccctacgctttgggcattatcgccactcgctcccttgatactcctgttattgggttacgcgaacttatgacgcaacatgaggctcgcatccgcaacggtattctagcctacagtttgcttaaagtattacgtactggggcttacagctctcaagacgtgactcaattcgatcgagtcaaaaatgatctgggttatggtttactattgcagcgttatatttctgatatcacccaggctaacgaacagcaaataaaacaggccaccgcagattccattcctgctgttgcaccactctatttcgcatttcgtattatggttggtagtggagtggcacttctagtaattatgacgctgtctttctggagtgtgattcgtcaacgcattggtaagaaagcatggctgttaaaattttccttgttcggtttaccacttccctggatagctatagagtcaggatggtttgtctctgagtttggacggcagccttgggctattggagagattttacctacgtcggtggctgtttctaacctgactcctgcagatctgtggttttctataatactagtttgcggtttgtatacgttattcttggttgctgagctatatttgatgttcaaattttcccgtctcggccccagcatcctgaaaaccggacgctattatcatgaatag

SEQ ID NO: 457073 - DNA, 657 bp, Serratia marcescens
atgaaaatacgtcttctctttgctctctgctcgttcctatccgtcatggcttacatgccgtccgccgccgctgagtcagggttgttttgtcacggcatggaagatgagcaaccgcaagatcgtgcacagctggctgaaaccaccaccaagagttacttcttcgattatcgctggaacgataacccgaaactggaaaatggccagctgcggcagggaaacagttatctgattgccggcgatcgcctggtggtcgggccggagcagagaggttaccgttgcggttattacattaatggtaaaggcatccaaacggctaactggataaaggcggatacgctgcggatgttgtccgatgttgccccggccgactggcgtggcctctgggtgactagcgacagccatcgctggctgaagataacggcccggcatgccgagtaccagtttaccggcggcggcagcgatcctggacctctgaatacgctattcccattcactgcgccgatgaaccagcaagatgcccagctgatctctccgcagccgacggatgctccctgcaaactgaaactgcatcgtttaggggagtatttaatcatcaccaatggtgaaagctgcggcctgatgaacgctaacccggatggggtactgcgtaaacgctga

SEQ ID NO: 457074 - DNA, 900 bp, Serratia marcescens
atgagtgaaactttttggccggtgaaacagcgtgaacagcagtgttacttctctgattccaccatctggaatgattttgtatttcgcgatgacgatattatcgtcgcttctgcaccgaaagccggcacgacatggacacagcaaatcgtggcacaactgttgtttaacggtgacggcgatgtgtcgatcgcagatatttccccgtggctggattttcgtcttcccgatcggcaaaccatgttggagctatatgcgtgtcaacagcatcgcagggcgattaaaacgcatctccctgtcgatgcgttggtctattcgcccaaggctaaatatatctatgtggcgcgcgatgggcgtgattgcgtctggagtatctttaaccacatcaccaattatagcgatgaactgtatcggcagttggacagtgctgaagggcagaacaccgctgcaccgccgaagccctccgccgatattgaacagtattggcgacagtggctggctgaggaaagcgaagcgttttggcacaatattcgcagctggtgggcgattcgctcgttacctaacttactgttgctgcactttaatgacctcaaacaggatatgcccggtaccatccggcgtattgctgatttcctgcagataccgatccaagaggcgtactggcccgatattttgcagcattgctcctttgactggatgaagcaaaacggcaataaggtggcgccgctgcggggggcgctgtggcaggggggaggcgatacttttattcataaaggcgtcaatcggcgttgggcggatgtattgtcagtgcaggaatgtgttgcttacgagcaacggacacagcgggaattgggggcagagtgtgcaaattggctgagcgccggcggttggcaaataccatag

SEQ ID NO: 457075 - DNA, 795 bp, Serratia marcescens
atgctgcaggtgaaagttttcgaaaaaaatgaaatttatagaagcaatgttgccaagttactcatcgatctgcatgaaaaaatattctcccctcccggtaacatcacctcggacgacatcatctctgcgtatatcccccctggcgcgaccatcagcaaaactgccatctattatgataataaaatccccgttggatttatatgcatgcagaaatacgagatagaaataaacaaaaaaaaggtaaacgtttttcgcagtcaggttggattattgaaaagttacagaaacaaaaacatcgttaagttaacctacttaaaatttgtgatttcagaaatgttacgcaccccaagaaaatcactcttctttgagctgtgcattcatccctccagctattgtgcaatactcaagaaaggttgcaacagaaataaagcatggccaaccaaggaaaatgcacagcaaaacatgccgatgaaggatctgtgtgagacattgctcaatacctttgatctggagatcaaaagagaaaatggcgtattcattcataacgatgggctggggccaacccgtattgaaaaaaaaccgcgggggaatataagtagtgacgctaaattttttatagagacaaaccccgactatgtaaacggcgatggacttgcaatcgttgtcagcctttcagtgaaagatatactggttaacatatgtcatcagatgctgagtaaaatcaatcgtagcttgatgatgaaaccggcccgtggccgcgaggaatcccctcaagagaaacctaatgaagtataa

SEQ ID NO: 457076 - DNA, 771 bp, Serratia marcescens
atgtttaaagaacttatagagcagagcataaacgaggcaaaagccgccagagctgcgctgaacaaggttaacggcgtagttgtcggaaagatgcataatcctgatcaggggttgtatctcgctaactatgcaaatttgctaatgaacaggcagatagatatctttgatgatgcgcttctcctcctcgaaaacgaacgataccaaaccgcttgtgtcgttagccgggggatgattgaaacacatgctttctcacgactcttaaacaagaaagtggagaagatcctgacgaaccaaagcggccgcgaaagtgtagataaagctctcgatgtcatcctgggctttacgaacagttcccgatttaaaaagtcagagcaagaaaagattcagaaaggagtatttgaccctaacgactacatgtttactgaagagactaagcatcgttttgaaaacctacttgctgtcagtcagcatgtgatgaatgctttacgcgatctctataaagatgagatgaaacagactaaggggagagaaagcgattttgaactgacgtatgacatacttagcgaatatgttcatccttcacaaacgagcatctaccaatactacacacctgaaacccacttagttcctacttcagttggtaatatccatgcttatgagtctgctcagatacagtgcgcgagagcgctacacttcatattagatgcgaagaatcaacattattggtcttcacagttagcagatgagatgactaaacgtggtaaacagtaa

SEQ ID NO: 457077 - DNA, 1056 bp, Serratia marcescens
atgaaatatcgcggcatcgtctacgatgttggcctgagattcacagctaatggcccgctttcagttaagacgtttaaccctgagctagtagcctatgacatcaacgccattgccacacaactgcacgccaacgccattcgtatcgaaggcgaggatattgatcgcctggtcatcgccacacgtctggcgcacgaagcggggttaacggtctttttcaatccctggaagatgaatgtgcctatcaccgagctgcccgcctatttttccagagccgcgagagccgccgaagagttgcggcaggaaggagtgaatcttgtcttcgttgcaggttgtgaaatgtccctgttcaatgaaggtattcttgacggctcctcagttgtcgaacggattcagggcatcgcagagctgatgactgccagagaagccatagatggtacaggaaaagcacataagaaacaggcgctgttcaatgacacgatgagccagatagttaaaaatgtacgcgcagaatacagggggatcctgacctattcgcagggcatgtgggaacaggtagactggcgccttttcgatattgtcggcattgaccattaccgtgctggtgaatctgccgaagagtatgtgatgacgctggatcactaccgcctgaacaaaccgctggtcgtgatggaagtcggctcctgcgcctacaaaggggcgggtaagctcggtgccggtggcttcatgaatctgctaggtaccaatcctgatggcacaggaattttttccaacgatgtcatacccacgcgtagcgaacgtgaacaggccgattacattgaggaacagcttaaattactgagtggccctgatgccggagtcgatggtgtgttcatctatgttttctcgttcccgacctttccccacggtgaagggggccgggatctggacatgatgagtttctcactggtcaagacctatccagccgaccattctaaggggcagaaaatgccgccttgggagccgaaggaggcgttccagcgcctgtccatgatataccagcatatggcggctcagtga

SEQ ID NO: 457078 - DNA, 1176 bp, Serratia marcescens
atgcctatcgcacttttcgcccttgccatcggcgcattcggtatcggtctgactgaatttgtcatagccgggatcctcccacaaattgctgcagaattcagcgtcagtatcccaaacgcgggaatgatggcgacctcttatgcacttggcgtcttcattggcgcaccgctgttaactgtactcggtgcaagaattccccgtaaggctatgttaatcgcattagcgggaatttttaccgttggtaatatcattacagcacttgcgccgacgattgcggtagcggttgtgggacgtattatcacctcctttaatcatggggcctttttcggaatcggttctattattgctgcatcgctggtcgcgcccggtcgtcaggcaagtgccattgcctttatgttttcggggctgacattagccaatcttgtcggcgtgcctgcggggacctggcttgctcagacatttagctggcggctggtattttgggttattgctggtatcggtctgctgacgatggcaagcgttgccgtattggttccgcacattgcgaagggtaaggcaattgctttacgtaacgagctgcgggctttcgttgatccacaggtgttgcttgtcatggggattactattttcggcccggcggcctttttcacttctatcacttacattgccccgatgatggttcaagaggccggtttttccgaaggtggggtggcagggttaatggtgctgtttggtctgggccttgcagtcggcaattgggttggaggacgctttgctgatcgtttcctgtttggaacgcttttcgtcactcttgcggctcagggactggtactactggtattctgggtcggagtcgaacgtcagtgggttgccggaatctcagtattcctgatggcagcattcggctttgcgacagtctcgcctattcagaagttagtgatggaacgagcaagccacgcgggtgcctccacgatggctgcatcggtaaatattggcatgtttaatctgggaaatgcgctgggcgcatgggccggcggggtgactattgccgcagggtttggtctggcctcaccgaactgggcgggtgccattctgtcctttattgcgctgggcttagcttatcttgcttggcttagtgctcgtaaaggatatgtattaagtgctgattcttattga

SEQ ID NO: 457079 - DNA, 507 bp, Serratia marcescens
atgggcgcgttttataaagaaaaagatggtgttcggcaggcaaggcataaaccagcagaactggatgccattgaccgaaaaatattaggcgccttagcggaggacgcaggtcgtagctacacggagttgagcgagattgtgaacttatcggccccggcggttcacgatcgcgtaaaacgactgaagcgcgacggggtgatcaagggtactgtggcagtactggatggctgcaagctgggacggacgctgttaactttcctggtcattgataccagtagctatcaagcaacgcgagcacttttgcagttcactagccgcaaggaagtggaagaattgcataccgttgccggggacggttgcgtctttataaaagtgcgggccgccgataccgaatcgctggaaaatttcctgatggagattcagagccttgagggcgtacgctccgtgcgcagctatatcgcgctttctacgttcctggaacgtggtccatcacctgattcagcttga

SEQ ID NO: 457080 - DNA, 570 bp, Serratia marcescens
atgcgctatgctgtgcaaagtggcttgattgattacaatccagcccaggagatggtaggtgcggttgcttccagtaatcgtgtccatcggccagcgcttgagctgaaacgcctacatggactagtccaccgaattgatggttacacgggacgccctttgacccacctagccgtagagctcaccttgctaattagcgagctgcgttttgctcgctggcctgagatcgattttgaaacggcaatgtggacgattccggctgaacgagaatctatcgaaggagtgaagcactctcaacgtggttctaaaatgcgaactcctcatctggtgccgttatctcgccaggcactaaacatccttccacaggttcataagctcagtggcaatcgagattttgttttcgttggagatcacaatccttgtagatcgatgagtagaaatacagtgaacaaggcactgcgcgtgatggactacgatacgaaagtcgaactgtgcgggcatggtttcaggactatggcatgtagttcattgattgaatcggggttgtggtcgaaggatgcggtagaacggtag

SEQ ID NO: 457081 - DNA, 627 bp, Serratia marcescens
atgagtagaggctttatctcagagttagtcggggtatttaccttggtgtttattggcgtcggcgcgattatcgtcaatcaaataacgcatgatattggaaattttggcatcgccctggcctttggacttagcgttacttttattattagctctatctctaagacaagcggggcgcaccttaacccgattattacgttttcattatgcgctaccggaaaatgctcatcacaatgcgccttttattatattacggcgcagataatcggcgcgtgtatcgcctccgcggtgctgtaccttgtttttggcgatttattgcagtctggcgtcaccgtcgtagcgcaaaacttaagcctgagcaaaggttttatcctcgaggtaatcatgtctttctttctggtattaaccgtattgcacaccgccaacgctgcagtgatcggtattatcgtgtttttaaacgcctttatcggcggcagcctcaccggagccagtatgaacccggccagaagttttggcccggcactgatcagcaatcattgggactcccaatggctttactggttagcgccgctgggcggcgcactgctcgccatagcgctccacgtttttacacgtaaaccttcctcataa

SEQ ID NO: 457082 - DNA, 1080 bp, Serratia marcescens
atgcccacaacagaaagtgaaacattaagccgtctcaacgatgtacagcgttattacggtaaaacgctggaaaacagatacgatcttgccaccaacgtatgtacggtagataccgagccgtcggacgagataaaagccatcctccctttagtgcatcccgatgttcaaacacggttttatggttgcggaacaccgtttcctccactgctaaccggcatgacagtcctggatctggggtgcggcgccggtcgggactgctttatactctctaaactcgtcggggaacaagggaaagtgattggcattgacgccacacgcgaacagatagatttcgctaataattaccgagagtttcatcgtgataaatgccattacccgcaatccaacgtacaatttatacacggaaccattgagtcgctgcagtcaaccggcatcgcagaaaactccgtcgacattattgtttccaactgcgtcatcaatctgtcagcagcaaaagcagacgtgctcgcgggcatgtttaaacttttaaaacccggcggagagatttattttgccgatatttataccgaccgccgtctgcctgagcaactcaaggaagatacgcaaatcgttggcgaatgtatcggcgacgttctgtattatgaagacttcttccggttagccagacaggccggctttaacgacgtgagagtcgccgccagttcattgaaatccattgacaataaagcgatagaagaaaaactggccggtgccaggctctactcgatgactttcagattatttaaactcgccctcgaggacaaatgcgaagattacggccaggtggcgatttataacggcactttgccaggctccccccataaatacgtttttgaccacgaacacacgtttgaaacgggcaaggcacttccggtatgtcgcaatactgccctgatgctatccaaaacgcgctataccgcgcatttcacgcttgtcggccagggtgaaaaacactatggccctttcaattgtggcaatgatatcgctcttaatctcgccggcgcctctgttgcgtcagccccgggcggctgtggttgttaa

SEQ ID NO: 457083 - DNA, 264 bp, Serratia marcescens
atgcgcggcgggttaccggtcgcctctgcggaaaatacgcacacgataaaaacgttaagtagcggaaatgattttttcctatttattattaccatgaaaatcttctataaaaattacaggaaaataacaccacataaaaattataatatacatctattactccctatttattttgatggtttcaccatttgccttcatcaggtacctgccatcgtcaacagtaaacaacaattcgttttttttattattttcaacggtaaataa

SEQ ID NO: 457084 - DNA, 312 bp, Serratia marcescens
atggatacggtgaatgatgtccatcagctacttaaaaaacacttctgggaaatggcgaatgatacttcgctgagcactggtaacaagagcgtgctgcctgaagatgtccacgattttctggcagagtatgccgatctactgcacgttgatatgggcaattttgattttcaccaatattttccaaacgcggggatttggttcctgcctaatgtaatcctccccaaacacatgcagacagataaccacgaacccaaagtgttaaccgtcgagatgctgattgagtccgccaaggcgggccgctggctatattag

SEQ ID NO: 457085 - DNA, 369 bp, Serratia marcescens
atgtttgcttttctaaagacgcttaagagattgttcaacaatcaaaacgagcaggatgccgaacaggtaaaatacacagaacaccaactaattcagtgggctacgggttgtatgttggaggggcttccagatgatttttatcaagccagactcttatgcatcagagaacgcaatcccataaatccatatggctggattgtcagcaccaatcacgatgtaaaactaacccatgattctgaatatgaaaaatttcaaccagctgacgacctatacccaacccaatgtgtagagaacatcctcgaagggaagacatggaacaaggctacgattatatttgacaaaagcaacgcgtcatttaaatgggaatga

SEQ ID NO: 457086 - DNA, 585 bp, Serratia marcescens
atgtcaaaaccaacggtggaacgaggaaagtttacctacgatagcgaaggtaatgattcaggaaaatggaattcacgatatttacattggccagaaaaatactcgggtgtgaccattggacgtggctacgatttaaaacatcgtcagcgtgaacaggttattcgtgatcttactggtgctggcatcagccaggaaaaagctgaactgattgccggtggcgtcaaactgacgcgcgacgcagcgcgaaattttgtacgcacccaccgtgaacgggtcggcgaaataacgataggccagcagattctgttattcaaccgggtttatgctgagtatgaacgtgtggcaaaacgcgtatatcaacgccacgcggtatcagagagtggttatatatcctgggataaactgtcttccgcgacgagagaaatcatcaccgacatggtgtatcacggcgccgccaacataaaaacatataggtcagcagcgagagataacaaagaggaactgattacccatatccggaataatattaatggggacttggcaagacacaatgctagaatcaattacctaaggaacgataaatga

SEQ ID NO: 457087 - DNA, 489 bp, Serratia marcescens
atgaacaataaaaagatatatcaatgttcggtgaaaaccattctactgctgttctcaagcgtatgctcttcttttgccgatgaaatgaaacccgctgttgtaccaaatgttgcccagcagatgattattaagcaacaagagaaactatgtatcactgaagactcccgaggctctagcgcgcgtgcgatggctgaatgcgccgatcttttgctgtcagactctcaacgacacctggatagccggatggtcgaagtcaaagagtacctggcttattacgaccgcagcaccaagggctatgaagacaacgggaaggagtacctggcagcattcaataaatatttggcaacgtggcgtgagttcgtcagcgccaaatgcggttttctgtattttgaattcaaggaccctgccaaatatatagaaacgcatacctgtcaggcggaggaaaactacctgctggaagcctcactacgtcgctttggctcaaactaa

SEQ ID NO: 457088 - DNA, 180 bp, Serratia marcescens
atgaaaatcagcacgttgctgacgttgttccctctgctgatgccggcatcggtgcttgctggcacgctactctataccgattctcaccatcccccgaccaacatcgatgcgtcggtattcgttatttatcttgacggcccggaacagctgcaaaagcaaatgttcggtgagcttcgttaa

SEQ ID NO: 457089 - DNA, 627 bp, Serratia marcescens
atggataaagcggaaccgaaaataaaggaactattagaaaaaacaaaaaagcacgtagtgatatttgacagttgccaattcacgatgcggggattaaccctgctgtgtgaacgccacgcaggatggcggatgtgcgggacggccgactctttttcacaattatggcagctgcttgcaagacagcgcgtcgatctggtgctgtgcggcatcggcaagcgggcagatgacttttcccgcttgctcaacctgccggactatttcgccggacgctgtattttattgaccgacaaaagttccgccgtgttgcgtgcggcctttttaagcgcgggttttgacgccgttaccagtaaacagacgtcgctgaccgcgctcgatagcctgctctattacaccatgtactcctcgctggaagaccggcaggcggaacgcgtggcggcgtgctatcgcccgctggagcgggaagtattaagcgcattgctgaatggtaaaaaaccccacgctatcgccagagatatggggatttcttaccgtacggtcagccgctataagcaaaatggcttaaagcgggccgggctgaacagtctgaatgaaattctggcctgccagaaaaactatgttgcgaaataa

SEQ ID NO: 457090 - DNA, 135 bp, Serratia marcescens
atgaaaataacggctgattggtggggcagatattcggtgcgcgcgatctggtcggccatccttatatccagcctggcattctggggcgtggtgctcgacagtgttttagcgctgttcggcaatggcttttattaa

SEQ ID NO: 457091 - DNA, 702 bp, Serratia marcescens
atgatgaaacaaatgcaacaaagcgtctgcgcgctggcggtactggcggcgaccactctgccggccatggcggcatcaagcgttgatgtacgggtgatcggcaccattaccccagcggcctgtacgccgaccctgagcggcggcggcaccattgattacggtgcgattaacccaactacgctgagtgcggcggattataccgtgctggaggagaaacaaattgatttcgccattacctgcgatgcgccggccaaggtggcgattaaagccatcaacggccgtccaggtacagcagcaggctcaaccgaaggccctggtggctttggtggctcacctgttccattgttaggtgattcaggtaaccgcgtcgtaggattagggctggatggcacagctaaaattggtggttacgctgtggctgtaaaagcaggtactgtaactgcagatggtacggtagttgccagcgtgcaatctcttgataatggcacgacttggatggcgagtccggcaggtagtttgggagcatatggttctgtgctgttaagttcatgggctacaggcggcacgactaccccgatcgctttcgagaatcttgccgggaaactggcggttcaggcctacctgaatcatgcctctgaactggatctgaccaagccggtggcgctggacggtctgaccacgatcgaactggtctatctgtaa

SEQ ID NO: 457092 - DNA, 705 bp, Serratia marcescens
atgatgaataaaatgcaacaaagcgtctgcgcgctggcggtactggccgcaaccactctgccggccatggcggcgtcgaccgttgacgtgcgggttatcggcaccattaccccggcggcctgtaccccgacgctgtccggtggcggcactattgattacggtgcgattaatccaaccacgttgagcgcgacggattataccgtattgccagaacgtgaagtgagtttggctattacctgcgatgctccggccaaggtcgccattacacctgttaatggtcgtccgggtactgtcgccggagccactgaatcgggtgggggagcggctctcactccggttcctttgctgtcactaaccggtgcaggtgtggttgggctgggtctatccaatggtcaaaaggttggtgggtatgccatgaaagttgaagaccttacaaccgatggtgcgccagcagatgttatcaggaccgcacttggctcaacgggctggcaggccgatggtaatcactatggtttcttccgaaatgtaggtacggttccattccaggtcacagcagcagcccctggaacattagttcctgaagcctttaccaccttggcgggtaaactgcgcgtacaggcgtacctgaataaaacgtctgagctggatgtctccagcccggttgcgctggacggcctgaccaccatcgaaatggtttacctgtaa

SEQ ID NO: 457093 - DNA, 438 bp, Serratia marcescens
atgtttacgacagtgagaacaatggtttttttcgccttggcgatgctgccatggcctgcttctccggcatcattgccctatcaggccgccatcggtagctcaccggataaccaactgctgtgccataactgcgggggcagcggaaaacatacattgattcagggcgggggcgacgtcaggcagtatcattttgtcgtcgagacgccccactatacgtttcttgcccgtcagggccggggcgcttgcccctatgcgacgtggatcgccgtcaataaaacgcgggcgacgccttatgccgagcatttcaccgtcggctgctatccggcgcaggacttccgcgccgcagacggacagaacgccaccacatttagtgtgtactttcgccgtggtgtgactgaaaccatcgagtttaatcatcaacagggcggtgtgcgctaa

SEQ ID NO: 457094 - DNA, 381 bp, Serratia marcescens
atgcaaagcaaatgtattctgttcgttagttcgctgatgctggccggcatcaccctgccgtcgcaggcatccgacatcagctgtgaaagtaaaaaaagcgaactgcgcacccagatcgactatgccagatccaacggcaatgctcatcaggtaagcgggctggaaaaagcgctgcgcgaagtcacggaacactgcagcgatgagttgctgcgacaggaaaacctgcttaaggtgcaggaaaaagagaataaggtcgccgaacgccaacgcgaactggctgaagcgcggcaatccggtaatcaggaaaaaatcgataaaaagctgaagaagctccgggaagccgaagaagagctgaccgcagcaaaaagcaacgccgcctga

SEQ ID NO: 457095 - DNA, 375 bp, Serratia marcescens
atgaaaaagttttcttctttactattactgggcatcgccgtgattttttccactaacgccgcggcggggcgccagggttgcgaaatcaagaaaagcaaaatccgcacccagatggagtatgccaaacgctacggcaaccataaccggctggcggggctggagcgggcgctggcccgggtcgaggccgcctgttctgacggttacagcggcgccagcaaccgtctggataaaatccgcggtaaggaagacaaggtaaaacgacgcgaactggagctggaccgggcgatcgccggcggtgatatggaaaaggtgcgcgacaaggcccacaagcttaatgaagctaaacaggagctggcggaagcgcggcgctggtaa

SEQ ID NO: 457096 - DNA, 270 bp, Serratia marcescens
atgctttatcaacaggcggcgcgcgtgatgcgggccgttgctgtgctgattgatgcgtcggatgaagccgaaattgcctacccgtcatacgccataactttgttggtcaactatttgcttacaaaatatccgcgttatatcaaaagcttaatgttcccaccgttttgcgttatcgctgaatgccgcgatacccgtccccattcctatagttttatcatgcgcatacttcctgcccgaacatcttcgccatgtgtaaaaatcgtcatctaa

SEQ ID NO: 457097 - DNA, 1515 bp, Serratia marcescens
atgggcggtgtactaaaaaattatggtgatgtgccgttggtgtgggatggttcggcagatccgaaagttattgccgcgctacgcggagaagatattgagctatattccggtctttcttttaattcggccttgaaagtagatgaggcgctggggagaagcgttctcgttgatggtattaccgggggtaaaaataaaacgccggtagtttgggatggctctgacgacccaaaagtgttgatggaattacgcggtaatgagttggagattaactctgacgtgtcatttagcacctcaattaaatttgatgatgctattgggcgagataccagagttggaacggtgtttaatcctgagacagatatcgctctgctttgggattcgtcggatgatccgaaagttatcttgttcatcgataaggacaggaagatccaggcgccaatgggttttggctccgctggaggtaccgccccggtctcatttgatgtagtggcaaatagctatgtgagtcaaaatgtcagggctcttttgcattctgttaaaaatggagctgtaaaacggaatgtaaaaatattgtttacgggacattcatggacggattttcttgagataccgaaggcatacagagacatgctgcaaccagtctacggcgacggtgggatcgggtatcagtcgtttaatccaacgcgcatacctgcaggtatgacgtgcattagtgaggggttcgaaaaacggacaatttttaatgccgtaacagcagatggcaccggcattaatggccgcagtttgtatacgacgactgacacggccagcgtgaaatttgacggacttagcggcagcaaggcagttatttactatcaagaccttaacggggtatttaccgttacgctaggtgatggaacgacgcaagaggttgtaggcggtgggacaaataaatttaaatctatcacgctgccggtatctgtatcaccaacgtattgtgaggtgaaaaccacaaataataatggcgggaaagtaaatgttttcggtgtcagcatggagaatgatacgggcgtcagtgtatacagcatgggtaacgcagggtgtaatgcgcatgactatgtaaatcattgcataaaaaactacccggatgttgttcccgctgttaatgctgattgcgtgttgatattgcttggtacgaatgaggttatcaataaagtgccgccgaacgtttatcgttcttatttgacaaatttagttagggcgtggaaaaacaacgttaaacccggtgttggtgtaaatattgtctcatgcgcacacacgctgaatacatcaaattccgcatctcaggaaaagtacccggaagtagagagaggtgttgctcttgccgagggggttgggtatgtggacgggtttaatattttccctaagccgccggtttccggtgatgcaagactatttgcgaatacagagcaccttaatgaaaatggtgcggaatatttttcagaacatgttattaacaagctgctggaggtttga

SEQ ID NO: 457098 - DNA, 783 bp, Serratia marcescens
atgccaagtatcggtaacggggttgttattccaggtgatggttatcctcgtctgtcatcattcactacaccactaatgatgccgccgggagcaaatgtcctcgccgcctattttctcgggggtattgcgaaaaaaggtgttttgcacaattacgccgacccgtctaagccactaacgatgcgaggtaacccggcagtattcaggaattttgcacgctgtgataaagataactgttttgatacggggctggtgttgcctgaaaatgccgttcgaattatcgcaattgtacggcctgcggcggagggaacccctatagaggcgcgaggggttgttgttagtgattatgaccaagggaaaggcaccagtaatgaaaagggcttgtatcttgatgtatacaaaagcgccggtgatgtagtttcaaactggttattccctgccgcaacaaatggcaccggcattgtcactaagcgattatcgcagccaaatgctgatgattttcagatggtgtctgcggggcatttcccgaaacagcaaagttatacgtctatgtatgacttcactacaggaaaaaataacggtggagctggtagcgctgcagctgtaaatgcatatgcaccgacgggtcggacgttacttatcggcggtcactacggtggtgatagtggggcttttcaaggctcagtagatattatgggattcatgatcgtgtcgtggggaaccagtttagatgatgcgatgaactggctctataaaacacaaggtgcacagcttggcatgtggtga

SEQ ID NO: 457099 - DNA, 1011 bp, Serratia marcescens
atgaccgataagaaaatatctattgcggaaatggcgatcggcgatggtgggggcgaggacgttgaccccgggaaattgagcgatttagtgaatgaggtttaccgttcgccattgaataggttggttatcacagacaaagaaaaaaatatcattcgcgccgaaatgattttaccgccgcaggccggcgggttctggatgcgtgaggctgcgctttatgatgatgccggtgtgtgccttgctattgcgaatttgcccgcgtcttataaaccactgcttgatgaaggttctggccgcttgtattccgttaatttgtggattgaggtaagcgagtcatcagatattgtcttgaaagctgatccgacggtcatcatggcgtcagttgaggaagtgaataaagcacgggatgaggcaaaagattatgctgaccaagtgaatggggcgctggataaagacattcaaaaagcgattgctgaggcggtgaaagctgcaacgcgtgaggcgtgggaactgtcacacccaaagggcatcagcctgtttttctttgagaacgtcgaccccaataagctttggccgtggtcaacgtgggaatataccggcgaagaccgaacggtacgcattgccaagcgtgacggttccaacgttgggcagatcggcggcagtgacacggctgttattgaacgtcagaatttgccagcgtcaaaaattccattcaggggaaatgcgagttatgagcctgagaagacgttggaaacaacgaaaaacggactgcaccatcatcggggaggtaaccgggcgccaggcgaagaatggggggaggaaactcgaggaaccgataatcaggggcgtgttactctgaataatacaagcgatgatggcgatcatgtgcacgaatatactattcccggccacgctcatgaggtttccggcgaaaccgatgcgcttggcagcggcgaagccatcagcatcgtggagagtcatgtgctgcagatgtgctggcaccgcgtagcgtaa

SEQ ID NO: 457100 - DNA, 1050 bp, Serratia marcescens
atgagcgagtctgttaagtttagtttttatcaagtggatgaatgcggttattactcatggggaaatagttctccagtttttgggtctatacaggaactgctaacggaccttctccactggagtgcggacaagagcattgaaaataccaaattgtatgaaccacaagtaggtagtgactatctctcaacttatttgtttgatatcaaatgcatgggtgaagattggttggttactacttggaatgaagtaccatcaactgaagccggtatagcatctgttataagggattcgagtgttactgcacctgatgtgatcatgaaccgtatacaggataactccattccaggttatgcgacatatttttggatattaccgaatgatggcttgtttgctagtttgcggttcaaaaaacgcactcaaactgggcaacaaccatttagaaagtatatggaacaggcactttcattgatctcttcttacgtcagatatggtgaagatggagtcgatgactctagacaggtgattggttacgcaccggtaggagaggatttgattagcccaagtccttctcctcggttcaaaacttctcttgcgcatgatgtcggtaataggcagttcattagggaaaatgctactcgagttagcaaaattattcgtaaagagacattacgattgaaccacgatgatgaacgccaatggtggcaatctgccttaagccgtttggggattagcagtggtagcgattatagaagaacagacgatgtgaatgtaaagtatgagttacgtcctgaattttttgatttgcaaaaagttgattcgatgatggaagagtgggatgaatctgagcctacgcgttcagagtgggatgattatggctttacttttaaaggtgatgccaataaggtccactggctgagctatagtactctaacggcatctgctgaattgaatattgtttgggataataacgaggttgttaatagtgaatcgttgttatcagttttaactgctggtaaagcagagcttctacgacaaatacgtgaggagtaa

SEQ ID NO: 457101 - DNA, 552 bp, Serratia marcescens
atgttctggaatatagtgaagttgttcatcatcgtttgcctcatagggttaatcggtgtgggattctggtatgggagatttgttccatttgctcagcagtccccactttttgaggctctcagaacgactgcgtcaataatatttgcagttgtgggagcgtggatggcaatcatctaccctgaaaggttgcgcttcacatttaaaccaggcagtagtgaatcaacatctatgcctgtcaatatggggaagctattgcatccagctgtaaattctacatttattttgtgcattgtactaatggtgggagttttgtcaccattgattaagcaagtctcttttctgctcccctataaggaattactacgaggattgtcatttagtttgctcattgcacttacaacttggcagatatggaccgttattttgacattggttcctgctgatatgattaagagtaaagtggatcatgaaaatgcgaaagttgctggtcgtaagagttttttttctcaaactcaaaatgttagtgatagtaaaaagcaagatgtagattga

SEQ ID NO: 457102 - DNA, 132 bp, Serratia marcescens
atgaagccggagttgcgtattatggctggggagtcaatagaatgctatatagatattcaatattactttgggctatgtcaactctcacatgtaacgaataaaaaattacaggatcatatagtaatcgggtga

SEQ ID NO: 457103 - DNA, 522 bp, Serratia marcescens
atgcattgttattcaaactgcgtaaggggcttttggtcggcaatggggatattcctgttgacgccgattttttcctccgcccaggcggcgccgggcggcagcggcggcactgaaataaaaatttacggcacgctggtggagccaccgccgtgccagattaataacaatcaggtgatcgacgtgccgtttggcgagattggggtcaaccgggttgacggtaagaattacttaaagcaggtcgaagcgccgctgaaatgcgacgacagtcagctgaaatgggatctctggctggaggtgcacggtcaggcgacggcatttgataaagccgccgttcaaagctccgtgacggatctggggattcatctgatgatggacggcaagccgctggagctgaacaagccggtgctgattacgccagctccgacgctgaagctgcaggccgtgccggtaaaaaaagcgggcgcggagttgcctgaaggggcgtttgacgcctctgccacgctgctggtggagtaccagtaa

SEQ ID NO: 457104 - DNA, 483 bp, Serratia marcescens
atgaatcagaagccttacccgccgagaccaagtaaaccgatggtgcaggcgcgcactaaaggaggcgggcaagtaataccggtgacgccggagtgttcgattaatcagggtcatgtgattgaggcaaatttccgcaccttgcaaacggatcaggtggccagccgtagcgacggcgagcgctacagtaaagatattgccctgcactttagctgtaataccagtctgacgcaggatattagggtgcagctgatggcggacagcgccggtttttcatcagaccttatccgttccgacaataacgccttagggattgcgttaaaacaccaggggcagctggtgaagccgatgatggcattccccgcccggcttgaggaggggagtgggaatgagaatatcaccctgacgccggtaaaaaaaccgaaagtggcattgcaggccggcacatttaacgcctcggcgacgctggtgattttgtcgctgtag

SEQ ID NO: 457105 - DNA, 573 bp, Serratia marcescens
  misc_feature (505)..(514): n is a, c, g, or t
atgagatggcgagcattactagctttgttattattttggggggcagcccacgcggaaccagataatacctgctggggcgatccggtgaatatcgccgtggtggatattgcaaatgcgccatttacgagtaataaaaaagggtcgagtgcaacagtgaaatatcgaacaaatcctacttcttttagtgggttttgtaataaaattatactatttgcctcgatgacgcattatatcgatatgggacctgctctgacgccttcaaatattaatccgggttactttaaattaagtgatgatgttgatgttatgatagggagtagtgctgataatgtaatgaaattctttccgttggaaccgcctgactcattagttggtaggaatacacccatatatattggaaagaatgtttttactacgggattcggtgtggccggtgagggagaaataaaaataaaattaagaagggatattattggtggcgctattttagttccatcagatactnnnnnnnnnnaaaagacccgaaagtggcattgcaggccggtacatttaacgcctcggcgacgctggtga

SEQ ID NO: 457106 - DNA, 243 bp, Serratia marcescens
gtgcaactggtggcggacaccgctgaattttcatcggacctcatccgttccgataataatcagttggggtttgcgctaaagcataatgggcaactggttaaaccgatgaactcatttggcgcgcgcctttactctggggctggcagcgatgaaattaccctgatgccggtaaaagacctgaaagtatcattgcaggccggtgcgtttaatgcctcggcgactttggtgattatgacactttaa

SEQ ID NO: 457107 - DNA, 1008 bp, Serratia marcescens
atgaaaatattatcgttattatcattgatttttttacctctgtctgtatatgcagagccagcagatacctgctggggggatccggtgggtaccgccgtagccacggttggtaaagtatcttttaccagtaataaacgtggagcaatggcaacggtgaaaatatccgccaaacctggaagtttttcgggtttttgtcatttaaccagggaaacagggacgatacggaataatgttagagcaagcgataggttggtatcatcggaaatcaatccgggatactataaactaaatgatgatatagatgttgatatatatgtagctggttatcggattcctttcgatgcgacgtatccggttaccgatattatggagagatttaccaaccttccgattggcgagagggttccggcgagtcatttctctgcggctattgatgccgaatggaaattcaaactgcgcagagacgttatcggtggggctattattattcctcctgatgttgaattatattctgcttatccgaaggaatatgttactggctcaacggcaagccgaccgatgtatcgggtgaaaacgagctcttccggacagattatcgctgttcctcctgagtgcagtatcaatcagggaaatgccattgaggttaactttgataatattaaaacgaccgctatccctgactctgttgacaaaagtgatacaggttacgtcagaaacatagggttgaactttagttgtaacaccaacctgacgcaggatattcaggtgagactggtggcgaatccctccgccttttcgccggatcttattcgttcgaataaaccgcgtttggggtttgtgatgaaacataataatcagatcgttaagccatgggggtcgttccgttcccgccttgagggcggcaagggccaggaaaccatcacgctggcgccggtcaaagcccccgagctctacctgcaaggcgggccgtttagcgcttcggctacgttgattattcagtcgctttaa

SEQ ID NO: 457108 - DNA, 1008 bp, Serratia marcescens
atgagattactggcgttattaacctgtatgttgtgcacattacccgcttatgctgaaccggataatacctgctggggcgacccggtaaatatcgcggtggtggatattgctgctgcgccttttagcagtaacaaaaaaggtgctgaagcaaaaatgtactatgaggccaaaccaagagagtttccaggcatatgcaacaggagcacttttattaatacgatggtgcattatgtcgatatggggccaaagcttatcccgtccaccttaaatccgggatattttaagttgagtgatgatgtggatatcctgatatccagcgatgacggggtggattttcccgcattacccaaggatcatctgatgggggtggtgataccgccgctgggccagaatgtcaggaagacggggtttggcgccgcaggcaggggctatattgatgtgattctgcgccgagacgtgattggcggggcgattgttatcccttccgatattgaactgtattcggcttatcgagtgatgaacacgccgccgtattatccgccaaggccgagtcgtccgctggtgcaggggcgcaccaagtcaggcggcggggttatagcgattccttctgaatgctctattaatcagggaaataccattgaggttaactttggcaccatacaaacctctttgattcctgacaaaggggtggatagcggcaaaggttatgtcaaggatgttgcgcttcattttagctgtaataccagtttaacgcaggatattcaggttaaattggtggcggataccgccggtttctcagccaatctgatacgttctgataataatgccttagggtttatcttgaagcatgataacaaattggttaaaccacatagctcatttcgttccagggttgagggcggggtaggtaatgagacgatcacgatctctccggtgagaaacaagaatgccaagctgaatggtggtgcgtttaacgcttcggcgacgctggttattctgtcattatga

SEQ ID NO: 457109 - DNA, 510 bp, Serratia marcescens
atgaactcaatcgttaaacgttgcagcgttgccgcagtgctggcgctggcggtgatgttgccggactttgcccggttgcatacctcaatggccgggctggagcttatcgctgacttggaagggtgccgcctcagcccgtaccagtgcagcgcgggcgtatggacaaacggcatcggccacacggccggggtaaaaacggagcgcgttatcaccgagcgtgaggcggcggtcaatctggtggctgacgtcatgcaggttgaaaagcagatcgcccggtgtatgccggttgtgatgcctcaaccggtctatgacgcggtggtcagctttgtgtttaacgtcggcaccggtgccgcatgcaagtcgacgctggcatatttcatcaatcagcagcgctggacgcaggcatgcaaccagctcccgcgctgggtttatgtcaacggcgtcaagtcgcgcgggctggaacgccgacgggcgagtgagcgggacgtctgcctcaagggggtgcaatga

SEQ ID NO: 457110 - DNA, 432 bp, Serratia marcescens
atgaaaaccgtcgtggcttttctggcgttggcgttactggcggccggctggctgaaatgggaaaaccagcgcctgagccgtgcgctgacggaatcccgtcagacggtcagccagcaggaaaaagacctcgccgcgacgcggcaggcgctgagggaattgcaggccagcgcgcgcagtaacgagcgggcgcaggtcattctgcgccagcagatcgccgccgctgacgcgctcgccaaccgccgtaaccaaaccattacgaggctgctcaatgaaaatgaaaccctgcgccgctggtctcagtctgttttgcctgatgatattgcaaggctgcacgcccgtccggcattctccagccccggcgattatttacgttggctgtccgagggtcagcagttgcccgataccggccagccagccggtcaacaacggtga

SEQ ID NO: 457111 - DNA, 597 bp, Serratia marcescens
atgagtgatttgttgccgccggggtcatctgagctggagcgtcgcgctgcgcaggcatgtgcgcaggcgatggggctggatgtaccgctccgggatttgtggaatccggcgcgctgtccggtcaagtttttgccctatctggcgtgggcgttcagcgtcgaccgctgggatgagaattggccggagtcagaaaagcgcagggcggtcagcgatgcgttttatatccaccggcgcaagggaacggtggcggctattcgccgggtcatcgaaaacatgggctattcgatgagcattgaggagtggtggcaggttgccgatccggctggaacattccggcttactgttgagttgaatgatgtcggcattacagagctgatgattaaggagctggagcgcatcatcggcgatgcaaaacccgtcagccgaagtatttcacaacttacgctttcagccagtacgcgaggtgatataagcgtcggtgctgttaattttgatggtgagaaagttagcgtttatccggctgggtataaacccgacgagagtatttattataacggcctgatttttcatgacggcaattatgtgtttgagggatga

SEQ ID NO: 457112 - DNA, 969 bp, Serratia marcescens
gtgcagattattgatcgacagtatgcggaacgcgtgctgtccccggatcaatgcctacgattaagccgcgatgcattcaggctggttagtcagggtaaggtgcagcaaagcttacgcagcgttattgcgtcagcggaggggagcctgatggggaccatgccggcatatatttctgaggggccttatgccggatttggtctaaaaacggttaaggtcgactttggtcagggcaagcaacgcacatcgcatgaaggctgtattttgctttatgacgcgggagcggaaagcgcgatggctcttgttgatgctgcctcgataaccgagctccgcaccgccgccgcctcggcggtggccacagatcttctcacatcgccggaggtgagccggctggctattctcggtactggcatacaggccagaaaacatgccgttatgatgctggcgattcgtccattccagcacatgacgatctggggcagaagcgccgacaaagcatcagaatttgcattatggtgccgggaaacgctgaatattgcggtatcggttgcatccacgccggctcaggcggttaaagatgctgaggtgatctgtaccgtgacggcctctaaagaggccttcctttatgctgctgatttaccgggaagctgccatatcaatgcgatcggagcttcggcgccggggtttcaagaaatttccccggagatttatgctgctgtcgaactgtttgttgatgacagagaggcggtgtggcactcctcaacgtgtttaaacgcggcaaaagccggggggctgttgccgcaggaaaataccggcgttgagattggagaattgttgatacggcaagagcgttcaaccatgcacaattcgcaacgaacattattcaaatcggtaggtatagccgctcaggatttggtctttgctcgggcgctcatcagactgcagcagcgtgaaccaaagatcgatctttaa

SEQ ID NO: 457113 - DNA, 537 bp, Serratia marcescens
atgaccgtactggaaatgcatgatctcgccagcgctcctattggcagcaggccattgctgcagagttcaatcgatggctttggctggatcccatggcaaagcgcttatatggcggcatcgccggcactattagcatcgtatcaattcgcccatgatgctttctcgcgttgttccctgaatgaggaagaacgcgccattgtgtggattaccacagggatgatcaaccgctgcggctacacggttcaggctcatagctggattgccctgcgtaaaggcgttgcgcctgaaatcgtacgcgcgcttactgataagcctgaagcccttcccgccaggctcggcgcgctctatgccttcactgcccatgtggtgcaggcgcaggggcaaatacggcaggaagctattgaggcgatattggctgcagggttcagccgggaaaatatgctggacgtcattttgggcgtgtcacaaaagacgatgtcgacattacttaacagtattgcgcatacacaagttgaaccgcagttccagttgggatag

SEQ ID NO: 457114 - DNA, 573 bp, Serratia marcescens
atgaattgtcactttatggatatagatttaggctgtgcggtaaatcttccggttcatactttggggccggagggaaccagcagcgagtttgccgctaaatatttctatggttggatgaataataattacgcttctagtcatcatgatatttatcttaatgcctcttatgaagcagcaagagacaatgttgaccatgagaggggcctgctcgttgtggcgaatgcgtatcatggaattaatacattttatatggatacgcgtttaaaactgctggcgacatttttatatgataccccgttgtatggtttggctgttaaaaaatcgccgcctgaaaaaccgctctatattgcgtcacatccggcgccgattccactaattaaagaactgttgcctgcaggtttaaaagtcgcacgtattgtcgaaatggcctcgaccagcgccgcagctcaggcagtggttgacggtgaagtcgacatggcgttaaccaccgaaattgcagcccgcttgcaccggctcgaatttatttcccgtacccgaccaatacatatgctctggtccgtatttgcctcataa

SEQ ID NO: 457115 - DNA, 969 bp, Serratia marcescens
atgaatgcggataaacccgacaatattgctcctgcacgtccggtacatcatcgctgggtttacctcaatggcgagttcattgaagcgcagcaggcttcactggccatcacaacgcaggcatttaattacggtactgccgtgtttgagggcattcgtggctatatgcctactgccggtggcggcgtacatatctttcgccttgatgaacatctttcccgattgcggcaatcggcttcgctattgcttattgatgacctccccgagcatgaatcgttgaaggcctcaatactctcattactgaggcgcaacgatgtcggcgacgactgttatatcagacctattgcgtataagcatcagctgctgccaggtatggggtttggcgtgaaattatccggcgtatcgagcggtttgtcggtgaattcgttgaacatgcgccgttatgttaagcaagatggcctgagctgcgcaatttccggttggcgtcgggtggcagataatgccattccggcaagggctaaaattaccggcagctacgtcaactcggcgtttgcaatggaatcagcacagcgtagcgggtacgacgacgccattatgctcaatagtcttggctatgtggcggaagccactaccgctaatgtttttatggtcaagcaagggagaattattaccccaccggtaacggcacatattctggagggaattacacgcgcctcggtcatagaactggcggagaactatctcgggttggaggttgagcagcgcgatatattaccctcagagctattaaccgccgacgagtgctttttatcaggtacaggcgtagagatatctccggtcaagcaaattgaataccatgccctacaaagtctggaaccagacagtctttccataaaaattaaaaacctctatctgcaagctgttcgaggggaactagacgcattcaatcattggctaacgcccatctattaa

SEQ ID NO: 457116 - DNA, 1410 bp, Serratia marcescens
atgtacgccatttttaaaaatgaattacttcagcacgccaaagatatatatagtcaacacgaaagttttgccgccggggcgctcagtgcagaacagctgagtgttcaccaaaccaagcagctccgtgatgttatcaattacgtcgcagatcattcgcctttttatcgtaaacacctgaaaggtttgacccgtgccgatattgaaatgctgacgccagatcatatttcaatgctgcctttcaccacaaaagatgatcttagagagcagggggcattattagcctcagcaccgttgcatcagagctggatttattacgaaaccaccggaacaacggggaagccaacgccgtgtccccgcaatgaaattgactcgatacataataatacccctctgatcattaattatcggaatatatttgaacagcacggcagcgagcatatcgtggggatacttggtcccagcgaactacactcaacgggagatacctttgaggatgtattccgcagtctgggttacggggtggtaaaaatgtggccgcggtcgcctgttgtcgggatcaaacgtgttattgccctgatcaacgaactgcagctcaccgcacttgtttgcacgcccgccgtggctatcacccttgcccgagcgataaaagatcttggcatgtccccttctgaaaccagcatccgactactgctgaccgtcggggaattaactacaccggcgttattacgcaatatcagtgaagtatggaatgcctcggtctatagctgtatgtatgcgtcccaagagtcttctattcttgctgtttgcgccaaagatagccatttgtataccgtccctctgaataattattacgaagttatcgacccaatagaagggaagagctgcgatctcagcggcgatcaggcaaccggcgagttggttattactcatctctaccggggccaaaagcctcttattcgttaccgcaccggtgatatggtgcgttctgtccgcatgccggatggcagactcagaatcacgccaataggccgcgtgcgggatgtcttgacgctcaatggcgtggcctactgcgcttgggatttggaagcggcgctgcttgacgatttgcacggttgtctggattacgccatacaaatagatcgggacggtaaacaggatgtcctgaacattacggttgaaatgtttgatgagggaaccaataccgcatctgttctcacaaccgtcgagaatgcgatgatgaaaaaaattgcgggtgtgcgagttaaccttgtcgttggcaaaaccagtgcggtgacctcaacctccgcgatggtcagctggaaagccgcccgtctgcacgatctacggcctgcggcggataacagcgatcgccaatccgcgctggaattgatcaaaaaagggtttaaataa

SEQ ID NO: 457117 - DNA, 2445 bp, Serratia marcescens
atggtatctgtgcaagcccatgagtacagttttaatactgatgtattggacgttaatgatcgaaaaaatatcgatttagaccagttttctcgtagtggttatatcatgcctggcaactatgtcatggtggtacatattaataaacaagagttgctggaacagccggtagatttttatgtaccggatgacgatccgaagggtagtgaagcctgtgtgacgctggcgttagtggagcaattaggcctaaaacctgaaatgaaggacaagttgacctggtggcatcaacaacagtgtctggtgcctggcagcctgcctgggatgagcgtcaaaggagatttgggagcagcaacgttatacctgagtattccacaagcttatctggaatataccgctgatgattgggatccaccatcgcgttgggacgaagggattcctggactgttggtggattacaacttcaacggtcagacccagcggcaacagaacaatggtacgcaagactatagcctcagcggtaatggagtcgtaggggctaatttgggcccttggcgattacgtgccgactggcaaacaagaatcagccatcagaccggttctggacaaccgacacagcacgattgggattggagccgctattacgcttatcgggcagttgcacgtttaggtgccaagttcatgatgggggagaactacctaagttctgatatttttgacagtttccgttttattggcgccagtttgatgacggatgacaaaatgttgccgccgaatctgcgaggttatgcaccggaagttactggcgtagctaaaactaatgccagagtgattattagtcaacaaggccgagtattgcaggaaacacaggtggcatcagggccgtttcgtattcaggatattaatggtgcggtctccggtgaattagatattcggatcgaagagcaggatggcagtgtgcaggcattcaaaatggaaacagccagcataccctatctgactcgccctggttttgttcgctacaaagtagcgattggacgccccaatgactggcaacatcatgttaatggtccattttttgctaccggagagttttcctggggggttaacaatggttggtcgttatatggcggtggcgttttaggcgacgattataatgcgttggccttggggattggccgtgatctgctgatgtttggtgcattgtcattcgacgttacgcagtcccgtgcccgtttacccaacgaagatgagaaattaggtggcggttcttatcgtttgagctattccaagcgttttgatgattatggcagtcaagttactttcgcgggctatcgtttttcacagcaaaactacatgagtatgagtgaatatttggatacccgtcgcgatggcgctcgcacacaaaatagcaaagagatgtacaccgtcacctttaatcaggagtttcaagaattaggattgagtgcttatttgaattatcagcaccaaacttattgggacaggccagataacgatcgctatagcctgactatgtcgagctacttcgatattggaagattcagaaacctgagtctatcaatgacggcatatcgcaataaatacaatggaataaacgatgatggtatgtatttgtcgttatcagtaccctggggtaacagcggctcatatagtttcaatagcagttgggatcgtgacgacaatacccagcaggttagctacaacgaccggataggcggccatgatacttaccagttaagtgccggatcatcacgaagcggagctgttgctaatggttcttatactcatgatggggatagtgcccaggtgaatgctaatgccagttatcagtctggacgttattcctccctggggttgtcgttacgaggcggagcgacggctacgttgaagggggctgctctgcaccgtgcaggtactttaggtgacacccgtatactgctggatactggcggtgtggcgggggttccgatccaaggttatggcgccagtactgaatccaatcgtttcggcaaagtggttgtcacagatgttggcagttactaccgtaatcgggtgagtatagatctgaaccatctgccggatgatgcggaagttgccagatcggtagtgcaggccacattgaccgagggggcgatcggttatcggcactttgaagtcatcgccggtgaaaaagccatggcggttatccgcctggctgatggttctactccaccatttggcgctacggtgctgaataaaaaacgtcaggaggtcggcatagtggatgaaggcggtagtgtttatctgagcggcatcaatgttgatgagacgatgaccgtacattgggccggacgagcgcagtgcgaattaaagttgcccggtgtgctacctaacagcggtgtaacggatttgctgttaccttgccgcctactgaaagaaaaaacgatttga

SEQ ID NO: 457118 - DNA, 750 bp, Serratia marcescens
atgaaactgaaaatggcaacaccactgttcactggcgcattatttttcgtcctgatggcgcaatcggctcaggccgccatcgctttagatcgcactcgggtaatttatgacggcggccagaaatctattagcttgaatataagcaatgaaaataagcagcttccctatttagctcagggctggattgaggatgcagagggcaacaagatcacttccccactaaccgttcttcctccggtgcagcgtgtggagccgggggctaagagccaggtcaaagtacagggactgccagctgccaatctgttggcgcaagaccgggagtcactgttctactttaacctacgtgagattccgccgcgtactgataaacccaatacgttacaaattgccttgcagacgcgcatcaaactgttctatcggccgaaagcgttaataactcactctaacgatacgccatggcaggaaaaaatcaccttgcgtaagcagggcaatagctacgtggtgaataatccgacgccgtattttgtcaccttggttgacggtagcagtagagtaaaaggggcgtcaataaaagattttgaaccgctgatggtggagcctaagagtcaaggaactctcacggctagcgttacagaactgggcaacagcccggtattgacctatatcaacgattatggtggtcgtccacagttgcagttccactgtagcggcggtaattgcacagccatgccggtgaaagacaataattga

SEQ ID NO: 457119 - DNA, 645 bp, Serratia marcescens
atgcaacgtagaacagggagagacagacgttcccggctatcacatcgtgaatgtcaccgaataactgcatggcgagtggtgccgttggtggttggtttcgtgttcttattgttgccaggcgcgcgtgcggcggatgattggcaggtagaggactccgtggggattttacgtgtgcatggtgctctgactgaaagtgcgtgtcggttagatatggcttcagtctggcaagacgttgatctgggggacattggtagtggccgcttaaggcgggttggcgatcgtggcaccccagtggctgtgcagctgaaactgaaagactgcttaccggtcccgtcagatatttgggatgtccggcacggcagtcgactgtggagtactgggcagccggcggtatccgtcagttttagtgcaccgtctgatgcagacaatccacagttggtgaatgtgcagggggccagcggtctggggctgcgtttaatggacgctcagggacgcgatgttcgtttggggagtcgcggtgcgccgttactattatcgccgggacaaaatgacttaacttatattcttgtcctggaacgtacccaggcaccgttacgggttggtgcttattgggcgcagttgaactttgggctgagctatgactag

SEQ ID NO: 457120 - DNA, 525 bp, Serratia marcescens
atgactagttttttaacgggtatggttgattctcgatatttgttacggctgtgtgtgggagggacgttgcttctgtcgggcggaggggtacaagcaataacaacaaatgtcaccgttaaggctgtggttctcgccccgcctccgtgtgagatcaataaggggttgactattgtggtggattttaaaaacgatgtgatgaccaatcaggtaaacgggagtaattatcgacaaccaattccctacagtgtgtcttgcagtggcaatactactaatgccatgacattacagatacagggaacgggagctggttttggtaatggcaatgtactcagtaccaatcaatcgaatttggggattgcactatttcactcaagtaccaatacaccgttgatactgaataagccgatatcgtttacctatccagcgatacctgcattgagtgctgcaccaattaagcgcagcggcagcaccctgacggcaggtgcattttctgccggtgcgacgctaaaagtcgattttcgatga

SEQ ID NO: 457121 - DNA, 486 bp, Serratia marcescens
atgtcgtgtgatttaaccgtgaaaatattactggtactgggtatgggaagttgtccatcattatgggcagcagataatctgttgttccgcggaacgcttattgaaccacttccgtgcgaaatcaacaatggtgggaaagtagatgtggattttaaagaagtaggggtaaataaggttaatggggtgaactatgaaaaaactatggattataaaattacctgcggtcctaacgcgactggaagagatatgacattgaccttgatcggtctacagactgactacgattctgctgcggttaagacgacggtacaaaacttggggattagggtactgcaaaacggtacgccgttgactctgaataaggcgataaacattaatccggctgatccgccgaaattgactgcggtgccagtaaaaaaaccgggtacggtattggagaaaggggatttctcagctaccgcaacgctgcaagctaagtatcagtag

SEQ ID NO: 457122 - DNA, 558 bp, Serratia marcescens
atgaaatctaacgataagttcggcggatgttggatattactggggctgatgagttcactaatgctgtgtatgaagaccctggctgccgacacctctacagataatacgttctttcatggagcgctagttgctgagccatgcgtaatcctgccaggggaagagagcatttcgctggcattttttccactgcttgacaccgatctgtatctgaataagcgcacccgtgggcagcaattttatttacacttaactgggtgtgatattagtcaggtgaatacggtgagggtgatgtttagtggtaatgaggatcctgctttacctggattgttggcactggcgtctagtagccaggcatctggtattgctatcggtttggagagtagtgatggtgagtttatctcgttgaaccaaaaagggccaaggtacaatcttcttaaaggagataatgtgtttgacttcaatgcctatgtgcagggtgaacccgaggcaatagctaaaaaaagaattagacgtggtgcgtttagggcgacagcgacttttaacgtagaatatgaatga

SEQ ID NO: 457123 - DNA, 786 bp, Serratia marcescens
atgttaagatttttaatattttttattattctcggtataagttcaacatcttactcattcacgaataaagtgacttccgttagtatatctggtggcggtagcgtgggccagactctgacgattcagtggggaacgggggcagataattcggcagtacctctaccggctgcgggtaaccgatacgagcttctggcatatgcgaaacacatgagtggcaggacacaatgggcaccattggctcagacagggcctgtccctggaggacctgcgcttggggggaatagtattgttggtaaaacatggagtgagttggcacaaatgtgggttcagcgtttcggcccaacgggaccttatagggtcggcccactcccatttttagaaacgattgaagtgtgttttgctaccggaccttggtcgtcgccccagatattacgttcctcgtgtttgaaaccaggagctccccctgttgtggagtgtagagtgggtggaaccttaacgatcgatcatggggtattggcggcagccaaggtgaataatgcctacgcaagccagccgttatatttaacttgtagcggtgaaaccaatcttcgggtacatgtttctccatactgggtttacatgggaggagggcttttatcaatgatcagtgtaaatggtatctctagtgatcaaacattgaaggtaggaggatcaactacattaacaataggttcacgattgtctggcactgctgtttccccaggagtacataccggttttacggtgatttctcttgatataatataa

SEQ ID NO: 457124 - DNA, 1194 bp, Serratia marcescens
ttgttttttttcactcagctatggaaaagaaaggatcggaaagatgttttttctgatttagcagaacataaaacattctatctggtttctgctgccggtatgccaaattttggcgatgatatgttgacgcgctattggattgaggaactacagcagaggttccctggctgtactatttatctcgatgcggtcgatgcagtagtggcagccaagttgttcccacatattaagtgtgtcgattatttatggcgactggcacaggcattaggcaatgatggatctatagaggataaatttagcgataggtatacgatgcctttacgtgaacgtttaatgtctgaagtatttaattctgtggaaagcattcatttgcttggtggcggttatatcaatgagctttggggagcgaatcgccggttagttgaactggtggcatacttcgggaaaataaatcaaattcattgttatgcgaccggactggggttgctgccgctttcttctgaaaatgcggctaaaatggccccttccattcgaaaatttacgcagttcgatgttcgtgacaaagctagttatgatgttttggccccctttgaactgcctgcactgaatttttctggggatgattacttctcttttcctttacatccagtaggcaatatcgttcctcaggagtcagcaactctgcatctgtgcatccataccgaattatctgaaaatgaagtgctgacagcggatttgctggcgctattacaaccagttgcggcacatttttgccaacataatgctaacgcgacaatccgtttctatgagtttcgccccggctctgatggggtattttttcagcaagttcaaaaactgttaccgactgtagaattcgtgacgtttgaacaaatttggcaagatggcctggcattttccactcatgattactgcatcagttcgcgttttcatttccaggttattgctgccagccttggggtggcgggggtgtcgttatcttggtcagattactatgacaataaattttccagtctgaagcaaatatctgattggcccgtgcttcgcccagatgtagcaccggaggtgctgatttcgcagctgtttatgccttcaccatcgactgaccgaaagcagggcaaagaatggactcaccaggccaaagctcggttattggcacagatgtacaatttttga

SEQ ID NO: 457125 - DNA, 1116 bp, Serratia marcescens
atgattcagcccgagacatttggagctgaaaacgcccgagaactgaatgaggatgatagagaacaagaaattacttatgcaacagtagcacagtatcctcagcccgttgatcctgaagattttgaattcagaagcggtggggcgcatatcctttttacccatgcaattaaccagaaattggtaacggtgaacagggggaaaaatgatggtcaatccagtggtttctccgtatgtactgagtgtggtgctgcttcagtgtttgattcctactccccagtaaaagggccgcataaaaggccttatagatataatgaaaccaaagagacaccgccacaatgttctggtgaatataaacgtgtttttcttggacatgatttccgtactgatttgcttttactaaggttaactgttaattccccacttgtaactgacacttcaaatgtgattgtgcttagaatgtacgaggacgcattatactcaatcgctgaagcactgcgactcgcagctagtcgccataagcagctagatctcgatccggccgagttcggctctggtttcaggattttacctgttgaggcagaagacgctcagacgttagatctttttctttatgatactttatctggcggtgctggttatgctgaggtcgctgcttctaatctggaagaaatacttatagcaactctcgatttactcgaaggttgtgagtgtggcacttcctgtacagagtgtttgaatcatttccataatcagcacatccagagtcgccttgatagaaaactaggtgcttctttgctccgttatgcaatatacggtgaagtgccgagttgttcctcaaatgatattcaggtggaaaaactgtcgcagttgagggcgagcttagagctagatggttttcaatgttcagaggatagggccctggacgtgcctttggtcgtttccttaaatggccattctgtagctttgggaagctatcctggcctgattgacagacctgagtttgagcatggtgtctgtaattgcaaaaaagtcgatgatcatttggcgttgaacgaatatcttctccgttcaaatcttcctcaagcacatctcaaagttagaagattgttacgataa

SEQ ID NO: 457126 - DNA, 1035 bp, Serratia marcescens
atgaatgcaattccaagcacaaatatccatgcattcattggtaggaatggttgtgggaagacaaccattcttaatgaaatgatcgaagcaataactacccccactcgcgaagatgtattttttactgaaaagggtagattcagtgaaaatagaattccaaatgggtacttcaggtcactaatatctgtgtcatttagcgcatttgatccattctctcccccccaggaacagcctgatccatcaaaagggactcagtatttttacatcggactgaaagatgtaaataataaaaacctcaaatctcttcgtgaccttcaaattgaatttgtaacgtcccttataggttgtttaagagtggagtggaaaaagaaaatatggcttggcgcaatagataatctaagtagcgatagaaacttcgcggatatggggttaagcatcctacaaacaagatataccaatcttagaaattcttatgttcatcatcaggtagataacgttatttttcgagatgcattattccaagacatacaaaaatacttatcgagaatgagttctggccatgccattgttttatttaccattacaaaattagtggatacagttggtgaaaaatcacttgtgttgctcgatgaacccgaaggacatcttcatccaccgttgctctcggcatttttacgctcattaagcgatttattatatgcacaaaatggtgtggctattatcgcaacacactcaccagtggttctacaagagatccccaagtccaatgtttggaagatattacgctctcgagaggcaacaaatattaccaggccagatatcgaaacttttggtgagaacttgggtgtactgactagagaagttttttctttggaaattatgaattctggatatcatgcgttgctagcaaagtctgtggccagcggtctatcttatgatgatatactaactcaatataaaaacaagattggcctagagggtagaacggttttaaaagcaatggttctaagtcgtgatgcaggggataagaaatga

SEQ ID NO: 457127 - DNA, 129 bp, Serratia marcescens
atgatgaacttcttgtttcgtctggtgaaaaatgtccattttgcggagatattgggcaaactaaaaaccttgatcactttttacctaaagcccatttcccagaattttcaatcatgcctcttaatttag

SEQ ID NO: 457128 - DNA, 150 bp, Serratia marcescens
atgattaaaggcacgatccttgtcctcttgtctccaattgattgggcattgaacataatagctgatagctccatcatcttcatcaatataatcagcaaaaacccactgtacttgaaagaaaatgtctttgtcaataaatggatgaagtga

SEQ ID NO: 457129 - DNA, 144 bp, Serratia marcescens
atgttttactatttgaggatcgcctacgccaaaagcatggacatgatggctacgttgatcttcgcctttagtgaaatatctgcgatttggaatcccattttcaccacgaacacggtatccggcacgctccattgcaacgtttaa

SEQ ID NO: 457130 - DNA, 240 bp, Serratia marcescens
atgagtgctgatttcgaaattgatttttttagcgataataagtatgaagaaatatctgttgaaatatcctacaaagggcagatcctttgccaaatgaataaggataaaggtgttttaaatatagaggtggagtttttctttgattccaggttgctagctagtcaggtaacgaaaaaattcccgctggatgaatttattaatgttttaaatgaagcgaggcaagatcttattacggcgtaa

SEQ ID NO: 457131 - DNA, 540 bp, Serratia marcescens
atgcgcatgaaaaaaattgcttatatcttatttttaccgttgatcttgttagctgtggataagagcgtggccagtgagaagcagggctgggggcgagtgagtatggtcggaacgatcatcgaatcggcctgtgcaatagatacagtcagccgtgaccagactattaatatgggcgtgatacctattagccaaatagcccgtgatggtcaaggtactcagcgatccttttcgattcgcttaatcaattgtattcagaatcatggcggggatatattgtcaagtcggcgaaattttcaaatcacgtttgacggaagcagtgtcgctggtgtgtttagcattaacggttcagctaaaggtgtgtcattacaaattgctgatgaaaaagggaatattgttactcccggaaggccgttacctttcggtagtagcttaacaaaaccgatgttgttaaattattctttacgtctggtgaataatcaccgaggtttacgtgctggggagtacagctcaacggtgaaatttaaaatggactattactga

SEQ ID NO: 457132 - DNA, 165 bp, Serratia marcescens
atggcgttgcgggttttcaggctgatcagcgccttgaaaataaccgtcgaggtggggttggtggcggggacgataccgcagatgaccccgatcggttcggcgatggtcagagtgccgaacgcctcatcttccgccagaatgccgcaggtcacttcgtccttgtag

SEQ ID NO: 457133 - DNA, 153 bp, Serratia marcescens
ttgaactttctgctaatacacatcaggcatattatggtacaaatgccctccatcctcatttaccaaatgctcatccgattaatcctgtggatagggatttattcaatcttgatcgtgaagcatattggcagagtcggggacaagcagaattga

SEQ ID NO: 457134 - DNA, 123 bp, Serratia marcescens
atgctcaatgtcgataatattaccgcccagtttaaaaaaaatggcgaaagtgatactcaggccaattattcctatggtggtaagggtccttactcgggcagttttccaaccgagcagaagtag

SEQ ID NO: 457135 - DNA, 603 bp, Serratia marcescens
atgcccaacaacctgcctttacggcaggtttttttgtatttgccgttccccctgcgccatcggcgatccgcccgagaaccctctgattgtcggccgcttttctgcacgctagtatccttttcaaggagagcggcacagggagaggagcgacaaatggatacggttgaagagttgggtggcagctatttttttgatgggatgattggattgtctgcgagtgaattagcattttggatagtggtcgatgaagccaggaagcagcttggcgtgagtgatatcttgtcacttgtgctgattattggtggtttacctctggtgcctgttcccggcaaactagatgccaaacgaacaaccaaagggacatcttatttatctctggcctcgagaaaacttatcacctatcagctaaatagttcttggaagacattaacctggaagaagatgctaaaaggaaaatggacgccgacaaagagtttaggggcatttgtcggccgttggcttccttggattggggtatttattactgcatatgatcttacgatgattggaacaaggtcgctgaagcgctataacctgctagtgaggccagaggatagattgtga

SEQ ID NO: 457136 - DNA, 282 bp, Serratia marcescens
atggttgtgacggaaaatgtaccgccgcggttacgtggccgtcttgcggtctggttgctggagatacgggcaggcgtttatgtcggagatatttctcgcaaagtacgtgaaatgatttggcagcaaattaccaccatggccgaagaaggaaatgtggttatggcgtgggccgcgaacaatgagtctggttttgcgtttcaaacatacggtaagaatcgtcgtattccggtggatttggatgggctgaggttagtgtcttttagacccattgaaaatcaatag

SEQ ID NO: 457137 - DNA, 654 bp, Serratia marcescens
atgtttctttcacgcgtcatgcttaatctagcaaaattgacgccggacatgtggctgaaatggcagtccataccgtcttatgccggtcatcaatggctatggcaactcttctccgaacagcaggaacgacggtttttatttcgccatgagagcacgcggcagggagagtgtttttatgtcctttcagacgttcagcctctgcacggcaatgggttgtttaccgttgaaagtaaatcgttttctcctcagctatccgaaggtatgcggctgacattcgcattacgcgccaacccggtggtaacccgcaaagggaagcgttgtgatgtaatgatggatgctaaataccgtgcgaaagagcagggtattgatcctggggaataccaggcaaagcaggtttcagcggcaacagagtggctaaagcagcagggagaaaaaagcggtttcttctctgacgacggccatattgaggttgccggcagccagcggcatcggtttgcgcgccgtaccggcgaacgcccggttagctataccagcgttgatttcaccggcagcctgacggttacggatgtgcctcttttcctgcgtactttgcaccatgggctagggaagagtaaggcgctggggtgcggcctgatgctgatacggcgaggctga

SEQ ID NO: 457138 - DNA, 2661 bp, Serratia marcescens
atggaacagcaacctgactattttcgctattggggaaaaacgctgcgtaaagatgatcccgctagcgcggcctaccatcttcttgtatggcataatctggatgttgcagcatgtggttggcaaatggtgatgagtaatcactttcatgcagcggatatctttgctgagctgggtttctcccgtgaggatgcggcgcagtggtttgcatgggtgcttgctgtccatgatatcgggaaatttgctcgtggtttccagcagttgtataccgaatcccatcctgctttagtccccgctgtgagtggaagatcttattgcgcacgtcatgattccctgggctactggctctgtaacgattatttattacctcgttgggaagatggaagtagtgatgctatcccgcagtgtggaaataaaagaaaagtcacacatgcgttggagaggtggttcaaaatcaccacaggccaccatggcaaaccaccgttgaaggagggcgatgtcaaaggcgaactggcgtttatgcatgatgacaagcttgcagcggaaaactggctggccgatttatctttattattaggggttgcggcgcttcctgaatgtttcagtgataaaacctggcgagaaaaattaaagcagcaaagttggttattagccgggctaaccgtcctggccgactggataggctcaaatcagacttatttccctttggtgagtgaggtgctcccgctcggcacatattggcaaacggctcaacgacaggcaaaaaaagcgctggcgcatttgccggcctcgtcatcggttcgagcttatcactcccatcaaaccctgttcccctttattcagcagttgaccccgttgcagttaaaagctgcgaatgctgatatttcaactcctggaccgcagttgttcatccttgaggatgtgactggtgcaggcaaaaccgaagccgcactgattttggcgcatcgtctgatgtctgttggcaagggcgatagcctgtatgtcgggctgccgacgatggcaacctctaacgccatgtttcaccgcttatctcgggcttatcggggtttatatgaggagcatgacacaccttctctggtgttggcgcacggtgctcgcgatatgtcggaggattttaatcattcgttatggagcggggacaatacagggcaggagggttatcaagcggacgaaagtgccgccagcagcgcttgcaaccgttggtttgcggattcccgcaagaaatccttactggcagaagtcggcgtcggaacgcttgatcaggtgctgatggcggccatgccgtttaatcatcagtcgctgcggttgctcgggctgtacggcaaaattttaattttagatgaggtccatgcttacgatagctatatggtgcgtctactggagggattgttgaccttccacgcggcgcaaggtggaagcgccattattctcagcgctactctccctttctcgttacgcaacaagttgcttcatgccttccagcgcggaactgctgggagcttgcctgtgccagagccggatgcgcaatatccctggttttctcagcttactgcgcagtcgttgcaggaaagttatacgcccacacggccggaagttatccgtcaggttgcggttgcctggttaactgaaattgaccaggcagttgaactgattgagcaggcggtagcggcggggcagtgtatttgctggatccgtaacactgtggatgatgcaacggcggtctaccgccagttgcaacaacgaggaaccattcctacagaagatctgctgctctttcatagtcggtttgcttttattgaccggatgaatattgaaaatcgggcgttggcttggtttggcaaagagagcatacagaaagaacgacgcggtaaggtactgattgccacccaggtcattgagcaaagcttggatatcgacctcgatatcatgatcagcgatctggcgccgattgacttattggtccagcgtgctgggcgccttcagcgtcaccaacgtggggcgcgacttgcaccggtattgcatgtgcttgcgcccgtttggcagcccgacccacagccagactggttgggtgaacatcttcaaggcagcggctttgtttacgccgaccatgcaaacctgtggcgcactcagtcgatacttcgggataaaggcatgctcaacatgccggaagacgcgcgtgagctggtcgaaagtgtctatgaggagtggattgagaccccggtcggattacagcgaggcagtgatattgaatttggcaaaatcctgagtaagcgcgaggcggcggcgcaggtcttgctggctcgtgaccaaggctacgattataaagcgagtgattacttttggaacgatgtggagttatccacccgtttaagtgaggcatccatcgatctgtatcttgcctggcaggacggcaccccctacgccagcagcgagcatttcccctgggagcaaagccgcatcgcggtccgcgaaactttgtggaacgaactggctggggatatcccacatctcaatggtaaagcattggaacaccaccgtcgtgaaatccgtaacccgcaggctcaggtagcagtgatcacccgcagcgaagagtgtgggttttatagcaaggaatgggggcttatcagccatatcggtaaatag

SEQ ID NO: 457139 - DNA, 204 bp, Serratia marcescens
atggatgcgccaggcagcgatcaggctgacttcctgatcaaccatgatagacacaacatcatgagggatcacttcgtcgtcgttgtcgccagcgtgataggggacgtccgcccaatcattactgatgaggcgttcgtattcatcgattggcagtacaacatactgcggttttcctgccacatcgttaatgtattgaggttttga

SEQ ID NO: 457140 - DNA, 315 bp, Serratia marcescens
atgcagttcaccgtatacagtaacaccgggaaaagtgctgtctatcctctgctgcttgacgttacaagcgacattattggtcaacttaacaggaggattgtgatccccctgttgccggtagaaaagtatcctagcagcacccggccggagcgcctggttccgactgtcaggctgaccgatgataaagagtacgccgttatgacgcatgaaatggcaagtattccagcccgttctctcggcgccgtattctgtgacgcgtcgctttaccgctcacaagtcaaagccgctattgattttattttcgacggtatctag

SEQ ID NO: 457141 - DNA, 237 bp, Serratia marcescens
atgggcacaacacagcgagcaacccagagcgttacgatgacagtggagcgtgggttacttaatcgtgcacgtgaagcagggattaacctcagtgcgaccttaactgcagccctggacgcagagctacgccagcacgaagcgaagagatggcaggaggaaaacagggaaggcttagaagccttgaaccgcttccacgaggaacacggttgtttcagcgatgaatacaggacgttttaa

SEQ ID NO: 457142 - DNA, 825 bp, Serratia marcescens
atggcaaaaacccgcaaaaaatttcgcgtgatgacttccggcaccaccattgacggccgaaaggtaacccgcgatcagctccacgcgatggcagcatcctataacccgtcggtttacggtgcccgcgtcaacgtcgagcacatcttgtccccgttccccgacagcgccttttgcgcaatgggggatgtgactgccctaaccgctgaggatatctctgaggggccgtttgccggtgaggccgcgctcttcgcagaaatcgagccaacggcccgcatgaccgcactgatcgacgacggaaaaaaggtttattccagcgttgaaatccaccccaaccttgacaccacgggcggcccttacctggtcggcctggcgatgaccgattcgccggcaagcctgggcacggaaaggattaagtttgctgccgagaagcgtggggaaatcatgcgctttagcgccgcagacgccgagccgacgctctttaccgaagcggtagaagctgagctgattgagctgcacgctcagcgcagcgatgaagggaagcagtggtttaaccgcgtcatggggatccttgggaaaggcaagaagacggacgatcagcgctttacccaggtgcatgaagcggtggaagccgtggcgcaatcccaggccgatatgcaggaccaattcagccgtaccgaacaggcgcaggaaagtaaccagcaggccattaccaagctgactgccgacctcgccgcgctgcagcagaaggtcgccggcaccgacggcaacttcagccaccgaccgcctgccagcgggggtaacaacgcgcagatggccgattactga

SEQ ID NO: 457143 - DNA, 297 bp, Serratia marcescens
atgtcatgggggaaagcgattttgcaaactgcaaggttcgttaagaacgccgctctattcgttgtgtgtttcatagtcgcgtttgtgctgtcgatgcacggcatgccgttgaatgctccaacgttagccatcgtggattacgcctatcagaccttcggccactcattagctggtaactatgaacaaggtgctgacccggtatcattcaccgcgattcttgtagctaatctggtctacgcccttatccttttcgccctaataaaacgaatcgcaaaaaccttcaacaagaaaagctaa

SEQ ID NO: 457144 - DNA, 360 bp, Serratia marcescens
atgctgcgtctgaacgagcgcattacctcggtggatacgccgctgggtggtgactcggagaaagcgctgctggatattctggctgacgaaaaggacaacggaccggaagacaccacgcaggacgatgatatgaaacagagcatcgtcaaatggctgttcgaactgaacgccaagcagcgtgaagtgctggcgcgacgtttcggcctgctgggttatgaagcggcgacgctggaagacgttggtcgcgagattggcctgacgcgtgagcgcgtgcgtcagattcaggtggaagggctgcgtcgcctgcgtgaaatcctgcagacgcaagggttgagcattgaggcgctgttccgcgaataa

SEQ ID NO: 457145 - DNA, 324 bp, Serratia marcescens
atgaacgattatgaacagcaactgcgtcaaaatggtttttcagctaaagatatccgtaagttgaatcgggttcttcagaggagcgagagcaggggcgatacgattcaggggctaattctggacctcagcagacggttttggggcggggttataggtttggtgctgttggcactgattggtttatacggcgtgttggcagccgataaggccagtgcggtttcctatctcattgtgctgctttttggcgcggcggctatctaccttgttactccgctgaacctctcctggaaatcctacagattccagaagaagcacaggaattag

SEQ ID NO: 457146 - DNA, 651 bp, Serratia marcescens
atgttgtgcgtcatcacgctcccggctggcctgatttacgctgccaaccgcctgagaaagttcacttcttgcactatccaacgcccctctgacggcattcaattctccctggcgctgagcaacgaatttgtcccagcttgcgacctccgcagaccagccgcgcccaaactcatgaggagggttattgctaataaactcatcacgccgatcttccgcattctttacagctgcttcagcttgacggaccgccgtttctctttccgccagtctgcgttcggcacccgccttattctgttgtgcttgttgaatgcgttgctgcgtctcattgagctgttgctcaatgatagcaatgcgcgttccccagtccgtcatggctgccggttgccgccagttggcactaacgcctttaaccagcaattttgtcgcctggaacaaaatgctgccgttagataccagcgtcatcaagccgccagcattcaactcactgccttgttgggtggtactttcggtaaattcattacctccttcacgataggtatgattttgcacggcctcaaaacgcatattgccgccagaagtcaaagtcatattcctaccggaagtcaggttggcgccgtaggccaacagctggttattcgccgccgccgttaa

SEQ ID NO: 457147 - DNA, 501 bp, Serratia marcescens
atggtcaccgtcccttttttgaccgtcagcgcttccagcgccccctgtttatcaaactgcggttttccggtggtcaacgtcacccccggagtattgataaagccgcaaccatcacaggtaatcccattcgggttagcaatcattacgttggctttattaccgaagacctcaagcttgccttttaattctgaacgattaccgccgatcacttcgttgatgatcaattccgcagggcgaccattaagctttagattacctttagcattaataatatcaacgcccaactgggttttcccgcttttaatagaattattcaataccgccccgggggagccaacattaaaatccttatatgtattatgtgaaataccggcaccgttgggggtcgctatatttactacgggtacgttccccggtttaatcaccacttgggtattaccattagcggcggtaataccggcagcgaatgccggatgcaacggttgtaacgccgtcaggtaa

SEQ ID NO: 457148 - DNA, 798 bp, Serratia marcescens
atgacaacgattattcgcaacttagatatggaaattaaaaatccgactctgccaccgctgttcgagccgttcacgtcagtgccaggcctgattgctggctggcggttcggtgaaggttttagcgatctctctgggaacggacatacactgaaagagatcggaaaccccggtgtcggtgaatattttgtgaccggtgacaaagacaacgggtttattacagacgtgcccgacggactgcaacgcacgataattaccgtatatcgacaagccgcggacgtgaacacattcggttatccggcgggcaatattgtgcagaacgtatcaacgaacggcgaaggggtggcgattgttaatacatcagttgatgccctgcgccggcgttctctatatgtcggcgggaaatcatacaatgcagcattgtacggaaaatctcttggtccatcagaacccaccgcgagccgcaataattttgcattttcagcagcaacaatcgacggtgctggtaacgccgccggacttttcgttccgtctgcgagcgcagacattatccccgctacgctggcgagcggtgtaaatcttgctgatcgatcaatcacagaatccggtgctgagtcattttaccgcgtaattgcatggcgcagctctaacctgccaccagtgccgccgtcgagccctaacacgggtcttgctgtcgcagagatattgttttatgaccgtgctctgtcactgagtgatctgaatacgcagtacggacgatcaaaacgatatttcaaaacgaactacaacgtcgatatttag

SEQ ID NO: 457149 - DNA, 2316 bp, Serratia marcescens
atgtcggcaggcacaataacattaacgaataattccgatgcggtaactggcgcaggaactgcatttacaaaagacctaaatcccggtgattttatcgtgtcagttgtcggcggcgtcacgtatacgctcgctgtaaaaacagtcgatagcagcacgaaagttacattgctgaaagcttacgacggaccaacccaatcaggcgccgcgtggtctgctgtcccgcgtgatgcgatgaacgcaatcactgcacagcttgcagcggagactgctaaagcgttgcgcgggctgaattatgataaggagaattggcagcgtttttttgttgatgatggcaatatcacaataacattacccgacaacagcaaatcaacagggccgtcagctaaaaaaataattagcggcgtatcagatgaagcagacagggcggagtcagcggcggatagggctgaaagcgtagccgatgcgaacacatatcacataactccagatgacccggacggcactatcgctggcatcgcaggaactgaaagcggaaagtattttcgcgtagcccagggagcagggaacgggtttaaatattatttgaacgataatggaacagcaattgaggtttcagaagttgtgggtgcggcagctgttgaacgagcaatatcatcagcaaataaatctctcgaacaaagtggagagattaataaacgcacgcgggggtacggtgttgagaaaaaagtttatgacgcagagggagtattaatcggcggcggtttttttgacgcaaaaggtgcgtcggcactgaactatacagaaaacggtgatgtgaatatcgccggtgcgcagttcaaaaacatccctcaccatcccgaatatgactgggcgcagacagataaaaacaacgtgccgtacattggcggctcaaaaatgggcggtgtcattattggtcgcgttgagattgtagaaataccggggccgcccggcgtcgtatttgtcgataaaaattacatcccttacgccgccgatccgagctatgacactgatttggatatacccatcatcggtggctcatcaacgccaccagttacgccgccaccgccgtttcggccctacgattacatgggggtacgcagcgaagggcagtcgctatcactcggcgtcgctaatcccgcagatgatcctcagcctatcagtacagtacaaaaatacgcgaatcgggggtttagcaacaataacaacagcggtacgactgacacagatacactcgtgccactcgttgaaaaacggtatcaaccagcagctggcacatggcccggtgcagaaacaccagtcacgggtgctacgcataaaatcgttgaaatgattcaggcggaaactggcctgtcgtttgaccgccagcccagcgcatatatcggttctgcgcccggcacgggcggccaaccgataaagaatctgattaaaggcacggcggcatacgagcgaatgatcgctcacattacaaacagtctgcgcctggcagccggagagggaaaaacttttgccgaactggcaactatttggatgcagggtgagggtgattatcgtgaccagacatcgcgcgctgactatctcgcgatttatctgcagtacatcgaggattcactcgcagacaaaaaatcaattacaggccagctctttgaccccatttttatcagctaccagctcagcacgcaccgggcatacagcagaacgaatccgaccatcgcgctggcgctgcgtgatgctgccattctcggtaaaacggaaatagcgttcccgggatacatcggcgactactacacatcagactatatccacggcatcccagagacgtattacatgttttcgcagtatacgggccgcatgatttacaaaaagcagcgggacatgctggagggcgtgacgcgcatgcatcgtcttgatgtgatcgatgaaatccggcagggcatcttcactatgctctatttcaacgtaccgactccgccgctggtgttcgataccgactgggtgacagcggcagaaaatatgggattccacatccgcgacaatacgtcgctcgacgtcatcgacgttattactgccgtcaatattgccggccccgaccgtgtccgcatcacgacatcacgcccgcttaaaaaaaatgaaattgtaacgtatggatgggggaaagccggtgacccgttgacgaatggcaggacgacagggccacgcggcaacctgcgcgatagcgagggtgatttgctgggagagagctacacagacggcgcaggcgtgctgcgcaaactgcacaactggtgcgtaattttttga

SEQ ID NO: 457150 - DNA, 993 bp, Serratia marcescens
atggctgaatttggtatagaggtgcgcgcactaaatgggcgcatgattaacatgagcagcggcatgcgaatgtgccgcctcgttcagtccggtttcaaaattaacggttccagcgataagcgcgaatatgattattcgcgatatacagaaataccagggttatctgaaaatagcgatatcatcattaatttcgaccagttcctgtggtggcaagcgccggcaagatacgcaaaatcatataacagagagggtaatggtgttagggtttattacagaaaagaaaacatgtttgctattgttggtgatttaaccggtgatgtattcgaactgcttaatccgaacgatgtgccagattatggcattttattgacggattctgtgcagccggcagtaatcggtaaaaatcagatagcgtatattacgcacatggaaactataaacttcacgggcaactggtcgttaccgagtgattttccatatcgagacaactctatgatatttgccggatggcatcataatagcgttgccgtagtgcctaatgggagaaatggcatcagtggttatattcgtactggagatgagagtgttagccaaaactttaacatcccaatgcgaataatggtgatgagtcaaattccagatttgcaaataccagattacggcattcagatatttaatcagcacggtgaaacaacattttgctctggatacacgccattgtgttaccacacatacgatgttcgtaatgccgatgggtttaaaaattatggaataaataaccccatggtaaacgtgcaactttatggctgcagggcaaccggtagcagcagacgcacccaggtatgtcagcgcggtttatgcattcgtgatgacggtagcattggcgctgcagacggtgatttttatgttcgtgggagtagttccgttgttggcaatgtgaccgtaaatttcactcagccgctgcttgtcattgacagtgatagatatttttag

SEQ ID NO: 457151 - DNA, 3216 bp, Serratia marcescens
atgggcgaaatcatggaaaaaatcattcaggggcggaaaggtggtggtggcggtggccacactccgactgaatcacccgacagtatccagtccattgcgcgcgccaaaatactgctggcgctcggtgagggggagttcgccggcggcctggacggcacgaatatttttctcgatggtacgccgctgcaggctccagacggcacatcaaattttcccggtgtgcagtgggaatttcgcccgggaacgcagtcgcagagctatatccagggcatcccaggcgcagagaacgaaatcagcatcggcaccgaactaaaatcctcccagccttgggtacggtcaatcagcaatacgcagctgtctgccgttcgcctgcgcatcggctggccgacgctgctgcgccagcaggataacggcgaccgcgttggtacgcgtgttgagtatgcgatcgacctttcgaccgatggcggcgcgtatcagacggtgctgaacggcgcggtagacgacaagacaacgacgctgtacgagcgcagtcaccgcgttgatctgccgaaagccacgaccggctggcagatacgcatgcggcgcttaacgccagattcaacatccacaaacatcgtcgatcgcatgaacgtcgaagcaatcactgaagtgatcgacgcaaaactgcgttacccgaatactgcgctgctgttcgtctcttacgacgcaaagcagtttcagaatatcccgcgcatcagctgcaagcccgacgggcggataatccgggttccgacgaactatgaccctgcgacccgcacctacagcggcgtatgggacggctcgttcaagtgggcttactcgaacaacccagcgtgggtgttctatgacattctgctcgataggcgtttcggtctcggcgaccgcttagacgcgacgcaagttgacgaagtggagctgtaccgcatcgcccaatactgcgatcaactcgtgccagacggccggggcggcgaggggaaagagccgcggttcctgtgcgacgtctacattcagtcgcagaatgaagcgttcacagtgttgcgtgatatagcgtcaattttcagagggatgacatactgggccaacaatcaggcctgcgcgctggctgacatgccgcgcgacattgattacgtctacacccgcgcaaacgtcatcgacggcaaattccactaccagggtggcagtcagaaaaaccgatactcgatggcaatggtgagttggtcaaacccgaacaaccattaccaagacgaagttgaggcagtttcagaaaacgatctggtgcgtcgatacaatgttaaccaaaccgagatatctgcgatcggctgcacacggcagaccgaggcaaatcggcgagggcggtgggcactgctgacaaacagcaaggaccgcagcgtatcattttctactggccttgatggctttatcccgctacccgggcggattatcggcgtcgccgaccagatgctatccgggcgcgtgctgggtgggcgcatttcttcagttggcggccgaaacatcacgctcgaccgtcttgccgatgtaaaagccggtgatcggctgcaggttaatctgccatctggcaaatcacaggcgcgtaccgtgacagctgtgaacgagcgtactgtcacagtgtcgacgccgtacagcgagacgccggaggtcgaagcggtgtggtcggtggacgctgacgatctcgtggtgcagcagtaccgtgtttcgactgtcactgataacgatgatgggacatttacaattaccgcggtctggcatgacccgggtaaatacgacgccattgataccggcgcgcggctggatgagcggccgatcagcgtcatccctcccggcgttcaggcaccgctgaaaaacatcacgatcgacagttattcatccgtacgccaggggattgcagtcacgacgatgcgcgcggcgtgggatgcagtggataacgcggtggcgtatgaggccgagtggcgcaaagacagcggtggctgggtatcgatgccgcgcacctcggctctcggctttgaagtgcctggtatttatgccggccgttatctggtacgcgtacgagcgatcaatgcgagcgacgtatcgtctatctgggcgacgtcgatggaaacccatctgaaaggtaaagagggcaagccaccgctgccggtagggttcgctgccgccgaactgctgtggggagtccgtctgtcttggggattcccgaccggcgccgaggacacactgaaaactgaaattgagtatgcagacaacgccgctggcgaacgcgcgctgctgctcgctgacgtgccatatcctcagcgcagctatgagcaaatggggttgaaagccggacaggagttctggtatcgcgcgcgacttatcgaccgtaccggcaaccaaggtgactggactggatggattagaggtcagtcaaacgcagataccggcgattatctcgagggcatcggcgatgggttcctgacagacaaagacggcgaacgcctggccagcgacatagatacgaatattgaagccatattgcagaatgcgctagccaacaacgcgacggttgagcaccagtgggcgcagtacggcacagtacgggctgatattctggttgtgaaaaccacgatagcagaagtcgatcacgcactagccgaactgtctacccaggtgcgggcacaaatcggtgatataacggcagtgctggaagataaattgacggccacggtagacgccgacggcgccacagctattcacacgctgaaagctggcgtgcgcgtgaacggcgttttctacaatgccggcatgtcgattgctgtactggcagaaaatggtaaaccaccggtgacgcgcatcggattcaacgcgaatcagtttgtcctgatgagcggcagcggtgatacgcaatattcgccatttgccgtagttaacggccagacatttattaatgatgcgtttattcaggatgcctctatcacgtcagcgaaaatcaaagatgcatcaataacgagcgcaaaaatatctgagtccatacagtcagataattttgttgaccgcacacagggaatttctcttaacttccgaaacggtaacttccagttaaacggaaatgtgccggggcaggggcgtaaagaatccaataatttatacgatgcctggtatgacggagggaataatctgatgataaaaatcggcaagctaaggtaa

SEQ ID NO: 457152 - DNA, 606 bp, Serratia marcescens
atggtaaattttttatggcggcaaccgctgtggcatttttcatcgcatctggcgacggcggggcattctgggaggggatactatacggactggattcaatttttgactccaaggctggctattgagcaatcacccggcgcgagccgggtttttattgcctctccgtatccctttggtaacatgttgcgacttgttaccgtatatgggaaagggatgaaaatgaaaagggttgtggtaatggttgtattgtccatggctttgactgcatgtaaaccaacagagcaaaaagctatagatctcgcgcaaaaggaaatagctttggacttgaaggatccggatagtgctaaattccggtttgttcgtgtggcaaagacccaagaaaaagaggatggtacggttttagcattggtatgcggtcaagtgaatgctaaaaatggcttcggcgcttatgccggatttcactctttcatgatcgatgtcagcatgaaaagtaaggggatgtttagtcgaagtgtaagttacaacgtcggtaacaagcaactctccaccgcagatgataagagtgacattatcgggtatgcagagatgtgtggtgcagactcttaa

SEQ ID NO: 457153 - DNA, 342 bp, Serratia marcescens
atgtccatagaaacttttacttggcgagttcaggggcagccagaggggaacctgaatcaacgggtgcgaactgcgcaatttggcgacagctataagcaggtgtccggcgatggcattaacccagaaacccaaacttggcccctatcgttcagcggccaaaaaacggacatgcagcagctgctggcgttcgtgcgccggcacaccaccaaatccttcatctggacgccgccgctgggcgaacaggggttgtatagagtcgttgctgactccatacggacggtaccgatcggcggcatggcgtattcaatatcagtgacctttgagcaggcctacgcgccatag

SEQ ID NO: 457154 - DNA, 183 bp, Serratia marcescens
atgaaatcgactgacctgataaaggaattgactgctgccgggtgtgaacttaaacggcataacgggggaagccatcagatatggtggtcaccaataaccggaaaaaccttcccggttccgcatccgaaaaaagatttacccctcggcactgtcaaatccatcaagaaaatggcggggatctaa

SEQ ID NO: 457155 - DNA, 438 bp, Serratia marcescens
atgttcttctcagtgggcgtcgaaacgccaaaagatgaaaacacagcatacggcctgattgttcctgcattttcagcttacgattacgggtgtttctcggctgctgatactcaggagcaaatcgcctcaatggtgagagaggcgatcctgttgaccgttgaggatatggtttccagcggcaaatggtcagttgaccagataaaagatgccgggcacctggtctatgctgcaaaccctgaatatgcagatttcgatagctggtttgttatcgacattgatctatctgaattcgagggtaagcaacagcgcataaacatcgcgttgccagatactctgatccgccgcattgataatcgggttaaagaaaacccgacggcatatcgcgatcgcagccactttattgccgaggctgcgcggcacgaactgtcatcagactga

SEQ ID NO: 457156 - DNA, 3204 bp, Serratia marcescens
atgacagacattgcatcgatctccctgcgcgtcgataccggtgacctgcagcgcggtaataacgagctcgataaattccagaagacggccgccggtgcggccggtgccgctgatggcttcaataaatccggtaaaggcaccgctgcggtgtcaaaggaagtcgcgcgcgaagtcgaggaaacccataagcgggtggcggagttcaaccgccggctgcgcgagacgcaggccacagcaacaacgtctggccgggtgcaagaccagctcaccgagtcatatttccgccagattgatcgcatcaagcagctcggcaccggcatgcaggagctgcgcgccgttcaagcccgcgtgcgtgccgaccgtgccgcgggcaatatcacacagaacgactatctggcactggtcagccagaccgcagcgaaagaacgggagctggcgcaggcggagcgcgtggcggccattgccaaagaggcctacctgcagaaactgcgtgaccaggtagaactgcagggaaaaacggcgtcacagatgcaggagtatcgggccgcacaactcggcgtgactgagcaggcggcgccgctcattgcccggctacgcgagcaggagaacgcctggaggcgcggagcaatatcagcaggacaataccggcaggctatcaggcagttgcctgcgcagctgactgacatcgcgacaacgttggccgctggcatgccggcatggatggtgctgattcagcagggcgggcaaatcagcgactcgttcggtggaattggcggttttttccgctttatcaaagaagagcttctcggattgcgcccggcagcagatgagtcgtcagagtccctggctgagaacgccaactcgctggccgaaaccggcgagaatgcgcaaaaattggctggcattctatcaccgacaacgctggcgatcgcgggcgtggcggtcgccgctggagcattagcagttgcgtggtataaggggcaacgtgaagcggacgagtttaatcgtcaaattatattaacgggaaattacgcaggaaaaacaacggaagaccttcagcggatggctagggccatagccaatacagctgatgtaactcgtggggatagcgccgaggcattaactgcggcaataggggcgggtagattttctggcagtaatctgatgatgattgctgatactgccgtgaaaatgaaagacagtgttggtcagagcgttgatgaaacgatagctcaatttaaacgcctacagagcgacccaatccagtctgtgaccgagctggataatgccatgcacttccttaccgccgcgcaactggagcagataaccgcgttatcagaacaggggagaactgcggatgccgctgcattagccatggagagctatgctaatgcaatgcgctcaagagctcaggatatccaggataatctagggacgttagaaacagcatggaaatggctgggtgatgcagctgccggcgcttgggataaaatgctggatgttggccgggaagcacctttgagtgaaagggttgagacaacccggcgtcagctggaaaaagccaggtctgatcttgcttcaatgcaaaaagccccggcggttaacacaacgactattggatatggtaggcaaaatgattccctttcatctcggcatgagatacagcgaattagtaatcagaaattattggtttctcgtttgcagaaagaattgggggagttaagcgagcaatcgtatcaatcagcgataaaagcagccagggaaaagagggataaagacgaggaaactcgtaaaaaacgacaatttcaagctgaccaagcactaaagcagcagtatgaaaatgccgcggaaaagcaccagcggcggctggctagaattcggaattccgatgcgtcccagtctgttaaagacgactctattcgccgagaaaacgaacgttacgcgaaggaaaaagacagggagacaaaaaaagtccggctgtacacgcctccagcgggggatctggctggtgagcggacgcaatccgagttgctagaactgcgggcgcagctcaaagtgttgcaggaccaccgcggtatcaatgacaaaatcagccagcagcggcaggcgctatggaaggcgcaggctcagtttagcgttttggaagacgccgcaggaaagcgacaactttctgcacaggaaaaatcgctgctggcgagcaaagataaagttctggcactggccgagcaaaaagcagcccttggtgatcagattgttcagcaggagcggctgaacaaactgcaggatgcttctaccaagtatgtcacccagatgagcgagaaacggcaggcgctgcgtgaaagtgctggcctgggggatcgtgaggcccgtcgccgcatggaagaggcgcagctcgcgcaggggtggcagaatcagggcggcagcctggacgacgacggctacaaacggcagctgaaagccgccagggagttctacgcagaggaagacaagctgcgctcggactggctggccggcggccagaagggctggaatgactacctggattctgcgacaaacgtttatgcctcagttgccaatgttgcgacatcggcatttaccggattgagtgacgttctgaattccctggcgactactggatccgccaacgttaaggccttcggtgtttcgatgctgaaaatggtcttggacatcatcaataggctgctggtggcgtacgctgtgcaggcggctatggggtggatcggcggcgctgccagtgcatcatctggcggcaataaccctggctcagtaccaatggggctacattacgacggcggttataccggtgacggtggcaaatatgagccgaaaggtatcgtgcatggcggcgagttcgtgttcacgaaagaggccacgcgtagtatcggcgtcggcaacctgtacgccatgatgcacagcgcgcagggttacgccgacggcggctatgtgggtaatgcgccgatgcatggcctggcggccgctggtggtggtatcaccgtagacttgagcggcatgcagatcatcacccaagggaaacaggagcagccggcgagcaaagccagtaacgagctggtgagtaaggcggtcaggcaggaggttatcggcattgtttcgcagcagcttgatagggcgcttggccagtctggccgaatcaaccaattcgtaaccaataaaattggtcgctga

SEQ ID NO: 457157 - DNA, 354 bp, Serratia marcescens
atgtctgcaaaattcacgctcaccccaaacccgacctttaaagttgacgtttccattccgcgcgccggtgccgaggacggggtgctgacgttcacgttcaagcataaaacccgcagccagcttgaagcgctggagtcgacgctgcgcgccgctaccgaaaaacagattgatgccggcagccatagcaatgcgccgatggtggcgtttgtcgaagaaatcacgggcgcttgggcgttgcctgacgacttcaacagcgaaaacattttggtgctgcttgagaactacccgcgcgcctttgatgccatcgccacggcgtatacgcgcgaattgatggcactgcgcgaaaaaaactaa

SEQ ID NO: 457158 - DNA, 660 bp, Serratia marcescens
atggcctttgcattaccgaatggggctacggttttcgtcggctcaaagctggcggcgccgctgccaacaaccgcggtcagcaacgcaaaaggtgccgttttcacggtgtcaggcggcacgctggcggcagatgatattgtccttattcagtcgggctgggggttgctcgataatctggtggcgaaagttacctctgccactgctacggcggtcacgattggcgccattgacagcacggatgagaaatttttcccgccaggcggcggtgttggcgcgctgattaaagtcgaagaatggacgcagatcccgcaaatcaccgaggtggcttcaaccggcggcgatcagcagtacgtgcaaatccagttccttgaagacgaccgccagcgcaacctggcaacgtacaaggcggccaaaaaccagacgtacacgttcgcgcatgattccgacctgccgatttatccggtactcgaacgaggggataaatcgggcgacattttgccgatgtacatgtacgtgccaaaggcgcacgaaacccgctattggtctggtacgccgtcattcgatgcacagccacaaaccgcggttaaccaggtcgaaaccgtgcaggccgcgttcgctatccagtcccgcaccatgacgttttataaagacgcaaagtga

SEQ ID NO: 457159 - DNA, 411 bp, Serratia marcescens
gtgagccatacccgcattgccggactgctcgaggcccgcctgggcgaatgggccgacggtaacagcatccccgtggcatgggacaacatcgcggaaaacccgccggatgcgctttatcttcaggcctacgtgatgccggcaacgacgacgacgattgacctggcggaacagctgcaggtgctgccgggcgtttggcagattaacgtcattgcgagggctggcgacggcgtcactgatgcccgcgcgctggccgacgaggtggccgcactgtttcctgtaggcctcgaactcaacgacggcgaaatcacctgctacatcagcacgccggcgaccgtttaccgcggtgtgacgacgaacgcccggtactccatccctatcagcatgaattaccgcgctgacatcaccacctaa

SEQ ID NO: 457160 - DNA, 582 bp, Serratia marcescens
atggctgataatgacgcgtttatgcaggcgatcagcgcattcgttgaaaagggaaaggccaacccggccagggcagtgcgtgctacggggatccgcatccttaatcaactggtgcaaatgtcacctgttggcaatcccgagttatgggaagtgaacgacactgcggtggcttacaatcaggcggtgttcgaccataacgaggcattgcgacaggatccggctaacctgacgaaaaccgggcgcctgaaaaaacgtgcccgcgtacatgacagcatggatatcaaggcgccggccggctataccggcggccggttccgcggtaactggcaggtggggtttgatgtggcaccgcagggcgaaaccggccaggtggataaatctggcggtaaaacgttggctgccggcacgctggtgatcgaacaattccgcgtcggcatgcaggcggtgtactttaccaacaacgttccctatgcctacccgctggagttcgggcactcgtcgcaggcgccgggcggcatggtgcgtatcacggctgccgacttccagcgtttctttgccgccgccgcgcaggaggtgaaatag

SEQ ID NO: 457161 - DNA, 351 bp, Serratia marcescens
atggcaattaactacatccgcatgcgcgcgacggccacccggctgcttacagagaacggacagaagcgcacgctcacccgtggcggtacggtcaagcggatcggcggtaaagaggtgcgcacgccggacgaaacggctgaggtgatgggcgtcttgacggaatacaagccgggggaaattgacggcacactgattcagagcggtgatgtactgctggtggcgacctaccagacggaaatccgcatcgatgaccgcatcgagatcgacgggaaaaaatatcgtgtggttaatccgcacccggttaagccggcggcggtgctgatctgctatcgcgcgcaactgagggcatga

SEQ ID NO: 457162 - DNA, 975 bp, Serratia marcescens
atgtccctctatattttccaacaacaagtttccaccgccgcgacagagctggtggatcaggaagtccagaaatttaacgccgcatcgggcggcgcgctggttatggggagtggtgaccatatcggtgatttcatcgagcaaaccagctggcagctgattggcgggctggcgcagcgtcgtaatgcttatggcagtggcaaccttacccctgaagagctggggcaaatcctcgaccgcatggtcaaggtcgacggccgtatcgggcctgtctctgtcacgccaaccatgatgaaacgcctgggcaaagatgtcgccgaagcatcgtcggttgtcgctgcgcaggctgctgaggcgatgattcaggacttcctgaacacaacctgcggcgcgctgaaaacggcgatcgccaccaacagcaaaatggttaccgacttgtccggcgccgccggttcgccggttcaaccttcgctgcgcggtctgaacaaaggcgtgcgcccaatgggggataccttctcacgcatccttgcatgggtgatggatggcgccacctacaacgattttattgatgaggcgctggctaacccgaaccgcttgttccagatcggcaacgtcaacgtaatgcaggatggcttggggcgtcgcttcgttatctccgacgttcctgcgctggcggacggcaacttacagcacgcgctggggctgacggccgccgccgccgcggtgaaaaccacgccgctcatcatgaaggctcaggacgtactggggcaggaaaacctgaaggcgctgatgcagggtgagtacgatttcactattggtctcaagggctataagtggaaaaacgacaacatcaaatcgccaaccaatgcgcaactgacggctgctgcaaactgggaaaaaacagccaccagcgataaagacaccgctggcgtaatggtgacgtttggcgagaagggtgcagctaaagcggcaggttaa

SEQ ID NO: 457163 - DNA, 738 bp, Serratia marcescens
atgcccgcggcctggggccgcaacatcacaacggggttgatgatgaaatttaaaatcacgaaagaagaatttaacgcgctggatgatgcaaagaaggcgctctacaaagaatccggcgacggctaccagatgcagattgaagggctgccagacacgtcagagctcgacggactgaaaaagaaagtcgacgagctgatgaccgaaaagaaaacggagcaggctgcgcggcgtaaggccgaggatgacgccaagaaagcggcggaggagcaggccaagaaaaacggcgatgttgaagcgctggaaaaatcatggatgcaaaagctgaccgatgcagaaactcagtcgaaggcaaaaatcgacgcgctgaactccagcctgcatggcctgctggtggacaacgtggcgcagaaactggcgacagagcttgcgggcgatgcggcgccggtaatgctgccgcacatcaagtcacgtctggctattgaagagaaagacggccagcacgtgacgcggatccttgatgcggcaggcaagcccagcgcggccagcgttgacgaactgaaaaaagaatttatcggtaatgccgcctttaagggggttgttatcggtagcaatgccagcggaaccgggggtaacggtggcggcaaccctggcgccgggggcggcgggaacggaaacggcggcaatcaggattcactggtcagccgcgcacgacaaattatcgacagcaatcaggagtaa

SEQ ID NO: 457164 - DNA, 801 bp, Serratia marcescens
atgtcaaaaccggaagaaagcggccttgagcgcgattactgtgccggtcagctttctctacgggagatggcagagatatacggcatcagtgagggggccataagaaaacgcgccaaaaagcacggatgggtacgcagtaaatcgactggtacgcaggtgcgcaaaagcggtacgcaaaaagctaaggtgcgtaccggcgcacgtagcgccaaatctggcgacgttcagaaaagcgatgaggcccccgagccaaaaacgaaaccgatacgcggaaagcgtaccgacccaccagttaacccattcggcaggaacaatcgagcggcattgaagcatggcggctacgcccggcgcatgctgtttactgatgatgtgattgaagatgctgaggctatgggactggaggatgaactgcgccgtgtgcaggcttccaacctggtcgccgcggcaaacatcggccggtggagtgaagcgctacaggatgaggatgacgaagagcgcaaaaagacgctgcgtgaaaatatccgcggcgccgagcaggcaatggatcgcaacacggcgcgcatcgaatcgatactgcggacaatgagccagcttgcaatcagcgaggccatgctgccgaaaattggcgcggagacagatttccggcacgcagccacggacaaaacccgccttgaggttgagaagctcggcaaagagctggccgacgatgacgagaacgacgtgccgaagccggtggcgataaatatcaacatcgtggacgcaaggctaaggagtgacgacgatgatagcgccgacgcttaa

SEQ ID NO: 457165 - DNA, 186 bp, Serratia marcescens
atgccgaaaaacactattaaacataaagttatatatatcctcctccgtctattggttgaatttgcaccactctctgagtggcatcagcactgtcaacattcaaccgctgaagtccaagtaacgcatgagcactgcctcggtacagaatgtgacagcctgcagttcaaatacaaaaatattaaatag

SEQ ID NO: 457166 - DNA, 270 bp, Serratia marcescens
atgcgattaaaaacgatgactgtgcccgccgcgatgttcctgctgccgttcttgacctcctgcgcggaacgggtgccggagccgctggagccgatagttcgacttcctcctgaatcagtgttcaaaccttgcgagcagccgcagctttccggcagcacttggggagatatcggcgcccactccctagcgcttcaaacagcgttatcaatctgcgccggccaggtggccacgctgaaccaatggcgggaaagtattgggagagaaaaatga

SEQ ID NO: 457167 - DNA, 294 bp, Serratia marcescens
atgtcttttgaaacggtaaaacaagtcttcaccaacccctttggtaccgcgcggctcctcgaggggcacagcactttaagcagagcaaaggccgcaagcataaccaatgaacagttaagagagctataccctgatcttcaaaaagcaaccgatactgaaatcaatgggtttgtttcgctgggtaacaagttcgttaaaggcgaagttcgctgcaaaggatctgccttccctaaggaaaaaaagacaaataaaaacctcaactccgctaatcaaagtgagggcacgtccctttag

SEQ ID NO: 457168 - DNA, 1056 bp, Serratia marcescens
atgcgactaccaaaaaatctgacctatcgccagaaaggaaaggcgttctactggcgcaacccggccaccaaaaaagagatttcgctcgggcaaatcgcgcgccgcgacgccatcgcacaggcgatcgaggccaatcactatatcgagcagaactactcccctgtgctgctgctggagaagattaaaggcacgcacgaatacacgctaaactcctggctcgagcgttacgacgtcatttttaagcgccgcaacctggccgaggcaacgtataaagttcgccgcgggcagattgcgatcgtcagcgaaaaacttggcgacatggtgctgtcaaagatcacgacgcggcacgtcgccgagttccttgagttctgggttgcgcaggacaaaaagaccatggcgacgactatgagatcggtgctgtccgacattttccgcgaagcgattgtcgaggggcacatcgaaaacaaccccgtcacccctactcgcgcggcaaaagtcacagtgaagcgggaacggctggagctgtcgcaatatatccagatccgcaaagcggccgagcaacttccaccgtggttcggcttggcgatggatctggcgctggtcaccgggcagcgccgggaggacgtcgcactgatgcggttcgacaacgtcacgaacgggcgcctgcagttcgagcagggaaagaccggcgccaggttgtcgctgccgctggatcttgaactcgcgtccaccggcctacagctgcgcgcggtgatagaccggtgccggttgatcagctccacagatttcatgatcagcgctggcattcgcaaaaatagcccggatggcgccctgcaccccgatggattaacgaaaaagtttgtcgccgcgcggcgggcagcagggattgagtttgcagagagtccgccgacattccatgagatccggagcctggccggccggctgtatgagcgagaaaagggaaaggaatttgcacagaagctattaggacataaatccgaagcaatgacgggaaaatacctagattcacgggggaaagaatacgtgatgatataa

SEQ ID NO: 457169 - DNA, 2154 bp, Serratia marcescens
atgccaacttatatctcactttttgaaccaaagaaaaaagccctggcggccggcgccgtgccgcttgttattgcactggatgcaccgagcaaacgtgcggctgaaagcatcgcgctcggtaagctgttcgaagcgtacccggaaggcggtgacagcttcctctccccaaaaaccgtagaagatcaacccggctcccctcgcccggcaattggtcagttcgatgaacagtttgcggccgtgaatgagttcgacggtaagacgtggtcaccgaaagcgcccgaaccggagccagaagcgcagaccggtgcggtagatttaatgtctcaaccggcgaacgttcggatcgccgcggtagtgatgtatggcgacggtgaaatcgataacagccagctgtcgcttgtagtcgatatgctcaatgatgacgaaacgcctgatgatacgggtatgcgcgctgtgatcgatggcctggtatcggtgactcaagtcggtgccatgtacccatccgcagtatataagctgatttccgcgctgtttcagcaggccggcgaatccatgccgtcacaggaggctgtggcagcgttcgcgcactcctgggtaaccaaccctttcgatcgtgaaagcctgaagctgtccggcaccggcgctgctacaaacgcagctgccgaaaatgatgcaccagcagaatccgtgcacgatgacgagcgagggtatccgcacacgttagacagcctcgattacgaaatctctgcagccctgctgccgatggacttcgatatctttaacattccagtggcgatccatcgcctagcaaaagaggttgtggccaagaaggaaagcccatggaaagaatggtcggcaatactgcgtaaaactaccggggttttggagtttagccgcgcgcaaatcttcgacctgattcgttcggccaatcctgacctgcaccagttcccgacaagccacagggaatatatcaacgccaatctcggccgcctgtcggcgcccatggacaaagccaaagaaccgcaagtcgcttctctgggggatgggaaattcactattgacggcctgaccggtgagcagccggaaaccgcctcaaatcaagtcgaaaaaacggaagtggatcagcagcaggaagttaacgacgccacggcggagcaggccaagcagcagctggatcagatgggctatggcgtttacgccagcgcgccagaggataaatcccctgctctgcagcaagctgaagaaaacgcagagcgcgcagaggaactggcaaggcagctaaaggccgacgatttccagcagcgcgctgcacaggttgagcaggtgatcgccgagcaaaaccaagacgatcgggataatctggcaatatggaaccaagtttataaaaccgatccgaagtttacccaaccgttctctaacaacggcggcggcacggcgatcagcggcacctacatggaaatgcaggctacaaaattatttgggccaaaggggatcggttggggtgtggacgttatcgaagaacgtttcgacaacggtgcgccaattatgcgccctgttaagcagccggatggcagtttcgtcaaagatattatccccaacgggcctgacgcctatctgtgcgaagttaaccacgttatcaagattcaattctggtacaagcaggcgggtaaatcgggtgcgatcaccgcctacggctgcaccccgtacatcgtagccacgaaaaccgggggagtatatagcgacggcgaagcacctaaaaaatccctcaccgacgccaccaaaaaagccctgtctggtctgggcttctctgctgacgtgttcctcggtctgttcgacgacgtgaactaccgcgaggaaaacgaggcggaattcgcgctgaagaacgccagcgagaaagccggcggcattacgcgcatgcgtgaagagctggacaataagctgtccgcggtggccgaaaccatcaacagcgccgtgacagaaaacgaggccagcaaagtctacggctcgatcgctcgcgaagtggaagcgcaacgcaaagccgccgaggccaaaggcgacgccgagcacgccaagtatctggccggccgtctgcgccgccttaccgttctgaaagatgagcgcatcgccacactgtcagaggagaaagcatcatga

SEQ ID NO: 457170 - DNA, 237 bp, Serratia marcescens
atgtctgaaatttcagagattaaattagaacttgaaaacgttcgggctgaactgaaagcccatcaaataatgctatcttccttaatggcttatgttttgaatcccgccgatcgtatggacttcataaaaataatgaccaacgccgaaaaagatttaaacccacagcaattagaggaaattacaaggaaagttggtcatttctctgggctagttgtacacacaagtaagtataaatag

SEQ ID NO: 457171 - DNA, 180 bp, Serratia marcescens
atgcttaacactagacgcccaatcgccgaacgccggatccaaacgatcggcaacctggcccgttcggttcagtcagagcaggggcaaccggcaaataacccggtgatcgaagcgtccggccccgcagcaggacaaccgatgcggcaacaatatgggcatgccgatgacgcagccggctga

SEQ ID NO: 457172 - DNA, 381 bp, Serratia marcescens
atggatattaaagtaaatactctcaccctcttaacaaccaccttattattttcaacgtcactattcgctgaaaacattaaaatagaaaatctgccacaaaataaaatctatgacaattggctaatcagtcgttgcatcggtgagtttactgactcagaaagcacccggcaggatgcattccgttctgccagtgcttatcttgaattcagtcaactaccgatcgaagcctttgacagcagcgaagtgctgatacatcagtacctgaaaaaaaagaatagcggttcagtacccggaagctataacacattgacctgtttatcattgccaacatcagaacaagcccagggtattttcaagaaatacgtagccatcagtaaataa

SEQ ID NO: 457173 - DNA, 171 bp, Serratia marcescens
atgatcactaaaaaattgtcgtatcttaactgccttggtctggtctgcttcttcacctctttatctgtctatgcagcaccacaatctaaccgcggtgatgcaatgagctatctgaaggattacgctatcagcgtttgtattgccaaaggctatttcggcaacagaggttaa

SEQ ID NO: 457174 - DNA, 279 bp, Serratia marcescens
ttggagaaatgcatcaacggcattaccgccaataaggaagtgtgcgagcactacgtcttcaactctatcggcatcgtgacctacctgaatccgtttatcggccaccataacggtgacatcgtcggtaagatctgtgcggaaaccggtaagagcgtgcgtgaggtagttctggagcgcggcctgttgacggaagccgaactggatgacatcttctccgtcgagaacctaaaacatccggcctataaagcaaaacgctatacagatgaaaacgaacaataa

SEQ ID NO: 457175 - DNA, 714 bp, Serratia marcescens
atgatgaaacaaatgcaacaaagcgtctgcgcgctggcggtactggcggcgaccactctgccggccatggcggcatcaaccgttgatgtacgcgttattggtaccattaccccggcggcctgtaccccgacgctgagcggcggcggcaccgttgattacggtgcgattaacccaactacgctgagtccggcggattataccgtattaccagagaaaacgttggatttcagcgttacctgcgatgcgccagccaagattgcgcttaaagttattaatggtcgtccaggatcgttggcgggttctactgaaaatattagtggtgcagggccggctcctgccggcgtacaactgttctctgttgccaatacagcagcagtggggctgggtaaagatggttcggctaacataggtggttatggtctgcgctttgtaccgggtacagttcaggccgatagtgttaatgtagatccactccgtacttcagatcccacactcgcatcatggggcgcgggtgctgcatcgggaagtattttgtataacgggccggttttacataatacctgggcggctacaggtactatgacaccggttgcttttgaaacgctgaccgccaagtttggcgtgcaggcttacctgaaccatacttccgaactggatctgaccaagccggtggcgctggacggcctgagcactatcgaactggtctatctgtaa

SEQ ID NO: 457176 - DNA, 711 bp, Serratia marcescens
atgatgaataaaatgcaacaaagcgtctgtgcgctggcggtactggcggcgaccactctgccagccatggcggaatctgttgatgtgcgggttatcggcactattaccccgacggcttgcacgccgacactatctggtggtggtactgtcgattatggtgctattaatccaacgacgttgaatgcggcggattataccgtattaggggaaaagcagctcgattttgccattacctgtgatgcgccggccaaagtggcgattaaggcaattaatggtcgcccaaatacagctgctggcacaacagagaatggcatttcagggagtggtgcagcaccagcgggtgtaaacctctttggtattgctaatgtgcaggctgtaggccttggacttgatggcacaagtaaaattggtggctatgggattcgtattgctggcggaaccgtcactgctgatggcgtagctgtcgacagcatccaagctaatggtaatacagctacttgggtttctgctaatggcctcggcagtttgtacaataacaacaatgtgcggaattcatcttgggcggcatcaggcaccttggtgcccattgcttttactaatttggcaggaaagctgggagttgaagcctatctgaacaaagcgtcagagcttgacctgaccaagccggttacactggacggcctgaccaccatcgaactggtttatctgtaa

SEQ ID NO: 457177 - DNA, 483 bp, Serratia marcescens
atgaatcagaagccttacccgccgagaccaagtaaaccgatggtacaggcgcgcactaaagggggcgggcaaataataccggtgacgccggagtgttcgattaatcagggtaatgtgattgaggctaatttccacaccttgcaaacggatcaggtggccagccgtagcgacggcgaacgttacagtaaagacattgctttgcactttagctgtaataccagtctgacacaggatattaaggtgcagctgatggcggacagcgccggtttttcatcagaccttatccgttccgacaataacgccttagggattgtgttaaaacaccaggggcagctggtgaagccgatgatggcattccccgcccggcttgaggaggggagtgggaatgagaatattaccctgacgccggtaaaagacccgaaagtggcattgcaggccggtacatttaacgcctcggcgacgctggtgattttgtcacagtag

SEQ ID NO: 457178 - DNA, 315 bp, Serratia marcescens
atgacaacatacggctacccattacttgataatgctatcggtacggttttcaaccaggacgctgacattatcactggcgcagacaccatcgaaggcatggtggactgtttcattgcgaatgcttaccagcctcatgtgaaaaacaacatgctggccctgctgctggatgaattaaatgagtttgagaacaactatagccagaatctggatgcggcctatcaacaccgttatccatcggagctgcacttcgcctgcgtaaaagcgttctttgatatttttcgcgagcatacccaaaaaacgttgaaacgcagttaa

SEQ ID NO: 457179 - DNA, 759 bp, Serratia marcescens
atgagtaataacggtgatgtaataaaaatagagcctactttcgatcgggcgggcaatgcgaactatcagcttatcagtacagagaaaggctgtaacgttgaacagcagtgtgtggtttatcctgagcgtgttatacccgttatatttattccgggtgtaatgggaagcaatctgaaaggaaaaagaaaaggaaagagtatagacatttggaatttggatagccctggcaggattgttggttcttggtttggtgttaacgctaacatcagaaaacaaaagctaaatccaaaagaaacagaagtggatgttagtggaaaggttgatgagagagatgagccttttttgctgcaagaccggcgaggacgtggctggggaagtgtagcctataccagctatgctcctttcctcgactggctgcagaatagtttgaatgattttgacgagtatcagcgcggtgagcgttatagcttactggagtcggtgatggaaacggaaacgggtgacgtaaccctgagtaaggatgaagtagacttaagctaccgctatatttatccggtgtttgccgtcggttataactggttgcagtcaaatgcagattctgcggaataccttggaaagcaaattgatactatcatcaatttttatcaattgaagggcaaacagtgcgagaaggtaattcttatcacccattccatggggggctggttgctcgtcactatacccagaatctgggaggggaaaaaaaagtgctgggcgtag

SEQ ID NO: 457180 - DNA, 2523 bp, Serratia marcescens
atggattttattaataatgcacagggaaccctctctgggattatatcaaaaggacttaatcgttacggcctggatatcccttcctgctcagctccgttagatgtagagagctttagtggtgcggaaggcatgagtgctatctacgaatatcttatccgctttaccagctcggaaaaagatatcgccgcgaaaacgttgcttaataagtcagcctgtttaaccatgaattcaggaggattggggagcttaaccgagcgcaaagtggttcatggcgtaattactcattttgaacgaataaaaagctcggcagatcaaactcagtatctcattatcgtaaaacccttcctggctctgctggataatcaatttcgcactcaccgattttttatcaataaatcggtgccggaggtcgtagagttggtgctgcaggagcacggcctggaaggatgggaatatgccttcacgctcaaaaatgtgtatccgcagcgtgagcagatcaaccagtatcaggaaagtgacctgacgtttatccagcgtttactggcggaagtggggatattttacttctttacccttcaacctgatacgcagacggaagtggtgcattttgctgaccagcagagtgcgtggcaatttggcaagatcctgccgctgaacagcccgtcgggcgcgcatgataacggagtggaaagcgtctgggggatcgctgttcggcagtatgttgccgagcgctcggtgacggccaatgattacaaccaccggcaggctcagaaggtgctgctgtcggcgccggcggatatgacgcacggtgaggacgaggaggtgaactacggtgacgtttatcactaccgtccgcgccatctggaaagcggtgacaaggtcgagccggccgcagaaagcggcaatttttgggcacgtctggagcatgagcgttttctgtctggccagaccgtggtcagcggcagcagcagcgacgccacgctggcgccggggcaggtgctgaggattagcgaactgacgctgccgcccacgctgccgacggagaccgctgcgggtgtcattatcctgaataccgtgtttaccgccagccgtcaggcggcgctgcaggttgcctggacggcgatgccttacagtgaaacccgctgctggcgtccggcgctgctgccgcgcccgacggtgagcggcacgatgacggcgcgggtgaccagcgcgaagcacaacgacgagtacgcccacctgaaccagagcgggctgtactgggtgaagtttgacgccgaccgcgacgacaagccgcaaggctatgaaagcatgccggtgcgtctggcgaagccctacggcggtgatacttacggcatgcatttcccgctgatacagggcacggaagtggcgatagccttccatgagggcgacccggaccggccgtatatcgcgcatgcgctgcatgattcgcgccacccggaccacgtaacggcggacaataatacgcgcaacgtgctgcgcaccgcggggctgaacaaactgcggatggaggacaagcgcggcgaagagcatatcaagctgagcaccgagtacggcggcaagacgcagctgaacctggggcacaacgtggatgcgcagcgggcgttgcgcggtgagggcgcggagctgcgcaccgacgactgggtgagtatccgcggcggcaaaggggtgtttatcacggcggacctgcagccgaaagcgcagggtgacatgctggcgatgcaggcggccttgacgcagctgaagcaagcgcagcagttaaccgaatcgttgcgcagcgcagcggaagcggcgaaggcggagctggcggatttacaggcgcagaagacgcagctggcggagacgctggaggggctgcagcggtcggcgttgttgctgtcggcgccggcgggaatagcgcaggtaacgcccaaaagcctgcagctgtcagcgggagaaaacatcgcggcgacgagcggtggcaatacggatttcagcgtattgaagaagttgacggtcgctgcgggtgagcggataagcctgtatgcccagcggctggggctcaagctgtttgcgagtaagggaaaagtggaaattcaggcgcagggcgatgagatggcgctggatgcgctgaaggatgtgcgcatcagcagcagtgagggaaacatcatcatcagtgcgaagcaggacattgtactggtgggcagcgggggggcgtatatccgcataggcaacggcgaggtggaaagcggcgcgccggacaagataatccagcgtgcggcggtgtggcagaagttcggcgggcagagcgccagtcagatgatgaatcagtatcagcaggggcattatgagttgcagccgaccatggtttgggccgggccggagggggcagtggaaaaccgtcaggcggtgctgagcagtggtattggggccgtcacggaaatgacgacggcagacggtaaaacctcagcccagcactttccggatattacaaaagttaatctgctgctgaataaggatatttaa

SEQ ID NO: 457181 - DNA, 381 bp, Serratia marcescens
atgataaaaaaaaccgaactattcatattaaacactctcattccaaaagaatataaagaagccatgcagtcatcgaatatatattttttgaaactctatgaaagagatagactagatgaaataagagaattaagcatccacattgaaaacgcaaaacatagtggacttaatataatcggaggagagtcctcattagaggctttacgtaatttaaatgaatgcaacattcacatagtagcagcaaaaaatgaattatacttcataaagatatatacaaaaaaagacaaggagagaatagctttcactctaataaaacgaaagaaacgccccaaagaggaactcaatgagttatcgaagaaactgggaataaggtctaaatga

SEQ ID NO: 457182 - DNA, 537 bp, Serratia marcescens
atgcacattattaatgctgaagaacagcacattaccgcgatacgcaatatctatgctcaccatgttctgcatggtacaggtagcttcgaaaccgaacctccggatacgcaggaaatgcttaaccgactgaggagcattcagtctcggggattcccatggtatgtcgccctgcagggcgatacgattatcggctactgttatatttcccgttaccgcgaacgccatgcttatcggttcacggttgaaaattcgatatatattgatccggcttatcagcgacagggcgtcggaaaagcactgctcgatcatgcattaaaatgggccgaatctgagggatatcgtcagatgattgctgttgtgggtgacagcgctaacgtcgcttctgttgcgctgcatatccgcgcaggatttactgaaataggcacattaaaggatattggtttcaaacatggccgctggcttgacacggttttgctgcaaatgaaacttggtgaagggaatagtactctgccagaagattcagatcttatgctctga

SEQ ID NO: 457183 - DNA, 363 bp, Serratia marcescens
atgtcaaaaattgagatctttgaatctgcaggctgctgcgcaaccagtagcgttgtggtcagtgacgaagccgtcaaatggaacgcaagcgccgaatgggcgaagaaaaatggcgttgatattcagcgctatagcctcgtgaagaacccgcagcagttcctgaatacgcctgttatcaaagagtttctgaatacatcagggatggagtccctccctgtcaccttactcgacggcaagctggtgatggctggcaaactcccgactcgtgaaaatatcgcccgctgggcaggtattccgcttactcaggactggagtgaggacagcacgcaaccacgctgctgcagcattccacgtatgccttaa

SEQ ID NO: 457184 - DNA, 714 bp, Serratia marcescens
atgacaggtgatcttaagaatgttgattcgggtttgttcgacacttcaatcacagaggcaagattaggtatccctgtcgttcctcatccgcctcgaatcctcatgctatacggctctgcgcgcgaacgctcctacagccgactggcaacggaagaagcggcaaggttactgaccgccatgggcgcagaagtgcggatcttcaatccttctggcttgcctcttcctgatgatgcgcctgactcgcatcctaaagtcatggaactgcgcgagctggttcgttggtccgaagggatggtgtggtgttcccctgaacgccatggtgcgatgaccggcatcatgaaggcccagattgattggataccgttatcagaaggtgcagttcgcccttcgcagggtaagacgctggccgtaatgcaggtctgcggtggctctcagtctttcaatgccgtaaaccagatgcgcattcttggccgctggatgcggatgatcaccatcccgaatcagtcctctgtggcaaaagcctggcaggagtttgatgaagatggacgcatgaagccgtcatcgtactacgaccgtatcgtggatgtgatggaagaactggtgaaatttactctgctgacccgaggtaactcagcctatctcgttgatcgctacagcgaacgaaaagagtctgcagaagaactttcccggcgggttaatcagagcaaaatttga

SEQ ID NO: 457185 - DNA, 579 bp, Serratia marcescens
atgctcaaaaattcagatagaaattttaatgaagactggttcctggcttcagttctcaatgcacacatcgatgaaatgataaacagatactcatgccttttggcattacgcatggattttttctacaaaaagaaaagtgccaggtattcacacttaaatcaccaaacacttgaacatgacttgcgtgtactaatggagaaaatgacaaaagagaaaggtgtggtgggctatttctgggttgtcgaatggactgaacgacatagataccatgcgcatgtcgtattctggctggacagacaaaaaacacagcactcttatccctttgcccttacagcaaatacactttgggaggaaataacgcaccgggacggcgtatcgcaccgatgtgaatatcggccgcagtattctgtaaatatcaatatacctgttcggtataacgatccggaaagcattaacaatatccgtcatgttctgagctatctggctaaggaagaacaaaaagacggtttgtgtgcatacggctgtaatgacgttcctccacgctcagcggcagggcgtccacgtaagccaggctcctga

SEQ ID NO: 457186 - DNA, 213 bp, Serratia marcescens
atgttagaaaaattggagaaacgggtagagcgcctggaaaccgatgtatctcaaatcaaaattgagctgactaagctgacaactcgctcagaagagttcgttaccaagggggatctgcataaggaaatcgtcggacaaacaagatggattgcaggaacaattcttgttgctgtagggctgtgcatgaccattgctaagtttatgtttgggtag

SEQ ID NO: 457187 - DNA, 645 bp, Serratia marcescens
atggggaaggattctggaggcaggcataatcggattgctgggcgtgatttcaatgagaagcatgtaacagcagagcattttgtggacgggcatcaggtcaatattgcctttcctgctgttgagaaagatacgcggccattagttccagcacagcgtaagcaacttcatcaacttgtcgtgtctgttgctgaagccggggacgaagaggcttatgaagtgtggcggcgcgtacatgctgaaattggtgtagaaaacattgaaaaaatgacagtcggccaataccagccagcctgcagttatcttcaggcgcaaatggatttgatccgtgaaagagcccataaaaacgaattgatatccactctgttgaagatcagtacaagcagtgatctccgctttaagctttcccaatactgccgaaaaagttttggctccagccatttaaagacgcttaggcgctctgatctacagcaggctctattgtggctggatgacgagcgtaacaaagaagaaccagcctccgcagagccagccccgacaatgccatggtggcgcgtagcgtgggaatatccggtattcaccggtttggctttcctcgctggtgtcgccgttcaggtgattattgattatttttattttggcttttaa

SEQ ID NO: 457188 - DNA, 609 bp, Serratia marcescens
atggtgttttttcttaccaagagaaatcattgctctatttctcgccggattgaaaaggctggaaagagcattactgtcaaactcttcaagcatattcacgcgagaaatcatctcgtcaacactgagattatgtatttcgttaatcaacgaaaggtatcgtttactttgctgacgagcggcttcggctttttttccatgctgacaagccactcgaatgccactaataacggcgacaatagcaccaaacaactgactgagatcactattaacaaaaatacctgcgccaagaataagcattacagcattactcgaaatatcaattcggcgattaattgtttccgtcataacttccaaccaatagccgtaccaaatacggaaacgcaaatcatactcagtcggttgttttgtcatgaaccttactcctcgtcgtcatcttccggtggcgcaggtttatgcagcacatggaagtcatcagatttatcgcgggactgtgaattatcgttgtcgctcatagcggctcctcattgtggtgggatggtcgttatgcccgtgttcggtcaggaacttggcgggcataacgaagataccacaacgcggccgggcgcgtaa

SEQ ID NO: 457189 - DNA, 186 bp, Serratia marcescens
atgcatgacgatgaattgcacgctgcatttataaaagcccgccgctctgagcgggtccagctgctcgaccttttgagcagcaaactcgatcgcctggctgtcgaaaacatgaccaaagaacaggttatcagcacgctgaaagactggatcgacagccatcaaagcaccagcggaggtaaccagtga

SEQ ID NO: 457190 - DNA, 219 bp, Serratia marcescens
atgcctgatcttctcgacgctgcacaagaactcagtgagcagacactcgctaaccaaatcgccaaagcccgcccgcagcaatacgggccttctgcatatttctgcgaagcatgtggcgacctgataccggacgcgcgccgcgtacttattcccggcgtaacacgctgtgttacctgccaggagattcacgaagccaaagcacggcatatcaaggggtaa

SEQ ID NO: 457191 - DNA, 2499 bp, Serratia marcescens
atgacgaaacacacccgaggccgcacagcccctaccccgccgccgcccttcccgggcagcggcgcagttgcttttgactggccttattcatggaacgccccaaagaaaggcattaacccatacaccaaagaggccaaagaaaagccgcaactgaccgacgcccaaaagcgccgccagcgctggatagagatcaccactgacagggagcgcgatcgggaatcacaattatctttgctggcacagcagcgccgcggggaagacaaggtgcagtctgtactgggtgcgctgatggcgcagcctgatttcatccgttcgccgctgctggcgaggattaacgctatccgcaagagcaaaaaaggcaacggcgagaagctatcgcgcaactacattctgcgcaccattaaaacgattatgacccgcatcgagagaatgcaggctaagcatctgacctttggcctaaaaatggtcgcgcgccgcgaacgccttgacgacctgctgcgcctgccggaactggataaacgcgcggtgcagctgcttgccacgtttaccgccgcgcattttgaatcactgcttgatcagcagtgtaaaagccggctttccagcgatgccacccaaaacgaaatcctgcgcgcttacgtcacgctcggaacagaagcggaacgcttcagcgtgaccccgcccagttggcaatcactgaacccatacctgcgccgccgcggagaaccaccatacgacaagatccccggagctatctcccgcctgtgctgcgccaattggtggtttggtaagttgtggtcacttcggtgccgctggcgtgaagagttgttgcgcgcggcgggcctggtgcgtaaacaggactcagcctacatcagcgccgacgcactgacgcatttccgcgaacaacgtcgccgtacgcgcgaatttttgaaggcgtttgaattaaccaatgatgacggcttctctatcgatctcgaagacgccttctatgccggccccagcaacccgcgccaccgccgcattgaaatgatgaccaccgtcaagggtatgcaggacatcgctgaaatgcgtggcgattgcgcaatctggtgcaccatcaccaccccttcgcgcttccatgccaccaaatccaacgggcgactaaacccgaaatggacggcgcagaccgtgcgcgacagcaatgactacctggttaatcgcttctttgccagcgtgcgaaagaaactgaaccgcaacggtttgcgctggtacggcattcgtgttgcagagccacaccacgacggaacggttcactggcacatgatggtattttgccgccctgatgatcgagacgacattatcggcatcatgcaggaattcgccattcgtgacgatcgggcagagttggggagcgacatcaccccacgttttaaaaccgaattgataactgcagataaaggttcgccgatcagctatatagccacctatatcggcaagaacttggacgccgagccgctgcgcaaacccaacaaagacaccggcgcaccaccggtcgatcacgaaagcggcaaaagcatggccgatactgtcgagcacgcgctcggctgggccagcctgcaccgcatccaccaattccagtttttcggcatcccgtcacgtcaggtttaccgggagctgcgccggctggcgacgcagctagaccgccagggcatcaacgccaggaaaagtcaacgcctgaccgacaaggctatggatgacgtcatgagcgccgctgatgccggctgcatagccacctacatcatgaagcagggcggcgtcctgacgccacgccgtgatcacgttgtgcacaccgcctacctgcaggcagagaagccgaacgactacggcgaacacggtattcagatctttggcgtctggtcgccgatattgggtgaagcgtcacgcatttgcacccaccccgacacctggacactgaagcgcaaacgtaaacctgcaagcggcgaagccgaacaccagggggttgaccttgagggcgaaggcgcagccgccgccccttggactcgtggcaataactgtcccattgaacaagaaccgaacagctcaggggcagaaattacgacgcatacagagccgcaaagcgtcgattttgaacagttgggatacagaaaacggcgcgagctgctgaagcgattacgagcccccagccaaaaaacatccgccaatcaaccactgggtaggccgctgacgcctggtgagcgtgcaatatcgccgttacaagatgaactgatcggaaaactggacgattacgccttcacgctggggatcgatctcagtcgagcagctctgagacgactggtcatgggacaaacggtcaatattgacgacaagcgctaccgcgcaagtcaggatggtgtgctgtatgtggtgaaaggtgcaggcaaaataaccgtcgacgaccttgtgaccagatttaagaatgcgctccaatcattaggtaagaaaagccatcggtcaaagttatga

SEQ ID NO: 457192 - DNA, 1401 bp, Serratia marcescens
atggtcgatgtactggtgattggcggcggcaatgccgccctatgcgccgccctgacggcccgtgaggccggcgcgtcggtgctgctgctggaagcggcgccgcgcgaatggcgtgggggaaactcgcagcacacgcgtaacttacgctgcatgcacgatgcgccgcaggatgtcctggtggacagctacggcgaagaggagtactggcaggatctgcggcgggtcaccgacggccataccgacgaagcgctggcgcgcctggtgatccgcacttctgcgcactgccgcgactggatgcgccgccacggcgttaacttccagccgccgctgtcgggcgcgctgcacgtggcgcgcaccaatgcgttctttatgggcggcggtaaagcgctggtgaacacctattaccgcagcgcagaacgtctgggggtgcagatccgctacaacacgccggtacagtcgcttgagctacgggaaggaaactttgtcgccgccatggcgggagaggaacggatcgaagctaaagcctgcgtgctcgccgccggcgggtttgagtccaaccgcgcgtggctgcgcgcggcctgggggcaaaatgcgcgcggcgaatggccggccgacaattttttaattcgcggcacccgctttaatcagggcgtgctgctcaaatttatgatggacgcgggcgcggacattatcggcgacccttcccagtcgcactgcgtggccatcgacgccagagcgccgcgctatgacggcggcatctgcacccgcgtagactgcgtgtcgctggggattgtggttaaccgcgatgccgaacgtttctatgacgaaggcgaagacttctggccgaagcgttacgccatctgggggcgtctggtagcccttcaggccggacaaatcggctattcgattatcgacagcaaagcgatcggccattttatgccgccggtgttccccggcgtacaggctgacacgctggccgaactggcccggcggctggggctggacgccgcgcgctttacccacaccgtgacgcaatacaatcaggcctgcagaccggggcgtttcgaccacaccacactcgacgactgcagcacggaacatctgacgccgccgaaaacgcactgggcgcgcccgctcgatacgccgccctattacggttacgccctgcgcccgggaataaccttcacctaccttgggctgaaagtgaacgatcacgcggccgtgcactttgccggccggccgagccgcaacctctttgtcgccggggaaatgatggcgggcaacgtgctgggcaagggctataccgccggggtgggcatgtctatcggcaccaccttcggccgcattgccggtaaagaggccgctctggcggcacgggaggcgcagcatgcagccgcttga

SEQ ID NO: 457193 - DNA, 516 bp, Serratia marcescens
atgatgataaaacggaaaaataattttcacttgtccgcttgcaataatattttgttgatcatgtttttattgctgggcagttataattctctgggggcggataatgtaagtttttatggttctttagtggaggagccttgcgaggttaataacggcatgacggttacagtggattttgaagaagtagtaacaactatggttgatggtaaaaactaccagaaaccgatacgcactgatatcaattgtggtcaggcagggaataacgttctgaccatgtcgattgagggggctgaggtttctggtgctggttatggcgtgttacaaactaataagacaggtttgggggttaaaatatttgttaccgaaactggcctccccgtgcctcttaatgtatggataaaaatgttgacccctactcttcccaaaatgagcgctgtgccgataaaagtttcgggtaatgctttgactacaggagatttctctgccggggcaacattaaaaatagcttatcaatag

SEQ ID NO: 457194 - DNA, 894 bp, Serratia marcescens
atgcctcaaatccccgatccgcaggataccagtgatgcggtgcgtacctgcctcaatctcttaccccggcaggctactgaacgtattctgtcccgcctccaggaggcgattaactatgaacccgtgataggcatcatgggcaaaagtggtgcgggcaagagttcattatgcaacgcgctttttcagcaacccgtttgtctgaccagtgatttgctgggatgcactcgcgaaccccagcgtctgttactcaccgttggtgagcgcagcatgacactggtggatttaccgggtgtgggtgagacaccggaatacgacgaggaatatctggcgctctataaggcgttgctgggagagctggatttgattatctgggtactgcgtgccgatgaccgtgcccgggcaacggatatcacgacatacagggcactgatggaagccggtgctgacccttcacgtttcctgtttgtactgactcaggccgaccgtattccacccctcagggatggtgagccctggcaggcatcaccttcttctgagcaatgcttttcactggctgcagtcagtgcgcaggttgccggtcagttgccgtcctctttcccggtcatggctgtctctgcacataccggctataacctgcccgccctggtggagttgattgtgcatgccttgcccgtacaggcctgcagtaccgtgtattgccagctgaaaccagagcatcagactccggacactgatgccgctgtacggcagcagtttggtgaggcagcgggtaaggcttttgacacggtgattaatcctgaccacctgccttctgtctggactgctctgttaaggagtatccgacaaaagttagtgcaacttgccacggcattatgggaccgaatatttggctga

SEQ ID NO: 457195 - DNA, 678 bp, Serratia marcescens
atgaaaattcagaccgtgattgcacttgttttgtcagccgtttcggtttctgctcaggcgggtaactgggctgtgaaaaacggctggtgtcagacgctgaccgataatggtcaggcactggtgatgctgaaaaacaataccataggcatctttggtcagttgcagggctgccccaatggcccgcaggagctgatggggagtcgcatcaatgtaaacggcaatctggtacccacgtctcagttgtgcaaccagcaaacaggatttaaggctgttgaggttgaaggtgggcaggcacctgcagccgccagaaaggcaattgcttcgattgcaggtcaggaaacatcgacccttcaggtctttggtgcgcaactgacattcacccgcggggacatgatgacggtctgcccgaaatacgtatctggccttgctgccagtgccggtagtcgagcgccggagattaacaaaggctcagtcatgaaagcggccaaagaagcgtacacgaaagagtatgaccgtgacacggctgaggccgctgattttggcagctacaaagtggagggaaatactgtggtttatgaggtctacaatgccgggtatcgtacctacgataaggtggtggtgaccgttggtgctgatggtaaggccaccggtgccagggttgaatatatggggcaataa

SEQ ID NO: 457196 - DNA, 474 bp, Serratia marcescens
atgtccgaactgattttaccttcggtcttcccgatgaatgaacaacgtaccatccgtcgtgccctgcgattactggagaaatatcagcggcagcccagtgagtcgttccttgccgctagtttcgcgaaaaactggttacagctctatttggcaaagcaggagcgcgaagtctttgttgttatctatctcgataatcaacatcgtctgctggagcatgaaacgctcttcctcgatacgattaaccataccgaaattcatcctcgcgaaattgtgaaatctgcactgcgtcataatgcagctgcggtaatcatctcccataaccacccatctggcattaccgatgccagtaaagctgacagagccattacgtccaggattatagaggctctggggctggtcgatgtccggctactggatcatttcatcattggtgatggtgaagcgttgtcgtttgctgagcatggatggctataa

SEQ ID NO: 457197 - DNA, 222 bp, Serratia marcescens; identical to SEQ ID NO: 94026

SEQ ID NO: 457198 - DNA, 351 bp, Serratia marcescens
atgtcgagtaagacactcacagtgaatgatgataccgctgagccctggtgggggctgaatcgtaatgtcattccttgttttggtgcgcgtctggtccaggaaggtaaccgcctatattacctgtctgaccgcgccagcataataggcctattcaataaagcggatttgctccgtcttgaccaggcatttcctgttctgctgaagcaggcggagctcatgcttaccagcggcgaactgaatccccgacaccagcattgcgtcaccctctatgcaaaggggctgacctgcgaagctgatacgctgggttcctgtggtcacgtctatatctccatttatcctactcaacgctaa

SEQ ID NO: 457199 - DNA, 228 bp, Serratia marcescens
atgaaggataggattgtcgaaatattgcaatacagtctgaaaaaaggatctggtgatgaattttatcacatcatgcgtgaagttagtgttccgttacatatcagacacggtattgatgttgttgcgtatggaaactctttacatgatgctgacagtttctatctcatacgtgtttttgacagtgaagagcagatgaaaagctggacaaaagcgcgttcgctggtgtga

SEQ ID NO: 457200 - DNA, 642 bp, Serratia marcescens
atggcggcgggtatcatgcagtgccggggcgcggtctatgagcagccgctgcgttatgccggccagtatcaggataacgaaagcgggctgcattataatctgttccgctactatgagccgtttaccacgcaggatccgataggattgcgcggcgggctgaacctgtatcagtatgcgcctaatccgtatgggtgggtggatccgcttggtttggctaaccgaccaaataatggcaagtatcatatattccaggagcacgctatttctcctgggaatatttattccagtgatgcggttcagtttaaccgtgcaaatacagagtttattgcaaggatggatgctgatccttctttccgccgggatatgttaggccgatacccggaactgggtgagtggatgaaaaaaccgaataaagcttcaagtctaccaacattaacttggcatcatcatgaagatgttgggcgcttggtgctggttgaacgtttatatcatgctgataatcatgctctttatcatcctactggaaaaagcggtcgcgaaatgtggggtggtggagaacctggaagacgaggtaagctggatggaactacggggaatccgaagccagccagagttaggagaagaatgggagggggatgttaa

SEQ ID NO: 457201 - DNA, 453 bp, Serratia marcescens
atgaaactaagcttcaggaagatctgtctgttctgggggatgatggatgttttttatatcgccagatttatctggcttaatgtagagcaaggacgtattcctctgattgatgatttcatgagttttagccagctttattctgagtatggaggtggggtctggattgtgttaatgttttcgctatccatgatattgaatgtttctatcgttatttccgccatattacttattacctgttggcgcagggttggttattttatttttatacagacgccatttcgtctattgctggttatcccctcagtttcttttgtaccatggttattgaaacagctgcatatcagtagcatgctcgtatttgttactttctttgttatctctgaggttattaaggttatctcatttattttagccaaaacgacaaagactgaaggaacagctaatggcgaataa

SEQ ID NO: 457202 - DNA, 2871 bp, Serratia marcescens
atggattttattaataatgcacagggaaccctctctgggattatatcaaaaggacttaatcgttacggcctggatatcccttcctgctcagctccattagatgtagagagctttagtggtgcggaaggcatgagtgctatctacgaatatcttatccgctttaccagctcggaaaaagatatcgccgcgaaaacgttgcttaataagtcagcctgtttaaccatgaattcaggaggattggggagtttaaccgagcgcaaagtggttcatggcgtaattactcattttgagcgaataaaaagctcggcagatcaaactcagtatctcattatcgtaaaacccttcctggctctgctggataatcaatttcgcactcaccgattttttatcaataaatcggtgccggaggtcgtagagttggtgctgcaggagcacggcctggaaggatgggaatatgccttcacgctcaaaaatgtgtatccgcagcgtgagcagatcaaccagtatcaggaaagtgacctgacgtttatccagcgtttactggcggaagtggggatattttacttctttacccttcaacctgacacgcagacggaagtggtgcattttgccgaccagcagagtgcgtggcaatttggcaagatcctgccgctgaacagcccgtcgggcgcgcatgataacggagtggaaagcgtctgggggatcgctgtccggcagtatgttgccgagcgctcggtgacggccaatgattacaaccaccggcaggctcagagggtgctgctgtcggcgccggcggatatgacgtacggtgaggacgaggaggtgaactacggtgacgtttatcactaccgtccgcgccatctggaaagcggtgacaaggccgagccggccgcagaaagcggcaatttttgggcgcgtctggagcatgagcgttttctgtctggccagaccgtggtcagcggcagcagcagcgacgccacgctggcgccggggcaggtgctgaggattagcgaactgacgctgccgcccacgctgccgacggagaccgccgcgggtgtcattatcctgaataccgtgtttaccgccagccgtcaggcggcgctgcaggttgcctggacggcgatgccttacagtgaaacccgctgctggcgtccggcgctgctgccgcgcccgacggtgagcggcacgatgacggcgcgggtgaccagcgcgaagcacaacgacgagtacgcccacctgagccagagcgggttgtactgggtgaagtttgacgccgaccgcgacgacaagccgcagggctatgaaagcatgccggtgcgtctggcgaagccctacggcggtgatacttacggcatgcatttcccgctgatacagggcacggaagtggcgatagccttccatgagggcgacccggaccggccgtatatcgcgcatgcgctgcatgattcgcgccacccggaccacgtaacggcggacaataatacgcgcaacgtgctgcgcaccgcggggctgaacaaactgcggatggaggacaagcgcggcgaagagcatatcaagctgagcaccgagtacggcggcaagacgcagctgaacctggggcacaacgtggatgcgcagcgggcgttgcgcggcgagggcgcggagctgcgcaccgacgactgggtgagtatccgcggtggtaaagggatcttgctgacggcggatatgcaaccggatgccagcgataaaatgctggaaatggatgaggcgattgagcagttggaacaggcgttgacgctggccagaagtatgcgggtggcagcgaaagcggcgaaagccttgcagtcggatatcgacagccagaaaaccctgaataattctctgcgatacctgaaaatgccgggcttgctggcgcatgcgccgtccggcgtggggatcctcagccctgaatcagtacgtctggcgtccggtaacgaaagtgtcgctctgatgtccggtaaaaatacggacattagcgctggcgattcgtttaccgtcgctgccgctgaaggtgttggtctttttgctcagcatacggatatgaagctgtatgctggggaaggtaaggtggatatccaggcgcagggaggcgcgcttggcgcggcggctaagcaggatgttacgattaccagtgcggaagggcgtgttgaaatctgtgccgcttcagaattggtgctgaaaaatcaggatggttcttttattcaaattaccgggaaaaacattgtactgggctgtgccggaaatatttttctgaaagccgctaatgtggatcaaacaggcccgacaacattgagtacgcccccggtatctttcccgcaaggatattcaggaacttttacgctccgcgatccacaatcgggtgaggtcaggccttttacccgttataaggtcacttcgtcagaaggggagacctttgaagggatttctgacgcttccggaaaaaccgtacgtttatattcgtctttgccgggagaaatgaaaatagagttccctgatgaattaaaagaagaaggtcctggtcattgggtgacggtagatcatgattatcacgcgctgaaaaatataggcatcctgtctgtcaaccgattgacgtccatgggcgataccgggcgcgtattcttatctgaagggaaagacctcatgcatactaaacgcgataagatccaggagtggaagccattacctgaggatactgatgaggaagtgatcaatcgttcagcgattcataaatatgggaagcagcggaagataacgcaaacctaccttgagggggatgatgcctggcctgtcagtggacgatcgtggcactggatgccggttgtggcagatgacatcaatgagaggaaggagtaa

SEQ ID NO: 457203 - DNA, 465 bp, Serratia marcescens
atgagcgtaaaaaataaaaaaacaagaaatataattttaattataggttgtatttttctagcctatgctatttggttgctgctacgcccggttagaattgttgcggttcatgaggatggacactttagctctgtgttggtcaaaagttttccgtttagcaccaaggggaaaatagactggtggttgcagaataaggatatgctaaaagagcgctacgacattccaaaaccagcatcttacggtaattttagtgtaagtttctggctgtttggtgatggttataaagaggaagggaaatatgataggttgtgttttgatgatatgaagacaaacattaactgtattgagaaggatatcgttttctctgtaagtaagagtaaaaatcttggcgttgtttttattgtggataatgggatatatcgaatagataaaaacggtaggatagtaaaggtaaatatagactaa

SEQ ID NO: 457204 - DNA, 1164 bp, Serratia marcescens
atggcgcaattctactctcccaaacgccgcgtgacgacccggcagaacacacaaatcttcaccgtgacggtgagcgacctcgatcccttcggccagggcgtggcgcgccacaacggtaaagcggtgtttatcccgggcgtgctgccgggcgaacaggcggaaattcagctgacggaagacaagcggcagttcgccaaaggcaagctgaaacgcctgctgacccgcagcccgcagcgggtggagccgcgctgtccgcactttggcgtctgcggcggctgccagcagcagaccctgcagatgggctttcgtcagtcaggctccagcgaactggtgacggtcacccgctgtccggtgctggcgccggagctggagcagctgctgacgccgctgcgcgcctgcctgagcggtctgcaggcggtgaagcgtctggggcattccgagctggtgctggcggacaacgggccgctgctggtgctgcgccatttggatgcgctcaggccggccgaccgcgaagcgctgctggcatttgcccggcaaaatgccgtaacgatttatttggcgtcggacagcgaacaactggagaaactgtgcggtgacgcgccgtattatcaggttgacgggctacgcttagacttcagtccgcgcgactttattcaggtaaacgatgcggtcaaccagcagatggtggcgcaggcgctggagtggctggagattcagcccgacgatcgggtgctggacctgttctgcggcatgggcaatttcaccctgccgctggcgcggcgggcgaaagcggtggtcggcattgaaggtgttgccacgctggtagcgaatgggcaatataatgcacataagaatttgctgagtaatgcgtcgttctttcatcagaatctggaagaggacgtggagcgacagccttgggcgcaacagggatttgataaggttatgttggatcctgcccgggcgggcgcggctggagtgatgtcacatattgtaaaactggcgccggcgcgggtggtatacgtttcctgtaaccccaccacgctggcgcgcgacagcaaagcgttgctgtccgctggttatcgtcttgcgcgtgtgcgtatgctggatatgttcccgcacacggggcatcttgaatcaatggcgctgtttattcgtcaggaataa

SEQ ID NO: 457205 - DNA, 1425 bp, Serratia marcescens
atgagattgattgcactatcaacggaagatctcgaaccttatcagttttcccgtatttttaatcccggctcggcgcgttatgcgctggagacgaaatatctgttcggggcctcatcgctgccctcgatctgtcgtcgctatccggtcagccgctgcgagattttcggcgtgggcgtgtcgcagtaccgggaagaccggcagataaaaaagcaggtattggccgagctggatgcggggcagctgcttgccatcgatgacgactgttttggctggtcgccggcgcggcacctgttctttatcgaccaaaccggccggctggcgcagtacccggccattttgccgccgctctacccgacgcagcggataatccagcgctatgaggcgatggttgcccgctatcgcgtccgtccgccggcgacggtgctaccccccagctaccggccgcagcagaaagcgccggcagtcgccgcggcggccaccgcggtggaggtgcgccgggatccgctggccgcgatgcgcgccatgagcaagcgcgaacgctggcaggcccggcaaaatctgatcggccgcgggcggcgcagcatctaccccgatgcgcgcatcgccgcgacgcgcctgggtgagaacaatattgccgttgagaaggccaagctggcgcaaaatgtttacggcattgacgggcgaccgattagggcgttggaaacgatgccaaacgtacccgaagggtggcgcgatattagtaatgatattaaagcactagagaagatcggtttaattccggaaatgttatatgacaaagctgatgaacctgattttttatccagagtgtactcgcctgaaaatgctgtatttggcaatgatatgaccacgaccatcgtctttcgggggacgaggatggaaaaattggccgattggaacaacaacgctcgtcagggaattggcgttaattctacttattatgagaacgcggtcacagtaggtaattatcttaagaagactcgtcatcaaatagatattgccgggcactcattaggcggcggtcttgcctctgcggcggccgttgccagcggtaagcccgcctggacgtttaatgccgcggggcttaatgccggcacggtggaaaagtatggcggcactgctatcggcgacggttcaaaaattgccgcctaccgggtgcagggcgaggtgctgacgcggctgcaggagttccatctgttagaggatttaaagagcgtttattacaacattccgctgctgatggtgaagcatcagctctctgcgctattgcccagcgcggcgggcaacgcgaaatggctgccgggcggagagggcggcaccattgataaacacggtatgcagcaggtgatcgacagcctggagcagcagaaagaggtggatatggccaccattactagcaggctatag

SEQ ID NO: 457206 - DNA, 912 bp, Serratia marcescens
atgcttattcagaaaaaacgcattaggaatattgataactacataacaacctttgatggtcgaaatgtttatatagctcatgctttgccaaaccagcagaaaagcgaatctattggatttacagccaatcaatcccttggcgaggaagttcttcctcgaatcgttggagcgataacccgcttcaatgctaacggtaagtctgtacctgacaaaaccgtacctaaagagactgcttatcgacaggtatcatggacctggaagaaatgggcaggacgaggtgaaactgaagaaatcactgagacacgcgaaattgagtatcaacgctatcaaaggatcttcacaccgccaccaagcatcgaattaaaaattgttgagaacttacaaggggaaaaactgattgtatccccactgttgtcgctacaaaattcgaataaagagcttgttgcacattgcataaatttatttttagaactgtttgggctatgcgaaattgtcgatgataacctcaacactatcgttaagagcacatctattaagctgaactggagtttgttgccacaaggtgaacaaccttggaacacgttgggcccacaaattttcagtgtgattaaaataggaaagggcaacgccgctgttgttgaaggcagacttgaacttgttaatagtaaaaaacctgattttgtcgcagttggcagggcaggctttcaaggttacgtaatttttggatttaccagccgaaatatttacattttagaaagctcacagtgcaataacgcaacctatatacttaatcacaactggcagcacttatcccagctaaccaaagccgagatactagatggaaacctgcatcaagctcgtgttatccatcgcaggaactgggcaacagaaatcttgagatacctaccttaa

SEQ ID NO: 457207 - DNA, 351 bp, Serratia marcescens
gtgcaggaatttgccaaggggctgctaacgactcacagcaactccatctataatgatgtattcaagtttggtctgaatgtatatttgcggattgctgacctgctcacgctaacctatgaggaaatgttgagcgggaaaatccgtgtcaaagagagcaaaactaaggaggtaaaagggaaactggttagggagattccagtaacagccgcagcaatgaaaatcgccaaggcacggcgcaagtctaacccggaacacgtttacctgttccagaacgacagccgccgcagtaccgccaaaccgataaccaaggaagctgtcatcagagcatttgcaaaggccaatgaggagtag

SEQ ID NO: 457208 - DNA, 1953 bp, Serratia marcescens
atgaattctaaaaggactttcaggcatgacatcaatggacttagagcctgggctgtcatcgctgttgtactgttccatttcggcgttcccggatttgaaggtgggtttgtcggggttgacgttttctttgtaatttccggtttcctcatgacacagataatcgtcagtggcgtaactgatgggaaattttcacttttacaattttatctcgcaagagccaggcgaataatcccagcactgatgacgctgtgtatcgtattgatgatttttggatggtttttccttacaacaatagattacacagcactatcaaaacatattttgacggcagtattttttatatccaacatcaagttttggagagaatcgggatattttgattctgcatcacatgaaaaatggttgctgcacacctggtcactatccgttgagtggcaattttacatcatcttaccgatcgctattttacttatgtgtaaattgtggcgagatactggagcagcagtaacaatctttgtaggtttggctatctctttcgttctctcttgctacttatcaattacaactccctcggcagcattttttctattacccactcgagcatgggaaatgcttgctggcggcgcagtatggtggttaacaagaaataaagagataaaaaaaaccaaagcacgaatgatggagttatctggattactcctaatagctctatccatattactttacaactcaagcatgtattggccaggattatatgcaaccgctccagttctagggtcaatgttcgtgcttgcggcagctcgacaaaactccatttttacttccagttatttcgttgaaagaattggagcgtcatcatactcaatttatctttggcactggcctgtagtcgtatttttaacttacaacaacacatccgactcatgggtgtggattgtcagcggcatcgttctcagtatcgggttgggtgaggtttcgcttaggctagtagaaaatccaacgcgtaaatggctatccaaacagttaccgtggatgaattttcttgcaattactgcttgcattgctgttgttggaagcatttcaatgctgctacttaaacataattttagtggacgagtacctagtaacatagaaattattgcaaatgaaagtacaaatataaaaccaaaccgctcagagtgtttccctgtttcaggaacaacatctccaagctgtgtttatggtggtaaaaatataaaagctattctggtcggagatagtcatggtgatgcaatgactacggccatagtcgccgcattgccacaaaaaacagatggtgttttagacttaacatatgccagttgcccaacaatattcaatgccaagactgttccaggtgaggctccggaaaatcagaaatgctacgagtacaatcagtgggagcgtaaaaagttatcagaacttgataagtcattaccactgattatcataaataggacttcctcttatgccctcggaagaccaacagttcatggtaaagagcgcactccatttgtctactttagcaaagtatataaaacaccggaaccagatttcttatatgagtttaagacttcattaattaaaaccacttgtgaactcgcaaaggaaagacctgtttatatactaagaccaactccagaaatggaaatgaatgtccctaagacgatatcaagagccatgatgtttgggaaacaagccccaaacatatcaatatctaaagatgaatatatgaaacgacattcatttgtgtggagcgcgcaagacgaagccgcaagtttatgcggggtaaaaatactggatactacggctatcctttgcaagtctggacgatgcgagagcacgtataacagccgacctatttattatgatgataatcacatgagtgaatacggcaataaacttttggttccactcttcagagagatattttaa

SEQ ID NO: 457209 - DNA, 129 bp, Serratia marcescens
atggatacggttgaagagttagctggaacgtacttctatgcgggaaggtataatctcagtgctagtgagttgttttttatgatcttctgtgaagatacggcaactcacaccaacacgggggaaatttag

SEQ ID NO: 457210 - DNA, 435 bp, Serratia marcescens
gtgttgaaaccgaaactgctggcaaccctgggtgaagatgaggattgtgagcgcatccggccgacagaggatgaggaagaagaacacgcagaaacgatcgggctgacgccgctggacgacgcgcacgtgctgatttccgcgctctgctggcgggcggcatataacgaagggtacggctattgggtggttgacagtaaactcgagggcaaaccgcagctcatcacctcatcaggttctggctatgatgagggggaaattttcatgagccagaaaggacgtggtctgggtgactgctgggggatggctaattgggtgtgggatggcatgacgttccgcaaaagcatagaagccaccacggggatgtgtcgctatatccggctgggaggcacctgggacttacccacctgggtgaccgaggttaaaccggccaaataa

SEQ ID NO: 457211 - DNA, 438 bp, Serratia marcescens; identical to SEQ ID NO: 456366

SEQ ID NO: 457212 - DNA, 3063 bp, Serratia marcescens
atgaaagcatctacaggaaagaaaaggccgacatggaaactgaatgccttgctgtgttcgctgttggcggcaggcagcgtgcaggcggacgacggtaaaatcggcgacccgggcagttggcgcagcgccgagtttaatgctgactgggggctgggggcgattcacgccgatcaggcctacgccgccggctataccggcaaagggcagaaagtggggatcctggatacgccggtgtataaccagcatcccgagttcgccggcgacggcaagctgatcaatgtggtgacgcaggggatccgcgcctataccgatccccaccggccgggcattaacgccggcgatccgttctatttcgacggcaccttccatttctataacggcgagacactgagcaaccacggcgtgcacgtggcgggcatcgccgcggccaaccgcgacggtgcgggcatgcacggcgtggcgtttgattcacagataatcagcgtggacaacgataacgacggcccggcctacggtgaatttctggggctggacggcgcggtgaccaacgccggctggcaggcgatgattgaaagcggcgcgcgggtgattaacaacagctggggcgtcagcatccctgatttcctttccgacggcggtaaagacccggatgcgctgcactttgaactgcgcgatgcgcaagagcagttcgaccaggtgaagccgctgctgggcagcctggccggcgcgggctatcagggggcgatcgacgccgcgcgccacaatattctggtgctgtttgccgcgggcaacgacggcaactacaaccagccggacgtgatcagcgggctgggctattttgtaccggatattgcgccgaactggctgaccgtcgccagcgtggcgcaggatgacgcgtcgaccaacagcgtaccttacaccctcagttccttctcaacccgttgcggctacaccgccagcttctgcgttgcttcgccgggcagtaaaatatacagcgcggtggccaacggctccgacccgcagcagctgacgtcggactacggcaataaaaacggcacctcgatggcaacgccgcacgtgaccggtgcggtcgccgtactgctgcagcgtttcccttatctgtcgacggcgcaaattgccgacgtgttgaaaactaccgctaccgatatgggcgacccggggattgatgcgctgtacggctgggggatgattaacctcggcaaggcgatcaacggaccggggatgttctataccgaacaggatattccgcaagagttccgcatccctgatgccgagggcgtggcctatggtcctacgcagtttgtcgccaatattccgggggtaggcgcggaactggatagcggtacgcgctatcagcgtatctgtgacgacgtacactgtggcctggaagtttattcgaacgatatttccggtcacggcggcctgaccaaagagggcatcggtacgctggtgctgaccggcaacaacagctacagcggaccgacgctggtgaatcagggcctgctggcggtgaacggtacgctggcgtcggacgtgacggtgcaggacggcggcgtgctcggcggctcgggccgcatcggctcgctgaccgccaacgccggcgccaccgtggcgccgggcaactcgatcggcacgctgaacgtgacccgcgacgtgacctttgccgccggctcgcgctacgcggtggaagcggcggcggacggcagcagcgatcggatcgtcagcggcggatcggcgcagatcgacggcggtgaggtggtgatgctgctggatcagcagaacgtgctgaacggcgagggcggcggcagcgccatcggtcagtatgacatcctgcaggcgcagcagggcatcggcgggcagtttgacggcgcgacgaccagctcgccgttcctggacgccacgctgtcgacgcagggcagccagctgacggccgacgtggcgcgtaacgataccgcgttcgccagcgtggcgacaacgcagaacgagcgctcggtggcggcggcggcggatgcgctggcggcgggcaacccggtgtatgaaagcatcctggcttccggcagcgccgggcaggcgcagcaggcgttccgccaactgtcggggcagatccatgcggatatcgcctcggcgcaggtgaacgacagccgctacctgcgtgacgcgctgaacagccgtctgcgtcaggcggaagggctggcgacggcgccggacatcaaggcggatgacggcggcgcgtgggcgcagtttgtcggcgcgtgggatcatgcgtccggggatgtgaacgccaccggctaccaggcctcgacctacggggtgctgttgggtctggattcggcctacgacgactggcggctgggggtggcgaccggctacacccgcacctcgctggacggcggctacggctcgaacgcggacagcgacaactaccacctggcggcgtacggcagcaagcagtacggggcgctggcgctgcgcgccgggggcgcttacacctggcaccggtttgatacggcgcgctcggtgaactacgggctgcagtcggaccgtgcgacggcgaaatacagcgcgcgcaccgagcagctgttcgcggaggcgggctacagcgtgcagggtgagtgggtgaacctggagccgttcgccaatctggcgtacatcaacttccggaacaacggcatcagcgagtcgggtggcgcagcggcgctgcacggcgacaagcagcatacggacgccacggtgtcgacgctggggctgcgtgcggaccaccagtggcagctgagccgtgaaacggcggtgacgctgcgcggtgaggcgggctggcagcatcagtacggcgagctggagcgcggcacggggctgaagttccgcggcggcaacgcggcgttcgtcagcaacagcgtgccggtctcgcgtgacggcctgttgctgaaggccagcgcggacgtggcggtgagccagaacgcgtcagtgtcgctgggctacggcggcctgctgtcggatcgccatcaggacaacagcgtcaacgccggcttcacctggcgtttctga

SEQ ID NO: 457213 - DNA, 237 bp, Serratia marcescens
atggcgcagcgccagaacaccacgttaaccaccggctggccggacatcagcacaaaccagccaatcgaaccggaaatcagcatcgccgccaccatctccagcgaaccgcgttttatctctgccttcatcgtctgtatcccctgcgtcagtaattgcattagcttgcaaccttttgccgccgcgctccatagccaaaagcaggcagatatgcttaacttcctttttattaaaggctga

SEQ ID NO: 457214 - DNA, 207 bp, Serratia marcescens
gtgcattacattcggcagaaaagccaaaaattaatcccggccggagccgggataatttatcagccgataaagggcaaccagttcaccgtccacgcgctggacgtggaacacattgaggtcgacgcggacgccagcggcgcgatggtcggcttcaacgtgcatttccacagcctgggcagcgccagcctgacggtgctctaccgctga

SEQ ID NO: 457215 - DNA, 294 bp, Serratia marcescens
atgcgcatacctcattatgtgccgttaagtcatcaagccattgatatattgaaagagctaaaagagattagttatgatattatcgatggtgagggcctgatatttattggttgtcataactatagtaaacctatgagcgataataccgttaataaagcattgcggcttatgggctatgactctcaaaaggacgttttcggccacggtttccacacaatggtttgtagtagtctgattgaatccggtatatgggctgaagacgctatagaaaggcaaatgagccatagagaataa

SEQ ID NO: 457216 - DNA, 936 bp, Serratia marcescens
atggggttcagaggtattgttgctacggctttaacaggtaagtttcttgatgatagctatgattatttgaatgatttctacaaatgtaatccgcgatcaatctttgaaaatggaatattttacgcattccaggaaatggaaataccctgtggaaaatcagacccactaaatgtagcaaaaaataataatattttagacgaaaattgggctaaggggaaaagacctcagaaaactgcgatggctgcagttgatttattaagagtcattagcagtgaagatgatgatgttattcgggaaaaaattatcaattatttctttttccgtttgttatcttattcacaggagtgtggttcagtagttattcatactcttaatgaaactttcatttcaaatcagattgttgcttcaaggttaattagctttactcttaattatcctgagtctggaacaataccgcagtttgttatttcgaaaatattaacctctctatataaccaatcgtcaattaatgttgttggaggagatgaaagtgtttttggaactaatactacgtcgagaaaacctgctgatgtatggctagaaaataaaggtgtaatattaaatctctacgaaataactgtaaaaaaaatcgattacaaaagattggacgatagtattcagtcccttgctgatacagactctctggaaaaacccattatattcatatgtcgactaccggatgatataaatactttgagcgggtatcaagaaggtgttctaacgtacaaaaataaatcatttaattttgtggacatatcagggtttattaaaagtactgtggctttattatctccccaccaaattaaacttcttctttccgaaatagaggcatttgttggctcatatttaaggcccgttaagactaaagatggatggaatgaaatatttgccatttga

SEQ ID NO: 457217 - DNA, 294 bp, Serratia marcescens
atgggctatgagtataaggtatttgggaaaggatgtggttctagtgagttatatttttatgtgaaatctgcaatggatggttcatcggattatcttgttactgatttgaatgatagctcattggaggttaaatatcgtacgtcagagtctgattggggggctgatattgagttgtttattgattgtgatgaagtgtttttaaatgttcactcggggaatgctaagaaacttttgtcttatataaaaaatttcctttttcataaatgccttgctgttgattttgaggaaatatag

SEQ ID NO: 457218 - DNA, 438 bp, Serratia marcescens; identical to SEQ ID NO: 456366

SEQ ID NO: 457219 - DNA, 360 bp, Serratia marcescens
atgaaagatattccgggttcagttctccatggcctgattgccgctaaaattggcgaaaccgttgcgggcaactatgtaaagctgcaggagggatggagtgtccacgacccgcaaaatcaagccgatggctctgttaagatgggtgtgttatattccgtattactttttgatctggcagagcagaagtattattccgtcatgcaggtaggtacggtgctggcaaatgatcggaatagcagcgggttggttgttggccagccttttaaatctttacgaccggactctatcatggatgtcctcgactcatggccggttaatgttccctatccaacgttccaggcggaaaggtccgatggctga

SEQ ID NO: 457220 - DNA, 264 bp, Serratia marcescens
atgctcctaactgacatacaaattcgacgctccaaaccgcaggaaaaagcctacgccctcaacgacggccagggtctgtccctccttatcaatactgacggtagtaagggctggcgtttccgctatcgctggactctggcctacagagaagaaatcatgcgtacctttgaacaggatgtgttcccgtacattggtcacagtccgattgctgaaattaagcctttggaactgctggaagcgctacgacgcattgaaaatgcgtag

SEQ ID NO: 457221 - DNA, 699 bp, Serratia marcescens
atgcgtagggcattggggaagactcgcaaggtacgccagcgctgtggagaagtgtttcgctacgcaataattaccggcagggcggagtataatccagctccagatctcgccagcgcgctggctgtgcctaagcaaaagcatcatccgttcctttcggctgaggagttgccttactttgttaaggacttggaagggtataccggcagcatcatcactaagaatgcaacgaagatcgttatgctgaccggagtccgtacgcaagaaatgcgctttgccacgtgggaggacatcgattttgagcgtgctatttgggagatccccgctgaacggatgaaaatgcgacgtccgcatattgtgccgctctctactcaagtgattgagttgttcaaacagctacaaccgataaccggtcactatccttatatttttattggacgaaacaaccgcagaaaacctataagtaaggagagcattaaccaagtgattgaattgttgggttacaaagggagagccactgggcatggttttaggcatacgatgtctacgatattacatgagcatggttttgatagtgctttaattgagatgcagttagcccatgttgataaaaatagtatacgtggaacatacaatcacgcttcatatgttgataaaaggcgccaaatgcttcaatggtatgcgaataatttaggcctctaa

SEQ ID NO: 457222 - DNA, 1389 bp, Serratia marcescens
  misc_feature (1027)..(1036): n is a, c, g, or t
atgcagggagtttacttagaacaaatcatggcggcgtgtcgcgtcatggacgggaaaattgccgaagccaatcgggatctctataaggaagcaagggacaaaaatgtgccacttcggcacgcgacatttggccaagcctatgtgttcgatcacaagattgcgctttcgcggcttgtgtcctttatccatagtggtggcttacgccacactcaagggagagagcttggtgacgctctaaataaatcatggaatgaagcgagcacgtatagcgaattctacgtccttctcggaatcactaggttcacggagcaagcatcatgggctgcgtcatgtgtattggatctccttgagcgtctgaaaagcttgccttatcacctccagctagccgcggtagacttttgtgcccacttgcgaaatgtggatgatgcagtcaaggcaaagatgatcgcggtgcttaaggactcagctaacaaattgggcttgtttatgaattccattattctcgatgcactgaaggggttgggcggactagacgacgaagaagaaaactacagaatagtggtcttagaggagatcgaaagtgtgttctccgagtcgggaccacaggccgatacggaagcatggaatatcttttctcgacaatttgatcatccgcatgagagcatttattgggaagaggtaaacaatctcgctagcgatcagaagcggcagtttctcttcaaggcactcaaaggggcgagcaccgattatgtttcctttgtcggtattttgattcatcagctcgcagatttcggtgatccagcagtttctgaggctattgaaccatggcttaggttgccagccaaaaggtatgtcatcccacaagatacagtcgaggtatttttcgcagcgcatgaagcgatggggattttggggctcccacttcctgctacagtagcatcgtctatcgatatcgatgaaactatgcgagcctgtggggaattagcttactgggcttgccggttgagccatcgtgaacttgagtccnnnnnnnnnnctacgttgttggcttactccgcttcggcaagtgctggagcactttggtcttcaacatctcgaatgttgtcttcggatagtgcaagaactcatgttgcaaagagctatccaaacaccgccctagctgtttgccgcgatgcactaatcaatcgcggggtgcagaagacataccacgaacacggattgaggaatgatttggcgtgcattgcttccttttctattcaagtgattgggcagtttgggggcaccgacgacttgcaatatttacgcagtatttgcgacgatgaggggctgggtcatgcagcactcgacgcgatcaggaaaattgaagagcgcgtccgttaccgaaaataa

SEQ ID NO: 457223 - DNA, 1809 bp, Serratia marcescens
  misc_feature (1793)..(1802): n is a, c, g, or t
atgagcacagcacgtaacagtgagaacaaagtctggttgttcatcggagagcggattgagcacatctcggatcgcgaggttttggccaccgtttgtgatgttctagaaaagggcaccgagtgggcttacatattcgctaactttaacgtgaatgggcgtcaggttgatgtcgcggttttttccgccaccattacgcttgttattgaagccaagggatatacacagcccattaagggaggggtgaacggcagttggacccaaattggatcgtacggtagtcgaaagctacgcaacgggtacactcaagctttggatgctaagaatgcgttacgtgatgcaatatccgagctatttggtgcactttccggctatcccaacgccttgctagctattgtgccagcgattccatcaggctcctcgttaccactgagtgatttcaaggtagctactggcgggttggatgcgatcgcggttgctctccgtgcgatgtcaggatccttgctgagtaaagagcaatgccaagcactcgcagctcatttgaaccttgaacgcgtatcgggaagggatgcggcaattcatgaaactgtgctgttatcagagcgaatagtgtcaagctatgagtctgcttttttggagtttcatagaccaaccggtacactgctagtagaggaccaataccaccttgatgacaaactgatctcagcatctatgattctagagatggttctgtcgtcgcaatctgcgcttctgatcaggggaccgtcaggatgtggaaagtccttgctgagtgctcgcatcgctacggaatgtatccaagtcggtgtgcttcctatccacatccaaggtaaagacttcgagggaaagcttcagaagataattgacgttgagcttagactacttggcacttccgtacgcgatttactaagagcaagtcgtttcctcgtaaggcatattgtcctgtttctcgacggctacaacgaatgcccagaacctttgcgaatgactttgacacgaagtctccaagcgttttcactacgctacggtgcgggtattgtcatcacctcacaaggcaccttggctagacaagagcttctgccagttgaagcgattttagttagtccgccgcaactcgcattgaagttacagctcgcaaaacttaaccaagaagatgaaaacttcacaaactgccaagctctccttgagattgctctctcagggcttgaagctgaactcattgggcaagctgctgcatcactgcctgccggggcaagtacgtttgttctattcgacacggttgcccggatgcgcctcggcaattttgcaacttcgggaattcgggctctttccgggtttgcagaggaactaatttctcaaactgcgtttagtatgtctattcgagagtttgatcgattttgcgatgcgacaaacgtgacaaacatgacgcgggacgcggtccttaagtcgcggcttgtattacagcgcggtgacagactcagtttttctcatgaaatgtttttctatgctttcatggcggagtctgtggttcgcatagcatgcaaagattctgagcgtgtgcaagcttttctgcgctctccgcgatttcatggttctaaggctcttattctcggcgcgatggaggacgattcgacgttaagggatattttggagaaaaccactgatcgggacatcctggagtcttgcgtccgaggagagtgtggagagaccgcaggaagtatcatgaaagtaaagctcgacgtgctactcgccgaaatgatcgcagaggcttctgaacnnnnnnnnnncttctga

SEQ ID NO: 457224 - DNA, 942 bp, Serratia marcescens
atgattagattaaaaaaaccgttgctgctaatgacttttttgtttgtggcaggtgatgttgtcgccgcctgtagttctggcatgaatcgtactcccgttgctaactttccaaacgtgacaatcccaagggatgcgcctgttggtactcttttatattcaggaacaatgagtacatcagttaatgttagtgccaatacaggctcttctttccacatccaggccagggggtttccatatggtgccagtgatgtaagatataatgataaagtggttttcaatacggggcttaatggtgttgggattgcttttaattatactactggtggcccaacaggattcgatgttgactctagaagtggaagctttaccggaaatatcgatggtagcatggagtattatatagtaaagactggtaatatatccggggggagttttaataataggattaccggactttattataactgtgccggagtcaaccttagtagcccttatggccgtgatatctacacgtcaggtaccgtcattgtatccgcgtgccgtgtccttcagacaaacctgaacgttcctatggggaggttgcctgtgcgtgagttctcaggggtagggagtgcgccagataataaagaatatgaaatccccttggattgtgatgcaaatataagagtgagtatgactctggatgcgaccgctgacagttctggcgcgcctggggtgatggcaatagactcatcatctccaggtaattcagcaagtggagtcggtatacagctgttatataataatttgccgataacctttaactcacctattactattgggacagttccttccgccggtccttataatatacctatgatagcgaggtattatcagacgtctgccgatatttctgccgggcaggctaatggtgtggcgacgcttactatgacgtataactaa

SEQ ID NO: 457225 - DNA, 792 bp, Serratia marcescens
atgcgtgaagcaccaagccgtgtgcgttatacatgggaacaagataataaaggtaatccggttcctcatggctggcatacaccacccggtaaagatatggtgcgtgtgcgcaaaatggagtgggacagcagtcgaaaagcgtatacgttcaccacagaggaagatccacgtataacaatcatctggacgccagacagttcaggtgtcaatgttccttcaaatacaggcaaccagaacccggtaaggataccaaatccggtagttgttgacccgttgccggaagatacccgtattgaagctacaaccactccggccccggaagaaaagaattttgcggattatatccttattctgccgttgccgaatattccaccgatttatatatatctgcgaaacaatcccggtcaggtaacgggtaaaggccagaaggttagtggtatttggttgtctgatgctaacacggggaatggttctccggttccaagtcagatagcagataagctacgagggcgaacctttgaaaactttgaccagttccgcaaggctttttggttagaggtttcaaaagatcctgagctatcaagtcagttccgggggagtaacaaaattcatatacgcaatggaaactcccctttcacacgagaacaggatcgtgctggaggaagagaacgctatgaaatccatcatattattccaataagtaaaggtggagaggtttataatgtcgataatatgggcataacttcacctaagcggcatatcgatattcattcaacaaggcagagtaaataa

SEQ ID NO: 457226 - DNA, 726 bp, Serratia marcescens
atgggagcgatagggttttacctgcgggtcggtgactcgactacctgcggggggaagatcttgaccggggatgaaacgtttagctggtatggtgtggcgggagcacgggaaggtgactccgtgtcgtgcggtcagcatccgggaacatatagaattctgggtggcacatctgatacatgggacgaaggcagaaggctagcaggaacgctggacagtgtaagttcctgtccgtgtcgtgcacggtttatacagactatcccggattgctatatcaaggatgatacgccggaagagcaggcagaaaaggcgcgattacttgctcttgtcactctgcgggaagagcaggagcagcagaaagcagaggaaaaacgactggcggaagaacgcgatcgtaatcgcgtctttgccaaatcctgccttcgtggtgagggctgtaatgatgctggggaagagcaggaaccccataccaattttgcatcaatggcattttatcagactgttccacctgctgatccagcatccgatactgatgttccccaacatgctcagaccgccaagaaaaagaaacctgttgaagatattccaaagccgaaaaagcgaagcgccctgtataaatggctgaatggtaatcacgaaaaatcgaataccagcgggcgacagacgtcgctacaagtgctgctaacgcccagacggctgttgaaggtgccagcgttcttgggttggtag

SEQ ID NO: 457227 - DNA, 522 bp, Serratia marcescens
atgcatcgttattcaaggcgcagccggagtatttggccggcgatggggatatttctgctggcgccggttttttcccccgtgcaggcggcgacgggcggcagcggcggtacggaaataaaaatttttggcacgttagtggaaccgccgccgtgccaggttaataacaacaaagtgatcgacgtgccgtttggcgagattggggtcaaccgggttgacggtaaaaattacttaaagcaggtcgaagcgccgctgaagtgtgacgacagtcagttgaaatgggagctctggctggaggttcacggccaggcgacggcgtttgataaagccgctatccagagttccgtgacggatctggggatccagctgatgatggatggtaaaccgctggagctgaataagccggtgctgatttcgcctgtcccggcgctgaaatttgaggccgtaccggtaaaaaaagcgggtgcggagttgcctgaaggggcgtttgacgcctctgccacgctgctggtggagtaccagtaa

SEQ ID NO: 457228 - DNA, 1005 bp, Serratia marcescens
atgaaatggacggtgttgctgaccctgttatttttctggttgcctgcctacgctgaaccagataatacctgttggggagatccggtgaatattgcccttgtagatattgctgctgcggatttttccagcaataagaaaggagcaaggacaacaatgacatatcagactaaccccgcgatttttagcggtgtttgcaatagaagtaggtttttcacttttatgtaccactatgttgatatggggccaactttggtgccgtcctcactgaatcctggttattttaaattaactgatgacgtggatattcgaatgagtagtggtgtgccggagcatttctttcctctgacagccgcagacggtttgggaggcgatgctgttccaccttatgggcaagaggttagaaccaaaccgacttttgaggtcgccggtaaggggaatatttatttaatattgaggagggacattattggtggggctattgctgttccatctgatgttgaacttttttcggcttatcgggtaatggctagcgctccctatcctccacgacctagcagaccaatggttcaggcgcgtacaaaaggcggcggacaggtgataccgataacgccggaatgctcgattaaccagggtaacgttattgaggcgaatttccatacgctgcaaacgagccaggtggttagccgcagcgatggcgaacgctacagtaaagatatcgccctgcgctttagctgtaatagcagcctgacgcaggatattaaggtgcagctggtggcggatagcgccggtttttcatcagatcttatccgtagcgataatagcgccttagggtttgcgctaaaacatcacggtcagttggtgaagccgatgacctcattccccgcccggcttgaagcggggacgggcaatgcaacggttaccctgacgccggtaaaggatcctgacgttgcgttaactgccggtgcttttaacgcttcggccaccttggtgattacgtcgctttag

SEQ ID NO: 457229 - DNA, 444 bp, Serratia marcescens
atgcgatcggtgctgtcagatattttccgcgaggcgattgtcgaggggcacatcgaaaacaaccccgtcacccctactcgcgcggaaaaagtcacagtgaagcgggaacggctggagctgtcgcaatatatccagatccgcaaagcggccgaccagctgccgccgtggttcgatttgtcgatggatctggcgctggccacagggcaacgcagagaggacgtcgcactgatgcggttcgacaacgtcacgaacgggcgccagcagttcgtccaggggaaaacaggtgtcaaattgtcgctgccgcttgaccttgaactcgcagacaccagcctgacgttgcgcgcggtgatagatcgctgccggctggccaacactaccgattccatgctcagcgctggcattcggaaaatagtccggacggttccctacaccctgacggattaa

SEQ ID NO: 457230 - DNA, 876 bp, Serratia marcescens
atgattcaaattcctttattgcgaaacatcggtagacaaaaccagatccatattgccgttcatttcgataattgctcagccgatatgggtcgaaaaggttttcaaagtgaaatagttgattttgctaagagtttagcaaaaaagataatagaagatattatccaaagcaaatacaaaaagtttttcaaagcaaattcgggagctcctgttgatctgaaaaggcaacaccttgttgaaacttggaagagagatttcgaggatcatgaaaaagccatgccacttaatttaattaataagaacttctttaaccccgtaaatgaaatatcaatatcatccatccccactagagagcaagatgttatcgccttatttaatcaacttattgccggcggtgttattcgagggattaaaatcatgtctacgaatgagaactttacttatgacggcatgttcaggcttgagattaaagaaccatttcaacatcacttgtacgatgaggaaataaatcctctagggataacccaagatgtcttggacatctatactgatggattccgtagttcacccaaaatacttgagtacaaattctcgcttgatgggttgatagaaaatatcgaggatggttctaaaaattcgaatgacattgatcttgttgtagtttgggaaatagggaaggattaccaaggtaattacgatgtgatatcatatttgaacaaggataatctagactctcgctcatatcatgggttaacgcatagattaatacaccagaataacaaacaaagtgaaatggagctaattgcaattaaggatttaatagaatatctaaatgacaatgaagaaatttccaaacaacaagaaatcctctacggataa

SEQ ID NO: 457231 - DNA, 1602 bp, Serratia marcescens
atgggagcgatggggttttacctgcgggtaagtgatccgactacctgcgggggaaagatactgaccggggatgaaacactaagttggtatggtgtagcgggagcacgggaaggtgactccgtgtcgtgcggtcagcatccgggaacatatagaattctgggtggcacatctgatacatgggacgaaggcagaaggctggcaggaacgctggacagtgtaagttcctgtccgtgccgtgcacggtttatacagactatcccggattgctatatcaaggatgatacgccggaagagcaggcagaaaaggcgcgattgcttgctcttgtcactctgcgggaaaaacaagaacagcagaaagcagaggcaaaacgactggcggaagaacgtgatcgtaatcgtgtctttgctaaatcctgccttcgtggtgagggttgtaatgatgccggggaagagcaggaaccccatactagttttgcggcaatggcattttatcaggcaattccacctgctgatccagcttccgatactgatgttccccaacatgctcagaccgccaggaaaaagaaacctgttgaagatattccaaaaccgaaaaagcgaagcgccctgtataaatggctgaatggtgatcatgaagaaatcgaataccagcgggcgacagccgccgctacaagtgctgctaacgcccagacggctgttgaaggagccagcgttcttggcctgataggcggaagtgccattacgtcaggaacgtgggcagtaaaactgggtgagatggctacagggcttggaagaatagccaccagcggtcccggtgctcctatcgcagcagtcgtgatgggaatgatgcccggaagactcaatgacggtgaacaggactttattgaccggatgcgtctggaacagatgcgtgaagcgccaagccgggtgcgttatacatgggaacaggatgataaaggtaacccggttcctcatggctggcatacaccacccggtaaagatatggtgcgtgtgcgtaaaatggagtgggacagcagccgaaaagcgtatacgttcaccacagaggaagatccacgtataacaatcatctggacaccagacagttcaggtgtcaatgttccttcaaatacaggcaaccagaacccggtaaggataccgaacccggtagttgttgatccgttgccggaagataccagtattgaggctacaaccactccggcaccggaagagaaggattttgcagattatattcttattctgccgttgccgaatattccgcctatttacgtctatttaagtaaaagacctgaagatccaatttggactcaaagaaggaaaattacacaagttgaaaacgcatacaatcactggaaaaaacacggttcagagtttccggagttagctaactctaaagagtatgttgatgctactcatgactttgttaataaccctccagaaggaacaatgacaaaaacaagaagcaatggtgatattcttttatatcacccagaaagtaatacgttgggcatcaaatctaaaagtggtgctccaagaacgatgtttaaaccaactgacaaaatggattactggaatgatcaatga

SEQ ID NO: 457232 - DNA, 549 bp, Serratia marcescens
atgacagtaaaaaccgatttctatatggaacctattttgttctccacgaaaagtcagtttctttccggcacaactcaagaaatagctagtcatgaggtgatatttgacgaagataaagccaagactttgttgtttagtcaattcccacccactgaatatatgatttggggtgattttttttccgaagaaatatcagaaatcctattaaacaaaaagtatcaagaatcacaagaatctataaagaaccacacaccaaaggctaaggaaagcgaactaaaggaacacattagaaaaagaaaggaatttcttttgagaaaaaaggccggcttacccgtaaataacaaatacgatgacttcaaaaaagaatttagcgatgaggcaatatatatcctcaatatgatatcaactcagagatacttattaggtgagaaaaaaggatctattcttgaatcaatttttgatatattcaaaactggatgcttaccttgtggcgtaaagaaagaaaaaaaagaaatagtaatattcaaccccataaaactaaaagattaa

SEQ ID NO: 457233 - DNA, 438 bp, Serratia marcescens; identical to SEQ ID NO: 456366

SEQ ID NO: 457234 - DNA, 702 bp, Serratia marcescens
atgaatggggggggtatgaatactgtattggaatatatatcaaaaaagaaagctgactatgcgcaactcccgctatttgagtttatgcgtgattccaaattgacggcgaaagatagactttcatttatgccatatttctccttttttattatggctttttctgatttcaataagtttatattgcgtaatgaagcgtcaaccgatgtttatcaacaaaaggttaatgagcatacttatgaagacgatcaccattggccctggtttctcgaagatttggataagctcggttataaccaaaagacgaccacggtggcatgtttacgtgatctgtggagtgatgagacccaagctagccgtaagttaatgtaccagctcagtgcgctagtgacagatatgagcagtattgaacggatagcggcgattgaagcgatagaggaaacgggtaacgttctttttgggcttaccacaccgcttgctaatataatccaaaaggaaaccggcactgaactgcgttattgcggcgaatttcactttgcacttgaatcgggccatgctcaaaggcaggagcatgccgagttaaccaatatcaggttaactgatgatgtaagacgaagatgtataaccaacgtggatagagtctttgaactgtttgaagcctggacttacgaagcattaaataatgcacaacggaaacttacttaa

SEQ ID NO: 457235 - DNA, 1023 bp, Serratia marcescens
atgactaaacttattcgtaaacccgattacgacgacagagccgtgctggatgttacattgaatctttatgcctatcctgctattttggtcggccatcagcttggcttattcaagagcctggggccaagggcaaaaaaactgtctgaaatctgcgatgagttgagtttaaaacgaaggtcctcggaggtcgttttatctgtagctatggcattgggtttcgtaaacagagaatcacaggcatactcgctcacgcaattaggaaaagattatttactcgaagatagtccggcatacttcggttattttttcgatttaatgattgaaaatagcaataattattcaatcaaacaccttgaaaatgccattagagatgatgagccccaggcttatggggaaaaaaacatctttgaatcacataggaatgaatcggaaaaagcaaaaaatttcaccttagccatgcatagcctgagtataggcgctgcaactcaatggccggatatggtcgatttatcgaaaaaccgccttatgttagatattggcggtggttccggcgtgcattctattggtgcagtttcaaggtggcctgaactctgtagtctgatttatgatttggatgagatatgtcattttacgaaagagcatacaagcgactatggtcttcaggacagagttaacttttattctggtgatatgtggcgtgatccgttccctgatgctgattttcatttttattcacacatttttcatgattggcccccagaaaagaatcgcttcctggcggaaaaaagttttaacagcctgtcgaccgggggaagaatcatgattcatgaagttctttacaacgatcaaaagacagggccattagctgcggcagcatttagcgtcatgatgttaggttggacacaaggggagcagtattcaggacgagaactgtctgaactactgagtgacgttggtttcgttgatatcgaagtcatgcccagttttggctattacagtgtggtcacaggtttgaaaccttaa

SEQ ID NO: 457236 - DNA, 264 bp, Serratia marcescens
atgaccgccatcaccgccgccgctatgaccatcgtcaccgccgccgctatggccgtcgtcaccgccgccgctatggccgtcatcaccgccgccggtattaccgtcatcacccccgccgctatggccgccgtcaccgccgccggtctctttctgccggatggtcaaatcgacattttgccgatcgcgcgtcagcgccgtatccaaaaaggccgagtccagcaccgcttcgctgaacatgcctttaataccgtcgccagaagttaa

SEQ ID NO: 457237 - DNA, 1425 bp, Serratia marcescens
atgagattgatttcactatcaacggaagagctcgaaccttttcaattttcccgtatttttcatcccagttcggcacgttatgagttggagtcaaaatatctgttcggggcgtcatcgatgccctcgatcaatcgtcgctatccggtcagccgccgtgagatttccggcgtgggtgtgtcgcagttccgggaagaccggcagataaaaaatcaggtgctggccgagctggaatcggggcagctgcttgccattgatgacaactgttttggctggtcaccggcgcggcacctgttctttatcgaccaagccggccgcctggtgcagtacccggccattttgccgcctctctacccgacggagcggataattcagcgctatgaagcgatggttgcccgctatcacgtccgtccgccggcaacggtactgccccccagctaccggccgaaacagaaatcgccggcagtcgccgcagcggctactgcggcggcggtgcgccaggatccgctggccgcgatgcgggatatgagcaagcgcgaacgctggcaggcccggcaaaatctgatcggccgcgggcagcgcagcatttaccccgatgcgcgcattgccgcgacgcggctgggtgagaacaatatcgccgttgagtatgccaaactggcgcaaaatgtttacggcgtagatgggcgaccggttagggtattggaaacgatgccgaacgtgcccgaagggtggcgcgatattagtaatgatgacaatgcgctacaaaagttgggtttaaaatccactatgttatatagcagtgcaaatgatcctgattttttctcccgagtatatgccccagataaattggtatttggtaatgagatggcgccaaccgtggtcttcagggggactcggatggaaaagatgaaagattggctaaacaatggtcagcaagggatggggattaactcgacctattataaaaaatcagtatcaatcggtaataatttaaaaaattttcctggaaaggttagtattgccggacattcattaggcggtggtcttgcttctgcggcggccattgccagcggtaagcccgcctggacgtttaatgccgcaggcctcaatgccggcacggtagagaaatatggcggcacggccatcggtgacggttcaaaaattgccgcctaccgggtgcatggcgaggtattaacgaagctgcaggaattccacctcttggatgatcttcagagtgtgaactacgatattccgctgctaatggcgaagcggcagctctctgagctattaccgagcgcggcgggcgccgcgaaatggctgccaggcggtgagggtggcgccattgataagcacggtatgcagcaggtgatcgacagcctggaggagcagaaagaggcggatatgaccaccattactaacaggttataa

SEQ ID NO: 457238 - DNA, 870 bp, Serratia marcescens
atgaatttcagcgagctacatcatcttcatttagattttaagcgcaggttgacctctattctgggtaaggaagtttttcctgaaataactttaaacccgccgaccggtgacagtgacgaaatctcattcatccgattagtatcgtgggggtatgtttttgtttacgaggctggaagagcacctttaaattttttaaagaaactacctccattagatggctacactggcaaggtactaccaagtttgcatgctctgagaacatgggcaagccataatttggagttcgagaaatccagtgatgtaaaaactgttcgtgtggcaacagcatggttgattgaaaaatgtcagacaggatcgccttcaaagccagaacattggaaaaaatgttttgatgcaatgggctctgatttaaaaaaactattagaagactgtttattagcgtgtgactgttttgacctacatgaagatagagcagggttgatctcctcatttgaacaaagtctcgataggaattggagtgcttacctttttgatggatatgctgaaaaagctcttcagaaatttggatatgaggggttaagtgcccaacagatcagaatcagtaatttagatgcttggcgaaaaatagttttatcatcaatagatgatgagtctatcaataggaatctaacaatacgggtggaaaatgacatacttaaattaatggcatcatcattccctatgacatctgctgaaataagtaagatcattaatagggatgaaaaagctattgtaactgcagctatgatttacttgagagaattctcaggagataaaatgcaaaattctggtgaggttttaaaagctctacgagagttaaattcgcaataa

SEQ ID NO: 457239 - DNA, 1089 bp, Serratia marcescens
atgaaggcagtatctctcttttgtggtgcgggtggtatggatgttggcgtccaaaacgcaggttttgaaattgttgcggctaatgaactagatccctacgcttgcaaaacctatagagaaaatcataaagaaacctttctatatgaaggagatatagaaaaaaatcttgatgcgataggcaaacataaaggtgtcgatttagtaatcggagggccaccgtgccaaggtttttcagttgctggtagaatggatccgaatgatccacgctcaaaactggtgttctcatattgtgacgtcattgaacgagtcatgcctaaagcttttataatggaaaatgtcaaagccttaggagcattagaaaagtttaaggtgatcagagaagagatatttagaagaatgtcagaattaggatatacactttcaatggtaacccttaatgcaaaagattttggtgtccctcaatccagagaacgtgtttttattataggtttatttggtaaaaataaacctataacatacgctgacttcgagcataaaaaagagaaagccatatctttacgtgaagctataaaacatcttggccccgcaggtggtgaaaaaaactcaagaattaccaaggcgaaaattacccttgctgaaaaacctgtgctgagaaagtctccatatgctggtatgctttttaatggtcagggcagacctctaaatcctgatgcatggtcaagcacactgcctgcgagtatgggtgggaatagaacgcccataattgatgaagggcatttatatgacgatatgccaagctgggttgaagaacatcacaaggctttaatggaaggtacaaaaaaagcggaatacggtgatgctcccaaaagattaagaagattgacgattgatgaagcaatcatactacaaacattcccagatgattatgttttcattggtcctcaatcaaaagtatttagccaaataggcaatgcggtaccttgtaaattagctcaagtcgttgctgaagtagtcaaaaccaaactatctaaagaaacaaaccatcaagaaaataatagtacgcatcaactacccttagagattatataa

SEQ ID NO: 457240 - DNA, 588 bp, Serratia marcescens
atgagtatgcgagatggaaaacgctatgaaaaggtcggatataacacgataaaaatccctcttcaacaacaaggagcctccaatatttggttagcaaagttggctataaatggcggtggatcatgtgattggatgttaagtgaattcaccttggggattgaatataccgatgcaaaaaaattcggtaatgacctagttcctggttcggcggttggtgccacttttgttttcggagatactatgtctagtaggcatttttttaaactttttgatagtgacatcactctgaagcctaaatattatccatacataaaaagatacagcagaataaaagggggggcggagaaagacatgatttcactattcggtgataacactgattttcctgactatcatgtgaatttaaaaaggcaagaagggattaatgttgtatactcaccagtcgtaaatgagtataaaattgccgaaattatttttccttatcaaaaggggaaaggagaacatacaaagatagtttatccagatggctcgtttactgctgatggacgtatttaccctgacttcaaaaaaatggaaggcattaaatag

SEQ ID NO: 457241 - DNA, 372 bp, Serratia marcescens
atgaacatactctcgcgcgccgtgctgctgacgctggccggcagcctgtggctcggtcaggcgcaggcgacctgctaccggatcaccgccaccaacaccaatgccagttcgaactattacaccgatccgagcaagggcatcggcgccgcctggagcggttcgaccgacacctccggctcgatcggcacgctgccgacgacggtgaatatcaataacagcctgttccagccggacggcacgctgatcgccagcggcaccgtcagcgcgctggaggccggctccggcagctacagcgccgatcagatcctgttccgctgcaccgccgatgaggccggcaaactgtatgaatacctgtctcttatacacatctga

SEQ ID NO: 457242 - DNA, 294 bp, Serratia marcescens
atgaaagattatccattactggacaacctcatggggggatactttaatcaggatgcagacctgattacgggttcaaccgaactggaaggaatgattgattattacctacagggggcatctaagaatttgctgcgaaatttaatcagtgaaatggacgattttcaaacagcatattccgacgatctggacaaagcgttttgcgagcgctatcccggagatctggatatgtcgcctgtcggtgagttttttgatgttttccggcgacggatccagacagtattagggcaagattaa

SEQ ID NO: 457243 - DNA, 834 bp, Serratia marcescens
atggtaagagaggaaggtttacgggttgtgctttcgcctgttcaactggcggcgatcctgtcagacaggagtgtcactgaaggggaaaccctaagcaatcgcctatttggcggcctggggcttgccggtggtgttgttgaacttattggtgctggggcgatgtgttatgtaccagaccccacgttgttaacaaaagtcggttgcgtcattgttggcactcacagtctggacagcatcagggctgcttctaatcagatcattaccggtcagccgacaactactgatacttaccaatcagctgtcgcactggctaaaaccctaggggcggatgatgatacggcttacaatgttgggcttacggtcgatattgctgtgccgttgatgtttgcgacagcgataagcgcggtacgtgttgcctctgtaggtatgggcaaaataaggctgattgagcacgagtcaatggcgggagggaagcctggtggccacacaatcgttcgccatgtagggttatccaaggcagctttgttacagcgattggaggagactaaattcgggcgttttcccccacgttctatcagttcatttacgaatcttacgattgctgaaagagcaatctcaagcgctatgaacgccaatcacacactaataaaaaattgggctaaatacccatttcgtaatcttgtcataactcatagggctgtgaatcacgtgggatattacatacagcgaggtgcttctgaggttgtgaaaacctccaaccttaaagttgtcattgagcatggctcttttaacggtaagccttactacatacttaccgcatacccaatcccctag

SEQ ID NO: 457244 - DNA, 1896 bp, Serratia marcescens
atgactcaatccagctataacgctgatgccattgaagtactcagcggcctagaaccagtgcgccgtcgtcccggtatgtataccgacacgcagcgcccgaaccacctcggccaggaggtgattgataacagcgtcgatgaagcgttggctggccatgcaaaacgcattgacgtaatcctgcacgccgatcaatcgctggaggtgattgacgacggccgcggcatgccggtggatatccacccggaagagggcgtgccggcagtagagctgatcctgtgccggctgcacgccggcggcaaattctccagtaaaaactaccagttttccggcggcctgcacggtgtgggcatctcggtggtcaacgccctgtcaaaacgggtggaagtgaccgtcaagcgcgatggcaacgtttacgatatggcgtttgaaaacggcgacaaggtgcaggacctgacggtcagcggcacctgcggcaagcgcaataccggcacccgcgtccacttctggccggacgaacaatttttcgacagcccgcgtttttccgtttcgcgcctcagccatctgctgaaggccaaggcggtgctgtgcccgggcgtggaaatctactttaccgataaggtgaacaataccgagcagcgctggtgctaccaggacggcctgaccgactacctgatggaagcggttaacgggctgattaccctgccggaagcgccgtttgtcggcaccttctccggcgacaccgaggcggtggactgggcgctgctgtggctgccggaaggcggcgaactgctgaccgaaagctacgtcaacctgatcccgaccatgcagggcggcacccacgttaacgggctgcgccaggggctgctggaggcgatgcgcgagttctgcgagttccgcaatattctgccgcgtggcgtcaaactgtcggcggaggatatctgggaccgctgcgcctacgtcttgtcggtgaaaatgcaggatccgcagttcgccggccagactaaagagcgcctgtcgtcgcgccagtgcgcggcgtttgtctccggcgtggtgaaagacgccttcagcctgtggctgaaccagaacgttcaggcggcggagcaactggcggaaatggcgatttccagcgcccagcgccgcctgcgtgcggcgaagaaagtggtgcgcaagaagctgaccagcggccctgcgctgccgggcaaactggcggactgcacctcgcaggatctgagcatgaccgaactgttcctggtggaaggggactcggcgggcggctcggccaagcaggcgcgcgaccgcgagtatcaggcgatcatgccgctgaaggggaaaatcctcaacacctgggaagtgtcgtcggacgaagtgctggcgtcgcaggaggtgcatgatatttcggtggcgatcggcatcgatccggacagcgacgatctcggccagctgcgctacggcaaaatctgtatcctggcggatgcggactcggacggcctgcacatcgccacgctgctgtgcgcgctgtttgtgcgtcacttccgctcgctggtgcagggcggccacgtgtatgtcgccatgccgccgctgtaccgcatcgacctcggcaaggaagtgtattacgcgctggatgaggaagagaaggccggcgtgctggaacagctgaagcgtaagaagggcaagccgaacgtccagcgctttaaaggcctgggtgaaatgaacccgctgcagctgcgcgaaaccacgctcgatccgaacacccgccgtctggtgcagctgacggtcgacgataacgacgtgcagcagacgctggcggtgatggatatgctgctggccaagaagcgttcggaagaccgccgcaactggctgcaggataagggcgataccgccgagctgtcggtatga

SEQ ID NO: 457245 - DNA, 582 bp, Serratia marcescens
atgtcaacgctgctttacctgcacggttttaacagttcgccgcagtcggccaaggcgtcggcgtttaaggcgtggctggccgaccatcacccgcagatcgaaatgctggtgccgcagctgccgccctatccggcggaggcggccgaactgctggaggatctggtgatggcgcgcgccggcagcacgctgggcgtggtcggctcttcgctgggtggttattacgccacctggctgtcgcagtgtttcgcgctgccgacggtggtggttaacccggcggtgaagccgtttgaattgctgattgattatctcgggcaaaacgagaacccctacaccggccagcaatatgtgttagagtctcgtcacgtttacgatctgaaagtcatgcagatcgatcctctggagtcgccggatttaatctggctgctgcagcaaacgggcgatgaaattctcgattacggccaggctgtcgcctattacactgcctgccggcagacggtggagtcgggaggaaaccacgccttcgtcggtttcgaccactacttcccccagattgtggattttttagggctcgccccaaaatga

SEQ ID NO: 457246 - DNA, 828 bp, Serratia marcescens
ttggagagcctgtttaaactgcccgtggcgagtggggccaaggtcaggattttacaaataaccgatacccacctgtttgccggcgagcacgagaccttgctgggcattaacacctaccgcagctaccatgcggtgctggacgcggtgcgcgcccagcagcgggagtttgacctggttgtcgccaccggtgacctggcgcaggatcacacccccgaggcatatcggcactttgcggacggtatctcgcagctgcccgcgccctgcgtgtggctgccgggcaatcatgatttccagccggcgatggtcgacgcgctggccgccgcgggcattaccccttccaagcatgtgctgctgggcgagcactggcaggtgatcctgctggacagccaggtgttcggcgtgccgcacggcgagctgagcgaataccagctggagtggatggagcgctgtctgcaggcctatccggatcgctacaccctgctgctgttacaccaccatccgctgccttccggctgcacctggcttgaccagcacagcctgcgcaacccgcatatgctgggcgcggtgctgctgcgctacccgaaggtcaacacgctgctgtgcgggcatatccaccaggagctggatctgggctggcaggggcggcgtctgctggcgtcgccgtcgacctgcgtgcaattcaagccgcactgtactaattttaccatcgacgatgtttctccgggctggcgttatctcgacctgctgcctgacgggcgcgtggaaactcaggtgtgccgtctggacaacgatgatttccgccccgatatggattcggacggctactga

SEQ ID NO: 457247 - DNA, 426 bp, Serratia marcescens
atgacaaagcgctatacccctgatttcccggaaatgatgagagtgtgtgaaaccaatttcgcgcagctgcggcgtttgctgccgcgcgatgacgaaaccggggaaacggtgacttatcaggtgaacggcgcccgctatcggctgacgattgcggaatccacgcgttacacgacgctggtgacgattgagcagacctttccggcggtcagctactggagcctgccggcgatgacggtgcggctctatcatgacgcgatggttgcggaagtgtgtgccagccagcagatctctcgttttaaagcgcgttatgattacccgaataaaaagttgcatcaacgcgacgaaaagcatcaaattaaccagtttcttgctgattggctgcgctactgtttagcgcatggtgcgatggcggttcctgttgtgtga

SEQ ID NO: 457248 - DNA, 636 bp, Serratia marcescens
atgagcaacttacggcctacgcccgttactttcgacaaaaatgatgtagaaattattgcacgggacacgctgtaccgtggttttttttcactcaatttataccgttttcgtcataaattgtttaacggcggcgtgagcgaagagattacgcgcgagattttcgagcgtggtcatgcggcggtgctgctgccttacgatccgcagcgcgacgaagtggtgctgattgaacaactgcgcatcgccgcggtcgatacctcagactcgccctggttactggaaatggtggcgggtatgatcgaagacggcgaaagcgtggaagacgtgtgccgccgcgaggccgaagaggaggccggcgtgacggtcgggcgctgcaagccggtgctgagctatctggccagcccgggcggcaccagcgagcggctgtcgattatggtcggcgaagtggacgccgcgaccgccgaaggcattcatggattgagtgaagaaaatgaagatattcgtgtccatgtggtcagccgcgaacaggcctaccgctgggtggaggacggtacgattgataatgcggcgtcggtgattgccctgcagtggctggcgttgcaccatgaatcgctcagaaaagagtgggtcaacccatga

SEQ ID NO: 457249 - DNA, 1512 bp, Serratia marcescens
atgaagaaactgctcccccttcttatcggactgagcctgggcggcttcagtgcaatgagccaggcagagaacctgctgcaggtttataaacaggcgagggaaagtaacccggatctgcgcaaatccgccgctgaccgcgatgccgcattcgaaaaaatcaacgagtcgcgcagcccgttgctgccgcagttggggctgactgccggttacacctacggcagcggctaccgcgattccagaaacattgataccgacaccaccagcggctcgctggcgctgacccagaccattttcgatatgtctaaatggcgtgcgctgacgctacaggaaaagaccgccggcatctccgacgtgactttccagaccgcggaacagaaactgatcctcgacaccgccaccgcctatttcaacgtgctgaaggcgattgacaccctctcctacacccaggcgcagaaagacgcggtgtaccgcaccctggatcagaccacccagcgctttaacgttggcctggtggcgatcaccgacgtgcagaacgcccgttccaactacgacaccgtgctggcaagcgaagtcaacgcccgcaacgcgctggacaacgcgctggaagcgctgcgtcaggtgaccggcaccttctacccggagctggcctcactgaataccgaacgtttctccaccacgcggccggaagcggtcaacaacctgctgaaagaggcggaagcgcgcaacctgagcctgctctcggcgcgtctgagccaggatctggcgcgtgagcagatcaaatatgcgcaaaccggctatatgccaaccatcgatatgagcgcctccaccggcgtcactaatagcaagtatcacggcagcgcttccggcggacttaacaacagttacgacggccagaacaaggtcggcatcagcctgaacctgccgatttacagcggcggcgccaccaactcgcaggtgaaacaggcgcagtacaacttcgtcggcgccagcgaacagctggaaagttcgcaccgcaccgtggtgcagaccgtgcgctcctcgtacaacaacgtcaacgcctcaatcagcagcatcaacgcctacaaacaggcggtgatctcggcgcagagctcactggatgcgatggaagccggctaccaggtgggcacccgcaccatcgtcgacgtgctggatgccaccaccacgctgtatgacgccaagcgtcagctgtccgacgcgcgctacacctacctgatcaaccagctgaacatcaagtcggcgctcggcaccctgaaccagaatgacctgctgacgctgaacggcgcgctaggccaaccggtttcaaccgcgccggacgcggtcgcgccacagaaccgcggtcaggacgcctatgccgacggctatcaggacaacgcgccaatgcagcaggttgccgcaccggcgccggccaaccgcgtcaacagcgcaacgccgcagccgacggctccggcggcgacaaccggcagccagccgcgtaatccgttccgcaactga

SEQ ID NO: 457250 - DNA, 1431 bp, Serratia marcescens
atgatcaatatcgtagtggtgtcgcacagcgcgctgttggcgcagggcgtggaggcattggcgcggcagatgatgcgccgcgacggctgccggttggcgctggcggcgggcgtggacgatgagcagaacccgatcggcaccgatgcgctgcaggtcatggcggcgattgagtcggtggccgacggcgacggcatcgtggtgctgatggacctgggcagcgcgttactgagtgcggaaaccgcgctggagctgttggagcctgcgctggcagccaaggtaacgctctgcgccgccccgctggtggagggcaccttggcggcggtggtggccgccaatgccggcggcgggctggaacaggtgctggcggaggcgcggggggcgctgcaggccaagcaggcgcagcttggcgagacggcgtcggcgctgaacgcggccgagctgccgccggcgcagggcaaaagcgtcagctggcgggtgcagaatgcccacggtctgcacgcgcgtccggcggcgcgcctggcggaagcgctggcgcatttcgatgctgagctggtgctggagaagggcggccagcgcgtcgatccgcgcagcctgaatcagctggcgctgctgcaggtgggccatggcgacaccatccggctgagcgccgacggccggcaggcggatgaggcgctggcggcgtttaacgcgctggcgcagcagcacttcggggaagcggtttccggtgaacagccgctgtcgctgcatggggtgccggtggcggagagcgtcagcagcgggccgattttgcagtggcgcagcgtctggccgacgctgccggcgcggcataccggcgtcgacgatattttgcatgagcagcagcgactgcgacaggctctgcagcagacgctcggcgacctgaaccggctggcggagcgcaccgcgacgctgatcggcaaaccgcaggcggggattttcggcgcgcacagcatgctgttggacgacccggatttacagcaggcggcctatacgcgcatcgcccagcagtgttgcagcgccgagcaggcgtggcggcaggagctggaggccgttgcggcggattatcgcgcgctggatgacgactacctgcgggcgcgcgagctggacgtgcgcgatatcctgcggcgcaccctcagctatctgcagcagcagccgattgcgccgattaccctgtcggagccggtgatcttggtgatggacgagataatgccgtcggaggtggtgatgctggaccggcggctggtgctgggcatctgtctgagcggcggcaatgcgctgtcgcacagcgccattctggccaaggcgatggggatgccgatggtggtcggcatgagcgactgcctgttgcagacccgcagcggccagacggcgatgctggatgcggcgcgcggcgtgctgcagctgagcgcataa

SEQ ID NO: 457251 - DNA, 630 bp, Serratia marcescens
atggcgttaacaaaacagcagctggttgactggctgatgcgctgcagcgaggtatttcgccgcgagcgcgactatttgaccgagctggatacggcgatcggcgatgccgaccacggtctgaatatgaaccgcggtttcgagcagttggcggccaaactgccgtcgctggcggaacaggatatcggcgcgatattgaaaagcagcggcatgacgctgttgtccagcgtcggcggcgccagcggcccgctgttcggcaccttctttctccgcgcggcgcaggcgacggccggcaagcagagtctggaactggccgacctgcagcagatggtgcaggccggcgcggagggcgtggcggcgcgcggcaaggcgcaaccgggtgataaaaccctgtgtgacgtctggctgccggtggcggacagcctgagccagtcgctggcgcactctctggacgtcagggaagcgctgcagcaggccgcacagcgggcgcagcaggcggcggaaagcaccgttcccatgcaggcgcgcaaagggcgggccagctatctgggagagcgcagcatcggtcatcaggatcccggcgcgacctcggtgatgctgatgatccaggcgctggcggcagcggcggagtaa

SEQ ID NO: 457252 - DNA, 1071 bp, Serratia marcescens
gtgaaaaagctgattaatcaggttgaatcggtgctggaagagcagttgctcggactgggcgaggcgcatccggaactgctggtgcagcgcgatccgctgtttgtctgccgcgcagacggcccggtgacgggcaaagtggcgctgttatccggcggcggcagcggccatgagccgatgcactgcggctttgtcggcgcaggcatgctggacggcgcctgcccgggagaaatttttacctcgccgacgccggacaaaatgttcgcctgcgggctggcgatcgatagcggcgccggcgtgctgctgctggtcaagaactacaccggcgacgtgctgaattttgagaccgccacagaactgctgcatgacagcggcgtggcggtggcgacggtgctggtggatgacgatgtggcggtgaaggacagcctgtttaccgccgggcggcgcggcgtcgccaataccgtactgctggaaaagctgctcggcgcggcggcggcgcgcggcgattcgctggatgaactggtgacgctgggccaccggctgaacaaccaggggcactccatcggcattgcgctcggcgcctgcaccgtaccggcggccggcaagccgtcgtttacgctggcggataacgagatggagttcggcgtcggcattcacggcgagccgggcattgagcggcggccgttcagcggtctgaatcaggcggtagatgcgatgtttcacaccttgctggatcacggacactaccagcgcacgatccgcgtctgggaccgggtgcagggcgagtggcgggaagagctgcagaccaagcggccgctggcgcgcggcgaccgggtgattgcgctggtgaataacctgggggcgacgccgctgtcggagctgtacggcgtctatcaccgcctggcggagcgctgtgcggaaaccgggctgattgttgagcggagcttggtcggcgcctattgcacttcgctggatatgcagggcgtctccatcactctgctgaaggtagacgacgaagcgctgtcgctgtgggatgcgccggtcaatacgccggcgctgcgttggggttgctaa

SEQ ID NO: 457253 - DNA, 660 bp, Serratia marcescens
atgaaacggaccaaaaacatcaaccaagagacgttccgcaagtcttggcgcagctaccgcatggcgccggtcgcgctggccatcagcgccgtatttatgctcgccggctgtgaaaagagcgacgagaccgtctcgctgtatcaaaacgccgacgactgctcgcgcgccaatccgtccatgagcgaacagtgcaccaccgcctacaacaacgcgctgaaagaagcggaaaaaaccgcgccgaagtacgccagccgtgaagactgcgtggccgaattcggcgaagcgcagtgcacgcaggcgccggcccaggccggtatggcggcagaatcgcaaagcagcggcagcttctggatgccgctgatggccggctatatgatgggccgcctgatgggcggttccggcttcgcgcagcagccgctgttctcctcgaaaaacccggccagcccggccaacggcaagttcgttgacgccaccggcaagagctacggcccggccaccgccggcggccgcaccatgacggtgccgaaaaccgccatggcgccgaaaccggccgtcaccaacaccatcacgcgcggcggctttggcgaaaccgtcgccaaacagaccagcatgcagcgcagcgcggcctccggcacctcctcccgcagcatgggtggctaa

SEQ ID NO: 457254 - DNA, 1161 bp, Serratia marcescens
atgaaacgcattgccattgcagagcgcccggactggcaggccaaggcggcggagttcggctttaattttcacaccatgtacggcgagccctactggcgtgaagacgcctactaccagtttacgctggcgcagatcgaagagatcgaaagcgtcaccgaagaactgcaccagatgtgcctgcaggtggtggaaaaagtggtcgccagcgatgagctgatggccaagttctgcattccgaagcatacctgggagtttgtacgcagctcctggcgcaccaacgcgccgtcgctctattcacgcctcgatctggcctatgacggcgttaacccgcccaagctgctggaaaacaacgccgatacgccgacctcgctgtacgaagcggcgttcttccaatggatctggttggaagatcagatcaacgccggcaagctggatccgcaggcggatcagtacaacagcctgcaggaaaagctgatcgaacgctttgccgagctgaaggcgcatcacggcttcggcctgctgcatatggcctgctgtcaggacagcgaagaagatcgcggtacggtgcagtacctgcaggactgcgcgcaggaagccggtgttcccaccgagttcctgtttatggaagagattggcctgggggaaaagggccagtttaccgatctgcagaaccaggtgatcggcaacctgttcaagctctatccgtgggagtttatgctgcgcgaaatgttctccaccaagctggaggacgccggcgtgcgctggctggagccggcctggaagagcatcctttccaacaaggcgctgctgccgatgctgtgggagatgttccccaaccatcccaacctgctgccggcctattttgccgaggatgagcacccgccgctggatcactacgtggtcaagccgctgttctcccgcgagggggccaatatccgcatcgtgcagaacggtcaggaagtggccaacgtcgacggtccttacggtgaagaaggcatgattgtgcagcagttccacccgctgccgcagtttgaaggtaactacacgctgattggcagctggctgatcaacgatcaggcctgcggtatcggcctgcgtgaagaccgcgagctgattactcaggatctgtcgcgcttctacccgcatatcattttgggctaa

SEQ ID NO: 457255 - DNA, 783 bp, Serratia marcescens
atgacgatttctcgtatgccggcgctgttcctgggccacggcagcccgatgaacgtgctggaagaaaaccgctataccgaaacctggcgccggctgggggaaagtctgccgcggccgcaggcgatcgtggccgtttccgcccattggtacacccgcggcaccgcggtgaccgcgatggaaaggccgaaaaccattcacgactttggcggcttcccgcaggcgctgtttgatactcagtatccggcgcccggctcaccggagctggcggctcgcctgcagcagctactggcgccgacgccggtgctggcggatcgggagtcatgggggctggatcacggcagctggggcgtgctgatcaagatgtatccgcaggcggatataccggtggtgcagctgagcatcgacggcacccagccggcgcagtaccactatgcgctggggcgcaaactggcggcgctgcgggagcagggcgtgatgattgtcgccagcggcaacgtggtgcacaacctgcgcatggcgcgctggcagggcgacggcagtccgtatccgtgggccgaatcgttcaaccgctacgtacgcgataacctgcgctatcagggcaacgatcacccgctggtgaactttatgcagcatgagggcgctgcgctgtcgaacccgacgccggagcactacctgccgctgctgtatgtgctgggcgcctgggacggcgcggagccgattagcataccggtggacggtatcgagatggggtcgctcagtatgctgtcggtgcaggtcggataa

SEQ ID NO: 457256 - DNA, 768 bp, Serratia marcescens
atgtcggtaccgttgattctgaccctgctggccggcggcgccacctttgtgggcgcgctgttcggcattatcggccagaagccgtccaaccggctgctggcctttgccctcggcttcgcggccggcattatgctgctgatttcactgatggaaatgctgcccgccgcgctgcatacgccaggcatgtcgcccatgctcggctacggcatgtttatgctgggcctgctgggctactttgcgctcgaccgcatgctgccgcaccagcacccgcaggatctgatgcagcagccaatcaaaccgcacaatctcaaacgcaccgccatcttgctgacgctgggcatcagcctgcataacttcccggaaggcatcgccacctttgtcaccgccagcgccgatctggagctggggatgggcattgccctggccgtcgccattcacaatattcccgaagggctggcggtcgccggaccggtatatgccgccaccggttccaaaaccaaggcgctgctgtggtccggaatttccggcctggcggagatcctcggcgggctgctggcctttgtgctgctggggccgctgatttcgccggtgatgatggcggcgattatggcggcggtggccggcattatggtggcgctgtcggtggatgagctgatgccgttggcgaaaaagatcgatcctcacaacaaccccagctatggcgtgctgtgcggcatggcggtgatgggctttagcctgacgctgctgcaaagcggcgggctgggctaa

SEQ ID NO: 457257 - DNA, 654 bp, Serratia marcescens
atgaatcagacgctactttcagacttcggcacgccggtagaacgcgttgaacgcgcgctggatgcactgcgcaacgggcgcggcgtaatggtgcttgatgatgaaaatcgtgaaaacgaaggtgatatgatcttcgccgcagaaaccatgaccgttgagcaaatggcgctgaccattcgccacggcagcggcattgtctgcctgtgcctgaccgaagaacgccgtcagcagctggagctgccgatgatggtgaccaacaactccagtcagttccagaccgccttcaccgtgacgattgaagcggcgcagggcgtgaccaccggcgtttccgcttctgaccgcctgaccaccatccgcgcggcgattgccgataacgccaagccgagcgatctgaaccgtccgggccacgtattcccgctgcgcgcgcagccgggcggcgtactgacccgtcgcggccataccgaagcaaccatcgatctggtggcgctggcgggcttcaaaccagcgggcgtactgtgcgaactgaccaatgacgacggcagcatggcgcatgcgccggaagtgattgaattcgccaaacagcatgagatgaccgtgctgacgattgaagatttggtggcctaccgccagatgcacgaaaagcaggcgagctaa

SEQ ID NO: 457258 - DNA, 270 bp, Serratia marcescens
atgattgacccgaaaaaaattgaacagatcgcacgtcaggtgcatgagtccatgccaaaaggcgtgcgcgaattcggggaagacgtagagaagaaagtgcgtcaggttctgcaggcgcagttaggtcgcctggacctggtgaaccgtgaagagttcgacgtacagacccaggtgctgctgcgcacccgcgaaaagctggcgctgctagaacagcgcattgccgctttggaaggcaaacaggccgacgcgccgaagcaggaagaagagtaa

SEQ ID NO: 457259 - DNA, 1251 bp, Serratia marcescens
gtgagcggactgaagcaggaactggggctggtgcagggcgtagggctgctgtccacctcgttattgggcaccggcgtgtttgcggtgccggcgctggcggcgcagctggcgcagggcgacagcctgtgggcctggccgctgctgattgcgctggtgtttcccatcgccattgcctttgcggcgttagggcggcattttcccagcgccggcggcgcggcgcactttgtcgctatggcgttcggtccccggatggggaaagtcaccgcctggctgtttttgtcggtgatcccggtcggcctgccggccgccttacagatcgccgccggcttctggcagtcgacgctggggtggagcgctggcggcctgctgctggtcgagatcgccaccctgctgcttatctggctgctcggcacgcgcagcgccggctccagcgccaatattcagacgctgatcgccgtgctggtggtggcgctggtggccgccatctggtggaaaggcgatattgagccggccgagatcccgtggccggcgcttggcgacgtcgcgccgggcaatatgttccgcgcgctggcggtgatgttctggtgctttgtcgggctggaggcctttgcccacctggcgaccgagttccgtaactcggcgcgcgattttccgcgcgcgctgctgctcggcatgctgctggccggcctggtgtattggggcggcaccgtggcggtgctgcatttccatgcctatggcgagcatcaggcggcggcggcttcgctgccgggcattgtggtgcagctgttcgggcagcatgcgctgtgggtggcctgcattatcggctacctggcctgtttcgccagcgtgaatatttacacccagagctttgccagaatggtgtggtcgcaggcgcagagcaaaccgcacagcgctttggccaggctgtcgtccgcacagacgccggtcaacgctctcagcctggtggtgggctgctgcctgctattcaccttgctgatttatatgctggatttgccgctggatacgttgctggtctacgccaacggtatttttgtgctgatctatctgctgtgcatgctggcggggtgccggctgctggcgggccgttcgcggctgatggcgctggtgggggcgctgctgtgcgtgctgctgctggtgattatcggttggaaaagcgcctatgcgttggcgatgtttgcgctgatttggctgctgctgccgcggcgggccagggtacgcgcggaacaataa

SEQ ID NO: 457260 - DNA, 1431 bp, Serratia marcescens
atgaaagttacgctgcctgattttcgccgcgccggtgtgctggtggttggcgatgtcatgttggatcgctattggtatgggccgaccagccgtatttcaccggaagccccggtgccggtggtcaaggtagatacgattgaagagcgtcccggcggtgcggctaacgttgcgatgaacatcgcctcgctgggcgccaattcgcgtctggtgggcctgaccggcatcgatgacgcggcgcgggcgctgaacgccaagctggatgaagtcaacgtgcgctgcgattttgtctcggtgccgacgcatccgaccatcaccaagctgcgtatcctgtcgcgtaaccagcagctgattcgcctggattttgaggaaggcttctccaacgtggatccgcagccgatgctggagcgcatccagcaggcgctgccgcagattggcgcgctggtgctgtccgattacgccaagggcgcgctgagcaaggtacaggggatgatccaactggcgcgggcggccaaggtgccggtgctgatcgacccgaaaggcacggattttgaacgttaccgcggcgctacgctgctgacgccgaacctgtccgaatttgaagcggtcgtcggccattgcagcagcgaagagcagctggtggagcgcggcatgcagctggtggcggactttgagctgtccgcgctgctggttacccgctccgagcacggcatgacgctgctgcagccgggacgcgagccggtgcatctgccgacgcaggcgcaggaagtgtttgacgtcaccggcgccggggatacggtgatcggcgtgctggccgcggcgctggccgccggcaatacgctggaagagtcctgcttcctggcgaacgccgccgcgggcgtggtggtcggcaagctgggcacctcgaccgttgcgccgatcgagctggaaaacgccatccgcggccgggccgaaaccggctttggcgtgatgaacgaaacacagctgaaaaaggcggtggcgcaggcgcgtcagcgcggtgagaaagtggtgatgaccaacggcatctttgacatcctgcacgccggccacgtctcctatctggccaatgcgcgcaagctgggcgaccgcctgatcgttgcggtcaacagcgacgcctccaccaaacgcctgaaaggggaagcgcggccggtcaatgcgctggaaaaccgtatggtggtgctgggcgcgctggaagcggttgattgggtggtgccgtttgaagaagatacgccgcagcggctgattgccgacgtcctgccggatctgctggtgaaaggcggcgattacaagcctgaagagattgccggcagtaaggaagtgtgggcgaacggcggtgaagttaaggtgctgaactttgaagacggcctgtcgaccaccaatatcatcaacgcgatcaaaggcggacgcggctaa

SEQ ID NO: 457261 - DNA, 2844 bp, Serratia marcescens
atgtcgccactttcagtcgcattacaggctcaggcgctgcaggttgtgcagcgctttcaggacgttaacggtaacgagtgggtgtttgacgagcgggagcagcaggctctggcatcgagcgatttcatcagcgatacgctgctgaatcatccggactggctgacgacgctgcgccggcagccgccgacggccgaggagtgccagcattacgccgcctggctgcaggacgcgctggaagaggtgagtgatgaagcggcgctgatgcgcgagctgcgcctgttccggcgggaaacgctggtgcgcatcgcctgggcgcaggcgctgaacgtctgcagcaccgaacagaccctgcagcagctgagcgcgctggcggaaacgttgatcgtcagcgcgcgcgactggctgtatcagacctgctgccgtgaatggggcacgccgtgcaatgccgatggcgtaccgcagccgctgctggtgctgggcatgggcaagctgggcggcggcgagctgaatttctcatccgatatcgacctgattttcgcctatccggaaaacggccagaccgtgggcggccgccgccagctggataacgcccagttctttacccgtcttgggcagcggctgatcaaggcgctggatcagcacaccattgacggcttcgtttaccgggtggatatgcggctgcgccccttcggcgacagcggtccgctggtgatgagttttgccgcgctggaggattactaccaagagcaggggcgcgactgggagcgctacgcgatggtcaaggcgcggctgatgggcggcttcgacgatccttacagcgccgagctacgcggcatgctgcggccgtttgtattccgccgctatatcgatttcagcgttattcagtcgctgcgcaatatgaaaggcatgatcgcccgcgaggtgcggcggcgcgggttaacggacaacatcaagctgggcgccggcggcattcgcgaaatcgagtttatcacccaggtcttccagctgattcgcggcgggcgcgagccctcgctgcaggggcgctcactgctgccgacgctgcaggcgatcggggagctggggctgctgccggaatcgcagattgcggagctgggcgccggctatctgtttttacgccggctggaaaatctgctgcaggccattgccgaccagcaaactcagacgctgccgcaggatgcgctcgaccaggcgcggctggcctgggggatggggctggccgactggccggcgctgcaggcccggctggacgcgcatatgcgggcggtgagggcggtgtttgacgatctgattggcgatgacggcccggatgcggaggacgatccgcagtgccagcacttcgccggcctgtggctggacgcgctggatgaacaggagatcgcgccgctgacgccgcatctcggcgaagaagagcgccgcatgatgctgcgcagcatcgccgaatttcgtcaggacgttgataaacgcaccatcggcccgcgcggccgcgaggtgctggatcaactgatgccgcgcctgctggcggaagtgtgcccgcgcagcgacgcgccgaccgcgttggcgcggctgactcaactgctgctgagcattgtcacccgcaccacctatctcgaactgctggtggagtatcaggcggcgctgagccacctgattcgcctgtgcgccgcttcgccgatggtggccagccagctggcgcgctacccgctgctgctggacgaactgcttgataccaacacgttgtatcagccggtggcgccggacgcctaccgcagcgaactgcggcagtatctgttgcgcgtgccggaggaggatgaagagcagcggctggaagcgctgcgtcagttcaagcaggcgcagcagctgcgtattgccgccggcgatatcgccggcgcgctgccggtaatgaaagtgagcgatcacttaacttacctggcggaagcgattattgacgcggtggtgcagcaggcgtggaacgatatggtggcgcgctatggccagccgacgcacctgcacgaacgcgagggacgcggttttgccgtgatcggctacggcaagctggggggctgggagctgggctacagttccgacctcgatctggtgttcctgctggactgcccgccggaggtgatgaccgacggcgcgcgcagtatcgacggccgtcagttttatctgcggctggcgcagcgggtgatgcacctgttcagcacccgcacctcatccggcattttgtatgaggtcgacgcgcgcctgcgtccttccggcgcggccggcatgctggtcagcaccatcgaggcctttgccgagtaccagcggcatgaagcctggacctgggagcaccaggcgctggtgcgggcgcgcatcgtgtacggcgatacggcgctgcagcagcgctttgacgccattcgccgcgatattctctgccagccgcgtgatgacgacaccctgcggcaggaagtgcgcgagatgcgcgagaagatgcgcagccaccttgccaacaagcggcgcgaactgtttgatatcaaaactgatgaaggcggtattaccgatatcgaatttatcgcgcaatatctggtcttacgctatgccgcggatgaggcgcgcctgacccgttggtcggacaacgtgcggattttcgagctgatggccaattacgacatcatggcggaagacgaagccgccgcgctgacgcaggcctatgtcgccatgcgcgatgagatccaccatctggcgctgcaggagcactccggcaaagtcagcagtgaacgtttcaccgccgagcgggagcaggtgcgcgccagttggcatcgctggctgggccagcggtaa

SEQ ID NO: 457262 - DNA, 1308 bp, Serratia marcescens
atgaccgttgaaattgaactgaaatttattgccacgccgcaggcggttgccgcgctgcccgcgcagatggcggcctggccgcatcaacacagcgcaccacagcggttaaccaatatttactttgagagcgccgataatttcctgcgccgtcacgatatggggctgcgcatccgtggttttgacgaccgctatgaaatgacgctgaaaaccgcgggcacggtggtcggcggcttgcaccagcggccggaatacaacgtcgctatcgctacgccggaactggcgttgtcacagctgccggcggacatttggccgcagggctgcgacgtcgcggcgttgcagcagctgctgcagccgctgttccgcaccgacttcgtgcgtgaaaagtgggtggttacttacaatcagagcctgattgaggttggcctcgatcaaggcgaggtgcgtgcgggcgagctgacggaagccatttgcgaaatcgaactggagctgcagcagggcgaaacgcaggacgtgctgctgctggcggccgagctggcgcaacagggcgggctgcgtcagggtagtctgagcaaggcggcgcgcggctattatctggcgcagggcgcgacggcgcgcgaggcgcgcccgctgccggtattgcatgcgccggccaaggccagcgtagaacagggcatgatcgccggtttagaactggcgctcgaccattggcagtatcacgaagagctgtggctgcgcggcgacgccgcggggcggctggcgattgcggatgcgctggtgctgatacgtcaggcgctggtggtgttcggcgggctggtgccgcgcaaggccagcgccggcttgcgcagccgcctgtccgagctggagccgctgttggatgccgcggacgccgaggcgcagacgctgtgctacagcccggcttatctgcagtgtaagttggcgctcacatcatggttggtcagcggcgcctggcgcgcgtttattgacgccaaggcgcaggccaagctggacggttccttcaagcgcttttgcgacattatgctggggcgcagcgccgccgacctgaaagagggctttagccgtccgctgagcgacgacgagttccaggagcagctgccgcgtctgaagcgccagctggcggcctttacgctgctgtccggcgcctatgcagatgcgctgtccgagccttatctgtacggctggcgcgagctgcaggcggcactgtccgggcgtcgtcagggctggtacgaaagctgccgcaagcaggctttatcccatgcgccattctggctaaacggcgcggttcgttaa

SEQ ID NO: 457263 - DNA, 630 bp, Serratia marcescens
atgaaaaaaatgcagaaattacgcctgattttcctcgccctgctgagcttcagcatcacttggggcgcacatgccgaagataaacgctatatctccgatgaactgaacacctacgtgcacagcggcccaggcaaccaataccgcattgtcggcacgctgaacgccggcgatgaagtcacgctgctcagcgtaaacgacagcaccaaatacggacagatccgcgatgccaaaggccgcagcgtgtggatcccgcttgaccagctcagcaacacgccaagcctgcgcacccgcgtgccggagctggagcagcaggtgcagaccctgacggacaagctggctaatattgataatagctggaaccagcgcacggccgaaatgcaacagaaagtggccgccagcgacagcaccatcagcggcctgcaggaagaaaaccaggcgctgaaaaatcagctgcaggtcgcccagaagaaggtgaacgcggtcaatctgcagcttgacgacaagcagcgcaccattatcctgcagtggtttatgtacggcggcggcgtcgccggcatcggtctgctgctcggcctgctgttgccgcacctgctgccgcgacgtaaaaataacaaccgctggatgaactaa

SEQ ID NO: 457264 - DNA, 1233 bp, Serratia marcescens
gtgaaaatttacctggttggcggcgcggtgcgcgacagcctgctggaactgccggtggtcgaccgcgactgggtggtggtcggcgcgacgccggaacagttgctggcgcagggctaccagcaggtcggtaaagattttccggtctttctcaacccgcaaacccatgaggaatacgcgctggcgcgcaccgagcgcaaatccggccacggctataccggttttacctgctatgccgcccctgatgtgacgctggaagaggatttgctgcggcgcgatctgaccatcaacgccattgcgcaaaccaccgagggcgaactgctcgacccttatcatggcgtgcaggatctcaacgcccgcgtgctgcgccacgtttcggcggcgtttggcgaagacccgctgcgcgtactgcgcgttgcgcgctttgccgcccgctttgcccacctgggcttcaccattgcgccggaaaccgccgcgctgatgcgccagatggccgacagcggcgaactggcggcgctgaccgccgagcgcgtctggaaagagacggaaaaagcgctgcagagccgcagcccacaggtgtacttccaggtgctgcgcgactgccatgcgctgggcgtactgttcccggagatcgacgcgctgttcggcgtgcccgcgccggagaaatggcacccggagatcgacaccggcatccataccctgatgacgctggcgatcgccgcacggctcagcccggagacggacgtgcgcttttccgcgttgtgtcacgatctgggcaaggggctgacgcccaaagaatactggccgcatcaccacggccacgggccggcaggcgtgcgtctggtcgaagccatgtgccagcgcctgagggtgccgaacccgctgcgcgatctggccaaactggtggctgaatatcacgatctgattcatacggtaaataaactacggccggaaacgctgctcaagttgttcgacgccatcgacgtctggcgcaagccgcagcggctggagcaaatcattctgaccagcgaggccgacgcgcgcggccgcaccggctttgaggaacagccgtatccgcagggcgactatctgcgcgaggcgtaccggatagccagcgacgtatcggtgaaagaggtggtggccagcggcctgcagggcccggcgattcgtgaggaagtgcagcgccgacgccgacaggcgctggcaaactggaaagcggcgcagccccagccgtag

SEQ ID NO: 457265 - DNA, 825 bp, Serratia marcescens
atggcggacatgcattcactgtttgtggcatttgttcttggggtcgttgagggattaacggaatttctgccggtgtcttcaaccgggcacatgattatcgtgggcgagtggctgggctttaccggcgacaaggcgaaaacctttgaagttatcatccagttagggtcgatcctggcggtggtggtgatgttctggcggcgcctgttcggcctgatcggcatccatttcggcggcaagccggtggcgcacgaggggcatacgccgggtcatctgaaattaacccacattctgctggcgatggcgccggcggtggtgctggggctgctgttccatgaggtgattaaatcactgttcgagccgaaaaacgtgatgtatgcgttggtggtcggcggcgtactgctgctgacggcggaatggctgaagcctaaaaagccgcgtgcggtcggtctggatgatatcacccaccgtcaggcgtttatgatcggctgcttccagtgtctggcgctgtggccgggcttctcgcgctccggggcgaccatctccggcggcatgctggtcggcgtcagccgctatgcggcttccgagttctcctttatcctcgcggtgccgatgatgattggcgccagcgggctggacctgtacaagagcctgcacttcctgacgctggcggacctgccgatgtttgccgtcggctttgtgaccgccttcctggtggcgctggtggcgattaagaccttcctgacgctgattaagcgcatctcgtttgtgccgttcgccatttaccgctttatcgttgcggctgcggtatacgtggtattcatgtaa

SEQ ID NO: 457266 - DNA, 360 bp, Serratia marcescens
atggatatcgtatttattgaggagcttaccgtaatcgccaccattggcgtttatgattgggaacaaacgattcgccagaaactggtgttcgatatcgaaatgggctgggataaccgcaaggcggccgccagcgatgacgtcaacgactgtttgagctatgccgatatcagcgaagcggtgattcaacacgttgaatccgggcgctttgcgctggtagagcgtgtcgctgaggaaatatccgaaatattgctccagcgctttaaatccccatgggtccgtattaaggtcagcaagccgggcgcagtggcgcaggccagccgggttggcgttgtgatcgaacgaggccggcgcccgacgtaa

SEQ ID NO: 457267 - DNA, 636 bp, Serratia marcescens
atgagtgctaccgcgcttggcatgattatcttcgcgtatctgtgtggctccatctccagcgcgatcctggtttgccggatcgccaggctgccagatccgcgcgaacatggctcaggaaaccccggggcgaccaacgtcctgcgtatcggcggccgcgttgcagcggcggcggtgctggtattcgacattttgaaagggatgctgccggtgtggctggcgtataagctcaacgtaccgccgctctatctggggctgacggcgatcgccgcctgcctgggtcatatctatccggtattcttccatttccgcggcggcaagggcgtcgccaccgccttcggcgccattgcgcccatcggctgggacctgaccgggctgatgaccggcacctggctgctgaccgtgctgctcagcggctactcctcgctgggagccatcgtcagcgcgctgattgcccccttctatgtctggtggttcaaaccgcagttcaccttcccggtggcgatgctctcctgcctgatcctgatgcgtcaccacgataatatccagcgcctgtggcgcgggcaggaagggaaaatctggaaaaagttccgcaagaacaagggcgatgcggcggacgccgacaagccggaagagtaa

SEQ ID NO: 457268 - DNA, 1014 bp, Serratia marcescens
atgcgagtactgggtatagaaacgtcctgcgatgaaaccggaatcgcagtgtatgacgatcgggccggtttattagccaatcaattgtacagccaggtgaagctgcatgccgactacggcggcgtggtgccggagctggcgtcacgcgatcacgtgcgcaaaaccgtgccgctgattcaggcggcgttaaaggaagcgaatctgagcgcggcggatattgacggcgtcgcctataccgccggccccggcctggtgggcgcgctgctggtcggcgccaccatcgggcgtgcgctggcgttcgcctggaacgtaccggcggtgccggtgcaccatatggaaggccacctgctggcgccgatgctggaagacaacccgccggcgttcccgtttgtggcgctgctggtgtccggcggccatacccagcttatcagcgtgaccggcatcggcgagtacaccctgttgggcgagtcgattgacgatgcggcgggggaagccttcgataaaaccgccaaactgctggggctggactatcccggcgggccgatgctgtcgaaaatggcgcagcaggggcaggcggggcgctttaccttcccgcggccgatgaccgaccgtccggggctggacttcagcttctccgggctgaaaacctttgccgccaacaccatccgcggcaacggcgacgatgcgcagacccgcgccgatatcgcccgcgcgtttgaggatgcggtggtggatacgctggcgatcaaatgcaaacgcgcgctggagcagaccggctttaaacgcctggtgatggccggcggcgtcagcgccaaccgcaccctgcgggcgaaactggccgagatgatgcaaaagcgcggcggcgaagtgttctacgcccgcccggagttctgcaccgacaacggtgcgatgattgcctatgccggcatggtgcggctgaaaaacggcgccaacccggaattgagcgtatcggtgcggccgcgctggccgctggcggaactgccggcggtataa

SEQ ID NO: 457269 - DNA, 216 bp, Serratia marcescens
atgccggtaattaaagtacgtgaaaacgagccatttgacgttgctctgcgtcgtttcaagcgttcatgcgaaaaagcaggcgttttagctgaagttcgtcgtcgtgagttttatgaaaaaccaactaccgaacgtaagcgcgctaaagcttccgctgtgaaacgtcacgcgaagaaactggctcgcgaaaacgcacgccgcactcgtctgtattaa

SEQ ID NO: 457270 - DNA, 1752 bp, Serratia marcescens
atggctggacgaatcccgcgtgtatttatcaatgacttgctggcgcgcaccgacatcgtcgatctgatcgacgcccgggtgaagctgaagaagcagggcaagaactaccacgcgtgctgcccgttccaccacgagaaaacgccctcgttcaccgtgaacggtgaaaaacagttttaccactgtttcggctgtggcgcgcacggcaacgccgtcgatttcctgatgaattacgacagactcgagtttgtcgaaaccattgaggaactggcgaccatgcacgggctggaagtgccttacgaggccggcaccgggccaagccagatcgaacgccatcagcggcaaagtctttaccaactgatggaacagctcagcacgttctatcagcagtcactgcagcaaccgaacggcaagcaggcgcgtgattacctgcagcagcgcggattaagtgacgaggttatccgccatttcgccatcggtttcgcccccgccggctgggataacgcattaaaacgctttggtcgcgagcgcgacggccgcaccacattgaacgatgccggcatgttggtgactaacgatcaagggcgttcttacgaccgtttccgcgaacgcgtcatgttcccgatccgcgacaagcgcgggcgggtgatcgccttcggcggtcgcgtactgggcgacggcatgccgaagtacctgaactcgccggaaaccgaagtattccataaaggtcgtcagctgtacggcctgtatgaagcacagcagagccaccccaagcagctgcagcgcctgctggtggtggaaggctatatggacgtggtggcgctggcgcagttcggcatcgattatgccgtcgcctcgctcggcacctcgaccacggcggaacacattcagctgatgttccgcgccaccgacaacgtggtctgctgctatgacggcgaccgggccggccgggaagcggcctggcgcgcgctggaaaccgcactgccctacctgaacgacgggcggcagctgcgctttatgtttttacccgacggtgaagatccggacacgctagtgcgcaaggaaggcaaagaggctttcgaacaacgaatggagcaggcgcagccgctttccactttcctgttcgaaaccctgctgccgcaggttgacctgagcagcccggacggacggaccaagctgagcgcgctggcgctgccgctgattagccaggtgcccggcgaaacgctgcgcctgtatctgcgccagcagctcggcaacaagctggggctgctggacgacagccagctcgacagattaatgcccaaacaggctgaaaacgccaatacttatcaggcgccccagctaaaacgcacaaccatgcgtatactgataggattattggtgcaaaatccgcagctcgccgcgctggtgccgtcgctggacgggctggagcagaccaaacaggcggggctgccgctgtttgtcgaactggtgcaaacctgtttgtcgcagccggggttgaccaccgggcagcttctggagctgtatcgcgacaacaaattcagccagcagcttgaaacgctggccacatggaaccatatgatcgttgaggatatggttgaacaacattttattgacacgctaacgaatctttacgactcagtgctggaacagcggcaggaagagctgatagcccgtgacagaacgcacggcctgaacgccgctgagcgccaggagctgtggtcattacagctggcgttagcgaagaaagactga

SEQ ID NO: 457271 - DNA, 1839 bp, Serratia marcescens
atggagcaaaacccgcagtcacagcttaagctacttgtcacccgtggtaaggagcaaggctatctgacctatgctgaggtcaatgaccatctgccggaagatatcgtcgactccgatcagatcgaagacatcatccagatgattaacgacatgggcatccaggtgatggaagaagcgccggacgccgatgacctgttgcttgctgaaaactcaaacaacaccgatgaggatgctgaagaagcggctgctcaggtgctctccagcgttgagtccgagattggccgcaccactgacccggtacgcatgtacatgcgtgaaatgggtaccgttgaactgctgacgcgcgaaggcgaaatcgacatcgccaaacgcatcgaagacggtattaaccaggtgcagtgctcggttgccgaatacccggaagccatcacctatctgcttgagcagtacgatcgcgttgaagcgggcgaatctcgcctgtccgatctgatcaccggcttcgtcgatccgaacgcggaagaggatcttgcgccgaccgccacccatatcggctccgagctgtcgaccgaagagcaggacgatgacgacgacgatgacgatgacgacgacgattccgaagacgataacagcatcgatccggaagttgcccgtcagaagttcaccgaactgcgcgagcagtacgaagcgacgcgtcaggtgatcaaggccaacggccgcagccatgccaagtccgcagaagaaattctgaagctgtctgaagtcttcaaacagttccgcctggtgccgaagcagttcgacttcctggtcaacagcatgcgcaccatgatggaccgcgtacgcacccaggaacgcatcatcatgaagatgtgcgttgagcagtgcaaaatgccgaagaaaaacttcgtcacgctgttcgccggcaacgaaaccagcgattcctggtttgaagccgcgctggcaatggccaagccatggtcggaaaaactgaaagacgtcgctgaagacgtgcagcgcagcctgcagaaactgcgccagatcgaagaagaaaccggtctgaccattgagcaggtcaaggatatcaaccgccgcatgtccatcggcgaagccaaagcgcgccgcgccaagaaagagatggttgaggccaacctgcgtctggttatttctatcgccaagaaatacaccaaccgcggtctgcagttcctcgatctgattcaggaaggcaacatcggcctgatgaaagcggtagacaagttcgaataccgccgcggctataagttctcgacctacgccacctggtggatccgtcaggcgatcacccgttccatcgccgatcaggcgcgcaccatccgtattccggtgcatatgattgagaccatcaacaagctcaaccgtatttcgcgccagatgctgcaggaaatgggccgcgagccgacgccggaagagctggctgaacgcatgctgatgccggaagacaagatccgcaaagtgctgaagatcgccaaagagccgatctccatggaaacgccgatcggtgatgatgaagattcacatctgggcgatttcatcgaggataccaccctcgagctgccgctggattccgccacctcggaaagcctgcgctccgcaacgcacgacgtgctggccggcctgaccgcgcgtgaggcgaaagtactgcgtatgcgtttcggtatcgatatgaacaccgaccacacgctggaagaagtgggtaaacagttcgacgttacccgcgagcgtatccgtcagatcgaagcgaaggcgctgcgtaagctgcgtcatccgagccgctctgaagtgctgcgcagcttcctggacgactaa

SEQ ID NO: 457272 - DNA, 498 bp, Serratia marcescens
atggaacttttggcgccccatctgcgggtggtgttttgcggcatcaatcccggcctttcttccgcccatcgcggctatccgtttgccaatgccagcaaccgtttctggaaggtgattcatctggcgggatttaccgcccgtcagctggcgccggaggagtggcagcagctgcaggagtacggctgcggcattacggcgctggtcgcgcgcccgacggtggcggccagcgagctggcgcgtgaggaactgcgccgcggcggcgaggcgttaagcgataaaattctgcgctgtcagccgcgcgcgctggcgatcctcggcaaacaggcgttcagcgatgccttcggcatccgcaaggtgaactgggggcggcaggcgctgacgattggcgataccgaggtgtgggtgctgcccaatcccagcggacttaaccgcgcgacgctggagtcgctgacggacagctaccgtcagttggcgtcggcgctggaaaacggacaataa

SEQ ID NO: 457273 - DNA, 1011 bp, Serratia marcescens
atgaatatttctaatgtatatcgctataagttagaaagttttttaaacacacggggatgtttgcaggatctttctccgttttattacaaagaagatgagcaggatctttatctgctggcaatgaaaaatgatagggggaggttacaatcactgagtcgttggcatgatgttttttccattcgccgtctggctaattggctaaacaagctggggtatagtgcggatgacgtctacttcattaacatcctgttgtcacggttaggatatttatttgacatagataaccgggagcgtttggataaggatatatttattctctactacacgctacagcttgttagtctgaaaggttcaataatgtcagataaggaaaaacaccagaattacatgctacgatttctatgttttgaactaggcatagaacatgagtgttactcaaagttaaagattgccgataattgcatttttttcgaaaccgaaaatcttgggcttattccggttaaagagatcgtaagcaccattttccagttttttgatgttgatgaaaaaaataaaaaggagttgctagccggtattgttaacttccagttatcatcattggattttatttgtgaggatgatgatgagttgtttaggataaacttcaatgataccaatgagtaccttatttatcctgatgagtttatgagcgcttatgtgaaagataaaaaagtagtgttccaggctattagcgatagttttaatgaatatcagtcttcttataatcttcttatttctaattttataataattaactatgcttattatattttgcaaagccgacctaagtgtctattagcgttacaaaaatatattgccgacgataggttgtttagccaaatagtgactacattggcttaccgtaaggtcggcattacccatgcaggcattgagaagttaggactcggtgacttcgttaagcctgggttaaatgaacggacacgtcttttcaatttgatttatgccaaatga

SEQ ID NO: 457274 - DNA, 213 bp, Serratia marcescens; identical to SEQ ID NO: 456922

SEQ ID NO: 457275 - DNA, 321 bp, Serratia marcescens
atgcttcgcatggataacggcccagaatttatctcgctgactctggctgaatgggcagagaaacatacggtaaaactggaatttatccaaccgggtaaaccgacgcagaacgcattcattgaacgctttaaccggacatatcgcacagaaatactcgatttttatctgtttagaacactgaatgaagtacgtgaaatcacggagcgatggctgtcggaatataactgtgaacgcccgcatgaatcactgaacaacctgacgccggaggaataccgtcaacagtattacttagccgggatctcaaaaagtgtatggaactaa

SEQ ID NO: 457276 - DNA, 267 bp, Serratia marcescens
atgcgcaaagcccgttttactgagcatcagatcatcgccgtgattaagtcggctgaagccggacgaactgttaaggatgtctgccgcgaggccggtatctctgaagcgacctactacaattggaaatctaaatacggtggtatggaagcctctgatattaaaaagataaaggatcttgaggacgagaacaggcgtctcaagcaaatgtttgctgacatcagccttgagaaccgggcattgaaagacgttatcgaaaaaaagctttga

SEQ ID NO: 457277 - DNA, 267 bp, Serratia marcescens; identical to SEQ ID NO: 457276

SEQ ID NO: 457278 - DNA, 321 bp, Serratia marcescens; identical to SEQ ID NO: 457275

SEQ ID NO: 457279 - DNA, 444 bp, Serratia marcescens
atgacaagaaaggtctttttcagtttccagtacgaagatgtacaacgagcaatgaatgtacgaaacagcaacgtaatagcttctaataccaacgtagggttcattgacaaagcagattttgaagaagttgaacgtaagggggatgctgccatcaaaaaatggataaacgatcaactacacggcactagcgtcacagtcgttctggttggagccacaacagacaagagcaaatgggtgaaatacgagatcgagcaaagcattgaacgtgggaatggtgttttgaccattgatataagtaaaatagccgatctcaaaggaaatacaaccaactgttgttcgcttcgtgtacctggtagtccccattacttatggaacaagcaaaacggtcgcgaaaacctaggtaagtgggttgaggttgcagcaaaagcggcgggtaaggcataa

SEQ ID NO: 457280 - DNA, 1434 bp, Serratia marcescens
atgaaaaaagaactccggcggctcgtagacaacttgtccaaagagctaaccgagggaaatcttgcaatttttgcaggtgcaggtttgtctagaccagcaggttttgtggactggaaatccctgttgaggccaatagctgatgacttggatcttgatgtcgagaaagaatgggatctggttacactggcgcagtaccatgctaatgcaaatgcgaccaatcgctcaaagctgaatcagatgctggtaactgaattctcgtctgatgtaacatcaactgaaaaccatgaaatcctagcaagactacccattcagacctattggacaactaactacgacaaactcatcgagggttcactcgagaggaatggaaaagttcctgatgtcaagtacaccaataaacagttggccactactctccctaaacgagacgcggtggtttacaagatgcatggggatgtcaatcatgcatcagaagcagtactgacccgtgatgactatgagcgttatcatgtaaaaatgcagccatttatcacggcactcagcggtgacctgatagccaagacctttctatttttaggtttcagtttcaccgatccaaatcttgaatatattctaagtcgagttcgaattcagttcgcgcaggatcagcgccaacactactgtattcttcgtaggacaagcatattggaaggcgaggagcgtgctgacttcgaatatcgtcagcgcaaggaagagctattcaagcatgagttgttacgggttgggataaaagctgtatacgtcgataatttctcagacataacagacattctacgagagatcgaacgccgtcacaaacgtaaaactatttttatctcaggcgcagctcatgactacagtccttggaccaaaatcgaggcggaacaatttgtttacaagctcagtaaagctattaccaaagagcaataccgagtcatttctggattcggtttgggtgttggtagtgcagtaatcaccggggtgctagaacaaacaatcatgaacggtagtcgacttgacaatgatcaattggttctgcgtccattccctcaaaaccaatccggcgagcgtcccttaaatgcgctctggacggagtatcgccgtaacatgcttgctcatgcaggtattgcccttttccttttcggcaacaagctggacaaatctggtacgatagtgccatctagcggaatgcgcgaagaatttgatattgcagttgctaatggcctcttcatcatccctgttggcattactggttcaatctctgctgaactgtggaaagaagtaaccaagatgtacgacgaatcacaatacgaacatggggaaaaaatcacccctttgctttatgagttaggctcccaaaatactgacttagcccgtacccacgatatcatcatgaccctcctacctctaatttaa

SEQ ID NO: 457281 - DNA, 519 bp, Serratia marcescens
atggcactatacggaaagtttatagttaatgatgcggattattcaccgctgactctttatggtatcggtacgtttctcgccttctccggcaacgggaattaccggaacgcgccggggtgcggagctatccccaacaacggcccaattccggcggggaaatactggattgtggatcgcccctctggaggatatagagaaccgataaagacgtggtttagtgatgtgataaaccgcagctttcgcaacattccaaccggtaagagggaatggttcgggctattcagggacgatggaaccatcgatgattatacgtgggtcagagggattgagcgcggaaactttaggctacaccccggcactatctccctcggttgtatcacgctaaaacatcactcagactttgccgcaattcgtagcgctctactgagaactaaaacaatcaatatcagaaatacgagattgcgcgcgtatggtatgattaatgtgattagcaatggagaatgcaaggtaagcggatga

SEQ ID NO: 457282 - DNA, 165 bp, Serratia marcescens
atgctgcgtcacctgggctggttcgaagcagccgacctgatcgttaaaggcatggaaggcgctatcgccgccaagaccgtgacctatgacttcgaacgcctgatggaaggcgctaagctgctgaaatgttcagagtttggcgacgctatcgtcgaacacatgtaa

SEQ ID NO: 457283 - DNA, 1194 bp, Serratia marcescens
atggcattaattagtggtttgttgttggggccgtatggcgatccgctcgctggcgtagctattaaaatgtcagctttgaagacgtcatcaacggttgttgataagtctacgtctatatcaattactgacgaatctggcaaatattcactatctgtagagccaggtgtgtatgctgtaattatctcgtctaacggttgccctccagcccgtgttggcagcattacagtttatgtcgattcagtggacggcacgcttaatgattttctgacgcaaccgggcgaggatgatttaacgccagaaatcgtcaaaacagttgagcgcatgcgcgcagaggcggcagcatctgcagcctctgcgaaagagagcgcgaataaatcaacagcagcgatgaaaaacgcgctaagcaaaacagacactgcagatcagacagttgctagttcggtgacgtttaaaaaggcagtctatattaattcgtcagctgttttaaaagccggagacgccggcttaggatcaacaacaacacctgttgtcgcatctgttaatgacagaacgctcgtaaacggtttttgccggggaactccagtatcgggtgctcctggagctggggcgtgggcgtttatgagcgggggatacgatggctcatcaaagtggcagttgtcctttcccatgggatcgaaaggttttcgaatgtttggccgcttcagtagccctggaggctcccccggcgacgagtcgagttactacggtgcatgggctgaaatgtggcataacaaaaatacgactgtagacgctaacggatttttaaaaaaagcatcgccgatcgcgcggcttgctggtgatccgaaaaaaatgcttgatgattatttagatggcttcgcgcttgctggctatgttgcagtaaacgatgaggcatctggtgtatcagctgagcgcctatctgttggcgtctataaagtgtcgggtgcactcggatttgctaaagagggttggcacgtagaagtaccacaagacactaacggtaaccggctgtgcttcgtcgaggcatttgctgacaaagacggagttatcactgtgaacgtcagcaaacgcaggtttgacgttgagtctgcggcaatcgtggccggtgagccgatggatattcctgacggtcgctgggtagatctgcgtttagagatgccggcattgtcagactga

SEQ ID NO: 457284 - DNA, 1182 bp, Serratia marcescens
atgtcagcaggcacaataacattaacgaataattccgatacagtaactggcgcaggaacagcatttacaaaagacctaaaacctggggatttcatcgtctccgttgtcggcggcatcacgtacacgctcgctgtgaaaacagtcgatagcaacacaaaagctacgctgttaaaagcatacggcggcccgacacaggccggcgctgcgtggtctgcagttcctcgcgacgcgatgaatgcaatcactgcgcaattggctgcagaaacagcttcagcgcttcgcgggctaaattacgataaacagaactggcagcaggtattcagcggaacggggaatattactgtgcgtttgcctgacggcagtacattcacagggccagcctggaacagttttaatgctgcattaaacggaaaagccgacaaaacggaacttgatagcaagttggataaattaacgacaactgctcaggaagttaaaagtccactttcattaaatgggtctataacactaaaaaacaatgcaaatatagatgttgctggttttggtcggtttagaaagtccgtaacgttcgatgaaacaatttggtccccacgggggatgacctgcatcagtggtgtcaatgattcaaacccgtccattacatgtgctggtcaatattcagcaagctccggttcattttcaggcggggttattgagtcacacctcacaactcagggtgtaacgaaaaaattaatcatgacaacgttccaagatatcggcgttactgattatggtttgatatcatatcaagattaccaaggtaattggcatgagataagatttcaaaattatggcgatgtaactaatctaacagggaactgggtcagtggttctgatcgtcgtattaaaactgatataaaagaaattgacgacccaatatctttaattcgagaactgaagctttatagcggaaagcgcgatggtaaaccattcattggcggaattgctcaggaaattgaaaaaacgttaccacttcttatttcaagtggtggttcgttgacgctgcaaaccggagaagttgttgagcaagtaaaatccgttgactattcaagtcttggttatgttgctcttgcagcactgaatcaggcattggatagaatagagttattagagagaaaagtagaggaagtttctaaaaaataa

SEQ ID NO: 457285 - DNA, 297 bp, Serratia marcescens
atgacgaaaagagagccacaaataaatcttcgcttgccacaagagctaaaagaaaaagttcatcagatcgcggctgaaaatcaccggtccgttaactctgagctagtgaagatgattgagtcgtgcgtgaacgagtattacttttttaaggactcagagggagaggggcactactctgtcgaagaggttactgcagaatataacgtatatcgacctgatgagagccgggtgaaagaagctctaaggctgcttgaggagggaatgcgagtgctcaaggatagtaagccggccaagtag

SEQ ID NO: 457286 - DNA, 837 bp, Serratia marcescens
atgaacactttagcaaaacaagtaacgtgtagcacgcaatccggcgcaaatacttctgtggctggcactatcaccatttctggcattgctgttcatcgagattctcacggccgatactctctgaatgacttgcataaagccgcaggtggagagcaacgccaccagccgagatactggttagcattagagcaaaccaatgaattaattaatgaaattttaaatagcggaataacgctatttgactctccgcctacctacgttaagaaaggccgctacggtggcacatacgtttgtaaggagcttgtctactcttacgcgatgtggattagcgctgcattctcgctcgctgtcatcagggcatatgactcgttggtgagcaacgaaactcaagcggcaagtagcaccactgttgacgaccgaacgccacttcgcggcatcgtaaatcgcatcatgggtaagtacggcatgacctaccaagcagtgtacaggctcgtgcataaagagttcggcgttcgtcatatcgatgaactgtcgccaaaacagactgcggaggctattgagtatctcgctgcgaaagtcattgagggggaattcctcggcaaagagagagctcatgaatttgactttgatatgtacgcacagaacgccgctgcagcacacatccacatgagatacatctacgaagtttggatgcgcgatcttcacccagcacttaagcagattggctcaccgttggccataaagctttatgaccgcattaatgatgcgacatgcattgttggtatgattaagggcggtctcgcaagggcatcacacaacaagagactcacggaataa

SEQ ID NO: 457287 - DNA, 288 bp, Serratia marcescens
atgaaacgatggagtgcagcagaggataaggttctaaaagaccatgccagcaccctgactgccaaacagatcggtcatttgctcggcagaacggcaaaatcaatcggggcacgagcagccgttgttgggattgaacttaggaaacgcggtgacgcgtaccacggccgaaagtattcggaagccgatatcgaaatggcccgccaactacatagcgccgggatggggttaagactggtagcggaaaaaatggagatcccattcgcctcactaaaaaattatttttactaa

SEQ ID NO: 457288 - DNA, 624 bp, Serratia marcescens
atgatcaacacaatcacgattgatacagaaacaatggacgttcagccgtcagcggtgatcctctcaattggcggattcgcattcgatattaacgatgttcatcagacccaagaaaacatcatcaatacttcgcgctatatggacgacggctacaccgaacactccttctattccctggctgatacattcgaccagttgatgaatggacgcacagtcagtgcaagtacccaggcatggtggcgccagcaaggagaggatgctcttgacgccctaagtggtgaccgagagccgctacgccaatgcctgaggctgctcactaactggattgcccagcccccagacgcacggatcttctttcgtggtaccgactttgacggttccattcttgagcatgcatatcgtatgtgcgggatgaaatgcccgtggcactttgccggaaaaagggatgtgcgcacgtatatcgatgctatggcgaagtcacaaaagggatacctgccaacccaccagccctgcttcgcgatggttaaacataactccttgcatgatgccatgaacgatgctgagcaaatggccattgcctatcagatgaacgatcaactatcaggggtaaaacacgatggctaa

SEQ ID NO: 457289 - DNA, 789 bp, Serratia marcescens
atggctaaaaactctactgaggcgtacggcgccagcggcaaaacaaacgtgctgaattttgagccagaaaagctgcacatcgttactgataaatcgcatccgctctacgatgagcggatacacctaccgatcgatgaagctctagtgttaagcatcatggatcaaggggtgcttgagccaattatcgtttggaaagaccctgaaaccgggcttccctgtgttgttgccggccggcagcgtgtgcgctgcacgcacgaagcaaacaagcgactgcgcaaacttggaaaggataccaagctggtgccgggggtcaccaggagaggttcggccattcgaatggcccaggcaatgatcagcgaaaacgaaatccgccgagctgataccccgatgggccgcgcaaaaaaaatgtctgatgcgctggaccgaggacacgatgagcaagacctatcgctgatgttcggcgtgagcgtacagacagtgcgcgcaaccctggctctcctagacgcaacgcaggccgtaaaagacgctgtagaagctggcgacgtcactgtaacgcaggcacgccagcttgcatcactcccacccgaagagcagcgcgaaaaaataaaagaggtcgccactgcaaccgcaggcactaccggtcgagaaaaatcacggcgccagcgccaagcacttggcgaagccagaccccgcatcaagtctcgcaaggaaataacaaaggccctggaaggcgcaaacggggattacgcgcaggcgttgcgctgggtgttgggggaggaagaacaatga

SEQ ID NO: 457290 - DNA, 1035 bp, Serratia marcescens
atggattatcgtggcttaatgtttcgttatgataaaaacagatacccagatcttgaacttacggccgatgagctgaaccatcagctctgtcagcatcaggcaattgaccttaatggccgaggcgtgatggatgatgcggcggttattcattttagctccggttatatggagattgtggataaatggtattcaattaaaggttttctgacggtcgttgcattatcaatgctgctcctttttggttttggcgtgttgtatattccttataatatgtttaaacacttttttttacagcatgattacgatgttggtttctatgttatcggcgttatcgcttttgtggtatcaagtgtaatcacacttatttgctatcttctgttgcgagtagagtgtttccgctggacgcattatcccgtcaggtttgacagaaaaaacaggctggtgcatgtattttctgtcgacggtgaggtgtacagcgcgccctgggacaaggttttttttaccaccggtgactgcgttgaatataagcatatgaagcgaaaacattacgatatacgcgggcacgtgctggcagaggacggtaaaacggtattgaaaacttttacgctgccggtgtcggcggcgcggcgtgaagagctttaccccaactgggagtttgtccggcgctatatggaagaggggccggaggcggttgccgatgtcctgcagctgatgccgccggtggaaggacggcgtgaggggataggcttcggctactggtatctgatgttcagcgccagctatggcgcgccgctgccggtggtgccgtttctgatggtgctgtatctgacggcgtggccgttcagggtatttgccatgtacagctgtaaaattccgcgctggagcaaagaggtggatgcgcagtgcgagatagcggcggatgacccgtgggatatcagcgcggcgcaaaacccgcgctcaatctggcgctggatgctgtggatggacaaatcgcacagtatggtgagtaagaaacgggcgatgatgggggagtaa

SEQ ID NO: 457291 - DNA, 129 bp, Serratia marcescens
atgaataaccgccgcatcatccatcacgcctcggccattaaggtcaattgcctaatgctgacagagctgataattcagctcatcggcgacaagaacagacgacgccctattcttatattttatcattaa

SEQ ID NO: 457292 - DNA, 411 bp, Serratia marcescens
atgagaaagttattttttattttacccttactgctaagcgggtgcttccacctcggcgatccacgtgcaaagagctataaagcatccgtggtggtcgttaccaatcacatctgcgtgttaattcagcccaaaggggatgaaaaaatggtctcactcagtattgatgaacccggtaacaataaaagcatatttaacaaatattatgatggtgatggcttagcggttgcagccgataaatgcataccgacatacaactatccgtttagagccggccatacttacaccctttccatcaccctacgttcgcaagataaaaagagcaaaggcatcgtgccggccgctcgcttatacggcgccagcttcaccttaacgggtaaggatgacgagctggttataagctctataaattaa

SEQ ID NO: 457293 - DNA, 1395 bp, Serratia marcescens
gtgcaaatccacgacaccggcatcggcatctccgaacgccagcagtcgcagctgttccaggcgttccgtcaggcggacgccagcatctcgcgccgccacggcggcaccggcctcgggctggtgatcacccagaagctggtgaaagagatgaacggcgatatctgtttccacagccagcttaaccgcggctccaccttctggttccatattacgctggacctgaatgaagatctgatgacgcgccagccgtgcctgccggagctgagcggcaagacgctggcctatatcgaatccaatccgacggcggcgcaggcgacgctgaatatgctcaacgccacgccgctggtcgtcacccattcgccgaccctcggccagctgcccgtcggcgattatgactttatgctggtgggcgtaccgatcccgttccgcgacaagatggcgcagcatcaggacaaactgctgaaagcgctcaactatgccagacgggtaattctggccctgccgtatcagtcacagatcgatgccgaactgctgaaagaacagggcgctataggctgcctggtcaagccggtcaccagcacccgcctgttcccgctgctgcgcatggaaacgccgcgtcaggaacacgccgcgccggcgcgtaaacgcctgccgctgaccgtgatggcggtggacgacaacccggccaacctgaaactgatcggcaccctgctggcggaacaggtggaaaaaacgctgctgtgcgaaagcggcgaagaagccattgcgctggcgcgtgacaacgtgctggacctgattctgatggatatccagatgccgaatatcgacggcatccgcaccagcgagctgatccgccagctgccgcaccataactccacgccgatcgttgcagtcaccgcccacgcagtcagcggcgagcgggagcacctgctgcaggccggcatggacgattatctggcgaaaccgattgacgaagcgatgctgacgcgcgttctgtcgcgctaccacagcggcgtacaagaggcggaggccacaccgccgcctggcacagaaccgctggcgtcgctggactggccgctggcgttgcgtcaggcggccaataaacaggatctggcgcgcgacctgctgcaaatgctgctcgacttcctgccgcaggtgagggagcgggtgcaggcggtactggacggcgcgcaggacgacacgctgctggatctgatccacaaactgcacggcagctgcagctacagcggcgtgccgcggctgaagcagacctgcttctatattgaacaacagctgcgtcagggcgtcgccatcgaggatctggagccggagtggctggagctgctcgatgaaatcgagctggtcagccaggcggccagaaaacacctgggttaa

SEQ ID NO: 457294 - DNA, 132 bp, Serratia marcescens
atgcctcagtatttcattaatttcctgggggcgatgttaataatccgcatgtttattaataattatgattgtttgatagttaataaagaaaatatttgctccataaatattcagcccgacttgacagaataa

SEQ ID NO: 457295 - DNA, 996 bp, Serratia marcescens
atggactgggagacgctacttgaggagtatttcttctcaaaaccacttcgaccagaaactgaaagcagctaccgaaaagtggtcgcagttttccaaaaatttattggtgaagataagttgccggacgaggtgacgcatcgcgatttgattctctggagaagggatatgcttggacgaggtctgactacaagtacctggaataataaggttcgtcatttacgggcgctttataaccaggggatcaagaaaaattggctcacgattacagctaatccgcttgatgatacgcaggttcctccggggagtaagcggaagaagatactaaatcgcaatcagatcgttaggatcaatttagtattggcgcagttcgaggagcgtgaaaagttacgaataggaaagcctcgtccgtgtgcgctgtatcctgtctggtattggcgtacggtcattgatgtgttgcgttctactggcatgagacaaaatcaactgttgcatatccgtctgatggatgtcgatttggaagcaaactcgatgcttctttgtaaagaaggcagcaagacacatcgtgagtggctagtacccatagttagctttgttcgcgaacgcatgcgaatactcgtcgaaagagctaaaaaccaaggtgccgagccagaagattatctgttcgatgtggaccgttttaaaaatcctctgggggaagtagggctggagcctgaaatacagcctgtacgatctttctttacccggctgagcaaggaatgcggttttaaagtaagtccgcatcggtttaggcatactctggcaacagagatgatgaagtcgccagatcgcaacttggccatggtgaaaggtctactggggcaccgcagcgtgagtacaaccatggaatatgtggagttggatttgaagataaccgggcaggcattagaagacgagttgtctctctatatggacgtgattcctgtccgggaagaagaagttaggcttgccttgacataa

SEQ ID NO: 457296 - DNA, 615 bp, Serratia marcescens
atgattctctttgatgaaaacaacctgtcgccggtccgtcggagaaccttagagcggttaacaaacgcagcactcaagctgtacaaggagaacaaattcccaaccgctgaagaaatcacgcgtgaagcggagtatgccaaagtcaccctcaaaacctatttcagcacgcacagcgaattcgtggagtatgtcgtgcataaagtgattggcgcatttgaaaaacccaaaatgggagacgatcccgaagagaatattgctaggctgatgagctggggatatggcgagctgaattcccatgaggccctgatgcgcgatgccatgcgtattgcgcaacagcgctggcagagccggcatcaagatgaggagtctgctgaagaaagcagactgctgaaaaagagtaaccgccgtgaagcgctcactgaggcattagcaccgctagagtcacaactcccaccggaaaaagtggaaaagctggttatgctgatgtccgttctgtacggaacggaagccatgaccatactcaaagacaccttcggactggatcagaatgaaatttctgatctgacgacctggggcgccagactgatgttgcagcaagcaacacaggaaaattaa

SEQ ID NO: 457297 - DNA, 276 bp, Serratia marcescens
atgaaatactttacttatctgaccgcgctgatttcactgtctttcgccggtgttgccagcgctggcgaagctcacgtttgtaaatctccagcagtgtcgggaactgcggcgaatcccgcgctgaatgataacaccgtatttacttgcggaggcggggtttccggcactattccacaactggcaaaagagggctggaaaattgttcagcaaactgatcaggctgattctcctgatcctaccaaaacttatgcgcaactgattatccagaaagactga

SEQ ID NO: 457298 - DNA, 147 bp, Serratia marcescens
atgcctggactgattaaccatgaaaaagctttcatttcactgttcaatgagacggcgcggtatggggtccgcttggaaaacggaaaatatcctacgccaagcctgtttttcgtacagattgcttcatgggtctatggtgatagctaa

SEQ ID NO: 457299 - DNA, 603 bp, Serratia marcescens
atgttgcactttgaccctgaggcattacgcctggttgttgccgaagcgaaagccaatcagtgcgagctggagctggtcaagaacgacggcatttacctgatatcagccgtggccgagcgtgatgactcgggacgtgtcaggcacgtggcgtatgccgacggctgtcatccggaaaaggatgacgcctggtacgagacctcgcggttactggttggtggtgatgacttttgtgagcacctggcgctgactgacgaaagcgcggagcgaatactgtcagacggctttgagctctggatacacgtgctgcacgatcagatccatgtgcatggtgcgcctgtcacctgggtaccggtggccgagtaccggcatatcattaaccgcatgcagcgcctggcccatgtccattatcgggcatgcgtcggcaacgcggagtacaaacgctggcgtatcagcgccatcgacctgctggcgaccgccagtcataccgacgctaaacgggcgaaaccggatgacagggaagaattccagttgatgttcgaacgcctgtataccctggccgatacggttaatgcgcaaggggctctccgtttccctgctcgctaa

SEQ ID NO: 457300 - DNA, 366 bp, Serratia marcescens
atgcttggaactcatgatgttatgtttcgcgtcctgactgtgtcagaactcaaaagggcagtttatccgaatgagtatggcttcagtggtggggcgctaatcaggggagaaatcctccgaaataacatctcctgtggtgaacagctatttcttgttcctcctgataactgcgagcctgcagagaacgaactacgtgcctggtgccaatattacgggttcccgcctgttgttcggtccggcgacgtgttggaggcctccatcgtgactggtatgagtaatccggcgctactggaagccatcgttttggaggggcttcgttataacgatacctgggcctttgaaaccaacagcttttcaccgcattga

SEQ ID NO: 457301 - DNA, 423 bp, Serratia marcescens
atgcgtgatgatattttgatgacggtagtatcgattaaacctgtttatgagatcattctgggaagtgatgaatgtagtgaagttatcattagttttaaatgtgtaacaccgctgggtgaatctgatacatgtgcaatgttggcaagatattttggtgatatttattttgaggagggggacgatgacgcttttatccctaaaggtggtgtatttgatatgcacggtgtaatcagagttcctccctcagagaagacagaactgattgcgggtgctgagttctcgatccctatttcctccagtttgactcgtcagcttatctctcaggagtatgacgctgaggggaaagagagtgttaacgaaatggttgataattggattggcgatctgttcgataagcagggtaacttgattattgataaatga

SEQ ID NO: 457302 - DNA, 732 bp, Serratia marcescens
atgtataaaatttttgccgcgtcgctgctcgcgctgtccgccccctcgtctgctgatacaacattgaattggacttatgaagggaaagcgggcccagaaaactggggaaacctaagcaatgcgtttgccacgtgtaaaaccggaaaatttcaatcgccaataaatattcatcataccatagaagcaaaattaccgccgcttaacctggactttcatactgcagccgaaagcctgatcaacaatgggcattcactacaagtcatcgtcgatggcgacgatgaatttcaactggacaacgataccttcatgttacgccagtatcattttcacacaccgagcgaaaaccagcttgaggggaaacactatccgttagaagcgcacttcgtgcataccaattcgcaaggggaagtggccgttattgccgtcatgtttgcccttggacaagaaaactcggcactcactccaatcctcgccagcatgccaaccagagaaaatcatgtcgtccccgtagagaaacgattcgatctgacaccgctcttcccggatgatcgtcactattaccgttttagcggttcattgacgacaccgccatgtaccgagggactacgctggttagtaatgaaaacgcctgtaactctgtccgaagaccagttacgcgcatttcagcaagcactcaagcacagcaacaatcgccccatccagccacttcatggccggatgattgtcgagtaa

SEQ ID NO: 457303 - DNA, 3054 bp, Serratia marcescens
atggcctcttttaacctttcttttctttctcgcagctgcttgatggcgctggcgactacgcttcctgtcggcgctagtgcaggatcaccgtggcatgttactgatggctctacgctggatgtgaccagtggctacgtcagcgatgcggcgcgcgattaccctttattggccgccggttcaggcagccggttgcagtctgccagcgatggcttgaatttccgcaccaccggcaatttgctgtatgccgccaatgctctatcgggcggcagtatacatctgaccggagcgacattgaccactaatggggtactggcgcatggtgccaacattgacggtggcagtttgctgatgaatggtggcaacatcatggtatccggggaaaacagcgccggagtattgggtagtcatggcgccgatatatcactggttaatctggggattgcggcggatggagccggtagcagtggagtaacgctcaccgacggctcgctgaacattgccaatagttctgtgctggcaaccggggccggcagtcacggtctggtgcttggggcggcagcttccggtaaagctgtagcaacgctggataacgtcaatatcattttgcgcggagaagggacccaggccgggttgatgctggggaacggccaggtaaccgggaatgttgttaatatttcaaccaccggacaaaatcgcggcatcgaaatttataacagcagtggcggccatggcagcctgagtctgacagatagcacgatcagtacgcaggcgggggatggtgtgtatattctgggtggtgatgtgtcactgacgaataccagtgtaaacactcagggcggtattgccgtcaatataaataaagccgcaattgcggagatccagggaggtgcgtttaccacccatagcaatcatgctgatgcattgtggatagcaactgccgattcgtctgcatcggtcagcggtacccgttttatgactcagggggcaggttcgcacgcgtttaatgcccagtatggcaatgccgagttgcgagacagttctctggagacccatggcaatggcagttacggtttgtacagcgaagcgaaggtgcaggctgataatgtcagtataggaacgcagggcgacagcagcattggcgttttcgccgcgcggggtggggtaattaatctggcgcacattgctgtgagtactaccggaaaggctgccgcaggactgttggcttatccgggggcgaccatcaacggagacgacctgacagtgcaaacacacggtgctgatagtcatgcgttgtgggcgcgtgccggtgtattgaatattcgtaacagtcagttgatggctctgggagataatgcggcaggcctgtatgtcagcaataatccgaccggtgacggtagtcaggttatgttggacaatgtcatcatgagcagcgaaaacggacctgcaattcgaaccagcggcgcagcactggacctgaacgtaaaaaatggttcagtgctgactggcggcaatggtgtgttgctggataacctggcggggaatttcactgatccgcattacaatggcgatgtcacattaacagcagataaccaggtaacgctggttggggatattcgtgcggcgacggaaaatcaggtgaacgtggcattgaataagggttctcaattgaccggcgcgatacataatctcgatgtgttgcaggtggacgacagtagtcgttggacgatgaccgataattccagcattggacgccttgccagtgatggtgtggttgattttcgtcacgatgacgcagggtttagcaccttgtcgctggggagtttggaagggaatggcgcgtttgtcatggatacggatattgcgtcgctgcaaggagacttgattgccgtgtcaggtaatgctgagggtaaccatctgttgtcaataaaaaactcggggcgtgagccggtgagaagtgaagatgcattgacggtggtgacgaccggtggcggagacggacactttcacttgaatggtggggctgtagacgcaggggcttaccagtatgaactgcagcagcgtggagacgattgggtgttggcgcagaagttcaccgatccaggtaatggtggtgagcctggtgatggtagcggcgatcctgtgccgacgcccactgcgctgacggctctagggttattcaatgctacgccgacggcctggtatggcgagttgacgaccttgcgcacgcgtatgggcgaggtccgtcaggggaaaaaggggggcggagcctgggtgcggatgctgggcaatcaatatgacgtcaatgaccgtgctggctcaggttaccggcagaagcaaagtgggatgtcagtcggggtcgatagtgctcatgaattgctcgatggacaactgctgacaggtgtattcagcggattaagccgcagtacgctggcgtttaacggtggcagtcgtggtacgctcaacagttttttcattggcggctatgggacttggctgatggactccggttggtttgttgatgctgtggtcaaagctaataacttcaccagtcaggccgatgtccgtatgaccgatggtgaaaaggcgcatggcggttacagcgtgccggcgttgggtgcatcgttggaggcagggcgtcagtatgcgttggccgacggctggtttgtcgagccttcggcacaactgtctgcagtatgggttaaagggcaatcttatacctacagcaatcagctgcaggctgacagtggcagtgtgacttcccggcaggttgcgctgaacggtgcagtggggaaaacgctggcgctggataacggtatgacgttacagccctggctacgtgcggctctgatccaggaattcagtgatagcgaccgcgttaacattaacggtcatgcgtttgataacgatctgtcggggacgcgcggggagttgggagcgggtattgccgctcaggtgacaaaagatgtgcaaatttattcggatgcacgttacgccaaaggggataaaattgagtcgccatggggcgtgaacctgggcgtgcgctggacctggtaa

SEQ ID NO: 457304 - DNA, 594 bp, Serratia marcescens
atgaaagagctgttcaccacactggtgcttggtgctgcactgtgtctggcggtggatgcgagagccaccctgtccgaggctggtgtcggtaacctgactccaccggcggataaccgctgtagcctgtctgccggggcgccggttattgattatggcgtacagtcacgttggcagttacaggatacggatggtcatcagcgtgtcacgccaggcaaacgcacgttattgctgaacgtcgtctgtccttacagtcagataatgcgcgtaacactgcacggtgacaggagcggtaacggtgatttgcgctatggcgaacaaggaagcgttgtcttgcggctactggacgcccaactggatggacagagcgtgcaaattgcggcgacgacctccgacggagtggtaagtggcggtgtgcaatccagcttgcaactgaggccgaatgacagttttgctgcagtgcaaaatggccgcttgcttaaaggtaaaagtttcaccgcgcgtatcgagatggtgccggtgatacctgagagtgcagcccgggtatccacccgtcaggtcagtgaagccaaactgacgctggcgttgatgaattaa

SEQ ID NO: 457305 - DNA, 2433 bp, Serratia marcescens
gtgcaacacctacatcatcatgttcgcgggacggttccagtccgctcattactttcgctggccctgttggcgacattaagttccccacactgggtgatggctgcggataccccaccaggtgaagtcgaatttgatacccaggccatgcaggcacgtggtgtcgatccgaacatcgctgagtggttccgtcaggctccgcgctttatgccaggacaatcaaccgtttctttgacggtcaacggaagtggtcgtggaaaggtgaaagcccgtttcgacgagcaggggcatttgtgtgccgatatggatttcctgaaacaggccggattgatgactccgccaggatttaccgaaaaggctgcgtgctttgatttgcaaagtgcctggccgcaaacagagttgaaccttgatccaggtgaagagcgggtcgatttggtgttgccgcaacaggcggtcgccgcaccgggtacggaaagtggcaactggagtcacggcggcgtggctggcatgcttaattacgatgcgcagtatatggattccgccggcagctcggccagtgtgaacttcatgcagttgggtacagaagcggggttcaatattgacgactggattgtgcgcagccggcagaccttctcgcgctttaatggcgaagaaacgatgcagcatcaggcggcctacgcccagcggactttcaccgggatgaaaaaggtgttccaggtcgggcaagtgagcctgtccaattcaatgttcggtgccggccaggtactcggttttcagatgttcccggaagctgccctgcaaggcaaccgcggtggacctggactggtggaagggattgctgacagtcagtcggtcgtagaaatcagacaatcgggcgtactgatttacagcacgacggtgccggcaggaccattccgactgcaggggttgccgttgctgaatacccgttcggatctggccgtaacattgactggtagtggtggtgagacgcggcagtttaccgtaccggcttctgcactgttgcttaatggtattgctgtggctccggggctttccttcggcgccggtaagttggaccaaaaaggcagcagtgaagaaccgatattgggcaccgttgccaacggatggacgttgaccccttacaccacgctaaatgtcggattgctcggctcttcaccttatcgggctggtgcgttggggcttgacagtcaactgttcgacaagacgttgctgtcactgcaaaccaccgttgcacaagacagtaaacacggcgataacggagcctctgccgtcgctgttgtcacccatcagctcagcgaacgtattgggttgagtatgaatgccagccagcaaagcccagggtatcgcgagctgagtgatgcgctgcaggatgattacagcgattaccgcgaccgtatacgcaatcagtacggtgtgggggtgagctggtctgaagagacattgggcagtctgtcactgtcggtggcgcgtagcatgacgtttgccggggacaacaccagttatttgcgtggtggttggagccgccagtttggccgggcctatgtcggcgccagtctggagcatgataccggtacccgggataccgatgcagataatcgcttttacctgacagttaatgtgccgtttggtgacggcggggacgttagcagttatctcaatagtgcccgtcagggcagccgtgccggcatacgttacagccaacgcagcagccaggatcgtggttggagtttgtcgagcgatcgggacttccgtaatcaccgtaccactaatggcggcacgctggatatggtcacctcgttcagccaattgagcggaagtctgagtcatagttctgataactacacttcctggtcggcgagggcgaccggtgcggtcgttgcccatagtggcggtattagtctgtcgccataccgtatcggcgataccttcggcattgccaaagtaggcgacgaggccggggtacgactggatacgccagcgggaccaacctggactgacggacgcggttatgcggttctgccgtcgctgaatggctataaacgttcggcgatccaggtggatacccgtagcctggcgaaaaacgtcgacatcggtaatgcctggcaggaaacagaggctgcacgtggctcggtcagccgtgtcgattttgatgtactacggacacgaagggtactggtgcatgtgaaggatacgcagggacaacctttgccacacggtgccagtgtatttgacgcaaagggaagctttatcacggtggtcggcgacaaaggcagtgtgtttattcctaatgctgacaaacccggcaggctggatgtccaggcttcgggcgtgacgctgtgttccttcacactcgcgttgccggataaaccggaaataagtgggttatatgaagaagcgtcggcagtctgccgctaa

SEQ ID NO: 457306 - DNA, 714 bp, Serratia marcescens
atgatgaaacaaatgcaaaaaacggcttgtgcgctcgctgtgctggcaaccacttctatgtctgtcatggctgcggatactgtcgatgtccgtgttatcgggactattacgcctgctgcttgtaccccaactctgtctggtggaggtactgtcgattacggcacaatgaaggctgatacattaagcaatgcggattatactgtactgcctgaaaagcagttggatttcagtgtcacttgcgatgctccggctaaaatagcactaaaagtaatgaacggtcgcccaggttcattagctgggagctcagagagcgctagtggtgccggtagtgctcctgcaggtgttcaattgttctctacggcaaatattcctgcatttggtttgggtaaagatggggctgcaaatattggaggctatggtcttcgttttgtgccaggaacagcccaggctgatggtacgagtgtggatttgattcgtacaacagatcctgcattagcatcgtggggggctggtagcccgattgggcagattttgggcgcaggcccggttatgcataactcttgggctgcaaccggaacactgcttcctgtggcttttgaaacgatgaccgctaagttcggtgtacaggcttatctgaataaagcttctgaacttgacctgactaaacctatttctctggatggtttgtctacggtagaggtggtttacctgtaa

SEQ ID NO: 457307 - DNA, 627 bp, Serratia marcescens
atggataggccagtgccagagataaagagtttatcaaaaaaaatggaaaagaacgtagtgatatttgatagttgccaattcactgtgcaggggttaactctgttgtgtgaacgccacgcaggatggtgtatgtgcgggacggcctattctttttcacaatttattaaaatcctttccagtcagcacgttgatatggtgttgtgtggtataggcaagcggaatgatgatttctcgagattgttgaatcttccggtttatttttcaggtcgatgtattttgttgacagacaaaaactccaatgtattacgatcagcgtttctgactgccgggtttgatgctgttgtcagcaagcaggcgtcgttgagctctttggctagcttactttattacagcatgtattttcctaaggggcaggcggtagaggcgagtatgcctgcacattaccgtccttatgagcggttggtgttaagtgaattattaaacggaaaaaaaccagcctgtatcgctgatgaaatgggggtttcgtatcgaacggtgagccgctacaagcaagatggattaaagcgtgccggattgagtagcctgaacgagatactggcttgtcagaaaaactatttacctagatag

SEQ ID NO: 457308 - DNA, 624 bp, Serratia marcescens
atgaataacgtgctgatagtcgatgaccatcccgtcgtccggcttgccatcaaaatggtcctggagcaagcccatatgagtattagcggagaaaccgatgatggcctggaggcactgcgcctcgcacaacaacttactccggatttggttatcgtcgatattgatatcccatcattgaatggcatcgatgttgtacaacgcctgcgtaaaaacgggtatatgggggggatcctggttctgacaggtaaagacgatgatcattacgtcaaacgctcagtcaatgcaggtgccgatgggttcatcagtaaacgcaataacctcactgaactgcacgatgcggtacgcgcgctcagaggcgggtacggctatttcccactaaaacgaatacgcttcgataccccccccaccctacaaagtgatgacagaaaacttgcctcgttatcagccaaagaattgcaggtactgcattatctgtccagagggctaagaatggtcgacatcggcgtcaaaatgaagatcagcgacaaaacagtcagcacgtataaacgccgcctgatgcaaaaattggaactgagcaacatggccgagctgtatgatttcacacaacgtaatcatctggactga

SEQ ID NO: 457309 - DNA, 3624 bp, Serratia marcescens
atgcgcatatttcgggttttctgctatctgttttgttacctgaacatcgcggctacttcagccaatgagcctcagcccatgtggatgttcagccgggaaacgctttccccgttaaaatttgaactcagtgatcaggattggcgctggttggggaaaagacatgaagtacatgttgccgtttactcaccagaaaatccaccgtttgacctggtaccagactccaatacggtcgaaggcatctccgctgattacagcatgttgatctcacgttatttgagcctcaggatgaaaattttacgttaccccaaccgcgaggcggcgcttgatgcattgcgagcaggtaacgtggatatgttaattgatgacgcgggcccacaagacatcgagagtaacggtgttattaccagcatctcttttgctcccagcagtaccgcattagtcaccccagaaacgtctcttgcacgccctgtacagatgaatcccgatgcacgtatcgccatgccacgcggatatttgagtgacagatggttagccgcgcattaccccaatgccaaagttacccgctatagctcagcccaaagcgcactctcttccgttgcatttggcgaaaacgattacttcatcggtaatcttactgtcgcaaattttttgattgaacgtaattattccaatcaactgtcggtagcagatatcctcccaacgggagaacacggtccgcgcttcgtatttagggaaaatgacaccacgctacaacgcatcgttaatactgtgttgcaggctatcccgccgatccaacatcggcttattcttagccaatggagccagggcgcagatctttggcaatttcagtctccgcttgccttgaacaaaagagaacaacgttggttggagcaacaccgggaactgcgtgtggtcgtcaatccgctctatgcaccctttacgatgtttgataccaatggggtatttcacggtatcagtgctgacattttgcgcctgatccatcttcgtaccggcttaaaccttgtgcccgtcgaatctgatacggttaccgatatgttcagcctggtgaaaaaaaatcagggggatatcattgctgcgatgagctatagcaatgcgcgtgacgatcgcctgatgtttacccgtccttatgtccaaccgccgtttgtcctggtggtcaaaaatagcctcggtgcccccagcaatttgtctgccataaagaaactggccgtcaccacggacaatatgctgacggactggctccatgccgaatatcctgatatcacactgatcacggccaaaaatgcaagcgtggccatgcaattagtcagtgaagggaaagcagacggtgcggtacataacctgatcggtgccaattatatgattgatcgctattttcgtggcgatttaaaaattaccacgcgtattggcgacgcccccgcccgggtaggttttgccgtacgccgtgaccaacccgaactttacagtatcctgaacaaagcactggcagacatcccgccaggggatatttcattaatcgcaaacaaatggcaaggcacaccggatgtaaagctgaatacctgggtgatctaccgcagtcagttttactggctggcaggtatttttgccatcctggtattgacatcactgatctggaactactacttgcgccgagagatccgcatgcgtcaggatgcacagacgaaattgcaggaacaggcgacattccgcaccacgttattcaatggttcaccggtccccatgtatgttacagacaaacatttaaatattattagtcacaaccaggcttgggtaacattttttaaacaacacgaaaaagtgttagaaacgctccctcttacctcagaatcacaccccctcaacaaaatcacacctgcactcagagaaatactctttccctctgaggaggagcactcatctccacagcgctaccacatcaacaatggtgaagaagaacgggtcattgtacaccaggccgtaccctttaccgatcatgaaggctcggttgccgggctcatctgcagctggcaagatatcactgagcacgaacatttactcaaggcactttcctctgcacgtgaacgttcagagcaggccaatcgcgccaaaagtattttcctggcgactatgagccatgaaattcgcacccctatcagcgctatcattggtttacttgaattagctgtcaccaacaaaaaaccgtctgacacagaccgagagaccgtacgagtcgcctacgagtccgcgcaatcgctgatggggcttgttggtgacattctcgatctggcgaaaattgaatccggtaatctggagctcacccccaagtgggtagcatttgacacactggtggcaccagtcgttcgggtgttcgacggcctggcgcggcaaaaaggcctgacgctcaatagtcatatcgacgtactacatccggacgaggtgtatattgacccaatgcgcctgcatcaggtgttgtccaacctgatcagcaatgccataaaattcaccgaacagggttccgtcgacgtgcaagtcaactgtctgactgacaaaaatgctcatttaacactgcagttgatcgtcactgacagcggtgccggcatcgcggcacaggatcaattacaagtcttcagcccctacaaacaatcggaggccggcaaaaagcagacaggtaccgggctgggactggcaatctgttcacaactagtgaacatgatgagcggcactatcgatctacacagccaattgggacgcggcacacaagtcattgttcatattccggtaaatcaccgccagcgcatagcgtcgcaggaagacgttattgaagacgaaagccgtagcgcccagccactgcgtattctggccgttgacgatcaccctgccaaccgcctgctgctgaaacgccagctaacacgtttagggcattgggtgatcggagcagaagatggtgaacaggcgctacgcttatggcgtgaacacaacattgatctggtgatcactgattgcagtatgccagtcatggacggactggcactaacggcccacctccgtcaggcacagagccagccactgactattctcggtctaactgccaatgctcagccggaagaacgcacacgctgcatcgctgccggtatggacgattgcctgtttaaacctctgcgcttgcctcagttaggagctttactgcgtaaagtaccgcgcaacaccgtacctaccgagaatataatgctggagcgactcgttgatctcaatgccctgcgtcaattgacacaaaatgataccagtctgctgcacggtctgctgtacactacacgtaatgagaatctacgagacagcgaactggcgcgtagcaaactacaggagcaaaactgggatgctctcgcatcctgtctgcatcgtatcgccagtgcagcacaaatcatcggtgccggcggtgtgggacaactgtgccgcgaactagaaaagtactgcgaagcaactccggaggccagcgtggtggaagtgcgcctgcaggcggcactgcacgccgtcgccgagtttaatcaggccatagaacagtttctcaatcagtttgatgccccatctccgggagatacacccgcgtag

SEQ ID NO: 457310 - DNA, 993 bp, Serratia marcescens
gtgcggatgaccggcaatctccagcaccggcgtcagcggcaactgggcgatgcggaaatgctgaaacgcatactcaaactggccgtaaccccagcccagccagggcttcgcagcgatcattttcagcgtgtcctgcagcatggcgatccgcgcctggttcgacagcgcgtgggacacatacgccatcccaccgtcaccgcccggccacagcagcatgcccacgccgaatgccccgcccaacagcaccgccagcccggcccggagcagccggtcggcgcagacgcggcggaacgccagccaaaaccccgccagcaccagcacgccccccagccaaccggcgcgcgactgcacccataccagcaaggcggccagcagggccagcaacgccgccagacccgtttgtctggcgcgctccgcccgcgccgagcgcagcacatagcccggcagtaccgccagcatcagcgccagcgccaggccggtggcgataaaactgcccagcacgttcggctgctggaagatgccgaagacgcgtctgccgcgcagcggcacccagctccaggcgggccagaacagctgcagcagcgcaatcaggctctggccgatgaccagcgccagcagcagcgtaatcagcgccgtgcgccagcggaaggcaaggcgcacctgcagccagccgcagtaccaggccccgccggccagcagcgcgctcacccgccacgcggcggcggcgtaaccgtccggcggcgcataggccagcggcaacgccaacagcgcgacgcccggcaaaaaatacgccgcgctgcggctgaagcgccacgtgcggcgtcctggctgtcgccagcaaatcagcagcagcatcgccgccatcagcgcgtaggtcagcgcattcagcggcagcttcagcccgctgccgcccatattgggcagatagcacagcgacgcggccagcagggcgagaaagcccgccgccagcgcgttattcgtattccagactaa

SEQ ID NO: 457311 - DNA, 156 bp, Serratia marcescens
atggtatggctcagcgcagaggtggttatcccgagttctatggcggctttggtaaaactgcgcattttctcggtaataagaaatgcgttgagctcagcaagatcgcttcgggtgagcgtggtagaaggtctggagggcatgaagttggaccgttga

SEQ ID NO: 457312 - DNA, 186 bp, Serratia marcescens
atgttaattctgactcgtcgagttggtgaaaccctcatgattggcgatgaggttacggtcacagtgctaggggtaaaaggcaaccaggttcgtattggtgtgaatgctccgaaagaagtgtccgtacaccgggaagaaatctatcaacgtatccaggcagagaagtctcagcagacgacttactga

SEQ ID NO: 457313 - DNA, 531 bp, Serratia marcescens; identical to SEQ ID NO: 443635

SEQ ID NO: 457314 - DNA, 489 bp, Serratia marcescens
atgagcgaagagagcctgcataaacttagcgtggccgtcggcgaaaaattaaaggcaggcggacgctggatcacggcggcggagtcctgcaccggcggcggcattgccaaggcgattaccgatatcgccggcagctccgcctatttcgaccgcggtttcgtgacctacagcaaccgggctaagcaccaactgctgggcgtatccgaggggacgctgcaggtgcatggcgcggtcagcgaagcggtagtgcgtgagatggcgcagggcgcgctgcatgcggcggacgccgatatcgcgctgtcggtcagcggcatcgccgggccggatggcggcagcgcggcgaaaccggtcggcaccgtatggtttggctttgccgagcgttcggggcgggtgttggcgtgcgaaaggcatttcagcggcgatcgtgacgccgtccggctgcaggcgacggttttcgcgctgcaaaccgtgctcgatgaatttttgtaa

SEQ ID NO: 457315 - DNA, 1341 bp, Serratia marcescens
atggctcattccaccaagttgaacatccagcaggcgatcgacgacagtaagttctcgctgttccactggacgctgattattctcggttttctggttctggccatcgacggcttcgacaccgccgccatgggctatatcgcgccggcgctggccgaggactgggggatcgtcaagcaggatctggggccggtgctgagcgccgccctgctcgggctgtcgctgggcgcgctggtggccgggccgctctccgaccgcatcggccgtaagcgggtgctggtgttttcctgcctgttcttcggcttgtccagcctggcgaccgcctacgccggttcgctcgacagcctgacgctgtggcgctttcttaccggtctcggccttggcgccgccatgcctaacgccattacgctgatttccgagtatgcgccgcagcgctgccgttcactggcgatcaacaccatgtactgcggttttccgctgggcgccgccgccggcggcgcgatctcctcttggctgataccgggctacggctggcacagcgtgctgctgctcggcgcgatcgcaccgctgatgctgacggtgctgctgattctgctgctgccagaatcggtcaaatacctggtcaaccgcggcaaggatatgcaaaagatcaaacgcatcacccagcgcttcagcggaaaaaacctcgatggcgtcgagcatttttatctgtacgaagcgccgctggcagtgtcaaaaagcagcgtcggcctgctgttcagccgcccctatctgctcggtaccctgatgctgtgggtcacctactgcatggggctggtgatctactacatgctgctgagctggatgccgattctgatgcagggcctgggttatcagttggagcagtccgccatgctgacctcgctgttcacctttggcggcaccgccggcatcctgatggccggctggatgatggaccgctggaacgcgcataaggtggtcgccgccggcttcatcgtcaccgcgctgttgatcgtcggcatggccaccgaagatcgccatatcgttctgctgggcggcttgattttcctgatgggtattaccatgaacggcgcacagtcggggctgcaaacgctggccgccaccttttacccgacccacagccgcgccaccggcatcgcctggatgcagggcatcggccgtttcggcggcgtggccggcacgatgattggcgcacagctgatggcgctgcagtgggaagtgcacagcattctgctgttcctgtgcctgccggcggtcgttgccgccgtcgccacgctggttaaaatggcgcgccgcaagacgctgcagacggccaatccttga

SEQ ID NO: 457316 - DNA, 672 bp, Serratia marcescens
atgcagtacccgattaatgagatgttccagactttacagggcgaaggttatttcaccggcgttccggctatttttatccgcctgcaggggtgtccggtaggatgcagctggtgcgataccaaacacacctgggaaaaggatgctcatcgggaagtggacatgcagcgcattttggtgaaaaccgaggaaagcgacgcctggggcagcgccagcgccgaacagctgctggcggtaatacgccagcagggctatagcgcgcgccatatcgtcattaccggcggcgaaccgtgcatttacgatttaaccccgctgacccgcctgtttgaagagcacggctacggctgccagatcgaaaccagcggcacccacgaggtgcagtgcacggcggatacctgggtgacggtttccccgaaggtgaatatgcgcggcggcatgaaagtattggatcaggcgctaacgcgtgcggatgaaatcaaacatccggtcgggcgtcagcgcgatattgacgcgctggatgcgctgttggagacgctgcacgatgagaaacggcgggtgatcgccctgcagccgatcagtcagaaagatgaagcgacgaagctttgtatcgccacctgcatcgagcgcaactggcgcttgtcgatgcagacgcacaagtatctgaatattgcttaa

SEQ ID NO: 457317 - DNA, 360 bp, Serratia marcescens
atggcaaccacgctgtttaaagattttcaatttgaagccgcacaccgcctgccgcatgtgcctgaaggccataaatgcggccgtctgcacgggcattcgtttatggtgcgtctggagataaccggtgaggtggatccgcacaccggctgggtaatggactttgccgaactgaaagccgcattcaaacccgtttgggagcggctggatcaccattatctgaacgatattccagggctggaaaatccgaccagtgaagtgctcgccgcctggatctggcagcagatgaaaccgctgctgccggaactgagcgcggtgatggtgaaagagacctgcaccgccggctgcgtctataaaggttaa

SEQ ID NO: 457318 - DNA, 1806 bp, Serratia marcescens
atgacgactcaggctcctccaacatctttgctcccgctgacgcccgaacagctctctaacctgcaggcggcgattggcgactattcgccgacgcagctggcgtggctgtccggttacttctggggaatggttaaccaacagcccggagccgtcgccttgccggccgcgcccgctgctgctgccgcgccgagcattaccattatttccgcctcgcagaccggcaacgcccgtcgcctggcggaacagctgcgcgacgatctgctggaggccaagctgagcgtcaacctggccaatgccggggattacaaatataagcagatcgctcaggaacgcctgctgatcgtggtggcctccacccagggcgaaggcgaaccggcggaagaggcggtggcgctgcataagttcctgcattccaaaaaagcgccgaagctgaatgaaaccgcctttgcggtatttggcctgggcgatacgtcctatgagaatttctgccagtccggcaaggatttcgacgccaaactggcggaactgggcgccgagcgtctggttgaacgtattgatgccgacgtcgagtatcaggacgtggcagctgcctggcgcaaacaggtggtgacggtgctgaaagatcgcgcgccgacggaaagcgccgcaccgggcgtgctggccggcggtgcggtagacctgctcgacagcagtccgtacagcaaagagcagccgctgacggcgcagctggcggtgaaccaaaaggtgaccggccgtcattccgataaagacgtgcgccacattgagatcgacctgggcgactccgggctgcgctatcagcctggcgatgcgctgggcgtctggttcgataacgatccggcgctggtcgacgaactggtgcagctgctgtggctgaaaggcgatgaagcggtcgaggtggacggtaaaacgctgccgctgagcgacgcattgcgcagccactatgagctgacgcagaacactacgccaatcgtagagaaatacgccgcgctggcgcgtgatgaaaagctgctggcgctggtggccgacaaagccgcgctgcagcagtatgcgcataatacgccgatcgtcgatatggtgcgtcaggcgccggttgaactcagcgccgaacagctgcttggcctgttgcgtccgctgacaccgcgcctgtactccattgcctcttcgcaggcggaaacggaaaacgaagtgcatgtcacggtcggcgtggtgcgctatgacatcgacggccgcgcgcgcgccggcggcgcatcgagcttcctggccgatcgcctggaggaagacggtgatgtgcgggtgtttatcgaacacaacgacaacttccgcctgccggccaacccggacacgccggtgatcatgatcggccctggcaccggcatcgcgccgttccgcgcctttatgcagcagcgcgacgccgacggcgccggcggcaagaactggctgttcttcggcaacccgcactttaccgaagacttcctctatcaggtggagtggcagcgctacgtgaaagacggcctgctgacccgcatcgatctggcctggtcgcgtgaccagcagcacaaagtgtatgtacaggacaaactgcgcgaacagggcgcggaagtgtggcgctggatccagcaaggcgcgcacatttacgtctgcggcgatgccaatcgcatggcgaaagacgtggaaaatacattactggaactggtcgccgagcacggtgggatggataccgagcaggccgacgaatttttaagtgagctgcgctttgagcgccgttatcagcgagatgtttactga

SEQ ID NO: 457319 - DNA, 1716 bp, Serratia marcescens
atgagtgataaacaccccggccctctggttgtagaaggcaaactggccgatgccgagcgcatgaagcgtgagagtaacttcctgcgcggcaccatcgccgaagatctgaatgacggtctgaccggcggctttaacggcgacaacttcctgctgatccgtttccacggtatgtatcagcaggacgatcgcgatatccgcgccgaacgcgccgagcagaaactggagccgcgccatgcgatgatgctgcgctgccgtctgcccggcggtattatcagcccgcagcagtggctgggcattgataagtttgccgaggagagcacgctgtacggcagcattcgcctgaccaaccgtcagactttccagtttcacggcattctgaaaggtaacgtgaagccggtgcaccagctgctgaacaagctgggactggacgcactggcgaccgccaacgacgttaaccgtaacgtgttgtgcacctcgaacccggtggagtccgagctgcatcaggaagcctacgagtgggcgaaaaaaatctccgagcatctgctgccgcgcacccgcgcctatgcggaagtgtggctggataaagagaaggtggcgaccactgacgaagaaccgatcctcggcccgacctatctgccgcgcaagttcaaaaccacggtggtgatcccgccgcagaacgacgtcgatctgcacgccaacgacatgaactttgtcgccattgcggaaaacggcaagctggtgggctttaacctgctggtgggcggcggcctgtcgattgaacacggcaacaagaaaacctacgcgcgtaacgccagcgaattcggctacattccgctggagcatacgctggcggtggccgaggcggtggtaaccacccagcgtgactggggcaaccgtaccgatcgtaaaaacgccaaaaccaaatatacgctggagcgtgtcggcgtcgacaccttccgcgccgaagtggaaaaacgcgccggcatcaccttcgagccgattcgtccttatgagtttaccggccgcggcgaccgcatcggctgggtgaaaggggtcgataaccactggcacctgacgctgtttatcgagaacggccgtctgctggactatccgggccgtccgctgaaaagcggcgtggcggaaattgccagagtgcatcagggcgacttccgcctgaccgccaaccagaacctgatcgtcgccggcgtgccggaaagcgagaaggccaatattgaagccatcgcccgcgcacacggtctgatcgatgacggcgtcagcgagcagcgtaaaaactcgatggcctgcgtgtcgtacccgacctgcccgctggcgatggcggaggccgagcgcttcctgccgcagtttgtcaccaaggttgaaggcatcatgcatcagcacggggtgggcgatgagcacgtggtgctgcgcgtgaccggctgcccgaacggctgcggccgcgcgctgctggcggagatcggcctggtgggtaaagcggtcggccgttataacctgcatctgggcggcaaccgcgaagggacgcgtatcccgcgcatgtatcgcgagaatatcaatgaagagcagatcctgcaggagatcgaccaactggtcggccgctgggcgcaagagcgcaacgcgggcgaagggttcggcgacttcaccatccgcgccggcattatccgtccggtggtggatccggcgcaggatttctgggactaa

SEQ ID NO: 457320 - DNA, 732 bp, Serratia marcescens
atggctgaattcgatctggcggcgctgaatgcgctgccgaaatccgggcaggcgctggcgctggctgaggtcaacggcaaactggagcggctctctgcgcaacagcgcgtggagtgggcgctggaacagctgccgggcgcgtttgtgctctcttccagcttcgggattcaggccgcggtctgtctgcatctggtgacgcgtatccagccggatattccggtgatcctgaccgataccggctatctgttcccggaaacctatcagtttgtcgatcagctgaccgacaaactgaacctgaacctgcaggtgttccgcgccgagcactcgccggcctggcaggaagcgcgctacggcaaactgtgggagcagggcgtcgaagggattgagcgctataaccagctcaataaggttgagccgatgaaccgcgcgctggaaacgctgggcgccaacacctggttcgccggcctgcgccgcgagcagtccggcagccgcgccaacctgccggttctggcggtacagcgcggcgtctttaaggtgctgccgatcattgactgggacaaccgtcagatttatcagtatctgacggatcacgggctgagctatcacccgctgcgggagcagggctacctgtcggtgggggatacccacaccacgcgcaagtgggagccgggcatgaatgaagaagagacgcgcttcttcggcctgaaacgtgaatgcgggctgcatgagtaa

SEQ ID NO: 457321 - DNA, 1074 bp, Serratia marcescens
atgttttcccgccagtgtctgaaagccggcctgttggccgcggcattcagcagcgttttttgcgcctcagccgcgacgcatcccggccaggatgcgccaataggcaaattcgccgccgaaaaaatgcggtatatcgccacctactttccggggcgtatggccggcagcccggctgaacagctgaccgccgactacctgaaacagcaattcacccagatgggttatcagagcaatattcgcagtattaacagccgctatctctataccaacaaaaacggcagcgagaactggcgcaatattcgcgtcaattccgtgatcgccgccaaaagcggcgatcggccgcagcagatcgtcatcatggcgcatttcgatacctatacgccgcgcagcgatgccgacgtcgacaacaacctgggcggcctgacgctgcaaggggtcgacgataacgcctccggcgtcggcgtgatgctggagctggcgcagcggatgaaggatatccccacccgctacagcctgcgctttatcgccaccagcggcgaggagcttggctcgctgggcgcgaaaaattatctgcagcgcatgagtgcggaagagcgggcgaacacgctgctggtgattaatctcgacagcctgatcaccggcgacaaactctatttccacgccggccgcaacacgccgccgaaggtcgccaaacagagccgcgatcgggcgctggatatcgcccaccgctacggcatcgccgcctcgctcaaccccggcagcgaccactatccgaaaggcaccggctgctgctccgatcagcaggtatttgacgacgcgcgtattccggtcatggcggtcgaggccaccaactgggcgctgggcaaaaaagacggctatcagcagcgtgcggtcagcccgcacttcccgcagggcgtctcctggcaccggccgcagtacgacaacgtacaatatctggaccgctacctgccgggacggattgataagcgcagccgggacagcgttcaggtgctgctgccgctgttaaaagagctggcgcaggcgcacccggcgccaaaagcgaaaaaaccataa

SEQ ID NO: 457322 - DNA, 381 bp, Serratia marcescens
atgatgctggataaactggaaaaccgtctgggtgtcgttgagcaaaagattgagcgcatggatcagcgagttgaacggctggagcagcgcattgaggggatggatctgcgcattgaagggatggggcagcgcattgagggagtggaaaagcgcgtcgaacgggtggaggtggacgttaaccaggtcaaactggatttggccgcgctgaacatgcgttcgctggaatttgtcaccaagggcgatctgcataaggaggtggccctgctacaccgggaaattggtttggtgaataaagaggttgtcagccaaaccaaatggatggtcagctgtatattcggcgttgccgcactgtgcatgaccgccgccaagctgtggttctga

SEQ ID NO: 457323 - DNA, 1431 bp, Serratia marcescens
gtggactatctaccaatatttgccgatctgaaacaacgtccggtactggtcgttggcggcggtgaagttgctgcgcgtaaagttgaactgcttgcgcgcgccggggctgaaatacggatagttgcgcagtcgctctcaccggaacttgaacagcatcgccagtctggacgcatcaactggctggggcaggcgtttgcgccgcaccagttggatgaggtgtttctggtgatcgccgcaaccgacgacgccgcgttgaacgcccaggtttatgccgaggcggataagcgccgcttgctggccaacgtggtggacgatcagccgcgttgctcatttatctttccgtcgattgttgaccgttcaccgctgatggtggcggtgtcatccggcggcaaggcgccggtgctggcgcggatgctgcgtgaaaagctggaagcgctgctgccggccagccttggcaccatggcgcaactggctggcggttttcgcgctcgggtaaaacagcagctgagttcgatcggcgcacgccgccgtttctgggaaaaatctcttaacggccgctttgccacgctggcggccaatgagcagccgcagcaggcgcagcaacagctggaacaagacctggccgcgtttgccgccggcgatgaggcagcgcagggcgagattgcgctggtcggcgccgggccgggcgatgttggtctgctgaccttacgcggcctgcaggtgatgcagcaggccgacgtggtgctgtacgaccacctggtgagcgacgagattctcgatctggtgcgtcgtgacgcggaacgcatctgcgtaggcaaacgcgccggcgcgcatctggtgatccaggaagagaccaaccgcctgctggtggaactggcgcagcagggcaagcgcgtggtgcgcctgaagggcggcgacccgtttatctttggccgcggtggcgaagagctgcaggttgcggcggcggcggggattccgttccaggtggtgccgggcgtcacggcggcggccggtgcgacggcctatgccggcatcccgctgacccaccgtgaccatgcgcagagcgtgacctttatcaccggccactgccgtcccgacggcgacgggctggactgggccgacctggcgcgtgcgcgccagacgctggcgatttacatgggcaccatgaaggcggcggatatcagccagcgcctgatcgcccatggccgcgaggcgcagaccccggtggcggtgatcagccgtggcacgcgtgccgagcagcaggtgctgaccggcacgctgcagcagttggaacaattagcccgacaggcgccgttgccggcgctgttggtgattggcgaagtggtggaactgcaccatcaaatcgcctggtttgggcatcaacctcagacggacggggccgcgcgtcccgccgtagtgaatttggcttaa

SEQ ID NO: 457324 - DNA, 909 bp, Serratia marcescens
atggacgaaaaacgactcactcacttgcggcaattggaggcggagagtatccatatcatccgtgaagttgccgctgaattcagcaacccggtgatgctgtactccatcggtaaagactcttcggtgatgctgcatctggcgcgcaaggccttctatccgggcaccctgccgttcccgctgctgcatgtggataccggctggaaattccaggagatgtatcagttccgcgaccgcacggcgaaagagtacggttttgagctgctggtgcataaaaacccggaaggggtggcgatggggattaacccgttcgagcacggcagcgccaagcataccgatatcatgaaaaccgaaggcctgaagcaggcgctgaacaagtacggttttgacgctgcctttggcggcgcgcggcgcgatgaggaaaaatcccgcgccaaagagcgtatttactcattccgcgaccgtttccaccgctgggatccgaagaaccagcgtccggagctgtggcacaactacaacggccagattaacaaaggggaaagcatccgcgtattcccgctgtcgaactggaccgagctggacatctggcagtacatcttcctggaaaacatcgacatcgtgccgctgtatctggcgaagccgcgtccggtgctggagcgtgacggcatgctgatgatggtggatgacgaccgtatcgatctgcagccgggcgaagtgatcagccagcgtatggtgcgcttccgcacgctgggctgctggccgctgaccggcgcggtggagtcctcggcggaaacgctgccggaaatcatcgaggagatgctggtctccaccaccagcgagcgtcagggccgtatgattgaccgcgatcagtccggctcgatggagctgaaaaagcgtcaagggtatttctaa

SEQ ID NO: 457325 - DNA, 1428 bp, Serratia marcescens
atgaataacgtaattgcacaacaaatcgccgagcagggcggggtggaagcctatttacacgcgcagcagcataagagtctgctgcgttttctgacctgcggcagcgtcgatgacggcaaaagcaccctgattggccgcctgctgcacgatacccgtcagatttatgaagatcagctgtctacgctgcacaccgacagcaaacgtctgggcacgcagggcgaaaagctcgacctggcgctgctggtggacggcctgcaggccgaacgcgagcagggcatcaccatcgacgtggcctatcgctacttctccaccgagaagcgcaaatttatcatcgccgatacgccggggcatgagcagtacacccgtaatatggccaccggcgcatcgacctgcgatctggcgattctgctgattgatgcgcgtaaaggcgtgctggaccagacgcgccgccacagctttatcgccacgctgcttggcattcgtcacctggtggtggcggtcaacaaaatggatctggtggattacagcgagcaggtgtttgagcagttcaaacaggactacctgacctttgcccaacagctgccaaacgatctcgatatcaagtttgtgccgctgtcggcgctggacggcgataacgttgccggccagagcgccaacatgccatggtacagcggcccgacgctgctggaagtgttggaaagtgtggaggtgattggccgttcggaagcccagccgctgcgtttcccggtgcagtacgttaaccgcccgaacctggatttccgcggctatgccggcacgttgtccgccggcaaggcgcgcgtcgggcagcgggtaaaagtgctgccttccggcgtggagtccagcattgcgcgcatcgtcacctttgacggcgacctgcaggaagcggtgccgggcgaggcggtgacgctggtgctgcaggatgaagtggatatcagccgcggcgatctgctggtggcggccgatgatgacctgcaggcggcgcaaagcgcgctggtggatgtggtctggatggcggaacagccgctgcagccggggcagagctatgatatcaaggtggccggcaagaaaacccgcgcccgggtggaggcgattcgccatcaggtagaaatcaactcgctggcgcagtatcagaccgacagcctgccgctgaacggcatcggcctggtggcgctgacctttgacgaaccgctggtgctcgacagctaccagagcaacccggataccggcggcatgattattatcgaccgtctgagcaacgtcaccgtcggcgccggcctgatccgtgaggcacagcaggcaaccacggccgccgccggcgagttcagcgcgtttgagctggagctgaatgcgctggtgcgcaagcacttcccgcactggggcgcgcgcgacctgctcggaggccggtaa

SEQ ID NO: 457326 - DNA, 630 bp, Serratia marcescens
gtggccgagcgtgaacagcgaccgaccgggccggacgatgaaaacgtggtgtggcatccgcatgcggtaacgcgtgcggaccgcgaaacgcgcaatggccatcgcggcgtggtgctgtggtttaccgggctgtccggctcgggaaaatccaccgtggccggcgcgctggagcaggcgctgcacgcgatgggcgtgcgcacctatctgcttgacggcgataacgtgcgccacgggctatgccgcgatctgggcttttcggatgatgaccgtcgcgagaacattcgccgggtcggcgaagtggcgaagctgatggtggatgccggcctggtggtgctgaccgcgtttatttctccgcaccgcgctgaacggcaaatggtgcgtgacatgctggacgacggccagtttgtcgaggtgtttgtcgacacgccgctggccatctgtgaagcgcgcgatccgaagggcttatacaaaaaagcccgcgccggcgagctgcgcaatttcaccggcatcgacgcggtttatcaggcgccggaggcggcagatatccacctgaatggcgaacaattggtaacaaatttggttgcgcaattgttagacgtgctgcgtggtcaggctattatcaaaccctga

SEQ ID NO: 457327 - DNA, 318 bp, Serratia marcescens; identical to SEQ ID NO: 443626

SEQ ID NO: 457328 - DNA, 723 bp, Serratia marcescens
gtgattcgcgtacataatctgcaaaaacagtttggcgccacccatgtgctgcgcggcattgactgccagattgccgccaacgaagtggtgtgcgtcatcggcccgtccggctccggcaaaagcaccttcctgcgctgcctaaacgcactggaaagcctgtccggcggcgaaatcgaggttaacggcttcgcgattcacgatcggaagaccgatctcaataaaatgcgcgccagcgtcggcatggtattccaacgctttaacctgttcccgcatatgaccgtgctggaaaatattattatggcgccgatggacgtgaaacaactctcccgcgccgacgccacgcggcaggccgaaacgttactgcgcaaggtcggtctgctggataaaatcgacgcctatcccggcagcctgtccggcggccagcagcagcgggtagcgattgcccgtgcgctggccatggagccgaaagtcatgctgttcgacgagccgacctccgcgctcgacccggagctggtcggcgaagtgctggcggtgatcaaggcactggcccatgaaggcatgaccatggtggtagtgacgcacgaaatggcgtttgcccgcgaggtggcggatcgggtgctgtttatcgatcagggcgtcattcaggaggaagggacgccgcagcagattttcggccagccggccaatccgcgtactcaggcgtttttaagcaaagttttgtaa

SEQ ID NO: 457329 - DNA, 765 bp, Serratia marcescens
gtgaacttccgctgggagatcatccaggagtacgccccgctgtttatggaaggcgcctggatgaccatcaaatgcaccattatctgcgtcctgctgggcaccacctggggcctgatactcggtttaggccggctggcgcaggcgccgcacggcgtctggaaacctattttgcactacggcgttcaatggccggtgcgcatctatatcagcgccttccgcggcacgccgctgttcgtgcagatcatggtggtacacttcgccctggtgccgctgtttatcaacccgcgcgacggcctgctgatcgccggcggcattatgagcagcgatttcgcccgcgaactgcgcgccgattacggcgctttcctgtcctgcgtggtagcgattacgcttaacgccggcgcctatgtgtccgaaattttccgcgccgggatccagtctatcgaccgtgggcaaatggaggcctcgcgctcgctcggcatgagctacggcaagaccatgcgcaaagtcattttgccgcaggcgtttcgccgcatgctgccgccgctgggcaataacgccatcgccatcgtgaaggattcctcgctggcctctgccatcggcctggccgatctggcctacgcggcgcgcaccgtatccggcgcctacgccacctactgggaaccctatctgaccatctcgctggtctattgggtcatcactttcttgctgtcgctgatggtgcagcatatggaaaagaggttcgggaaaagtgattcgcgtacataa

SEQ ID NO: 457330 - DNA, 762 bp, Serratia marcescens
atgttaaaacacctgctgctgatagcagcctgcctgaccgccagcttttccgccgctgctgagacgacctatgtggtcggctccggcggcacctaccgtccgttcgagttcgaaaacagcaataaacagctggaaggctttgatattgatattattaaagccgtcgccgatgccgagggcttcaagatcaagctggtcaatacgccgtgggaaggcatcttcgccacgctgaactccggcgatcgtgacatcattatctccggcattaccattaccgataaacgcaagcagatggtggaattctccgcgccgtacttcccggcggagcaggcgatcgtggtgccgaaggattcgacggtcgacgccatcgccgcgctgaaggcgctgaaggtcggcgtagtcaactccagcaccggcgatatcgtggtatccgacgtgctggggaaaaacagcaccgccatcaaacgcttcgacaatacgccgctgatgctgcaagagctgtatgaagacggcatcggcgcggcagtcggcgacgtcggcgtcgccaagttctatatcaagacgcatccggaaaagcagttcaagctggtgtccgacgccaagtttgaacggcagtatttcggcatcgccgtcgccaaaggcaacgatgaactgcgcgacaagatcaacgccggcctgaagaaaatcatcgccgacggcacctacgccaaaatctaccagacctggtttgacaacaacgtccccacgctgccggcccaataa

SEQ ID NO: 457331 - DNA, 318 bp, Serratia marcescens
atgggaaaacttacgctactattgttggcattgcttggttggttgcagtattcgctgtggctgggcaagaatggggttcacgattacgtgcgggtcaatgacgatgttgcagtccagcagggcagcaacgccaagttgaaggcgcgtaacgatcagctgttcgccgaaatcgacgatcttaacggtggtcaggaagcgattgaagagcgcgcgcgtaacgagctgggcatgatcaagcccggagaaactttctatcgtctggttcctgaccaatccagacgcggcgtgacgccttcctcgcaaaacaacgtaaaataa

SEQ ID NO: 457332 - DNA, 687 bp, Serratia marcescens
ttgccgcaggtggttgccgtactgccggcggcaggcatcggcagccgtatgcaaacagattgcccaaagcagtacctcaccatcggcaaccaaactatccttgaacatgcgatccacgctttgctgcgtcatccgcgtgtccgtcaggcgatcgtcgccatcggcccggacgatggtcactttgcccgtttaccgattgcccgcgatccgcgggtggtggtgacggtcggcggccagcagcgcgccgattcggtgatggccggcctgcagctggcgggcgacgccgaatgggtgctggtgcacgacgccgcgcgtccgtgtctgcatgctgacgatcttgagcgtctgctggcgattaccgaacacagtaaagtgggtggcattcttgccgcgccggtgcgcgacaccatgaaacgtgcggaaagcggggttgcggccatcgcccatacggtggagcgccaggacttatggcacgcgctgacgccgcagctcttcccgcaggcgctgttgaaacagtgcctgcagcgggcgatggatgaaggggcgaacgtcaccgatgaagcctcggcgctggagcattgcggctaccatccgctgctggtggcgggacgcgccgataatattaaagtgacgcggccggaagatttacggctggcggcgttttatttaacccagttgaaccaatag

SEQ ID NO: 457333 - DNA, 474 bp, Serratia marcescens
atgcgaatcggtcacggttttgatgtacataaattcggcggcgaaggcccgctggtgatcggtggcgtccgcattccttacgaacaaggtttgctggcccattccgacggtgatgtggcgctgcacgccgctaccgacgcgctgctgggcgccgctgcgctgggcgatatcggcaagctgttcccggataccgacccgacctttaaaggtgctgacagccgcgaactgctgcgtgaagcctggcgccgtatccgcgccaaaggctaccgtctgggcaacctggacgtcacgattatcgctcaggcgccgaaaatggcgccgcatattccgcagatgcgcgtttttctggcggaagatctgcagtgtcatatggatgatgtcaacgttaaggcgaccactacggaaaaattgggtttcactggccgtggcgaagggattgcctgcgaagcggttgccttgttaatcaaggagtaa

SEQ ID NO: 457334 - DNA, 1047 bp, Serratia marcescens
atggatatggcaaacctgacctggttgcacggtcagccgtcgtccagcggcgtactgaaggccaacccggaagatttcgtggtggtggaagacctgggctttacgccggacggtgagggcgagcatctgctggtcaatatccgcaaaaacggctgcaatacgcagtttgtcgccgactatctggcgcgttttgccggcgttcacggacgcgcggtcagctatgccggcctgaaagaccgccacgcggtgaccgagcagtggttctgcctgcacctgccgggcaaggaaacgcccgatctcgcccgttttgagctggaaggctgcgaagtgctcgccgccgctcgtcatcgtcgtaaactgcgcattggcacgctgaaaggcaacggttttacgctggtgctgcgccatatcagcgatcgtgacgacgtagagcgtcgtctgcaggcgattgccgcagacggcgtgccgaactatttcggcagccagcgctttggccacggcggtaataatctgacgatggcgcgccgctgggccaatgacgagatccgcgttaaagaacgcaacaagcgcagcttttacctttccgccagccgcagcgccctgtttaatctggtgacgtcgacgcggctggccaatcagcagcagcgcagcgtgctggaaggtgatgcgttgcaactgagcggacgcggcagctggtttgtcgccaaggcggatgagctggagaatgtgcagcagcgtgtgaatgacggtgaactgctgattaccgcgccgctgccgggagatggcgagcctggcaccgccggcgccgcgctggattttgaacaacagtgcttggcgcagcagccacaattgcttagtctcttaaagcgtgagcgcgtagaccctgccagacgcgctttgctgttgcagccgcagaatatgcaatggaactggtgggatgatgtcaccgttgaactgcgtttttggctgccggccggcagtttcgccaccagcgtagttcgcgagattatgcagcaggataaccgtgatgcggatattactgagtaa

SEQ ID NO: 457335 - DNA, 762 bp, Serratia marcescens
atgcggatattactgagtaacgatgacggcgtcagcgcgccgggcattcaggtgctggccgcggcgttgcgtgagtttgccgaagtgatggttgtcgcccccgatcgcaatcgcagcggcgcgtccaatgcgttgacgctggaagcgcctctgcgtacccaaacgttgcccaacggcgatatcgccgtactgcagggcacgccgactgactgcgtgtatctgggcgtgaacgccctgatgcgtccggcgccggatattgtggtttccggcattaacgccggccctaacctgggcgacgatgtgatctattccggcaccgtggcggcagcaatggaagggcggcatttaggcctgccggcgttggcggtgtcgctgaatggccaccggcattatgacaccgcagcagccgtaacctgccgtctgttgcgtgcgttgctgcgtgaaccgctgcgcaccggaaagattctcaacgtcaacgtgccggacgtgccgctggcagaaatcaaaggggttcgcgtgacccgctgcggcagccgccatccggcggagcaggtgttttgtcagcaggatccgcgcggtcgggatctctactggattgggccgccgggcgataaatttgatgccgggccggatacggattttgctgccgttgagcagggctatgttgcggtaacgccgttacaggtggatttaaccgcgtatgccgcccaggatgtggtaaaaacatggttaaccaaagccgaggtcagcggggaatggtga

SEQ ID NO: 457336 - DNA, 627 bp, Serratia marcescens
atggtgagtaagtcaatgcaaacattgctggctcagctgcgtcagcaggggatccaggacgaacgactgttgcaggccatggcggccgtgccgcgtgagcgctttgtcgatgaagcgctccagcataaagcctatgaaaataccgcgttgccgatagggtcggggcagactatctcccagccgtatacggtggcgcgtatgaccgaactgctgaacctgacgccgacgtcgcgcgtgctggaaatcggcaccggttccggttaccagacggctatcctggcgcatctggtccagcatgtgtgctccgttgagcgcatcaaagggttgcagtggcaggccaagcgccgcctgaagcagctcgatctgcataatgtttccacccgccacggcgacggctggcaaggctgggcctcgcgcgggccgtttgacgccattatcgtcacggctgcgccgccggaaatcccgcaggagctgatggcacagctggacgagggcggcattatggtgctgccggtgggagaacagtcacaaattctcaagcgtattcaacgtcgcggtggcgaatttgttattgatgcggtggaggcggtgcgttttgtcccgttggtaaaaggcgagctggcctaa

SEQ ID NO: 457337 - DNA, 1002 bp, Serratia marcescens
atgattacttttcgccgggttgcggtgtgtacgatgatcggtgtgtggttggcgggttgtacgaacagcggttcgtcttctgctcctatcagcagcgtcaacggcggtggcggtagcccgatgacggctggcagcgttgcagctccgtctgcgcaggccacgccgcaagagcgtatcgtttataatcgcagttatgactcaattcaaaagggcagctacaacggcagcacctatacggtaaagcgcggcgacacgctgttctatatcgcctggatcaccggcaatgatttccgtgatctggcgcagcgcaacaatatccctgaaccctatagcctgaatgttggccaaaccattcaacttggtaatggttctgccaatgccggcggcggcgtagtagcggccacggacgctaccggtggcggtattcctaaaccaccatccagcagccagatacaaacggcaacggttgattctcaaccaactaacgcgtattctgacaattcgggtaaacagaatgtaggtaagatgttacctgcagcaggagccgccgcggcgggaagcgccactgctcctgttaccgcgccagttgctacgcctccggcgagcagcgccgccagtaataattcgccggtcagtacctggcgttggccgactgacggtaaggttattgataacttttcctcatcagacggtgggaataaaggggtcgatatcgctggcactcgtgggcaagccatttttgcgaccgctgatggtcgcgttgtatacgccggcaatgctttacgaggttacggtaatctaatcatcatcaaacataatgatgattacctgagcgcctacgctcataacgacacaatgctggtccgggaacaacaagaagtgaaggcgggtcaaaaaatagccaccatgggtagcaccggaaccagttcagtacgtttgcattttgaaattcgttacaaggggaaatccgtaaacccgctgcgttatcttccgcagcgatag

SEQ ID NO: 457338 - DNA, 999 bp, Serratia marcescens
atgagccacaatacgctgaaagttaacgagttacagactgatgcagatttcgacgagaatggagttgaggcggaatcatttgatgaaaaagcgctggcagaaaccgaggccagcgagaatgatttagctgaagaagagctgctgtcccaaggggtaacccagcgtgtgttagacgcaacgcagctctatctcggagaaattggctattcgcctctgctgaccgcagaggaggaagtttattttgcgcggcgggcgctacgtggtgacgtgccgtcccgccgtcgtatgatcgaaagtaacctgcgtctggtggtgaaaatcgcccgtcgctacagcaaccgcggcctggcgctgctggatctgattgaagaaggtaacttgggtctgatccgcgcggttgaaaagttcgacccggaacgcggtttccgtttctccacctatgccacctggtggatccggcaaaccattgagcgggcgatcatgaaccaaacccgcaccattcgcttgcccatccatatcgttaaagaacttaacgtctacctgcgcaccgcgcgcgagctttcacataaactggatcatgagccgagtgctgaagagattgccgagcagctcgacagacctgtggatgatgtgagccgcatgctgcgtctgaacgagcgcattacttcggttgatacaccgctgggtggcgactcggagaaggcgctgctggatattctggctgatgaaaaggacaacggaccggaagacaccacgcaagacgatgatatgaagcagagtatcgtcaaatggctgttcgaactgaatgccaaacagcgtgaagtgttggcacggcgtttcggcctgttgggctatgaagcggcgacgctggaagacgttggccgtgagattggcctgacgcgtgagcgcgttcgtcagattcaggtggaagggttgcgtcgcctgcgtgaaatcctgcagacgcagggactgagcattgaggcgctgttccgcgagtag

SEQ ID NO: 457339 - DNA, 2553 bp, Serratia marcescens
atggaaaaaaaagaatacgtcgaacacacgccgatgatgcagcagtatctgcgcttaaaggcgcagcatcctgaaattctgctgttttatcggatgggtgacttctacgagctgttttatgacgatgccaagcgcgcctcgcagctgctggatatctccctgaccaaacgcggcgcctcggcgggcgaaccgatcccgatggccggcgtgccgcaccatgcggtagaaaactatttagccaagctggtgcagttgggcgaatccgtcgccatctgtgagcaggttggcgatcccgccgccagcaaaggcccggtggaacgtaaagtagtgcgcatcgtcacgcccggcaccgtcagcgacgaagcgctgctacaggagcggcaggacaacctgctggccgccatctggcaggacgcgcgcggcttcggctacgcaacgctggacatcagctccggccgtttccgcgtcgccgagccggaagatgtggaaaccatggcggccgaactgcagcgcaccaacccggccgagctgctgtacccggaaagcttcgagcaaatggcgctgatcgaacagcgccatggcctgcgccgtcgcccgctgtgggagtttgagctggacaccgcgcgtcagcagttgaacctgcagttcggcacccgcgatctgaccggcttcggcgtagagcagtcgcagcaggcgctgcgcgccgccggctgtctgctgcagtacgtcaaagacacccagcgtaccgcgctgccgcacatccgcggcatcaccatggagcgccagcaggacggcatcattatggatgccgccacccggcgtaatctggagatcacccaaagcctgtccggcggcagcgaaaatacgctggcggcgatcctcgatcgcaccgtcacgccgatgggcagccggatgctgaagcgctggctgcatatgccgacccgcgacgtcaaagtgctgaacaaccgtcaacaggcaattggcgcattacaggatctgactgccgatctgcagcctccgctgcgtcaggtgggcgatttggagcgtattctggcgcgtctggcgctgcggaccgcgcgcccgcgcgatctggcgcgcatgcgccacgccttccagcaactgccggagattcgcgcgctgctgcaggacgttgaggcgtcgcacgtgcagcaactgctggcgcaggtcggccagttcgatgagctgcaggacctgctggagcgcgccgtggttgaagcgccgccggtgctggtgcgcgacggcggcgtcatcgccaccggctataatgacgagctggacgagtggcgcgcgctggcagacggcgccagcgactacctcgatcgtctggaagtccgcgagcgtgaaaagctgggcctggatacgctgaaggtcggcttcaacggcgtacatggctactatattcaggtcagccgcgcccaaagccatctggtgccgattcattacgtgcgccgccaaacgctgaaaaacgccgaacgttacatcattcccgaactgaaggagtatgaggacaaggttctcacctccaaaggcaaggcgctggccattgaaaaggcgctgtatgacgaactgttcgacctgctgctgccgcatctgggcgaactgcagcaaagtgccagcgcgctggctgaactcgacgtgctcggcaacctcgcggaacgggcggaaacgctcaactatgcctgcccgaccatgagcgatcagccaggcattcgcattaccgaaggccgccacccggtagtggaacaggtgttgagcgagccgtttattgccaacccggttgcgctgtcgccgcaacgtcgcatgttgatcattaccggccctaacatgggcggtaaaagtacctatatgcggcaaacggcgctgatcgtgctgatggcgcatatcggcagctacgtgccggccgccaaagccagcatcggcccggtcgaccgtatctttacccgcgtcggcgcggcggacgacctggcctccggccgctccacctttatggtggaaatgaccgaaaccgccaatattctgcacaatgccaccgagcacagcctggtgttgatggatgaaatcggccgcggcacctcaacctacgacggcctgtcgctggcctgggcctgtgccgaaaacctggctaaccgcatcaaggcgatgacgctgttcgccacccactacttcgagctgactaccctgccggagaaaatggaaggcgtcgtcaacgtgcacctggatgcgctggagcacggtgacaccatcgcctttatgcacagcgtacaggacggtgccgccagcaagagctacgggctggcggtagccgcgctggccggcgtgccgcgcgacgttatcaaacgcgcacggcagaaactgcgcgagctggaaacactctccaaccacaccgccgccggtacggtagacgccacccagatgacgctgctgactgaagaaacttcgccggcggttgaagcgctggaaacgctggatccggattcgctgagcccgcgtcaggcgctggaatggatttatcgcctgaaaagcctggtctaa

SEQ ID NO: 457340 - DNA, 1092 bp, Serratia marcescens
atgcgtcaatttgcccctctcattcctctggttgttttgctttccgcctgcagcagcaagccggaaaataccacccagccgccgcagagccgcacggtgcaaggcggtttcctgctggaggccgatcacgttaatccgatgctgtccggcgattatgcctataacgcggcggcccagcgctttatcgacaaaatggtgcgcgagcacggctttgatcgccaacagctgcacgatgttttcgcgcagaccaaacgcctggactgggtaattcgtctgatggaccgtcaggcgccaaggccgaccggccagccgccttccgggccgaatggggcctggctgcggtatcgtaataagtttattacgtcggacaatattcccaacggcgtggccttctggaatcagtatgccgacgcgctggagcgcgctcaccgggtatatggcgtaccgccggaaattatcgtcggcatcatcggggtggaaacacgttgggggcgggtgatggggaaaacgcgcattatcgatgcgctggcgacgctgtcctttgattatccccgtcgtgcgacgtactttaccggcgagctggaaactttcctgctgatggcgcgtaaagaacagcgcgacccgctggagctgcgcggttcttatgccggcgcaatgggatacggccagtttatgccgtcctcctttaaggattatgcggtcgactttaacggcgacggacacattaacctgtgggaccctgaggacgcgatcggcagcgtggcgaactatttccgcgcgcacggctggcagcgcgatgcgccggtagcggtgccggccagcggccaggcgccatatatggagcacggcttcaagacccgctatacggtcggcgccctgcaggccgcggggctgacgccgcagggcgggctgggccatgaccaggaggtgagtctgctgcgtctggatatgggcagcgactatcagtattggttcggtttgcctaacttttacaccatcacccgctataaccacagcacacactatgcgatggcggtatggcagttgggtgaggcggtcgggcgcgagcggcgcggcggcagcgtattctga

SEQ ID NO: 457341 - DNA, 1404 bp, Serratia marcescens
gtgaaaaaaacgtttggcgtattctttccgttatataccacaacgctgctgatgctgcttggctccgggctgctgaccacttatatctctttgcgcctgacctcgattcacgtcaccggcggcctgatcggtgccattaccgccgccaactatatcgggctggtgatcggcggcaaggtcggtcattttttgattgcgcgcgtcgggcatatccgcgcctacgtctcctgtgcgggcattattaccgccgcggtgctggggcacggtttgaccgaattcatcccgatttgggtggtgctgcggatgattatcggcctgtgcatgatgtgccagtttatggtgctggaaagctggcttaacgatcaggccgaatccaatcagcgcggcgtggttttcggcttctatatggccgccacctatctgggcctgtctctgggccaggtggtgctgatgctgcaaaccgatctgggcatcaccaccctgctgattatcgccctgtgcttcgcgctctgcctggtgcccatcgcccttaccacccgcaccaatgtccgccatatgtcgccggcgccgctggagctgctctactttattcgcaacatccccagcgtgctgaccaatacgttggttatcggcatggtggtaggctcgttttacggcctggccccggtgtataccagccagcaggacctcagcacccagcataccggcctgtttatggcgctggcgattttcgccggcctggtggcgcagttccccttgagctggctgtccgatcgttacaaccgtacgctgttgatgcgccttaacgctattctgctggtgttagcggcgctgccgctggcgattttgccgcacatcactttcccgctgctgctggctatcggttttgtcgtcagcatgctgcagtttacgctgtatccgctggcggtggcgctggccaacgacctggtcgagccggagcgccgtgtgtcactggcggcctgtctgctgatggccttcggcgtgggcgccagcatcgggccgctgacggtcggcatgctgatccagccgctgggcggcaatattctgtatgtatttttcgccctgtgcggcgtgctgattgtcggctttagccgcacggtgaaagaggatgaatcgcagtttgtcgacgatgcgccgctgccgcacattccgatgccggacagcctggtcagttcgccgctgtcgccggcgttgaacccgaccttcgatgaacaaacgattcatgacaccatgccgccgccggaagccgcaccggatccggtcgaaccggaacccgccgcagagaatacggaagcgacggatgaggaaacggcagaaacgcccgcccaaggcgcggacccagatgaggacaccgggctgaaaaaagcctacaccatgctgtag

SEQ ID NO: 457342 - DNA, 552 bp, Serratia marcescens
gtggcggaaggtgcgaccattactccgttgacggccaccacgggggcagacggtaatgccggtgccacagtgacgagcctgaagtcgggcacctatacggtgacggcggaagtgaatggcaagggcacgagcaaggacacgacgttcgtggcggacagcaagactgcggagatcactgaaggcaacctgacggcagtggacaacgatgctgtcgccaacggcacggccacggacagcgtacaggcgaaagtgacggatgcgaacggcaacccggtcgcgggcgttgaggtgagcttctcggcgacggtggtgacggagaaggtctctaccgaggcggatggtgtagcgaagacgacgctgaccagcacgaaggcgggcacgtccagcgtgacggcaagtgtgggtgacagtgagcagacggttgacgtgaacttcgtggccaacgagcctgcaaacatggaagtgactattacgaataacaatgctgttgcaaatggcaatgatatggtatctgagcgggaaagccagaaaggaccgttggtactggaataa

SEQ ID NO: 457343 - DNA, 477 bp, Serratia marcescens
atggaagtgactattacgaataacaatgctgttgcaaatggcaatgatatggtatccgtgcaggctatggtcagggatgcgcaaggtaatccagtaaaagattctgtcgtgacttttgctaagcttaatacaagtggctctgagcaaatcagccaactgtatacaaccactaacgatcatggggtggcctccaccacgctgacggatacggtggctgaaactgttgttctggtcatcaacatgctgaatgcagaaggcaacgtttcacttgaacaagagatacatgacatcactttcgtggcggatgacggcacggctgaaatcacggacacgaacctgagcgtggggactggcgcagttgccaatggcaaggacaccaatgcggtcacagccaaagtcaccgatgcgaaaggcaacccggtggcgaaccaggagggacgttcagcgtggcggaaggtgcgaccattactccgttga

SEQ ID NO: 457344 - DNA, 954 bp, Serratia marcescens
atgaccaattatcaggttctcatcagtaatggtcgccgtgctgtcatcagccacaaatgtcgtgtccttgctcgcgcccttgccattcacttccgccgtcaccgagtaagttcccgccgtcgtgctgctgactgcagccatcgccttgccgttgtcgccagtcgtgccctgcgtgagggtaataatggcgccttcggccacgtgaaacgtcactacttggccagcaaccggattaccataggcatccgtgactgttgccataatgccgtttttggccgtgccatttgctacagcgttgtctctgaatacaaccaagttctcatccgtgatttccgccgagctctcgtccgccacgaagctcacgtcaaccttcggctcgctgtcaccggccttcaccgtcaccgtcgagacgcccgccttcgtgctggtcagcgtcgtcttcgctacaccatccgcttcggtagagaccttctccgtcaccaccttggcgtcattgcttgccgagaagctgacctcaacgcctgcgaccgggttgccgctcgcatccgtcaccttcgcctgtacgctgtctgtgtgcgaaccatcagctacagcattgttatccaccaccgtcaggttgcctcccgtgatttcagcggtgctgtcgtctgccacgaacgtcgtgtccttgctcgtgctcctgccattcacttctgccttcaccgtataggtgcccgccttcgtgctcgtcaccgtcgccgttgccttgccgtcatcaccggttataccctgcgtagtggtgatagtggcaccttccgacacactgaacttcacctcctggcccatgaccgggttaccattcgcatccgtcactatagctgtcaccgcattggacgcctgcccgtctgctgccgcacccgtgcccacgctcagattaccttccgtgatctcaagcgtgccgtcgtcagcttctga

SEQ ID NO: 457345 - DNA, 441 bp, Serratia marcescens
atgaagtatgtctttatcgaaaagcatcaggctgagttcagtatcaaagccatgtgccgggtactgcacgtcgcccgcagtggctggtatgcctggcgtcagcgtcgtcaccagataaaccggcgtcaacagttccgacttgtctgcgatgctgcggttcgacagacctttgccaaggcaaaacagcgttatggagcgcctcgtcttgctgatgaactgccggagtacaacatcaagactatcgccgccagtctgcgtcgtcaggggctgcgggcgaaagcctcgcgccggttcagcccggtcagttaccgtgagcatggtctgccactatccgagaatctgttgaagcaggactgttacgccagcggcccgaatcaaaagtgggtgggtgacatcacgtatctgcgcaccggtgaaggctggctgtatctgcggtggtga

SEQ ID NO: 457346 - DNA, 216 bp, Serratia marcescens
atgagcgctaaaggctgttgttacgacaatgcctgcgcggaaagcttctttcactcactgaaggtggaatgtatccacggggaggactttgccagccgggaaataatgcgaacggcagtgtttaattatatcgagtgcgattacaatcgctggcgtcgtcacagtgcctgtggcggtcttagcccggaacagtttgaaaaccaaaacctcacttag

SEQ ID NO: 457347 - DNA, 618 bp, Serratia marcescens
atgaagactcagattaaaatagatgtttctactgaaaacaaatatttcaaccttggattaacgtgtgtgcttcgagaagaatttagcaaggtaggtatcacaactcatgttataggcatgcataatgccacacattcagatatatcatttaaacatactcctccgaaagatgatatctgcctttatcaatacgttcgcttagaaaaaataaaccaaccattattctttgaaattagcccaccaaataaccataagtcacccaagagtaaaaaaataaaactcatgcccaagaatttgaagagtgggggtgttgaatataatatagatattgatttcattttgcgggaaataaagcatgagattagattaaaaatagaaaacaaatcaaaaaaaacactggcaagatatgaaataacacatttcagcatgagagaaatgcacgtaatagaaggattgaaaaaagagatgaatgcctccgaaatagctcataacctaggtattagccccaagactgtcagtagtcacaaaatgaagattatgcggaagatgggatttaaaaaaaacattgaactatataagtggattaggggaacggtgatgattctagattttttttaa

SEQ ID NO: 457348 - DNA, 216 bp, Serratia marcescens
atgagcgccaaaggttattgttacgacaatgcctgtgcggaaagattcttccacacactgaaggtggaatgtatccacggggagaattttgccgtccgggaaataatgcggccagcaatgtttaattatatcgattgtgattataatcgctggcgtcgtcacagtgcctgtgacggtcttagcccggaagaatttgaaaatcagaatctcgcttag

SEQ ID NO: 457349 - DNA, 3885 bp, Serratia marcescens
atgcagatggcgcagggctcggacaaggtatctatcaacggccagccggcggcgcgtgtgggggataaaaccaactgcgacgcccaggtgatggaaggctcgcccaacgtgcgcatcggcggcggcaccatcaccaccttgccgataaaaccggaagtgccggactggttgtataaaatctccgacctgacgctgctgtttgccggtttggtgggcggcgtcggcggggccgccagcaaactgggggcgctcgggaaaatgctgagcaaggcgcccggcatcaacaaactggggcggacggcctgccggtttggcacgctgatgaccgccacgaccgccgccggcattattgcccggccggtcgatatcatcagcggccagaaattcctgtccggcgacgacgagctggactttgtgctgccgtcgcggctgccggttgagtggcagcgctactggcgcagcggcaacccggcagagagcgtgctggggcgtggctggagcctgttctgggaaagcagcctgcagcgctaccaggatggcctggtgtggtgtgcgccgtccggcgactacgtttccttcccgatggtgccgcgtggtcacaagacttactgtgaagcggaaaagtgctggctgatgcacaacagcgatggcagctggcaggtgttcgacgtcagcgaacaggcctggcactacccggctctgagtgatgcgccgagccggctgcagatgctgacggacctcaccggcaacacgatttccctgttccacgacgaccatggccggctgaccgaactggtcgacagcgccggccagcggctggcgtgccgttacctgaccaccgccaacggactgtctcgcctgagctcagtgctgctgtttaccccggacggcgagctgccgctggtgcactacggttacgatgacgaggggcagctggttaccgtcagcaaccgcgccggcgaagtcacccggcgctttggttggcaggacggactgatggtcagccatgaggaccagaacggcctgctgaacgaatatcgctggcaggagattgacggcctgccgcgcgtggcggcctaccgcaacagcgccggcgaacagctggcgctctattatgattttgccaacggcacacggcggtcggtgcgcgacgacggcgcacgggcgctgtggcagttggacgatgacgacaacgtggcgcagttcaccgactttgacaaccggcagtcggccttcatctatgcgcgcggcgagctgtgcggcgtggtgctgccaggcggtgcgcagcgccagagcgagtgggaccgttacggccgcctgctgagcgagaccgacccgctgggtcgcaccaccacttaccagtattcccgcaacagcggccgtctgttctcggtcacctacccggacggcagtcaggcgtttcagcactgggacacccagggacgcccgacacagcagattgatgcgctgggcaatgttacccgttaccactatcccgatgaggaggagagcctgccggcgagcgtcatcgatgcgctgggcggcgaggtgaaactgacctggaacgcacagggattgctgacgcgctataccgactgttccggcagcgtcaccgcctacgcctatgacgcgctggggcaactgacgcaccgtaccgacgcggaaggtcacctgacccgctaccactgggaccgagctggccggctgcagacgctgctgcatcccgacggcagcgaagaacgtttcgactggagcgcgcagggccagctggcccgacaccatgacccgctcggcagcgagacgcgctggcagtacaacctgctgggccagccggtcagtgtcaccgaccgtatccagcgtacgcgccgttatcactataactgccgcggctggctgacgaggctggaaaatggcaacggtgccgattaccagttcagccacgatgcggttggccggctgatgattgaacggcggccggacagcatcgaccgtttatatcgctatgggcttgacgggcaacttaccgaataccgggaagttgcgtcgccggacgtggagccacagccgtccccgcggctgcaccaattccgttatgacgacgccggccagcttgtctggcgcgccaacgacagcgccgagtggcattaccactatgatgcggccgggcgcatgagccgcctgatacgtacgccgaccgctgccggcatcgcactgggtatcgagccggacagcgtgcagctgcgctacgacagggccggcaacctgctgagcgagcagggcgtcaacggcgagctgcagtaccagtgggatgccttgtccaacctgcaggtgctgacgctgccgcagggtgaccaactgcagtggctccattacggctccggccatgccagcgccatcaggttcaaccagcaactggtgagcgaattcagccgcgaccggctgcaccgggaaaccggtcgtacccagggcgcactgcatcagcagcgccaatacgatgcgctggggcggcgcagctggcagagcagcgcattcgggcacatcagcaaaccggaagagggcgtgctgtggcgcacgttccgctataccgggcgcggcgaactggagggggtcagcgacgcgctgcgcggtgagattcattatggctacgacgcggaaggacgcctgctgcagcaccgcgaggcacagcagggcaagccgggccaccggctgcgctacgacctggcggataacctgaccggggagcagcgcgtcagccgagacccggatgccgacctgccgccggcgccggtggtcaataaccggctcgaatactggcagcggatgttttaccgctatgacggttggggcaacctgaccagccggcgtaacggggtttaccaacagcattacgtctatgatgccgacaaccggctgataaaggcgcatggccgcggcccgcagggtgattttgaggcgcagtatcactatgacgcgctgggacgccgcacgcgcaagacggtaacctgcaagggtaaggcgccggaaaacacgcgcttcttgtgggagggctaccggctgctgcaggcgcagcgggataacggtacgcgccgcacctggagctatgacccggacagcgcctggacgccgctggcggcccttgagcaggcgggcgacggccagcaggcggatatctactggctgcacaccgaccttaacagcgcgccgctggaggtgaccgatgccgagggcaacctgcgctggtccggcaactacgacaccttcggcaaactgcaggggcagacggtcgccggcgccgaacggcgcaagggcgcgctcgttgaccagccgctgcgttatgccggccagtaccaggataacgaaagtgggctgcattataatctgttccgctactatgagccggaagtaggacgctttaccacgcaggatccgatagggctgagcggcgggctgaacctgtaccagtatgcgccgaacccactcggatgggttgatccgttaggtttagcttttggctcaggtaaaggtacacataatgccaaggcaacattatttgatagcaatggcaatgttaaagcgacaggtgtgtggcaaagtgggaacatgacgccggatgaggctgctttaggattcccgcagagtacacttgccacgcatacagaagcgaggattactcgtgagttacatccacaggcagctcctggagatcgacttgttattgatggcgagtacccaccttgcaatagttgtaaagggaagatgaatgccttcaaaactgctacaggtgctgaggtagaatataaatggcctgcagatacaggtgatggaaccaaggtctggaatgctaagtcgaaaggaactaggaaaataccaggcgcggattgctaa

SEQ ID NO: 457350 - DNA, 423 bp, Serratia marcescens
atgctttccacctgcggtgccgcccgcagttatgaccagaaacaccgtaccattttacgcacctattccgaaatgacgctggagaccgctcttgacgaggcatcagcactgatccgcgcggttgccttgcgcctgcatgcccaatcgcgcctcagccatgatgaagaacagctccatagcaacgatccgttcgcccgggagccgtatgatgttgtgatgcaggagattatgcaggcactgattgaacgtgttggtagctatcaactgaacacagagggcgaccctattcttgaggcgattgggttgtacggcccggatttcagtggccttgaccagaggctaattaacagtccggcctcacgaatcaaactcggcaaggaaatcgctgcccgcaaacaagccaaagcggaagaggaggtataa

SEQ ID NO: 457351 - DNA, 576 bp, Serratia marcescens
atgaataatgacggtttgaagtctttacgctctgcggctgccgtctgcctgttcggaagttttctgctgtcagggtgctcgatgtcagacgtggccgcgtggaatcagaagatcagtgatgccgcacattctattgccagtggctcggggacgagttcagattccggcggcatgtcctggatgaccaaggccggtgctaccggcccgcgtcaggacgtgcagcatacctataagctgccggtggatgttgataccgctgctgcccgactgaaaagccactatcagtttatctccacggatgagctggaaagtctcctcaagcgcgatcaatacggtgactggagtgccggcgctattgatgaagcacggccagaatgggcagcgcaaaagggcagttactacaagatgggccaggagtggaaagataacgatcgtctgatgttggaggtcgttaagtccggcgccggcagtcggctgaaggtcacttacagctcaccggacagtacccacctgaccgacgcctatctgagccgcctgatgaaccagctgcagcaggttgccaaaggtcagagctga

SEQ ID NO: 457352 - DNA, 138 bp, Serratia marcescens
atgacggagaaatacaccttccccgacgggaaaagtgtttcccgtcgggagtctgcaaagtcatacgtcagtgcagactgtctgaattgtgaaatggaccttcatcaccgttcagtgatccctgttctcaaaggttaa

SEQ ID NO: 457353 - DNA, 3810 bp, Serratia marcescens
atgatgaatatacgaggtttatgggatttttgttgcggagaattttcagataccacctcagaacaaaacaattacacttatgaggctctaacccccagtattattgaacccgagaaagcgcataactatatcgaagcacttacttttgcctgctcccgtccggacataaaaaatattgcggttacagggccttatggcgcagggaaaagctccgtactactgacatggcaacagtatccttgcaatgactttcgtgtcatgaccatatcgttagcagattttgatatgcaaagtgttcctgatcaaaaagcggatactgttagcaaggctgaagataatagtgaggccggtaataagggaggtgagaaaactattgagtacagtatcctccagcaacttctttataaggaaaagaaaagctcattaccctactcccgtattgaacgtatatcggatataacttcccgacaggtcgctgggatggctggtaacctgatgttgatgattgttttggtaatgaccggcctgctatttttgttccctgattatattagtactaagctaactcttccgcgctggttgagtcactcccttcttgatttaccggttgtgtgtaggctgagcggcgcaggtattctacttttcttcgccttgtttttgatactgaagaagctacatcgtatcggcctattcgatcggcgcgtcaacatcgacaaggtcgatatgctgaaaggtgcgatatcaacacgtccttctgcaccttcccttctaaatatctatatcgatgaaattgtttatttttttgagcagacaaagcacgatgtggtgatttttgaagatttggaccgttataacgatggtgccattttcatcaaactacgtgaaattaatcagattattaataactgtctaccagcagataaacccgttagattcatctatgctgtcagagatgacctgttcagtactccggagtctcgtaccaagttttttgattttgttctaccagttataccagtgatggatagtgataatgcgcaagagcatttctccagtaagttcaatgaagctgaactcagccagctagggtttagggagtgcttggcacgtttgtccgtatttattcccgatatgagggttatgcataacattgccaatgagttccggctgtaccggaatatcgtcaataatggcgaagatctccggcgtcttgtctcattgatatcttataaaaacttgtgtgcagaggattatcatggcattgatcacaagaaaggcatcctatataacattgtctttgcgtatgtttctggcgactttaggcgtgattatgaagataaatatcaggcagagatagtacatatacagtctgagatttctgcgacccaaagtgaaaaatctgacagtaaacgagacataagaagggatattcttcttccgtacatcagtcaaaagacatcagggacattacatttttacctgcgtaataatgtaacaatttcacttgatgatgtcatttccaatgagagtaagttctttgaattgatttctggctcggtgtttgatgtccttactaaaatacgtgggcagaatgttgcttatgtagacacgtcagcagtaaaggagattgatggcgagtataaaaaaagatgtcaactgctacagtctaaattagaaaatcgtattgataatctggagaaaaaaataaattcgcttaagggggagattcaaaggttgtattctcgtgagcttagctacttcatggataaaatgggaagtggtggtttttttgagtggataaaagaacggtcaattaacgaaggtaaagggggggtatgtgtaagtagtagtgaacagatggagtttatatatttccttttgcgttgcggttatatatctacagactatatgtcatatcgctctgtatttatgcccggtagtctgaccaaggaggataatgattttattagagcggttagtgcaggtcgatcgtcaggtgggacgacggtgatgccgttagtgaatattgcaaatgttattagaaaacttactgagttggggttaaccttgcaggagaacgcttggcaccctaccatactgcatcaccttttatatgaagatcgaccactacttagtaaagttatgcttcatcagacagaggttggaaacgagcaccggctaatctggctttccggtacagtctttaaacagtggcctgtcaatgaaagacttgaatatgtacatcaattggcatcgaatggtgagcgtttagaagtgcttatccagcggcttgttgggataggaaatacgcctgaaggattaagtttgttggctctactaatgagtattcaatcgttgtcatgggaccaggtttcggttgtctcgcttgagaaactgcaccaactgattgcggagtacaccgatttaattacatatgtaccagaagggagtgctaactattttacggataatattaaaaaatcaggaagcattattcagcacatccctattaatgtcggagacagtggtgtgcaggttgtccgtaatgtcgttatggggaaactttggtgttactccgaggataacttaaaaaacatagttattttactttcagggaaggaagaggtttcacaggatttattctatcataggccattgtctttatgtaggtcccttcaaattaatgagattaatgaagttctcgatgagaacattcatgatttcattgagggggttttcacagactcatgtgactatgagtttgtacctcatttactgaactcaaaaataattgactggaaagatgctgaatgcatagtttacaaaatgaattttgtcctgaatgaactgggtgaagtgaataacaggcaaggagaggtctcggagttttctggtgatgggtatcggaataatctatactctttattattgcaccatgatagaatattgccatcttggcagaatgttatattgctgttggaaagtgaagaagaagtctctagcggggttttgtgtaaatggtttaataaaagttattctgctcttgaagatgaatttcattctctttcgctcatgctctttggtatgctaatggataagctcgtagtttcagaagttattacttcggaggcattaaatactattgtagaaaaaattaatgctgtacttattaatgtgcctgataatatacccctacgtaatgcggagttgctggtttcccataagtggcttgcccctacaccaacggtgtttgaggagctctatgaggtgttttatgacgaaggtaataaacttcattcccttttgcacgaactggtgcgcttgcgccctgcgctgttgggtcagaaccatgagctcattctgtacagtgatgggaagtttaaccgtgaacttgcattgttgatattcaatgataaacagattcctgcagattatcgcgtaggtgcgcttaagtggctatgggagcgtgacaaggaaatttttaacactggtcctctcatcgagttgcaggagtgtggtgaactaactctactattgtcaaacgacgacctgaagctcgcgttgcttgttcagtgccttaaagtcggagatgatgatcaccctgtgcttcgctctatactccagacttttagtgatactagatattctgctgttttgattaaaaaaagccatcgcaatatagagttctcagagcccatgtggaggttggtaactcttcttgaaaacactggtttcatcgctcgggctaaaataacacatgggggggcgcgcatacgtattgacgctgcggacgggcttgtagatgaatga

SEQ ID NO: 457354 - DNA, 372 bp, Serratia marcescens
atgactgaatcagagaagaaagacctgctgccccgccggggcggcaggcttggttggggcgctaaacgcgccctgcagctgcttgccatgcttgtggtggccatggtcatggcgctggggctcgcgcactggggcgttactcaccccagtgaaaccaccgcgctgcgtagctgggtgcacagtacccgttacggctggctgttctggcgcctggcgctttatgccgtgctggcctgggggttttggaaaatctggcacgcaccgggcgttaagccagaacatcggcagcccctcaagcgcatggtcatcgcgtgcacggtctttgccctggcgtgtgaatactccatcttcggcggagggctgacgctatga

SEQ ID NO: 457355 - DNA, 321 bp, Serratia marcescens
atgagtggtgatttctatcgcgcttttgaggaaaagcacaggggaagcgtgcaagacatcaagcagcgtttatctgtgtatcttccattcatcacgacgttggccaaaacgtatccttctgtagaggttgcggatgtcggttgtggccgtggggaatggcttgaaacattaaaggagcacgctattcctgcaatcggggtagaccttgacgatggcatgttagagcgggcgttacaggttggtctgaatgtaaaaaaaatggattgcctggcgtttcttcagtcgttagaagatgagagtctgctggcgattgccttttga

SEQ ID NO: 457356 - DNA, 432 bp, Serratia marcescens
atggcgcaggagctggcacacgatggcacccataacgcgctgcgcaaccgcgttcgccaggttggcgggcaggtcgtgccgatgggcatggcgattcagatggaacagatcagcggccgtacagacatcacagaagcgatgtgtaagcgcgctggtggtgtgtttgtgaagttgccagaagtcggcgccgttgataacgaagagctgcttttcaaattcaatgagttgatggctgcgcttggtgtttttgctgcggctcataacgaatttacagcagacggaatcttggacagtaacgagagtagaaggctgaaagccaaaggttatcgcgtgcagtcgttggtggctgagatttatgcggtaactgtgatgttgtttggagagggtggcgctaccgatatgcggtcagtagcgccgggtgcatcaatttaa

SEQ ID NO: 457357 - DNA, 246 bp, Serratia marcescens
atgaaccccatcgaatttatccgtaagaacgtcgtaacgcagctggtcggcgaaggttttcccgaagaagtggcgaaggggggggcagaagaggcggtggatttgtaccgcaggatgtctcaggccagccgcaaggggcgcatcttcgacgattgccttgctcaggcaagactctactgccgattccacacaccgaaaacagccaaagggggcgcgaatggaaagcgaagtaatcgtgccgtttga

SEQ ID NO: 457358 - DNA, 546 bp, Serratia marcescens
atgaagtctgactatcttggcgggagtcaaaccccaccggaacacaaagaccgctggcagacaccgatcgaggtgtttagcgcgctggatgtcgaatttgggttttatctcgatgcagcagcagagcatagcaatgcgctttgcgcccgctacctgacagaacgagacaacgccctggtggttgattgggagagttacggcgccatctggtgcaatcctccgtacagctcgcccgcgccatgggtggagaaagcggcagaacagtgccgggttcaaaaccagccgatcgttatgctgctgccagcagatacctccgtaggttggttctctctggcgctgcagtccgtcgatgaggtgcgattcatcactgaggggcggatatcgtttatcaacgcgggtacaggcaaaccagtcaatgggaacaacaaggggagcatgtttctcatctggcgcccgttcatcaaaccgcgctgccagttcaccactgttagccgtgctgatctgctgggtattggcgctgctgctctgcgcgaggtggtggcatga

SEQ ID NO: 457359 - DNA, 621 bp, Serratia marcescens
atgggtaaaattaaagatcacatcctagaaaccatatcgactaacttttctgatttcatggccagtgccagtaacatatggactgatagtccaacattttacccggcagctataggtgccatcattgctgttgtaagtatccttactcaaaggaagacttcccgtgaaaagaactcgttggatttcgaggtttcttacaaaagaagcgaaacagtaacagaagcttttgatgtattggttaaaacttacacgaataagtttgaaacgccattatctgagtggggaaagagggaaaatgcaaggacaacggaaggtaaggctctaagtacaatcttcaatgagtgggagcgttgtgctaatgctgtaaagcataagatctatgatgatgcttatctctataaagtctatggttctacagtgttggacctagatgagcgatttggtgagtatgttgcagcatgccaaatgtggaaccctagagtttacaataatttcaaatggttggcattgaagtggcgggtgaggcgctcttatgaggattgttctcgtaaagtgaaaaaaaataaagcattaatggatgaaattgaaaagcttttaaaagagctcaagaaaaacagctag

SEQ ID NO: 457360 - DNA, 309 bp, Serratia marcescens
atgcatgataaagagagcttcactggcatttcgtggctggtgctgcttggcctttcctgctggggagggcttgttcgctatctgatggatatgaaaaggagcaaggcggcgtggaactgggcaaatgctatcgcacagatagtcgtttctggcttcactggggtgatcggcggacttattagccttgagagcgggttgggtttttattggatcctggcatctgccggggtgagcggggcaatggggtctgtagccctgtcgttcttctgggaaaggattacgggaattaaaacaaatgcgaatcagtga

SEQ ID NO: 457361 - DNA, 384 bp, Serratia marcescens
atgagctggctaatcggtggatggaagctttttaaggagcattggccggcgctggcaatactcacgctcgtttttgcgttcttcgcaatgctactgacaatcgaccagcagcgctacgagatagaacgtgcggcgaagcagaacgagcagcaacaggcgcggctaaggatcaaagacgcggccatatcggcactgaaggcgacggccgcagatgagcgccgcatcactgagcagcagctcaatcacgagcgggagttgagagggaagtctgatgcggaaaacaaagcgttacacgacgcgctggcaggagttgactgtgctaagcgtcgcttgcctgccgatgttcttaacgtcctgcgcaagcccgccagcgccgcaaactga

SEQ ID NO: 457362 - DNA, 1743 bp, Serratia marcescens
atggtggagaaaaagaagaggacccgctcaaccagttcttcggttgacccggccacgcaatacgctatggacgttgagtcaggcaaggaaattgccggacccgatattcgaaactcctgcaagcgtcatctaaaggatcttgaatcctgccatgcacgtgggctggtctgggatgtggctgccgctcagcgcgccatcgactttttcgcaaaggtactgaaacttaatggcggtgagcacgaaggaaagcccttcaatctgttgccgtggcagtgcttcattgttggttcgatattcggctggaaaaacacggatgattatcgccggtatcgcatgatttatgtcgagtccgggaaaggctctggtaaatcaccgttggttgcaggtatcgccctgtactgtctggtcgctgataaagagcctcgcgcggaagtgtatgcagccgccaccaaaaaagaccaggccatgatcttgttccgcgatgctgtagctatggtggatcagtcgccggcattggcgcagcggatcaataaatccggcggtgccggaaaagagtggaacctggcttttttgcagacaggctcttttttccggccaatcagttctgatgatggtcagtctggcccgcgcccgcactgcgcactgattgacgaaattcacgaacataaaaataacctggtcgtggagatgatgcgcgccggcacgaaaggccgtcggcaggcgctgattttcatgatcacaaacagcggccacgataaaaccagtgtctgctacgactaccacgagtacgggcgaaaagttgccgaaggctctatcgaagatgatagttttttctccttcatctgctcactggatgagggggaagatcctttcaaggatgaatcatgttggaaaaaggccaacccttcactggggcataccttcactgagcgatacctgcgtgaacaggtcacccaggcacgcggcatgccgtcgaaagagagcattgttcgtaggctgaatttctgccagtgggttgatgctgataacccatggatgagcagcgatgtgtggatgggctgcgaagacgatttcgatattgaagatctgcgcggtgaggaatgctttggtggccttgacctttccggctcaagggacttgacggcgttggcgctgttctttcccaagcaacgtaagctgctggtggagttctggactccaggtgatacgttggctgagcgagccaaaacagaccgggttccttatgacgcctggctacgtggtggttttattcatgcgccgcccggcaaggcggtgaagtatgggtttgttgccgagcgtatagctgatttgtcgaatctctttcatattgtcgcgatcgcctttgaccagtaccgaattaagtaccttgagcctgagcttgatcaggcgagcgtaagtgtgccgttagttccgcatgggcaagggtattacaaggcccaggagtctgggctgtggatgccgcactctatcgagttgttcgaacaaagtctggatgacggtgaaatcattattaaaaccaatccatgcctgcgctggaatgcagcgtctgcagtcactgaggctgaccagaaggaaaaccggatcttcgccaagcggaaaagtaccgggcgaatagatggtgttgttgcatcagctatggcgattggcgctgcggaagattacgagccggatgacggcgatttagatggcttttttgatgatccgatcatggtgggtatctga

SEQ ID NO: 457363 - DNA, 258 bp, Serratia marcescens
atgaaagtgaaagcgctggtgccgattttattcggctatcgggtgatcaacgacggagagtttttcgacacgcaggagcttcacggtcgtgaactgatcaagaaaggctacgctgagcaggcggatgaagataatcctgcagagcagccagagcagccagagcagccagagcagccagagcagccagagcagccagagcagccagagcagccagagcagccagagcagccagaagcggctaagaaaaccaaaaagtaa

SEQ ID NO: 457364 - DNA, 393 bp, Serratia marcescens
atgatcagcattaatgttacaggcatggacgagttggcccgccagcttgaagcgctcgggcgcgatgtttccaccaaaattttgcgggatgccggccgtgccgcgctggtgccagtgcaggaagatatgcagcagcatgcaggttatgacgaaacggccagcggtccgcatatgcgcgatagcatttcaattcgctcgacaacacgggggcgtgcgcaggtaacactgcgagtcgggccaagcaaagcgcaccatatgaagtcactggcgcaggagttcggcactgtgaagcagatctcggcgcctttcatccgcccagctctggattacaacaaaactcaggtattacgcatcttggccgtgaacatccgtcacggcatcgaaaaccggtag

SEQ ID NO: 457365 - DNA, 363 bp, Serratia marcescens
atggccgaatacgacctgaaagcattgaaatctgcgctgctgcagtctgataaccatgttaccgaggtgtcgattctgggcaccaaggtatttattcgccgcatcaaggccgccgaactgcaggccaatgaggacgcaatgaaagcagcgattgaagccgacgacatgaacacggccgcacgcttgaacgttgagttgctgatttcctgcatcatgaccccagacgggaaaccggttccggtcagcgcgctgccgagcgtcgatgagttgctgcaggcgcacgataacccgacgctggtggacgcgatcagcacagttaagcggcatgcggtcggcacgctggaagacgctgaaaaaaactaa

SEQ ID NO: 457366 - DNA, 3336 bp, Serratia marcescens
atggctgatgtagcatcgttggctgtcgggttgtatctcaacgacgccaattttcgtaacaaactggttgccgcataccggactgctggcgatcagtccgggcggttcaatcgccaggcgcagcaggatgcaaaaaaaaccgatgaggcgtatcaacgcatcggtaaaacagtaagcagcctgaaaggaacgctagcgggcttagctggtgttgccggcctggggttttcgctgggtagtatcatcacgacaacccgtcaatatggccaggcgctgtctgacctgtcagcgattaccggcgccaccggcagccaactaaagcagttggatgaggccgcgcagctgatggggcgcactactgagtttagtgccagccaggccgccgaagcgctgaagctcatggccagcgccaagccggacctgctgaaaacggcggatggacttacaaccgtgacaaaaagcgcggtgatactagcccaggcatcaggcacgacattaccggatgcgacaaaaacgctggcgctctccctcaatcagttcggagccagcgctgatcaggcaaatcgttacatcaacgttttagctgccggcgctaaatatggtgcgtctgaggtcgcaaatacgtccgcagcgataaaaaacggcggcgtggcggcagctcaggctggggttggttttgagcaactgaacgcagctattcaagttctggctgagcgtgaaattaagggcggcgaagcaggtacggcactgcgtaacatttttctgaaccttgagaaaggcacggataaaacgttaaagccgtccgttgtggggttgagcaccgcactggaaaatctgtcgaagaaaaatttatcgacagccgaggcggttaagctgttcagggtggcaaacgtcagcgcagcatctattttagttcaaaaccgtagcaagttggatcagttaacggcggcgctgacggacacgcagactgcacatgagcaggctgcaacccgcgcaaataacctgaatagcgacatagtttcgttaggtagcgccttcgaagggctgattattaagattggccaggcaagcaatggaccgctgcgcgatggcgtccagaatgtcacccaggctattaacgggctgactgataattttaatgccgttgccaatgtggcgctgtacacgcttcttccggtaatggctacaaaactgaccgccggtgtgcgcggtagtatcagcgcctggcgagaacaacaagttgccgttcgaaccgctgcgcaagcgcaggcgaacattgctaagagaacgctggatgccgcaaatgcaacgctgcagcagaacaacgccgagttcgggcgcgttcgcgcgatggagaggctcgcacggcaatacggctctaacgcaagttttactgctgattataaccgcttgatccgcgcggaaaccgaagcgacacgcgccgcgacgatcgcaaaggcacagttggatgccgccaataaacgactgtcgatttctgcgcgggccgcctcaattgccgtgggtgccgcacgtggcgccctggcattggtcggcggaccgttcggtgccgccatgctggcgggctcggcaattctgtattttcatgagcaaaacaaactggcgcgtcagtccgcgctggcgttgaaagatgcagtggttgtcactactgctgaattgctcaagctgtctgagacaaaaatcgcaatcaaggttgatgattttgaagaccagctgaaaaacctgaatgaagagcgttcgaagatcgagagccaactgggccagcttagcgacacgcgcattaatgcagcgaaaaatcgccgcagcggcatgctgggctttctttattcagaccccgcagagcttgaaaaagagcggaatgcgctgaaggggcaactggaggatatcaacacagcgacatccaccacccagaagaatttggctaatgccaagagcgcaatggacgccatgcaaaacggtatggccggcattatctccggcagtgtcgatggcgccagtgccatttcgagcgcgattgcaaagcttggcacggcgggttctggtgtcgaaacaccttggggcggagatgacccggcaaaggctgataaaaaaggccaacaggcattgcgacagtatcagcagctgcgtcgggatattgaagttgctcacgcgaccagcctggcgaagattgcgctggaagaggcaagctcacaggcaaaactgttggctgccggcaaagcggccggcgccagccaggctgatattcagcgcaccatgctgctgaatgccgagaactatcagcggcggcgcctggagctggctgagcagtattcaccgggtctggcaaccgttcgccacgaaattgagacgaacaaggaactgaaggggctttacgatgctcagctgataactgagcgtgattatcttgttgcaagggttaacctgcgcgacgagatggcacgccagcggctgagggccgatgccgatgctattgcggcgccccggcagaacatcgccggtgacgttgatccgtcggtgcaactgagtaatcagctcgcgcagcagcaggcgcagtatcaggtgtattaccagcagggttacgttgacaaacagcgctatgagcagttgatgcaagctgcaacggaggagtcctccgatgcgcagtatcagcaggctctatacctgtacgcagggcaaagccgcgtcaacaagctgcagattgggctggtggacacgataaaagagcggacaaccaacgcccttaccgggctcctgaccggtacgcagtcattcaaggacaccttggttgggctgttctcatcgctgacacaatccatcgtgaagaacctgatagaaatggccgcacaggcgctgctgacaaaaaccattctgtcatcgttcatgagttttggcggtggtgctagcggtgggaacaacccaggtgcagtacccatgttccctaacgccaaaggcggcgtctattcatccccatcactgagcgcatacagcggacaagtcgtcagtagcccgacgatgttcgcctttgccaaaggcgctggattgatgggcgaagcggggccagaggccatcatgccgcttaaacgcggggcggacggttctctgggggtaagggccattcaggcgccggcgcaggctgctgcagcgcctaacgtctatatcaccattgaaggcggcaacgtcagcactcagtctgatcctggctgggaagagttcggcaagcagatgggtaacattgccgcacaggaaagccagaaggttatcaaccgcaacctgaagcctggccagccaatatggaacgccattaaggggacacgatga

SEQ ID NO: 457367 - DNA, 339 bp, Serratia marcescens
atgacgattaaaacattcagctatccggcgcgcgtcaatgccgccggtgatacccgatttcgtatcaggaaggcgcagtttggcgatggatacatgcaagttgccggcgatggaataaatccgataagtcgttcttgggaactgtcgttcgtcggtaagtatgactacatcgccccaatcattgccttccttgaagatcattatggggtgaagtcatttcaatggacgcctccgaataacatcctgggcctataccgctgcgagggttataagccggtagcgatgggcggcgataactactcactgacggccacgtttaccgaggccttcagcgtttaa

SEQ ID NO: 457368 - DNA, 753 bp, Serratia marcescens
atgctgaattcagacctgcagaaattagagccgggcaaccgcgttcgcctgatcgaggtggacggcacaaagttcggcgccgatattcttcgttttcacaacgatactctgccattcacgccagatgaactggttgccgccggaggagatgagtcaaagttggctgccaaacctatctggtggcagggagaagaatacggtccgtggccacatagcgtagagggcatagagatatcatctgagggacaaggtgctgagccaaaattaacagttgccaatattgacggactgattacggcgctatgtcttcagtttgacgacatggtcaaggcgaaggtgatcattcgagacacctttgtgcattaccttgatgcccgcaactttcccgacggcaacccgcaggccgacccggaacaggagtttaagcaggttttctacatcgacagcaaaagcgccgaagacaacgaagctgtagagttcacgctgtcgagtccgatggatctgcaggggctgcgtatcccgacgcgacaaatcacatcgctgtgcacctggtgcatgcgcgggcagtacaaaaccggcgacgggtgcggctatgccggccagaatggctggtttgataaaaacggcaacccaacggatgacccggcgaaagatgagtgctcaggcctgctgacggactgtaaaaagcggtttggtgaaaacgaggaactggatttcggaggtttccccggatcggcgctcatacggaggtag

SEQ ID NO: 457369 - DNA, 933 bp, Serratia marcescens
gtgctttctgatttagagcggtggatttttgtgtatgacttcattctaaagcccaagcatgaatgcgcaccagaaatccccatgaagcaagctattgataagcttaagataatatacgactctggaaaagcagttaaaatgtactttaacgaaactcgtgcgtttaggatctcggattttcaggttaacaatcgatcaaagaaagctactcttttgatccagatgtgcgataaaaacgttagcgatccagttttcagtgagctaaaaagtggcagtcttcgtgtcgagcccaagcttgcaggtgaaggcattgcagtttctgctcatgtggttatctcaatgactcctaacgaaaactcaaccaacgcatacttagctttagttgaggatgtccctggtataggtcgttctttgctcaagacattcctccaggctttgatgaaagaggcctttgaaggggaagagtttaagaacccaaacaccaaaagaatttgtgagcataggcccatgcttgagatagtttcccatcaaagcaaatcgcttactgattctctccggggcggaaagttactatctgtaactatgacgagtagcgagaaaataagtgaatttgataagaatccgtacacaaaacaagttgagcatgtagtgaaattgaaggttgtaaaacagccaaagactgtcacggataaagttaatttcattgatgaggtgcggaacaaggctcacagaaaaggatttgacaaagtgagagtgtcgtttaaaaaccatgataagcaggacagtttagacttcgatcggaaggatgatgcgatgacaaaactctttactaggagtgaaagaatacttctaggaactcatattgctcaatgcgaagcaagtatccatactgatttgcatggaaaacttctttccctcattaaacgagtatga

SEQ ID NO: 457370 - DNA, 576 bp, Serratia marcescens
atgttgggtatggtactgaaaccattcaagtatctattgataaaacatgatgaaaaaaaatggtttgatatagttatacccgctattttagccgcttgtttttctttcctattctataggcttgaaaagccgtttccactagtatcaagcggtgggctaatccctcaagttaactcgttgcttcaaatgcttattggattctacattgcttcactggcagcagtggcaacatttggaaatgaatcaattgatgaggttatggcaggcacgcctcctactctgaaaatgaaagtgaaaggtgtgccaagcattgtcccgctaactcgcaggcgctttttatgttatttgtttggttacctagcgcttatgagtattgtactgtacctatcaggggtgtttgcaacgttggttgggtattcaggggcagatattattagtgccttgagttacgctggttggatgagcgcatctaaggcactgttattatttatatatctgttttttttgataaatttggtgttgacaactctacttggattgtattatttatccgtaagaatccatgaaagctcatag

SEQ ID NO: 457371 - DNA, 255 bp, Serratia marcescens
atgctgattatccgcgtaggcctgataaatggcctgacgcaagacgccgggcagcgggaaacgcgcggggtcaaaatcgccgataatcaggtcgcagatcggccggccgtcgtcaatctgccgctgcacataggacgccagcttgataatgccggaatagtccagctccagcgccagacgcgacaggcgtccgacggacgcttcgcacagcccctgcccgccggcgacatcgtcaatattcgcgggttggcttaa

SEQ ID NO: 457372 - DNA, 459 bp, Serratia marcescens
  misc_feature (284)..(293): n is a, c, g, or t
atgaaaaaaagcaattatcaccattcgtttttaaaaaaaatatcaaacaacctctatggaaaagaaatattacaaatcatagaggtaaaggatgaggacggagatgttattgacaatgttatattcattgaaaccaaagataatggggtggtcggattttacattaacggttccaatccattaattagcacgaataaaattgatgaatttgattcatttaacctgtatgctttatatgaaaaattaacgagtgttgaaaaaaacatccccagtcattttgaagnnnnnnnnnngaaattaaaacgaacagattaccctgaaacatttgaacatatttctgatgctattgatttaggccatccacaagtggtaactatacaaagaggtatagctaaagctaacaggaaaaccagtttgaaaagtattaaaaccaagacaggatttgatcgtgatgaatga

SEQ ID NO: 457373 - DNA, 513 bp, Serratia marcescens
atggcaggcgctgcgctggttctggcgggctgtggtgaaaaagatgactatgagaaagcgatcaacgcgaagattggtcaatcgaaaacctgtttctcactgagaaacaacgatgtcacattccctatccagctctcgaaaccacggtttgatgaaacaggcactggaacaggatctgtgatcctcgacggcctcgttgaacagggcttaatggcctttgttaaaggctgggataacaatacgcttgggataacagatgaaggtaaacaagccaaaatctggaatgccaaagaaggtgtttgtattggtcaccgggtagttgatgaagtgaaggaatggaccgagccgggcaacggtaatcagaaagttgttcgcgtcacctatacatggaaattaactgatgttccttcatgggtggacaaaagcgcgttctctggtgtgaaagggatgaatgaagctgctgatggtgccatgaatcttgttaaaaccagcaatggttggaaagcgatctaa

SEQ ID NO: 457374 - DNA, 315 bp, Serratia marcescens; identical to SEQ ID NO: 454588

SEQ ID NO: 457375 - DNA, 324 bp, Serratia marcescens
atgaaatacataataaatctgattatcgtttatacaccatcggaaaaaacgctcgctttacataacgacccgtcgcaaaaagtgaatctgtcgaatccggctaatcgcttactgctggagttaatcaggtacaatggaaaaacgctggagcgagaaacgttattgcataacgtatgggaggagtatggttttaccggttccaacagcaacttaaacacctatatcagcgaactgcggaaatcattttccagcctcagtgaaaacataaaaatcatcaccaccgtccctaaggtcggctttcgtctggaagcagaaatagtgtaa

SEQ ID NO: 457376 - DNA, 504 bp, Serratia marcescens; identical to SEQ ID NO: 456933

SEQ ID NO: 457377 - DNA, 318 bp, Serratia marcescens
atgcgcgcattattattggaacaacacggcgagcaaatcatcagccaagtgcaggatatcgacgccaaccgtctgccggaaggcgatgtgacggttgatgtgaactggtcaagtctcaactataaggatgcgctggcgatcaccggcaagggaaaaatcgtccgccacttcccgatggtgccgggcattgatttcgccggtacggtacgcagcagccaagacccgcgtttcagcgaaggtgacagcgtggggcgggctggcggaacaggcgcgcgtcgccggcgaatggctggtgccgctgccgaaagggctggatga

SEQ ID NO: 457378 - DNA, 156 bp, Serratia marcescens
atggatgaaaacaaaaaacaacccaccaaatcgaattatattgtaatcattcaaataagtttggtggaatgtgtttataaaatctcttccgtaggcgaaaacagagtattgcaaaaaaccaatggctaccactatgagggtgtttacaaagaatag

SEQ ID NO: 457379 - DNA, 303 bp, Serratia marcescens
  misc_feature (287)..(296): n is a, c, g, or t
atgtcagagaaagtattatcacaaggccgaaaagagctatctgaagaaatagatctgcatagattatttggtgaattgctgcataacaagtggctaatatgcgggattgtggggttgttcgccgtggcggcgttgacctatgtgaatttcgccacgccgatttatgaaagtaccgcgctgatccaggttgagaaaaatgcgggcaattcactgcttaacgacatttcatcaatgctgccagatagccagccgcaaagtgatgcagaaatcgaactgattcagtcccnnnnnnnnnncttgtga

SEQ ID NO: 457380 - DNA, 381 bp, Serratia marcescens
atgctcccgatcgcgaacgatacgttccgtgacgtcgctggcaatcttgattatctcgtacgtccggccgtgacgatcgagcaccggcgtataggtgccctgcagccacaccggctcgccatcttttcgcagtcgtttcaccgtatcgctaatcgcctgcccttcggccagacgctgccagtgccgccggtagtctgcgctggcggcatattccacttcacaaaaaatccggtgatgctgaccaaccacctcctgacgcgtaaaccccatctgctgcaaaaacagatcgttggcgcgcagtatcgtgccgtcgggggtaaacgcgatggtggcaacggcgcgttcaatggcggccagctcggcgcctttgcgagtaattga

SEQ ID NO: 457381 - DNA, 867 bp, Serratia marcescens; identical to SEQ ID NO: 456942

SEQ ID NO: 457382 - DNA, 669 bp, Serratia marcescens
atgaaaagcgggagtggcgaagttactactctaattaatattgtatctgcatcggataaatcaagtaggttacttctcggttatgcctttgaaatgcttttgaaatctgcaatattactcttgaactatggagcaacaaaagaaaccatagagaaaatattccgtgattatggccataagttggacactatggcgaaagagctagatttagatataaatgaacatgaaataaacttactacgcatggtatcgaaagacatattaattcaagctcgctaccccttgaaagtggaaaatgatagcgaatatataaaggagttcaacaaactaacaagtgagcatgcggatagcaacaaattcatagaattagtgggtttgtacgacaaaattaaatttactatttgtaaacttgacaaagactcgtcaaactgtgccaattttaataagtacacctgtgatgagtttagtattttcttcagatctggtggtggtctaagatcaagggcaattgttttatttaacaaccctgaattcgaaaataaaagaaaaatgtatgtaaaggaatcaataaaaaatgaggcgggtaaattttccacattatttctatataattgggatgaatttgagttctatgaagatcataataaaaaactaaagccaatagactga

SEQ ID NO: 457383 - DNA, 264 bp, Serratia marcescens
atgttagcaaacaaagataatgcgttagaaatattaaaatccgatgtggcagactttctataccctttaaaaatgggtggtgaattcaatatggataaatataaaaaacttattatcactctgggtgacataactaggacttataaacaagaggaattgattcccaatagatcattaagcgaattttatctgaacgctgaagggattaataacgagcctctctacataaaaaattcgatcttggatccatggcaaaagagataa

SEQ ID NO: 457384 - DNA, 912 bp, Serratia marcescens
atgaccgagcatatgctgcagcagtacgctctggacaaccagcgcgatattctagctgcggacaagggtgataaagaggcggcgaagcgggttgtcgcacgtcgtgaagctgcagctgctgttgccgtggtcggtggtggcgggctggcgctgacggcgggcggttttaccctactgggcgcagctccggagatgttgctggcggcgcggctcgctattgccggctgtaaaactaatcctgcgctgtgccttaatcaggcggggatctatgcggcggatattgttgcgccggatgctattataggtacaggcgctgttactgccggcagcacgttgatcgtagggaaaacccaggatagcgtgaagaagctggcgcagcaggtggtgaaagtcaccgatgagtcttttaaaaataaggcatttaacacccaacctgtcgctgagtttatcaaaggagagtcgacggcagggagcggtctgtcgacgaaaactgtcgattatctgcgtgatattcaaaaaacaaatactgaccagttggcgagggtatttgatcccaaacaagcggagagtaagttaaatgtgtttgggaagcagtttgagcaggttttaggggaaggtgggagcaataaacaaggtaatacaaaagtgtttgctacagaaggtttgtcaaaacaggagatcttcgattatgtgcaatcactggctggtagtaatccattgctggaggtgaaaaacgggatgatttggactgcagtgctaaacgagaggacaggagaaaaattaactttaagaagtgtatctagcagtaaagaagaaactaaggcccgctggactgttgatataattggtaatgaacaattaaaagcattgcagggaaaagtgaagaaaagaatggaaattaaattccgttga

SEQ ID NO: 457385 - DNA, 258 bp, Serratia marcescens
gtgcgctattacggcagggcgctcggcaaggccgctttcgtcacggttaacaaccggcctgcgatttatgtcacctccaaaacgcatatgggcacccaggccgagcagctgtttgccgttgacggcgaaaaagtcggcaagatgctggcgctgcgcactttctccgggggaaaaaccgaaagcgagcaaggcgatcggcacgccttgcagcgggcggcgacgttgagccggcaaactgtgccgccggtggttttttga

SEQ ID NO: 457386 - DNA, 165 bp, Serratia marcescens
atggctccgtggtatatttacgtgatgtggcacgcgttgaaattggggctgaaaactaccaaaacatcaccacacttaatggttaccccgccgctgggatctccatacaactcgcatcaggcgcaaatgctttggccacagctgaaaatgtccgagcggaaatag

SEQ ID NO: 457387 - DNA, 327 bp, Serratia marcescens
atggttgtggctttgtacgatacctcacgaagactcactaacattgacatcaacgattaccttatcagtaacctgcaggatccgcttagcagggtagatggcgttggagaaaccaccgtatttggctcgcaatacgcaatgcgtatctggttggatccttataaattaacccagttcggactcatgccatccgatatacaagccgccattgaagcgcagaacgttcaggttaccagcggtgaaattggctcccagcccacatctgaagaccaatatctgaatgcaaccgttacggttcaatcaagactggaaacgccagaacagtga

SEQ ID NO: 457388 - DNA, 165 bp, Serratia marcescens; identical to SEQ ID NO: 431663

SEQ ID NO: 457389 - DNA, 939 bp, Serratia marcescens
atgaacagtatatcaattcttgaggcagttaacacttcatccgtccagttccatgggcaaccaatcatcacggccatggtcgccggcgtggcttatgtggcaatgaagcctattgttgaaaacctcagcatgagctggacaactcagcatcgcaaacttatggaagatatgaagaaaaccaaccatcctcatatgagcatggttggcagtgttcattccaaattcgactgtagagatatctctatggttgccgctgacggcaggattcgcaagcttctctgcatcccactgaagaagctcaacggctggctgttcagcatcaacccgtcaaaggtgcgcgccgacatccgcgacaagctgatcgcctatcaggaagaatgcttcaccgttctgcacgactactggacaaaaggcgccgccgtccggaagtcaggaacaaccgttgatgagagaacaccactgcgcgatgcggtaaacatgctcgtcagcaagaagcacctgatgtacccagaggcttactccatcatccaccagcgcttcgccgtagagagcatagaggacttaacgcctgagcagatcccgcaggctatcgagtacgttcatcgcatagtgctggatggcgaatacatcgaacaccaaccagagctctcgctgccaacaccgcagttctcagaagaggaaattctgagactatgccgaatgtgggtatgggccaacagagcgagaaagatgtgcaagctgatttatccgtcgctgcgcaacatggaatcgcgcttggccggaaatttctacgacctcggctttgagacttactggatactcaacgaaagccggaagattctctacagagaagcctccaacgtcgcgagcgaaacctatagatgcgtctcccatgaaaatagagacaccctgctatccaagctctctcaggacatataa

SEQ ID NO: 457390 - DNA, 426 bp, Serratia marcescens
atgggcgtgaaggttaaaggtatccgggaggcgcaggcaaagctggagcgcatggtcggtgatattaaaggcaggaaggccgttagggctatgtatcgtgcattgctcttaatcggcacagagtctgcgacgatggttcctgtagcaacctcaactttgctaaacagccaattccgggatgttgtggttaatggaaccaggctaaccggcagagttggatattcggcggcttatgcagtttacgttcataacgcaccagggaagtatcttggcgcccgtaaacttcgctcggtgaggaagggagagaaaaagggctcgatgggatacatctgggataaaaccggcgagccaaaattccttgataaagccgttgaaaaaaccaaacgtcaagttgacgaggccattcggcaggagatgcagctatga

SEQ ID NO: 457391 - DNA, 546 bp, Serratia marcescens
atggctaaagatccgagtatcgacttcctgtgcgaatgccttagttataatccagttaccgggattcttgtttggattcctagaccaagatcccacttcactaccgatagggcatttaacacatggcactcgcgattctgtggcaaagctgcgggtggattgaatagcaagggatatattgaaatagggatgctcggccgattggtgaaagctcatcgagcagcgtgggcgatttattatgggaaatttccagatgccgatatcgaccatattaacggagtcagagacgacaatcggatagctaaccttcgaagtgttactagaaaaagcaactgtagaaattcagccatacacagaaacaacagatctgggatcagcggcgtccgctggcgtgaaagggataatagatgggttgctgagattaattttgatggaatgcagcgccacctcggccactaccaatgtctgatagatgcggcagcagctagaaaatcagccgagttgaagtatggctaccatgaaaaccacggcagaacgccgaaatga

SEQ ID NO: 457392 - DNA, 267 bp, Serratia marcescens
atgcacttaaaggcagtaaatgtgggaatagtcctatgcctgccgctgttgttgagctcctgcagcaaaatgccaccggcaccccagcaagtcgtcctgttaccccctgaaacagtattcacaccatgcgagcagccaagccttcagggtgacacctggggcgacgcggtgagctacacgctgacgctgcaaacagcgttatcaatctgcgccggccaggtggccacgctgaaccaatggcgggaaagcattgggagagaaaaatga

SEQ ID NO: 457393 - DNA, 831 bp, Serratia marcescens
atgggggttttaaataatggaaacccttatttgactatgcgtggcttatcaaggctatgtggtgttgactctgctgcaatgactcgtttgacctctgactggatagaagaacggcaaagaccgcgcggaaaaaaaattgacgctattttgcagggaaaaggtttaagactcacacagttatactggacagtggttagcaagggtgttgaagtaagggcattcccgacatctgtctgcatggctatacttgaatattatgcctttgatgcagagcagactgacaaaaccacagcattagcaaattatcgtaaacttggtgacagcgcccttagaagattagtattcctcagcgtagggatagacccagaaaaccctcaacgaggtgcctggcaagcttttcaggatcgccttcagcttaactcacaaataccccttggttttttctctgtttttagcgagatggccgacctatcactaaaaatgattaatactggctttgaattcggcccagcatccgtaccagacataagtatcggacaattttggggtaagcattggctagcttccggtttagacgaaaagtatggacctagaactaagcaccctcatgtttatccagagtggttcccacagtcaaaagccggtcctatagacgcatggatatatccggatgacgcacttggcgaatttagacgatggatgcaaaaatcctaccttccaactaggctccctgcttatattgaaagcaaatcgagaactggagctattgcctctgtagatgctgcgaaactacttactcaacttaaaaagccggaattacctaaaaaataa

SEQ ID NO: 457394 - DNA, 1176 bp, Serratia marcescens
atgatggataaagtaaatgactcagataactatacagggccacatttcattctaaatgtagattatctgcagccgggcgatatcattcttgagagggggtacgaatggtattcagaaaagatttgtgaacagaccggtagtcgatattctcacgcaatgatatgcgttggtggcactatcattgaggcaacgcgagcagggggagtgtttagccgaattcctaatcgttcaacagtgcgtgaaataaacgattttttggtgttgaggcttaaaaaaacacctgaacctgaagtaatagaaaagatatgcagacatgctcgttatcttgtcggaagccagtactccatatccgaagcgctatcggtaaaaggaccacattttttaaagcaattttctgaaaatagcagaaaacagttttgctctcgcttagtagcacagtgctataaagaaggtggcataaatcttgtcgatgatattaacttttgttcgccagcagatattgaaaataatgacgacttattgcacgaagtcaagggggcagtcaatcctgcttcagaagctgaagtccggcatgcgctggaattaactcctcacacagagcacactggtaatactgttaattttattaacagggcaatggatattttcagaaaccatggtattaaaatggtaggttctccccatggtgaagtagttatcactactctaaatgatattagttgggcattatatcaaaataaagatgtaccagggcttgacgatgagcttaccgaggctatgtatgcttctggctatcttgcccacataaatatagatagagagcgcaatccctacaggtatgattacacattattcaaattaaatgttgaatttgcatctggtggagataaaaatgagctgtttgaaattcttaggcaggaactaaataatactgttagtgtttttaaacaacggttgcaaagttatatcgcggggcgagataatcttgaaacagggcttaaatatgcagaggctgactttcaagtgccaaaaggaatgttgcttataattaaggatcgactcattatcattgaaaggtattcggcacagtttaagaatacacagggtttcaaggaaattaatgaaatgtcaataaaattcattggctatataagagaatatgcccctgaactttaa

SEQ ID NO: 457395 - DNA, 162 bp, Serratia marcescens
atgattcagggtattgaaagtaaggcggtgtatgaagcagtggtggctaatccaggggtatgcggctcgattgagcatgacgggcttgtgaccaaccgtgagatatgttggagccatccttatcttgaattgaaaaaaaacattaatatttatgtcttatag

SEQ ID NO: 457396 - DNA, 1245 bp, Serratia marcescens
gtgggttatattattaaacgtggcattctggttacacttgatacttataataagttcattgaggatgtacataacatacctttcattgggaaagatggtcgccagtctccgtcatactatctggatatccaacggtttttgcagcatctgatttgtaataacttcctttatgctaaagacaccccagaggataatccatggacgcaatactcgccaatatataatgagctgggtaaaaaggaattaccgtttgtctttaaacaggataaatacctgtgttgtgacagggcgttagagttgctgaaagatgcaggaattatagatattaaaaaatactgttatgggaatgggaaaagccgtacttttgctttgtccaaggcatacctcaaacgctggtttgaaagctcgcctgatgattacaggcagcgcgatgaccgttacatttatctgtctgtgggtaagcgtgttcataaccaaaagatcatgacggaggaacaactgatccacaaagcgttatcgcactttaataagccccgccatgctacgcgtcacgtatcccgtgaaacccagcaatatatgcgtcaggtgtatctcaacatgggggcgttgcgtatcaaccttgataagctacaggcctacgttcctgaaaatgaaagggaggctgctctgaagtcgcacttcctccagcatctggctgagcgtggttgcaagatggtttcaagcgttcctttggtggttgaatacttccctgaatacaaactggcagagcggggaacgcgctcatttgagaagaatggcggctttcaggcgttaaaggccgcgatcaaatgggaagttgttgtgggtattaactacgatatcaaaagcagccaactgaatattctgaaacatgaactggagcgatacggcatcaaatgtaagcggctggcaaagatcaccaagaagaaggttatgcgtcggttcaacgttgatcaaaaggctgctaagttgcttatctatactctgatttattcactcggagagtttcgtaagcacaaggacagcgctgcgtttcgtaagctttgtgatttgtatggctacagtgaagcggtgtgtgtggctgatgagtggattgagtttgttcggcccgtgagaagggcgcttaacgcgttggtgtcgcgttatcttgatgagcatgttaattgccccggtcgtggctgggcaagatcactgcgagtgttcgtcggtgtgttctttcgcatatga

SEQ ID NO: 457397 - DNA, 201 bp, Serratia marcescens
atgaacaccaaccgtattctccgcaaaaaagaagttcttcacctgaccgggatctccgccgccacgatgtaccgactcattgcgaaagggacattcccaatacctaagaaactgactggcgacagtgggcgcgcagtgggatggggatcaaatgaaattcaaagctggattgagtcgcgcgggattagcaatacgcagtga

SEQ ID NO: 457398 - DNA, 489 bp, Serratia marcescens
atggaaaacgaagacaaaacgcgattgcagaaccgtcagagacaggaaaaacgccaggggaatctgaaaaggcgttacggtaaagccttctccctgaatctcaatgaagcgacgatggaacgtctgcttaaaatcatccctcaaaccatagttaggaagaatgaagaatcaataacagtaaagagaagccttgcggtaaccgagctgattaaccgatattttctcgaaaatacggtaccccgacattctgaagtatccgtcaccacttatgaactctattgtaaggttaggaacatgcgtatttcaggtaaaataagtcaaaaaattgctgaagagttaaataatgctggtcatttaatccctgtgtttgacaacgagaccgggcggatttcgctggaagaaggcacctggaatagtagggatatattaactatatctgacacgaataaaataattcagatgattgattcaaatgaaaggtatcaataa

SEQ ID NO: 457399 - DNA, 933 bp, Serratia marcescens
atgaaaagggctgcgtttcgtcaggtcgttccggtggtgcaaactaccgtgtttgatgcgtatattggtggtctggcaccatcgggtcggcggggtatcaccagtctgttgaaccgcagtgcccgcatactcaaacgtggtgcggatgcagcagtttatccgtgggaacaacttaactacgccgccgtagctaaagtacgtgtggcactgctggatgacggttatgccgtgtcgtcggtgaacatggcgttgtcagcactgcggggcgtggcgcagacagcctttaacctcaactgcatggatgctgaaacgctggcacgtatccgatcagttaagcgcgtaagtggcgatatccagcgtaggggaagggcgctcagccgggaggaggttcgtgcactcgttcaggccgctaaacggcatccgcaacgtatccgctgctgtcgtgatgtcgccattgtaatgacactttgcggtgcgggtttgcgggccggggaactggtcagccttgagcgccgggactataacaatggcattcttacagtgaggcaggggaaggggcgtaaataccgggagatacacgttgcggcagcggtagataaagtcatccgcgcatggattaaagccagtggagtgaaagaggccggggatgccttgtttaaccgtattcagcgcaacggcagggttaccagccagccgctgacaacgaccggtttaaccggcatcctggagcaattacagcaaacgtcagatatagcacgttttaccccacatgatatgcgacgcacctttatcacccgtttactggagcagggcgtggacatcaataccgtacgccagctggcaggccatagcgacataaccaccacaacccggtacgactatcgtgatgatgacatgaaagccaaagcatcacagaggttgcggtgctggtga

SEQ ID NO: 457400 - DNA, 1149 bp, Serratia marcescens
atgaatgaaatgacgctatcgcgtactcgtccggtgcttccttctctgttggggagcttcgtcatttgcccggcgaaatacctgctggaaagtgaagctcattcttacgcacgtttacccctgcacccgggagtgattctgggccaggtaatacatcaacgggtcaattcagtgatacgcagggaggccgcttttgggaattataccctcaggcaactggaaaatgatttttcgatcgagctgaaagccaatcgacgtgccgggccggtagcaaactggatatatgaccgtcacggcgttgccgggctggtgtcacgccaaatgcttgttacccagatccgctacgtcagatcgcttatgccgcctgttttcgtaaaagggggccttgcacacgaaaaaacattacccgttggccgggaggttatgctgaccagcaatgatttcgatatgcatgggcgggccgacctcatatatcaggagcgacccgatcggttaaacgtagttgatttgaaaaccggaaaggtaacagacgaacaaaaccagccgaaagaagctaacctgttacaggttgcggcctatggcataatggtaaaagagcgagcacctgatatgaacattgggttagttctgacggggagccgtgatagttgggaaggggcactaaatacagacctgattgaacgggtcactacgattatcaaaaatattaatcgacttttgccacggaatatcccactttcagtatatgagttggcttgtccaggcacgtactgctcccattgttcctgccgttgctcgtgcccggcctggacagaaaagctatgcaagcagatgcaaccgtctctttctgatcatcagcatggcggaatcgatattagtggaaaattacttgatgcggaaaatgacgatcatcttcttacgctgaagatcctgctacccgataattcagttgttaaggtctttcgtgtgccttccagcaccatcccagatccaacggaaataataggaaaacaaattgcattgtacggattaaacaccttcagtgagacaccaatagagtattttccccgcaacttctacgtcatcaatatgcaggatacaagaagatcggcgtttcagtttcactggcagagtgaaggagagaattag

SEQ ID NO: 457401 - DNA, 5949 bp, Serratia marcescens
atgaataatccactggaaacatttgaatcaataagagatttttatatttcgtaccttgaaacagccttccgtattgattcatcagacatacagtctgaacggcgagcgttactggaacagcaagggacattatgtgccgatctatttcttgaaccgatgccccgatatcagcattatggcttaactatcagcgaattacgaaatgatgcttatggtcagacatggttgccagggtttaatgcgcaacaaagggcggcattcatcgacctctgtttaggtggacttctgccccacaataaaacggattcaactaagggacgttttaatctttatacccatcaactggacatgctgaaaagaggggtacagccagggaaaccgggtattgtcacctccgggaccggttccggtaaaaccgaatcatttttactgccggttctggcacagatcgcaaaagaagctaccggctggccgcaaagcccggcgttgaagtgctggcaaccgtggtggcataaggtagcggataaacagccctgcttcatgcgcgagcatgaagccgctgctcgtccgaaagcggtacgcgcgctgatcctctacccgatgaatgccttggtagaggatcagctggtacgtatgcgacgggcgctggattccagcgaagctcatgatgtcatggatacgcatttcggcggcaaccggatcttctttggccgttataccagcgcaactaaagtaactggctggcttaaacatccccgactcagtgaagaaaaaaatgagaaaaagcgcgtggctaaaaaaatcactgagctgcgtgaatatatgcaattaacggaagagacccatcaggaggcggtacgacaagcgcagcaggacaaggataacgaattatcgtttaatttcccccgaaccgctggcggagaggttctcagccgctgggaaatgcaaaagacaccgcccgatattctgatcaccaacaccagcatgctctcaacgatgctggttcgcgaggtggacgatcctatttttgagcaaacccgacagtggattgagcgcgatcctgatgcctatttttatcttattcttgacgaacttcatctacagcgaggaaccgctggtactgaagtcagctacttgcttaaacatttgatcaatcggctggggctggatcaggaaaaacaccgacacaaattgcgcattctggcctccagcgcctctttacccgttgaaggtgctgaaggtgatcaaagcgtcgaatatttatgggggatgttcggtcagcggggattacccgcaggtgcctcttccagcgactggagagaatgtattattaaaggtgacacccttcccccgggcaatatgtctcttttccagggggatctggaggcgttttatcacgcagtgcttcagttacagcaagcaccacttacctcattacaacactggcagaatgtcgcccgcagcatggaaatgacagccagtgaagcctctacagaacaactagcgcaacgtgtcgttttacaggcgggcaacctgcttgaaagtggctgctatacggacgatcattctccgagagctacgtcaatcaaaatgcttagttcacgcctttttaacgcccaaccccatagtgacaaagcgctccaggcattaatctggttacgttcgactgagggagattggccgcaatggttttcacatgcctttcctgatgatatcggtgcgccacgtttccgcgctcatgcttttttgcgcgctcttgaggggttatatgtcgcgccattgcccgtccctagcgctgcatctgcgcaagaaattaatcacagatattttggcgatcttaccgtggagtccggcttacgttacggcaaagataaaaaatcgcggcgtgtcgaattactctattgtgaatgttgcggtaatctcttttgggggggtaaaccttcggtcttttccggttcagaaagtcgaattgaacttttacccaacgaccctgatacggaacaactgcccgaacacgcaaaatcagtcatggtagaacgccgatctgctgaagaatacgcgctatttatgcccgttgtcgaacgtttctggccgaaaggaaatgaggagctaaacagcgataatgacaatacttttggtacttgggtaaaagccagctacgatccatttaccgccactattcaacacccagcatcgctcttaaaaccgctaccggaaaaccatatagcgggctggttctattacgttaaacccggtgaatttgcctcctcggaaagaggccagtcatccagccagtcaccgggaacggcgctaccttttcagtgtccggcgtgcggtacgtcctataaatacggcaaaggtaagctctccccaatccgtagctttcgcgtcggtttttcgaaaacgacacaactactggccagctcgctaatggcggaactacagcgatcgggtaaccgtgagcaactggtaacgttttcagacagtcgtcaagatgccgcaagggcggcgctcgatctggaatcgggtcaccatgacgacgtccgacgagaaattgttgtccattcgctacagactattgcggctgataaaccgtcccataaccaactaaaaatacgccaggcagagatagagaaccggaacaaaacactagttaacctcagcgtaaggtcggatgaggaagaggatgaattggatcaacttgctgatgaacgaaagaaaatcagagggttattatcaaagcctgaatctgacagcatacctctgcgtgaaatcctcgaacctgaatcaccggatgcaggtcaaccacttggcccgctgttaagggcgcaggtagatgcaggtattcacccttccgatcgtactggcatcgcgcctgttcccgatccagaaaaacatgaagaaggcacgctgacctttgcatggcaacaactctttgaaaagaacacgcagggggagtggtgctggaaagcgcttccatcctatgaagacaacctgcttgtggcacgacaggagatttcacgcgatctgaaacggctggtaggggaaagcgtattcagtaaaacctacttcgcgctggaagagtccggttggggttatccctgccttcccattaccggaaacgactcacgggaacatctcgcgatttatgacgcaatgtttcgtgtgttggcggacgcataccgggttaccccttcacaatatacaaagccagaaactccatggagttcagcgcgcgatgtcaatcgtagaaaccgcctgtaccgttttacacaggagatatgccagtgttcaggaggcgagcctttatctttaattgatagttttctccggcgactagagctggcgggtcatcagggcggtattattgatattggtaaaatgcactttcgcctggcggaacctacagatcgcgtctggcgctgctcccgctgtgggcgtatacacatgcacaccggcgcgggaatctgtactcgctgctactctcctttaccagaaacgccgtgcagtgaggcaaaaacgctccagatgcaacactatctcggcaaacgtctctcacattcttctggtattcacaggatgcgctcagaggaactgactggaatgaccgaaaatccggcggcaaggctacgccggtttaaaggtattttgattgccgacgacgatgatattttaccagaaggaatgaaaaattttgagcccgatcgagatcttgaccgggcagcccgggtggttgatgtgctttccgtaaccacaaccatggaagtgggcgtggatatcggtgatttacgtgcggtctttcaggccaacatgccgccacagcgctttaattatcaacaacgtgtcggacgtgccggacgacgtggacaagcgttttcattcgtattaaccgcgtgtcgcagtaagagtcacgatctgttttacttccgctatccggaaaaaattacaggcgacctccctccgccaccgtttctgactacaaagctggaaatgatctgccagagactggtacgaaaaatctggatggtgtcagcattcaaatggttaagacagcaaacggaaaaagccgatcatccatggccggttgacgactacgcacacgtccctgataaccatggtgagtttttcccggtgcactggctgaaagaaaaccaaacggactggctgccaaaaatccggcaggccatcgaagcaaccatcctggcgcgcaatgaatttgcccagactagcacacagcaaaacccccatttgttccagaaaattattcagcctttgacgccggaacagctgattcaggatatcaacgccgtactgaacgacagcgcgatggaggcgaaaggactggctgaagcgttggcggaacacggtaaattcccaatgtatggcatgccgacccgatcacgccttttgctgacaaggcctgtaagcacaggtggaaaagaaatcgaattcgccagcatggatcgcgatctggatattgcgatacaggaatttgcccccggaaaaattctggttcaggataaacgacgctactttacagcaggttatagtggactgcttaaacagagcagaaaaaatccacgatcattttattcaaatgcctgcgaaccgggtgaactcagaacaatgaccgcctgtccggtgtgcaacatttgggctccagcaaactctctggctaccgaatgtactatctgcggtgccgttatggataaggcagagcgctatcaatgctatgttccttatggatttatcaccacgctggaaccaaaatcggccaaagaggattttgatcagatcttgaccacggccagtcgtgtatcaattgcagaagcctacgctttttctgcaacgcctgagcctgacgttaatgtggcgatacagcttcagccacagacatgtctgcaccgcctgaatcggggaatttataccaataaaacatggcgtggtttcagcgcaacacaggggagcctatcggtccctttcagaaagcaggggacccaccagccgctttgggcgaaccgggtttggatggatagtcaaataattgaggccgacctgttagttaaaaaccgctttaccgatcggggagaaacgcgaaacacattttatcttgccgcgcctaaagtgactgatctacttgcgctgatggttgcccaaaccccgccgggtctccggctacagtattccactctaactccggcattcagagctgctgcgctctcggcgtcttctatcattgtgaattatgcatcaaaagagctactggatattgatcctgaagaaatcgaaattctggaaccccgtgttcaaatgctgaaaaacggtaagtcggtaccggttctgcaaatggccgatcgtctggttaatggttcagggttatgtgaacggctacagcagaagggcgcatccggttctctcattatccttgagatcatgaagaatattttaaataacaaaacggcctacccgctggctgagttcctgcaacccgatcatcgcgaacgctgctttcaggggtgttatcactgcctgcaccggtacggaaaccagccgtatcacggattgctggactggcgtctgggactggatgttattcaacttcttctggatcaaacctataacgccgggctgaacggtgattttacctctccgggcgtagctgactggtcagaaaatgccctacgattagccaaagaggccgcttcgctatacagcgacagtgccgcagaaatgaaggggaatatacccgtgattcgcaccggggccgggcgttgggctgccgtactacatccattctgggatcccgatgctgcatttgctgcaaacccggaacttgaggcattttcatatgaggtggacgtagacgcgacgaatacttttgcattatcccgccgcatggggactgaaatggcaaaattacggactcaggcgtcctcggctcaggagtga

SEQ ID NO: 457402 - DNA, 2763 bp, Serratia marcescens
  misc_feature (1057)..(1066): n is a, c, g, or t
atggctaaaaagaaaaatattatcagcgaccggctgggccaaatgtactacttcggtacagaatctcatgaattgatcagatgcttgcaagagtgcaagcaaagactcaccagaaatggcgctaaagcggataatttaccgaaaggaccggagaaaaggttacattttctccgtacgttaccacctaaggccaaacctgttgtgtctgattggcttcgtgaaaatttaacgttttctgaacaaaatgacccacaaattgttcttagagatctgttagaagcagaaagtaatgcagaagatattgaactctgtaaaccgttatggcgcaccattctgggattctatatttcttctgactgccctgaaattataacgaaattcctgaatggtgaagaaattgatttaccccaacatggtgtttctgactccttgacaattaatttcactgacgaagacattgaacaatgtgccttaattagtcagggtaaagaaatttctatgccagagcgcactattccactgtttgttgggggattggttgacgcacttaggggaacgcgtacagccgataatcgatggcggacaaagctatcagaacattctttaccgctggcgcgaaaattgggtgaacttatcgatcagtttgaagccagtcacgaccttaaaaaaatggatggtaccagtgtaatacaggctcctcccgttgtttccaaagaaatcgacagttcgatggacgaagttatgttcattggaaaagtgttagcgttaaccgcgtccggcgctttttttgttacgccgattagtctgttaattaatggcaacctacgagacctcccggaggaactggtaaaagatcttttccctcatggtggtgaagccattggttttgagaatcatttcagcaaaaaatttactcggggtgaaattgcaatatggaaagcccgatatcagccgtctgataaacccgcgcagtatgtcattactgactacctgtcgcgcgtttatcctgtcgtcgcgctgcctcatgcctcagatgaacctgatactgtcagagagnnnnnnnnnnacgatacgtcggtcatttttcagctaagtgatggagtatccctgagattaccgggtgacttgtctgatcctaaaaaatatgactttgatatgccgctggagagttatcgtcaggttcctcagacattacttggttctcatgccctcacggtgatcactgaactccctcaggtgagtgaaaagtatgattgtgctgaagctactacgtggatcaaacgcctgcttaaacgaactgattcagcaaaagacttccctcaattcagtaaagggcagctacaaaacttaacccattttattgctgaacatgaatctgataatgaggcatcctatcttcgtgcagtatctcatctggaacagatagcagatacaagatcctttcttaatgatacgactcaacagttactggctttacctgaggttgaggcgcaaattaatattgagaaacaggaaatactgactcgttacgaagacgaacagtatcagattaaacaatcaataatggtattatctgaaaagaaaatacagcttgaaaatgaaatagccgatcagaagaaaaaactgaaaaaagagaccgatcgaattaataaagcactacgtcagcaagaaaatgagctggaacaacggattaaaaagaccttcgaagccgcatctcaagcgggagtggaaacgctagcccagacagcgctactgcgggcgattatcaaaaatgaaacagcgcaggaacaacctgtccaacaacggataacaccagaacctgtagccgaatcagtaaattctaatttcccattagcagaggtgagcatcctgactcgcaagcatcaactatcattggctatcgaaaaacaggcacaggcaacgggactaagtgaatctttattatccagcctgattgccactgcgagtattacacccgcgatcggattgatgggaaaacagacaaaacagactatcgcttcattagcgaaccttttagccggtaatgtttggggggaagtatcggtacatagcgatcattttagcttcagcgatttaatgaactcccccacgctgatccgcttatccggcgatactcataccatgacactgggcgattttttgacccaacaacaagaggcagggctggcgagcattattgaattgcgtggttttaaccgtactccgccagaaacgctgctccccgaactccacgagtgtttattcagaactccccattctgccgcatgcagttggacggatcggcgacaggctttgcgacatttgcccatccggcacccaatactttttttactcacattcaccaccgggaaaagcacgtttccattacaggctcctcttgcttaccagttacctctgtttctggcagagaatatatggtcggatgaacggccatttgagcaaaatactgacatcacgccttctcgtattgccccagaactatggcagacaatctatgtggacaaccaccagccagaacacccggcttgtgcgccatgggaagcactaaaagcagcgctactctctttacttcctgatgaacaagcgcaagccgttgcccgtctggcttacggtctcggtcgtagtacaacacaagatattgcgaccacgattgacattcttgcaccggaattagggccatatgttcaggaaatgactagcggtgaatcggcaagcgtacttgagcaccttttccagttataa

SEQ ID NO: 457403 - DNA, 2766 bp, Serratia marcescens
atggatgattctttcccggttactttagaagaatggaatgctgaactagtaaagatcgtctttcttgagtcttcgcatacgggctcgactttaagccgaattgatactacgggccgcatttttgagcaacttgcaggtccacgtagcaaagaggatgctaagcgaagtttcctgatttcgtttggaaaaaaagcgtctaaaatccaggatgctctcagagatgagtcgcgattagacattttagcgcaaataaaaggataccctacttattttgccgttttatatttaacattacttgctgccagtgctgatgatgaaacacatgacgaaggggattttcgggttcgattttctgtgctgcttggctttgataaaaataaaaaatttgtttttactgaattacccaacttatgggaaaggttagaaagatggagtagtaaaagacaaaactgtacccgtttaatcttaccaaggccatcaaagcatgaaagattgattgggtattccaagagaattgcttttccctgctacaaagatgaggtctttttacggaatattctcatcgataataaactagataactattcaacttttgaatcagttaataaggtagtacatcaatatatatcttattttagcgaggtttttaaccaagagtttattgagttcagaacattactttcaaaggctgccatgcagcaggcttatgactctcctttttggggcgctgttcgtgatatcactgtacatacggagagagaacaactcaaagagaatggtaagtattgtattcacatggagtttaatgattcaggtaatccggagatttatcttcttatggatgacgctgctgctacagcctcagaaatccagcattattactccttgcctaatgaaatagagaactataataatatatattacgaacgagacataggcaccacattaaattccttggatttattattaaaaaaacggaagggttatttctataaatcacgagtgggagtcgcattgcggtctgggtgtttaccgctttttcgtgatgatttttgtcatattagttcagaaggagaatattatgaagattctccaacctatttaatacttcatcatacatatgcagacagtgttttcactgtcttgaagaaggttggcgaaagagtacaacgtcgggatattaaatctaccaaatggtcgatagtttcttccgataaagttggcaggcaaacgctggataagattgcccgtttgttaccagaagaagcccgtcgttttctaatacagggatggcagcctgctcgacctcgtatgtcaggtgcagcgcgatttggacaggctatactgcttaaccctgccagtacaccgataattcatatgcctgaagtactaagaggatgctatgtcatcagcaataaagacggagaagaattaactcatggctcgctatctcagggagctgaaggattattcatttcaccagaggagttgatggaaatatctggtcaggcattttgtcgctacgaacttacgttagcgcattcagatatcccagtaaattttgatgtgcacgtgttagatcatgcgccttacgccacttattgtaaaatttcagagccacatgattggctgactgatggaccatcgggagtattaatggcgttaggggatacggcagtgatccccccactgaaacgcgaagaaataacgccattgagtggtgctcagatgttatggaagtatgaaaatggctttcctgtaacatgtcaatatactgaattacataatatacccgcagcatttgactggatcgctgaagcgctggccttgcgttttcaacgccgtagcacattgccttttggtgaattaaaaaaacatattgaaccggtatcacaggtaacgaggatacccgaatggcaattgcgtcgcatgctctttgccgctggctggctttgtgtagtacaacgacgtcatgcgccatattcgttagtctcattggctgaaagaaccatttccgttgatgtcactgagcagggaattgttgcccgaattctggggatgtttacaagaagtgaacgtaatcttctacaagaagcacttaataacggtgagcgaatagggcgtcggttagttgaggataacggctgttcaatgggttgtattgaattgcatctgtcagccagagagcgtgtccatgctttcattgaacagtttgggttacgtttggttaatcacgacgatttccccgtaaatgctttgagcggagtattgctaccgatgtctcaaatgcagtttaccccggctttacccccggatctccatgtgtcgctatggcaagctgaaaaataccaatggtcagaagaacagcggattactcaaacggcaaataatctattgatacggtgtcaggaaaaacagcgttatcgttattttattaggcagaatgctggatactggcaaaccgatagcttctcctgggccttaatggctcagatgatatgttcaggagaaacggttggtgtgcaaaaaggcgatagtggctggtgctggtcaacgaaaattattgcgttaccgccctccgttttacagtggtggatccatgttgcccatggatgcttgtcgataacagataacggtggttacttatttgcaggggggaaagttccactctgggacaatgtaatgaccttcccctcctgtcaacgagcgttggcacgacggaacagagcgctgacaacacgcaagttgcgcagaaccttacagtaa

SEQ ID NO: 457404 - DNA, 1086 bp, Serratia marcescens
atgagcagtgtttttgagagagagaacgataatattcgggtactttcacttttctccggttgtggtggtatggattttggaattacctcagctggtggagacatcgtctttgccaacgatgtcgtagagaatgcctgtaaaacattaggaaattatttccccgatactgatgtcagacatagcgatatctctcaaattcagtcttttccagatgttgatattgttgttggtggctatccttgccagtcattttcaatggcaggtaacagaaaaccaaacaatgacgacagaacaaatctttataaacactttctacgggtattagagaccgttcggcctaagtattttgttgctgagaatgtttctggcttgaaacatttgggagccggtagttttctggaacaacagctcacagcatacaaagctgccggataccaggtcagctatcatatggtaaacgcaagggcttatggcgtacctcagtcacgcaagcgtttgtttatcattggtgtcagaaacgacctggggcaatactttgaatttcctgctgaaacacatggcaaagcgacaaaaaagaatcctcatttaaaaccctatgtttcacatggtgaggctattagggatttaccactatggcctgaaggtgagttttacgaacgaccacatgatcctgaagggcatttctcatggtatttcatgtcccgaaatcgtaaagctctatgggacagccctgcttacaccgtcgtagctaactggcgtcatgtgacattacatcctgccagcccggtgatgaagttaacatggtcaaacctggaggatggctggaagcagcgctgggacttttctgatgaatatgagcatctaattgttgatacttctcgtcccaaactggaacaggcaaggcggttatcatggcgggaatgtgcacgaatacaaacttttccacagggttttgagcctgtaggagacgtcgagtcaaaatttacccaaattggtaatgctgttcctccactgctggctgaggtactttttcggcatttattttctggtactggtttgaaaatgatgacagagaacggtaattag

SEQ ID NO: 457405 - DNA, 195 bp, Serratia marcescens
atggataactggctaaaacagtgggcgatgaagaaccagctttccgtcgcatcccgcacgtttgtctgcttcgacgatgctaaggtgatgtcttcctactcgctggcttcaagcgctgtaacaacaaatactgcccccgtgcgcttttgtcgcgatatgtcttgcccgatccccttctggtgctgggacgcctag

SEQ ID NO: 457406 - DNA, 1983 bp, Serratia marcescens
atgcttaacattccagtgttccgcccatggcgctcgatttgggacactcaactcagcgataagatgactaagcttgatgctattgccgcgcggaggcagcgagggcgtcaaagacctccagcacttgagggtctgagtgatcacaccctgattcttgctgctcttaatttatcacgggcgcgattggactcccctgagatattgcaccaaaaaatcgaacctttgcttttggcatgtgtctggccacgctggttgctcctggaagaggcgttagaccaagcctccaccacaggtgacctacatttggctgctctagtgcttcgaacccagatagaagaactcgatgcattaaatgtcgttgcggaactctttgaatttggcaaaaagactccatttgacagtgaggctgtggcggaaaaaattcgttttctccaaagtcgggtcttacctaggctggaatcaaaaaatagggaggagctgactaatcaggcttcagataaagagatagccgataaacgtcatgaaagtctgaagctggctttcaaccaacttagtgaatatgtccatcctaactatggtagccacattctatctgtgaggcctcactccactgaggccgcaactattgtagctgacgcttttatcgtgatttatgaagcgttttttcaattgccatgggttgaaaatgacaattgcgatcatattgtttttttacctttgaatcagacatcctcaaatgatcctttccgtatcttggcggatgtcactttacccatcctcaaaaagacttactctgtggaaatggggcatagagaagcagattggaaggacgcagaggggacttttcaccattttgctaactgcgagtctaactgggaaagcgcttttggtactctgccgacttggccaacagatgttgaggcaatcaaggctttgagagagagccagctttcaccaagtctttggcctgactcacttaagacaatttcagggcagaatcgatattcgttcttaattcaacaagaatttcgacttgctcaagctgctaattctttacctataccgaatgggtcgtatgagggtaatgagcagctctcgatcctagttccgagtttgagcttcagcatcgaggtaattgagtacaagatgtggtctatggctcgtcaagcggcgagacttgttaacgcagacagcgttctcggggtgacgctactcgtgcgctcaatgcttgagcatcatgcattggcattcgagttaggggagaaattaaccaaagctaaaaatgaggtggaaaagtctgcccctaactccggaaaaatttcggaattattggcgaacgctgagaaacaattggcacgagttcttgcgggaagctcgaacttgtctggtgcaacgtccgagtggcagcacctgtggcgagagtctatcaaaaagccgtataacatactaactccactagggacaatgaattcaaaacaaccaggggtgctcagccagtacggtttcttgtcccatgttgcgcacggtacaattgctaccggaggtgatcttttggggggcgggggagaagggtggaagtcaggtcataagataattctggcacaattgacacttatgctttcaacgctatgtgggattgaggcgatgatggatcgccaagtagcctctatgctgaccggatcttggctcgactcgctgcgagaaaaatcaactgacctcggaaaaagtatcaaggcgaagcgaatacttgaaggtcaaaaattgaaatttggaagggatatttttggagttggaaccaaagatgatccttaccgctttcgcgaaggattggactatcatccgtcattttatcactacttgtcacaagaaggtttaaaggtggacagtcgcagtgttgccctttttaagggagcatgtggagatgaggtcaagctcgatgatggaagtgtgctgtactttatgaattcccagttgaacatctga

SEQ ID NO: 457407 - DNA, 297 bp, Serratia marcescens
atgagagcgttcttcgtgcttttagctttaacggtgcactggatgcgggaatggatccgggtagctatgcatggcagtccgtacctgtcggcgactgggccgctcgactcgatttcaaagtctggtcgaataccacgtcctccggccaccttgtctgttactttaccgccctggatgatggccaacgataccgtctctcggcatttcgaccgaaaaatggctcccgtcgtgataccccaaaagatggtggtattgacttttctgaaggtgggctggatgggcaagtatttttgttga

SEQ ID NO: 457408 - DNA, 627 bp, Serratia marcescens
atgaattccgctatacggtttctttctttgcttataatgtccgtgctaatttctggttgtttagatgattcaccttctgttgagggtaattggatatctacagataataactgcaaatcattttgtagtttcaaaattaaaaataacacaaatgtatattctgatttatttgttgtatttgacgatgaaagcatgcctcaaatcagtagtggcttcttagttagaacgagtgatgagagttttttaatacaatcgcctggcggtgatatgttggtaagatttaacgatggaaagttttactttaccgacggagttgtatacgagaagaacgaagatagatatctagcttatcaaaaaatattggctaagaataggaagcaaaagatgaatgaacagaaaaaaatagctgaaaaaaaagactgggagtcagcggaggtaaataggattaataatcctgcttctagtggaagagatataattccaacgccggaggaacgttggaattatatcaaagaattagagagtagacaggctgggcaacggaatgcggtgtcaggaagtgaccaatcatcacttacagatgaacagaaacaattacttaatcaaatgcaatctgatatgaaataa

SEQ ID NO: 457409 - DNA, 255 bp, Serratia marcescens
atgagttatgctgatccgtttggaaataaatttcagttcgatgcaaccataaaaaacatttacattaactgtaaaacacgccagtacgcgctatacagtactgagttctatagggataacaatctgttatttaggcgaaatgataaattcatggccgataatctaagctctcatatgggttttgatacgttatggaggccattgggctttggtgatttctatagtaaatcatttgaatattactgtaataaataa

SEQ ID NO: 457410 - DNA, 249 bp, Serratia marcescens
atgagcgatcagaacttaaaagattacctttcagaaaactggaaaagaccatttaagaccctttcattttgggttatctccattgctgccgttatattaaaagaccaattatataattacgatctctcagtcgacagcatttttcatagaactaatctgctggactggcttttaggatttatagttatactcacgtatatttttgccgaaagaatagataccaagatcaaaacaatgatgtcaagttaa

SEQ ID NO: 457411 - DNA, 312 bp, Serratia marcescens
atgacccaacgtaaacaaaccaaccaccgtttttctcccgagttcaagctggaagccatcgagcgagtaactaaataccgacagcgcgctgttgatgtcgctctagccctggatttggatcccagccagcttcgtaaatggagccgtcagtatgaagccgagctccatggggttacgcctgccagcgtggcagtgacaccagaccagcgtcgcatccaggagctagaaaaacaggttcgccgtctggagatggagattttaaagcaggcagccgcgttgatgagcgaaacccccgtcaaatctgtgcgctga

SEQ ID NO: 457412 - DNA, 1152 bp, Serratia marcescens
atgagtatggataacaaggtgccagagatccggtttaaagggtttagtggggagtgggttgaacacagttggagcaatacggttgatgtttcaacaaacatggtagacccgagaaactgtcagtacggggaattgtttcatgtaggcccaggaaaattccattttaataatggtgatataatttatggaaaaattaaccctcagctagcaaagtatgtaatcgcaccttttgaaggacttgctagtgcagatgcatatgtattaaatgccaaaaatggagtgattcaaaattatttatttgcaattcttcataccaaagaattttacaagtatactgtttcagtttcatcgcgcacaggcatgccaaagataaatagggatgaactgaatacttatagttatatggcgccttctgagtcagaacaaaccgccatcggcaaatttttccaaaagttagatgtgctgatcaaccaacacaaaaaaaagcatggcaaactcagcagcatcaaaaaagctatgctggaaaagatttttcccaaacaaggcaaaaccattccagaaatccgttttaaagggtttagtggggagtgggaagagaagatgttaggtactgatatcgctgaaattattgggggaggtacacccagcacgtcaatttctgaattttgggacggtgatattgattggtattcacctactgaaattggagaaaatgcgtatgcggaaggtagtcagaaaaagattacacctctaggtttgaaaagttgctcagcaaagatacttcctgctggtaatacggttctctttactagcagagcggtcataggtgacatggctattcttacaaaaccaggctccactaatcaaggttttcaatcacttatagttaaagagggttattcaccctattttatcttttcagcgggtaaacaaatcaaagattttgcgctcaaacatgcatctggctccacttttttagaaatttcaggcaagcaacttgggcgtatgaagattcttatgcctagcttggaggaacaaaccgccatcggcaactatttcgaaaaactcgacagcctgatcaaccaataccaacaacaaatcaccaagcttaataacatcaagcaggcctgcttaagtaaaatgtttgtctaa

SEQ ID NO: 457413 - DNA, 198 bp, Serratia marcescens
atgccaaatgccgtgattagccagctagcctgtcaggtacaagccctggctgataaatacgccgtcacctattcgcagatagcccatgagatgaaaaccaccgagcaagagctagcgaagatgatgggcgagctcacgggcaacgagtttgatatgcagggcctggcagaactcactaacttactgaagggtgaataa

SEQ ID NO: 457414 - DNA, 615 bp, Serratia marcescens
atggacaataagctgagcgaactgagcaagcccgagcaatttgatgcagcggtagagattcacggcggcgagccattcgcagtatgggcgccagcggtaaacggctcacacgtcaagaaagagcaatattttgtcctgctggcagagctggaagcgaaggataagcgcatcgtcgagctggaattgcgtttggctgtagaaattgatccgcctccagttatctatcccggtcgttatgattgccacgcaatgcattcagccattcgccgagctggattccgcgttttaggtgattcagagcatgtcggtgatgtagatatgcgcgatgaaagagcgctcgcagcggtatcagataagcagcgcatcgctgaactggaagccatccgatcagacgcctcgcaggtgttcaaagaaatcggcaacgagctgggctgcaatcccgacaacgagtcgatcatgatggctatcgatgcgctgaaagagcggctggctacgccggtgcggttgcaatcgccatgggtggataaagttggcaatcgctggctgctggaagggactacagccgatgtaatccgcacagccgggtttgcggtcaccgtagagggggatgagtag

SEQ ID NO: 457415 - DNA, 174 bp, Serratia marcescens
atggctaagcgtaagagcaacagagagcagccttttacgttcgaaaagtggcttgaatcagaaaacagagagccatctgaccgcctacgtatcgatttaaaagcggcatttgaaggcgggcaagaaagccagcgactcaaacagcaggccgaggcccaggagaaagcattatga

SEQ ID NO: 457416 - DNA, 849 bp, Serratia marcescens
atgccctccgcaacgcgggatggcctgacgataaaccagtctggacaggttcttgcccgtgccagcctttcagcgcggcaggcaaaggcagcgggtttgatgacgagcggcacttgtggcctgcattccactggctcattggcgagtgccgacctcagcacgtttttggcgaacaagttgcaagcggcaacgcaaatgcttggttcgaccttgtacaggctgacctggaagcaatggactacgccttcgggcttgtcccgttcccgtctgcgggcgtcggcgcaccgcacatccgcgatcgagcgtactgggtggccaacgccaacggcgaacgctggaaccggagcgggaaccgaggggcgtcagggtgggatgaatattcaatcagcagcgatgttggcagggtggccgtcaccgatggcctcagacgggaacggggggaaaggcccgcgcaaaggggtgagcatcaccggaaggatgccggacggctccaaagccagcatgggattgaatgcggtggcgaaattagcgctgaccggctggccaacaccactggcgaacgaggctcgcttggggtatcagaacaggagcaacgggaagaaaggcagtcaggaaagcctaaccactgtggtggtgaactcgattggggagcgggagcacctgccgagccatcagccagcccggttaacggcttctggcgaaatgctgactggctgttctgccgggatgaaaagtggcggccagttagacccggctcattcccgctggttaatggggctgccgccagagtgggacgactgcgcgcctacggcaatgccatcaacgcggaagcggcaaaagtcttcatag

SEQ ID NO: 457417 - DNA, 636 bp, Serratia marcescens
atgaccagactccgatcccggcgaagaaatggcattgtgtgtagtttcgtaggtcatcaggtttcacatcctcgatcgagcgttcatcaacatcaccaggcgcgatatggccggcggctatcaggttgcgcagccactgcgcagcgtatggatcaatttcgttgtagtaggccttacccacgctccatctccctagcgccgacatcctgcgggaaccacaattccaattccttccgcgctgcttcgttggtgatatcaccactcttcaatcctgtgctgcttgctcccgggcaatcagggcaaccacgacactcgcttcccatagtcgggcagggcttcagttcatttgctggcatcactacctccatgaatcactgtgcgaatgccattccaggcaggagcggttacgacgccttcttcctgcatgcgttcgataagccacgctgcgcggttgaagccgatgcggaaatgtcgctgaatagccacgatgccgatcgatgcgtgcaggcgagcaaattcaacagcctcgctgtagaggcggtcgtctatttcggatggtttcacttttccacctccacgcgacgaaactcgataacccacacccaggggttggcgttccagctttcttcgccgtag

SEQ ID NO: 457418 - DNA, 252 bp, Serratia marcescens
atgtacaagctcggcggctttcgacttcagcgccgcattctccacagccagcgcatcggctcgtttctgctgcgcatcgcgctcagcctccagggagctcactacctgctggtgggcatcaaaccggacgtattcaccgtgttcagcttcacgcgcgaaagcctcaaaccgaactgcgtgcattttgtagtcgggggtaaagcgcttgatggttgtcatgcttcgtctcccagcacccagcggagcgcctga

SEQ ID NO: 457419 - DNA, 135 bp, Serratia marcescens
atgaggcgtgtaaaactcaccggcttttttacccgcattggcagcaaatttctcaagcaggtattcgtaaatgtagcccagtacgtcatacccttgattactattcatgggaatgcttttgatcaggtgcagtaa

SEQ ID NO: 457420 - DNA, 186 bp, Serratia marcescens
atgtctgaaattatcatatcgctcctgatatacagtgcttttctttttcttaaactcggtattttccgttttcccaggagacctgaaagcattatgaatgaagaaatcgtcgaaatcgaacccccttatttccttgactggagtcttgaccaaaaaatcaagaatataagaaccagtgccccctag

SEQ ID NO: 457421 - DNA, 252 bp, Serratia marcescens
atgataagaactacttactatccggaggggagcgcccaagaagtgttggataaaaatctttctgacttatctaaacaaagggataatttatatcgcactaatattcaaatcggcgagctcaatgcattgaatgcctgcttggcagttataaaattcaagcaatataaaggattttactcgagtgaagaagacttttaccatacattattcaacatatctgatttgaaaattgtatctgagtcaatatcatga

SEQ ID NO: 457422 - DNA, 1245 bp, Serratia marcescens
  misc_feature (1192)..(1237): n is a, c, g, or t
atggataataattatgttgccttactaattgattggaggcttttcgaaaacccgtatctctcatttgacgatgtcactgttccattcagagagtttgaaaatatagattctctctctgatgttttatctggtttgctcattgaacttaagaagaatgtatcctttcccagcaaagatgaagatgaagatgaagttcgtcattttaatcatcttctcacaaaagcagcttgggaaaaattctcagaagacgagaaagctgtaaatgaaaaaagtgactttattactactcaagatgaaataattaatttttgtgatcaatttaaaatagatcctagtgtcttcgttccttgggaagaaatcttaatcaaagttgaaaagatagacggtggtaaacatggtaccgctctctttttattggagcttggacgagatttgtcattattaaccaatgcaggggatttagctaaggataatgcagagttatctgatgttgaacaaagcttggttgacactttaagggcatttgtaaatccttatattttagaggatctatcattctcttatgagatatatacagttaaggccaatggttaccatcgtcaaatattaaagcaatcggatgtatttagtaaaagcgattttgatgctttagagcacactgttgtaggctatgttgatgagaaaggttggtttagaggtcgcgtaaaagcttttggtgaggataagggcgaagtagttattcctgccagcataagtgttaattctgattctggagtcggaccatttgaaattcaaattgggacattagaatttctgccgcaaaatacctcgcacaccgagcgagagcatacacattttgacctcaaggcaaaaaaatatgctgggcttatggtgtttcgggataatttaagagtgttaccatatggacgagtagataatgatttcttccagatcgaggaaagacgttcatggaatgctgggcggtactattggtctaaccgaagaattttcggatttatcagtatcacacaatcaaataataaagaactaaaggataaatcaggaagggaaggcttcattcgaaaccaagctgctagagaattgaaaacattagtttcagatttattaacatcattagcggatagattttttggtagacattccgaagatcgtaaagaacttcttgagcaannnnnnnnnnnnnnnnnnnnnnnnnnnnnnnnnnnnnnnnnnnnnnaaacgtga

SEQ ID NO: 457423 - DNA, 180 bp, Serratia marcescens
atgttcggattattttttctcatctgcgcaagcggctcggatatctgcagctatcaatctgctgactacatctacccggattaccagaactgcactgctgacatcgccgcgcaaaaactcccctcttcttacgaatgcctgccagttgatgctgtggtgcgggctaaggatgacctatga

SEQ ID NO: 457424 - DNA, 378 bp, Serratia marcescens
atgaacgacattcaaaaaaaacaatatgatcaggtcattgaatctgtgaacttcgccctcaaatcattgtcacagttgttcgaacgtcatgacatgcacggcttgtataatttgacaaacccaaacctagatgagctaaagcaagtatttatcaacatgaagcaacacgttgataacattgcaaaaagctttgaacacatggtttctagcggtaaagacatggatgcagccaacgctagcatcaatgtgatgaacatcaagcagggccttctatatgccgagtcactattgatcgctgtagagaaattagactatgatgagtgcattgaggcacacaacaacatacaaggttatgacgtgccaaccactcagtggtag

SEQ ID NO: 457425 - DNA, 507 bp, Serratia marcescens
atgaaaaaagaactcagcattgacgacctcaaaaaagttatcaaatacgacgaagttaccggaagcttctcgtggctaaacactgaatctatccatcctcggatgaggggaaaggtggcaggtacaaagcgaaaagatggatatctccaaataaatatatttggcgtttgttatctgtcacatcggctggcttggttttactcaaatggccattggccgtcagagatcattgatcacgccgatggcaatagggcgaacaatcgcatagccaatcttcggctggcatcaccatgtgagaaccaatacaacagagtgaagagcaagtctaacagtagcggggcaaagggcgtcacattttgctctcgtagcgggaaatggatcgccaaggtgcgactgaaaaaggaaatgcattttcttggacggttcgacgacatcgagcttgcttctttggtggctaaccaattccgtgagaagtatcacggagaattttgcaggcacggatcatga

SEQ ID NO: 457426 - DNA, 915 bp, Serratia marcescens
atgatggctgatgatggattgaaagagccagtgatcatccaggcaacacgcatcgatgccacgctccttcctcgcaatatcttctctcagccttatctgctttacgtaattcagcagggaactgacctgggcaacgtggcggggaaggcaaacgaggcggggcaaggggcatgggatgcccagaagaggaacgatgagcaggatttggtgctggcagaccacgaaacaaggatagaggcagcagagcaaacgctcatcaaccatgagcaaaggatatctgcggctgaaactacgcttgctgatcatgaagtcaggttaaccgctgcagaggcagagcttgtcaatcatgaggcaaggatttcagccaatgaggccgaacttgctaaccacgaaacgcgcataacccagaacacaacggatattgcaggcctgaccgttcgcatggtcacggccgagagcaatatcacgtcactgcaaaccaatgtcgcctcactgacaacgcgagtaaccactgcagaaggcaatatcacaacgctgcagggaaaggtttctaccatcgaaaccaactacgtatccaaggccgtctccacgagccaatcggttcaggcatctggtggttcattcctcgtaggtaatgtagcgactccaaccactgacaagcttcaagttggcggcagcgttaacgctgtttcttacaaagtggcaggaattcaggtcgtcggggctcagcaagctggatggacggctgcaactggaactgcaaacaaaggcgcgttcaacgcagatcagtcatacaccattggtacttcatattcgcagtcagaggtgcaagatttagcagatgcgcttaaagcggcatgtcagcgagtcaaggcgctagaggatatggccagagcacatgggttgattaactga

SEQ ID NO: 457427 - DNA, 648 bp, Serratia marcescens
atgggtggtatcgctaaaggtattggtaaagtagtcggctcagtaactggggctaaccaggcggcagatgctcaagttaatgccgctaattcatcaaatgagaatgcatggcggatttatcaggatcaaaaatccacgcttgcaccatttcttaatgctggccaacaggggcttcaggggcttctcggcgtagctggaaaaccaatcgatagaaactctttacttcagcaatattataacagcccagagtttaagcagttctcaaatcaggcgcgataccagcaactggcatcctctgaggctactggcggtcttggcagcacagctacggcaaatggtttggccgcgattgcccctcaactaggtcaaaactatttaggaatgatgaccgaccagcaaaataacatgtacaaccagctgatggggttaactaacgttggcctttcagcgggcggagcgaccaatgctgctgctggtaactatgccaatagctttggtaacaatatggcgcaaattggagcggctagggctggccaatctcttgccggcggcaatgctcttactcaaggcttgggtttccttgcagggtcgtctcctgccggcgcattaggtagcgggttagctggaattgtaaaaagctggttttga

SEQ ID NO: 457428 - DNA, 1335 bp, Serratia marcescens
atggtagatccaatcgactacacgcgtggcaatggattcggtcaaggattgcaacttgccgggctatatcaggatgttcagcagcgtagagcgcaagctgagcaggcacaggcgcagcaggaaacactaaatgcatttcaggctgactggaaagagtcatttggtgacccgcagaaaatggcggcattagttgcaaaatatcctggtcagatggatgcgattaaagcaggaatcggttttcaggatgaacagcaccagatggcattgggtaacgcagcaagagacttgagggtggcaatggcaacaggaaatcctcaagcagtgcagcaggcagcattgaatcatgccaatgtgctcgggtctgttggctcctctcctgaagaaattgtgcagcagtttcagcaagaccctaacagtcttgctcacattgtagatgctgtcgggcttaatgcacttggtgccaaggactactatggcgttactggtgacagggaaaagttagcagaaacgatccggagcaatcaggcgagcgaagccaacacgattcgtgggcagaacatcacgatgcgcggccaggatattagcgcgcagaactcgatgcgaagcgctggcggcgcagttccagccagtgttagagagtatcagtacttcaacagcctttcacctgagcagcagcaaacatatctgcgagtcagggggcgtccaggtggtgatgctgacaacacagtccagttgtcagacggccgaaccgtaaccgtgtcaggaaagttgcacggacaaggtgccaatgcattctatgaaggcaaggatgataacgggaatatggttcgagtacctgccagcgccatctcagccccgccaacagctgcagcaagcgcacaaaattacgcgatgaaaaaagacctagatgcaatcctagatgcaacgcctaataaactaggtttcatgactggtatatctggaggaagcggaacaccatcatgggatgctgaagcaagaagtagatggaacggcggagatcaacgtcagcttttcaatgcaactaagcgtatccaagggaaaatgcagaaccagggtattgctgcggctagggatatgggtgcttctggcattaacactgtggcagaagccaagatgtattttcagggcatgcctcaggttgactactcaagcccggaagctatgcagcaatctatgagtgacatcaaggaatacacggacaattacaataagcaatatcaggtcaatgtaggtggaaagcgccaaggtaatagccaagagaaaacgcagctttcagatgacgatctgttaaacaaatatcttggaggcagataa

SEQ ID NO: 457429 - DNA, 1788 bp, Serratia marcescens
atggcatacgaccgtgagcagcttatgacggcgctgcgaaacgctgatgctgctggagacactgaaggggcgactcgcatcgcccaaatgattcagtcccaggcgcagcaagatacgcagattctgcaagatacccctcaaccgcaagccaaagaaccatccatgatggataatgcagagcaagcagctcgtgggctggtcaatatcccattcgacgttctccagggcggagcaagcctaattaacgctatcagccaaggactaggaggacctaaggttcttgatgatgtttaccggcctgtagatcgcccaactgacccatatgcgcaagctggtgaggctattggcggctatttaactccagggctggggatggcaggaaacatggcacttggttcgctagcagaagctggcaaccaagatggcgattttgctcaaaatgccgctactaatgcggcagttaacctcggagcgcaaggtttattgtctgcggcagcaaagggaattggtcgaggaattaccgcggttaggggcgagattgctcctgaggcaaggcaggcgatagactttgcagagaggaacaacgttccattgctgacaacggatgtcgcccagcctggaactttcgccggtcgttctgctcaggctctcggggaaaagattcctgttactggcacaggtgcggttcgtaggggtcagcaggaggccagaagtcagctagtgcaaaactatgcacagcagtttgattctgccgcccctgaggaaattgttagtagccttcagcgccagaccagcaaggtaaagaaagcggcaggccagcgcctcacccaagttaatgacgccatgcaatccattggcgctatcaatcctgtgcaatcagttgcagctattgataaagaaattgctaacttatcaaggctaggttcggcggctgactcccaaacaatcgccaagcttcaaacgtacagggatgagctgagcaagggtgcagattttggtctgctaagggatctcaggacgcaattcaggcaggatgtcaaaggcgacagagtggcatggccaaaccagtcacaagccgctgtaaaccgggtttactcatctataactgatgacatcaatcgcgcgataactgacaatcttggagctcaagccgcatatcgatacaagcaagcaaatgccgtatatgctaatgaagcgcagctggtcaacaacactcggttaaagaatgtccttcagaaaggagagttaacaccagaagttgttaacaacctgctgtttagcagcaagccaagtgaagttaagcaactttatggatcgcttgatgccagaggaagaaatgccgcaagagcgtcagttatcggtaaggcctatgagaaatccggcggtagtccggataagttcctgaatgaagtaaataggctgtcatctcagaccgggatattattcaaaggctctgataggcaatatcttaatggcctgactaagtacctagaccaaacgcgaagagcctctcgcgccggagccgtgacgcctacagggcaggaactatttcagatagctgttcctgctggagtggcaacagatgttattggaacgggaggagttgccactggcgcggctctcagttatggggcattggcaagggcatatgagagcagaccattcaggaatgcaatgctcaaactagccaacactaaggccggaactcctatgtatgagcgatttcttggtcaggctgctgatgctgcatctatcatttctcgtgggtattcttcgggcggccagtaa

SEQ ID NO: 457430 - DNA, 213 bp, Serratia marcescens
atgaacgaaagattaactcgcattgaaactgtggctgccaaccaagagaagcttattgacgatattcgcctagacatgcgaggcatccgtgacgatatccatggccttgagaggcgcattgtcgacaaaatggacgaaaaccacaaatgggttatcgggcttattatttcatcaattcttgttccgctacttattgccttggttacaaagtaa

SEQ ID NO: 457431 - DNA, 180 bp, Serratia marcescens
atgaatggtagatcaatcaatgctgaattggtgcaaattgttcaggatgccattgccaagccctctccagtatctggttatagaaatgacgccgaacgcttggctgaccagcagtcagaacaggtgaagaagatggtttttgataccctaaaagaaatctattccaaaggtgacaactga

SEQ ID NO: 457432 - DNA, 162 bp, Serratia marcescens
atgaagggcgcaagaaagttgccgcaattcaatcttcgttggcctgaagagattctctctctgattaggaaggttgctgaagagaatggaaggtcagctaatgctgagatctatcagagagtaatggaaagcctgaaacgtgaagggcgcattgttgcgtaa

SEQ ID NO: 457433 - DNA, 2355 bp, Serratia marcescens
atggctgaaaccacccctagcgtagtagtaagcatgcctactcagctgttcacgctggctagagcatttaaagctgcggcaaatggacggatttatattggtaagattgataccgatccgaccattcctgagaatcagattcaggcatatctagaaaatgaggatgggacatctgtacctgtggcccagccaatgatgataggtccggctgggctgccggtatacaatggtcagatagccaagtttacaactacaacgacacacagcatggctatctatgatgcttatggcgttcagcagttctacttccctaacgttctaaaatacaatcctggtgaattcgctggccctggcggcgctggtaaaatcggcattgggtatcctgaaggaaccacattcaactactcaaccgtgcaggcagagcttgggtattcgctggacatgtttggtggcgacccaacaggcgttaacaatagctacgatgctatgaccagggcattggccttccttgccacttctgatgcaaagtttaaagttctaaagcttcatgggaaatacaaaatttcaggctcaactggcttcacgctgccatcaggtgtaagcattgttggtaatcatgaaggcatgacgcaggggccgcaaactgaacaagtatggccgcaagattacgcttacgactcaacgctgattattgacttgcccccgggcgttgactgttttacagccacagctaataacgtgtttgcaggcttcagcgttatttataatcagcctcagtctgtggctactgctgctgattttatccagtatggatattttatccgaagcaattctcgctctatggcgttggttaatatgcgctatgccggagcttacaactgggcatacttgcaaggtgaatgcccattcgttgaaaacgtttatggctatgcgatcaacatcgattaccgcgttcatcgttctgctgacgtaggcaggttcagcaatgttcacattaaccctaacgtaacgcgtccggcttggtcatttattaacgctgcagcgatgatccccacaagttgcgcattccattttaccgaacatgatgggatgtttattaatgacactcatgtattcggcaagaacaaggtggtcatcaataaccagaacggcacggcgcggctttgtacagttaatggcagcaactggttggttgacaaatgcgggacattactgaaaagcgacatcaatagcggtcttacttggggtgtaaacaacggtacgtttatctcacgttactgctctgaaggtggtggcgtcatgctgacaaacccactagcaactcaggtttctggatatcagttcgacggctggaaattccagatagatgcagataccagtccagtcactgcagtgggcccacttcctgctcggtggtttaacttcggcacggcatcaggctgcagggtttggctaaataacttcattgtcttggccatgcctaacatggagttcaataacgatgcgcaaagcaacttgattgaaggttctgccacagtcggcacaagaacaatcatctttgataacaagccaaaaaatcgcctaagtaacgtatggctggcatctgtagacccggccacgctgattccgtatggatatgctgcagcaggtagtaacatcactatcaacaggaacgttgttacttctaccaatccggcatcttcaaatggtgttggcatatctcagcgcgtattcacatcgtttacaggcgcttgctcaatttgggtttatgcatcgtctgtaggggattctgtaggcgtgtcagcgactgcatacctggctgatttcggcagcccaattgtgttcccatcaacagggcctgctaagtgggaacgttttggcaatgagtatcttgctaggatttctatccctgccagcaccaaccgagttatctgggatgtcgtggcagcagcaccatcagcaaccggcggcctgcttgttctgtcagacttcaacatgacggctgataacccattaacctactggcatggcgcgcctgaagttcagctgcaagctcagcagatcaaccagaactcaggaacgatgattgttacccctggcgttgcaactgaagtgccaagatatctatgggcttcagacgttggggcgatcatcgttcatgttcgtactgctaactctgcgctgatcgtcgctctaacaaagcgcatggtggcttttgatggcactctaaacataatcagccagcaggccggttccgagaccgtgacggttgcatggccatctggagcgggtaagcgaccaacaattatgtgctctgcgaatagcactgcaatggtgacaatttcaggggtgtga

SEQ ID NO: 457434 - DNA, 1509 bp, Serratia marcescens
atgagcctattaaaacaaatcgaagctgctattctggaagaaacaaagaagttgataagcagatatcataagtaccataatcaagtgcatattgaatttgttagaaatcagaaaagacttggtttaaatactcctgaaaaaaagatatacaaaccggattattggagtgaaaataacaaattcaatccattttatgtgaaacgcaactataagtctatagcacgttctattacaaaaaaaatagagtcaagaacgtattctccgaatgcgccatatattaaatccgtaccaaaaccaggaggcggggagcgtcttgtatcaatttatcaaattcaagacgcagcaatatcaaagttattttttaatagactattagctaaaaataaacataggtttagttctttttcttacgcatatagaaatgataggaatgtgcattttgccatacaagacatatctgttggaattagaaaaaatgaacgcacatttttagctgaatttgatttttcagatttttttggaactatatctcatgagtttttgagagggcagtttaaaaaaaatgggttttatataagccaagaggaacaattcataatcaatgcattcctaaaggggcgaaaggtaggaattcctcaaggcacttccgttagtctattcttggctaatttgacttgttggaacctggatcaaaaatttgaaaatgaaggagttaagttttctcgatatgctgatgatactattgtctggacgactgagtactctaagatatgcaattcttttggactaattaacgaattttcaaatgaagcaggagttaagattaatcctacaaagtcggatgggatatgtttattaactaaaaaagggttgccatcagaaatagagtcaaaaaatagcttaagtttcctaggttatgaaatttcagttgataatgtttctataaaggataaatctgtaagtaagataaaaaaacaaatatcttatattctctataggaatttaatacagccattaaaacaacattctttagctgggcaggtaataccttcgaacaataaagatgaaaattttctttctgcaattttgcaaataaaacgatatatgtatggtgggctaagtagcaaaagcataaaagattacctttcaggacgaacaaaaagaatctattttaaaggggtgatgagtttttatcccttagttgatgatgtggagcagttgaaaagccttgatggatggcttttatctgtaatatatcgtagcttggctttacggagtaaattgctcagttcacatcattataacagaacgtatatgtttccttttaatcaaaaccggaaagaacttttgcatgaatgcgcgaaaaagaaaatagccggaaaatttcttttggaaattcctagttttctattgatacataaagcattaaagaaagggcttatagagtctggaatagaaagcataatgaatccaaaatcattgaactacaattacaaaagtataaattag

SEQ ID NO: 457435 - DNA, 540 bp, Serratia marcescens
atgaaggctattgatgatatggatcggtggcatatcgagcgaaatgagtttaaaagagagatggaaggttttgccaaggcatttattgataaagactacccattcccactagttactaaaagagaagtgaatgggattaatttatcgaattttaatttcattgatgaattaaggagaatcgaactcgatgatattatggtggataaggctatagtggattttttacgcgcagaaagaagtaccctaaagatattgaaacttcatacatctatggcagacaatcttgaggactttgatgatactcttagtgaaaacctttctctagttaagctaaagcactctacaataatctctcaaaaaaaacagaaagaattagagataatatcagtatcaaagaaaatgtactcggaatgcttattattaaatgataaaaaaatcctcgggatacaggaaatagcagggtattatcaaaaagggagaatacactcaattgtcgatagaaaggagttttcttggctgttttcggagcatgaaaaatga

SEQ ID NO: 457436 - DNA, 2208 bp, Serratia marcescens; identical to SEQ ID NO: 439568

SEQ ID NO: 457437 - DNA, 2502 bp, Serratia marcescens
atgagtaaagcattcctttcacattcatgggctgataaagaatttgtcaggtcagttgcacatgacttaggaagacaatattgtgtatttgatgagcaagtatttgatactgcagaaagttttaaagattctattgaaaaacacttatctgatagctctatttttgttctttttgccagcaaatcatcacttcaaagcatatgggtagatttcgaaatcacagaagctagataccaaattttattaaaaaacatggagaaagcaatagtatttattattgattcagaagtaaatattggagatttacctccatggttgaatcgtgctaaggttttatccgctaatattccaaaactggtgtccagagaaattagatatcaaattgacaaaagtttaatggcgactcacaaaccatactttgaggggcgcgctgctgatcttgaaagatttcaaattatgatgactcctataggattaccagctcctaaggttgcatctatatttggacttcctcatataggtcgtcgcacatttttaactcatgcagctaaccttacactagcttttaacagactattacctataaacatctctgatggagatgagttagttgatgttgcagtaaaactttccactcaattagaaccatattcaactaaggaagggtttgaatatattattaaaaccataagaaatgaaacggaaattcaattaattgaaagaataaaaagccttttaatcactgcgatagctaacaaagaattacctgtcttaatagatgatggcggactctttacttcagatggctatcataggcaatcggttcgtactatattaacaaatatagcatcaataaatgaagtgtatttgttcattatatctaacagaaaatctaatgaactagataattcattacttttaaatccattgtcgcaagaacatgtcaaacgtttgatatcaaaagcagcaacagataacaacataattttaacagcaactcaaatatcagagttaagtgaatatattaatggattcccaccatctgtctattatgcaattcaattgttaaaaacatatggaatagaagcattgttggctgaaaaatataaacttgttcagtttagagtatctttttttgttgatttcttaactaaacatgtttttgattcaactgacaaaaatatattgaatatgttaagtaaatatagcccaatacctatcaacgttatagttgacgtagtgggctcagatgctgagcaggttgcaggtagtgtaattaaactgattgagcactcattagttgtattaaatgataaaggattatatgcaatttctgagcctattgctgattcagtaattaaattgttccgagaagaaggggatgttgatcatacagccacttataattctttaaagaaacatttggcctcccaaaatgaagagttgcctcgattagacctaatgaggttattgtttaaagctgcagcacgcagcgggcagtcactcgacgaaacatttcatatgtcaaatgatttaataaaacttgcagaagattactatcaccagagggattataagcaatgcatccgatttgctgagctatctcttgctgaagtccctgataacgaaaaatccacagaattgcttattagaagttttatacaggatgaacagtgggatcatgcattagaccgtatcgatatttattcgcgctatgcagtaaaaagaaatatatctttccttcgtggattttatcatagaaaaagaggtgaactagttgacgcgataaactcttttcttgagtctgaaagaagtggacacacgggagttgcactgaaacgtgaactagctatgtgctattacttgaataatcagattccagagtccaaacgttatgttttagaagcaatgaaacgtaacgaaacaaagtttattgttgacctatttattcagattgccactcgcgaaggtaatgaagaacaagctagagaagggttacttaagcttgaacaacttgatacggtttcatttgtacagcatagattatcaacagttgaattaaggtttggcgacgtatctgtagcgttagatgccgccaaaaaggctttggcatctttcaaaggagaacgaccaccttttggaatcctttcccaattagcaacttgttatactcgatcaggaaactttttggaagcggaaaatattataaatcgattatcaaaacaatttgataataagaaaaatgatataaggttagggttggagtgtcgtttggaaattgaaaaagggcgttattccttagcgttgaaaatcctttctcgcataaaaaataaagatttgctggtttacaaagcgatggagcgagatgcgctaattggagagttaagggtaagctctttaacagatcagcaaagaatagcatatacagaaagtctttcgaagcttaactatgaacttgatgctaaagatgtcacgaactcgtggatggatttgataaaataa

SEQ ID NO: 457438 - DNA, 825 bp, Serratia marcescens
gtgaaagtctttatctctgcggatatcgaggggatcgccggcgtgatgcggccggagcagtgcaacccggcccacgccgactatgcggcggcgcgcgagctgatggagcaggaggtcaacgccgccatcgacggcgcttttgccggcggcgccaccgaggtgacggtggccgacagccacgcgatgatgcagaacctgcgcgccgaacgcatcgatgcgcgggcgcgcctggtgcagggcaaaccgcgcgggctgtcgatggtggaagggctgcagcatcaacgttacgacggcctgatgtttatcggttatcacagcgccgccggcgagcgcggcgtgctggcgcataccatcaacggccgggccttttaccgtgtcagcctgaacggcgaggcggtaggcgaaagcgatctgtatgcggcggcggcggccgagttgaacgtgccgctgtggctggtgagcggtgacgacgagctgcaacgctggatcgctgaacgttatccgcaatccggctatgtttgcgtgaagcgcgccctctcgcaaaccgccgccgaatcactcagcccacagcgggcgcgcgccgagatccgcgagcgcgcgatgcaacaggtgcgccagggcgccagactgccggtggagcgccgttttatgccgccttaccggctgacgctgatggcggccaaaccggtgctggcggatctgttcagcctggtgcccggcgtggagcgccaggatgcgctcaccgtggccttcgacagcgacaacatggcggcgccaatccgcctgctcagcgtcttctcctatctggcgacgacgcagagctga

SEQ ID NO: 457439 - DNA, 246 bp, Serratia marcescens
atgcacatggccgccgcgctgaatacgccctcggtggtgttgttcgggcccagcaacctcgcgcaatggtctccgtggcaggcgccccacacgttgctgtgggccggagattatcgtccgctgcccgcgccggaagctgttgacaccaacacccgcgagcgttacctcgcggccatcccggccggcgatgtgatacaggcggttaacaggcaactggcatccctcgtcgggtctgcgcagcgttaa

SEQ ID NO: 457440 - DNA, 1065 bp, Serratia marcescens
atggctattgatgagaacaagcaaaaggcgttagctgcggcactgggccagattgagaaacagttcggcaaaggctccatcatgcgcctgggtgaagaccgctccatggacgtggaaacgatctccaccggctcactgtcactcgatatcgctctgggcgccggcggcctgccgatgggccgcatcgttgaaatctacggcccggaatcctctggtaaaactaccctgacgctgcaggtgatcgccgctgcgcagcgcgaaggcaaaacctgtgcgttcatcgatgccgagcacgcgctggatcctatctatgcgaaaaagctgggcgtcgatatcgacaacctgctgtgctcccagccggacaccggcgagcaggcgctggaaatctgtgatgcgctgactcgctccggcgcggttgacgttatcatcgtcgactccgtggcggcgctgacgccgaaggcggaaatcgaaggtgaaatcggcgattcgcacatgggcctggcggcacgcatgatgagccaggcgatgcgtaagctggccggcaacctgaaaaacgccaataccctgctgatcttcatcaaccagatccgtatgaaaattggtgtgatgttcggcaacccggaaaccacgaccggcggtaacgccctgaagttctacgcttcggtgcgtctggatatccgccgcatcggcgccattaaagagggcgacgaagtggtgggcagcgaaacccgcgtgaaagtggtgaagaacaaaatcgctgcgccgttcaagcaggctgagttccaaatcatgtacggcgaaggcatcaacagccgtggcgagctggtcgatctgggcgtgaagcacaagatgatcgaaaaagccggcgcctggtacagctataacggcgagaagatcggtcagggcaaggcgaatgcctgtaacttcctgaaagaaaacccggctatcgccgctgagctggataagaagctgcgtgacctgctgctgcacagcggcggtgaactggtggccgcttccggtgacgatttcgaagacgacgaagcggaaaccagcgagcagttctaa

SEQ ID NO: 457441 - DNA, 270 bp, Serratia marcescens
atgggcctgaagaattattttgagaagatagagcatcacttcacgccgggcggcaaactggaaaagtggtacccgctgtatgaagcgaccaccacggtgttttatacccccggcacggtgacgcgcggcgcttcgcacgtgcgcgacgccatcgatttgaaacgcatgatgatcctggtgtggctggcggtattcccggcgatgttctggggcatgtacaacgtcggccagcaggcaatcccggcgcggctcttcagcccccggcgatga

SEQ ID NO: 457442 - DNA, 129 bp, Serratia marcescens; identical to SEQ ID NO: 106395

SEQ ID NO: 457443 - DNA, 1089 bp, Serratia marcescens
atgaacttcttgcatttaaaagttgataaaatagctattcatcagatctttccaagaggtgaagatgggaaggaagtattaccgggcaaaggcacggagttaataaattttgatgaagatgctttgagcgattttaaacaaagaatttataactctcttgggcatgattcttctgctgtggaaatggtgataacaaacgaaaagacagaaagcactccgttttacgtaaatattctacatggttgtaatgatgtggaatttataaataacagttatgaaattgctaaaaatttatcaaaagcacaaacacgtagaggcatgtccggaggtatacttgttgttttcagcgccacctatcaatataacaagcttccttttgtaggcattatcaaagctgacttatacagtggatacgaaaaatggcaagataaaaaaacaggcattatttctttaaaacatgtaaaagagctactacttacgccttcaaccaagctttataagtctgccggattttttaaacgtgaaaacgtaaaaaatgatagcaccttaagtgaacaatgggccgtacatatttctgattatcagattgataaatctgacggtaaagctgctgctcagtatttttatcaaactttcctcggttgtgattacccagcaaccagcgccagaacaacaaaacgttattttgaaatagcatgtgattttataaatcaaatggatattgatgaagaagagcgaacccacttacacaacgtcttatacgcagacctaaaagcaggtaaatcacaaaaagttgatcctatggcatttgctggctcatatatgtcaacagcagatgtagataattttaggaactatttagacgattatgattttccggttggtccattcataaaagatacgcagtatatctctagcaaattaaagaataggcgtttaaaatttagtaaaaacattcgaattagcgcaccatcagaaatctttgaagagtttgtttctattgaaactgtagagggtgaagcaggtcaagatggttatagaccaacttggacaaaaattcttgttaaagacagaatagtagatcaataa

SEQ ID NO: 457444 - DNA, 213 bp, Serratia marcescens
atgatgagattgataggtgaagagcattggcgattctctacgctcctcattatagtttctacactgcgtagcatcccaaccttcttgaacggcaacttgtttaataacctcgcatactttttcaacgtcagtttggagcattacgacaaagcgaacacctaccttatcttcaatatcattataaggatttttgtacgctttattacgatataa

SEQ ID NO: 457445 - DNA, 1191 bp, Serratia marcescens
atgtaccgtacgatcgatgttcatgttgataaatccagttggccagggatcggcaagattcccagttttccggctgctttcaccgcaggcagcagttccttcaatttgaacatcaactcgatgttattaatcatcggttacctgacaacaccgacttctgtcacaggtgtttcgcttgcagaattctgggcgtgggtgagatatttggcagcgatcacgccccgagaccaggatctccgcttgacaagaagctatgcagatcttgatgcgcatcagaaaactattctaagtgatgacttcggaatgggagtgccaatggtctggctcatgaagaatttaccattggttgatattgtcgatggccgctattttttgcagcgctacggcgcaagccatggcgcataccagcatcgcaccgcaaagcgcgggccaaataagacgcctgacttcgtggtacatgggcacgatggaaaatggcacattatagaatgtaagggaactcaatctggcgaggctttcagggatagccaaatcgattcgggcatatcccagaaactttcaataaagttcccaccagggcatacagggcagaggttggtatcaggtcttagtatcggcattgaggacggtaatccaagtcacctgaagatcattgatccagaacctgaagatcctgtaattattaccgaaagtgaaatggagtttgtaaaggacgccgcaacccgtggcgtaatggccaaactgcttcggtcgacaggctttgaaacagcggcagaggcggtagccgcgcctttcgggaaaccgcaagccatgcctccatcaacaaaaaaaacagataaaaagcgtatagagtttcttgcagatcgcgaccgacgcgcacgcgaagagttgctggaaagcacctcaagagctaatcttttcggcggtcgctatcgaggtcgagaggttactttccagttgccgagaccgatctatatttatgacgatatgatttcaaaagttaccgtaaggcaaggaatgaatgtggatgccatcgatttgctcagagagcagccaaccattgagacgttaatcgacccatctcgtaatcattggatcgatatgatgggggctaacattattcaggatgacgagcaaaccgcgacgttgcaattcggaagtattttcaggtccgagttgattcttaattaa

SEQ ID NO: 457446 - DNA, 1638 bp, Serratia marcescens
atgcaaagcacagccttagataaaagtcaagaatttcaacttgttgggaatgatgatgttgccgagcagtcaacaattaatgcaacccaagaaataaaagacagtgttactccagagattataatcgcactttgtgggccaattggttcaccgctacatgagactgctgagcagatatcattctcgctgaaaaaatatggctataaaacatatgacatacgtttgagtgatctaatccggattaattcaaaatatacaaatattaatattgatgaaagcactaagctaaagaaattcaagtcgctgataactgtgggtgataaacttcgtgaaatttacggtagtgatattcttgcaaaattagctattgctaaaattagcgccgagcgtaaaaaaaactttggtgagtttgatgatattgtcaatgaatccagcaaaggggaagcgagtaagattaaaaatcaaaaaatttgtcatattattgactcagttaaaaactcatctgagcttgagttgttgaaatcaatctatggaaaaatgattttctctataggtgtgttctcccctttagaggcaaggcgtgaaaatctttcaaaaattaatagcctaagcgttgaagatatcgctgaactaatcaataccgattctggtgaagagttcgaccatgggcaatcagttagagacactttcccgaaatgtgattactttttgcgggttgatagtgggttggcagagccaggaaatgccgaggctaaaggccaaattctatctaaactggaacgtttctttaagctaatttttaggagttcagttatatcaccgactgaagaggaaaatgcaatgtatgcagccacctcagcggctcgtaattctgcatgtctatcaagacaagttggtgctgcagtaacatcttcatctggagaacttctttctaccggttggaatgatgtgcctcgtaatggtggtggcctctatggtaaacaatctatccgcttaaaagttattgatcctgatcatcgttgttatgctttacaaaatagaaattgttcgaatgatgcagaaaagagaatattggctgaagttgtcattgatagccttgtacaggaaaaaatcatccctgtaaaaaaaagagaagctgcgattcaaaccattataaaaaactcacgattaaaagatttaatagagttttcaagagcggttcatgcagaaatgcacgcgattcttggcgcatctcgtgtggcaggagaaagaattttaggcgggaaaatatttgtaacaacttatccatgccattcctgcgcaaggcatattatcgcttctggtatctctgaagtatatttcattgaaccgtatagaaaaagcttagctcttaagcttcattcggatgcgatgaccgaatcagtaatcgagacggatgaaaaagtgaagttgatacaatttgatggagtagctccaactaggtttcttgagctttttgaatctggatctcgaaaatctaaagctggggtgctagagttagcgacagagggtgcggctatgcctgtggatagcgttagtctcaaagcgattcctaaattagaacaggtagttattgctgaagttgatagtaataaacttaacttgttgaggcttgagtga

SEQ ID NO: 457447 - DNA, 411 bp, Serratia marcescens
atgttcggattctttaaaaagaaaaaacctgacgctgagccagggcaaggtccccgactgacggcaaaacaatttatcgcgctgacgctgagtgatgaaaagctgtctatgcccgtgtacctgccggggatccgcagtgaggccgaatgtgacgaaatgggtttatggccactcatctacatctggaatgtggatcgtgccactggcacgttcagcctttctgttaacggtaaggccattgcccacctcctggagcctttcgtaccccgagaagaccctgcgtatgtcgaaattcgtgatgaggcgatgaaggtcatctccgagtcttcaacgcggtccgttctggcgacggttgagaaaaccggtctcatgcccgatgttttgttcgcgtatgacgctgagaacgaatga

SEQ ID NO: 457448 - DNA, 729 bp, Serratia marcescens
atgagcgaatcacgtaagcaatttatattatctaaaggtgcgacttgcaataactggaattggagttggtcatttaccaatcacgatgaaaaaatggttatctttggggcgtgggatttcaatactgacaatgaaaaatcactgataatgcataaggattggcaaaagaaaaataatcgtcaacaaccgggatactctcaagcaatcgaacatttaaaattattagaccaaggatataatctatatattttttatcaagaaaatattagtcatgacgaaggtgaaccaaagataggtaaaattagtgacaatcttttaaaagcttacatgaaatatgatggagaagcttggtatgcatacaaaaacgcattcgactacttacctgatgaaagagatgccgaagaggaatattttgaagggactcgaaaattagtggctgtgaatgcttatgaacgtaataaagatgctagagaagaatgtattaggattcatggttataaatgtaaagcttgtgattttgattttgaaaaaaaatatggcgagcacggaaaaggtttcatccacgtacatcatatcatacccttgaacatgataggcaagcgctataaagtcaatccagaacatgatctgatacctttatgtcctaattgccatgctatggtacatcgttttaaaaacaatgaattaggtttagataaattaaaagaacttatatcatcgggcaaatag

SEQ ID NO: 457449 - DNA, 708 bp, Serratia marcescens; identical to SEQ ID NO: 170564

SEQ ID NO: 457450 - DNA, 813 bp, Serratia marcescens; identical to SEQ ID NO: 170565

SEQ ID NO: 457451 - DNA, 576 bp, Serratia marcescens
atggtcgatattcgtgaacaaaagctgatttttcacttaacggacattaataatctggagactattttttcggatggactaaagccacgtagcctattagaagggttttcagacgttgccgatcctgacatcatcgactcgcgccgcgcattacaattagaaaaactcgttccctttcatttttttgccgggaatccttttgatggcagagttcaccttgataaccggggtaaaaagtttgttcttatcactgttcatcgcgatcatgcaaaggcaaataactggaaaattatccccagacatcctctatccggcatggctatcactctgctcgattatgaagcaggaatgaatgccactgactgggcaacaatgaatctacgaaagtacgataacgacgagtgcaaacgcatatgcatggcagaatgcttatccccagaaactgtgtctgctaaagattttttcagtatttatgtgcctgatgcagaaagcgagaatactgttaacactctaaaacaaaagcatgggctaaatatgtatgtcaataacagtcctaaaatgttccctggagtctga

SEQ ID NO: 457452 - DNA, 546 bp, Serratia marcescens
gtgagaacattaaatatcatcatagatgatgaaaatcgctatttcgctgcgggtgtagagcgcagcatatcggaatatgctcggactaataataaaacggtctgctttgtgacgccggatgtaggaaggcgagctgatgtagtgattgcatcctcccggcggcgtaatcaacgttggcgtcgatcgggtctttgtgacaaggctgtgccggttgtcacaattaaggaaaagcctattttggcttgcgagtcgtctcgtgttctgtaccgcacggaccgccccggcagattgtttgaactgttaactgaaacgctggctgatacgccagttacggggcggtttgaacgccaggctttgaccgttcgtgagcgacaggtcatgggctacctcaggagagggttcgatcagtcgcaaaccgccagagtattgggcgttagcgtcaaaacgattcacagccataagcggtcggtaatgaataaaatgatgctgagccgatctcatgaatttatttattggttgctcgctcatgagggagaatattcctaa

SEQ ID NO: 457453 - DNA, 852 bp, Serratia marcescens
atgaaaaaattgtgtgatgtctttttaaaagagacgagatttcttgcttttaatcttctattgctatccggtcattcatatggcgcgctatatgttgattttatttgggagcctttagttggtagttattatattggaactctgcagcctacagggactgtggataatttatatatttctgatgggttgaggtgttttgatggaccttgtgaggctaagtgggaaataataatagatggtatgaagtctggttgttttggaaaggttatttcaccagctggaactttatataataaccatgtcaacgctatgaataatactatgataaagccatgtccaactcagcttaaagagtttactggaaatgaaaaaatgtgtgttcgccttatttcatacggggagtttattagccagtcccttcgtacattcaatatagtacatctgacctctggaggggagtgtggccctgctaccgatggtggtcaaactattccaccggttacccctcctgtcaaaccaacatcctgctccataaatgatgatatttatctacgtcatgggaatgtcaattacgactccataaatgaaaacagagtcagtgctagcgcttatttgtcatgttcgcggacatcgacaatcaaagttagcatcggcaatggcggtgttatcgatctcaatgctaagagtggattgaaatctacaatatacatctcaggaaaaaaaggcgtgaatacgtttaagagtgttaatggtatgtctgttttatttgagtctgttttgacaaaaacaggaggggaagtcgtagggggtaacttcagtaatagtgcggtggttacgcttgatattctctga

SEQ ID NO: 457454 - DNA, 522 bp, Serratia marcescens
atgaaacgacgtttagggttggtgctggcactgtgttgcctgccctctttggcctgtgcggcggataacctgcgttttagcggcgcgctggtggcggagccctgcgtgatcccgccaggccaggagaccatcgcgctgaacttcggcagcgtagtggacaaatatctttataccaaccagcgcacgccgggcatgccgttttcaatcaatctggccgaatgcgatctcagcctgggtaaaacggtcaccgtgaccctcagcggcagcgaaagcgcggttctgccggggctgctggcgttagcgccgggaagtcaggcgagcggtatcgctattgggttggaaagcactgcaggtgaggtattggcgatcaatagccccggcagcaaaatgagcttgttatccggaggtaccacgattcgtttgcaggcctatgtgcgagccgagcctgatgctatcgccaataaaaaactggtgcgcggtacgtttaatgcaacggcgacgtttacgttggaatatgaatga

SEQ ID NO: 457455 - DNA, 930 bp, Serratia marcescens
atgattattaagtgtttttttagttttttaaatacaattaaacgtttttccttgcttgggagtattgtggttttttctatttcttcctgctatggcgcttggtttccaggaatgacgttaactaaagtgagcgaaaaaaatttcgtcgcacatggggtacttagtggcgtggggtacagccaagaacccttggatacatgcaaatattatacgtctttgattaataacaaaccacttgtagacaaaggtgaatactgtggcttgactttaacgctcgctagtcgagtttccttaggttggaaggacgactggcaagggatcggtaatctgagagtcgactttatagaactgcctgacaaggttctttataatagtaacgccagaaccattggtgattttttgagagtggccgctgctcatggcaaggccaatgatgaaattaaagtttccactatgatttatgactataatccaaatgaattatgcgtgactgcaaaaatgtattcggggatttttaatacgatagtttatggtcgaatggatggttcttgttatcgtggtcagatcgttcatcccagctgtaatgtggacaacgatatcgttatcgattatggaattgttggctcgagtaatataataagtggtgtgatttctaaaacggcacaaataaacttgcattgcgaaatggatgctagggcaattctcagaaccaatgcggttaacaacgtcgattttattactgacaatgggcagggcaacgtcaaagccaagctttatgtaaatggcataactttgatgcaaggcgatagcgcatctatatccgccaaaaaaggggataattggttaaccctgcgttcggatttagtgggtacgggcaatgtatttggtgacttttttgctagtacggttttggttgtcagtatgccataa

SEQ ID NO: 457456 - DNA, 519 bp, Serratia marcescens
gtgcatactaaaatgagagcgatgatgtcaaagaaaaaattcatgataagagtatttattttgctttggattaacggatggtcaatatttccagtctggtccaatgccaatatatttttcaaggtgacggtactatcttcaccatcttgcataattaacgggaatcaccctattgttatcaattttggtaaggaagtcatgactactcgtgttgatggaaaaaattaccgtgaggcggttaattattcgttaacctgcgaacggccaagttcattatcgatgcggatgttgattcagggggcggtggcagattttgattcctccgctctgcggaccagtatgccaagcttaggtgtcatcttttttgccgacggaaataaatggccgatcaatacaatgtctgggtttaattattatacacccccgaggatagaggcggttttggtaaaagaaaaggataaagaattacatgcgggtgaatttactgctgcggcgactcttgaagtgttctatcaatga

SEQ ID NO: 457457 - DNA, 489 bp, Serratia marcescens
atgaaagccgggttaagtaagcgcatctggcgctatcgttacaccctgttaagcgcgatggcgatcgtaggctgcggaatttcggcctatttcttgttttttaaaccgcacatcccggagtgtcgcgcggtgctgcgttcaaccgatcagctgcccggcaaattgatgcagcgtgtcttgctggtcagtgttgtgccggatggcgcgcgtggtgtgacgctattgctgagcggcagtttctttgatggtggcactcgctatgtcgtcgagcgggcaatgatcatggactaccagcggcaggggagcaactacacgttgcgacgaaaggaagaagtcaggaaatcacaagacaatttggagaaggaagaagttaaccgccgtttgcccatgtcggcgccgttgcttcattggcggattgaaaaaatcgacgaacgtcactatctgttcagcggcaatcatgcgccgctgtttgtgtgcaccacttcctaa

SEQ ID NO: 457458 - DNA, 819 bp, Serratia marcescens
atgggcgttaaccagtttatcgcgcagggaattatgagatacataattaataataatattaaatatcatgaagatagatcggagttgatctcgctgcatgacgacattccgccgattgtgctgacggccacgctgaaccgcctgctttccgccctggtgcgcaacaataatctggtgctttcccgcgaaacgctgctgacgcaggtgtgggaggcacatggccaggtcgcctccggcaataacctcaacaataccatttcgattctgcgtaaagcgttctcttcgctcggtgaggaagagatcatcgtcaccctgccgcggcaggggttcatgtttaccgcccgtgagttaaagacggtagacagtttggcggaaagcttattagaggtgtcggttgcgggggctgggagtacttcgccggtggtttcaaagcgcgtcacccactttaagcatatcggactgggcgctttgctgctgttgacggcgggcagtggcatctgggcctggcaagacgctggctatgcgccgctcagcgcggtaagcgtaggcaacattggcagctgtgaggtaaagtttgtggcctcttaccataaggcgggacctggaaaggttgacctggtacatttgaaaaatatgttggaacaagataattcggttcggtgttcggaaccggcgatgctactttactacgacagcgagtccgtggtgtcggatgccgttgggcgagtccgggcctcttatttcttttattgtccgcaggccgaaatggccgcgggcaaggtgcaatgcgagaactattatgaaagccgggttaagtaa

SEQ ID NO: 457459 - DNA, 810 bp, Serratia marcescens
atgaatggaataactaaagagccagttgagcagattaaacaagcatttaaagacaggatttcaagccctttatggggttatgtgtttttctcatggcttggtttcaactggcaaaatattgctaagttatttatgagcaaaagagaggttgaagtaaggattgcggaaataacctctcaggagtggttttttgttcactacatcgcattaccagtgattgttggtgttgctctggctgccgtttccccctatcttcagcaatggctggcagcggcacacaaaaaggcagaagataagaggaaagctgatactctcacagaggaattaaggcttcttgatgttgatatggttaaaaaaaggaagtctattgaactttcaaacgttgaggaattaactaataaaagtgagcaagctaaagttgataggcaggatgagaggaataaaaataggcttgaatttcaaaaactgaggggtattaagatatctaaggcaataggtgacattgaaaagtcatttaatgatgctaatgataaacttcaggataagttgaatgaaataaaagttacagatgaaacatgcaagctcaaaatgcagactcttgaaaacttagcagaaggtttgaacaaggttgctgaattatatcacacatatcggaatgtcaactccagggaagagtttgcatcctttttgtctgaaattaaaaaaggtgattattttggttcagcacagcttgataagaagtttgaggcaatggcccaaagggaatcactattagaagctcttagcagaacaaaaagtactaagagttaa

SEQ ID NO: 457460 - DNA, 306 bp, Serratia marcescens
atgcatgaacgcttagcggtattgctcacttgggctgacaagcattatgacttgattgttattgatacgccgccaattttagctgtgacggatgcggcgattatcggtggctatgccgggacaacattgttggttgccagatttgagcaaaataccgcgaaggaaattgaggtttcgatcaagcgctttgaacagagtggtgttgtagttaaaggctgcatcttgaatggcatggtgaaaaaagcaagtagctactatggctatggctacaatcattacggctactcttattcagataaaaagtaa

SEQ ID NO: 457461 - DNA, 738 bp, Serratia marcescens
ttgtctagaaaagaaatactatctgacatacttaataagtattcatttatcaaagtaaaagatgtgactgactttttagatacaatattactagtcatcccagtaagtaacattgtttctgttgccacgccgaattacattacaaaacgtcaaatatcatttttggtaaaaaaaattcaagatgttttagatgtaaaggtgatggtaagttattctgcttttgcggataaagctaacattgagttagctctcaaagcgttgtctcgggccaacttaaaaaaagggaaaatatccgaattggatttatccttcatcgattcacaaaatgctattttgaatgtatttagcaagaatttaaacatgcaagagagaactgattgggagaacttggcgaaagctttactttcagggtttaatattaaagtttcatcgtttttatatgaagagaaaaacaatcctgcaccaacaatgatggccattttgagggcagcaaaaaggcttcaaccatttaatataaaccaattgcaaaaaagcatagaagataacagctatcatgttcaatcaagtgaatggctgaatagcaaacttgataaccttaggaaaaaaggttttatattgagggatcagcatggagtgtatcgaatgacgttagcaggcctggagctagtccctgtaacgaaatcacggcaaagctctgatatcgaaagaatactttatcttgcgcgtaagcatctctaa

SEQ ID NO: 457462 - DNA, 978 bp, Serratia marcescens
atgaaaacgccactaccactatttttctcctatccaactgctgagcagttattaaaagcactgagccaaagattaagagaaaaacattcagttgaattatcacggttagaacaactcaaattacctccactagtttcttggagcgttttatctgtagctataggcgttaatccacagttcatcgcttctcttattaaaaataaatcaaaatattatcgtgtttttccaatttcaaaagggaaaggaaaaaagaaaagaattatcgaagcacctagggttggtttaaaaataattcaggcttggattgcacatcatttgagcatcaacgcgcttttagatataagcgatagtgcttatgctttcattcctgggaaaaacggaatatatcaagccgcaaaaaagcattgcaactctaaatgggtattatctattgatttaaaaaatttctttcatactattacccttgataaaatcatattagctttggttgatattggctatcactatgaacaggcatctaagttggctgagatacttactctaaataagaggttgccgcaaggtgcccctagtagccctgtcatttcaaatatggtgtttaaatctacagatgcctgtattaatgagtttatcgtcgggaaaaatatttcttataccagatatgcagatgatttaattttttccggggtaaatgaagattttgacataaattcatttaaagataatattattgctcttctccaatcaaaagactggattatagccgaagacaaattacacatagccaaagcacctaacagattgaaggtgcatggatttttagtccatgaacttaaacctcgattaacaaaaggttatcgtaataaaataagagcttacaatcatcttctacatgctggaaaaatagataaaaacgacatagacagaattaaaggccatgtaaattatagcgcttttatcgatttattaaataaatga

SEQ ID NO: 457463 - DNA, 972 bp, Serratia marcescens
atgtctgacagcacaagcattaaacgtgtattaaatcataacaattggcctgctatagatttgttcgattgcgaacgagagctattggcacagatggcaaaacataatattcaacaaattttttcaaccactaaattagaggcaaatgataatgatgaggagtttaatgcagtagttggttatatcctagatggccttgattcattacccagacgaccagatgctgcatttgattgcctttatagagcaattgaccgaaaccttggccagttttcaaaaccaggttcttcgtatatgcataatttagttgatgagtttttttgtaaacacgataatgaatggacaactattacaaatatactcactgagcatgtgccgcaacaaactgctgattattcagcatcccgtatacttgattgccatatcgatagcaaccccccacatacagataaaatgaaaacgcgagctggacgtagtctgggaagtgatcgctataaagaattttgtgaaaaacatcttgtggaaaatcctcaaataccaggtggattttttgatcttgagtatcgccaaagaaggaatgcagggcgattaatgcgtcatttattaagacgaacaactcccttaacccccaaaaaaggtgttgtcggttgtacatcaaccgtgctagatctttctaatccagctaatttgctttcaccgaaggaaaaactcaggtcacttctggaaatactaatttctacgtatcgacatgagcgttttcatgggcagacattcactccatttagaagtagcaaggcatctttgaaaacatacgctcatgcatattatacacttatggtaacttatatcatcattttaggtatgttgcattatttgggtaaaggtggccttgccattacatcaataatagatacagctagaaaaaacatggataatcttagaacattttttggggatgctttagaacagtaa

SEQ ID NO: 457464 - DNA, 276 bp, Serratia marcescens
atgcgattagccagccgttttggtcgggtgaaccagattcgccgtgaccgtcccttaacccgcgaagaactgatgcagcatgtccccagcatcttcggggaagacaagcacgactccagaagcgaaaagtacactacatacccaccattaccctgctggagaaccttaaacgtgaagggttccagccattctttgcctgtcagtcacgagtgcgcgaccagagccgacaggaacatacaaagcatatgctgcgtctgcgtcgtgccggtcagataa

SEQ ID NO: 457465 - DNA, 1392 bp, Serratia marcescens
atgtatgaagtagttgatttttctgcacaggaaatagaagtattgttaaatacacctgaagatcatttcaatgattttaaaagtaagcaaatagcgccaagtaaactacaagaaacttttgtggcatttgccaatgcggatggtggtaatatctatgtcggaatagaggatgttgcttcagatagagagcgtttgtccggattcagtgaaccagaagaggctaatgctataattgcaattcttttggaaaatacaaatccggcagttgagaatgttgaggttgaatatattaagacaccttcaaatggtttgattttacatattgacgtcccaaaaagtccaaaggtacattacactgcctctggagattgccatatcagggctaatgcacaaaagataaggattagaggtgagagaattactcagctttcgtattctaaaggtgctgagccttatgaaaaaaaagttgttgatatggtggaagtaaaagatattttggatagcgaatactatattgattatcgagagagaataggaacttcgcaatcacctgaaatttttttaaagaaacagagattattaacaaaaaaagacgatgattttttccctaacgtcggctgtgtcttactctttgatgaagagccacaaggtagcttagatactcggtgtgctgtaaaagtatatcgtttgagaactacagaaactgagtataagcgtgaacaattgcaagaagaaccagtgacaatagatggtccattggaaatggttattttaaagaccattgataaagttaaggaatatgtcgatggcgcatcatttaaagatggcgataatctagtaaaacttagttatccagctgaagctttaaaagaaatattagtaaatgcagttattcatagagattacagtcaaaaagatgatgtacatgtaaaagtatatgataatcgtattgaggttcaaagcccaggaagattgcctggctatatgactatagcaaacatatatgaagaacgattttctcgtaatccaaacttagttcgtctgttacacaaacttcccaaccctgttaaccatgatattggtgaagggcttgacacggctaagaatgagttgcggaaagcaggtctggtagcgccggagtttgaagaacgtggtaacaattttgttgtaataattaaacaccaaactatagcctctatagaagatgttataattaattattttttagaaaatcctacaggccaacttacaaataaacttgtaaggcagttgagtggtgaggatgatcttcaaaaagttaagaaagcattgcaaaagctgagagaggaaggacatatcaaaccgctagatcctaatgctaatgcattcagattcaaatatatcaaggcataa

SEQ ID NO: 457466 - DNA, 792 bp, Serratia marcescens
atgctatctgaaatagagatcagtgatgaagttcagcaaggcaacatttttgatccattaacggtattaaatggaacatttaaagttcaatctgcaagcattgatctatctgtaaaaacaatacatataccagactgtcaagacaataaaaaaacacgtaacaaccatattctgatgccaggggaaactgtaatattagagttaaacgaaaaattccaacttgccaaaaatttagctggcgtaatatttccaagaaacacattatccaaaaatggaattattatgaccaatccaggacatattgaccctggatataacggaataatttcaatataccttgtgaatatgtcaaaagaaccattctcattgacacaaaactctgcagtagcccgaatgttagtgtttaaaacaataatactgactaaaggttatcaaggaaaaatcgttaataaattggataatgatcaactatctagaatggggaaggattttgcaggacttgataaacgccttccgaaagaaatcaataaaatcattgcaagaaaaactggctttataatcgcgatagcagccttaatgctaacattgataaccctagcaattcctttattacttcaaatagtatccagtaacgtcagcagtacaaaagatcttgaattaacaataaaagttcaacaaaatgagataaatagcctaaagagcaccgttgaattactaaaaaattctaaatcgaacgaaccagtagttgatgctaaagtaagtacccaaaaagctacacgggagtcaaaatga

SEQ ID NO: 457467 - DNA, 768 bp, Serratia marcescens
atgataaaaatatctgatttatcagtgaaatgcatatcacacccttcatttgaaagtgatgtttttgattgttttttgaacgcatcatcattgcaatgggttcgcaaagggcaggcgaccgaagcggagcttttggtagaggccgctggcaggctatgttatatgtctttcggagaggataagcagtctccacggactacaagtcaatatatcaacaatttaattattcaaggacatgaaagtgtcttagaacatttgaattggacctttctaatgactggggtatctcgtgcatttacacaccagctagtccggcatagagttggtttttcatatagtcagctatcccaacagtatcatgatgaatccgatgctgaattcgtagcccctatagaagtaaaaaatgatcctgaattgtttcagtcatggtgtcaacatattgaaagcagcctggctttctataaacaatcattaaaaaaaatccatgaaaaccaatcatatgagaacaaaaaagaaaaaatgcgagcattaagaagctcctctcgttctatattgcctaatgcaaccgagacaaaaataatcgtcacagcaaatgctcgcgcaattcgacacttcttcgaaatgagaggagcaatacagggtgattatgaaatgagaacagtttcagaacaactttacgatattgtaactcaagacgcccctgccttgttccaagatttcgaaaaggtcaatggaggaacggcgcacgttaagataataaaacaataa

SEQ ID NO: 457468 - DNA, 5841 bp, Serratia marcescens
atgttagatcccattggcggttttcgccgcattcaggacttcttcatttcatatatagaaaccaacttccgaattgccgatccttccgtcgcggaatcaagacgcaatctgctgaacagcagcggggaatttgccgcagagccatacattgaacctgttttacggtatgagtcttctgataaaacgctagaagctctggccgagatggacggtgggccgctgaatcgcttgtctcataaaggccgtaaggcgttcgctgaattagcgttatccggtctattcgattcgatacctggtgatgaggtctggccgcgtcgttcggtccatgcgccatatagccaccagattcaaatgctggagcgaggtatttccccaggttgccctggtattgttacatcgggaacaggttcgggaaaaacggaaagttttatgttgcctatactggcagcactatcgaatgaggctgtcagttgggccgcaccatgcgacggttatctgcaaaaccgatggtggaatggcgcagaaaagaactggatttctcgtcgcgaaggagaaaaacgtccggcggcggtcagggcgctggtgctctatccaatgaacgctctggttgaagatcaaatggcgcgtttgcgtaaaacactggattctgattacgcacgaaaggttatggaggatcgcttcaccggaaatcggatcttcttcgggcaatataccagtgccacgccggttaccggctacgccagccatcctcgtctttccagcgccagttcagaaaaaagccgccgcgtccgcaatcttgaaaaattacgtaaggcgttgaagcgaattgatagcgatcagcaggctgcgcgtgcattcgacgaaaaagaaaatccttcggataagacccggtatatattcccttctacagacggcggggagatggtttctcgctgggatatgcaggcaaccccgcctgatgttctcgtcaccaacgcctcaatgctgggagcaatgctttctcgcgaagtcgaagacggtatttttgatgctacgcgcgactggctaatgaagaatgacgacgcgtatttctatctggtattcgacgaattgcacttaatgcgcggttccgctggcacggaaacagcgatgttgattaagtcgttgattatcaggctcgggttggacaacccgaaacaccgctacaaattgcgtttactggcgtcttccgcatcgctgccgatggatggcgcagatggcgagcaatcacgaaaataccttcgggatctatttgcgcccttcggcacttgccgcgatgctctggatcccggcagcgttaagccggatttctggcgtaattgcgtcattcagggaaaaccatatataccatcaaaacctgaaggaaaaatcatcgttcggcctttcgccgcattaatgcgggttgcccttgaggggcagggaaatgtcgttcgtaatctaaacatgacggacgcgcttaagcaggctttgtctaatgtctttctggctctgggcttgaaagcgcaaaatggcatgcaaggcattaaacaagcagcggaaaaagcagctgcgctgctgaccaatgcttgtatagaagaaggcagcgagttgccgcgagcgatgccgccggagctaatcattgataagatttttcttaaggaagacacggataatcgagatgaattggaattagcattacgcgggttaatgctgatacgcgcgttgccggaatccgggatagattgcgagaaacccgccaatgtcacaccagcttttcgcgttcatacattcgtcagaaatattgaaggcttcttcgcctccgtatcgccgggagagaaaaaggcgaaattcgccgatttttgcctggagcgaggcctgtcgcatgcgccatcaacaccagacggaaaacgtggtcgccgtttgttcgaaatgctgtattgtgaagcctgcggtgacttgctgctcggcggtcagaagggacagaatgaaggcttgacggtagaactgctgccatcagcgaccaatctggaaaatcttccggaacgccccggtgctgaatattacgatgatatgacgctggatgagtttgcggttttctggcctgtcgatatagtggctgaaaatcccgcaggcagcgaaaaaggttgggatgtatgggaaaaagcggagcttaatcctatcaccggaattgtgactgtcgggcaagacgcatcggcgacgaatgccgatttagttcgagggtatctctatttccagaaaccgaccccgagcaaaaaaggtgaaccagcaaaaaaaccttccgcgcagcctttttgttgcccgaactgcggtatcgattattccagtcgaccagcaagcaaccgttccagaacccccattcgtgcatttcgtacaggtgtgactaagtcatcccagcttgtggcaacagagttatttgaattgctgcatgcgatcggtgcagaagccaagagtattgttttttcagatagccgacaggatgcggcatcgatggcgctggaaatcgaacgattgcatctacgcgatctacgcagggaaattttggtcacagccgccagagagatgatcagcgaggctgaagacgagtatatttctgaagacagtattgatgaaaaaatggatttagctctacaagttaaagacatgaatgagtatgtacgattacatgaacttaaacaaaaccaagcgggcattgctgacctatgtaagtacaggcgggtaaaaatcgataaattgctggaaccagaaggcgattccatcggaaaattatcctccgaactggctgggttgggaatatcgccttacaaatatcgcccaagcgctgatggggatggtagcgacatctggtacaccaattttataaaagaaaaaaatgtcgttaaataccatgaaacgctttcttcatctgttcgattggatctgaaaaggaagatatttgatactcagtatgaattaattgatgacgtcatttttgccaataccttcttcgcattggaggagacgggattagcgtatccatgcatttcagatatagaggatacgaccgagcttgatgcttggttacgggtatttgctggcgtttatcgtgttaaagaaaataaatattttgatcccgaaaatcctgctgaatggaatgaagggaaagatgtgaccaaagagaaagtaaagcgtgctgccagagctttatttggcgagagcaattatctggataatttaacgcaagtcttaaatcagtttgctacccgagggcattcagctggtttatttaatatcggtaaattatatctcaaagtagccaaaccaggtgatccctattggcaatgcagcaactgcgagcggatccacttacatttaggatttaagcgttgtacccgttgcacgaaacctcttgataccaaatccaaaggcgtcgttgaaacgttatgggaagacaattttcttggcaaacgtatagtgcgtggtgagcgggacggcgttaaacgcttccggttgaacgtcgaagagttgacgggacaaacggatgatttttcggatagattacgaaaattcaaggggattttcgttgatgagatgagcgagcttgaaaagctggatgctgaaatcgatatgcttgccgtcaccacgacgatggaagtcgggattgatattggttcgcttcagtcaatatatcaggccaacatgccgccccagcgatttaattatcaacaacgtgtcggtcgtgcaggacgacgcggccaggcattttcttttgtgatcacattttgccgcggacgtactcacgatgcttattattttgctcatcctcatgcgatcactggagatccgccgcctccgcctttcttggctgtcgatcacgatgctattcccaaaagacttttgcggaaaatctggcttaagagcgcgtttaactatttgcgcgaagaatgtcacaaaaacaaaacgactttccctggcgataagctcgttcctcctgatgttcatggcgaatatgtttcaacgcatgattactatcatgatgataaagcgaactgggccaaactattgtatcgcgcgctagaggcaaatcaggacatacgggagcgctttattgatgcagcaacatttgatcccgatcagcgtcgacgcctttattccgaaattaacgccgaaaaaataattgaagaaatcggaaaactaggaccttccgcgcctgacgacaatacgggacttgctcgctttctggccgagcgaggtctgttgccgatgtatggaatgccgactcgggtacgtaacctttatctggggttgcgcaaaacaaaaggaccaaatggtcagactgaatacgaatggtcaacaatggatcgcgatcttgatcttgcggtttttgagtatgctcctggttcggtactaattaaggataaaaaaaagcatcaggttatcggtttcaccggcaattaccgagaacctcaacttcgcgacaatcgagtttcagatctctcaacggcatgttcatgggatgaatcgagtcactacgttgcaatttgtcagtcatgcggttccgcaaaacttgaacaaaatgagccagttaaaatgattgattgcgaggattgcgatacgcctataagaccagatgaattcgagctttatgttacgcctgccgctttccgtacggatttcgagccaaaagatgacatggacagcttcactcgtatgtcgttaaaaactacggcaaccgtattgcataagggtatcccagaagattgtggtccttttaaagtgcggcgcggcggcgttactattttgcgtctgaatgatgggccgattaacggtgagaaggaaggcgaacgttttactgttaatttagcgacggaccaaaaggtgccgattcctttagctacctactactcgccaattaaagggagtcaagcgattgattcaaactgggccggattacgcaataactttagatggcggtgtactggcgaaaagaaaaagtttgggcttgtatcaagcaaagagactgagtcgctccacctggaattaatgcatttcgatgctcgccttaatctgaatatgatcgccagatacggcaaatacatgaatttgcctacgcgcgcggcagctatcagcgcgacccagatattgacgcataaggctgcgctctatctagatgtttcacctgatgaatttgaaatgcttgaaccccgactgcatcgtggtaaacctatcttgcaaatcgccgacgcgttgatcaatggttcagggttatgcagacgacttgccgagccagccattgctggcggtccgcctttgatcgttacattattgcatgagattctggaagataagttcgtctggccaatggtagactttctgaagaaggatcaccctgctcaatgtcaaacggcctgttacaattgtatacagcgctacggtaaccgccggtatcacggtttactggattggcgtttaggaatggcctatttacgggctatggttatgcccgagttcgcatgtggcctgaacgtcgccgattggaatcagccagagatggaaggatggctaaaaagagcgtttgagttagcggaagacgtcgaagctctacgaccagcaacgatcaaattgtcaaaagagtattcgttgcctgttcttatcgaaatacaggatgggaaagagcttcggagagcggctgtaacgcatcctttatggcaatggagagatggcaaacgtgatgcactgattgactcttttggattggctgatcgggagtcgccactactattcattgatacgtttgagctggaaagacgaccgctgcgtgcgctggcgaatcttaaacagagttag

SEQ ID NO: 457469 - DNA, 627 bp, Serratia marcescens
gtgataggtgaactggcaacacgaggtgagatttcgtgggcctatgggaagctgtatgtagtcgacccagatcagtactgggtccagggggtgatcaaggcggtatcacactatctggacacgacttatcgatggcgacgggggaccaaaacattccctgcagatgggactggggtcatgatcatagcctcggacagattgttcaaaatacaacatggtagccgcttgggaaacgtactgtggcttcctgtccgggataaaggcagggatgggactacacaacagccccccggtgggtatgatacccacacggtttatcggtgcgaccgtgtggataccgttattgaaaagctggtgatagcgtctcggggccgtgaacatgggatagaggggcgagaaatataccgaccaccccaacacactgcgtttacctcacaggaacagcgtgtcattcgcctaattggctgtggcttcgttcctaaggcgatcgcccgtgctttgggcatccatccgaaaaccgtcagcgcccataaatgcaacgtgatgcgtaaattgggcctgcgcaggactcaggatttatatcgctggctgcagcttagcggcttagtggaactaacgagtaaataa

SEQ ID NO: 457470 - DNA, 837 bp, Serratia marcescens
atgagactaataatcgccctcgctttattcgtgtacattccagtggggggcgccattccatggcctatcctgctggaccctaaaatcgacaggtgctccgggcctgtgtcgaatccatgctcaagttcggtttcgtacacagtagctggggtaatcatgactgatgtgctcccagtggggccctccaaccccggtaatacaggtaagcgtgtatacccggttggggttcattgccagacagggaacgcgctcgttgggaaattgccatttggaacgtgcacttggcgtaacgatcttgctcaccggccgcagctattgggcaagtgcgaactcagggatccgaactcatgggtgctcacatctgattccgactgctctgtgcagtcggcctggagtgggcactcgggggcgggtcctggaggcgaatgcgtagttttcacgaatagcaccagtgtggtggggggaggggtcgtgaatactccatgggggggactcactgcaatgcaagctgctaacagcgggaatcgtttttgttctaaacccctgccaccgaacgtgacgtgcgaactggacctaccgaacattattgaccatggtgagatacgtgcgggtgactcgtccaaacgggtcgatgaggggcagattaattgtggtcttacaccgaaaatcgaagtgctcgtgaacggggatcgggacacagagggggttcggatatccacaaccccgctcatcgtgaatccaacaaccgttcggatcaccaccgagatcaccgtgagtaatagtgctgtggcgggagaacacagcgccacctacgtgttcgtagcgagcccgtactag

SEQ ID NO: 457471 - DNA, 2133 bp, Serratia marcescens
atgcttacacctgaagacaccaatcattttttcaatgcagttgattcattaaaacgttttaaaagggccgaaataaaagatgcaaaggaaaagcctttaattgataaactttatactgatctattgcctaatgaacatgtatttaaaatgtgcttcagtgataacacaacatttttaataggtcgaaaaggcacaggaaaatcaacaataatattaaaacttgaaagtgaatataggaaaaaacagaattacctcccatgctacattgataccaagacagtatttgaaagtattaaaggagagtatcagaaaatagattatctgaaaggtaaaataccggaagagcatcttgagaactaccttatagagcgcgcatttataagaaacatcctgaagtcaattggcgatgaaataaacaaaagagcagagaatttttttgctaaacttgctgggattatgaacgcaagtaaaaaatctcaagttaaacaaaaaattaaaaacttactaataaaaatagaaaacaatcaatatataaaagaaattgaattacccgtaatttcagaggtaaatactaagctatcaaaaaacgaggagaatgaaacagggaaagggaggaacacctcggcaactttaagcgctagtgtagacttagtgagccctaaattaagtggtgaattaggtggaacatcgagtgaatcatctaaaaataaaataagcgatggttgggaaaaaagcttctctactacactaatcaaagtatttcaaataacgacaataatcgaagagttgcgtgaaatcctcaatgaacttgacgttaaaaagcttgttatatttcttgatgacttttcagaggttgaagaaaaaacaataaaaaattttgttgatgtaattcttgcaccactaaataattgggccaatgattttatttgctttaaagttgcagcttatccaaataggatatattttggagcaatcgatgttggtaaaattgataccgttgacctggatttttacaacctttattctaattatgataagtctacgatggaatcactatctatagatttcacaaaaagacttataaatcagagaataagccattactgttcaaaaggatttgaagattactttgatacatcgagcacaacgatcgatgattattttgatcttatatttaaaacatcgatgaatgttccacgaataattggctatatcttgttttattgtcatcaaactcacatatcaataggaagaaaaatcaataaggtagccatagagaatgctgcagaaaactattacaataaagtagtatctaaattctttgatatagccacacatagtctgatgtcatttagtgaaaaagcatcggagttgcaacagcgagaaatccttaatttatttgtatcaaagctaaaagcagttaagaagcagattgtatctggggatttctcagggctaatttacaataaagatcgaagcaatccattttgtagccatttctatttccaacaaaacttggagcacttcgtccggactttagaattaaacttctttattacaaaatataacgagatggtaaataaagatgggcacaaagtatctatttacggaattaactatggcctatctaaaagcgagaacttacgctggggccgacctgatggcacgcaatacagaacttactttatcgaaaggccatttgattttaataaggagattgaagatttccttaaagaatcaaaaagaattgtatgcttgaacccagcctgcatgaaatcctatccttatgaagatttgaaatttttaacttataacaagatgaaatgtatcgaatgtcactcgcctgtagaagttcaagcattttcagaaacaattagcgaagagatatctaagatagataatgctaaattattacccaaacttgaacttatgattttacatgagttacacaagtcaggagataagatacttgcaagagatatagctgaggaattggatgtgtcatctcagcttatagcaaaaagatcagaaaaaatggatagaaaagacttggtttcacgagataaaactggaagtttaataaaatactctattacagaaaaagctatagagggttacttctatgatgattaa

SEQ ID NO: 457472 - DNA, 966 bp, Serratia marcescens
atgattaaacgcttgtgttatcgcggcatgatattgcctttcttgttttttttcatgatgaaagatgcgagcgcttttacatgtacaacctccgaaggacagaaaattccgcccggggggtcaatggagcctgttgaggtgaaagtgagtatcgggcctaaccttaatgatggaaaaaacgaaataagcagcttgactcaggttacttgtaagaatgattatgctccgtggacggactatttagaattctctagtgctattataatcccagccgtactttatagattggtaggaggggtgacgctcaatggggtcgattatgacttgactagcccaacggtcaataaacgtgtgctatcagttaccggcggaaaaagtgctacagttcctatggagttatatttaaggatgaataagcggcctagcaaggactttttgattaagaaagacgagatggttgccatgctcacttttacacagacgaacgaccaggctggctgtcctcaatgcggtccgtacatttggaagctaattgctaataatgacgcttattttagtaccactacttgtactatcaatggcgctaaacaaattaatgttgatttcggacggataagtcaggataactttacggagagcgtcaataatgcagtgattaaaaaggatcaagagcttacatattggtgtgaggatgccactgcgactcaagatatccttattagattcgttggtggggtgagtggattttcttccgaagccataaggacgacaaataacgatattggtgtggccatgctgtacaaaggtaaagtcgttaagcctaatgagaccttcagaacgcagataagaaatggtgtgggccgtgatactttgtcttttgttccgattaaaagtaaaaaattagcaggtgatatatccactggtccgttttcaggttcggcaacgttaatatttagcgtgccttaa

SEQ ID NO: 457473 - DNA, 510 bp, Serratia marcescens
atgaacctgagcaggagagtaataagtgctgcatacttgagtttccctctcgccatgttgttgtcagcgtggatggttcacgctgcagcccagggagagatggttttctatggtacgctgaacaatccccctgtttgtactattaacaacgggcaaaagatagacgttgattttggtgaaaagttgggggttgataagattgatggcaataattatctgcaaaagattaattaccaggtaagttgtgagcccggagtggcgggaatggcgctggggctgacgctttccggacccgtgagtggctttgataaggctgcgttgcaaactaacatgcccgatttggctattcgtattctgaataatggccagccattagagttgaataagcgcatcaatattgatttctcagaattgccagaattggaagctgtgccggtaaaaaaaattggctctaatttgacatccggtgcgttcagcgtgacgggaacattgctcgctgattatctctaa

SEQ ID NO: 457474 - DNA, 495 bp, Serratia marcescens
atgggaaggcggaaaagagtgaagcttgctgtgctggggatgctggcactgtctgttatattcatcaacgccagggctgataccgatatttatttcagcgggaccgttactgcgccgatgccctgtacgattaacggtaagcagaagatagaaaccaatttcggcagcgatatgataaccactcaggtggacggttctcgttatttaaaaacggttaattataatctggtgtgtaacgaccaaagttcaaatgcgctcagattgaaagtgcaagggaatgcggctggctttaatcagaatgcgttacaaactgatatcagtgatttagggatagagttacgtgtcggtgacaagccgctggcaattaacacctggttcaacttcaactattctaataagccagtattacaggctgttccggtgaaacgcgcgtacagcaatttacccgccggcacgttttccgtgaatgcgaccttgctggtggactaccaatag

SEQ ID NO: 457475 - DNA, 660 bp, Serratia marcescens
atggcggggaaaacgacgataacgggcgacatgcggcaactgcgtgccgagctgcgctactacgtggcgttgggcgggctggcgctgatggcgccgctcagcctgaccaccctgttgtggatgctgccggcggcgcaggcggtggataactgggaggtagaaggtgctagcggcgcgctctacatcagcggcgcgctgactgagagtgcctgccggttggagatggacagcgcccggcaggatatcgtactgggggatattggtaccggcaggctgacacagctggggaaccgggggacgccggtgaagtttgaactacgactgcgcgactgcctgcgaggcccggcggcggtaagggacgagcggaccggtgccttgagttgggcgcttgatcagccggcggtgcgggtcggcttcacggcagtcgccgacgcggagaacccacagctggcgaaagtggtaggggcgtcggggtttggcctgcggctgttggactctctgggacgggatgtgcgtttgggaagccgcggcgcgccgttgtggatagctccaccgggcacggatgttttaacctacaccatcgctactgaacgcacatcggccccattacaatcaggcgcttatcaagcagtagtggatttcaatctcagttacgactaa

SEQ ID NO: 457476 - DNA, 534 bp, Serratia marcescens
atgaaaggtaagctcttgggctgcgtgctggtgctggtcaccggactaggtgttcaactgaaggcgatggcggtggacaatatggtcttccacggcgcgctggtagcggaaccctgcacgctgaagccgggcgatgaggacgttaagctggacttcggcgcggtgattgacaaatacctgtatgccaatggtcgtacaccggcgaaagccttcagcctgacgttgcaggattgcgacctcagcttaggtaaaacggtgaaggtcacctttagcgggaccggcagcgtggccttgcccgagctgttggcaccggacagcggcagccaggcaacgggcattgcactgggccttgagacggcggcgggccaaccggtggcattgaataagcccagccagagcttctcattggccagtggcggcaacagcctggcgctgcaggtgtatgtgcagggggagccaacggcgcttgcaaaaaagagtatcggtctcggtgagttttccgccgtcgctacttttagcctggcctacgaataa

SEQ ID NO: 457477 - DNA, 543 bp, Serratia marcescens
atggaatgtcggattaaacgtgtgaaggcgatttgcctattgccgtggctaattggctttgcggaacaggctatttctgccacgcaagggcaggggcgcgtcaatatgcaaggcgccattatcgacaccgcctgtgcgattgccaccgaaagccgagcacaaattatcgatgcggaaataatgccgatagcggatatcgagcgagaggggaaaggaaaatacgtgccctttcgcatcgaattaattaactgcgtgttggagcgccaaaataccgcgttgccggattggaaacattttcaggtgacgttcgacggcaatgccgacggcgagatgtttggcatcgtcggcgatgcctccggtatttcgctggttattagcgatgaggcgggaaatattgctttgcccggcgtgccgttgccggcggtcgctattcagccgggcagcatgacgctgaattatcgcctgacgctgaccgccaatcagcagccgctaaaggccggcagttatttttcatcagtgagattcaaaatggattactactga

SEQ ID NO: 457478 - DNA, 528 bp, Serratia marcescens
atgaaactgaacaaaatcatgctggctgcgaccatggtatttggcgtgtcttctctggctaacgcggccgatcagggccacggtaaagtgacctttagcggttctattatcgatgcgccttgctctattgctcctgaatctgaggatcaaacggtaaaactgggtgctatctctaacgtggcgctgaaaggcggcgggaaatcacctgcacgtagcttcgatatccagctggaaaactgccaactgtcgactaaaaaaacggtatctctgactttcaccggttctacctcagcagtagacagcaagttgttggcaatctccggcacagctaaaggtgctggtattgctatcaccgacgagaatggcacccaaattgaactgggtaaagcctcgacgccacgtaccctgctggacggaaataatactctgagcttcagtgcctatctgcagggtgacaaagcctcaggcgcaacaatcgtcccgggtgaattccagtctgtagccgactttaccctggcttaccagtaa

SEQ ID NO: 457479 - DNA, 747 bp, Serratia marcescens
atgattttcaatataaataacaacgtcctctttaatgaggaggaaggtacactatcgcagatagaaaatgagagcacccaagttacgctgcttaaacccgccagcagattgctttcgttattcattcaacataataacgttctactcctgcgcgaacggttacttaacgaagtgtgggtcgaacatgggctaaaagcatctaataacaatctgaataattatgtctcgggtttaagaaaatcactggcgcagttcggtgaagaagagttgataattacctacccacgccagggatttaaattttctgccagggtcattaatcttcaggccgaagaggaggaaacagccaagaatgagaaagggattctgaaagcacagctaaaagaaaagaaacatcatccgggagtgtggcgcgcgctgcagcgattaatactgacgctagccgcctgcctggtgcccttcgccgccgtggttttataccagaacagcaaccgtattaacgtttatccgctgggaagctacaaacaatgtcagatatacagcatgaagttgaacagcgtcagcctggcagcgctcaagcatctgattcatcactccgggttgagctgtgaaaaacgtgcagatgtctattactatgacaacatccgtaacgaaggtgccgagggcagtaaagaacaactgacattttgcccgcgagagattaatggcccgtgtattaataaatatatcgataccaataacgattaa

SEQ ID NO: 457480 - DNA, 492 bp, Serratia marcescens
atgaaagccaggatttgtagctggggctggcggtggcgttatgccttggtgagcctgctggcggccgccgcctgtgttgtcgccgggtattttttattcttcaagccgcaaatacccgaatgtcgcgccgtagtgcggataatgaatcaattgcaaggtaagaccacgcagcgggtgatattgatgagcatagtgccggatggtgcgcggagcattaccgtgctgctgaacggcagttattttgatggcgacgttcgctatgtgatcagccgggcagtggcgatggattaccagcgttggggaaataactataccttgctggtcaaagaaaatatcaagaaaccccaggatacggtggtgaaggatgagctgaaccgacggttgccgatggcgggtaagcagatgcatctgcggattgaacggattgatcaacaccactatctgtttattgataaccactcccccctgttcgtctgcgcaaccaactcttga

SEQ ID NO: 457481 - DNA, 825 bp, Serratia marcescens
atgggcgttaaccagtttatcgcgcagggaattatgagatacataattaataataatattaaatatcatgaagatagatcggagctgatctcgctgcatgacgacattccgccgattgtgctgacggccacgctgaaccgcctgctttccgccctggtgcgcaacaataatctggtgctttcccgcgaaacgctgctgacgcaggtgtgggaggcacatggccaggtcgcttccggcaacaacctcaacaacaccatctcgattctgcgcaaagcattctcttcgctcggcgaggaagagattattgccaccctgccgcggcagggtttcatgtttaccgcccgcgagctgaagacggcggacagtttggcggaaagtttgcaaactgtagaggagataccgacaccggcagaaagggagccactgctctccgccgtcgggcagcgcagacgggggaagttcgctgctgttacgctggtctttctggccttgggctgcggcatttgggcctggttgaataccgggtatccccccgtcagcacaatgccggtggggaaaatcggtaactgcgaagttcaatttgtctcttcttatcataaaccggggccgggggatgtcgatttggtgcatctaaaaaagatgctggaacagcgtaatcacatcaactgcagcgagctcggtacgctgttttactacgacagcaggtcggtactgcctaatgtgaccggccgcgtcagaagcgcttatttttattactgcccgcaggcgcaaatggcggcgggtaacgcacaatgtgagaacttccatgaaagccaggatttgtag

SEQ ID NO: 457482 - DNA, 852 bp, Serratia marcescens
gtgatcctgggcgcgttccagttccacaacgtgcacctgatgctgctgtccggcatcggcaagccttacgatccggtgaccggcgaaggcgtggttgggcgcaacttcgcctaccagaacatgaccaccatcaaggcgttcttcgataaagacgtgttcaccaacccgttcatcggcgccggcggcaacggcgtgggcgtggacgacttcaacgccgataacttcgaccacgccaaagaaggcttcgtcggcggttcgccgttctgggtcaaccaggcgggcaccaagccgatctccggcctgccgacgcctccgggcaccccggcctggggcagcaagtggaaagcggcggtggcggatgcctacacccatcacgtttcgatggacgcccacggcgcgcaccagtcgtaccgcaacaactatctggatctcgatcccaactacaagaacgtctttggccagccgctgctgcgcatgacgttcgactggcaggaaaacgacatcaagatggcgcagttcatgtacgacaagatggcgccgatcgccaaggcgatgaacccgaaattgatcgccggcagcccgaagaacgccaacagccacttcgataccaccagctaccagaccacccacatgaacggtggcgcggtgatgggggaagatccgaagaccagcgcggtcaaccgctatctgcagagctgggacgtgcacaacgtgttctcgatcggcgcatcggccttcccacaggggctgggctacaacccgaccggcaccgtggcggcgctggcttactggtctgcccgcgctattcgcgagcagtatctgaaaaacccaggcccattggtgcaggcataa

SEQ ID NO: 457483 - DNA, 630 bp, Serratia marcescens
atggcgattaattctactggtgaaaaaaatcgcgtcgcagggcgtgatttcaatgagaataaaatccagatagataaatttgatggacgtcacactatcaacattgctatcccgactgaaagtgaagaaaggcgacctcttgtaaaagcccaacgtaaagagctcaacagccttgtaacagcaattgctgaggcgggagagggtgaagcattcgtaatctggcagaaagttcacgcagaagttggcgtaggtagcattgatgagatgactgtaaaccaatatcaggccgcaattagtttccttcaggccatacttgataggtgcaaagaaaaagatgccagcagggtcttggtcagcctacttcttcgcaatagtgaagaaaatgaactcagacaaaaattaattcgctactgtcatgtcaattttggcacaggtagattaaatgacctcacccgctcacagcttcaaatggcactatcttggttggatcagcagcaaactagtgacattcggaaaccttctaattcaacagcaatgaaacttgatttcattctactattgaaatcttaccctaaagagtttgcgctaatctttgctgtcggaatcgtgttcggtgcttttgttttttga

SEQ ID NO: 457484 - DNA, 540 bp, Serratia marcescens
atggctacagagcctagcgttagctttttacgagaatgcttttcgtataaccaggacaatggcgtcatcatttggctgccacgaccccaaactcatttctctaccgcgcgagtatgcaaaacatggcacacgagattctgtggtaaagaagcgggcggtttaaatcaaaatggatacattgagataggtattcaaggcggattaatcaaggcgcaccgagttgcttgggcgatgtcatatggcgaataccctaaaggggatatagaccatatcaatggcgtacgaaatgacaatcgactgctaaacctcagggatgttgatcgcaaaaacaactgcagaaactcagcaattcaccgaaacaacaactctggcattagtggtgtttactggcatgtaagagacaatcgctgggtggcatcgataaactttgcaggaacccagaagcatcttggttatttcccgtcattaattgacgcagcttctgcaaggaagtcggcagagattaaatatggttaccatgaaaatcacggcagaagataa

SEQ ID NO: 457485 - DNA, 312 bp, Serratia marcescens
atggttgaaagcaaggatatagctgacctgctgaacaagttgttcaagctggacgctacagcggcggaaaatctcgttaatcaccgcgttgaatgcaatgaagcctttttggcgtctgacgttccttttgtttgctccagaaacggcaatggtgtgatcagtatggggatggttggctttctcaatgcaatggcatcacccaatagcggcagggtggcggctatttacagcgatgataagcggctggaggggttcacagtggttggatgcaaagaatgtgacccataccagtatgaggattatctctcatga

SEQ ID NO: 457486 - DNA, 639 bp, Serratia marcescens
atgcaaatcacgaaagaacaagttaaagcctggcgcgcatgcaccgacggttaccgctggttcctcgaaaaattcccgcagggcggcgcttacgctgctgtgcaccaagccctaaccgaagataaacgcttcgacgatgcgcgctggttggtcggtcagatgtacaaaacgcacctgaacaacgccgagttcatcaaggccgagacttctgccaccgacaagatgatcgccgacctcaccagcatggagcaccctgcggatcaggtcgagggggagagcagctccggctacaacgcccgaatcggcagctccggcgacaacgcccgaatcggcagctccggcaactacgcccaaatcggcagctccggcaactacgcccaaatcggcagctccggcgacaacgcccgaatcggcagctccggctacaacgcccaaatcgatgccatagggaaagacgctgttgttgcagcggccggttatgttctgcgcattgtcctgggggaaggtggctgcgctgctattccctatcatgatggcgatcgcactcgatttgcagttgcttacgttggcgagaacgacattaaagccaacaccccatacaccgtgaatgacaacggcgaatttgtcgaagtcgaataa

SEQ ID NO: 457487 - DNA, 624 bp, Serratia marcescens
atgaaagagcgcccagtgattttcaacggcgagatggttcgcgctattttagacggacgcaagacccagacgcggcgagttatgaaacctcaacctgagccatgctatcgcggcggtcattggtggccaagcaacacgtttaaaacgatgctacacatcgaagagcagatgcagaacggcgcgggtggctggggcgggctggcaggcgatgcctgcccattcggccaggtaggcgatcggctgtgggtgcgggagacgtgggcggaggctggagcaagcgcaccagatttaacgctctatcgctctaattatcccgcacatgttccagcgggttacgagaacgtgccggaagcagaagatattcgctggcgcccatcaatccacatgccgcgctgggccagcagaatcacgctggaaattaccggcgttcgcgtggagaggttgcaggacatcagcgaggctgacgcgatcgctgagggcggcaccaagcatttcaacattgattggttcgggccgctgtgggcatccatctacggcgttgatagctggaacgctaatccatgggtgtgggtgatcgagtttcgtcgggtggtagacagcgctagggaggtggagcgtgggtaa

SEQ ID NO: 457488 - DNA, 606 bp, Serratia marcescens
atggataaattcagcgaacttaaagcggccgcaatggccgcaactccgggtcgaattggtgaccgcatcgacgggtctgggagcatcaaatatgaatgcactggctacgatggttcgttggttctgcgcaccgatcacaaagacatggagtatggatttgtcggtgataatgctgatgccgatgagctgtttttcaggttgtgcgtgccggatgtggttctcaccctgctggcagagttggaagcgaaggatgagcaaaataaattgctgatgcgagaaatagaacacagtaagaagctgcgagtaaacatgcagaacaatgccgactcactcagcgaacgcatcgccgagctggaaacaaagctggaagagtcacgcgagacaactctattggtgcgcgatgagtggcagaaggacaaagagcgcgctgatgccgcagaaaagcggctggctacgccggtgcggttgcctgatgcactcattccggcagtccatgcaagcggggaaccgttcatgcgccatgagccattcggattttatctgaaccgcgacgacgtgattaagaagctgcgcgcagctggcttaaccgtagagggggatgagtag

SEQ ID NO: 457489 - DNA, 234 bp, Serratia marcescens
gtgagcaaatacgaaaatctggacgcggcaattttgcggcggattgatgcggagccaactaagtttgtcgagctgtatagcgggtgtgttcgccgttactgcacgtcaatcaccggggccgagggcaaagatagcgatgaggcattccgtattcttgatcgccgtctgcaagcgctgagaaagaaaggccttatccacagcacaacgcgtggatggattcagggggatgcatga

SEQ ID NO: 457490 - DNA, 225 bp, Serratia marcescens
atggtggcgcttgtctgcgatgatcggttgtttgttaaaccgacgccgggcggcaaagcgtttctgaacgaatattcagaagcgccgccttatccgggcgcaaagccttgttttgtgattccggaagagaagtggagcgaaagcgcctggctttcccaattaatcgcgctgacttatgctcagctgcctgcggcgaagaaaaaggcctcgaagaaacccacttaa

SEQ ID NO: 457491 - DNA, 537 bp, Serratia marcescens
atgcggcggaaggcagtcagtcaacaaaccgaaatgagccggccccggttctgtgcgcgctggcggtgcagcgcgcaacggtcccctggggaccgctccgcagataggcactcacgtcggcgttcccgtcctcggttgttgacggtatgcgtgctgcaccgcacgtcgcgctgccgttcgacacgatccttcgccgcgcagccgtccccaggggaccgttccgttgagcgccatggaggtctgcttcatggccttgccaaggcgctttgcccaggtttcgcgcagcgggtcgcgccgtcgcccggcgcttcaccgcacagccgtcccctggggaccgttctgttgaccgccatagacgtctacttcacggctttgccaagccctgcgctcaggtcttgcgcagcaggtcgcgcaggcgctcgatgtgctgccgggccacctcgggcggcacgacgttgcgcggcggctcggatggtggcgctcgcgccgccgatggtgttggcggtgccgggctggtctgcttggcccacgcattga

SEQ ID NO: 457492 - DNA, 453 bp, Serratia marcescens
atgagcacgcatttttccggcgaaggcaacatcggctcgccccccgagtaccgggagttccccaacggcaacgacgaaccgcggcgcttgctgcggctgaacgtctatttcgacaaccccgttcccaccaagggcggcgactatgaggatcgcggcggcttctgggcgccggtggaaatctggcaccgcgacgccgcgcattggaaggacctctaccagaagggcatgcgcgtgctggtcgtcggccgcatggagcgcgaaccctggaccgacaacgaggagcagccgcgcgagacctggcagatcaacgcgcgcagcgtcggcatcctgccgttccgcatcgagtccgtcgtcctcagccccaaaccgcaggagaccgcgcaggacgcgcagcccaagccccagcccgcccaggaaccggctgcgccgaaggagaccaagagcaggaagtga

SEQ ID NO: 457493 - DNA, 1611 bp, Serratia marcescens
atgcacccgaatctttgcgcaccgccgcgcaacacgccgctgctctacggcagcgtctgcagcggcatcgaggccgtgagcctcgcctggcaaccgctcgacctcgaagccgcgtggttcgccgagatcgagccgttcccgagcgccgtgctcgcccaccgttacccccgcgtgcctaacctgggcgacatgaccgcgatcgcccgccaggtccgcgccggcaccgtgccagcgcccgacatcctggtcggcggcacgccgtgccagtcgttcagcgtggccggcgcgcgccaggggctgaacgacccacgtggtgccttgacccttgcctatgtggagcttgcaaatgccatcgaccaaacccgccaccaagaccgccgcccggcggcaacgctcgtctgggaaaacgtccccggcgtcctcagcgaccgcagcaacgccttcgggcacttcctgggagcactggctggagaaagccgtgcgctcgaaccgccagggcaaaaatgggcgcacgcaggttgtgtgtctggaccccggcgccgcatcgcctggcgcgtgctcgatgctcaatatttcggcgtcgcccaacggcgccgtcgcgtgtttcttgtggcaagtggtggaggtggcgtcgatcccgccgaggtactttttgagcgcgacggcgtgcgcggggattcttcgccgggcttcgtgccgtggcaagacgctgccggcgctgctggatcgggcgctgcggcagcaggcgggtactcgggatatgcaggactgaagcagccctacggcaaggccacggtgacgttcggattcggcgggggcaacaccgcaggccccattgacgtcgcggcctgcctgaccgcggcacctggcccgaagaacgacttcgaggtcgagaccttcgtggcgcagtccatcgcgggcagcatcagccacacgctcagcaccgccaacggcggcaagggctgcagcgaggacggcaccggcaagggtgtgccgatcatcgccttcaccgcccagggctgcggagccgatgcaacgatggcctgggcaccgacgctgcgcgcgggcgggcatcgcctcagccacgcgaatgccggcgtcgtgccggccatcgcgttcgcgcagaactcgcgcggcgagctgcggctggaatccggccacggccagcttgccgggacgctctccacgggtggcggcaagccgggccagggccggccgatggtgatcggcgtggcgctgcgcggtcgcaccgaaggcctggccgctgaactgggcgatggcgtctcgaccgcgctgcgcaccagcagcggcggtgccgacaagcaccatgtgctggcaccggacttcgaggcacatttccgctacgactggaacgaccccggcccgggcgactggtcgcagtggcgggtacgtcggctgatgcctgtggagtgcgagcggctgcaaggcatgcccgacgactacacgctggtgccgtaccgcggcaagcccgccgccgacgcgccccgctacaaggcgatcggcaactccatggccgtgccgtgtgtcgcgtggctgggccagcggctgttgcagtgcccgcacaagacgggatcgagcgcttcggattga

SEQ ID NO: 457494 - DNA, 558 bp, Serratia marcescens
atggacaccatcacccgacaagaccgcatcacgctcaagaacctcaaggtcgcggatttcgcgagcgaggaaacgctgtgcttcaccgccaccgtcatgttcgacggcaggcccatcgccgaagcccgcaatgacggacacggcggctcgacgttcgtgcgcccgctgcaaggccaggccgcgctgctggcccaggccgaggaattcgccaagagcctgccgccggcatcgctcgacgtcgaacgcgaggacgacgagccgcttctcatcgacatgacgctcgacttcctcgtggaccagttggccgatgccatgcatgcggagcgcaagctgcgcaccgcgttcaaccgcgacatcggcaacaaggtgctgttcatcaaggacggccggctgctgttcctcaagggcatcaagctcaaggccattgccgaccgcgcggcgtatttcgcaaagctgcgcagccgacaggaccagcccatcatcatcctggccgagctgccagcggacgaggcattcgccatctggaagcagcatgtcctgggtgacaagccccgctga

SEQ ID NO: 457495 - DNA, 723 bp, Serratia marcescens
gtgtctgaatctcgtctcgacctgccgaacatcgacacggcgctgttccagcaaccggacaccgaacatctgttcgcgccggcacgggccacgcacgcgccgcgcttcctgctgctctatggttcgctgcgcgaacgctcgttcagccgcctcgcagccgaagaagccgcacgcatcttgcgggcgctgggcggcgagacccgattgttcaatccgtccgggctgcctctggtggacgatgcgccggccgatcacccgaaggtcaaggaactgcacgaactggtgcaatgggccgagggcatggtgtggagttcgccggagcgccacggcgcgatgaccggcctgatgaagacccaaatcgactggattccgctgtcggtcggcgcggtgcgcccgacccagggcaagacgctggcggtgatgcaggtatcgggcggctcgcagtcgttcaacgccgtcaaccagatgcgcgtgctgggccgctggatgcggatgctgaccatcccgaaccagtcctcggtcgccaaggcgtaccaggagttcgacgaggccggacgcatgaagccctcggcctactacgaccgcgtggtggacgtgatggaagaactgatgaagttcacgctgctcacgcgcgacgtggcgccgtatctggtggatcgttacagcgagcgcaaggaaagcgctgaatcactgtccaggcgtgtacggcaaggtgcaatttga

SEQ ID NO: 457496 - DNA, 423 bp, Serratia marcescens
atgagcaccatcacgatctaccacaacccagcctgcggcacctcgcgcaacgtgctgggcctgatccgcaacagcggcgaggaaccgaccatcatcgagtacctgaaaacgccgcccgaccgcgacacgctccaggcgctgatcgcggcgatgggcgtgccggtgcgagacgtgctgcgcgagaaaggcacgccctatgccgacctcgacctgggcaacccgaagtggagcgacgacgacctgatcggcttcatgctccagcatcccatcctcatcaaccggcctatcgtggtcacgccgctaggcacgcgcctgtgccggccttcggaagccgtgctcgacctgctgccgcagccgcagcgcggcgcgttcaacaaggaagacggcgagccggtggtcgatcaggacggccgccgtgtctga

SEQ ID NO: 457497 - DNA, 531 bp, Serratia marcescens
atgcgaggtttctccatccaagacctgctgctgaccatgaccgataccacttacaacgccttgttcatctgtacgggcaattcggcccgctccatcctcgccgaaggcatcctcaacgacatgggccaagggcggtttcacgcctggtcggcaggtagccatccgaaaggcgaagttcacccgctggcactcgccacgctggagcggctgcaccttccgacaacgggctaccgcagcaagagctgggacgagttcgtgaagcccgatgcgccggtgttcgatttcatcttcaccgtctgcgacaacgcagccggcgaggcgtgtccgctgtggccgggcaagccggtgtcggcgcattggggcgtgcctgacccggcagccgtggaaggcaccctggaacgacaaagcaaggcgttcttcgataccgccatgacgctgcgccgacgtatcgagttgttcctgtcgcttccgatcaagagtctcgatgccatgtcgttgcagcgtgaactgcgcgacatcggccgccagtga

SEQ ID NO: 457498 - DNA, 321 bp, Serratia marcescens
atgaaagaggatcaagccatttccgccttaaacgccctggctcacacccagcgcctgcgcgtgttccgcgccttggtcgttgctggcccgggcggactgacgccgagcacgctagctgaccagctcgacgtggcccgcaacaccttgtccttccacttgaaggaactggcccatgctggcctcgtcagcatcgagcagcagggccgcaacctgatttatcgcgccgagtacggccgcatggacggtctgatcggttacctgaccgagcattgctgccaaggtggcgtatgcgaggtttctccatccaagacctgctgctga

SEQ ID NO: 457499 - DNA, 567 bp, Serratia marcescens; identical to SEQ ID NO: 340572

SEQ ID NO: 457500 - DNA, 645 bp, Serratia marcescens
atgaacgcggcacagccgctccggcgcccgaccgccgccgtggtgttgcaaagcctgctctggctttggctgctgggtctcagtgtcttcgcgatcctgggccaccagacgatgaccgatcaggccgaccagcagcagctcgatgtccggttgcagcgcctcgaagcccaggtgaccgggctggccgagaccacgcgggccttgcagcagcagcccgcagccgccaccgccgcaggcctgcaagacgctcggcaggcaatggaggcgcgcatcgttcaagccgaacaggcgctgggtggctatgccaccgccgaggacgttcaggcgctgcgtaccgaagtcgagcagatcaaggtgcgccaagcgactgcgcgtgcagcggcgcctacccagcggcgcaccccgagccaaccggccaccgccaagtccgaaccgccgccgctgccatttcgcgtcgtcggcgccgaactgcgcgccggccagcgcagcgtgtccgtcgcgccgagcatcggggacttcacgcccgcccaacttcaggtgctgctgcccggggatgcggtcggcccgtggcgcctgcaggcgatcgagggcaacaccgcagtgttccaggccggcaaccagacccgccgcgtggcgattccctga

SEQ ID NO: 457501 - DNA, 447 bp, Serratia marcescens; identical to SEQ ID NO: 328215

SEQ ID NO: 457502 - DNA, 360 bp, Serratia marcescens; identical to SEQ ID NO: 328216

SEQ ID NO: 457503 - DNA, 657 bp, Serratia marcescens; identical to SEQ ID NO: 367498

SEQ ID NO: 457504 - DNA, 222 bp, Serratia marcescens
atgactgaatattcagatattagcgcgacagataaacgtgattggatttctttctctgaaaaacttccagttgttgagaatggtaagccagaggaaatatacgtgaaatataaaattaatatcgcgtatgaagaaacaccaacggccacggttgattgggcgctcagcgatgaaggtcgagaacagttatctcactgggcttacattaccgacggtaattaa

SEQ ID NO: 457505 - DNA, 2220 bp, Serratia marcescens
atgtcggtacctaaccagaccccatacaacatttacacggccaacggcctgacaaccgttttcccctacgagttttacctgctgaatgccggtgatttggccgtatccctaaacggctcggtgatcacctccggttatacgatttctggcgttggcaacgttgatggcggcgaggtttcgtttctgaccccgccggcaaacggcgttaccgttatgcttgagcgcgtgatccctacctaccgcctgaccgactaccaggacaacggcgatctgctggcggaaaccgtaaacaaggatttcgaccgcctatggatggccattcagcaggcgtttatttatctcggcctggcgctgactcgcccgcttctcggcggcccattcaatgcaaaagggtaccggatcgaaaaccttggatacccggttaacagctcagatgcagccaataagcaatacgtcgaagacgtcgccgcaggaacattgaatcgcacgctgcgggttcctgaaaattacgtccgtgttattcctgcaatcggcagccgccggcgccagctcctggcgtttgatgacttcggcaaccctattaccgtgctgcctgaatctggttcggcgtcagacgttctgattgtgcttgctggggcggatggcgctgaccgcattggcatggggcagagcaccgtgcgcgatgttatcggctacgtgacccctgaaatgtttggcgtgcctgatgacggtgactggactccacagattaccgccgccgtggcgacaatgcgcgaagtccatttgacggccggaaaggagtatcgctgcgacggtacgatctacatgccttcgaacaacatgcagagcctgaaattcgttttcaacggcgcaactattttcgccaatcacatgcagccggtgttccgatcgccagcgccgctcgagtcgccagcaatttcttattaccacattgtcggcccgggaaaaattcgcagcattggcagcgtggacaccgtatatgagcaggggaaaaacttcgttggtttccctgccggcgatcacagcagcatctacaacatagatatgacagacctttcctgcgatggcgttcagctctggggttacgcaggacatggcggcgatctattctttgataacgttcgtgataaccctgttgtgacatacggtacatttaaccagattggccgcgtaaatatcggtcactgcgcgggcgattcgttgctgttgaaggggtactacaacagcatcgagtggggatatgtaaaaaaagcggggatcccaggcgcaaacccagagccaggatttatttgtggcgggtgtgtcatttttggcgctcctgtggatggtgatccacttggaggccataaccgggttgggtactacaaagcagaacaatggtcatcgctgggcgttggattctccggtgataactgcagtgtcggtgaaatggaacttggcgagagtatttttgaagatgacagccctctggttcagggaagcaagccgtatgtcgcaatctataatggcaatgggaaccacattggcagaatcaagtcgcaaaaatctgcatacggtatcctgtttattcgtggagagcgccatacattaggtgctgcggagataaataactgtaaaaaagagcagttgagcataaatgttaataccaaaggtgcaaaagttggcgacttcattgtcaataattccttgcatgctggtatgtatattgcccccgggcctggatgctcaattgataatgtcgtgttcaataatgcagatattccgcaaggtagcacagcgtgccagattagaaattcgaatatttctatcggcgagatattgattaatggcgctggtagcggttctggcagcggggtttatgttgaacaacagggcagggcgtcaataggtctgataacttctgacaatataaacggcatggctatgtgggttcgcccaggtggccgcgtgccacttcgcgcccatctggcaaacttggccacagctactcgtccacttattcaggtttcagcaaatcagtctgcgtgctccggttggtatataaataaccgatcgtcttctggcgggcagcccactgtatacgcagaaccaagcgccggcggcgcagtttcgacgtgggtgggttgtgaaggaactataccgcttgcgcagggcggtgcaacgctaaatgccgcaaccacatctaaccgtttttattaa

SEQ ID NO: 457506 - DNA, 312 bp, Serratia marcescens
atgaaaattcaaaacaatataattgaaaccatacttttaactcttcgtgattattttccacacgcactaatgttagatggttataacatcctgcttgcgcaatttggtgaagacctattggatggccacctgatatatctgagccaaaaaggatatatttcccttccatcgcaatatcgctatttggatgaggatggcgacgaggtgataggcgtagtacctgagcgtggtcagggtcactgggaatttataaccaaaaatacatttataacggctaatggtattgattatttatactctattaataagtaa

SEQ ID NO: 457507 - DNA, 186 bp, Serratia marcescens
atgggtgaaaacaatgatgccgcgaaggcaagttcgtttttgcagctggccgcggatgcgactaactggcttgaatcggaaatgaaaaaaaccggcatgagtgaacgtgaagtgtggttggtgctgcgcattgctgcaaatgcagctgaacagcagcaccgggtagagcaaggcttgccttactaa

SEQ ID NO: 457508 - DNA, 714 bp, Serratia marcescens
gtggttgtacagggtgagaaggttatccgcatcggcgagcaggaatattgccttgaaacaggcgatatgatgtgttatttcacagacttaccgattttgaccaaggtggttgtagccgacatttcagcaccttattatggtctgaatataaagctggactatacggcgttggcaagccttgccgagcaactgccgagagatgagcaaagctgtctaacaccacaagtcgttcagatttctcctcctctttgtaatgtactggctcgcttaactagattgcttgattatcctaatgatgtttccttcctgttacctctttttcaggcagaaatttactattacttgctgaaaagtgagttgggcggttatcttcgccggcaacttagccgagggcaggctttcagccaaatcaaccgagctattcaatgggtctgccaccattttcgtgaaccgcttgatgtagacaggctagctcaggaggttggaatgagccgttcaaatttctatctgcattttaaagaaaccaccaagctcaccccattgcaatatcaaaaaagcctccggttaattgaagctaagaggttgattaagcaaaggaaaataaatatctctgctattgcttttgaggttggttacgagagcgcatcccaatttagtcgggaatacagccgttattttggcatcagtccgcaacaagaaagaacagggggttaa

SEQ ID NO: 457509 - DNA, 504 bp, Serratia marcescens
atgaaagcaatcaatcaattcaaccaattattagcccaacaacatgacaccgatgaactcttattcgcactatttgacagcctgcctgcggtaacaagcaaagaaatgatgggtaaatggcagggtggtgatttcaaatcaggacattggggcgaggccgcattagtggaagctaaatggttcggcaaatggtttaagggtaaatttgatgttgccccactggtttgctacaacaaggctggcaaactgttttctaacgaaatgatgggcggacaagaagccagcattcaaatggtagaatttcgcggtgtggtatcggcaacaatgatttatgacggcgcaccaatttttgaccacttccgcaaagtggacgacaatacagtaatgggtgtaatggacggcaagccgttcgcaggttttcctgatattgtagccaacggccgtcattatttcttctttttgaaacgtattgaacaattccctgtggaatttgtgcaaaaataa

SEQ ID NO: 457510 - DNA, 561 bp, Serratia marcescens
atgcggggttgctcatgccaagctatgataagttcttggcccggatggggttcttggggagttttcctgtcgcgtggttctttagaaaaattcttgagcgtaagaaaattaaaatcgctgctggagagtatttgccggaagcttcttatgctttcctccaacagcaacccactgaaagggtcggttgggttagaaagtatacggccttgtacttcagtttgtttcccattttcatcgtgctggttgtgttgtctttttggatatgaaccggcaatagctaatgaactctgcaaaatcctcactgaccaggaaaatcactcagcctggagggctagggctgcacacgttttggtagcaaaagcccctaagcaaattaggtgtgccatttttctttttctctatatcccttctgattttccgccaggcttttatctgagatttattttcctacggcgtatgccagacgccgctgccgaaaaacgccattgcatggattccctccaccgggtgttacggcgtgaacagcaagacaacaaagcaatctttgctgaattgtgctag

SEQ ID NO: 457511 - DNA, 852 bp, Serratia marcescens
gtggtactgctgaaaagtattttgcatcgcggaatcgaaagtccagaacaacttgaagatcaaggcatcaacgtttatgcaagtattccgttgtctgaatggcaacagaagaaagatatagaattgtcaatgcgtggtaataaaaaaacaaacacacgttcaaaaacgttgttggcagttgggaatccagcagacttggcgatcgaggcagtaagaagtttaaggaccagcttgcattttgctatgctcgaggctaaaaacaatgttctgatggtttgtggtgcaagcccaaatatcggtaaaactttcgttagcataaacttggccgctgtcatagctcaggctggacaacgtgttttggttatcgatgctgatatgcgtaagggatattcacactcattattgaataccgattggcataatggattgtctgatattttatctgctcagaccacgatgattaatagtgttcgcaagacagaaattgaaaatttggacttcattccgcgtgggcagataccgccaaatccgtcagagttactcatgggtgctcgttttaatgacctgattgactgggcgagtaagaactatgatattgttatgatcgatacaccacctatcctggcagttactgatgctgctattattggacaccgggccggtactagcctgatgatcgcacgctttgcatccaatacggtcaaagaaatagaggtgagtattcgccgctttaatcaaaatggcatagatgttaaaggcgtcattcttaatgctgttgagaagcgagctagtagttactatggtgattatggctactatcaatatgagtatcgttcaaccgataaaacgtag

SEQ ID NO: 457512 - DNA, 180 bp, Serratia marcescens
atgaaaaaagtcgctcaggcacgctaccgcccttggcttatagctgccaaagtgctattgattcagtatttgttggtgattatctgggattatcatcacgcctctacgcacagcagagtctgcgtaccaacacaaatgctttgtgactcacaaaacggcaaaaaagtctgtgccttataa

SEQ ID NO: 457513 - DNA, 1485 bp, Serratia marcescens
atgaccaactgtactttagaaaaaacaattacatataaaaaagtagatactaggacaaaatatgatttggaagatgcttttattagcgacaaaggaagattgatatactcagctccattccgacgtatgcaacaaaaagctcaagtattctctcttgaaagcaactctgctgtgagaagtcgcttatctcactcattggaagtggctcacattggagattatatagtacatgccatcactaaagaattaaaaaaatcaagcaatgaaaaaaacaaagaccaagtattttggataaacaatgataagtctattaagtcaatagtagaaacaacatgcttaatgcatgatattggcaaccctccctttggtcattttggtgagtccaccatatctgaatggtttaaaaatgaagagaaactaagcctgatacttagaaaatcaggcttattaaaaaatggagaagaaatagataaaaaatttgaaagattaattcagctaaaagatttcacatctttcgatggtaaccctcaagcaataagaatcgtaacaaagctgcaaggtgacgatggcatcaccgggctcaacttcacatatactcaaattgcagcatccttgaaatatacacatggcggctccacttataagaaaataaagggaaaccacctaacatccaaaattggctatttttctacagaagaagatattgtaaaaaaaacatggcaagaattgtctataccagaaaactgtagacatcctctaacttttataatggaagctgctgatgatatttcatattgtactagtgatatcgaggatggaattgagaaaggtattgtaactgatgaagaattatatgaattcattaaagaaaaaacatctttaaactcatcattatataatgatgatgttagaaaaatacttgaaatatgtgatggcaatcagagtaacaaaaaaatatcacaattcactgagtttaaaacaactttatcaagattgctagttaagaaggccgcagataatttcgtagaaaacttcgataatatcatgcagtttaaaaaaacagagcctttacttgtagaagataatgataataaagatataaccgcaatcctttctcaactaaaaaacttcaccaaggagtttattttctcttcttccgaagtagaaatgactgaattatcaggccacagcataatatctggaatattaaattgctactcccctttactggagataaaacagcatgacttcattgcattaacaaaaaaagagaagatctcatcgattagtaaagtagctgttagattatatcgaacattaccagaaaaatatttgaaatcatatattcaaaacacagatgaaaaaaccagcattcattcagaatggaatttacgtgcacatctaattatcgacttcatatcaggaatgaccgatcaatatgctctagaactttatcaatccctaactggaattaaggtgaaatga

SEQ ID NO: 457514 - DNA, 606 bp, Serratia marcescens
atgcatgatagtctcaacaaaggcccaattaatgatatcttagcgctgtctaatattgacccaatactaagctctccgcacagcaatgtatcattttttttcagtaaatactctgataaaaaaaataattatggccgcaggatagtaattgagattaataggaataacttaaccattgagtcaataatcaaaaatatttccgaattaaaaccagatgaagagttatcagttctttcattaataaaagttgacaatataatttatcatatcccaatgatagattttttagcaaaaaagagaacagaatcgacagtaatagctctcaaaaaaacatctgagttttggggtatagagtttaatgtctataatagtgggcgttctattcatgcatatggaacgaagctactcacatacaatcagtggataaattttatgggttatttaattttattaaaccctaaatccggagaaaaagtaaccgatactcgttggataggtcatagactaatgtcaggatacgcatccctgagaataacaaacaataccagaaaatataaatccgtaccagtttatataggtagcacgactggagatatattaatttaa

SEQ ID NO: 457515 - DNA, 1236 bp, Serratia marcescens
atgataaaaaaaactgtaaccattgctatacaaaatgcactgcatgaaaaaagcttaattgactggcgttcttattggagtaatatatatttatccgtcattgaaactttagttttccaaaaaaacataaaacattccttttctcatttgttcgacaaaaaggcaccactaactctagcaaactttaaaggcatggtaaataactctgagctcaacgttatgctcactaacatagtaaggaatcatagatttgagtatttcataagaaatatttttcgttctaatgatggtcatgggttattcaatcttttgattatggatatatcaagcacttataatctcccttatcttggtcgtggaacatattatatttgcggtcaagactctcattctgtaaatgttccgattgataaatttaaatataaagtcccaacgcgaagaggatggattaccgataagagtaaaataaagaatttacttagatattgcgatgcagctatagagctaaaaaaggaatttccaacgaataatttatctgaagaaagaatcctactaataggggagattgaaggggttaatggcgatgatcttgtaaaaaagaaatattggattgagaagaaaaaagcattaagtgatgatagatattatcactttggtattggcgtatcagggcttaagttgaatagcgaccttgttgaaaaaattcaaagaaatagtgtagaccgatatgaggtggatttaactgattacaaagttatagtttttatttttcaaaacctttctaattacattaaagatatagagcatgcaactgctgatataaaaaatatatttaacgatagtgtcgcgcaaactgtcccagcaatttactcagagtcggagtgttacaaagctcaaaaagagattatagataaaattactgatggatggcatgattccgtattcaaaatgctggaaagcttaaggaatgtaatttctggtgaaatgaatgaaaagaaattcatccttgaagttaatctatccctttctgatgagaacaatggagagctaaataagaatgattatagatttagtttttttgagcttgatgcaatgtcttctttaattaattatggccgtattcgtctaggcgatgaagccttcactggtaaaaaagatgagaatataataatagaatccaatgccaccggttactttttaaacttaccaaaaagggcaaagttaaaaaaagtttga

SEQ ID NO: 457516 - DNA, 162 bp, Serratia marcescens
atggaggctgagaaattgctgaaggttaaaggcccgcctggggcgggctttttggtgtttggggggaattgttgtgtaggcaatccgacggtcggttttgtgccagaagcggacattaccttcctatggttcaaaaaaattttcgttgattacatctattga

SEQ ID NO: 457517 - DNA, 1080 bp, Serratia marcescens
atgactgagcaaaactcccgtgcggtattaccctgctggatgatctacggtgcaactggttataccggggaaatgattgcccgtgaggcagtccggagggggtatcgacccgttctggcagggagacggcgggaaacagtagaagccctggcccgtgatcttggactggaggcccgtaccttttctctggagaataccgttgaagctatcagccaacttaagggctgtgcactggtgctgaattgcgcgggacccttctctgttactgcgtttccgttgatggaaacttgtctgcggacccggactcattatcttgatataacaggagagatagatgtgttcgaaaatgctcaatcgttgaatccccgggcacagaatgctggcatagtattgtgccctggagtcgggtttgacgtaattcctactgactgtgtggctgcagcactgaaggatgcaatgcccgatgcaattcagctcaatctggggttcgattcacgctctgttttttctcctggtacggcaaaaacggcaatcgaggggctggctcagggagggaaaattcggcaaggcgggaagataatcaccgtgcctattgcatatgacgttcgccgtattgacttcggcgatggtgagaaggatgctatgaccattccctggggcgacgtgtccacggcttattacacgacgggtattccagacattcaggtctttgtgcctggctcaacccgcatgatttcccgcgcaagaagagcaaaccacatcaggcctttgctgcaactggcgtgggttcagaaactcctgaagacctttatatccagaacagtgaaagggccaggggaagaaaaacgtcagcagacaccttcttttgtatggggcgaagtcataaacgccagcggtgaaaaaaagaccgcccgtattcgcacgccgaatggttatacactgactattttagggtcattaactgtggttgagttcctgatggtgaatcaggttgcaggaggtgcctatacaccagcaacgttaatgggtgccagtcttataacccagctgcccgggacgggtccgctgaggattgtgtga

SEQ ID NO: 457518 - DNA, 978 bp, Serratia marcescens
atgaaactgattgaaataacagaacctggtggccctgaagtgcttaaggtaagccagggcaaattaccggaatgtggcgagaatgaagtcctcatctcagtgaaagccgcaggtgtaaatcgcccggatattatgcagagagaagggaaatatcccatgccggagggggttactcctgtcccaggactggaaatcgcagggatcgtacgcgccattgggaaaaatgttacccacttttccgtcggcgatcgcgtttgtgcgctcaccaatggtggagggtatgctgaattttgtgccgttccggtcagccaggtattgcctgccccacggaagctaagcttcacagaagccgctgcgcttccggaaacatactttacggtatgggccaatcttttttcgctggggaaagtgaaacagggagatgtggtactgatccatggcgccgcaagtggtattgggacaaccgcgcttgcactgtgcaatgccatgaatattaaattattcggtaccgtaggaagtgatgagcaaattctcgcgctgaaaaagtacggggagatgattaacttcagaacacagaattttgaagaagagatcctcggcagaactgacgggaaaggggttgatgttattcttgacattgtcggtgcttcatatttcaacagaaacctgcggattctgaaaaaagacgggcgactcgtactgattggatttatggggggaaggattgttaaggagttcgatattcaggaactcatccttaaaagagccctggtaacaggctcaacgatgaggagtcggaatgacgctgaaaaaggggaaatagcccaacagctcatacaaaatgtatggcctttaatcgaatcaggaaagtgtaaacctgtcatacaccgggttgttaaatttgaagatgtccggacagcacatgaattacttgaggccggaaatcacataggtaaagtcattcttacacttgaataa

SEQ ID NO: 457519 - DNA, 690 bp, Serratia marcescens
atgactcagactattttacatgttgttaccaatgtatctcattatgacaacccggagcataaaaccggactttggctgtcagagctcactcatgcgtacgatatttttacggctcacggcttcaggcaaaaaatcgtaagccctgcaggtggccagtcccccttagaaccacgttctctccggtggccatttttagatacttcagcccggaactggcttagtgatccttccagaatggaacttctcgagaataccctcagtcctgagcaaatcgactcctcagaatatgacgccatttatttcaccggtggtcatgccgtcatgtgggattttcctgaaaacatcgggcttcagcaaataacgcggaatatctatgaaaagggaggcatggtgtcctctgtctgtcatggctattgcggtctgctgaatacccgcttatccgatggtgaacttctcgtgaaggcccgcaggatcactggcttttcatggacagaagaaatcctggcgggtgtatcccgtgagatgccatacaacgcgcagcaggagatgacgcaaaggggagcccgatatgagaaggcctttctaccgtttacgcccaacgttgtcgttgacgggcgcctggtcacaggacagaacccattttcagcaaagctgacggccacgcgagtggtgtcgcttcttaatccctga

SEQ ID NO: 457520 - DNA, 954 bp, Serratia marcescens
atgcaaacgattctgggagcaagcggacagattgcccgggaactggcccgcgagttaacacattccttcgggactgaactgaggcttgtcagccgtaatccgcataaggtcactaacagtgacacccttatatcggctgatttgcttgacggcagtcagactctggatgcggtaaaaggaagccgcattgtgtattttgcggcaggcctaccaccggattcctctctctgggaagatcagtttcctgtaatgcttcagaatgcactgaatgccacccggcaggcaggggctcgttttgtctattttgacaacacgtatatgtaccctcaggacagcagactgcagacggaagacacaccattccagccatcagggcgaaaagggcgtgtccgggctatgatggtgaagatggtgttggaagagatgcagcggggtgatattcctgtactcattggtcgcgccccagaattttatgggcccgggaaaacccagagctttaccaatgccctggttttagacagacttaaagctgggaaaaaaccactcgtccctttgcgtgatgacacattacgtacgctcatctggacccctgatgcaagcagggctttagcgctgctgggtaacacaccagatgcctatggtcagacatggcatctgccctgttgtgaagagcgaatcacctacgcgcagtttgtttctctggcgtgcagtgtatttggaaaagaaccgtcatggtcagttctcaggaagttctccttatacattgcgggtatgttttctaaagggcctcgtgaactgcgggaactcctgccccgctatgaagcggataatctttttgactcttcaaaatttaagatgcatttcccggactttcacataacaacttaccggcaggggatggaaagtatatacgctgaatggcaagccacatccgcgtttaaacaagataattaa

SEQ ID NO: 457521 - DNA, 429 bp, Serratia marcescens
atgaagataggcgatctggcaaaagcgacgggacttacaccttcccgcatccgctattacgaggcggagggcctgatcagtgcccctccccgacaggataatggctatcgccagtatccgcctgagaccgcactgatactcatgcttattgaccgggcacagaagtttgggtttacgcttgagcagatccgtcaggtattacctcaggggaaaggaatctggaaccatgagggattagttgcttctcttgaatccagggtagaagagatccgacacctgcagcagcaactcagggataatcaggccatgatactgaatttaatcagcggcatcgaaaacaggccggagggtatttcatgtcaggaaaatatgttacgggttatggggctaatgcaggttgatgcaccggttcttcattctattaagtaa

SEQ ID NO: 457522 - DNA, 831 bp, Serratia marcescens
atgggttatgtaacaactcgcgatggcgttgaaatcttctacaaggactggggtccaaaggatggtaaagttatttttttccatcacggctggcctctgagcagcgatgactgggatgcccagatgttattcttcgtaaataaaggcttccgcgttgtggcacatgaccggcgcgggcatggtcgttcaggtcaagtgtgggatggccacgacatggatcattacgcagatgatgttgcagccgttgtggaacatctcaatgtacaaggcgcgatgcatgttggtcattcaaccggcggtggcgaagttgtacgttatattgccagacatggtgaagataaagtttcaaaagccgtgttaatcagtgccgtaccgccattgatggtgaaaaccgacaataatccacagggaacgccgaaatcagtatttgatgacctgcaggcgcaactggctgctaatcgcgcccagttctattacgacgttcctgctggacccttttatggttttaaccgctccggttcagctccttccgaagctgtcatttataactggtggcgacagggtatgatgggtagcgccaaagcgcattacgatgggatcgttgctttttcgcaaaccgactttactgacgacctgaaaggaatatccattcctgtactggtgattcacggagatgacgatcaggttgtcccttacgatgattccggtaagttgtcggctgaactggtcaaaaacgggaaactcaatacttataaaggggctccccacggcatacccaccacacacgctgatcaggttaacgcagatcttcttgcatttataaacagttaa

SEQ ID NO: 457523 - DNA, 2004 bp, Serratia marcescens
atgcgcgtaatcagtggagaaaccaacattaatgatgttggtataaaaaagagatttaaaaatcacgagccgtttcaatcgattattgaactggcatggaatggttttgacgccagagctaagaatgtaacaatcgaattgcagagaacagaattaggtggcatgtcgtctttgtatgttcttgatgacggtgatggaatcgacattaacgattttgactctaacttcaatcgattcgatgactcattaaaaaaagacagtatcgaacaacacggttcgcaaggtagaggacggctagctttccacaaactaagccaccaagcaatttggtttacaaaacataaaaacgttaatgcaaaaatagaaatagaaagtaactctataaaagcataccaagcgtttattgatataaacgttcaagaccaacacccatcaataataaaaaaccgcagtggaacatgtgtcgttttaaatcattttcacaatgaattaccaactgataatgagataataagacggttacaaaatgagttttgctgccacttagcattaaacgaaaaacttacactttcatataatggtgagattatttcagcacctgaacatgattcgcattcgtttgatagagatgttgatggctcatcattttcggttaaagcgctaaggtggagtgaaaaacctgcaaaagaaaggtccaatgtgtaccttataaattcgcagggaaagaaaatgtatgaggtacccagcaaatttaacaaaaagaaagatttttacttatccatatttgtaacatctgattgggctgatacctttagcaataaaggtgacgatatattttcatcagctaaaagcaaccctacatcatccacgtggaaggaagtaataaaattcatttggagtatagcaagggatatttatgatgatttccttaaaaagaaactagaggaaaccatagagaggtatgagcaagaaggagtattccctagctatagcgaatacggtgatgaaaaatatgcagaatggaagctcaataatatcaagtcaattgtgagggacatatacattgcagacccagcactattggacagcctgaatgcgaagcagaggaagattttcgtgaggctattggataaattatctggctccaataataacgaagatttatttaatgttttagaaagtgttctcaacttaagtaaagaaggactgacgaaattttccgaccaattgagactaacaaaacttgacaacatcattagtgcaattgaagaattacaaaaaaggcgtttagtagtagacaaactccgctatttaatggacgtccattataaagaaataaaagaaacccctgacctccaaaaaataattgaaaataacacgtggcttttcggcgagcgttatgaaactttaggagcggaagaagataccttcacaaagattgctaaagaacttaggaataatgtgaaagatatagatgaaatggatcatcatgatactgaagatgctagtgaattagaaggggccaaaagacaaaccgatctgtttttagcaaggaaactccccgctcttgattccaatggaaagccttttttcaaatgtataatcattgaaataaaaagaccgagtatttctctaaacgtcaaacacttaagacaacttgatgattatgcagcgattatacaacgtcaccccggatttagtagtcaaaaccttcattttgaacttatattaattggaagaaaaatatcaaaggacagctttgaaatagaaagtcgtatgaatgcacatatccaaaaaggtgatatgggattagtcgctgatgaccaccgcatgaaacgctatgtcaaaaactggtatacaatctttgacaatttcgaccttataaatcggttcatgctggataaactgaagctcgagagagatgccattgagattgcaaattttagtgatgaggcaccaactacgatggttgcctcacttcaaaccaacgatacagctccataa

SEQ ID NO: 457524 - DNA, 642 bp, Serratia marcescens
atgcaggcgttactcaatgtactacgtaaggcgcctcgacttttaaaggaatatattatgagtgatttctctaataaaatttggtggaccaaaaaatccagaataaaagcagagataagattgctgaatttggatttttactcgcaatctttactgctctggtattctttttttttagtgggttattcaatattttcattggtaagtcccgcgtctggaaatacagagtcggcggttatgataacgctttccgtattgattttggttatgacgctatttattggtaacatgaattttaaagggcgagcgatgctcatgaagcaatgttacgaacaattaagtatcatttacacaaaatcaacggaaattacggatttcgctgagattgacattgaatatcaacgtatattatctatatctgaaaatcattcagagcaagattattgcagcgcacttgttgatgaatataataattcggttgataaaacaaaactaagtaagataccaactgataaacaagtacttaaacgtagaaatatgacatatataaactatgcacttattgttttctgtgccttgtttccagttttagttgtgatatttctgagggttttctcaaatgaaattagcccagcagtttga

SEQ ID NO: 457525 - DNA, 1233 bp, Serratia marcescens
atgactcatgaacttttgtggaaaatattagatgagcaattaaatattatcaacagaaaagtaatcacttcaaattatatttttagcaagtacaagcttaagttgattagcaagggaagagggaagtcaccaagggaaatttcgataccaactattagagataaaatcacgctacgtgcgttatgtgactttcttaaatttaaatatgaagatgttctggattttcaattgccccaagatatagtaaggcaggtaaaaaatgatattttaagtgaaaactatacggcttttataaagcttgatgttgcaaatttttatccatcaattaaacatgataagttgataaaacgcctgcgggcacgcttaagagatgatagaatcatcaccttagtaatgaatgctataaaagcgccaacagttagtaagccaagtaagtatgatatactctctgagcgaggtgtaccgcaaggactctcgatatctaatattttagcagctattttcttgtctaatttagataaacgaataaaaaatataaaagacattaaatattatcgctacgttgatgatgttcttatcctttgcaaggttggagaggtaacgaaaatatcacaggccttggttaaagattttagaaaactaggacttaaagtttatgatccggttaaatatcctgaaaaatcatcatttggagatttgttgaaagataattttagttatctaggatactcctttttaaacgatgtggtgtcagcaaggataggctctgttgaaagattaagggagtcattgcttgcaatatttacaggatataaacactctaaattgaaaagtttagagtttttagaatggcgaattaacttaagagttactggatgtatatttcaaaataagtccaagggatggatgtacttcttttcggaaataaatgatgagattttattacatcaattggatagcttcttgagaggtttatgtaaaagatttaatacgccaattaatttaaagtcttttgtacgatcatattatcagatacaaaataataggcgagaaacaaaatacataccgaatttcgataactatacagtagaagaaaaatcgcatgttctaagttattattttaaaaagaacattgaaaaattaacagttgaagaaattgaatatcattttagaaaaagaatatctaggcaagttaaagatcttgagactgatattaaagatgctggatactaa

SEQ ID NO: 457526 - DNA, 243 bp, Serratia marcescens
atgatctttaaacttgagtttcagccatcaagcgttactcccccaccagactcacaaagcaaaaagtatctggtaatttgcgatgagggtgactatttcttaggccaccctatgtttgacgatgaggggagttttctgtgcttcatcgttgatgagataggtgcttctggttttccattccatcagcaagattatgtggcttgggcatccttgcccgacactcgcgacgtcacagagcgttaa

SEQ ID NO: 457527 - DNA, 348 bp, Serratia marcescens
atgaaaccatatatcatgctttatagtgattccttcgaaaaaagagcaacccagtcccttacaactgactctacaataaggactttcactattgaatctaatgataaagactacctaaacttttctttatccactgagataactaaagttagcgaagcactcgatcatgattcgatgactttatcaacttatgagacgagagtaattgaaaatagtgataatgaacaaattcatatgggaacaatgttaacagaacgaactgaaaacaacgatgatgattacttaacattcggaactattgttaccaatgttacagaatcaaatgataacgattatattttacagtaa

SEQ ID NO: 457528 - DNA, 306 bp, Serratia marcescens
atgatcaaatcaatcgaaataaaattaaacctgctgcacaaaaccgtagtggaaattatgactaacggcgaaaccatcggttatatcgtcaataccgataataaagaaaagccgcactctctcgtgaattcaaaaggtgccaacgtaggtgattatgattgccctaaatgtgccatcgatgctgcggtgcgtacgcactttaacgtaggcagtgagtgcgccacagagttcggtatcaaggggcgaccatccccgaaaaagctgctactgcttgccctgctggccatgcttgcaagcgatgattga

SEQ ID NO: 457529 - DNA, 909 bp, Serratia marcescens
  misc_feature (564)..(573): n is a, c, g, or t
atgaaaacttcgccagttcatgagttgcagggtttggcttctgacgtcagtaatgacattgttggggttttaataaaagccaaaatgattgcagtgaagttaaacttgcccgaattggccgaatggtttgattatgagcttgatggctatcctgatggggttgccctacctgattatcgtataggtcaaggtgtagtcaggggatggtatccccgtcacggatggataaatgtccaatatcgtaatattgaaccagcaattataacaatgattcaagagtatgggttaagtgactcaatttcagcattgagaaatcttcgtgaagcagatgataacctgcggcttggaatgccacccgaaaaaataaaaatgcttttcccttcaaatagtgctccatcggaagtttgttggtttattaatgcttcaaagttggaatgtatagtaactactgtaaggaataaaatattaacatgggctttgaatttagaaacaaagggaatattgggtgaaggtgtagtgtttagtgcaaaagaaaaggaagttgcaccttcaacaacttataannnnnnnnnnaataatttctatggttcagttaacaatttaggggcgataggggcaggtaatcacggtagcatttatcaaaataatataaacttgattaacaactttgagtctcttagtctggtgcttaaaaactatggcttagctgatgagaatattagtgatttagcaagggttattagtgagtcgccacttcctaaaaacaaaaatgaggtgagagaatgctttggagattggattggagttatgacagcaaaagcgttaaagggtggtcttgctatagagggagctaatgtccctaacattttaatgaatgatttgtacagatactttaatctacagagataa

SEQ ID NO: 457530 - DNA, 2178 bp, Serratia marcescens
atgaatattgtaaaatataatgagctaaaaaatcgtataactgcggaggatagtgtttggttagagataattttggaattaattaatgaatataatagacatgagaacaaatatttaatccaagatttagttttgcgtttattagataaaaaagattatttcagtgagcatattaatctactaaatagattaatatgggagttgggattgtttccatatatagacgacaccaagatagattttaagactaaaattggaagggatgttttcttatccccgatagatgacgagactacattccatgttaagcaggcagagatttactatagaatagttaatggtgagaatattgttttaagtgctccaacaagttttggaaaaagtcttataatagatgctttaattagctcccggttattcaataatattgttgtagttgtacctacaatagcactgatggacgaacttaagaaaaaatttcataagcacaatgatgtatataaaataataacccaatcaaatcaagctacttctggtaaaaatattttcatatacacacaggaaagggtaattgagcgtgactttgagtcaataaaaattgacttttttattattgatgagttttacaagttggcacctagcagtgatagtgattacagatgtgataggttaaatattgcttttcataaactatataatgtatgtgataggttctatatgttggggccaaatatagatggtcttacaaatggattggaggatgatcttaattgttcttttgttaagtttgattcatataaaacagtggctgctgatgagttttactacgaaattaagaccaaaggtaaagacgaagatgtagatatagaaagagataaacatttaaaaagtatacttagtgcacttgatgctaatgaacaaactgttgtttattgtaagtcgccaaaacgagccaataaattaatgtcaaaaatattggcaatggaccttacaagtaaacgaccagaaaataataaattttctaagtggttaagggataattatcatcatgattggagtttagcccatgcggttgattatggtatcgcgtgccatcatgcaaaacttccaagagcaataggttcttatctggtcgatgcatttaataaaaaaagaataactatattagtttgtacctcaaccctcatagaaggggtgaatacaaatgctaaaaatgtcatcatttatgatgattgtattactggaagaactaaactagattcgtttacttttaataatatttcaggcagaagtgggcgaatgttcaagcactttgttggaagaattcatgtaattggtgccaaacccaacaagcagttgccattaattgatatccctattattactcaaagtgataatgcttcagattctatgcttttacaaattaaaaatgatctatcagagattaatttaactaggatatataaatatactcatcaacaaatcctaccaatagagttaatcaacaaacatcaaggtatttcacctgaaaaactattaacttttgcagaagctttgatggacaattgcggtaagtggaataggaatatggtatgggattcattgtatcccacaaaagaccagcttaatcacttatgctttattttatttgagtatttttctatatcaaggatgggtaatggcacggtaaaatctgcatcgcaactgcacaatagattaagatctatcatgaatcatgaaagtgatttggatttgatcaataaagaatactcttattggatagaaaaggatgctgattatactgtggatgacgcagtgcaaattatttttgatttcaaacggaatttagtaagctataatttaccgaaaataattcttgctattaatgatatacaaaagttaatttttacaagatttaattattcgtttggtgattatactaatttctgtcatgctctagaggcacacttcgaattaccaactttagttacgttagaagaatttggtattccaatgcagatatctaagaaaatagcaaaagttgcgaatattacatcagaggataatatagatatcaccttaggtaagataaaatcgaaagcaagcaatggaaaaatatataatgttttgagcgattttgagtcttctcttttggaaaatattctttattacttataa

SEQ ID NO: 457531 - DNA, 1263 bp, Serratia marcescens
atggcactttcagataccaaactacgcacacttgctcccagaaaccgcccctggcaacttgccgatcatgacaggttggtgattgaagttcttcccaccggacgaaaaatctggcttttccgctaccgctttgacaacaaatcgcaaaagatcacgctaggcgaatacccggctttctcacttgcagaagcgtggctttggcgtgaaaagtgccgctcaatggtggcccatggcatcaatcccgcgcagaaaaagcaggaagaaaagcttaaacagaaagatccgacgacagtcaaaacattcgccaaacgctggctgaccgatatcgttgaaaaaagtaaccgcgatccgtgcaacgtcactcgcgttatcaagaaggacatcattcccatcatcgggaagctggaactcgaagaactcacaactgcccacattcaggtcgtgctcgaccgcatcaaacaacgaggttccgatcacgtcgcgctgctgacgcgaaacgtgcttaaacgcatgctggcctatgcgatttccaggggaatcatcttcaacaacccggcagcgactatcgaagctcgttatattgcacaagcaacaagccgcgacgtggcgctaaccgcagaagagagcggcatcctgctacgggggatctacacctctaacatgaaccgacgccacaagctggccctgcacttactgattatctgcatggtgcgtaaatcggagttgattgaagcgacatggaatgaagttaacttcaacgcgctggaatggcgtatccccggcgaaagaatgaagatggataactcgcatattgttcctctgtcaaaacaagcgctagcgatgttcgaagagctaaaatttctggacggagattccccttacgtcttccccagccgaaacgaccaccgacgcccgatctccaaaacaacgcttaactgcgcggtgcgtacgttggatctgaacgtcagggattttgttattcatgacttccggcgtactgccagcacattgctccatgagcaaggctacaactccgactgggtagagaaatgcctggcgcataagatcggcggcgttcgtggtgtctacaaccgtgcggagtacctgaatcagcgccgggagatgcttcagtcctgggcggactttgttgatgcgcagattgaggagggacggaaggtggttatcgggatgtttgggaaggcttatacaataaatttaaagtggtcaccaaaaattatagtgaccactttcttatcattataa

SEQ ID NO: 457532 - DNA, 1467 bp, Serratia marcescens
atgagcgagggtaaattgccgcaagggtggtgtattgcaaaaattgaagatatttcatgcaaatgcagtcaacgcatacccctgagtagtgaaaaatttatctatgtggatattggaagtataaatagagaattaaaaattattgagtcgccacagcatttattaggagataacgcaccaagccgtgccagaaaaataattgaggaaggaaatatcctggtgtccttaactaggccaaatctcaatgcagttgctttggtaactaaagagtttaataaccaaattgcctcaactggttttgaagtagtaaagcctattctcgtcgatagtagatatatttttggtattactcgctctaaacactttattgatacaatttctggtgcagttcaaggggcattatacccagcggcaaagtctagtgatgttcaaaaatataaactaccactcccccctctagcagaacaaaaaataatagctgataagctcgacattctgctagcacaggtcgatagtactagaacacgccttgagaaaattccgcatatccttaagcgttttcgtcaggctgtgttggattcggctataagtggaatactgacagaagaatggcgtaagaaaaatacggaaattagtgttcagtctttggatttgataaatgaatattgggaaagtatatatggcgaaaacggaaaaaaaaggcctatcgcaaaaatacaggggattacgtattccaaggaattacctgagaaatggttaaacacacgcttaggtcacgtgtttgatgtatttgtgggggctactccaagcagagctgagcctgatttttggagtggtaatatcccttgggttagcagttcagaagttgccttttgtaaaataacaaaaacaaaggaaactataactcaattagggctgggcaatgcctcaacctcagtacatcctataggcactgttatgcttgcaatgattggccagggaaaaacacgggggcaagctgccattctggagatagaagcatgccataatcaaaatactgcagcattaagagttccttcagggtttgcattgtctgaatatctctattattttcttgtccaacaatatgaagaaactcgtaggattgggggcggaaacaaccaacaagctttgaataaatcttttgttcagtctatgggctttccattaccaccgattgaagaacaaaccgaaattgtccgccgcgtggaacaactattcgcctatgctgaaggcatcgaaaagcagatagaaaacgcccttaagcgagttaacatcctcacgcaatctattctggctaaagcattttgcggggagcttacggcgcagtggcgggcagaaaaacccgatttaattagcggtgaaaatagcgcacaagcattgctggtacaaattcaacagcaacgatcaagtatcagaactattaaacgtggcaaaggtaatagttaa

SEQ ID NO: 457533 - DNA, 1248 bp, Serratia marcescens
atgaagaatgctgttcaacattttgaagtacgtcgtgtaagcgcccaaagacataaaagactttcgcagaaaatcgaccaggaacaacaagtcgatattaatcatcagtatgtaaaaaaatacccacatatttttagtcaattatctgaagagggtttcgtacaagatggctatttagagttaagagaagttaactcatttgctagtaattttaactaccttgattacgataatgttgggctattggttctatcgctttcggtacttccgacagaaactacatcacaactatttgatgaaataacatacaaacatcctgtcaaagcagtgcttcattacgattttcgctcaggtatcatagaagatgatgccattcgtgatgtgaaaatgttgatccgaatagctggttccgaccatgttaagccaaccggaggccgaacgacagataaacagtatgagctttatgagttggactacctgtctggagagattaccctcgaattaagtgatgagaccgttttaaaccgactccgtgaagataactactatgattctttcgcattatttaaaagacttaataatattcaacaagttggtataaaaaactgggctcgtacatctcgtttgaaattgatgacagatgatttcttaggtacggtaaaaaaaccgcttcagtcaagattacctttatctgttattgagttattaatggctaatgaacagggtgataccgtgaagtttgatgatttatctgacggtgaagctcaattgattcaggttatcgcggctacgcggatattcagtcaggctcaggctatatttctttttgatgagccagaaacacaccttaatccatcttggcgtacctattttcaccagcgtttgaccgaagcttttacacctgaaaatgaaagcaaagggcaatcgcagttctttttatctactcactcaccatttatgatttcctcgctcaaacgcgagaatgtatttttcttcgagcgtaatgatatgggttatatcagtatggaaccggtatccagccagacttacggcacttcatttgatatcttggttaagaactactacggtttacgatcccttatttcacagacagtggtagaggatgttaaaaatcgattaccagaagataatgatcctgaagcagttatagttgcgcgacgctggattgaggaaaatttgggagattcaatggaaaaggcttatctgctaaggaaactagagaactaa

SEQ ID NO: 457534 - DNA, 1161 bp, Serratia marcescens
atgttattctcactcaacccacagacgcctcaatgttctgtatttgcattgcttaatgctgagtttcttcattttctggactccagtattaatgcaaatgttttctcagagggattatttcgaactttttttgagataatagacaatgtagaggtagctgttcctagtgtatgttggagtaatatacccacaagagagaaatttcagggcttatgggaagctctacctactaccgttgctaatcgccggagattgtcagatcaaataagtcaggctcagaatattattgtattttttaacgatacccaaactgtgttgcctgaattagtgccaacctccttattcgaagcatgtaaggcgttaacaactcatctttttacgcgtaccaaagatctcgctcaagcgaggtcgcaatccaataactctattgaaatacattatcaggattttgttaggggaaataataatagtcatctttgtcctatttgtggtactgcacttctctctcaaaatagggaaagtgtagcagatgaagagcagtggcgttcagattatgaccatgtactttgtaaagataaatatccagtttatagtgtccacccagggaattttattccgacctgccacatctgtaacagtaaggcaaaaggggctaaagatgttctcagagctaatgggattcagcgaagaatagcgttttatccactccccccatcacaagagtcatgtgagcaatttgcagtggtgtcacttcacttcagtgaccgtacagacttaattgagaataactgggaaacgcccttggactcagcatccattttattccctagagctccagaagacatagctgataaaattgatgtgtggaaagaagtttataaagttacagaaagagttgaacagcatcttaaggtcaacttttgcgagcgtatagctgcagatctacgaccaataagttttgatgatttctgtgagcaattacatagatattcaagacaaatgccagcagactataaaaaaacggaatggagattttggtggcagaaagtctatgaattcttagtgcatcaaaatcaagactatctgcgtgatgtgtggttattgattgagtggaaacaaagattatcaaatgatgttgacatggcccacacatttagttaa

SEQ ID NO: 457535 - DNA, 942 bp, Serratia marcescens
atgagtaaccgttacgtcattgaggccctgctgcgtccggccgttgagctgaataccgccgtggtatcgggcatggcggcgtatgtctgtgtgcaggcaccctgggctgtcgctctggctccgtctgtcagctatgtcaccgcagccgggtttgcggcgctggccgtcacccgcacgcatcaggggatgaagattattcgctaccgccggaatctccgccgcctgccgcgctatgtcatgagtactaaacagatccccgtcagtcatcgtcgcctgtttctaggccgggggttccgctggacgcagaaacacacccagcggctgcaggatacgttgcgccctgaagtggcccgttacctgcagccaaaccgcttttacctgggggcgcgtcagctcgaaatgatgacagagcaccgtctgccctggctgggtaagctgctgagtgccgatacgccgctgaacccggtgcggccattaccaccggtgggcggcaatccggcgctgcacggcatcgagcccgacgaaaaagacgtcaccctggctctgggggagcgcgttggccatacggtggtgtacggcaccacgcgcgtcgggaagacccggctggcagagctgctggtcacccaggatatccggcggggtgaagtcaccatcgtgtttgatccgaaaggcgacgcagacctgatgaaacgcgtctgggcagaggcccaccggctggacgcggggacaagctgtatatttttcatcttggctggcctgaaatttcagcccgttataatgccgtcgggcgttttggtcgcgtgtcagaggtggcgtcccgcgtggccggtcagctgtcgggtgaggggaacagcgcggcatttcgcgaatttgcctggcggttcgtcaacatcatcgcccgtgcgctggtcgccctgggtgagcgccctgactacacgctga

SEQ ID NO: 457536 - DNA, 522 bp, Serratia marcescens
  misc_feature (148)..(157): n is a, c, g, or t
atgaagcagaagtggatagcttctctttttcagcagggcaatgtctcaagtggtgtcatttccttcagccatattttgaatccgcacttggctgtaaaatttggacgacagtcggtcaattatggaagggagataaatggctttatannnnnnnnnntttataatcccacatatgatgaatttgaaaaatggtccaacaagggatttcagcccgaagatttttctgagacgcctgctctaaatcttcatgcctggtatacaacagatactggtcatttgattgatatttcatatctgagtactctttcaaatgtatttcctgattgccatgaatatactggaggtgtgctggtaggtaagccaaatgatatttttcctggctatcaatacgtacctatagtcgttgggcaaggtatagtagaaaaaattcaaagcaaatcttttataccttttcttgctaatgacgttgaggatctaatgtctgttggaatggtgatatatgcagaccctaacaatgaataa

SEQ ID NO: 457537 - DNA, 204 bp, Serratia marcescens
atgaaaatcaccgtagaacaaccctcagccagagaactggtcgatcgctcgcgagtcctggtgcatgtgatgctcgagcatcctgacgatatcggcccgaattatgcgttgcttctcatccttgccgaccagctacaactattaagggatgcttttgaagaggatgagatcagacggcttagagacgaaaaaattcctgtttaa

SEQ ID NO: 457538 - DNA, 987 bp, Serratia marcescens
atgacaagtaacaatacatcaaaaaatatttttgatgttacatcataccctccttatgcatatgcactatcttacttcatcaacattatctcattttctttaatatacaacatttttttcagcaacgattttaaatcaggatatttaaatttcatacaagcaacttactttagtgttgtcacagtgacaactctcggtttcggtgatataactcctaaacttgactcatcctctcttttaattgctataacaacccaggtcgtattgggtgtaattacgattggcttgtttttaaatggtatatctcaaaaactaagcgataaaaaggatagaatcaaagaagaatacgagaaagaattagaagagcagaaaatagcaaagttacttataatcctaaagccaattatagttagttatttggaaatacttgcagaaacatataaagtaacatgcaacactgaaagagacacattgagaatacgaccaaattctttattcaaccaagactattttgatcaaatctctgttcaaaatttttcatctcagcagacaagatatggttccaatataatgtcatgggggaaattcatagatcttgaaaacaataaattaaaggaaagcatagataattaccttattaaattctccactgtactaaccatagacattgttgaactattggtaaatataaaagatcatcattatctgaaccatgctaaacaagcgttaaacatggcagagtggaatcatactcatggtataacaatcccacatttttcaatgcttagtattgagcatagcagcatccatattccagagaaaccaacaacaataaaagattttcacaatttactgttaacactaattgatttaattgagaaaaaaacaaagtgtgagtcgttggagatgattatatgtctacaaaatggaacagctccgtctgtaggttcgtctattgcacctataataaaatttgggccattctga

SEQ ID NO: 457539 - DNA, 1053 bp, Serratia marcescens
atgacagcatcagaccgtactctcaccacctcccttccgctgcgccggggctcggaagggtttaacaccagtcaggattatctagtgaaaggactcattcccgccggggcgctgtgcagtatttacggccccggcggctcttttaaatcttttctggcagtatcgctggcgtgccatattgccagcggtacgtcatggggcggaagacgagtcaatcaaggggccgtgctgtttatcgccggagaaggaggaaccggtatatcacggcggatccgcgcctgggaactcagcgttaatgacgagatggtgctcgataacctgtttcgcgtcgactgcccgatctttccagccgctccgggaagcatcgaacaggtgatcctggcggcgaaggacattcagaacatgaccggaatgccggtacggctaatcatcctcgatacgctggcccgctgttttggtaactcagatgaaaacaccgcgcgggatatgggcgcattcatccaaggttgcgacaccattcagtatcatacgcgcgcggcgatgatgatcgttcatcattcaggtaaggatcaggaacggggcgcacgcggttcaagtgcttttcaggccgcgctggatgccgagtttaacgtcaggcgcgagggacgtcgcaacgctatcaccctgagttgtacaaagatgaaagatgcggagatgccggaggtcaccgcctacgatcttgaggaagttgttatctataccgatagtgatggcgaaccagtggcctcgctggtactgaacgacgagccccggcaaccagacgatgacttactgagtagtggcattccatccggcgttcctcatatcacccgcaaccatacggcgctatggcgctgtattaaccaacgcatcagccagaataagccctgtacccgcgcgctcttgcgcgacgatctacgcgcaaagggaattaacgtcgagaagaaattttcgcgctggctggagaagctgctgcgcgagcaactgatagtgctcgatggagaacagatccggctcccggatacgggggaatga

SEQ ID NO: 457540 - DNA, 984 bp, Serratia marcescens
atgagctattacgtttctgccgtctccgatcgcgcacgcaataactggccgaaaatatttgaacaacttggcattttcattccaccaaatcatcggcatggcccgtttccctgttgtgggggtaaggatcgcttcaggatggatgatctggaggggcgcggcacatggttctgcaatcagtgcggcgcaggtgacggactggatctggtttcccgcttcttcggttacgcactggttgcggccgccggaatggtgcaggacatggatcctgtaccgctggttccgccagccagggaaaaatcacaggctttgaatatggaatcgcgtattaagacactgcttcgtcattgcgaatccggagaagcgccgtatctgacaacgcgaggctggcggcgagcccagtggcttctgactgaacgtagtagccggacaatctgcggcgtgcatttcggggcgggtacgctggtattgccaattcgaaataccggcgcgctgctgacaggtgcgcagttcattcatcctggagggaaaaagtacctgctgcccggtagccatctgaaggattgtttttgcccggtacatcaggcgagccgcaacggtagaccggaaccctgggcaccggacagcaaaccaccggaaggcatcatcattaccgaaggatatgcgaccgcgcttgcggtctcatgccttcatcattttccggtcgttgctgccctgtcggcgcacaacctgaaaaatgtggccatcgctttccggacgcagtggcctgaatgccaccttatcctggctggcgataatgattgctgtcaggagaaaaataccgggctgctgaatgcaaccgccgctgccgaggtagtgaagggctttgtggttctccctgcagacactacattgagcgactgggatgaattttaccgtcactacggtgaatccatttcccggattgtgttcaaccagcaggttcctgcaaatctcaggtcgtaa

SEQ ID NO: 457541 - DNA, 594 bp, Serratia marcescens
atgtcgaaacttacaaaacgtatggaaaaacccgccctgctggctggcggcagttttaaaacagtccatgatcgcctccgcatcgccgggcgtttaagccagcatctgcacaagctgaatatccagattcaggatctccagcatctgaaatcgtcacatatcgaaagctacgtgatggcgcgacgggaagcaggcattacgccacgcacgctacaaaacgagatggctgccctgcgcaccatccttgctcagtctggacgtcaaaaatttgcccaatcggagcgcatcagcaataaagcgctcgggctgggtaacgccagtcgggcagggacgtatctgccattaacctcagaacgctggttgtcggcgctgtctgcttttcatgaaaaagatgaaggactggctctgacgctggagcttgccagagcaatgggtttgcgttcacaggaagcggtgcagtgttgtcagtctctgaagacctgggccgctgcgttagagcgtggagaaaaccgattgcaggtggtttttggcaccaaaggacacgttcccgtcagacggtggtgctcgaacctgaaaggctacgcaacatcctga

SEQ ID NO: 457542 - DNA, 2094 bp, Serratia marcescens
atgagtggcaataacggtacatcgcctcagcccggtatggtctgggatggggcgcagtggggatggccgacaactggcagctggagtggcaacgacctgacggtcacgcccggtaatccctttaattctgccaatccctttggcggcaatattgatcttggcaatgccattagtggatatgattcgtgggaggtcggcgactatcttcaaaaactctggcatgaagagcaagagcggctgaaacgggaaagagaggcggcagaagccaggcaaaggacggaagaggcggcgagaaaagaagccgaggagagggcccgcgctcaggccgaagctgaattcaaagccaaggcagaagccgaagcaaaagcgaaggcgactgcagaaggttcaaaaatcggcgtatctgcggctgaaaataaagtgcgtgaatctcaggagcgcattaatcaggccgcggaacaaatacgtcaaaaaaatgaacaacaggccgcagccattcctccgcgtgatgagaagcaaaagctggtatcgatgctcacggagatgtatcagcttgacccgagctatctggggcaactggaggaggaagagggaaaactgaagagtctccagcatcaggtggatgtcgtcacagcggaattaaccgcagcccagcaagcgctcaatcaggctaacgttgacaaagggctggccgatatcaccctggatgcggcgcgaaaagccgaagccgatgcgcgcgcccaggcagaagcggaagcacgggccagggctgaagcagaggccaaagtgaaagcggcagccgaagcggcagcacgggccgaagccgaggcaaaagccaaagcggaagcggaagccaaagcacgcgctgaggcagaggcgaaagcggcggcggatgccaaagccaaaatggcggcagaattggccaaagccggggtgcaccctgctccgacttatacccctgacatggtgaaggcggccaatggcgccctgggggcgacaggttcattggccctgagtcgcgctccgggttctgttcaatttgccgtggccggcggtggtacgatgatattgggcggtccgctgcctgagactctcgcgggcaacattggccaggggttgtcgctggccaccagggtggccggcgggtttgcactggccgttatcttccattcccagaaggtgggtgtggggagtgacaaggtgcccggccgtgatgttcccgccttgttcagttatccggccagtattatgctgcccaaagctcacgggctgaaaccgggcgtgagctcggtcgatttgcccgcacggggtcaactggtcatgtcaaacggccaattggcactgaaactgctgaaaaccggtgatggtttgccgaaagctgttcaggtgctgacggcggtacgcgatgaaaaaaccggtctggatcgcatcacagtgccggcgacggccggtgctccatcacggacggttttgattaacccggcggcggcaccgtctgccccatcgaataccggtaatcaggctccaccggttccggcaacgccggtgcataccggcaccgatgtaaagccggtggaaaacatcgtggtgacgacttcaccggtcgcagataccgatgggctgcaagattttatctactggcagcctgatgccaagggtaccggcgtcgagccgatttacgtggtgttcagtagcccgcgagatatgccgggtaaagtgagcggtaaaggacagcaagtgggtgaaggctggctgaacaaagcggggcaggaactgggagctccagtccccagtcagattgcggacaagctacgtggacgagagtttgcgaactttgatgcgttccgcaaggcattttggcaggaagtgagtaaagatcctgcattaagcaagcaatttattgtctctaatcgtagccgtatggctgtaggtaaggcaccgaaagcacgtaaattggatgccgccggtaagcgaacttcttttgaaattcatcatataaatgagatatccaaaggcggagatgtttacaatatagataatttgcgagttatgacaccgaaacggcatgttgatattcataaaggaggtaagtga

SEQ ID NO: 457543 - DNA, 381 bp, Serratia marcescens
atggtcacacgtgtcgatcgtctggctcgcagtatcaaggatctgcaggatatcgttcatgcgttgaacgaggaaggcatcaccctcaaggcaacggaacaacctgtcgatacgcgtaccgccgccggcaaagctttcctcgatatgctgggtgttttcgccgagtttgaaaccaatcttcgtcgggatcgccagttggagggcattgctgcggcaaaggcgcgcggtgtctatcgcggccgcaagccttccattgatcctgcagaggtatatcgtctgtatatggacgagaaaatgggcgctaccgcgattgcccgtcagatcggtatcggtcgggcttctgtctaccgcgtactggataattatgggcagccggcgtaa

SEQ ID NO: 457544 - DNA, 240 bp, Serratia marcescens
atggcagacaaacacttaacccaatcaccggcaggtgagtttgttatgtttgccagcgatgatggcgaagtgcgcgttgaatgtcgtcttgagcaagaaacgctgtggttgccccaggcgaccatcgcgaatctttatcaagtgactccccaggcgattacgcaacacatcaaagcgatctacgaagaagcggaacttgaacaaaacgcaacctgtaagtcttacttacaggttcaatag

SEQ ID NO: 457545 - DNA, 195 bp, Serratia marcescens
atgggatatttggggagcaaggcggcgagcggcgcttatcaagcgatcatcagccaaatgccgccgcatgacacttacatcgaaacacacctcggcagcggtgccgttatgtttcacaagccgctcgcggcgcgcacgataggaattgatgtggatagtaatgcgtttttgttgacgcgcggccgctggatttaa

SEQ ID NO: 457546 - DNA, 126 bp, Serratia marcescens
atggaattacataaaaaagctaaaaatttgaaaagtgaaacccatgatttaaaaaatgcggcccaggataagaccgcaggtaatattacaaagctctatttaactaaatttaagttgtatagttaa

SEQ ID NO: 457547 - DNA, 1344 bp, Serratia marcescens
atgactatagaaaaaataatcaaaaataacttgtgtactggttgcgggatatgtatatcggaagataaaagtgggtcttcctatatggagtggaatgatgatggttttttaacgccgaaagttactgctcaatctcacgtgggtgatatggaacgggtttgtccatttaatttagaaaataaatatgacgaggactttttagcaaaagagtttataaaagggtatagacatagtgatagttcgttgggggtgtataattcgctatatgttggctactcatcaagatatagagaaacatcatcatctggaggtatcgcaacttatgtttttgaaaaactgctctgctctaattctgtggactttcttttcgttgttaaagaaattaatgggcgctatggctatcaacttttcagttccattgaagatataaaaaccatatcaaaaaccagatattatccagtgactttagagtcgctttttacagaaatagaaaagattgatggtcgtgttgctgtttctggcgttgcgtgttttattaaagcaattagattaaaacaaaaactccatcctgagttaagagagaaaattccatttttagttgggataatttgcggtggtttaaaaagcaagtattacactgattttcttgcacagtccgctggatgtgaatctgaatactcacaccctgaatacagggtaaagaacagagagagctatgcatcagattataagttctcgtgtgaagggaaatatagtaatcgtatacatgttgtggagatgcagcgtttaggcgatatgtggggaactggattattcaaatctaatgcatgtgatttttgcgacgatgttaccactgaacttgccgatatatcgttgggagatgcttggataaagccttacagtctggatgggttaggtaatagtatagttatcgctagaagtgaattggctgctcagatcatagctaaaggtatcgataacggtgatttgaaattggatgccctcgatattgatcgagttaaagcatcacagcaaggaagttttaatcatcggcataaaggattgttatatcgagttaaccatgccagaaaaaataatctctcttttcctaaaagaagacagcgttttttggttaaacagagcatattctttgatttggtacaaaaagaacgacttattaccagggcgaaaagcattcagttctggaaagaaacaaaagaaattgttacttttaatgaaaggcttcagccctatctggtgcgacttaaccagaaaacatcgataaatcataaatatattcgtattaaagataggtttaaaaatttttttgggggtaataaatga

SEQ ID NO: 457548 - DNA, 1515 bp, Serratia marcescens
atgtcgaaaaataaaatcattgtgaaaaatagtctttttcttgcaattcgtacagtattagccgtaattatttcgttctataccaccagggtggtccttcaacagttgggtgcatcggactatggcctatatagcgtagtttatggtattgttggttttactgtttttttatcgtctgcaatgaatgaatcagttcagcggttcatttctatcagtattggtaaaaatgatgttcaagagttaaaaaacatagttattaatagttttctttcatatttaattcttggtactgtctttcttgctgctcttatgatggcaagagactatgtggtgagtaatttcctaaatattccacctggttcagtagaggtagcaaaggaattatattttctcgcagtgttggctatatttttatcaataatgcaaacgccgttaaatgcgctggttatagctcatgagaaaatgtcattttatgcatacatgtcaatttttgatgtaatctctaaattgataatatcttttttgatttcaatagtatcacaaaataaattatcaatttatgcaaccttactgttaatgtcgtcattgttggtttttgttatatatttatcctattgcattagtaagtttaaatattccctcgtgggagggagagtctctcttgcaataatgaagtcaatttctattttttcattctggaacgtttttggtaattttgcattcatctgtagaacgcaaggtatcaatatcaccatgaatttatttttctccacgacagtaaatgctgcatatgcactttctagctctgtattgaatgctctgtcatcgttgacacaatcacttgtaatgtccattaggccgcaaatttttaaaacatatgcagatggaagtatagaaagacatagcggtctaataatgattggttcaaaatatacgtttacattattgtttgtattaagcatgccaatactactctgcacagataaagtgcttgctttgtggctttcaagtacgcctgaatttacagcaacatttattaggtttgttctggttgtggctcttattgatagtttctcatctagtataattgcgggcatacaagcttcaggaaatataaaggtataccaaatggtcgtgggcttttttgtttttatcagtctcccgctgacatatttgatatattctttaggatatcctgcttacagcgcatttttgccattaattttgacatctttaattaatttaaatcttagggtttatttcctatgtaagaactcaaactttgccgcttctgtatattatcgtagtgtcattatcccttgtatctgtgcggcactattatccttggcaataaatttacttttgaaaaactatgttgtttatggtggagtgataaagacgattctaatgcttggtgtgcactctcttctctctttctttgttttctttatagtcgtagtatcttcaaaagaaagaacctatttgtttgattatgtgttaaggaagttaaaatga

SEQ ID NO: 457549 - DNA, 897 bp, Serratia marcescens
atgaggatggtaagtaagaaaaagattgacattattgttcccgtgtacaatcaaataaatgtgattgaaaatttcttattttcggcttcaaagatagataaggaaaaagttaatataatattagtcaatgatggttctacggatggtacggaatctaaaatattggaatttatttcctccgaagataaaactaacttttttttaataaataaatctaatggtggcgtttcgtcggcgagaaatgctgggctactggcgtctacatcgaaatatatttggttttgtgatcctgatgatgttatcttagataatttaagcaatgtgttttctgttatagaaaacaacccggatgctgatgcctttattttttcatacgaaacttactatactcaaaatggaattctaaagcaaaacatcagaagcaatgaggtcttaagtggcattagctttttagtgaaacataatagtttaagtaatgactattggcatccggcatcagatggcactttatgggacaaaatatataaaagggaacctattttagatgtgttgtttaacgaaggaatgatttgctccgaggattttaactttaacctcaatgtatttaaaagaataagaaaggtgattgtatcgaatgagttgctgtataaatactatgtgtacgctaacggtacgctgtcatcaacatttaacaaaaaaatatttgataacagattgcaggcagagcgggatacaatcagttttttgatggcgcataagggtagtgtaaggtcggaaatcaaaaagcatattttaaaaaatgttcgcttgctatctcaatattcagatggtgatttattttccttctataagaattgtgtcaagctttacaggatgataaaaaaataccttagataa

SEQ ID NO: 457550 - DNA, 570 bp, Serratia marcescens
gtgtcattcaacacatttaaagtatgggttattctttcttttgttacttctattttttttcttaggtggttttttttaacttctgttgttaaatttgcagtatatagaatgactgggagaatgaaccgcctcggatttaaggtggctttattaaaaattcagagtcgtacaaaattttggccttatgttggtaaaatatatggaaaggtgttggctcggcattatcttcgtcaggatttgctcgctctcggggataatactatcaaatgtttagcgactgcggcacctgatatttatgcctctcctttctccctggaggttaatcgctttgatgtcacgatctgtgcccactttacccactctggtgagtttattgagacattaaatgagattaaattaaaatttgttcgtgagcaattctcaggtcagcctgatcttttttttacagatcattatgatgacattccgctggctatggtcgctaaattcacctatattgtttctccatcaaaaatatctgaacgactattttcagaggctcttgatgtagaatgctatgcaattatataa

SEQ ID NO: 457551 - DNA, 1131 bp, Serratia marcescens
atgaaaatatatttaaatgacgctggtaatggcgacagcatcatactcgcaacagaaaatacaacaattatgattgacggtggtacagcagcctcttacaacatttggaaaaaaaacgtatcagaaatcaataaaattgatgctttatttgtaacacatattgataacgatcacgttaatggtctcattcgtatgtttgaagaaaaagctcatccagtcataaatgaaattttctacaatggcattgaacaggtaactaactctgagttttgtcaggatgattcaaataatgaggagtcaagcatacttgattctatgatatcaaatttctctgatgatgttgaaggtgaatcaaatatagggttttcggaaggaacatctctttcatttttattgagagaacttagttataatgtgaatgaaagatttgatggtaaggtaattaccaacacttcaaaaccaaatgtttttagtataggtgatgttactattgacattataggaccatcgaatggaaatatctcctcaatcaagaataattggcttgaggttttgtctgaatacggggtgaaaagaaaattaatcaataaaaaatgcagtgtagcatttgagaaatatatcgattcattaagaggtgatcttgatgttgaagatatatgtgaggcttcagaagaatcaattgagaatttatcgaataaaccatttattgatgataattcgttaaataatatgagtagcatatcttttatagctgagtgtaacaagaaaaaaatactccttcttggagatagtgatgccagaaccatcttagaatggatggattgtagaggttatgaaacaattaatgtggatgcagtgaagttaccacatcatggtagtaaacataattataataaagaattattagaaaggattttatgcaataagtatttaattagtactaatggaagaaaacatagtcatccagatttagaaacactagctaggattgtaagatactcaaaaaaacaaccagtaaacatttttattaaccattcaatatcacatattgatgagtcatttaaagaaaaggtatcaaattatagtcgtggctcaaatatatttacaggagagagagagattttgttatga

SEQ ID NO: 457552 - DNA, 198 bp, Serratia marcescens
atgggggaggcggggatcagcaaagagatccgcgaccgtatccagaatcacgctttgaatgacgtcagctcgaaacactatgatcgttatgattacttgcctgaaaagcgcagggcgcttgagatttgggaagatagggtcaacaactatcagcgacagcaggaaaacaacgttgtgaacttgtttgggcggaggtaa

SEQ ID NO: 457553 - DNA, 924 bp, Serratia marcescens
  misc_feature (878)..(887): n is a, c, g, or t
atgaaactcgtaacagccaatgagctggcgaaaaagtatggtgcctggcttgttgaaggaaaagagccccaacaagagcttgagcaacaacgcctggccgaagagcacattatgcagatccatcgctctcaaggatcgtttgaagagctggtgcatggctacgttaacaagatgaagctcgacaataagcggacctgggctgatgttctgaagcgtcttgaaaaagagtgctacacggttatccctcgagaaaccaaagcgaaagatgtaacacctctgcagatcaaaaccatcctctcaggcattatccagcgtgatgcggtggtgcatgctaatcggattcgctcgtatctgatggcggcatttaactacggcctgaaagctgataacgatccgattaataccagcgtgggtatcacgtttggtcttgaagttaacccggtctcggccataccgaaacagtcttcggcggaaaaagtgggtgatacatggctaacactggaagagttgcgtgttgtcatggaacagttcgccggggccaccaacgttgggccgctgatgcagcatctgattcgcttctgtgtttatgctggtgggcagcgtccgtttgaaatgattgccagccagtggagtgctattgattggcaacaaaagacgttgctggtcatagccgatgtatcgaaaaacaagcgtgagcatctgatcccgctgactgaatcggcactacaggaattagcctcagtgaaagaactgactaaggaaagcaacagtccctatatcttcccactctcgaccaatggagatcgaccggtacgcactgatagtctggcgcgttccatcatgtatttccgggcttttaatcctgagtttaaagtttnnnnnnnnnnacggcgcgagatttacgtcgcacctgtaaaacgttga

SEQ ID NO: 457554 - DNA, 774 bp, Serratia marcescens
atgtacgacacgcaggaagtcactgcacagctgcgggtgattgccaagcagctgcgggcgttttcctacagctattgcgacggctgcgagaccattgccgaggccaaaacctatcgcgagcagtttgccgaacgtgagggcatgctgatttggccgaacttcatcgcttataactcggtgagcggcgagaacgaagagttcccggcggtggcctacgccctggggctccgtgcgaagatcgacaacgagcagggctggcataagtcgctgtcaaacgtggcggtcagcaacgtgctcggcatttccaaagacgtcttttgggcgttgcaggcggaggactccgacgccaacgagctaaacgccaacgaagtcaccacgctgattaagcgtgacggcttccgcttctggggcaaccgcaccacggacaaagacgagtacatcttcgaggtgtacacccgtaccgcgcagatcttggcggacaccatcgcggaggcgcaatttaccacggtagacagtccgcttacgccagcaaacgtcaaggatgtggtcagcggcatcaatgccaagctgcaggggctggtcactgcgggtcggctgattggcgccgcgtgctggttcgatatcgtcgataacccgacaaccggcattcggcagggaaaagttgtggtgcgttacaactacagcccggtgccgccactcgaagatctgaccatgatccagaccttcaccgatcaatactacgaagcggccttcgcgtcgctgggaggggcataa

SEQ ID NO: 457555 - DNA, 516 bp, Serratia marcescens
gtggctatccctaaaaagctccggctgttcacgctgtatgtggacggcaccaaccacatcggcaagatcccgagcgtcaccttgccaaaagtcacccgcaagacggaggactatcagggcggcggcatgcaaggcgccgtagcggtagacctcggccttgacggcggcgcgcttgatgcgtcgatggtggtcggcggcgtcgttgaggagctgatcctcaaatacggcggtgatatcgacgaaatgcgtctgcgtttcgtcggtgaaatctacagcggcggcaccagttcgctgatggaagtggagatgcgcggccgcatcaccgaaatcgatcagggtgaggccaagcagggcgatgacaccaaccacacctacgccatcaagaacacctactacaagctgtcggtggatgataaggcgctgctggaaatcgacttgatgaactttatctacaagcgcgacgggaaaaacctgtatcccgatcgcattgtgtcagccctcggcctcggcggctga

SEQ ID NO: 457556 - DNA, 627 bp, Serratia marcescens
  misc_feature (590)..(607): n is a, c, g, or t
atgagagtcgcactagatagtcgatttatgcaaaaggttagccagggtactggaacatatacaatagaattagctaataatttagtttcttgcatgaatcgagatgatagactattgcttttggcagacgatccagcagttgttttaaccaagcaaaccgggcaacctttcttaaaggactaccgagtggaaataaagaagttggtgtcgggttggacgccaatgaacctgcttggtggttttgcacttgctgaatggcgtaacaaactcgacgtcttgcatacaaattatttatcaccgttgattacaaccaaaaaaacgaagcatattgtgacagtgcatgatgttatgtttcgtacacataaacagtatttcaatcctaagttgactaagggcttggaaattttcactcctgccagtttgaaaaaggcagaccatattattgcagtttctcattatacgagagatgagataataaataatttcggagtcaatgaagaaaaaattacggttgttcatgaagctgcaagtgagcagtttcatataaaggataaagcgaagtctcacgatgtaattactgctcttggtgnnnnnnnnnnnnnnnnnncggacgatttgctgcgataa

SEQ ID NO: 457557 - DNA, 264 bp, Serratia marcescens
atgaaacagccttaccgcattctgatcgacacgctgttgctgcagtaccacaccaaagcgaccaatctgcacagcgcttccgctgtggcaccagaggttcgccaggtatcgctgaacgattacgccttccgcctgtgcatcggcctgactggcctgctgagtacggcagaggctgctggcgatggcccggccgccgccgttatcgatcgtttgatcatgcgctgcaacaacggcgatattccacaacctgagcaaagggggtga

SEQ ID NO: 457558 - DNA, 480 bp, Serratia marcescens; identical to SEQ ID NO: 456832

SEQ ID NO: 457559 - DNA, 1086 bp, Serratia marcescens; identical to SEQ ID NO: 187081

SEQ ID NO: 457560 - DNA, 213 bp, Serratia marcescens
ttgcagggtaagctacaggcaacggataccgacaagcgtttttacacccatgaaatcagggaattggagcgctaccgggcgttgggtattcctgatggcaccaccccaaaaaatagctacgaagtctggaataatactcacacagcaacattagaagattaccagcttagttctgatgaaaacctgttatatacgccagaggctctgaaatga

SEQ ID NO: 457561 - DNA, 2568 bp, Serratia marcescens
atggctagcaaatcacttggaacacttacaattgacttgatcgcaaaaacgggcggatttgtatcaggcatggataaggcagagcgggcatcagaaaaatggaggaagcaggtacaaaaagatgttgccgatagtagtaaagctctcgctggcatggctacagctgctatggctgctgcaacagcaataggtgtagcaggatatcagctattgaaatctacttcagagcaagtcgccaatactgataaatgggcaaaatctttaaatatgtcaacgcaggaattgttggcatggcaatttgcagctgagaaagctggtttgtcaggtgaaaacatggctgacattttcaaggatctcggggataaaataggtgatgctgttttaaataagtctggtgaagccgttgatgcattaaacgcgctagggttgtcagctgaaaagttagcaaaagcatcaccagataaacaaatgttagctattggtgaggccattggaaaaatcggaacaaactccgcaaaaataaacattcttgaaagtattggtaatgatttatcaaaactactaccattgtttgataatagcaatgaaaaactaaagcagttcattcaactagccaaagattatggtgttgcaccagatccatcatctattgatgaccttataaaggtaaatgatattttccaagacatggaaagtcaggttaagggactaaaaattgaaattgcatcagggctagcaaaagttgatttatcaccattacaggactctcttgacaaggttaaatcggttctaaccgacccagcaattcagcaaggactggttgatttggtcagcaatgttgcgcaacttgctggctggtttgtccagacagctgcggcagctggaaagttactaaagtttcagaacaacagggttgctgttcttggcggtaacattgacgaaaataatttagatcaagtaacaggaagaataaaacaactccaagacatgattaataattggtcaccattaaaaggggacggacaatcttgggtcggaaagattttaggtgatgatgattctgttggtgcattaacaaaagaacttaatggtcttctggtagttcagcaaaagttaaatgaaaagaggttcgtgggtaataatctacctactgggctagcaacagtagttagtgagcagtttggtctcggtaaaggcgaaacgaatggtaagcctaaatctgaccctggtgcaaaaaaaattgagtctgcattcaaagctacagaattaaattacatgcggcagatagcgcttatcgaaacaacaggtaaaaaaactgctgaggttaccgaagccgaaaagctacgctttgatctagcgagtgggaagcttgttggtattaattctgagcagcagaagcgcctaattcaactagctgatgagttagataaactgcaagctttgaaaaaagtcaatgaagaaaatctaaaggtagctgcattagcagcaaatatgaaatcttcaaatgacaatgcgcgccaggagctttctgctgattttgtaggtgctggcatgggggaaaaaacccgcagcagaatgaaagaactgctgggggttcagcaagacttcattagtcagcagcaggacctacagaaacaatatcagactggtcaaattgacaagtcatattatgataaagcaactaaagtacttcaagattcgctaaatgaacggattgagatacaagaggattattacaagcgttcagatgaacaacgtgatgactggtcagctggaatttcagatgcgttagtagatttcgctgaacggtcaagtgattactatcagctatcagctgatgcaatgtcatcggtccttggttctgctgctgaatcaatctcaaatcatctttatgatctggcgacaagtgcagaatcattaggtgatttttttaaaggtattttttcagatctgggacagtcagtaataaaaacactagccgatatggcggcgcaatggattgtttatcagggagttcagttattagttggaaaaacggcacaagcagctgcaattccagcaatggttgctaatgctcaagctacagcgttacaagcacaactggcagcgtttgcatctacggcagctatacctatcgtcggcccggcattggctccggccgcgatggcaactgctgctactgtaacgatgcctatggtggccgcaatttctgcagctggtctttctggtatggcccatgatggtattgatgctgttcctgaaacgggtacttggttgcttcaaaagggcgaaagggtaacgactgctgggacaagtgcaaaactggacgccaccttggaacgagtgagtcgtgatgcgaatagcggaggtaatgcaccatatgcaccagtgactaatttaactgtcaatggtgatccagataaaagcactatacgcgcaatcgaggaggcagtatctcgcggtaataaacgactatatgggcagatgacttctgatgtcgctacggggcgaggtgatttctccaaagctctaggtgctggatggcaaacaaaacggagaacaggttaa

SEQ ID NO: 457562 - DNA, 216 bp, Serratia marcescens; identical to SEQ ID NO: 142298

SEQ ID NO: 457563 - DNA, 126 bp, Serratia marcescens
atgtatgaaatagataaaaacaaggccaaaaaagaagaagaaataattgaaagaatatattcattaattaataaaaaagaatctttttactttcaatccatggtttcagaaaaatattgtgcataa

SEQ ID NO: 457564 - DNA, 828 bp, Serratia marcescens
atggaacaagactataaaagaaaaggtaagcaaaatctgaatgatagggccgatgattatcaaggggatgaatcatcgtctacgcattataattcgagtgtaatacccgcccccaccctatttccacctgcacttcagttaagtcaggtggcctctagaaatatattgtcatctggaagtaaagacaatggccgcgatctggctgagctctatgaaagtgattactttaaagagtattactcagtgacaagggagcgggtggaaggggctgaaaattactttctctgcggagttaagataccaaggccgttcattaaaaaagagaaggtgatggattctttcgcaaagatagttaaagcagactatccaattaaaaatggtaagctttatcgagcgcacttgggcggagatatagaaataaagagtgatgggttgttaagaaatacatcgtctacagacagtgaaagttttgaagagtatcttgttagtctttttaatcacacggctgcaacaggaagttgtggtggcgtcatgtcattcagcgctaaaatgaaagtgtcccaaggcttcatggctgataataaatccttagtaaccataaacattgattcatttggtgagcaagtaaaagaaaatttcatctcaactccgcagttgattataaagtatggagcctcattgttgagtgagggaaaaatcaccgaagacattttgctcaaggctattgatcagttaggtaataaggagtacgagtttttcttcatcggtaagttaggtggtatgagatatggagaaattcctgcagaccatctgacaatttctcaatga

SEQ ID NO: 457565 - DNA, 885 bp, Serratia marcescens
gtgtccgacaatcccgaacacgcgttacatactttggcacattcactgtgctttcttccccatcacctctcacaaactgtccttgaccgaatacgacaatgtattcactacgaaccggtgattggcatgatgggtaagactggcgcaggaaagtccagtttgtgcaatacgctgtttacccctgcgccagcccgggtcagcgcagtgcagagttgcacccagaaaatccagcgctatccgctcagactcgcctcccatacgttacattttgttgattttccggggataggtgaatcaccgccactcgaccagatatatgctcgtctataccgacattggctcaataaactggacctgattatctgggtgctgaaggccgacgaccgcgcctggaataacgatatccagtgttaccggcagtggatttctcagggcgctgatcccgcgcgatttctgttcgtcctcagccaagcagataaaatagagccttgccgagaatgggatacaacaacccacctaccttctatgcggcaacagcagaacctgctagagaaggtggcacaggtgaacaccgtcttttcgcccgttcatcctgttttggcagtgtctgccgctgaaggtttcaacatacctcggtgggtcgaaaccctcatcaccgttttacccgacaaagccagcagtgcggttacccgtcaacttgaacctgagtatctgacggagaagatgaccaccacggcgcaggaaggttttgcccgtgtggtgggagacatctttgatgaaagtgtggaggccctgttggaatcacacacactcagaacatggttaaaacaggcccgctctcggctgctctctctagccaaattactctggcatcgcttcttttaa

SEQ ID NO: 457566 - DNA, 768 bp, Serratia marcescens
atgcgttatatgacgaagacaactactccagcaaagtctaaatctaaaaaaaatgatgtgaaggctaaattatcacaagaacagggaaatgcagcgtgtttcacctggcttagctccctttataaaaagaataaaaaaatagaattatcagatacttatccatgtggcagcatggagtttcagccaccaaggcatcagagaggccggcgaacagcattaggcgcggggtctaatagaacgcaaattcatacagatttggctgttagcctgagcgatctcagtcatctcgctatggtggaagatgaagcactcgatgatattaattccatgagaaatggtacttttatcgattatattaattcaagaaaaaattatatgctatcaattgtagacggaaaaatctattatcaggataaactgctaaatacaaatgagtgcggtcgatttaaatttgtgcaagatagaaatggtgaaatttatggagcagaaaccgaaaatgacccagagggaattaaacactcatctttaatgggaaatgagtggcctgtttcagctggaacaatgtctgccaacgatggggagttgaacgatatttcaaactcgtctggccatttcaggcctgggcaaacaaatcttaatgccacagtaagttttcttaagaaaagagacgttgttatatataatgtcagcccattttttgggggaaataatgtccgacggttgagtatcagctcccccgtcagtttcaggaaaaaattttatagctaa

SEQ ID NO: 457567 - DNA, 765 bp, Serratia marcescens
atgcgtatacccttccgcctgccattaacggcagtcgtgctcctggcaagccagcagcacgccctggccgcggcttccattctcatttggcctatcgatccggtgattgaagatcaacagcaggccaccgcgctgtggctggaaaatcgcgacagcaaaccggtgtatatgcaaattcgcgtgttgggttggaagcaaatcgcgggcaaagacgattacagcaaccaaagtgacgtgattgccagcccgccggtggcgtcgatcgcaccgggtaaacgccagttaatacgtcttatcaaacagtcggccccggcggcgggacaagagcgcgcctaccgcgttttagttgatgaagtgccggtgcaagaaaaatcgtcggatgcttccccctccggtgcggagatggggctgaaattccagatgcgctactcggtgccgctgttcgtcagcggcaagggcgtgtggaccaaacaggacagcgaaaaaccgcgcgattacgcgaccgccagccaaccccagctcagctatcgtctacagcagcaaagcagcgaacgctggctggaggtgcgaaaccaaggcgcagtgcatgctcgtatctcgaaagtgacgctgcaaggccgcagcctgaatcccggcctgatgggatacgtgctgtccggttcgcagatgcgcttcgccttgccgcccgccggcggtttcagcagcggcaagctgatggccacggtcaatgacaacaaacaacctgtcgttattccgttgtactga

SEQ ID NO: 457568 - DNA, 2478 bp, Serratia marcescens
atgcagtcgacaaggaggttactgccgcggtgtttcagcggtaaggcactggcgttttccatgctgggtgtggctgctggcggttggctgccgtttgcgctcggcgacgatctgccgtcacctgctgctatcagcatgccggacaccacgctgtatctggagccggtcgtcaacgggcggcaaaccggcaacgtcgtacccgtcaactaccgtggtggccattactacatgacggcccaacaactgctcgacgccgggctgccggtagcggataaacaggcgaaagaaatcgccgtcgatcggctggagaaggtggatgtcagctacagcggcgagagccagcagttgctgattaacgtgcccaacgactggttgccgcagcaaaccattggcgcccgttcatcattgcagcgcttgccggcgcaaagcagcctgggtttgctgtttaactacgacatctatgccagtcaaagcaacggcaatggccggccgggttacctgtcggcgtggagcgaacagaggctgttcgacggtttcggcgtcatcgccaacaccggcatctaccgcagcgggtttaacagcgggccaaacgacgatggcggccgctatattcggtacgacagctactggcgtttcaacgatgaccagcggatgctgagtctgaccgccggtgaccttaccaccggctcgctcccctggagcagcgccgtgcgcatcggcggcttgcaattggcgcgcaatttcgcggtacgcccggatcttatcacctatccgctgccgcagttttccggccaggcggcactgcccagcagtgtcgatttatacatcaacagctataaaaacagcaccaccaacatcaatcccgggccgttcaccctcaacagcgtgccctacattaacggtgcgggtcaggccaccgtcgtcaccaccgacgccctcggccgtcaggtcagcactacagtaccgttctacgtggccagcaacctgctgcagaccggtatgagcgatttcagcatttccaccggctggctgcggcgcaactacggggtaaattctgtcgattacggtcaatgggtaggcagtgccagtttacgttacggcgtcaatgattggttcaccctggaaggtcgggccgaaggtgcagccgagttggcggttggtggcatgggtgctgacattcgcatcgggcaatggggggttatcaatggatcctacagcgtcagccaggccggcgacgaagcgtttaacggcggccggccgatacaattccccccttattacgatccgctgaccggcaggccgttgcaacagccggaccctcagcccgtctatcgctacaccggtaaccacggcgatcagaggagctttggctatacctacagcacccaacgtttcagcctcaacgcacagcgtatcctgcgcagcgccgattttggcgacatttccgtgtataaaagcgactaccgtctgagccgccgcaccgatcagttgaccggtagcgtcggcctgggccggctcggtagcctcggcgttggctattttgacgtacgcgatgccatcgctcaacgtacccgcctggtgaacctttcctacagtatgtcgctttggggcaacagcagcctgtacgcctcactgaatcgggaaatcggcagcagcggttacagtgcccaactgcagctctccattccgtttgaccgctggggcacaaccagcgtcagcgccgcgcgcgacaacaataaccgctggagcgagcgcgtcagctacagccgtaccgcgccgactgatggcggtttaggctgggatctggcctacgccaataacccgagcggcggcgattaccgtcaggcggatctgacctggcgagctcgcaggctcgaagcccgagcgggcgtatacggcacccgtgatgatatcaaccactggggagaaatcagcggttcgctcgtggcgatgaacggcggcgtgtatgctaccaacaccatcaacgatgcctttgcgctggtatccacgcaagggtacgccgacattccggtgagctatgagaaccagccgatcggcaagaccgatgcccagggctatttactggtgccgactgtcacgtcttactatcatgcgaaattccagattgatccgctcaacctgcccgccgacgtcgtgctgccgacggtggagaaaaccgtcgctattcgcgatcacagtggttttctggttgagttccccatccaacccatttccgccgccgacgtcgaactggttgacgagcaaggcaagccgttggccaacggcagccaggtggcggtggttggcggcaatcaacagagctatgtgggttgggatggcatgacctatatcgacccggtgcaacaacacaatcgcctgagcgtgatcccagccgacggtggcccgccgtgtcaggcggaattcagcctggcgaagcctcagggcatccagcgcgtcggcccggttgtctgccgctaa

SEQ ID NO: 457569 - DNA, 2481 bp, Serratia marcescens
gtgcagccgacagggaggctatcgacgcggcgtttcagccttaagccgctggcgtttgccatgctgagcatggcggccggcggctggctgccgtttgcgctcggcgacgatctgccgccgccgcccagcgccgtcagcatgccggacaccacgctgtatctggagccggtcgtcaacgggcgccaaaccggcaacgtcgtgccggtcaactaccgcggcggccattactacatgacgccccagcaactgctcgacgccgggctgccggtagcggataagcaggcgaaagagatcgccgtcgatcggctggagaaggtggatgtcagctacagcggcgagagccagcagttgctgatcaacgtgcccaacgactggttgccgcagcaaaccatcggcgcccattcaccgttgcagcgcttgccggcgcaaagcagtctgggtttgctgttcaactacgacatctatgccagccaaagcaacggcaatggccggccgggctacctgtcggcgtggagcgaacagcgactgttcgacgggttcggcgtcatcgccaacaccggcatctaccgcagcgggtttaacggcgggccgaacgacgatggcgggcgctatattcgatacgacagctactggcgtttcaacgacgaccagcggatgctgagtgtgatcgccggtgaccttaccaccggctcgctcccctggagcagcgccgtgcgcatcggcggcttgcaattggtgcgcaatttcgcggtgcgcccggatcttatcacctacccgctgccgcaattttccggccaggcggcattgcccagcagcgtcgatttatacatcaacagctataaaaacagcaccaccaacatcaatcccgggccgttcaccctcaacagcgtgccctacattaacggcgcgggtcaggccaccgtcgtcaccaccgacgccctcggccgccaggtcagcaccacggtgccgttctacgtggccagcaacctgctgcagaccggcatgagcgatttcagcatttccaccggtttgctgcggcgcaactacgggttgagttctgccgattacgggcaatgggtcggcagcgccagcttacgttacggcgtcactgactggttaaccctggaaggacgcgccgaaggcgcagccgagttggcggttggcggcgccggcgccgaccttcgcgtcgggcaatggggggttctcaacgcgtcctacagcgtcagccaggccggtgatgaagcgtttaacggcggccgggcgatacaatcccccacctattacgatccgctgaccggcaggccgttgcaacagccggatccccagcccgtctatcgctacaccggcaaccacggcgatcagagcagctttggttacacctacagcaaccaacgtttcagcctcaacgcccaacgcatcctgcgcagcgccgattttggcgacatttccgtgtataaaagcgactaccgcctgagccgtcgcaccgatcagttgaccggcagcgtcagcctgggccggctcggcagcctcggcgccggttattttgacgtccgcgacgccatcgctcagcgaacccgcctggtgaacctgtcctacagcgtatcgctttggcgcaacagcagcctgtacgcctcgctgaaccgggaaatcggcagcagcggttacagtgcccaactgcagctctccattccgttcgacagttggggcacggccagcttcagcgccgcgcgcgacaacaacaaccgctggagcgaacgcgtcagctacagccgcgccgcgccgaccgatggcggtttcggctggaatctggcctacgctaataacccgagcggcggcgattaccgccaggccgatctgacctggcgcacccgcagactcgaagcccgagcgggcgtatacggcacccgcgatgaaaccaaccactggggagaaatcagcggttcgctggtggcgatgaacggcggcgtgtacgccaccaacaccatcaacgatgcctttgcgctggtgtccacgcaaggatacgccgacattccggtgagctatgagaaccaaccgatcggcaagaccgacgcccagggctatttactagtgccgaccgtcacctcttactaccatgcgaaattccagattgatccgctcagcctgcccgccgacgtcgcgctgccgacggtggagaaaaccgtcgccattcgcgatcacagcggttttctggttgagttccccatccaacccatctccgccgccgacgtcgaactggttgacgagcaaggcaaaccgttggccaacggcagccaggtggcggtggttggcggcaatcagcaaagctatgtcggttgggatggcatgacctatatcgacccggtgcaacaacacaatcggctgagcgtgatcccggccgacggcggcccgccgtgtcaggcggaattcagcctggcgaagcctcagggcatccagcgcgtcggcccggttgtctgccgctaa

SEQ ID NO: 457570 - DNA, 183 bp, Serratia marcescens
atgtaccctatcgacaccgcaatcgtgaacgcctgccacagcgggcaaggcggcaccggcgacgtcgcgatcctgaccgccgcgaaccggatgcagctgatgccgttcgcgcagatcgcgacgcggatcggcggcgcgatcgtcgtcacggtgacgctgatcctggtcgcgcacttcggataa

SEQ ID NO: 457571 - DNA, 555 bp, Serratia marcescens
  misc_feature (536)..(545): n is a, c, g, or t
gtgatcgctggcctgttgcttagaaactttaaaatatttagaaaccagcactacatcccaataatgcttgagaacagctccagttatttcattggtgaaaatggcgtagggaaaagctctgtacttttggcacttgataacgtacttaacggaacggatattaataaactagatataaacaatgaagctagaagtcaagggttcgagactagggaaccatttattgttccaatattcattattgagaaagataaaataaaaagaaacccagtaatgaacaggattcttgaagtgattagctcaatcacttgggatgtaaaacctgaagattttaattctctgcaaaagagtttagcagaaaagtttacagaacataggaaaaagctgtccaagtatcataataaaagaactcattacctcatcccgataggtttcattaaagagaaagctactgatatccccattgcttcaatgtcaatatttgaatcaatagagaaatacaatgagaaaatagaagaattgttcaccgcagagtnnnnnnnnnnccatggttaa

SEQ ID NO: 457572 - DNA, 150 bp, Serratia marcescens
atgtttgggattaataacttttctgaaatgagacttctccatccctgcattgtaataaagttgttcaacattatcatcttcatcattgaaatcttttattatattaaccattttatcatttcgattggaaaaaataaaagctctctctag

SEQ ID NO: 457573 - DNA, 300 bp, Serratia marcescens; identical to SEQ ID NO: 120059

SEQ ID NO: 457574 - DNA, 1005 bp, Serratia marcescens
atgctgaaattcatgaaattaactgtgtttgcacttgcactgtttagtggggtagtgaaagcagagccaggttgccagaatgccgaggtgattggtgggaagctgataacagatatatgttggagttgcctattccctataaaaattgcaggggtgtcaattagtggtggaggcggtgttgtgcctagtgatgcggttacatcacccctatgtgcctgcaatgataatctgggtgttccaaggccaggggtaactacgtctatgtgggagcctgcaaggcttattgagttccaaagagtcccaggatgctcctctgtgttgaatggcactcgtttcccatttgatcgaacaaatcaaggtcatcatggaatgggggatatggatgggggtgatggctcttttatgcactaccactattatgcgttccccctgcttattatgctcgatatgttcataaaagagagctgtaatgcggatgggtacatggatctagacatcatgtatctttctgaggtggacccgacttggaacaatgacgagctcgctttttttactaacccagaggctgcggcagtagcaaatccaatcgccgcaacagcctgcactgctgatgctatttcttctacggcaggaaaaccactcaagcagcttttttggtgcgctggttcatggggggcgctataccccctaagtggaaaccaaaatggcggtaagggggttatacgtgacagcagcctgctaactactcgtgttttggccgcgttgcaccggagagggttggcgtggaagactatgggctcagatgcaatgtgtcgtggagtgataagcccgacacttccaaaaacacaatacaagttcacgttgctacatccagttcctgagacaaactcatctcatgtgataggggagtcggccttgacttgggggctatcgaggacaattccatcaataggccaagaccctatctataccatttggaggtggaacgactgctgcaataattga

SEQ ID NO: 457575 - DNA, 399 bp, Serratia marcescens
gtgcttatcgatgaggccgaaaacctgccgtaccgtgcgttggaggtcatccgccgcattcatgacaaggccggtgtaggcgtcgttctggccggtatgccgcgcttgatcctcaacctgaaaggcaagcgcggcgagtatgcacagctctatagccgcgttggctttgctcttgacttgcaggagaaactgccgcaggcagacctgcagcttatcctcaccaacatggtcgaggaagcgaacagcgacagtgttttttccgccttttacaaggcatcaaaaggtaatgcgcgccggttgttcaaattggcacgcggcaccatccgcgccagcgaaattaacgccacgccgattgatgaggcaatggttgataaagtcgccggcatgttaattagttaa

SEQ ID NO: 457576 - DNA, 564 bp, Serratia marcescens
atgaactctgaggataatggccagagaaaatttattttagtagaaaatggtgatccttctaataaaaaaatcaaccgcgatcactatgtgaataatataacggctgaacgaattagaagagtcctttccggtaattgggctgacaaatcccagcatccaaaaatcaatgaaggattcaatttctatgaagctaaaaagactgtcagcaaaacagtcatcatggaatctaatagagaaaatttggctgatattattttacaggttgttgaagatgattctaaccgtttagattgtcgcatggatggctataaatatctaattggaaagacaaaacttggctttggaattgcgttggtgtgggaagcaggcaaagccaatggacatcagcccttaacaagagaaatccgttcagtaattatggatgaggctaagaaagcgaatgtgaacagacctgtttatatttatgctgtagccaatgtatctccgttgaatgatcagctttaccgcttccagcagattcctgattcaattctggcgagattaaatttactggaagaagagtaa

SEQ ID NO: 457577 - DNA, 543 bp, Serratia marcescens
atgaagtcgcattcctcgccagcgtcagcagccaccagcatcgactcaagcgagcggtgcggccaaagaattgtggtcgccttcttcaactgctcttccccgcgatacccaagtgtgcgtaggtcgcccagcaccttcacaattcgcgccgcgctttcgtcgtcccactgctcaggcatgattttcccccatacaccgctgccgccgctgcacttcaacttcccatcggtgttgccgccgtacatatcaccccaggcgttcagcagcgaagtgatccacaatgtttgcagccgggtcaggcgctggtatttacccaggtacttcttgcgaggaacaccggcaacagtcgcccaggcgttgtgtttgatttctcgtttctgttttggggtcatcatgctgccttctcctgcttcaatgctttgcgtttggctttatacgtgtcgcggatgcgctcatagtcactgcggcctagcttgccgactttcggcggtggcccaattaaccggtcaaaacgtgcctgcccgatttttgctatcaggttag

SEQ ID NO: 457578 - DNA, 195 bp, Serratia marcescens; identical to SEQ ID NO: 436095

SEQ ID NO: 457579 - DNA, 930 bp, Serratia marcescens
atgcctgaaaaggtattccatacctgcgtaacaagcccgccatattacgggctgcgtgattatggtgttgaggggcagatcggcctggagccgacgccggcggagtttatccaacgattagttgaagtcttccgtgcagtgcgtcgcgtactccgtgacgacggcacgttgtggctgaacattggggactcatacgcgacaggtggccgtggcggcggcgggtctttcatggatgctcggcgtgatggggcttggaaagggaaaagcgcagtgaccggatggcgttcggcaccgtcgggtatgaagcataaggacctgataggcatcccgtggatgcttgcgttcgcactgcgctccgatggttggtatctgcgtcaggacattatctggcacaagccgaacccgatgccggagagcgtgcgtgatcgctgcacgaaggcgcatgagtatgtatttctgctcagcaagtcgccgcgctactactttgaccatgaagcaatgaaagaggacgcggtaggcggccagtccggtaacgctgcaacctttaagcgcgcaggcagcaagagagaacagagaatccctagccagggctatggcactcataggcttgaacgagaggccgttgcgtacaacggtgagaaacgaaatcgccgaagtgtctggaatgtggcgacacgagcctttaaaggagcgcatttcgcgacgttcccgccggcgctgattgagccgtgcattttggcaggttgtccggccggtggtgctgttatcgatccgttcggcggtagtggcactactgcgggcgttgctgcggcatacgggcgtaaggcggtgctgtgcgagctgaaccctgaatatgcagctttagtgccgggcagggttagcgacatagcgaactcaatcaccgaacaacgaaataccaggaacagctaa

SEQ ID NO: 457580 - DNA, 132 bp, Serratia marcescens
atgatgaagaagatgctttctgttgcaatcatggcggccgcggtcgctgcgccggtggcttttgctgaagacaattccgccggtggcgtgattaactttaccggcgccattaccgacaccatgtacgattaa

SEQ ID NO: 457581 - DNA, 807 bp, Serratia marcescens
atgaaagagacagaaatcagagaaaaggacgattcgtccctttttggcgaaggaaaaaggacgactgaggttgagcttagtgagaagttgagtaacccttgggttagtgcgcaggacattgctggtttaccagatgttccaactacctctagacgtgctcgcgatcttttggaaaaggcgacagcagataaaccattattgagacgcagaagaaaagggacgaaagcgacggagtatcatgcatctacgctgcctatagcggctattcgagagcttcttcgattacagaacgagtcgaaaggagagttagagaaagaggtacccaacacgccgagaacttcaagtggtagtggtaatgagtattctttctctgatttcttagatgagttcgcactaataccagggtatagagtgcaggtctccgctggccacggaagtgttggtgatacaggcactgagccatgtcgtcatttggcgtttcgtcgcaagtggatgagatatagaggttttaaggaaagtgagctggtagtggtctgggcaaaaggagattcgatggagccaactatcagtaacaacaatacactcttgataaatacgtcaagaactcgtcccacagatggtaatatttatgttattcgtcaagaggatatgctgtgggtcaagagagttcaggttctccttgatggctcctggttattgattagcgataacccatcatataagccattagaaataaaaccggattcgatgcacaaccttcaagtcattgggcaggtagtgaacatcgcaaaggacattggagactga

SEQ ID NO: 457582 - DNA, 480 bp, Serratia marcescens
atgaacgagtcatacgtacttgctgaagtcagcaatgagaaccagacgctggttgcggtggttcagcaagggagcagggcagcctatttttatatctatcccgccgaagcctacagcgatcgctatcaggtgcgcgcctgctggctgcgcaacctggccgccgcgccgctgcaggaagatcgcgccgcgctggaacaagggcagccgccgatgctggcggcggagtattgccgcaacctggaaggcgaagcgccgctgaacccggaagggttgatggtggtgtggagcgaaagcgacgacggcgcggccctgtggtattacggccaactgctggcggtgatccccggctggagcctgtatatcgaccattcggtgtgctattccgccagctgcatcaaggagagcccgctggcctatccgctcggctcggcctcgaccaacacccagtatgcgcaggcggagagcacccgccagttctga

SEQ ID NO: 457583 - DNA, 909 bp, Serratia marcescens
atggctatcgctctcaacaccggtaaagtttatgcaggctttcgggagcctctcgatttgtcggcggacattcttgatgccaccgcgttatttaatgcctacaaagcccgcgtgcaggccgatggtggcattattccgaatgcggcgggctgcaaggaacgctttgagtttttggtcaataacggcatgtatgagaatgccgtgatgtgtgccgctcccgcctttggcgtcaaactgggcggcacagacggcaacgatgttttgactgtttacagcctgctgggcgaaagcaccgacctgattccggcaacccagggaaccggtgatgccgttcggtatgactcaacgaataagacggccacggtacggatcacctccagcggcggcacctatctgcgcacacgcgagaatgtccgtgttcagattggccgcagctatatgattgccggtcggctcagtgacgcgagcaatgccgatgtgctcgggatgactatcggcatctcgttatcaaacctgccgctggcgtacatgcgcacgatgataacgaaccagcaggccatcacggaggcctggcgttttggcacccgtgacagtgcctggacggggtctgttgccggtggggctgtgggtgctgcggcaacgacgtatgcggattatgtgcctgctgctggcctgttcaaagtggatgagggggttgtttacgggtatacacgcgggaagctggacaagacggctacggccaccacgggcaagttggcagacctggtgaactttaccgcgccgatcgttgttggtggtggcatggcatcaggctcagtatctccctgctacggctcactgcttgatatgttgttcctgcatacggcatcggaaccggatgccgtgctggcatcacgctttggtatgtag

SEQ ID NO: 457584 - DNA, 522 bp, Serratia marcescens
  misc_feature (5)..(14): n is a, c, g, or t
atgcnnnnnnnnnntgatgattttcgaaataatttgggaatagataggattattcaaatttcaagaaattgtataaataatttcgaccaatactacgattttgaatctgcatacccaactaacgttgagtcaaagatctcttacaaacaactcaaagatttggatttgaatagcgattcaatcgtaaaatatataaatgaaatggccaaaacagaagctttcattcaaaaattgcaaagctctggagatttaacaactcaagaagaaagactaatatatcaaaaagcgtttgatgaatggcaatcacgtcattcagcaacgtatatacgaagccgttttacagaaataaatgaagatcatctcaataaagccttctctgtctatactgaattgacaggaaactgtaatattgtgttggataaaaatcaattacctaaatctatgactacaggaacgttcttgctcctttcagataagcccaaaataggatggcttcaaaactgggagtcagtctataaatga

SEQ ID NO: 457585 - DNA, 591 bp, Serratia marcescens
  misc_feature (579)..(588): n is a, c, g, or t
atggatttctttgaaaaaactaatgctgacaaaaattcaataggttttacctatcaagattacgttgctttaaaacatgccttagagcttaaaccagaagaacacattgggattgaagtttatgacgatctccatcttgagagcatcgagggtcataaaacctttatccaagttaaacattcaattaacaagtctaatataactaataaagacatagacttatggaaaacattatataattggtcagaggcgattaagaccataggcgacaaaagcattagccttattttttacactaacaaaggtcttaccttagagcctggtatcgtgcaacttttgactaacgacactaaggacattgaaaaaataaaagatgaaatagaaaagatagaacaagatcataaaaataagtcagatgacctctataagtatatttctatcataaactcactcgatagcaattcttctaaacgtttatttaatagtataagttttcaacatagcgaagatgggatcatccgccaaataaaaacattactaaaaacattagcaatccctgatgataaaatagatgatgcnnnnnnnnnntga

SEQ ID NO: 457586 - DNA, 969 bp, Serratia marcescens
atgcggcttaatttaatcgacgccatccgatccgtacccaggtaccacaatgttgccaataataccttcaatcatcctgctgctgagttttgcccgggttatctcgtagtgcttgcagcacacataagtcggcatcgtatccctgagtctggatgcgttatgccgcacgatgattatttgaaggcaatcgcatggcataaagccttgtggggtgaggatcgttacagaaaggaacggcgaaacatcgggcataactatagcctgattacacctttggtaagtcctgactcggtagatgactcaaccactagcattaacagctgtatcagaacactggcctgcaaaaaatcgactgactgccctgaaggcatttctgcattgattcaggtcgtcggagaactccacgacaatgtttggtcacatggcttatcaacgggcttttcctttgctcaaaaatgggctgtaccaggaacgaatcccgcagatcattacatcgaatttgcgttggcagaccacggcaaaggttttctggctgagcttaatcgggccaaaattccagacatcaaaggccatgccgacgccatccgctggtgtattcaagaggggaactcctccaagcatgcagatttacaagacgattgggctcaaagcgttcctagttggcactctggcggaaacctgtttggatccggtgttgcggttaaagaaaaagaaaataaccatcaagggcttggcttataccacctattaaaattgataaaaagctataatggggaattgcttcttgctacgggtgatgtatgtttatcagtgaagcaaggcaaagaaagttacagacccatggccgcctcgtggcagggtgtagcgatttcttgcaggttcaaggtttctgagttgtctgccgtgacagaaagcgatgtagatgcagatgtgatggatatcatgagacgtttgagggaggggttatga

SEQ ID NO: 457587 - DNA, 1320 bp, Serratia marcescens
atggctaatatctatggggtgtgtccaaagggagccgcgtcgcacaagggctaccgcgatgttgtccagcaaacagacccgatgatttcgggccagttgcggtcatcaataagtggagcacaaactttgcagctaactttcggttacttacaagcctggcacaactcatttagagttgagcaagttttgtgccgacgaaattcgcacgtacaagcgaaacaggaacagtattccggttcacccaaactcgacgaggctccaagtttggaggctcagacgatagccgccatctgcacaccgggtgtacgaaaaatttctcatacccctcagcagcaggggcaggtagcaggcaaagaaaagggccggactgcgaatccgaccctttggatgaactcatatctgaatcatgaggtaaatcaatatagtccagttttggacgatgcccgtaagccagatttggcctacggtgatttccgtagcgcaactttgctctacgagaaaaatcagtatcttgcagcactgcaggatagcttaccctctttaagagggggagttaaccgcttgcgtaccgataatatcggtacgcaaaactacaccgaaacttctggggaagtaggctgcatctctttggtagatgtagttcagttatcgacctacaaaaaaagtgtaggtcagccctctggcgattccttgggtttcttgcgctgccggcgtttgatctcaccttccattgcggtgacgatgaaaccagaagtgctttcgccaacttcttttactgactccatcgcatcgactatctcatggggcactctcgcctttaacgactgtgattttgcattgactgttccggtagccataggttctctcgtgcacggtaggtgggccacagtatacacagaaataaatcaatttaaatacttgacgtgggccacaccattaaataaagtggaccacaccttggttgtgtcagggtaccaaaacggcaacgccccagagtgcgggaacactactgaggcgtctatccacaacgttaccggagataacactatggaattatcacatagtacccaaactcgccctaaatttgtatacctgttcttgggaactcccaacgaatttcctgactccacaccgacagtgttacgagctgaggctgattctgaggttgacgctcgctccaaattccctcgctggacgctgacctttgccgctcaaatccgcacggctgcaccttgtcgcctgcaaattttctccactgacgacggctttatgtgggtttacgaacagcgccaggcgacgccggaggtggctcatgcataa

SEQ ID NO: 457588 - DNA, 198 bp, Serratia marcescens
atgtcgcaatcactaatccgtcttcccgatgtccagcgccgtacaggttacagcaaggcctggatctatcgactcatgtctcaggggaaattccctgcatctgtaaaaattggcactcgtgccattgccttcgttgaaagcgagattgacgactgggttaatcaacgaattgctgagtcccgcaaggaggtcgcctga

SEQ ID NO: 457589 - DNA, 1326 bp, Serratia marcescens
  misc_feature (27)..(36): n is a, c, g, or t
  misc_feature (1311)..(1320): n is a, c, g, or t
atgcctactttaccgcatttggtctannnnnnnnnnctacgaaatgtcgatactgaaccttattgtgccctacgtctcgcccacttgttgggttgtttgtggcaaccggcgcgacaaagcaacagtcagtatcacggccaggggatcagtcttgccgtcagcggtaactttaagcaactactgaatcgctcttatgatagttccctctggaccacaattatcgaccctaaggtgacactcgatttctttaccaatcaaaaagatgtcgtgctaattcattactctgaccagtacaccagttgcgcaggttatgatgccgtaactgtcacaaaacaggttgaattgttcttgcgtctgcttcagacaggcaatcaaaccgggcaatccaccgttgatagccagcagctacttgctgaatttaatgcctttaacggcgagtggctgttgaaaatgttgcgttcaaatgagaaggaacgcaaagagaaacacggcattatcggtgcatacaaattcgtacagtctatgctgcaccagtcagatatttgctgggttccattgtcagtagcagagatgatccgcgtgtctggcaacgtcgggctgagaatgaaagaaagcgatttatctcgccatttacagggttatcagaaaggagcaatctctgacgatgtgctctttgtcggcttcaaagataacaacctgtatctgttaccacttgaagtaaaaacaggggttcgccccgattacaaccatgctgggcagcaggcccgcgagctaaaacgctatttacaacaagatattcttgggctgcaaactctggcatcacagctataccgggctctttttatccgccaggtattaatgcaggtagaaaagttgcgtctgtatggtgtactggataacgacaagctatcccctctcctggagcgacgcgaatggtggctcactggcgactatcaattaggcgagcttgctgattatgcagaaggctttgtggtagctcatgtagacagcggaacctgttttgatctctcttataaagaaacggcagagaaaattctacagatcgaaatcccctattcattgcttccatcgttaattgcagcacaaggcgatcaacctccactagctgaacgctatcgggtgccggaaaaatatctgctcaaaccagagtgtgatgtcaattcttcacacccagttcaggtggcaacaacaactgagccgcagcccatttctgtgccggagcttccacaacctgaagcatcggcactaccccccagtaatgtcagcaatacaccattacaggtcttgttnnnnnnnnnntcatga

SEQ ID NO: 457590 - DNA, 2727 bp, Serratia marcescens
  misc_feature (2698)..(2707): n is a, c, g, or t
atgtccgcaaaacagtatgaaacctatctggcagaaaccttcattgaatgggttagcagcatcatccagcctggtgagcgctaccagtttaaatctcccgatccggataacgccttaaagctctggatggctttcgattctttagcgaatggacataaactagaaattgcaccggggcaataccttacctacgtccaatgcaataatatccagcttattccggtactgcacggcacaactccccctgcattcacagaaaactatatttctcatttacgcgatcaggtttccggccgcaatggcatttttgcccagacggcgttgttgattatccacaacagcatgctggataccttactcaatagtaccaaagatgtcgctgcaccggatgctatctggcatcccgaaaccttccgtcaccagctcgaaaagttaatcacaacggacagcgcccgttctcaagtatcccgctgtttgctgggagatcagctgacaacaatattggacgaaggcgcaacagtttttggattttcatcgttataccgtttgctggatgacggcaatctggatttctctgagctaaagttatttaacgataataatctgctggactttagtgataagcagttacgcgctaggctcaatgaaaaccaaaagttatatcgtcagatagaggacagtgttgaacgctacagcgggcaactggagaacgttctaactgaatttagtgctaaattcattcaggagcatttcgttgacaatgacaactggcgtgaactcgatttttccgactacgtgaatgaaaaagcacaaaacagtgaacagaaactggtattggaaaacattactgtcgaaaatggtgaagtgtggcaaagagctaaaagtaccagtaaagcaggtaaacgtgatatcagtgtcctggtccaggttccaccgggacaaaatcatgttgagctggaatttatcttccagggtagcgaccttcaggacaatcaggtaaaaattgctcatcatcgtcagttacagaaagaacgattctggcgtaccagccgacttggggggagaaactctaagattctggcatctgtacctttcgatggtcggccctgcttctttagtctcgaaattatcaaccgcaataactcggcggaagagtacaaatttcgcctgctgttagttgaacaagggcaattctggcttaatgaaatccagcattgttaccgtattgaaccaagtaaaggtcaattaactctgcaactggaagataacgaattgcgtattgccgagctcggcgaccagacttgtttacttgatgaagaaagtgatgacattgattgtcaccattatgcactcgttaattttgaaactctggcgaatcaaagtgagctgatcaaatttacactgacttcaggtgactcccgtttactattcaacatcgaagggccaggagcagaggaaggattaactctgcctctactttttgatcagagtcgtttcaataaactctttaaagaagaagggaatgcaacctggaacaagatgaaaggtcgcgtaatcctggataatatcgaacataatgtggttggtgtacgccagcagttgcttatgcaagagtacactctaattgagagtaatctgctcagcacaggtagcaatggtaatgggtttgctctggatgagctactggtaagctaccccgctctccataatgcgtaccaccaattgttcgtttactatcaacgacgaaatactctgccgagtctggtgtcgtggtcagtggaatatcgtgtattagtcagtcacatgatcgctacctttgaacaggcattacagcaaataagtctgagcagagcattaactacccaagaaaaacggctcttacatgtggggatttgccgcggcgaggattatgaacgtctctcacctctgcacccattggtaatggcttatcatttacagctagctgaaactatcatcgcagagcccggattccctacatcagcttccttcgcttcattaccagagattactctcgatcgtctggttgtctcgggcttaatgccatttgtgtatcatagcgaacatgaatacgcacagttacaaccgatggcagaaaaccgcttctggatagatattgttccccagcgccagatgagccatgaatacgttaagcgtcttgtgaaagacaagctaaacgaatttacagacgcctattcccgcttgttccagagtgctgggaataatgcactagttattaatgctattaatattggagatgccagagagctctttttggggctggtagattattttaaacaggaaaaagataacgcaatttcgatacacgtaaactgctatgacgaacgtctgttccccaatgcctttgatcgctttgctgaaagtggtagctatgaacaacttaaaaatgatcttggcctgaacagcggtgcgtggcgttctgaagccgatatgttgatcgatctacttcgcagtcgcttaacattcagcaaatttgtcctgccaccggaaagcgataaactggcttacgcccatctcgcatttttcaccaacaccgcaccggttgattgccgccagattcgcattgaggatgctgccagtggggtgttatgtcatggtcttattgcgggtgaaggggctgaaacacagggtgatgcctactttaccgcatttggtctannnnnnnnnnctacgaaatgtcgatactga

SEQ ID NO: 457591 - DNA, 354 bp, Serratia marcescens
atgctcccgaatcgaatggcgcttagccgtcagactgaagatcagcttaaaaagcttaaagggcatactgggattacaccaaatgttgccgcccgactggcgtttttccgctcggtggagagtgagtttcgctattcgcctgagagagatagtaagaagctggatggtacgctggtgctggacaaaattacgtggctaggggaaacattgcaagccacagaactggtgttgaagatgctttatccacaattagagcaaaaggcattgattaaagcgtgggcggcgcatgttgaggatggcatagcagtgttaagaaaccatcgtagatttactgattttacccaagcattataa

SEQ ID NO: 457592 - DNA, 435 bp, Serratia marcescens
atgacgatgaataaatggtcgctgctgggattgtttatcgggttggccgcatccatctggtacatccgcaacgactcatacaacgacggtctgaccgccggtcgtctggagtgctcccaaggccagactcagcaagccgccgacgccctcaaccagttcattgccggtactaaagcgctgacagcccaggccaatgccgccagccaacagttggcgcagcagatcgccgaccgcgcggccgccgataaccaatccactcgggagttccgcgatgccctcaaaaaaaccgctgacagtcgcgctaattgcgtgttcgatactggtgtcatgcagcaactcgtcgccgcccagcagcgtgctgttgccgccgcaacaaacggtattaccagccgaactggcggtaaggtgcccgccaccggcgctgccggaagataa

SEQ ID NO: 457593 - DNA, 297 bp, Serratia marcescens
atgcgtacgactcataaattatcgttggtggtggaaagcgaaggtattcaaatagccatcatcaccataagtaaagtggttaccacattatctgcccagggaatttcggtaaagagtatcgacatcgaagaaggccgccgtccaacggtgaccatttacccaaactctaccactcgcaggatggtggccctgggtaaggcagttcgatattcaacaggtatcgacgattttgggcgctatcaaaaattccagtatcaactggataagtgtcgtgtcgtatgggaggaaagaacgtaa

SEQ ID NO: 457594 - DNA, 156 bp, Serratia marcescens
atggtggctgcaaatacaaaagatgccaccgaagttgaactgaaacttttggaggaattgaaacccgcatttcaacaaatggcgctgaaagagttaatagacagaggatttaaacctgccattaacttccccagtaaagacaaaacccatcattaa

SEQ ID NO: 457595 - DNA, 207 bp, Serratia marcescens
atgagcctgcaatgcacaacctgtggtgaagatgttgaactgctcgattttgagcaggccgacatcaagagagacggcgatggcacctggtgcgttgatctcgtcctaacctgcccgcattgcgggcagagctacaacgcttttgtgcctaccagcgagcttaagccgctgcatcacgatgattactcggaggggatatgtctatag

SEQ ID NO: 457596 - DNA, 933 bp, Serratia marcescens
atgtcaaaagcaccgtttccgattgacccgcacctgacggctattgccatcgcgtaccgcaacaccagcatgatcgccgatgaagttttgcctcgcgtcccggtcggtaaagccgaattcaagtggtggaagtacgacctcggccagggtttcaccgtgccgaacaccaacgtgggtcgcacttcgcaacccaaccaggtcgaattcaatgcggaagaagaaacttcttcgaccaacgactatgggctggatgcgccggtaccacagtccgatatcgataatgcgccggcgaattacgatccgttggggcgtgctgcagagcgcacttccgatttgatcctgctggatcgtgaagttcgtaccagtaaagaagtcttcaacgcagcgaactacgcggccggtaataaggaaacgttggctgcagccgaccagtggagcaacgataccagcaagccgatcaagaaaatcaccaccgcgctcgacaagatgattatgcgcccgaacgtggccgtgtttggccgtgcaacagcaaccgccttacgtcagaacccgtctgtagtgaaggcgtacaacggcacaatgggcgaagatggcctggtgccactgcagttcctgcgagatttgttggagctggacgacatcctgatcggtagcgcgttcgtcaacattgcccgccctggtcaaaagccggtgttggtgcgtgcctgggcgaaccatgccgcattcatctaccgcaacaagctggcagatacgcagggcggcgtcacctttggctttaccgctcagtttggcaaccgagtgtcgggctctattccagatccggatatggggttgaccggcgggcagcgcgtgcgtgtgggcgaacgtgtccgcgagctgattgtggcgcctgactgcggctatttcttccagaacgccgtcgcagcagcataa

SEQ ID NO: 457597 - DNA, 441 bp, Serratia marcescens
atgcatcagtacggtcagttcgcgctgggcccctttggtgttgaggttgaacttctccgtgccttcggagagatggtcgatggcttcacgctgtgcgcccagtttacccaggtaatcgttgaaggtaccgtcgtcaatgagcccggccttacgggacttacgcagctgcgcttcctgggcgtcgagtttacccagcgctttcgccgtcggatcaatgctgccgagcaaactgtcgaggtctttcttcaacttctcgacttctttgccgtgcgcttccgctgctttggctgctgcttcctgagcctgagcggctttctgctcctgctgatacagcgcatggccgcgcgcgctttgcgcgttctgcgcggcggtcacttcctcggcgctgcgggcagcacgttgagccatgaggaccgagttctgcagctcggtgttgagtga

SEQ ID NO: 457598 - DNA, 909 bp, Serratia marcescens
atggctatcgctctcaacaccggtaaagtttatgcaggctttcgggagcctctcgatttgtcggcggacattcttgatgccaccgcgttatttaatgcctacaaagcccgcgtgcaggccgatggtggcattattccgaatgcggcgggctgcaaggaacgctttgagtttttggtcaataacggcatgtatgagaatgccgtgatgtgtgccgctcccgcctttggcgtcaaactgggcggcacagacggcaacgatgttctgaccgtttacagcctgctgggcgagagcaccgacctgattcggacagcgcagggtaccggtgatgccgttcggtatgactcaatgaataagacggcaaccgtgcgtattacctccagcggcggcagctatctgcgtacacgcgagaatgttcgtgttcaggttggccgtagctatatgattgccggacggctcagtgacgcgagcaatgccgatgtgttggggatgactatcggcatttcgttatcaaacctgccgctggcgtacatgcgtacgatgataacgaatcagcaggccatcacggaggcatggcgatttggcacgcgtgacagtgcctggacggggcctgttgccggtggggctgttggtgcggctgcaacgacgtatgcggattatgtgcctgcggcaggcctgttcaaagttgatgaaggggttgtttacgggtacacacgtgggaaactggataagaaggcaacggccaccacgggcatgttggcagacctggtgaactatactgcgccgatcgttgttggtggtggcatggcatccggctccgtatctccatgctacggttcactgcttgatatgttgttcctgcatacggcatcagaaccggatgccgtactggcctcacgcttcggcatgtga

SEQ ID NO: 457599 - DNA, 375 bp, Serratia marcescens
atgaaaaaaaacataatcgtaggattcgtttttctgaccttggcaggttgttcttcagtaggcaaccagtcattgaaaaatgagacgcaggaaagtgtgaaaactaaaattgttaaaggcaaaactacaaaacaggacgtgttagcatcgttcggtgaacctgacagccgttctttgatcgatggtgaagagcaatggtcatacactatgtataacagccagtccaaagcaacctctttcatccccgttgtgggactgcttgcaggtggagcagactcacaaactaaatctctgacagtttctttcaaaggcgaaaaagtcagcacatacatctttaatgctggaacaagcaacgtgaagactggcattttttag

SEQ ID NO: 457600 - DNA, 687 bp, Serratia marcescens
gtgcgccaggcccataccgtagggttcgtcgtcgtggtcagcgccggtcgcgaacgaccagaagtacggtgccgggcacgcctcaccggtggtcatattctgcggtgtcagcaaccgcagctcgcctgtcgggctgaagcggaagcgccgacggtcgcgcaccttgacctcgtcgaaccacaacaggttgtcgcggaccccgtaaatcagttcggcaaccgcatagccgtaaaacacaccgtagtgcatcagacgggtgatgcggtcaaagcccaggctctcaatttgcaggcgcatggcgtcggcggcttcgatatcaatcggccgttcaccaccggcttcgaccttaatctcgcgggaaatcaacgcatcctggcgctgggtgaacgcggattttacctcctcgtcgctcagcacctcacggtaaattttgaggtctggcgctccgcgactctgcagaacgctgtcctctgcgagcgccagcgcaccgacccacgggcgggtaatatcgcggccgtcgccggtggacgcaaactcctgacccagttgcggacgcggcatggcaggcgtcgcctggcctggacggcgtcggtttttacggctcatataaatcctccaaagtcattcaatccgcgcaccgtaccgaagccggtatccgtcaactcgccgcctcctgtagagccatag

SEQ ID NO: 457601 - DNA, 738 bp, Serratia marcescens
atgaaagggatgcaaaaaatccgcagaggaaagagttttgctggtgtagtcctctatacgttaaagcccggttctcatcataaaaatgaccctatcgtgatcggtggaaatgtaacgatagttggcaatgccgctaaagatctgatcgctgaatttgatagcaccaaacagcttcgtcctgacgtgcaaaaggctgtttggcacaactcgcttcgtttgcctaaaaacgaggcattgactgatgctcagtgggctgaaatagcagatgattatatgtcccgaatgggcttctctgagacgcatctaagatgctatgtccttcatgacgataaggctggtcagcacatccatatcatcgccagtcgcatcgaactcagttcggggaagctctaccttggaaaaaatgaaaatctcatcagcacccgcatcatccagcagcttgaactcgactattcactgacaagaaccaaagggccggaagctaaggcacctccggcatcgccctcccctgaaccaaaacacaaaaaatcacgtaatgaagcgatgatggaggaaaggattggtgagttatgccctaaaaccatcatccagaacgctcttgaagtattccttgccaataaaccatcaaccactgagtttgtgcatcagcttgtggcacaaaacatcagagcaatcccgaacatcgcttctactggccgcatgaacggcttctcattcgaatacccttttcctaattga

SEQ ID NO: 457602 - DNA, 234 bp, Serratia marcescens
gtgtggttcgccatcgccaaatatgtcgctgtcatcgtcgcgtcatacctggttaaccaggcactggcccctcggccgaaaaacaacacgccggaagcagcgacggaagaaagttggcaactgccgcaacctgcagagggaacgccgcaatgcgtatttttcggcgactgctggactgatgactggttcgtgctcggttacggcaactaccgctatgacgccatcaaaaaatag

SEQ ID NO: 457603 - DNA, 234 bp, Serratia marcescens; identical to SEQ ID NO: 457602

SEQ ID NO: 457604 - DNA, 231 bp, Serratia marcescens
atgacggcacttgataaagcaattgagattgcgggttctgcaaagaagctcagctcaatgcttggcatttccaggatggctatcagtttgtggaaaaacgacgggaaaggagttgtacccgcccatcgtgttctttccattcatcaagcaacaggcgtaacccctcacgaactgcgccctgacctttacccaaacccgactgatgggttaccccagaaaaacgaggcataa

SEQ ID NO: 457605 - DNA, 552 bp, Serratia marcescens
atggcaaaacaggattggggagccattcaaaagctgttcctcgccgaatacgccaaaaccaaaatctccccgaaagaatggtgtgaggcgaatggctacaactacgccaccgcacgccggcacataaaaatccctgcacaagggaaagagaaaaaaatgcagaaaaaaatgcgcagtgtgcaagatgcgcacattcccgaaaatcccgcgcccgttgcggccggcgtttcaactgctggtggcgatgaggaggggaagggcaaagaaagcccaagccttttgaaaccacagcatgaacaatttgcgcagaacattgcgcagggcatgccgcagaaacaggccgcgatgtgcgcaggctacgcgccgacgaatgccgaatcgcaagcctcaatcctaatgagcaagccggacgtaaaagcccgcgttcaggaacttcacaataacgccgcgctgttggtttccttcaacgcaggccacctggcggagctgttgtataaatctgcgcagttggcgttggcgaataaaaatttggtcaggttgcaccgaacgtga

SEQ ID NO: 457606 - DNA, 162 bp, Serratia marcescens
gtgaagaacgccgcgcagctgaccggcatcgacatgagcacgaataaaaccgaggtgaatgtcgagctggccggactcagttacggcaaggtttgcatcgtgaccccggcggacgtgtgggctgctcacatggaaaagctgcgcgagggaaagccgacgtga

SEQ ID NO: 457607 - DNA, 2178 bp, Serratia marcescens
atgtcagagaaaaataggataagcaattcaggaagtgataagtcagatgagatcgatctgggacgcctgctaggtgagttaatcgataaccgctggttgatcattggaataacgacattaaccctaaccataggtattttgtattgcttatttgcaacgccaatctatcgtgctgacgctatggtgcaggttgaacaaaatgttggaaatgcgctgcttgataatatcagtcagattttaccaaatgggcaacctgagtcggggcctgaaatagaattattgaagtcccgaatgattctaaataaaaccgtagaagatcttaatctacaaacggttgttgaacagaaatacttcccactatttggtaaaggatttgctcgattgaccaagcagattccaggaaaggtagtggtttccaagtttgaactaccggggagctcggcggaagactcctcggtgacgttagtagttgatgacgaaaaaaacttctccatcacctatgatggtaaagatattgccaagggtagtgtcgggcatttgctggagagcaaaggcataactatcttagtgagtgatatagaagcaccgcaaggaacaaagtttagaattactaaggtcagtgaaatacaagctacgaacaatctgctggaaaagtttgatgtcgctgacaaaggtaaaaatactggtgtgctaggcttggggttgacaggagaagatccggttcttatcagatcgattttggattctatatcaagaaattatcttgagcaaaatattgtaagaaaatcggaagaagatgcgaaaagcctgagcttcttgaaggagcaattacctaagattcgcaattcacttgactctgctgaaaataaacttaatcaataccgacagcagaaagattccgttgacttaacgcttgaagcgaaatcagtgttggattctattgttgctgttgactctcagttaaatgagttaacttttaaagaagcggagatttcaaagctttatactaaacagcatccgtcatatcgagcattgcttgagaaacgtaaaacacttgaaactgagcgggataaacttaataaacgtgttagttctatgccgaaaacacagcaagagattgtgcgtttaagtcgcgatgtgcaatcaggccaagaagtttatatgcaattgttgaataaagagcaagagctcggtatttcaaaggccagcactgtgggcaacgttaggattatcgatcgtgccatcactcagtcaaaacctgtagagccgaagagtagtattattattctcttgagcattatgattggcgggatgttgtctataggttatgtcttgctgcgttctttcctgcatcgcggtattgaaagcgcagagcaactagaagtattgggtatcaacgtatatgccagcgttcctctttcagagtggcagaggaagaaagaccaagaatttgttttgagcaataaaggacgtaagttgagtagtgattctaatactctacttgctgtcggtaatccggcagatctagctgttgaggcgattcgcagtctgcgaaccagccttcattttgccatgatggaagctaaaaataatgtattgatgatctccggctccagtccgggtattggtaagacctttatcagtgccaacctggcggctgttgtagcacaggctggtcaacgtgtgttgttcattgacagcgatatgcgtaaagggtatatgcatgacgtgttgggggtgtcagccaaggatggtttgtcggatattctttctggccgaattaatgctgttgctgcagtgaagaccgcgaagcatggtggttttgattttatttcacgtggacaaatcccaccgaatccgtcggagttactgatgcattgcaggttctcagaacttctgacatgggcatcagagaattacgagctggtattggtcgatactccgccaattttggccgttactgatgctgcaattattggtaagcatgcaggcacatctttagttgttgctcgctttgaattgagtacccctaaagaggttgaggttagcattagacgctttgcgcaaaatgggattgagataaaaggcgtcattctgaacgcagtgatgaagaaagcttctaattattataactacggttacgattattacgagtatagctataaatctgagaaataa

SEQ ID NO: 457608 - DNA, 459 bp, Serratia marcescens
gtgaaagaaaataccgccaacagcacaccgtcaacaccgtcgataagcaaaggctcaacactgacagcgagcctcgttagcgacgagggccgccagtcattctggctacagcattttggcgacattccgcgatggcttcacctcgagtcaccgatattttcctggctcaacctcctgtgtaaggactaccacggagattattgggacttttacaccctcagcaacggcggggccttcattagcccctccaccgaaggcgagtacagactctttaacgccctgaacggcaatagcgccactgtgagccatgaagctgccggcattgtcgcctgtctcatcacttacagccatcacgcttgccgcaccatgagcgatgcgatgacagagcactattaccgcttacgggattacgccctcagtcatcccgaaagcaacgccattatgcgcatcatcgactaa

SEQ ID NO: 457609 - DNA, 375 bp, Serratia marcescens
atgaacgaaacaaaacagcagcacgcctatcagcgtggagttcgcatggcgaacctgtggaagcgccttaaaggtacaattctgagatgggattcgttctgggtgtcaaaggctcgtaaacacaacctaccaacttggttgggccatgtgcctatcacatgcttagttgtcatatcagccgttagttgtctaacggggggattactggtagccgttataattctgtttgtttgggcatttatactgctcccgtccgttatggagtttctcagacctacagtgaatgtaaaggttactaactgggaagaaaagagccatacatataactatggctctaatggttccaacggttcggatggctcaacaggctcctaa

SEQ ID NO: 457610 - DNA, 1320 bp, Serratia marcescens
atgtcagattctcacccaacacagaggccccactcgcccaacgaggaaattctggcggtcaacgcagtcagccatggctatgacaaggcgcacggcgagctgttgatcctcgatggggtcaatctgtcgctgcgggcgggcgaaatcgtcgggctgctcggccgctccggctcgggaaaatcgacgctgctgcgcatcatcgccggcctggttacccccaccgccggcacggtgaactatttggggcagccgttgaacggccccgccaaaggcgtcgctatggtgtttcaaaccttcgcgctgttcccctggttgacggtgctgcaaaacgtcgaggccgggctggaagcgctgggcgtcgcccctgccgaacggcgcgaacgggcgctggcggccatcgatcttatcggcctggacggtttcgaaaacgcctacccgcgagaactctccggcggcatgcgccagcgcgtggggtttgcccgggcgctggtggtggatccgacgctgctgctgatggatgagccgttctcggcgctggatgtgttgaccgccgaaacgctgcgtaccgacctgctggatctgtggaccgaggggcgaatgccgatcaaatcggtgctgatcgtcacgcacaacatcgaggaagcggtcttcatgtgcgatcgcatcctgctgctctcctccaaccccggccgggtgatcgccgaaatcaaggtgccgttcagccacccgcgcaaccggctggatccgcagttccgccgcctggtggacaacgtgtacgccaagatgaccgcccgcccgaccgacggcaacgtcaagaaagggctgaagctcggcacctggctgccgcacgtttccaccaacctgatcgccggcctgatcgaaaccctggccgccgcgccctatttcggccgtgccgacatgccggagatcgccctctcgctgcatctggaggtcgatgagctgttccccatcgccgaagtgctgcagtcgctgggcttcgccgacgtgcgcgagggcgacatcttcctgacaccaccggcgcgcgccttcgccgacggcgacgttcaggcgcgcaaagtgctgttcgcagagcatctgctgcgctatgtgccgctggccgcgctgattaaaaacgtgttggacgaacggccgggacatcgcgcaccgcgcgtgcgtttcgagcaggagctggaggattctctgtcggacagcgccgccaaagagacgctggatacggtcatcaactggggccgttacggcgaaatcttctcctacaacgatcaaacggcgttcttcagcctggaggacgtcgagttttaa

SEQ ID NO: 457611 - DNA, 282 bp, Serratia marcescens
atgttaggtagggcagagccttacatagctgtccctttggcaacttttgataaaggaatgatgttattcgcaaaggccttttttatcatttacgaagtgtttaataataactttaacaatattaaaaatgatcctaaacctaatttcaaaaaagatgaaatcctgaataaactttcgcaggaagatatagaagttatacgaaaagaatgttatcccgatgctgacgataactgcatcaaagaaatagtatatgaattattagttaatagattaatattctga

SEQ ID NO: 457612 - DNA, 648 bp, Serratia marcescens
atggcaaaaggtgcgaaggaaatcgcccaagagatggcgaacgctgtaaattcaaaaagtaatttctttggcggttttatcgaaggggccatctcctttcccgttgatatgggatacctagcatatgattttatcaatacagatagccgctccataaatcgatatgacacagaaagaatgcttcgcctcattaaagctggacttgctaatcaacactcactgaccaaaatcgtaaaacttgtcgttgacgaatatctgaaaaaagtcgatgtagagaaagtcaaaaggtgggttgaaaaaggctccgggaaaattgcaggcaggtttgtaagcaatcaggttttgatggttaacttaggggcggtgctttccgaaaggatggttattcgcctcgcaacaggttatgccctaacatcactgctaaccctcggtgctatgaactcaagggccatccacacctcacgccagttacgacagcgaaatcctgaaatttacgataacttaaggcgtgcggggaatttggatctcttatattttctggtagaacccaaaacaaagccatttgaacaagcgatagaaatttggcgaaaaaacagaggcgagtttgaccgcattaccgagctattttttaaaaaggtgtcgaaatga

SEQ ID NO: 457613 - DNA, 1143 bp, Serratia marcescens
atgtatattacgcgaaaaaattttacgccacaaaatgtttttctcttcactagctgtgtttcatttctggcttgggtattccccagtctaggttttttaaggaaagggttctctgaaccatacccctttctatcattaagtgggttagcttatccggtgattatattttttttctatggtgtgatatggattggttaccatattattcccgttgtgaatgataaagaaaaagatactggtaacgcgctattaattaatgataatgtatatttcgctagcgcgataatttcatttttggggattcttgcaacaactttcattcttgctaaatcaatatcgctatctgatattataagtatttattctacgggcaaggctaatgcgattaaagaggcattatacgaggattattcgttaggattggttagcctacgatattgtgtcatattgtcaggaagctttgctatttacaggcgtttaatgggtgagaaaaactggggtattgatattttctcgctgttatcgctaattgttgtgtctatgatttcaagtagattaacattgattgcgggtgtttttggtgggctatatttatacatatacactaagaaaactattcgcattaagactcttaaggtcatgtttattggcggcttagggttcttagttctttctgcattaaattggagtaggaattcgaatttttacgaggagaaggggttggggtttatatctgctggattttctgaaatactggcttatgtaggcactcctgttcaaggtgctctttatgcaatatcaaatcctgatgttggcaaacaaagttacatgcagttttataacgaaagtactattgagtctgcattgacaacaaactccgctattttagatgtgattcgaatgtttggagtacaaggtgtgctctttgccgcagtaatattgtttttttctgggttgtatatttctttctttgaaaaacttaaatctggtaaatatatatactgtaatattgctgttttttattcaattgctgaattttggcgtattttccttttctttcaggggataataatcacgctaatatcagtttctctattattagctgttttttctagagtcagattcagaaaggtattaggataa

SEQ ID NO: 457614 - DNA, 987 bp, Serratia marcescens
  misc_feature (975)..(984): n is a, c, g, or t
atggagaaggttttaattttaagtcacactcaaggatattctgattttaaaattggaagccatcactatgcgaatggtttgtcaaaaatcggatatgatgttttttactccggaataccaaggacgatatttcataagttattgagaagaaaaaatagcagtccgtataagttgaatgaaagggtgtctaacactcaattgtcagcgatatttccattaactgtgcctatgggtttttttacatcagtagtgaacccatttatgttctctctttttgaggtgaatagaaaagttaaaggaatgagctatcaggccgtaatatgtgatagcccatttttttatccgttactgaaaaactttagatttgaaaacctttactatagaccgactgataactatgtagcaatggttggtgaaaaagcttttgcttacgagaaaaaaatgtgtgatgaaagtaaaatgataatatgcacatcgcaggcggtttccgataatataataagaagttacggtgtttgtaggagtagagtaaaaatcataacgaatggatatgattcagaacacttttttaagattaacgacagggacgaaaatagaaagaatgcaatatatatcggtgccttggattacaggtttgattttgatgcactcatggttcttgctgagggaaataaagacattatatttgatatctatggaccaatagaaagaaaatataaagcggaggttttaaagtttcgagatattggaaatgtgatttttcatgggaaaatagattattcggtaactaatgagttgatgaataaatataaggtgggtttgttattattaaagaaaacaaattcaaactttggtcgaagcccaatgaagttgtgggaatatttagcaagtggattaaatgtcatctatgcgaatgtagacaatgtagaattgaacgagaagttatttaaatacgatggtcatgcggacatgatnnnnnnnnnntga

SEQ ID NO: 457615 - DNA, 987 bp, Serratia marcescens
atgaaacgaattgttattgataaccgctggagtggtacgggagggataggaacattttcggcgagagtaaatgctattaataactatccagatgccggttttcatggtgcgccatacagtcctctagattgcattaaaacaacattagcgttgcttttaaaaaagaaacgggtggtattcttcccaggttacattccaccgatattttcacgagagccctatgcattcactattcatgatttaaatcatatagataggcctgagaactccagttttattaaaaggattttttatcggtttgtcatattaaatggttgcagaagagcaaggtatatttttactgtttcagagttttctaagaaaagaattgtggaatggtccggtgttgatgtaaacaaggttattaatgtaggcaatggcgtatcggaagatttcactccagtaggggacacgatgaatcttccttttgattattttctttgtgtcagtaatcgcaaggctcacaaaaatgagtttggcaccattgaggcgtttaagaaggcgaaccttgcaaaacatgtcaagttgctctttacgggaaagatctctcccgagatcgagcagagaattacaaatctgggactaagagaacaggtcgttttcactgggtatatcaaggatgaggatctaccaaaactctatcgtggggctcgggcactgctctttgtttcgttctacgaggggtttgggcttccggttatcgaggcaatggcaagtggcgtaccagtaattacatctaataatacttctctaggggaggtggcgagtgacgcagcgcaactggttgatccatcaaatattgatgagatagctaaggctattgttaatataaacagtaatgaaggcctgcgggctcaaatgaaagacaatggcctagaacgagtaaaaaaatactcatgggatataacagctaagcgaatcgatgacattttgaatagaatatcataa

SEQ ID NO: 457616 - DNA, 963 bp, Serratia marcescens
atgatattgttggtgactaataagcgcgatataactatggattatatcgtggttgagttaaaaaaacgaggcatcaagtacttccgtcttaatacagaagacttgccaagatcatactgttctatgtcagattcatcatttatggattggagtatatctattaatggaaatacaataaaaggtatcgatgttaaagccgcctactttcgtagacctgggaatcccgaagttcctgcctcaataactgatcctggtattgctgattacattcagggagaatggaatagtttccttaagagtctttattcgcgacttgattctttttggttttgctcgcctactaatataattttagctgaagataaaccaaagcaactggtcgttgccaaacgtttgggttttaatattccagagtctaccatcactaattcatttgaagaaataaaaagttgtagcaatagctttcaaatgatcgctaagcctttacgacaagctctatttataaataatgatgctgaaagtatcatttttaccaacagattaggtcaactagatgagaccgattcgagttcactttctttggtacctattatagttcagcatgagataataaaaaagtttgatgttagagtaacagtagttgggaaaagagttttttctgttgcaatttactcccaaagccataaagaaacagaggtagactggcgcaaggggtctcgaattgacttaaaacataaacctttagagctacctacatcattgagttctaagtgtatagatcttgtcgaatcacttaatcttcgatttggggcaatagattttatttgcgacgaagatgatgttttttggtttttagaaattaatcctaacggtcaatgggcatggatagaaaaccagacaggtcttcctattgctagttctatagtcgatgaacttatgaggatcggtagatatgagttttga

SEQ ID NO: 457617 - DNA, 351 bp, Serratia marcescens
atggaacagcatgagggagcgctgcgagcggccttgcagctttcgttgcagcagtgggcactggctcggtccaacaccgataaaccaggcgagaagctggtgcgcggtaaccgcaagcggctgctgaagatggcggtggaaccgctacagggcaaactaccaccggactctctacagagagtgatttatgctttctcgctgatttacggctcggaagtgttcctggtgttgaaagatatctgggggctcgagctcgataatatccaggacgtcacgcaatggatggccaaagccattcttcgtcaggcggaagaagacgcgatgaacagcaaaaaaacatcagcaggataa

SEQ ID NO: 457618 - DNA, 615 bp, Serratia marcescens
atgtgtataagagacagtaaaaatactgactggacaaatgaaagtgaactagcccttgatgaggcaaaaaaactcaatgaattagaaaatcaaagaagagtaggagctgagagtaaagctgcaatatatttaacagctattactgctcttgctcctgtattagtctcgttagttcccggtattattagtagtggtggaaataatgcctttgtggattttttgtcatttgcaatttttgtgtatgcactttctaatttgcttagagctgcattatgggcttttaataccttaaaagtttcagcttccaatagaatcgacacgatagatttagttagaatttgggggggagccggagatgcatacaaaaaaaatttaattgttgaaaatctttgtgctgttcgaaaaaatagagatggagtaaatcgtaaggtaacatgtattaaaatgacgcatgaacttctccttagaacatttcttgcgtttgttttactcttattgttacaaacatcgatgtcatttattcctaatatcagcattgccaatcaggtctcttcaactacatgtaatgataaacaggatattgttcaacatcctgttaatatttatagaatatag

SEQ ID NO: 457619 - DNA, 288 bp, Serratia marcescens
atggcagaacgatgggagcccttcgaggttcaattcttacgtgaagtggccgggtatatgcccggccttcttatttctgaaaagctagaacgtcctctccgcactatctactccaaagcgagaagctccggcattcatctgacagccaaccgccaagtaaggcgctggagtgatgaagagttgtctttgctttccagatacggcgacaacgaagtttcgaaaatgacggagcggacgattcgcgctgttcaggtgaaacgctcagcgatgaataaggatgacctatga

SEQ ID NO: 457620 - DNA, 294 bp, Serratia marcescens
atgacgaaggttgttgttaagccagccaaagaaaacagtaaaaatagaaggttcaaggcgcgcggggagatcatgaagcgaaaatctgaagaactgcgcaaagaggaggaggcacagaaggagctgcttagaattgagaatggacttgatggctgcagcgataatgttgtcaaggcggtgcatattccttcggtagctaaagatgtctctccaccaaaagaaatccacgatgatgccatgcacagaaaagtgaatcatgcgcatcagcgaagtcccagcaagaaatggtcataa

SEQ ID NO: 457621 - DNA, 225 bp, Serratia marcescens
atgattgattacagtaagctcgatagcatgattgttgaaaaaattaaaaccggatcacgaacgttttcgcaaatcgatggggggaatgtttatgacgaagctaaaagattgcattggttgagcgggcggccggcattccgcatcatcgatggcagattacagtctctgcgcaagaagggtctgattcaatacaccacaaaagaaaaatggcaggtggccaaatga

SEQ ID NO: 457622 - DNA, 438 bp, Serratia marcescens
gtgctagggggtaatctggctcgattagcaacgctgggggctctgagtcagagctggtccatcgattttatgtacgatgagctggtctgtgacagacgcttcagaattttcaatgtggttgatgatttcagccgcgatgtgctggtgatagaaatcgagctgaatatcccggctcagtgtatcgtcctgctactggagtttattaagtcgggtaaaccgacgcagaatgcctttatcgaacgttttaacccgatctaccggacagagatactggatttttatttgttcaaaactctgaatgaagcacggaaaattacagagcactggttgacgaaatacaacagccagcggcctcatgaatccctgaataacctggcatcagaagaataccggcttatggctgaaaaaccggaaatctcaaaaagtgtgtggaactaa

SEQ ID NO: 457623 - DNA, 633 bp, Serratia marcescens
atgttttatccaatacttacaaggcgaaaagaatatgaaaggaaaatgtccggtgatttttatagatattcctattatagacaagttatagaggaagattgccaaaaacgctgtgtttactgcgatctgcttttaaaggaacatgcttttgaaggaatgcatttggatcatttcaggcctcaaagtgtttttaatgaattgacaaatgatcccagtaacttagtgctagcctgccctaagtgtaattcattgaaaacgaaccattggccttgtccaagagcagcattagactctccatctcatgataataatgttgggtttatagatccgttctctgaaaaaatgtgtgattatcttacagttgataaagatggaatcattcattcaaataaaaaaccagcagactatattattgaactgttgaaactcaataggccttcaagagttttattgcgaaaaagaagattacaaatagatgctgctttgagaattaaggtgtcattagataaaaaaattgatgccttgttttacgagttggcaaaagatggttgtgataaaaataaaatacttgctaaatataaaaaccttaaaaaaatcaactctattgttgctgatattattcatcaggtttaa

SEQ ID NO: 457624 - DNA, 633 bp, Serratia marcescens
atgaataatgtcatttatattgatgatgataaagaagctcaggcaacatatagagaccctttacaagagttatttggtgatgactttgaattattagatttagatccaaagtttgaacttaatgaaatgctagctactcttcaaaattacaataacgttgtagcgtatatattagatgagaaacttaatgtattaggcaaaaccaactacttggggcaagaacttgcgaaagctataagggatttgaaccctaaagttccaatttatatttttaccgccttcaaagatgaattcgataatacatatggtcctgctgaaatagaatatgttattgctaaagatgagctttcaaacgatgaaatgcaaaagtcgttgtcatcaaaaattagaaggcatcataatgttttttccgatgtattgtccgagcgagcaaagcgtcttgatgagttattaattaaatacttagataaaaatattagtcaagaagagactgaggaaatgaatcatttgaatttgcttaggacgaaaactatcgagttggaagaaagtacagttgttccagtacttaaagaaaaaattgaagaaacatcacaacgacttgctgaaatagaacgcttattgagggatgagtga

SEQ ID NO: 457625 - DNA, 828 bp, Serratia marcescens
atgtcttatttaatccttgagtgcggctctgctgcccgtggcgatacaaatattcatagtgacagagatttggtgtgcatttggtcagtaactccaccaaattattcgatgttaaaggaagtgcatggtgagataatgtactactctttagacaccataaaaaagatgagtaagaaaggctcactttttctaacacatctggatattgattcaaagtatttagatggcgaccaaaaaatttttagttcttttagaggatatcgtcccaaaaaaggaaaaattaaagagtccctcataaatacctctaatgtcattaaggagatagcttggtacccggatacattagttggtaaattgtggttatatgatgttctttacgtcgctcttagaaacttcatttactgcaaaaatgcgttaagtgatatttattcatttggttacgaggatgctattgaaaaattacacataacacaaagtgatagtgataaaatgctattgctccgtgagggcaaatattcctataggcgtactgatataaaaaacatagagaatataagcatcaaggacattgaacatgtatgccaagcaatactaggcaaaacagtaaaattcctcaatggaggaaatacaaactgggaacaaatgtacagaaaagactattgggctgagagatttattgaaagagccatacttaatggtgaatacaacgacaccagttttctagataaaattaaatctcacaactataacaaacactacatcaaatctgatgtggccagaataatagattttaaaaccaatagacatgtaataaaggtaaatgcatag

SEQ ID NO: 457626 - DNA, 846 bp, Serratia marcescens
atgttaattcgagtgtggaattggaaacagcgcgaccatgtttcgctgcctaaaataaatgaacacatttcagataaactttttataaacaaacttgactctaatgagatagagttatcacagattctcttccctgatacaatcataaacgcaaaagaacgaacggtcaaaaataaaactttcaaaaagtgcattttttctcaatcaagaattgacggttatacatttatagggtgctcttttataagctgttcatttaatgggtgtgaaatttctggctgtgaattccataaatgctccttctcagagagtagtttttataaagcaaaattcataacaacttatatcgacccgatttctttcaaattttcatggatgtggcactggcattgggcaaatgttaatgcttggctttttcaatctctttataaaaactcaaaggatatgcatcaagaaaaattcgcaatgcaagctgatagaaaatttcaattttataggcgatatgaatttttacgcgggcaaaaacgacaattaaagaagttttttacaagtcttttgtatgactacatgctaggttatggttacggaattaaaaatgcattaattataactttaataatgatcagtagctttgcgtacgtcatcgatggacatctcaaaacacaagagaaaagtttctttaaggccctgtatttttcggttgtttcatttacaactgttggatatggtgatgttgggcctgaattcgaaaccatacctatggcaattacgataattttcctccttatctcaatgatatggtttgctgttgttacggcaataattgtcaaaaggattgtaagataa

SEQ ID NO: 457627 - DNA, 348 bp, Serratia marcescens
atgatgcagaaacctcaagcctccgaaaaggagcgtagttgcatcaacgaagggatccgcaagttgcgtatggcgggccgattcgatgaagcaaatactcaaatgaaccgagttatcacggcagccagtggtgcagattggcattcactgcgtgatctggaaaacctgttggcgcagatgttccccgatgagggcgatacccagacggcgatcagtgcgcgtctacgtgaaatatctccgatcctgcatggtttagtgaagcaggtaagcaaagtccgcaacgacaaatcgggaaaaaccacctggttctatcgcctcgtgccttcacattcggaggtgcggttatga

SEQ ID NO: 457628 - DNA, 1131 bp, Serratia marcescens
atgacgtaccaactgctacaagggcggtgcgaagtggctttgcatctcttggctgaaaactctgttgatgcaattgtgacggatccgccttatggattgagtttcatgggccacaaatgggattaccaggtgcctaccgttgagcagtggactgaatgtatgcgggttttgaagcccggtggacatttactggcattcggaggcgcgcgaacttatcaccgattggtggttaatatcgaagatgccggctttgagattcgtgatcagctgatgtggatttatggcagtggattcccaaagtcgaaaaaccttaccggagagcatcaagggaaggggacagcattgaaacccgcgcatgagccgatcgtaatggcccgtaagccactggttggcacggtagagggcaatgttgtccagttcggcacaggtgctctaaatatcgatctttgccgggtaccgacagaggaagctttaaccggtggtgctggtggcctgttgtcgcatgtgcgtgacgagaaagcccccgaaagtggggagtggaaagcggatcagctcggccggtggcctgcaaacgtcctgcacgatggaagtgaagcggtgatgaccgagtttccgcaaaatgccggcgcccgagcgccagtaaagggaactgagccaacagccaatggtttcagcggcaccgtaaagtttggcggcatgattgatcgggttgccggctgctaccatggtgatcaaggcaatgctgcccgttttttctactgcgcaaaagttagcaaatcagagcgggatgagggtatggatcgttttattccatattcagcaagcgatatgactggtggcagaaaagagggaagcgttggtataaacgatcctcgagccggtgccggccgtactggcggtgccaggaataatcatccaacggtgaagccagctcaactgatgcgttatctctgccgtttggttactccaaatggcggtgttgttcttgatccatttatggggtcaggttctacgggtaaggctgccttacttgaggggtacgattttatcggcattgaactggatccagaccatcttactacagcggcagcacgcattgcgcattcagcaaaacaagcggtgattatatga

SEQ ID NO: 457629 - DNA, 1155 bp, Serratia marcescens
atgagcggcagaaacttcgcaaccagaatgtcatgtttctctttaatatctgctattgaaactgatatgagaataattattgtcaatgagttaccagaaaattacgaagacacgcttccatccgatgtggtaaagaatgctaaagaaagatactatgaacataataaagagtctttctttcaaaacagtaacctcattgatttattagaattcatagatttctatgatctcagcaaaatattaagcaaaataaagaatacacaaaaaacattcactttagtcgaagttgaaaagattatcgtcgatttagaaaatctcagtaaatgtaggaatagggtatgtcattctcgtccccttgagccaaatgattttacaacgttattagattttacaagtgaattaattaaagtaggtaaggctattcaatggaaaaatattaacatttcattaagtaatcttgataatccctcattcgctctctcactagaaataccagcatattggaagataacaagtaaaacagtaagcaataatttaccactacctgaatttgatgatacaggttttatgggaagagataaagatagaacagcgattaataaactcttaacctccaatacaaaagtcatctcaatcgtaggggagggaggggttggtaaaacagctctagcacagagatgtctttatgatattcttgagctatgtgaaagtagcactcatgaagagtcgatgtttgatatcattgtttgggtttctttaaaaaccaatagattgactgcaaatggtgtactacaaataaaaaactccataaactctagctcgggactatttcaggatatatcaaaaacgctagcgggaaagtctaccgaatctatgaaaaacgatttggatgaaattagagagtatatggatgagtttaaaatacttctttgcattgataatcttgaaactattgcggctaatgaagtaagagagtttcttgcggatatcccaaattcctcaaagattcttattacaacacgtattgggttaggtgagatagaatataggtataagcttgataaattagatgataagccatctgttgaattgatgaggaatatgtcaaagctgttgaacctagaaaagatatataaaaaaataatgactcattaa

SEQ ID NO: 457630 - DNA, 1344 bp, Serratia marcescens
gtggttgaacttagattctttctgagtgatgtccctgccattgaaatcgaagaggcgttacatcagctgcataactcaagtatgttgatctcaacagatgataagtcctcagaaggggggtatgtatacactttgacaggtgtagcggaagagtatattaatagcgtaaggccaatatcgaatgaaatttataatgaagttaaggcacgacgtaaagagctgcaaagcataattgctagcgaaaatattttaagaaatcattataactatgacttaaatgtcatttcatggacaactaaagatgaaaagatttgttcaatttatttaaagaaagctctatcggcccataaaggaggagataaggagctggctgagcagaatataaaaaaagcaaaatctctgatgcctggtttttctgaatgttatagaatacatagttatttattgaaagatatatcaccatttttggcagaggtggagcttgagaaggctatagatattgctcctagatcggttatttctcgttatgcgtatagtcagttcttaattaatgaggaagagtttgatagagctaatgagcaaattagtgaggctctaaagatagatcctaatgatattgcccttcaaacatgcaaggcatgggttttaacattgaatggagaatacaatcaagcatccgtcatatacgaaaaaattcttccagagcaatataaaaggttactgaagttccgtataagtactcatgatcaagcagcaagttgttatagacggatggctgagcaaaatatacgtgatttagatcatcagtcagcaaatcgtaaccttaaaagagcagttgaaattttggaatctgctgtaaataataatgattatgaccatgggactttcaatcgactatatgatttagtcaaagtgtcagaaagtttatttagcaaatttaacgatagaactatcacagacgacatcctgcattttattgaagcaaatataaaaagcttgaatattaagtctaccatccaactcaaacaagaccttaatgaatacaaaaacaattgttctaaagtattttttgataaagtggtaatgcttttagatgagttaagtcccaaaaacgctaaccacactggtgaaagaataaatggtacaattgataagatcataacatctgaacgtggtctatcatatggcttcatactagctatcgatcaaataagatacttttttcacaggagtgagattaatcctccttctttcttaagttcagtagatgaaaacgttaatgtcagttttatcgctgggcataatgaacgaggcatttgcgcttttgacgttagagaaagatag

SEQ ID NO: 457631 - DNA, 849 bp, Serratia marcescens
gtgggctatcaactgtgggtatctccattaactggagaaagacgtcatggcacagactttaaatctttaaagaagatatttatggattcagttacaacgaaaaatatctgtgagcctttactttcatgtgaaatggatatggttgctactgatatccacgagatgttgagtcaaagagactttgattctgctggagtaattgatgaaaacaagaaagtagtaggttatgttctaacaaatgaactaggtgatggtgttatatccgattatattaaaaaaatcgaacgcgatgcagtgatttctgattcaactcctattcctgtattgataaatgagttgtcaagaaaagaatgtctttatgttaattttgggcgagatatattgtatatagtgactaaagcggatataaacaaaccccccataaggatatttatatttggtgttatatctttgttcgagattcatttaaattactgggtgggaaagatttataaaaatgatgaggtaattagagagataattggtaatgatagatttgaaagtgccagtatactttacaagacagctaaggtcaaaaatgaaaatgaggatgtgagtcttgttggatacttacaactgggggataagaagagattattatgttgtgacgctgatttttgtaataattttagcttgagtaagaataaaatgaaagggtttgtcgagatggccgaaaaggttaggaataatatagctcatagccagagttctatttttacagacgtacctttaaatgaaataagtgttcttcttagtgatatcgagcgattcatagaacgttctgaaaatctatctatgtttaataattaa

SEQ ID NO: 457632 - DNA, 1542 bp, Serratia marcescens
atggaaagtgataatcttgattttaattgggagctcaatgcttcagatctgccaggagatttatttggtcgtgcaaagtatgctaggtttttaagttttttcttggcatctaaaggtaaggaagagaattttgtattaaatatcaatgcttcttggggcgcggggaaaacttggtttttaaggcgttgggcagatgaggtgaaatatacttatccagttgtttttattgatgcatggaaaagtgatcattccaaagatccattcctagcagtgatttcttctattgttaatgatttagagaaaatggttgattctaaatacgtagagtctactcttacaaagaaaagttggttgttaattaagagcatagcaccagaggtgactaaaggtatcattaaaaagtacttggggactgattgtgatgagatatctagagcaatagaaaaagatgacgagggtgctttagcaaacatcggttctaaaattgttagcgacttaataaagctacacgacacaacaaataatacaattgatgaatttaaagtggcagtatcaaattacttggggtgtatcgaggcagagaaaaaactgagcctgccgttgtttgtattcatcgatgaattagataggtgccgcccgacatatgcaattgaaatgcttgaaactataaaacatatttttgatatggaaagagttgtttttgttgttgcaacagataaaagtcaattgcaacactctataaaagctgtttatggaagtggctttgattctgcaaggtatttagacaggttcttcgatagatccgtaacattaaaacagttttcactgaaggatttcatttctaacagagtggctaatagtaacatttttgaaaaatacttcacaaaaaaagataatttttggttctacaattcaaactgtaataatataaataaagtgtgtggtattttatctgacattggcgatagtttagcgatggacttaaggacagcaaaccattggcttgacagattagaggctatattatccaacgatataaagaaaatagaaattatatacatgagttttctgttggcactatattccaaaagtcaggttttatatgatgatttcattagtagtgtatttacaagcacggatgagatacagaaattcactaaatcaaatattgatactggtaaaataagaaatacaaatatcgatattgaaaaacaatccatcatcgatatcatcggtatggatgaagttgattataacctgttgaatgtgaaagaaaatgtaaacgtatcgtatatgtcctatgtgtttaatattcataatatgcttaagaattatcaaggcgaagctgggttggaggcattacaagattcgttgctaggtgagatatataaggagcgtcacgttaccaaaactaactttgtcgtgaaagctacaagtttatctaatcagtacgagttcctgatctataatttccacgtaaaaaataatatatcttttcaggattaccttgactatacagagcttgcaacggtattagagtaa

SEQ ID NO: 457633 - DNA, 819 bp, Serratia marcescens
atgaccacagcaatagaacaactcataagaatgcacgatccgcgctgtataagcgcggagtcaatgaatgtaggccgtgggtgcgcttccctgaccagggagcagattctcggggcattagccgcagtacagcaccggcattcagtcggccttgacctactgatgacgaagtaccgcaacgatttcaaagcggagcagcggctacgtgcagcgatcaatgaatgggtgcaccaacgaccgcatcccgaactcgcagttgcagcatgccagttagctctcagtatggtactcgagcgtaacttgccggctcaggtgtcgcacctcgcatcattattccgcaggcatggcccgcgaacagcccaaacgcggaaaaatattgaagcgttgcaatccgagattaaaacactggaaaagcggcgcagccaagcacagatcaccgatattgaatatcacgaggttggcttcgaaattgccgatataaccaaacggattgagcgggaacgtgctggattacgtgcttggtctgaccaacgcgctgctacaacaaatatatgcccacgttgctccggtaccggccgcatggttaggccgcatcctatagagtgcgaggaatgtggcggcaaaggcaagattccggccaatatggagcatctgcgtaagtccatgcgtatcataggggctgtggttgagccaggtgactgggcaagccagtattcggatctggtgaagcagtgtatgggatggctatatattgaggagtcgaatgcgactgttctgctatccgaaaggatacgttctgaaaagtttgaaattagctaa

SEQ ID NO: 457634 - DNA, 666 bp, Serratia marcescens
atgacgccggaagaaattcgcctgattgtgagtgaaatattaccccggattgaaatcacgcaaccatactcgatcggtattgtgggggtttggggcctatttgggggcggtgttggtgctttttttggtgcatatcttaagcgatatggagagaataaggcaaatgatgctcattttaaaaacctaaatgaacaacttaaaataaacacctctgatactgaggagattaaagctgcagtatcgggacatggatgggttaggcagcagaactggagtattagagaaaaatactacactgcattgatttctagtctttcggactggataaatgaagtcagtattttgcgagattattatcctgacccccactgtgataaagttgaagtcgagtataaagatagagtggcaatgattgagtcacgaatgtcggatgcttgtcaaaaggtaagggaactaagagggccatctcttatttttctaactaaaaaaaccaataaagctattaggtcaatattcagaatgttattcaataattctcgagatctttcaaatcaccatgatgctttaaatcgaacgtttgtaggactagtgaagtatagggatgtaattcttaaagaagcaaaaaaagatttgcacgcaccacttcattcagttgaaaaacgctaa

SEQ ID NO: 457635 - DNA, 882 bp, Serratia marcescens
gtggcgctgatttatcattattgttcaccctatacatttctgcagattatagaaaggagatgtatttggttatcgtcaactaacaacatgaatgactcttcagaagggcgctggtatctggatttggttgaggagaccgttcgggaacatgaaggtgagttaggtaaaaaatggagcgaatacattcaaggaacttttgaatctcatgttagaccatcctatattgcctgtttttccactgaaaaagatttattaagccagtggagagcatatgctgataacggaagtggggttgctattggctttgagatggatagtttgccaaagacatatttacaaccaaaagaggcctttggtcgagtgagtaatgaggttgtgtctcaatttagaattacagacgttaaatatgatgacaaggaaagtttaaaagaaaaaataatagcaagagctcttttctggcgttctcctgatgccccagttgagtttgtttctccagaaggcttgaatgattatgtccgatgttcttggtttaatatggaatctgaaaggttgtctacggatcacaaaaatcctgctttcgctgaggagaaagaaaaaagaataatttacacgcctgattacaatgattggataaaccctatacggcaagaaaatttcgatatcaaaaaatcatcgttatcaagtgttttgggtggaatgaaacatagaatatctgacggctttttgacatcttactttgaatatccatttcctccagaggcaattaaacaagtagttcttgggccaaaaaataaattcactgagtctgacctcaaggattttttgttattgaaagatatgcgtcatgttgagatcgaacactccgcagcaacatatcgctaa

SEQ ID NO: 457636 - DNA, 228 bp, Serratia marcescens
atggcgaaggccccattgcttatcgcccacctggtcgcgttcctgcttgtactgaaattctctctggtcacgttctttaccataattgaagtctgcttcccgcaaactgtaattgcgatcagaatcctttatttgctgctgaagggcagcatcacgttgctgcatttctttattacgagagatggctgcatcggcagtattgaaacccgccaggaagccatcagctaa

SEQ ID NO: 457637 - DNA, 1254 bp, Serratia marcescens
atgagaaacgcattcaaaaatagatatccacggaaaaatgattactatgatgaattattaaaaaaagcaactattgttgtagatgcaaatgtccttctcaacatgtatcgctattcagaggatactgcgagctacatacttaacattctaaatcacgtcaaagaaagggtttggatacctcatcaagttggacgtgaattctttgagaacagaaaaaagataataatatcacagtctgactcatataaagagacagagcaacagctaaagaaaatagttaataactttgaagactctcagaaacatccatttatatcaaaaaacagcaccaccttactctcaaacgcattggagtcaatttacaatgatttgaaatcctctgctgaaaagtacgcttcattactgagcaaagatccaattctagataagatatttgatatttatgataacaggatcggcaatgaatactcttccgaagatcttgctaaactaattgaggaagggaaatccaggtatcagaataaaatcccgccgggatatatggactcaggaaaggagctccgagatctagaaaaaaacccatcagcaagtcaatatgagcggacaagaccatatggtgattttattatatggaaacagttaatcgatttttcaaaagacggaaatgatattctattcattacgcaagatgtaaaggaagactggtttgaaatacagagcggcaagaagttaggccctcgccacgaactactagatgagttcatgaacattactgggaatcaaatttatttttatcagacagatattttcttaaaaagaataactgaaacaattggcgaaccaacagataacaatgctattgaagaggtaagaagcaatgcaatggagcaaaaaataaataataattatataaacctgttgattacccatgaaaaactcagcgatttaaacttaaaaaaagtcaacaatgtatttagcccttcggaaaaagaaatcgtagacgatattttttccttgggtcataagattaatgtgatattatcaaaactaaagtcaaattgtaaagatgagttgaaaaacgatttggaaattgacagctcaaaaataaactccattttttctaaaatacaagagtactctataaaatactttgaggataaaagtaaagtagatatcggctatatcgaagtgttagcccaaaagctatgcgagatgcttgtctactgcgaggaaaaatacacaaacactgattaa

SEQ ID NO: 457638 - DNA, 513 bp, Serratia marcescens
atgcgcagccctgaaaatatccatgacatggccgcctgcacgatcatcagccagcaatcgctgtatcagctcagcagactcatctttagtgaggccgctttctgtagcctgtggctctacgaccggcgctttctctaccggcatgcgtatcgcataaccaccttcgacagcctcgatcgtagcgccttgtgttttacccgagcgagacgccttcgccattcgcaatgtagcgaaaggtttatctccaaagaaccgcagctcaccgactggctcgcccttggcataggcctcggtctgtgtatcaatggggacaccaccagcgcgctgtcgattgtcgggcaatccctgaagctgactattggcaccgatgccctcagagtattcacgcaggttacgctggtcgcgcgtttcacctcgggtaaatgctggcgttgctccggcctgcacctcgtcagtattgggtactggcccatcagcgaaaatgatgttcttgtcggtgatcgcattgcctag

SEQ ID NO: 457639 - DNA, 717 bp, Serratia marcescens
ttgtcaaagcaatgggtattcacagcactagttgaaaatgaaagtgatcaaaccggtttgttcgcctacgctttatacaaattagagaagaatcagtatgccgaaacattgaataataaaggtctagattccgatgaaatagactcaaaagtgaagcagtttcatgatcaggtcttagatgttcctttgagagtcaactcttatcgcctacgtggagaggacatgatcagaaacttgatggaggaacttgaagcgattatcagtcaaaattttgaggagcaaattaagaacgttgaagaacgcattggtgatattacgcagttggctagcactcattctgatgaagttcagaagttaaagaaaacgctcgaagaaaaagaaatacaacataaaaaagatattgaatcagcgaaggtacaagctgtggctgaattttacagagccgctggggcaagcgagaagaaaaaaactaacgggtggcttcgtgctttgttttggtttcttaatggtttccagggagtcttcgctgccttagcattcgcaatcatcatctatggaattgcagcccagtttctctcatcgagtgaccgaggtaatgttattagctttgcatggaaaaatctcatatcggttgtaacatccagcccggcaccaagcttaaataacgaaacggttatcgaaaaagaagtgagcatcaacacaactgataacaaatga

SEQ ID NO: 457640 - DNA, 615 bp, Serratia marcescens
atggatagaatctcaaagagctgctttacagctctgttaatactacttttaatctgcttatcgttaattgcacactttggagatgatgatggttattttgtaggtaatttagtcccagaattcattggtgtatgtgtagaccttatcatcattcttaaagtttttgaggtttggcagcaaagagatgagcgaagaaagctgataaaggttgaaaggcgtttaagagagtttttgatttttttcttaaatcatacatgcgaagatttcccggaaaaaagtcggccaggaagattttacggcactgactacgagcaaaatcaaaaatcattaactacattaatctcttacataaaagaaagggggatgaacgaagagaatgtgttaaaaatccaagcttattgtaaaagtcagcacgatattattaacaacatgattcctgtgtcatctgaactggaaaatgatcatttcaaatcatgggttcggatagcttattttatgaacgcagtggctattggtcaggaaaaaacgagtcatgcaatgataaaaatcctagaaaacattaaacgattcgataaagaatcgcatgataaaaaattgtatgttggtgctgattaa

SEQ ID NO: 457641 - DNA, 273 bp, Serratia marcescens
  misc_feature (258)..(267): n is a, c, g, or t
atgtactggccatttcaggcttcttcggcaagcaaattaaagaaagcggtgtggcatctgcttgattcttataatccatttatggctcgtgccatgcgtaaggagctgcgcaaattttctccggatgtggtgcataccaacaacctcagcggtttttccgtcgcagcgtggcgagtggccaagaagctgggggcgcgcgtggtacacacgactcgcgattattatctattccatccgaacggcacgttgtttaaacannnnnnnnnngtttaa

SEQ ID NO: 457642 - DNA, 306 bp, Serratia marcescens
atgagtatggacaccactaaagagctgattttccaaaatgaaatgattgctcagatggtcgaaacgggttggattgttggtaaaggcgagggctacgatcgcgaacgtgctctatattcgcaggatgcgctgacctttgtgcaaaccacgcagccgcaggagtgggaaaagttcgccaaaatttatcctaccgataccgaacgccacttcctcgatgcgctggtcgctcagctgagaaaagcggatatcaacgctaccgatatgctgtcgcgtacttacggcacaatacggcagatattctgctga

SEQ ID NO: 457643 - DNA, 1254 bp, Shigella boydii
atgattggcgtggcgctggagcaactgactccggcgctaaaactggacgctgactggattggcttgttgggcgcgggaacgctcgccgggctgttcgttggcacatcgctgtttggctatatttccgataaagtcggacggcgcaaaatgttcctcattgatatcatcgccatcggcgtgatatcggtggcgacgatgtttgtttcatcccccgtcgaactgttggtgatgcgggtacttatcggcattgtcatcggtgcagattatcccatcgccacctcaatgatcaccgagttctccagtacccgtcagcgggcattttccatcagctttatcgccgccatgtggtatgtcggcgcgacctgcgccgatctggtcggctactggctttatgatgtggaaggcggctggcgctggatgctgggtagcgcggcgatcccctgtttgttgattttgattggtcgattcgaactgcctgaatctccccgctggttattacgcaaagggcgagtaaaagagtgcgaagagatgatgataaaactgtttggcgaaccggtggctttcgatgaagagcagccgcagcaaacccgttttcgcgatctgtttaatcgccgccattttccttttgttctgtttgttgccgccatctggacctgccaggtgatcccaatgttcgccatttacacctttggcccgcaaatcgttggtttgttgggattgggtgttggcaaaaacgcggcgctggggaacgtggtgattagcctgttctttatgctcggctgtattccgccgatgctgtggttaaacactgccggacggcgtccattgttgattggcagctttgccatgatgacgctggcgctggcggttttggggctgatcccggatatggggatctggctggtagtgatggcctttgcggtgtatgcctttttctctggcgggccgggtaatttgcagtggctctatcctaatgaactcttcccgacagatatccgcgcctctgccgtgggcgtgattatgtccttaagccgtattggcaccattgtttcgacctgggcactgccgatctttatcaataattacggtatcagtaacacgatgctaatgggggcgggtatctcgctgtttggcttgttgatttccgtagcgtttgccccggagacatcgagggatgtcactggcgcaaaccagcaatatgacgatccgcgggcagagaatggggtaaattgttcagatttctctcttttctga

SEQ ID NO: 457644 - DNA, 531 bp, Shigella boydii
atgattcttataatttatgcgcatccgtatccgcatcattcccatgcgaataaacggatgcttgaacaggcaaggacgctggaaggcgtcgaaattcgctctctttatcaactctatcctgacttcaatatcgatattgccgccgagcaggaggcgctgtctcgcgccgatctgatcgtctggcagcatccgatgcagtggtacagcattcctccgcttcttaaactttggatcgataaagttttgtcgcacggctgggcttacggtcacggcggcaaggcgctgcatggcaaacatttgctgtgggcggtgacgaccggcggcggggaaagccattttgaaattggtgcgcatccgggctttgatgtgctgtcgcagccgctacaggcgacggcaatctactgcgggctgaactggctgccaccgtttgccatgcactgcacctttatttgtgacgacgaaaccctcgaagggcaggcgcgtcactataagcaacgtctgctggaatggcaggaggcccatcatggatag

SEQ ID NO: 457645 - DNA, 1863 bp, Shigella boydii
atggatagccatacgctgattcaggcgctgatttatctcggttcggcagcgctgattgtacccattgcggtacgtcttggtctgggatcggtacttggctacctgatcgccggctgcattattggcccgtgggggctgcgactggtgaccgatgccgaatctattctgcactttgccgagattggggtggtgctgatgctgtttattatcggcctcgaactcgatccacaaaggctgtggaagctgcgtgcggcagtgttcggcggtggcgcattgcagatggtgatttgcggcggcctgctggggctgttctgcatgttacttgggctgcgctggcaggtcgcggaattgatcggcatgacgctggcgctctcctctacggcgattgccatgcaggcgatgaatgaacgcaatctgatggtgacgcaaatgggtcgcagtgcctttgcggtgctgctgttccaggatatcgcggcgatcccgctggtggcgatgattccgctactggcaacgagcagtgcctcgacgacgatgggcgcatttgctctctcggcgttaaaagtggcgggtgcgctggtgctggtggtattgctggggcgctatgtcacgcgtccggcgctgcgttttgtagcccgctctggcttgcgggaagtgtttagtgccgtggcgttattcctcgtgtttggctttggtttgctgctggaagaggtcggcttgtcgatggcgatgggcgcatttctggcgggcgtactgctggcaagctcggaataccgtcatgcgctggagagcgatatcgaaccctttaaaggtttgctgttggggctgtttttcatcggtgttggcatgtcgatagactttggcacgctgcttgaaaacccattgcgcattgtcattttgctgctcggtttcctcatcatcaaaatcgccatgctgtggctgattgcccgaccgttgcaagtgccaaataaacagcgtcgttggtttgcggtgttgttagggcagggcagtgagtttgcctttgtggtatttggcgcggcgcagatggcgaatgtgctggagccggagtgggcgaaatcgctgaccctggcggtggcgctgtcgatggcggcaacgccgattctgctggtgatcctcaatcgccttgagcaatcttctactgaagaggcgcgtgaagccgatgagatcgacgaagaacagccgcgggtaatcattgccggattcggtcgttttgggcagatcaccggacgtttactgctctccagcggggtgaaaatggtggtgctcgatcacgatccggaccatatcgaaaccttgcgtaaatttggtatgaaagtgttttatggcgatgccacgcggatggatttactggaatctgcgggagcggcgaaagcggaagtgctgattaacgccatcgacgatccgcaaaccaacctgcaactgacagagatggtgaaagaacacttcccgcatttgcagattattgcccgcgcccgcgatgtcgaccactacattcgtttgcgtcaggcaggcgttgaaaagccggagcgtgaaaccttcgaaggtgcgctgaaaaccgggcgtctggcactggaaagtttaggtctggggccgtatgaagcgcgagaacgtgccgatgtgttccgccgctttaatattcagatggtggaagagatggcaatggttgagaacgacaccaaagcccgcgcggcggtctataaacgcaccagcgcgatgttaagtgagatcattaccgaggaccgcgaacatctgtcattaattcaacgacatggctggcagggaaccgaagaaggtaaacataccggcaacatggcggatgaaccggaaacgaaaccctcatcctaa

SEQ ID NO: 457646 - DNA, 591 bp, Shigella boydii
gtggactcgccagcagaatataaaattttcctcaacatcatcctcgcaccagtcgacgacggtttacgctttacgtatagtggcgacaattttttttatcgggaaatctcaatgatcagtctgattgcggcgttagcggtagatcgcgttatcggcatggaaaacgccatgccgtggaacctgcctgccgatctcgcctggtttaaacgcaacaccttaaataaacccgtgattatgggccgccatacctgggaatcaatcggtcgtccgttgccaggacgcaaaaatattatcctcagcagtcaaccgggtacggacgatcgcgtaacgtgggtgaagtcggtggatgaagccatcgcggcgtgtggtgacgtaccagaaatcatggtgattggcggcggtcgcgtttatgagcagttcctgccaaaagcgcagaaactgtatctgacgcatatcgacgcagaagtggaaggcgacacccatttcccggattacgagccggatgactgggaatcggtattcagcgaattccacgatgctgatgcgcagaactctcacagctattgctttgagattctggagcggcggtaa

SEQ ID NO: 457647 - DNA, 843 bp, Shigella boydii
atggcgacataccttattggcgacgttcatggttgttacgatgaactgatcgcattgctgcataaagtagaatttacccctgggaaagataccctctggctgacgggcgatctggtcgcgcgcggcccgggttcgctggatgttctgcgctatgtgaaatccttaggcgacagcgtacgtctggtgctgggcaatcacgatctgcatctgctggcggtatttgccgggatcagccgcaataaaccgaaagatcgcctgacaccgctgctggaagcgccggatgccgacgagctgcttaactggctgcgtcgccagcctttgctgcaaatcgacgaagagaaaaagttggtgatggcccacgcagggatcacgccgcagtgggatctacagaccgccaaagagtgcgcgcgcgatgtagaagcggtgctatcgagtgactcctatcccttctttctcgacgctatgtacggcgatatgccaaataactggtcaccggaattgcgggggctgggaagactgcgttttatcaccaacgcctttacccgtatgcgtttttgcttcccgaacggtcaactggatatgtacagcaaagaatcgccggaagaggcccctgccccactgaaaccgtggtttgcgattcctggccctgtcgctgaagaatacagcatcgcctttggtcattgggcatcgctggagggcaaaggtacgccggaaggtatatacgcgctggataccggctgctgctggggtggtacattaacctgcctgcgctgggaagataaacagtattttgtccagccgtcgaaccggcataaggatttgggcgaagcggcggcgtcttaa

SEQ ID NO: 457648 - DNA, 378 bp, Shigella boydii; identical to SEQ ID NO: 263724

SEQ ID NO: 457649 - DNA, 822 bp, Shigella boydii
atgaataatcgagtccaccagggccacttagcccgtaaacgcttcgggcaaaactttctcaacgatcagttcgtgatcgacagcattgtttctgccattaacccgcaaaagggccaggcaatggtcgaaatcggccccggtctggcggcattgaccgagccggtcggcgaacgtctggaccagctgacggtcatcgaacttgaccgcgatctggcggcacgtctgcaaacgcatccattcttaggcccgaaactgacgatttatcagcaggatgcgatgacctttaactttggcgaactggccgagaaaatgggtcagccgctgcgtgttttcggcaacctgccttataacatctccacgccgttgatgttccatctgtttagctatactgatgccattgccgacatgcactttatgttgcaaaaagaggtggtgaatcgtctggttgcaggaccgaacagcaaagcgtatggtcgattaagcgtcatggcgcaatactattgcaacgtgatcccggtactggaagttccgccgtcagcctttacaccaccacccaaagtggattccgccgtcgtgcgcctggttcctcatgcaacgatgcctcacccggttaaagatgttcgtgtgttgagccgcatcaccaccgaagcctttaaccagcgtcgtaaaaccattcgtaacagcctcggcaacctgtttagcgtcgaggtgttaacgggaatggggctcgacccggcgatgcgagcggaaaatatctctgtcgcgcaatattgccagatggcgaactatctggcggagaacgcgcctttgcaggagagttaa

SEQ ID NO: 457650 - DNA, 990 bp, Shigella boydii
atggttaaaacccaacgtgttgtgatcactcccggcgagcccgccgggattggcccggacttagttgtccagcttgcacagcgtgagtggccggtcgaactggttgtttgtgccgatgccactctccttaccgaccgggcagcgatgctcggtttgccgctcaccctccgcccttattcccccaactcccctgcacaaccgcaaactgcgggcacattaacgctacttcctgtcgcgctacgcgaatctgtcactgcggggcagttagcgattgaaaatgggcattacgtggtggagacgctggcgcgagcgtgtgatggctgtctgaacggtgaatttgctgcgctgatcacaggccccgtgcataaaggcgtcattaacgacgcaggtattccgtttactggtcataccgagtttttcgaagagcgctcgcaggcgaaaaaagtggtgatgatgctggcgaccgaagaacttcgcgtggcgctggcaacgacgcatttaccgctgcgcgatatcgcagatgctatcacccctgcacttttgcacgaagtgattgctattttgcatcacgatttgcgtacaaaatttggtattgccgaaccgcgcattctggtctgcgggctgaatccgcacgcgggcgaaggcggtcatatgggtacggaagagatagacaccattattccggtgctcgacgagctgcgggcgcaggggatgaaactcaacgggccgctgcctgccgataccctgtttcagccgaaatatctcgataacgccgacgccgtgctggcgatgtaccacgatcagggtcttcccgtgctaaaataccagggcttcgggcgcggtgtgaacattacgctgggcctgccctttattcgcacatcagtggaccacggcaccgcgcttgaactggcgggacgtggcgaagccgatgtcggcagttttattacggcgcttaatctcgccatcaaaatgattgttaacacccaatga

SEQ ID NO: 457651 - DNA, 1287 bp, Shigella boydii
atgaagaactggaaaacgctgcttctcggtatcgccatgatcgcgaataccagtttcgctgccccccaggtagtcgataaagtcgcagccgtcgtcaataacggcgtcgtgctggaaagcgacgttgatggattaatgcagtcggtaaaactgaacgctgcgcaggcaaggcagcagcttcctgatgacgcgacgctgcgccaccaaatcatggaacgtttgatcatggatcaaatcatcctgcagatggggcagaaaatgggagtgaaaatctccgatgagcagctggatcaggcgattgctaacatcgcgaaacagaacaacatgacgctggatcagatgcgcagccgtctggcttacgatggtctgaactacaacacctatcgtaaccagatccgcaaagagatgattatctctgaagtgcgtaacaacgaggtgcgtcgtcgcatcaccatcctgccgcaggaagtcgaatccctggcgcagcaggtgggtaaccaaaacgacgccagcactgagctgaacctgagccacatcctgatcccgctgccggaaaacccgacttctgatcaggtgaacgaagcggaaagccaggcgcgcgccattgtcgatcaggtgcgtaacggcgctgatttcggtaagctggcgattgctcattctgccgaccagcaggcgctgaacggcggccagatgggctggggccgtattcaggagttgccgggtatcttcgcccaggcattaagcaccgcgaagaaaggcgacattgttggcccgattcgttccggcgttggcttccatattctgaaagttaacgacctgcgcggcgaaagcaaaaatatctcggtgaccgaagttcatgctcgccatattctgctgaaaccgtcgccgatcatgactgacgaacaggcccgtgtgaaactggaacagattgctgccgatatcaagagtggtaaaacgacttttgctgccgcagcgaaagagttctctcaggatccagactctgctaaccagggcggtgatctcggctgggctacaccagatattttcgatccggccttccgtgacgccctgacccgcctgaacaaaggtcaaatgagtgcaccggttcactcttcattcggctggcatttaatcgaactgctggatacccgtaatgtcgataaaaccgacgctgcgcagaaggatcgtgcataccgcatgctgatgaaccgtaagttctcggaagaagcagcaagctggatgcaggaacaacgcgccagcgcctacgttaaaatcctgagcaactaa

SEQ ID NO: 457652 - DNA, 2355 bp, Shigella boydii
atgaaaaaacgtatccccactctcctggccaccatgattgccaccgccctttatagtcaacagggactggcagccgacctcgcctcacagtgcatgttgggcgtgccaagctatgaccgtcctctggtacagggcgataccaatgacttacccgtgactatcaatgctgaccacgcgaaaggggactacccggatgacgccgtgtttactggcagcgtggatatcatgcagggtaacagccgtctgcaggccgacgaagtgccgctccatcaaaaagaggcaccaggacaaccggagccggtacgaaccgttgatgcgctcggtaatgtccattacgacgataaccaggtgatcctcaaagggccgaaaggctgggcgaatctgaacaccaaagataccaacgtctgggaaggtgattaccagatggtgggtcgccagggccgcggtaaagcggacctgatgaaacaacgtggtgaaaaccgctataccattctggataacggtagctttacctcctgtctgccgggttctgacacctggagcgtggtaggtagcgaaattattcatgaccgcgaagaacaagttgcggagatctggaacgcccgctttaaggtgggtccagtaccgatcttttatagcccctatttgcagttgccggtgggtgacaaacgtcgctctggtttcttgatcccgaacgccaagtacaccaccaccaactactttgagttctacctgccatattactggaacatcgcgccaaatatggatgccaccatcacgccgcattatatgcatcgtcgtggcaacatcatgtgggagaacgaattccgctacctctcccaggcgggcgctggcttgatggaactggactatctgccttcagataaagtctatgaagatgaacacccgaacgatgacagttcacgtcgttggttgttctactggcaacactccggggtcatggatcaagtgtggcgtttcaacgtcgactacaccaaggtcagcgatcctagctacttcaatgatttcgataacaagtacggttccagtactgacggctacgcaacgcaaaaattcagcgttggctatgcggtgcaaaacttcaatgccaccgtttcaaccaagcagttccaggtctttagcgagcagaacaccagtagctactcggcagagccgcagttagacgttaactactaccagaatgatgttggtccgtttgatacgcgtatttacggccaggcagtgcactttgttaacaccagagacgacatgcctgaagcaacccgtgttcacctggaaccgaccatcaatttgccgctctctaataactggggcagcatcaataccgaagcgaagttgctggcaacccattatcagcaaaccaatcttgactggtataactccagaaacacgaccaagctggacgaatccgttaaccgcgttatgccgcaattcaaagttgacggcaaaatggtctttgaacgcgatatggaaatgctggctccgggttatacccaaacgctggaaccgcgcgcgcagtatttgtacgtgccgtatcgcgatcagagcgacatctataactacgactcgtctctactgcaatctgactactctggcctgttccgggaccggacttacggcggtcttgaccgtattgcctccgctaaccaggtgacgaccggtgtcacatctcgcatatatgatgatgctgccgttgaacattttaatatttccgttggtcaaatctactatttcacggagtctcgcactggcgatgacaacataacatgggagaatgacgacaaaacgggctcactggtgtgggcaggcgatacttactggcgtatctccgagcgttggggattgcgtggcgggattcagtacgatacacgtctggataacgtagcgaccagtaactccagcattgaataccgtcgggatgaagaccgtctggtacagctgaattaccgttacgccagcccggaatatattcaggctacgctgcctaagtactattccactgctgagcaatataagaatggtatttcgcaggtaggtgctgtcgccagctggccaattgccgatcgttggtccattgttggggcctactactacgacaccaatgcgaacaagcaagccgactctatgttaggtgtgcaatacagctcctgctgctatgcaattcgcgtcggttacgagcggaagctgaacggttgggataacgataaacaacatgcggtatatgacaacgcaatcggctttaacatcgaacttcgcggcctgagctccaactacggtctggatacgcaagagatgctgcgttcgaacattctgccgtatcaaaacactttgtga

SEQ ID NO: 457653 - DNA, 837 bp, Shigella boydii
gtgtgtcgatttggggaatatatgcagtattggggaaaaatcattggcgtggccgtggccttactgatgggcggcggcttttggggcgtagtgttaggcctgttaattggccatatgtttgataaagcccgtagccgtaaaatggcgtggttcgccaaccagcgtgagcgtcaggcgctgttttttgccaccacttttgaagtgatggggcatttaaccaaatccaaaggtcgcgtcacggaggctgatattcatatcgccagccagctgatggacctaatgaaccttcatggcgcttcccgtactgcggcgcaaaacgcgttccgggtgggaaaatcagacaattacccgctgcgcgaaaagatgcgccagtttcgcagtgtctgctttggtcgttttgacttaattcgtatgtttctggagatccagattcaggcggcgtttgctgatggttcactgcacccgaatgaacggtcggtgctgtatgtcattgcagaagaattagggatctcccgcgcccagtttgaccagtttttgcgcatgatgcagggcggtgcacagtttggcggcggttatcagcagcaatctggcggtggtaactggcagcaagcgcagcgtggcccgacgctggaagatgcctgtaatgtgctgggtgtgaagccgacggatgatgcgaccaccattaaacgagcctaccgtaagctgatgaatgaacaccatcccgataagctggtggcgaaaggtttgccgcctgagatgatggagatggcgaagcagaaagcgcaggaaattcagcaggcatatgagctgataaagcagcagaaagggtttaaataa

SEQ ID NO: 457654 - DNA, 660 bp, Shigella boydii
atggggatggaaaactacaatccaccgcaggaaccctggttggttatcctgtatcaggatgaccacattatggtggttaacaagccgagcggtttgttgtctgtgccggggcgtctggaagagcacaaagacagcgtgatgacgcgcattcagcgtgattatccgcaggcagaatcggtgcatcgtctggatatggctaccagcggcgtgattgtagtggcgctgaccaaagccgcggagcgggagttaaaacgccagttccgcgagcgcgagccgaaaaagcagtatgtggcccgcgtctgggggcatccatcccctgcggaaggtctggtggatctgccgctgatttgcgactggccaaaccgcccgaaacagaaagtctgttacgaaacgggtaaacctgcgcagacggaatatgaagtggtggagtatgcggcggataacacggcaagagtggtgttaaaaccgattactgggcgttcgcatcaattgcgtgtgcatatgctggcgctggggcatccgattctcggcgatcgtttttatgcatcaccagaagcgagagcgatggcaccgcgtttgttgctacatgcagagatgttgacgattacccatccggcgtatggcaatagtatgacgtttaaagcgccagcggatttttaa

SEQ ID NO: 457655 - DNA, 2907 bp, Shigella boydii
atgccttttacacttggtcaacgctggatcagcgatacagaaagcgaattgggacttggaaccgttgtcgcggtggatgcgcgaactgtcactttacttttcccatctactggtgaaaaccgtctgtacgcacgcagtgattcccccgtgacccgcgtgatgttcaaccctggtgataccattaccagccatgacggctggcagatgcaagtcgaagaagtaaaagaagaaaatggcttgctgacctatatcggtactcgcctggatactgaagagtccggcgtagccctgcgtgaagttttccttgatagcaaactggtgttcagcaaaccgcaggaccgcctgtttgccgggcagattgaccgtatggaccgctttgcgctgcgttatcgcgcgcgtaagtattccagcgaacagttccgtatgccgtacagcggcctgcgcggtcagcgtaccagcctgatcccgcaccagctcaacatcgctcatgatgttggccgccgccacgcgccgcgcgtcctgctggctgacgaagtgggtttagggaaaaccattgaagccgggatgatcctgcatcagcaactgctctctggcgctgctgaacgtgtgctgattatcgtcccggaaaccttacagcatcagtggctggtagaaatgctgcgccgtttcaacctgcgctttgctctgtttgatgatgagcgttatgccgaagctcagcacgatgcttacaacccgtttgacaccgaacagctggtgatttgctcgctggattttgcccgtcgtagcaaacagcgcctggaacatctctgtgaagccgaatgggacctgctggtggtcgatgaagcgcatcacctggtgtggagcgaagatgcgccaagccgtgaatatcaggccattgaacaactggcagagcacgtgccgggcgttctgctgctgaccgcgaccccggaacagctggggatggaaagccacttcgcccgtctgcgtctgctggacccgaaccgtttccacgattttgcgcagttcgttgaagagcagaaaaattatcgtccggttgcggacgccgttgccatgctgctggcaggtaacaaactgagcaatgacgaactgaacatgctcggcgagatgatcggcgagcaggatatcgagccgctgttgcaggcagcaaacagcgacagcgaagatgcccagagcgcccgtcaggagctggtttcgatgctgatggatcgccacggcaccagccgcgtgctgttccgtaacacgcgtaacggtgtgaaaggattcccgaaacgcgagctgcacaccattaagctgccgctaccgacgcagtatcagacggctattaaagtctccggcattatgggcgcacgtaaaagtgcggaagatcgtgctcgcgatatgctctacccggagcgtatttatcaggaatttgaaggtgataacgccacctggtggaacttcgatccgcgcgttgagtggctgatgggctacctgaccagccatcgctctcagaaagtgctggtgatctgcgccaaagctgccactgcgctgcaactggagcaggtactgcgcgaacgtgaaggtattcgcgctgcggtgttccacgaaggtatgtcgattatcgaacgtgaccgcgctgccgcctggtttgccgaagaagacaccggcgcacaggtactgctgtgctcagaaatcggttctgaaggacgtaacttccagttcgccagccacatggtgatgtttgacctgccattcaacccggatctactggagcagcgtattggtcgtctggatcgtatcggccaggcgcacgatattcagatccatgtgccttatctggagaaaaccgctcagtcggtgctggtgcgctggtatcacgaaggtctggatgcatttgagcacacctgcccgaccggacgcactatttacgatagcgtatacaacgatctgattaactatctggcttcaccggatcaaaccgaaggctttgacgatctgatcaaaaactgccgcgagcaacatgaagcgctgaaagcacagctggaacagggtcgtgaccgcctgctggaaatccactccaacggtggcgaaaaagcccaggcactggcagaaagcattgaagagcaggatgacgataccaacctgatcgccttcgccatgaacctgctcgatattatcggtatcaatcaggacgatcgcggcgacaacatgatcgtgctgacgccgtccgatcatatgctggtgccggacttccctggcctgtcggaagatggcatcaccatcacctttgatcgtgaagtggcgctggcgcgtgaagatgcacagtttattacctgggagcatccgctgatccgcaacggtctggatctgatcctttctggcgataccggtagcagcacgatttcactgttaaaaaacaaagcgttgccggtaggtacgctgttggtggaactgatttatgtggttgaagcccaggctccgaagcagttgcagctcaaccgcttcctgccaccgacgccggtacgtatgctgctggataaaaacggcaacaacctggcggcgcaggtagagtttgaaacctttaaccgccagcttaacgcggttaaccgtcacaccggcagcaaactggttaacgccgtgcagcaggatgttcacgctatccttcaactgggtgaagcgcagatcgagaaatctgcccgtgcattgattgatgcagcgcgtaacgaagccgacgaaaaactgtctgccgagctgtctcgtctggaagctctgcgtgcagtgaacccgaacattcgtgacgacgaactgaccgccattgagagcaaccgtcagcaggtaatggaaagcctggatcaggcaggttggcgtctggatgccctgcgtttgatcgttgtaacgcatcagtaa

SEQ ID NO: 457656 - DNA, 2352 bp, Shigella boydii
gtggcgcaggcaggttttatcttaacccgacactggcgggacaccccgcaagggacagaagtctccttctggctggcgacggacaacgggccgttgcaggttacgcttgcaccgcaagagtccgtggcgtttattcccgccgatcaggttccccgcgctcagcatattttgcagggtgaacaaggctttcgcctgacaccgctggcgttaaaggattttcaccgccagccggtgtatggcctttactgtcgcgcccatcgccaattgatgaattacgaaaagcgcctgcgtgaaggtggcgttaccgtctacgaggccgatgtgcgcccgccagaacgctatctgatggagcggtttatcacctcaccggtgtgggtcgagggtgatatgcacaatggcactatcgttaatgcccgtctgaaaccgcatcccgactatcgtccgccgctcaagtgggtttctatagatattgaaaccacccgccacggtgagctgtactgcatcggcctggaaggctgcgggcagcgcatcgtttatatgctggggccggagaatggcgacgcctcctcgcttgatttcgaactggaatacgtcgccagccgcccgcagttgctggaaaaactcaacgcctggtttgccaactacgatcctgatgtgatcatcggttggaacgtggtgcagttcgatctgcgaatgctgcaaaaacatgccgagcgttaccgtcttccgctgcgtcttgggcgcgataatagcgagctggagtggcgcgagcacggctttaaaaacggcgtcttttttgcccaggctaaaggtcggctaattatcgacggtatcgaggcgctgaaatccgcgttctggaatttctcttcattctcgctggaaactgtcgctcaggagctattaggcgaaggaaaatctatcgataacccgtgggatcgaatggacgaaattgaccgccgtttcgccgaagataaacctgcgctggcaacttataacctgaaagattgcgagctggtgacgcagatcttccacaaaactgaaatcatgccatttttactcgaacgggcaacggtgaacggcctgccggtggaccgacacggcggttcggtggcggcatttggtcatctctattttccgcgaatgcatcgcgctggttatgtcgcgcctaatctcggcgaagtgccgccgcacgccagccctggcggctacgtgatggattcacggccagggctttatgattcagtgctggtgctggactataaaagcctgtacccgtcgatcatccgcacctttctgattgatcccgtcgggctggtggaaggcatggcgcagcctgatccagagcacagtaccgaaggttttctcgatgcctggttctcgcgagaaaaacattgcctgccggagattgtgactaacatctggcacgggcgcgatgaagccaaacgccagggtaacaaaccgctgtcgcaggcgctgaaaatcatcatgaatgccttttatggcgtgctcggcaccaccgcctgccgcttcttcgatccgcggctggcatcgtcgatcaccatgcgtggtcatcagatcatgcggcaaaccaaagcgttgattgaagcacagggctacgacgttatctacggcgataccgactcaacgtttgtctggctgaaaggcgcacattcggaagaagaagcggcgaaaatcggtcgtgcactggtgcagcacgttaacgcctggtgggcggaaacgctgcaaaaacaacggctgaccagcgcattagaactggagtatgaaacccatttctgccgttttctgataccaaccattcgcggagccgataccggcagtaaaaagcgctacgccgggctgattcaggagggcgataaacagcggatggtgtttaaagggctggaaaccgtgcgcaccgactggacgccgctggcccagcagtttcagcaggagctatacctgcgcatcttccgcaacgagccatatcaggaatatgtacgcgaaaccatcgacaaactgatggcgggtgaactggatgcgcgactggtttaccgtaaacgccttcgccgtccgctgagcgagtatcagcgtaatgtgccgcctcatgtacgcgccgctcgccttgccgatgaagaaaaccaaaagcgtggtcgccccttgcaatatcagaatcgcggcaccattaagtacgtatggaccaccaacggcccggagccgctggactaccaacgttcaccactggattacgaacactatctgacccgccagctacaacccgtggcggagggaatactcccttttattgaggataattttgctacacttatgaccgggcaacttgggctattttga

SEQ ID NO: 457657 - DNA, 696 bp, Shigella boydii
atgttagaagatctcaaacgccaggtattagaagccaacctggcgctgccaaaacacaacctggtcacgctcacatggggcaacgtcagcgccgttgatcgcgagcgcggcgtctttgtgatcaaaccttccggcgtcgattacagcgtcatgaccgctgacgatatggtcgtggttagcatcgaaaccggtgaagtggttgaaggtacgaaaaagccctcctccgacacgccaactcaccggctgctctatcaggcattcccctccattggcggcattgtgcatacgcactcgcgccacgccaccatctgggcgcagtcgggtcagtcgattccagcaaccggcaccacccacgctgactatttctacggcaccattccctgcacccgcaaaatgaccgacgcagaaatcaacggcgaatatgagtgggaaaccggtaacgtcatcgtagaaacctttgaaaaacagggtatcgatgcagcgcaaatgcccggcgttctggtccattcccacggcccgtttgcatggggcaaaaatgccgaagatgcgatgcataacgccatcgtgctggaagaggtcgcttatatggagatattctgccgtcagttagcgccgcagttaccggatatgcagcaaacgctgctggataaacactatctgcgtaagcatggcgcgaaggcatattacgggcagtaa

SEQ ID NO: 457658 - DNA, 1503 bp, Shigella boydii
atgacgatttttgataattatgaagtgtggtttgtcattggcagccagcatctgtatggcccggaaaccctgcgtcaggtcacccaacatgccgagcacgttgttaatgcgctgaatacggaagcgaaactgccctgcaaactggtgttgaaaccgctgggcaccacgccggatgaaatcaccgctatttgccgcgacgcgaattacgacgatcgttgcgctggtctggtggtgtggctgcacaccttctccccggccaaaatgtggatcaacggcctgaccatgctcaacaaaccgttgctgcaattccacacccagtttaacgcggcgctgccgtgggacagtatcgatatggactttatgaacctgaaccagactgcacatggcggtcgcgagttcggcttcattggcgcgcgtatgcgtcagcaacatgccgtggttaccggtcactggcaggataaacaagcccatgagcgtatcggctcctggatgcgtcaggcggtctctaaacaggatacccgtcatctgaaagtctgccgttttggcgataacatgcgtgaagtagcggtcaccgatggtgataaagttgccgcacagatcaagttcggtttctccgtcaatacctgggcggttggcgatctggtgcaggtggtgaactccatcagcgacggcgatgttaacgcgctggtcgatgagtacgaaagctgctacaccatgacgcctgccacacaaatccacggcgaaaaacgacagaacgtgctagaagcggcgcgtattgagctggggatgaagcgtttcctggaacaaggtggcttccacgcgttcaccaccacctttgaagatttgcacggtctgaaacagcttccaggtctggccgtacagcgtctgatgcagcagggttacggctttgcgggcgaaggcgactggaaaaccgccgccctgcttcgcatcatgaaggtgatgtcaaccggtctgcagggcggcacctcctttatggaggactacacctatcacttcgagaaaggtaatgacctggtgctcggctcccatatgctggaagtctgcccgtcgattgccgtagaagagaaaccgatcctcgacgttcagcatctcggtattggtggtaaggacgatcctgcccgactgatcttcaatacccaaaccggtccagcgattgtcgccagcctgattgatctcggcgatcgttaccgtctgctggttaactgtatcgacacggtgaaaacaccgcactccctgctgaaactgccggtggcgaatgcgctgtggaaagcgcaaccggatctgccaactgcttccgaagcgtggatcctcgctggtggcgcgcaccataccgtcttcagccatgcgctgaacctcaacgatatgcgtcagttcgccgagatgcacgacattgaaatcacggtgattgataacgacacccgcctgccagcgtttaaagacgcactgcgctggaacgaagtgtattacggatttcgtcgctaa

SEQ ID NO: 457659 - DNA, 1701 bp, Shigella boydii
atggcgattgcaattggcctcgattttggcagtgattctgtgcgagctttggcggtggactgcgccagcggtgaagagatcgccaccagcgtagagtggtatccccgttggcaaaaagggcaattttgtgatgccccgaataaccagttccgtcatcatccgcgtgactacattgagtcaatggaagcggcactgaaaaccgtgcttgcagagcttagcgtcgaacagcgcgcagctgtggtcgggattggcgttgacagtaccggctcgacgcccgcaccgattgatgccgacggtaacgtgctggcgctgcgcccggagtttgccgaaaaaccaaacgcgatgttcgtattgtggaaagaccacactgcggttgaagaagcggaagagattacccgtttgtgccacgcgccgggcaacgttgactactcccgctacattggtggtatttattccagcgaatggttctgggcaaaaatcctgcatgtgactcgccaggacagcgccgtggcgcaatctgccgcatcgtggattgagctgtgcgactgggtgccagctctgctttccggtaccacccgcccgcaggatattcgtcgcggacgttgcagcgccgggcataaatctctgtggcacgaaagctggggcggcttgccgccagccagtttctttgatgagctggacccgatcctcaatcgccatttgccttccccgctgttcactgacacctggactgccgatattccggtgggcaccttatgcccggaatgggcgcagcgtctcggcctgcctgaaagcgtggtgatttccggcggcgcgtttgactgccatatgggcgcagttggcgcaggcgcacagcctaacgcactggtaaaagttatcggtacttccacctgcgacattctgattgccgacaaacagagcgttggcgagcgggcagttaaaggtatttgcggtcaggttgatggcagcgtggtacctggatttatcggtctggaagcaggccaatcggcgtttggtgatatctacgcctggtttggtcgcgtactcggctggccgctggaacagcttgccgcccagcatccggaactgaaagcgcaaatcaacgccagccagaaacaactgcttccggcgctgaccgaagcatgggccaaaaatccgtctctggatcacctgccggtggtgctcgactggtttaacggccgccgcacaccgaacgctaaccaacgcctgaaaggggtgattaccgatcttaacctcgctaccgacgctccgctgctgtttggcggtttgattgctgccaccgcctttggcgcacgcgcaatcatggagtgctttaccgatcaggggatcgccgtcaataacgtgatggcgctgggcggcatcgcgcggaaaaaccaggtcattatgcaggcctgctgcgacgtgctgaatcgcccgctgcaaattgttgcctctgaccagtgctgtgcgctcggtgcggcgatttttgctgccgtcgccgcgaaagtgcacgcagacatcccatcagcccagcaaaaaatggccagtgcggtagagaaaaccctgcaaccgcgcagcgaacaggcacaacgctttgaacagctttatcgccgctatcagcaatgggcgatgagcgccgaacaacactatcttccaacttccgccccggcacaggctgcccaggccgttccgactctataa

SEQ ID NO: 457660 - DNA, 879 bp, Shigella boydii
atggctgaagcgcaaaatgatcccctgctgccgggatactcgtttaatgcccatctggtggcgggtttaacgccgattgaggccaacggttatctcgatttttttatcgaccgaccgctgggaatgaaaggttatattctcaatctcaccattcgcggtcagggggtggtgaaaaatcagggacgagaatttgtttgccgaccgggtgatattttgctgttcccgccaggagagattcatcactacggtcgtcatccggaggctcgcgaatggtatcaccagtgggtttactttcgtccgcgcgcctactggcatgaatggcttaactggccgtcaatatttgccaatacgggtttctttcgcccggatgaagcgcaccagccgcatttcagcgacctgtttgggcaaatcattaacgccgggcaaggggaagggcgctattcggagctgctggcgataaatctgcttgagcaattgttactgcggcgcatggaagcgattaacgagtcgctccatccaccgatggataatcgggtacgcgaggcttgtcagtacatcagcgatcacctggcagacagcgattttgatatcgccagcgtcgcacagcatgtttgcttgtcgccgtcgcgtctgtcacatcttttccgccagcagttagggattagcgtcttaagctggcgcgaggaccaacgtatcagccaggcgaagctgcttttgagcaccacccggatgcctatcgccaccgtcggtcgcaatgttggttttgacgatcaactctatttctcgcgggtatttaaaaaatgcaccggggccagcccgagcgagttccgtgccggttgtgaagaaaaagtgaatgatgtagccgtcaagttgtcataa

SEQ ID NO: 457661 - DNA, 765 bp, Shigella boydii
atgcaagcattgctggaacactttattacccaatctaccgtgtattcattgatggcggtggtgttggtggcctttctggagtcgctggcgctggtcggtttgattctacccggtacggtgctgatggcggggctgggagcgctgattggcagcggcgagttaagtttctggcacgcctggctggcagggattgtcggttgtctgctgggcgactggatctccttctggctgggctggcgttttaaaaagccgttgcatcgctggtcatttctgaagaaaaacaaagcattactcgataaaactgaacatgcgttgcatcaacacagcatgttcaccattctggtcggtcgctttgttggcccgacgcgtccgctggtgccaatggtggcgggaatgctggatctgccggtggcaaaattcattacgccgaatattatcggctgcctgctgtggccaccgttttacttcctgcctgggattctggcgggcgcggcgatcgatattccagccggaatgcagagcggcgagtttaaatggttgctgctggcgacggcggtatttttgtgggttggtggctggctgtgctggcggttatggcgcagcggtaaagcaaccgatcgtttaagtcattatttgtcgcgcggccgtttgttgtggctgacgccgttgatttctgccatcggcgtggtggcgctggtggtgttaattcgccagccgttgatgccggtgtatatcgatattttgcgtaaagtggttggggtttag

SEQ ID NO: 457662 - DNA, 699 bp, Shigella boydii
atgttaaaactgactgatatcacctggctttaccaacatttgccgatgcgttttagcttaacggtggaacgcggcgagcaggtggcgatcctcgggccaagcggcgcaggtaaaagtaccctgctgaatttgattgccggttttctgacgccagccagcggttcgctgactatcgatggcgttgatcacaccacgacgccgccgtcacgccgtccggtgtcgatgctgtttcaggagaacaacctgttcagccacctgacggtcgcgcagaacatcgggctggggcttaatccaggattgaagctgaacgcggcacagcaggagaaaatgcacgctatcgcccgtcagatggggattgataatttaatggcgcggttaccgggcgagctttccggcggccagcgacagcgcgtggcgttagcgcgttgtctggtgcgcgaacagccgattttattgctcgatgaaccgttctctgcgctcgatccggcgttacgtcaggagatgctgacgctggtgagcacgagctgccagcagcaaaaaatgacgctattgatggtgtcgcacagtgtggaagatgcggcgcggatcgccacacgctcggtggtggtcgccgacgggcgcatcgcctggcagggtaagactgaagaattgttgagcggtaaggcgagtgcttcggcaatattggggattacgggttag

SEQ ID NO: 457663 - DNA, 1611 bp, Shigella boydii
atggcaacgcgccgtcagccgttaattcccggctggttaattccaggtgtaagcgccgccacgctggtggtagcggttgcgctcgcggcgtttctcgccctgtggtggaacgcgccgcagggtaactgggtggcagtctggcaggacagctacctgtggcatgtggtgcgcttctccttctggcaggcgtttctctcggcgctactctctgtcgtacccgcgatattcctcgcccgcgccctctatcgcaggcgctttccgggtcggctggcgctgttgcgtctgtgcgcaatgaccttgatcctcccggtgctggttgctgttttcggcattcttagcgtctatggtcgccagggctggctggcatcgctctgccaatcgctcggtctggagtggaccttttcgccctacggcctgcaaggtattttgctggcgcacgtattttttaatctgccgatggcgagccgcttattactccaggcactggaaaacattcccgacgaacaacgtcagcttgccgcccagcttgggatgcgcggctggcattttttccgcttcgtcgaatggccgtggttacggcgacaaatcccgccggttgctgcacttatctttatgctctgtttcgccagcttcgccaccgtgctatcactgggcggcggtccgcaggcgaccactatcgagctggctatttatcaggcgctgagttacgactacgatcctgcccgcgcggcgatgctggcgctgatccagatggtgtgttgccttgggctggtactgttgagtcagcgattgagtaaggccattgcgccaggcaccacgctgctgcaaggctggcgcgacccggacgatcgtctgcatagccgcatttgcgacacggtgttaatagtgctggcgctgctgctgttgttgccaccgttgctggcggtgatcgtcgatggggtaaatcgccagttgccggaagtgctggcacaaccggtgctgtggcaggcgctgtggacctcgttgcgtattgcgctggcggcaggtgtattgtgcgtagtgctgaccatgatgctgctatggagcagtcgcgaacttcgggcgcggcagaaaatgctggcgggtcaggcgctggagatgagcggcatgttgattctcgccatgccggggattgtgctggctaccggcttctttttactgctcaacaacactatcggcctgcaacaatctgctgacggcattgtgattttcaccaatgcgttaatggcgatcccttatgcgctgaaagtactggaaaacccgatgcgcgatatcaccgcccgctacagtatgttgtgtcagtcgctgggcattgaaggctggtcgcgcttaaaagtggtggagctgcgcgccctgaaacgtccactggcgcaggcgctggcctttgcctgcgtgctgtcgattggtgattttggcgtggtggcgttgttcggtaacgatgatttccgtaccctgccgttttatctctaccagcaaattggctcctatcgcagccaggacggcgcggtcaccgcgttaattctgctgctactctgttttctgctgtttaccgtgattgaaaaactaccggggcgaaatgttaaaactgactga

SEQ ID NO: 457664 - DNA, 984 bp, Shigella boydii
gtgttaaaaaaatgtcttcccctgctgttgctgtgcacagcgcccgttttcgctaaacccgttctgactgtttatacctacgattccttcgccgccgactgggggcctggtccaaagatcaaaaaagcttttgaagccgactgtaactgcgaactgaaactggtggcgctggaagatggcgtttcgcttctcaaccgtctacggatggaaggcaaaaatagtaaagccgatgtggtgctggggctggataacaatctgttagacgccgccagtaaaaccggactatttgccaaaagcggtgtggcagcggatgccgttaacgttcccggcggctggaataatgacactttcgtcccgtttgattacggctatttcgccttcgtctatgacaagaacaaactgaaaaacccgccgcaaagcctgaaagaattggttgagagcgatcaaaactggcgggtgatttatcaggatccgcgcaccagtacgccggggctgggcctgctgttgtggatgcaaaaagtctatggcgatgacgccccacaagcctggcaaaaactggcgaagaaaaccgtcacggtcaccaaaggctggagcgaagcctacggcctgtttttaaaaggtgaaagcgatctggtactgagttacaccacctctccggcttatcacattctcgaagagaaaaaagataactacgccgccgcgaactttagcgaaggtcactatctgcaggtggaagtcgccgcccgcaccgctgccagcaagcagccggagctggcgcaaaaattcctccagtttatggtttctccggcttttcagaatgcgatcccaaccggtaactggatgtatccggtggcaaatgtcacgctgcctgccgggtttgaacaattgaccaaaccggccaccacgctggagttcacaccagctgaagtggcggcacaacgtcaggcatggattagcggatggcaacgcgccgtcagccgttaa

SEQ ID NO: 457665 - DNA, 1656 bp, Shigella boydii
atgccatctgctcgtctgcaacaacagttcatccgcctgtggcaatgctgcgagggtaaatcgcaggacacaacgctcaacgaactggcagcgttattgagctgctcgcgtcgtcatatgcgtaccctgctcaacaccatgcaggatcgcggctggctgacgtgggaagcggaagtcgggcgcggtaaacgctcgcgtctgacattcctctataccgggctggcgcttcagcaacagcgggcggaagacctgctggagcaggatcgtatcgaccaactagtgcagttggttggcgacaaagcgactgtgcggcaaatgctggtttctcatctgggccgcagcttccgccaggggcggcacatcctgcgcgtgctctactatcgtccgttgcgtaatctgctacctggcagcgcattgcgccgttccgaaacccatattgcccggcaaatcttcagttcgctaacgcgcataaatgaggaaaatggggaactggaagcagacatcgcccaccactggcagcaaatatcaccgcttcactggcgtttctttttgcgtccaggagtccattttcatcatggtcgtgaactggaaatggacgacgtgatcgcctctttaaaacgaatcaatacgctgccgctctattcgcatattgcggacattgtgtcgccgacgccctggacgctggatatccatctcacgcaaccggaccgctggttaccgttactgctggggcaagttccggcgatgatcctgccgcgcgaatgggaaaccctcagtaactttgccagccatcccatcggcaccggtccgtatgcggtgatccgcaacaccaccaatcaactgaaaattcaggcattcgatgacttcttcggttaccgggcattaatcgatgaagttaacgtctgggttctgccggaaattgccgacgagccagctggaggtctgatgctaaaaggtccacagggtgaggaaaaagagattgaaagccgcctggaggaaggttgctactatttactattcgacagccgcacccatcgcggagcgaatcagcaagtcagggactgggtaagctatgtgctttctccaactaatctggtctatttcgctgaggaacagtaccagcaactgtggttcccggcttatggactgctcccccgttggcaccatgcccgcaccataaagagcgaaaaaccggctggcctggaaagcctcaccctgaccttttatcaggatcacagtgagcatcgggtgattgccgggatcatgcagcagattctggcaagtcaccaggtcacgctggaaatcaaagagatcagctacgatcagtggcatgaaggagagatcgagagcgatatctggcttaatagcgccaactttacgctgccgctggatttttcgctgttcgcgcacttgtgcgaggtgccgctgctccaacactgtattccgatcgactggcaagccgacgccgcccgctggcgcaatggcgaaatgaacctggcgaactggtgccagcaactggtcgccagtaaagcaatggtgccgcttatccaccactggctgatcattcagggacaacgcagtatgcgcggcctgcgtatgaataccctcggctggttcgattttaaatcagcgtggtttgcgccgccggatccatga

SEQ ID NO: 457666 - DNA, 132 bp, Shigella boydii
atgcgtcagttttatcagcactattttaccgcgacagcgaagttgtgctggttgcgttggttaagcgtcccacaacgattaaccatgcttgaaggactgatgcagtgggatgaccgcaattctgaaagttga

SEQ ID NO: 457667 - DNA, 1083 bp, Shigella boydii
atgatctggataatgacgatggctcgccgtatgaacggtgtttacgcggcatttatgctggtcgcttttatgatgggggtggccggggcgctacaggctcctacattgagcttatttctgagtcgtgaggttggcgcgcaacctttctggatcggactcttttatacggtgaatactattgctgggatcggcgtaagcctctggttggcaaaacgttctgacagtcagggcgatcggcgaaaactgattatattttgctgtttgatggctatcggcaatgcgccattgtttgcatttaatcgtcattatctgacgcttatcacctgtggtgtgcttctggcatctctggccaatacggcaatgccacagttatttgctctggcgcgggaatatgcggataactcggcgcgagaagtggtgatgttttcgattgccgccgggatattcacactcagtctggtattgattgcatttatgcttccgtctgtggcgcgggtagaactgccgtcggaaaatgctttatcaatgcaaggtggctggcaggatagtaacgtacggatgttatttgtcgcctcgacgttaatgtggacctgcaacaccatgtacattattgatatgccgttgtggatcagtagcgagttaggattgccagacaaactggcgggtttcctgatggggacggcagctggactggaaataccagcaatgattctggctggctactatgtcaaacgttatggtaagcggcgaatgatggtcatagcagtggcggcaggagtactgttttacaccggattgattttctttcatagccgtatggcgttgatgacgctgcaactttttaacgctgtatttatcggcattgttgcgggtattgggatgctatggtttcaggatttaatgcctggaagagcgggggcagctaccaccttatttactaacagtatttctaccggggtaattctggctggcgttattcagggagcaattgcacaaagttgggggcactttgctgtctactgggtaattgcggttatttctgttgtcgcattatttttaaccgcaaaggttaaagacgtttga

SEQ ID NO: 457668 - DNA, 606 bp, Shigella boydii
atggcagagaaatttatcaaacacacaggcctggtggttccgctggatgccgccaatgtcgataccgatgcaatcatcccgaaacagtttttgcagaaagtgacccgtacgggttttggcgcgcatctgtttaacgactggcgttttctcgatgaaaaaggccaacagccaaacccggacttcgtgctgaacttcccgcagtatcagggcgcttccattttgctggcacgagaaaacttcggctgtggctcctcgcgtgagcacgcgccctgggcattgaccgactacggttttaaagtggtgattgcgccgagttttgctgacatcttctacggcaatagctttaacaaccagctgctgccggtgaaattaagcgatgcagaagtggacgaactgtttgcgctggtgaaagccaatccggggatccatttcgacgtggatctggaagcgcaagaggtgaaagcgggagagaaaacctatcgctttaccatcgatgccttccgccgccactgcatgatgaacggtctggacagtattgggcttaccttgcagcacgacgacgccattgccgcttatgaagcaaaacaacctgcgtttatgaattaa

SEQ ID NO: 457669 - DNA, 1401 bp, Shigella boydii
atggctaaaacgttatacgaaaaattattcgacgctcacgtagtgtacgaagccgaaaacgaaaccccgctgttatatatcgaccgccacctggtgcatgaagtgacctcaccgcaggcgttcgatggtctgcgcgcccacggtcgcccggtacgtcagccgggcaaaaccttcgccactatggatcacaacgtctctacccagacgaaagacattaatgcctgtggtgaaatggcgcgcatccagatgcaggagctgattaaaaactgcaaagaatttggcgtcgaactgtatgacctgaatcacccgtatcaggggatcgtccacgtaatggggccggaacagggcgtcaccttgccggggatgaccattgtctgcggcgactcgcataccgccacccacggcgcgtttggcgcactggcctttggtatcggcacttccgaagttgaacacgtactggcaacgcaaaccctgaaacagggccgcgcaaaaaccatgaaaattgaagtccagggcaaagccgcgccgggcattaccgcaaaagatatcgtgctggcaattatcggtaaaaccggtagcgcaggcggcaccgggcatgtggtggagttttgcggcgaagcaatccgtgatttaagcatggaaggtcgtatgaccctgtgcaatatggcaatcgaaatgggcgcaaaagccggtctggttgcaccggacgaaaccacctttaactatgtcaaaggccgtttgcatgcgccgaaaggcaaagatttcgacgacgccgttgcctactggaaaaccctgcaaaccgacgaaggcgcaactttcgataccgttgtcactctgcaagcagaagaaatttcaccgcaggtcacctggggcaccaatccaggccaggtgatttccgtgaacgacaatattcccgatccggcttcgtttgccgatccggttgaacgcgcgtcggcagaaaaagcgctggcctatatggggctgaaaccgggcattccgctgaccgaagtggctatcgacaaagtgtttatcggttcctgtaccaactcgcgcattgaagatttacgcgcggcagcggagatcgccaaagggcgaaaagtcgcgccaggcgtgcaggcactggtggttcccggctctggcccggtaaaagcccaggcggaagcggaaggtctggataaaatctttattgaagccggttttgaatggcgcttgcctggctgctcaatgtgtctggcgatgaacaacgaccgtctgaatccgggcgaacgttgtgcatccaccagcaaccgtaactttgaaggccgccaggggcgcggcgggcgcacgcatctggtcagcccggcaatggctgccgctgctgctgtgaccggacatttcgccgacattcgcaacattaaataa

SEQ ID NO: 457670 - DNA, 1092 bp, Shigella boydii
atgtcgaagaattaccatattgccgtattgccgggggacggtattggtccggaagtgatgacccaggcgctgaaagtgctggatgccgtgcgcaaccgctttgcgatgcgcatcaccaccagccattacgatgtaggcggcgcagccattgataaccacgggcaaccactgccgcctgcgacggttgaaggttgtgagcaagccgatgccgtgctgtttggctcggtaggcggtccgaaatgggaacatttaccaccagaccagcaaccagaacgcggcgcgctgttgcctttgcgtaagcacttcaaattattcagcaacctgcgtccggcaaaactgtatcaggggctggaagcattctgtccgctgcgtgctgacattgccgctaacggcttcgacatcctgtgcgtgcgcgaactgaccggcggcatctatttcggtcagccaaaaggccgcgaaggtagcggacagtatgaaaaagcgtttgataccgaggtgtatcaccgttttgagatcgaacgtatcgcccgcatcgcgtttgaatctgcccgcaagcgtcgccacaaagtcacctcaatcgacaaagccaacgtgctgcaatcctctattttatggcgggagatcgttaacgagatcgccacggaatacccggatgtcgaactggcgcatatgtacatcgacaacgccaccatgcagctgattaaagatccatcacagtttgacgtcctgctgtgctccaacctgtttggcgacattctgtctgacgagtgcgcaatgatcactggctcgatggggatgttgccttccgccagcctgaacgagcaaggttttggtctgtatgaaccggcaggcggctcagcaccagatatcacaggcaaaaacatcgccaacccgattgcgcaaattctgtcgctggcactgctgctgcgctacagcctggatgccgatgatgcggcttgcgccattgaacgcgccattaaccgcgcattagaagaaggcattcgcaccggggatttagcccgtggcgctgccgccgttagtaccgatgaaatgggcgatatcattgcccgctatgtggcagaaggggtgtaa

SEQ ID NO: 457671 - DNA, 1572 bp, Shigella boydii
atgagccagcaagtcattattttcgataccacattgcgcgacggtgaacaggcattacaggcaagcttgagtgtgaaagaaaaactgcaaattgcgctggcccttgagcgtatgggtgttgacgtgatggaagtcggtttccccgtctcttcgccgggcgattttgaatcagtgcaaaccatcgcccgccaggttaaaaacagccgcgtatgcgcgttagctcgctgcgtggagaaagatatcgacgtggcggccgaatccctgaaagtcgccgaagccttccgtattcatacctttattgccacttcgccaatgcacatcgccaccaagctgcgcagcacgctggatgaagtgatcgaacgcgctatctatatggtgaaacgcgcccgtaattacaccgatgatgttgaattttcttgcgaagatgccgggcgtacccccattgccgatctggcgcgagtggtcgaagcggcgattaatgccggtgccaccaccatcaacattccggacaccgtgggctacaccatgccgtttgagttcgccggaatcatcagcggtctgtatgaacgcgtacctaacatcgacaaagccattatttccgtacatacccacgacgatttaggcctggcggtcggcaactcactggcggcggtacatgccggtgcacgccaggtggaaggtgcaatgaacgggatcggcgagcgtgccggtaactgttcgctggaagaagtcatcatggcgattaaagttcgtaaggatattctcaacgtccacaccgccattaatcaccaggagatatggcgcaccagccagttagttagccagatttgtaatatgccgatcccggcaaacaaagccattgttggcagcggcgcattcgctcactcctccggtatccaccaggatggcgtgctgaaaaaccgcgaaaactacgaaatcatgacaccagaatctattggtctgaaccaaatccagctgaatctgacctctcgttcggggcgtgcggcggtgaaacatcgcatggatgagatggggtataaagaaagtgaatataatttagacaatttgtacgatgctttcctgaagctggcggacaaaaaaggtcaggtgtttgattacgatctggaggcgctggccttcatcggtaagcagcaagaagagccggagcatttccgtctggattacttcagcgtgcagtctggctctaacgatatcgccaccgccgccgtcaaactggcctgtggcgaagaagtcaaagcagaagccgccaacggtaacggtccggtcgatgccgtctatcaggcaattaaccgcatcactgactataacgtcgaactggtgaaatacagcctgaccgccaaaggtcacggtaaagatgcgctgggtcaggtggatattgtcgccaactacaacggtcgccgcttccacggcgtcggcctggccaccgatattgtcgagtcctccgccaaagccatggtgcacgtactgaacaatatctggcgtgccgcagaagtcgaaaaagagttgcaacgcaaagctcaacacaacgaaaacaacaaggaaaccgtgtga

SEQ ID NO: 457672 - DNA, 945 bp, Shigella boydii
atgccagaggtacaaacagatcattcagagacggcggagttaagcaagccacagctacgcatggtcgatctcaacttattaaccgttttcgatgccgtgatgcaggagcaaaacattacccgtgccgctcatgttctgggtatgtcgcaacctgcggtcagtaacgctgttgcacgcctgaaggtgatgtttaatgacgagctttttgttcgttatggccgtggtattcaaccgactgctcgcgcatttcaactttttggttcagttcgccaggcattgcaactagtacaaaatgaattgcctggttcaggttttgaacccgcgagtagtgaacgtgtatttcatctttgtgtttgcagcccgttagacagcattctgacctcgcagatttataatcacattgagcagattgcgccaaatatacatgttatgttcaagtcttcattaaatcagaacactgaacatcagctgcgttatcaggaaacggagtttgtgattagttatgaagacttccatcgtcctgaatttaccagcgtgccattatttaaagatgaaatggtgctggtagccagcaaaaatcatccaacaattaaaggcccgttactgaaacatgatgtttataacgaacaacatgcggcggtttcgctcgatcgtttcgcgtcatttagtcaaccttggtatgacacggtagataagcaagccagtatcgcgtatcagggcatggcaatgatgagcgtacttagcgtggtgtcgcaaacgcatttggtcgctattgcgccgcgttggctggctgaagagttcgctgaatccttagaattacaggtattaccgctgctgttaaaacaaaacagcagaacctgttatctctcatggcatgaagctgccgggcgcgataaaggccatcagtggatggaagaacaattagtctcaatttgcaaacgctaa

SEQ ID NO: 457673 - DNA, 1053 bp, Shigella boydii
atggagatgttgtctggagccgagatggtcgtccgatcgcttatcgatcagggcgttaaacaagtattcggttatcctggaggcgcagtccttgatatttacgatgcattgcataccgtgtgtggtatcgatcatgttttagttcgtcatgagcaggcggcagtgcatatggccgatggtctggcgcgcgcgaccggggaagtcggcgtcgtgctggtaacgtcgggtccaggggcgaccaatgcgattaccggcatcgccaccgcttatatggattccattccattagttgtcctttccgggcaggtagcgacctcgttgataggttacgatgcctttcaggagtgcgacatggtggggatttcgcgaccagtggttaaacacagttttctggttaagcaaacggaagacattccgcaggtgctgaaaaaggctttctggctggcggcaagtggtcgtcctggaccagtagtcgttgatttaccgaaagatattcttaatccggcgaacaaattaccctatgtctggccggagtcggtcagtatgcgttcttacaatcccactactaccggacataaagggcaaattaagcgtgctctgcaaacgctggtagtggcaaaaaaaccggttgtctacgtaggcggtggggcaatcatggcgggctgccatcagcagttgaaagaaacggtggaggcgttgaatctgcccgttgtttcctcattgatggggctgggggcgtttccggcaacgcatcgtcaggcactgggcatgctgggaatgcacggtacctacgaagccaatatgacgatgcataacgcggatgtgattttcgccgtcggggtacgatttgatgaccgaacgacgaacaatctggcaaagtactgcccaaatgccactgttctgcatatcgatattgatcctacttccatttctaaaaccgtgactgcggatatcccgattgtgggggatgctcgccaggtcctcgaacaaatgcttgaactcttgtcgcaagaatccgcccatcaaccactggatgagatccgcgactggtag

SEQ ID NO: 457674 - DNA, 555 bp, Shigella boydii
gtgacgtccgatgtcgggcagcaccagatgtttgctgcactttattatccattcgacaaaccgcgtcgctggatcaattccggtggcctcggcacgatgggttttggtttacctgcggcactgggcgtcaaaatggcgttgccagaagaaaccgtggtttgcgtcactggcgacggcagtattcagatgaacattcaggaactgtctaccgcgttgcaatacgagttgcccgtactggtggtgaatctcaataaccgctatctggggatggtgaaacagtggcaggacatgatctattccggccgtcattcacaatcttatatgcaatcactacccgatttcgtccgtctggcggaagcctatggtcacgtcgggatccagatctctcatccgcatgagctggaaagcaaacttagcgaggcgctggaacaggtgcgcaataatcgcctggtgtttgttgatgttaccgtcgatggcagtgagcacgtctacccgatgcagattcgcgggggcggaatggatgaaatgtggttaagcaaaacggagagaacctga

SEQ ID NO: 457675 - DNA, 492 bp, Shigella boydii
atgcgccggatattatcagtcttactcgaaaatgaatcaggcgcgttatcccgcgtgattggccttttttcccagcgaggctacaacattgaaagcctgaccgttgcgccaaccgacgatccgacattatcgcgtatgaccatccagaccgtgggcgatgaaaaagtacttgagcagatcgaaaagcaattacacaagctggtcgatgtcttgcgcgtgagtgagttggggcagggcgcgcatgttgagcgggaaatcatgctggtgaaaattcaggccagcggttacgggcgtgacgaagtgaaacgtaatacggaaatattccgtgggcaaattatcgatgtcaccccctcgctttataccgttcaattagcaggcaccagcgataagcttgatgcatttttagcatcgattcgcgaggtggcgaaaattgtggaagttgctcgctctggtgtggtcggactttcgcgcggcgataaaataatgcgttga

SEQ ID NO: 457676 - DNA, 1005 bp, Shigella boydii
gtgaaactggatgaaatcgctcggctggcgggagtgtcgcggaccactgcaagctatgttattaacggcaaagcgaagcaataccgtgtgagcgacaaaaccgttgaaaaagtcatggctgtggtgcgtgagcacaattaccacccgaacgccgtggcagctgggcttcgtgctggacgcacacgttctattggtcttgtgatccccgatctggagaacaccagctatacccgcatcgctaactatcttgagcgccaggcgcggcaacggggttatcaactgctgattgcctgctcagaagatcagccagacaacgaaatgcgctgcattgagcaccttttacagcgtcaggttgatgccattattgtttcgacgtcgttgccacctgagcatcctttttatcaacgctgggctaacgacccgttcccgattgtcgcgctggaccgcgccctcgatcgtgaacatttcaccagcgtggttggtgccgatcaggatgatgccgaaatgctggcggaagagttacgtaagtttcccgccgagacggtgctttatcttggcgcgctgccggagctttctgtcagcttcctgcgtgaacaaggtttccgtactgcctggaaagatgatccgcgcgaagtgcatttcctgtatgccaacagctatgagcgggaggcggctgcccagttattcgaaaaatggctggaaacgcatccgatgccgcaggcgctgttcacaacgtcgtttgcgttgttgcaaggggtgatggatgtcacgctacgtcgcgatggtaaactgccttctgacctggcaattgccacctttggcgataacgaactgctcgacttcttacagtgcccggtgctggcagtggctcaacgtcaccgcgatgtcgcagagcgtgtgctggagattgtcctggcaagcctggacgaaccgcgtaagccaaaacctggtttaacgcgcattaaacgtaatctctatcgccgcggtgtgctcagccgtagctaa

SEQ ID NO: 457677 - DNA, 459 bp, Shigella boydii
atgttccggggagcaacgttagtcaatctcgacagcaaagggcgcttatcagtgcctacccgttatcgggaacagctgcttgagaacgctgccggtcaaatggtttgcaccattgacattcatcacccgtgcctgctgctttaccccctgcctgaatgggaaattatcgagcaaaaattatcgcgtctgtcgagcatgaacccagttgagcgccgtgtgcagcgcctactgttaggtcatgccagcgaatgtcagatggatggcgcaggtcgattgttaatcgcgccagtactgcggcaacatgccgggctgacaaaagaagtgatgctggttggacagttcaacaagtttgagctgtgggatgaaacaacctggcatcaacaggtcaaggaagatatcgacgcagagcagttggctactggagacttatcggagcgactgcaggacttgtctctataa

SEQ ID NO: 457678 - DNA, 942 bp, Shigella boydii
atgatggaaaactataaacatactacggtgctgctggatgaagccgttaatggcctcaatatccgtcctgatggcatctacattgatgggacttttggtcgcggtggtcactcacgtctgatcctctcgcagcttggcgaagaggggcgtttgctggcgatcgatcgcgacccgcaggctatcgccgttgcgaagactattgatgatccgcgcttctccatcatccacggacctttctccgcgctgggcgaatacgttgccgagcgcgatcttatcggcaagatcgacggcattctcctcgatcttggcgtctcttcaccgcaacttgatgatgctgaacgtggcttttcctttatgcgcgatggtccgctggacatgcgtatggacccaacccgtgggcagtcagccgctgaatggctacaaaccgcagaagaagccgatatcgcctgggtattgaaaacctatggtgaagagcgttttgccaaacgcattgcccgcgccattgtcgagcgtaaccgcgaacagccgatgacccgcaccaaagaactggcggaagtcgtggctgctgcaacgccggtgaaagataagtttaaacatcccgcgacccgtaccttccaggcggtgcgcatttgggtaaacagtgaactggaggagatagagcaggcgctaaaaagctcgctcaacgtgctggccccgggtgggcggctttcgatcatcagcttccactcgctggaagaccgtattgtgaaacgttttatgcgtgaaaacagccgcggtccgcaagttccggcagggttaccgatgactgaagagcagctcaaaaaactgggtggccgtcagctgcgagcattaggcaagttaatgccgggcgaagaagaggtggctgagaatcctcgtgcccgtagttcagttctgcgtatcgcagagaggacgaacgcatga

SEQ ID NO: 457679 - DNA, 366 bp, Shigella boydii; identical to SEQ ID NO: 261235

SEQ ID NO: 457680 - DNA, 1767 bp, Shigella boydii
atgaaagcagcggcgaaaacgcagaaaccaaaacgtcaggaagaacatgccaactttattagttggcgttttgcgttgttatgcggctgtattctcctggcgctggcttttctgctcggacgcgtagcgtggttacaagttatctccccggatatgctggtgaaagagggcgacatgcgttctcttcgcgttcagcaagtttccacctcccgcggcatgattactgaccgttctggtcgcccgttagcggtgagcgtgccggtaaaagcgatttgggctgacccgaaagaagtgcatgacgctggcggtatcagcgtcggtgaccgctggaaggcgctggctaacgcgctcaatattccgctggatcagctttctgcccgcattaacgccaacccgaaagggcgctttatttatctggcgcgtcaggtaaaccctgacatggcggactacatcaaaaaactgaaactgccgggtattcatctgcgtgaagaatctcgccgttattatccatccggcgaagtgactgctcacctcattggctttactaacgtcgatagtcaagggattgagggcgttgagaagagtttcgataaatggcttaccgggcagccgggtgagcgcattgtgcgtaaagaccgctatggtcgcgtaattgaagatatttcttctactgacagccaggcagcgcacaacctggcgctgagtattgatgaacgcctgcaggcgctggtttatcgcgaactgaacaacgcggtggcctttaacaaggctgaatctggtagcgccgtgctggtggatgtcaacacaggtgaagtgctggcgatggctaacagcccgtcatacaaccctaacaatctgagcggcacgccgaaagaggcgatgcgtaaccgtaccatcaccgacgtgtttgaaccgggctcaacggttaaaccgatggtggtgatgaccgcgttgcaacgtggcgtggtgcgggaaaactcggtactcaataccattccttatcgaattaacggccacgaaatcaaagacgtggcacgctacagcgaattaaccctgaccggggtattacagaagtcgagtaacgtcggtgtttccaagctggcgttagcgatgccgtcctcagcgttagtagatacttactcacgttttggactgggaaaagcgaccaatttggggttggtcggagaacgcagtggcttatatcctcaaaaacaacggtggtctgacatagagagggccaccttctctttcggctacgggctaatggtaacaccgttacagttagcgcgagtctacgcaactatcggcagctacggcatttatcgcccactgtcgattaccaaagttgaccccccggttcccggtgaacgtgtcttcccggaatccattgtccgcaccgtggtgcatatgatggaaagcgtggcgctaccgggcggcggcggcgtgaaggcggcgattaaaggctatcgtatcgccattaaaaccggtaccgcgaaaaaggtcgggccggacggtcgctacatcaataaatatattgcttataccgcaggcgttgcgcctgcgagtcagccgcgcttcgcgctggttgttgttatcaacgatccgcaggcgggtaaatactacggcggcgccgtttccgcgccggtctttggtgccatcatgggcggcgtattgcgtaccatgaacatcgagccggatgcgctgacaacgggcgataaaaatgaatttgtgattaatcaaggcgaggggacaggtggcagatcgtaa

SEQ ID NO: 457681 - DNA, 1488 bp, Shigella boydii
gtggcagatcgtaatttgcgcgaccttcttgctccgtgggtgccagacgcaccttcgcgagcactgcgagagatgacactcgacagccgtgtggctgcggcgggcgatctctttgtagctgtagtaggtcatcaggcggacgggcgtcgatatatcccgcaggcgatagcgcaaggtgtggctgccattattgcagaggcgaaagatgaggcgaccgacggtgaaatccgtgaaatgcacggcgtaccggtcatctatctcagccagctcaacgagcgtttatctgcactggcgggccgcttttaccatgaaccctctgacaatttacgtctcgtaggcgtaacgggcaccaacggcaaaaccacgactacccagctgctggcgcagtggagccaactgcttggcgaaaccagcgcggtaatgggcaccgttggtaacggtctgctggggaaagtgatcccgacagaaaataccaccggttcggcagtcgatgttcagcatgagctggcggggctggtggagcagggcgcgacgttttgcgcaatggaagtttcctcccacgggctggtacagcaccgtgtggcggcattgaaatttgcggcgtcggtctttaccaacttaagccgcgatcaccttgattatcatggtgatatggaacactacgaagctgcgaaatggctgctttattctgaacatcattgcggtcaggcgattattaacgccgacgatgaagtgggccgccgttggctggcaaagctgccggacgcggttgcggtatcaatggaagatcatattaatccgaactgtcacggacgctggttaaaagtgatcgacgtgaactatcacgacagcggtgtgacgattcgctttagctcaagttggggcgatggcgaaattgaaagccatctgataggcgcttttaacgtcagcaacctgctgctcgcgctggcgacactgttggcactcggctatccattggctgatctgttgaaaaccgccgcgcgtctgcaaccggtttgcggacgtatggaagtgttcactgcgccaggcaaaccgacggtggtggtggattacgcgcatacgccggatgcactggaaaaagccttacaggcggcgcgtctgcactgtgcgggcaagctgtggtgtgtctttggctgtggtggcgatcgcgataaaggtaagcgtccactgatgggcgcaattgccgaagagtttgctgacgtggcggtggtgacggacgataacccgcgtaccgaagaaccgcgtgccatcatcaacgatattctggcgggaatgttagatgccggacatgccaaagtgatggaaggccgtgctgaagcggtgacttgcgccgttatgcaggctaaagagaacgatgtggtgctggtcgcgggcaaaggccatgaagattaccagattgttggcaatcagcgtctggactactccgatcgcgtcacggtggcgcgtctgctgggggtgattgcatga

SEQ ID NO: 457682 - DNA, 1359 bp, Shigella boydii
atgattagcgtaacccttagccaacttaccgacattctcaacggtgaactgcaaggtgcagatatcacccttgatgctgtaaccactgatacccgaaaactgacgccgggctgcctgtttgttgccctgaaaggagaacgttttgatgcccacgattttgccgaccaggcgaaagctggcggcgcgggcgcactactagtcagccgtccgctggatatcgacctgccgcagttaatcgtcaaggatacgcgtctggcgtttggtgaactggctgcatgggttcgccagcaagttccggcgcgcgtggttgctctgacaggttcctccggcaaaacctccgttaaagagatgacggcggcgattttaagccagtgcggcaacacgctttatacggcaggcaatctcaacaacgacatcggtgtaccgatgacgttgttgcgcttaacgccggaatacgattacgcagttattgaacttggcgcgaaccatcagggcgaaatagcctggactgtgagtctgactcgcccggaagctgcgctggtcaacaacctggcagcggcgcatctggaaggttttggctcgcttgcgggtgtcgcgaaagcgaaaggtgaaatctttagcggcctgccggaaaacggtatcgccattatgaacgccgacaacaacgactggctgaactggcagagcgtaattggctcacgcaaagtgtggcgtttctcacccaatgccgccaacagcgatttcaccgccaccaatatccatgtgacctcgcacggtacggaatttaccctacaaaccccaaccggtagcgtcgatgttctgctgccgttgccggggcgtcacaatattgcgaatgcgctggcagccgctgcgctctccatgtccgtgggcgcaacgcttgatgctatcaaagcggggctggcaaatctgaaagctgttccaggccgtctgttccccatccaactggcagaaaaccagttgctgctcgacgactcctacaacgccaatgtcggttcaatgaccgccgctgttcaggtactggctgaaatgccgggctaccgcgtgctggtggtgggcgatatggcggaactgggcgctgaaagcgaagcctgccatgtacaggtgggcgaggcggcaaaagctgctggtattgaccgcgtgttaagcgtgggtaaacaaagccatgctatcagcaccgccagcggcgttggcgaacattttgctgataaaactgcgttaattacgcgtcttaaatcactgattgctgagcaacaggtaattacgattttagttaagggttcacgtagtgccgccatggaagaggtagtacgcgctttacaggagaatgggacatgttag

SEQ ID NO: 457683 - DNA, 1083 bp, Shigella boydii
atgttagtttggctggccgaacatttggtcaaatattattccggctttaacgtcttttcctatctgacgtttcgcgccatcgtcagcctgctgaccgcgctgttcatctcattgtggatgggcccgcgtatgattgctcatttgcaaaaactttcctttggtcaggtggtgcgtaacgacggtcctgaatcacacttcagcaagcgcggtacgccgaccatgggcgggattatgatcctgacggcgattgtgatctccgtactgctgtgggcttacccgtccaatccgtacgtctggtgcgtgttggtggtgctggtaggttacggtgttattggctttgttgatgattatcgcaaagtggtgcgtaaagacaccaaagggttgatcgctcgttggaagtatttctggatgtcggtcattgcgctgggtgtcgccttcgccctgtaccttgccggcaaagacacgcccgcaacgcagctggtggtcccattctttaaagatgtgatgccgcagttggggctgttctacattctgctggcttacttcgtcattgtgggtactggcaacgcggtaaacctgaccgatggtctcgacggcctggcaattatgccgaccgtatttgtcgccggtggttttgcgctggtggcgtgggcgaccggcaacatgaactttgccagctatttacacataccgtatctgcgacacgccggggaactggttattgtctgtaccgcgatagtcggggcaggactgggcttcctgtggtttaacacctatccggcgcaggtctttatgggcgatgtaggttcgctggcgttaggtggtgcgttaggcattatcgccgtactgctacgtcaggaattcctgctggtgattatggggggcgtgttcgtggtagaaacgctttctgtcatcctgcaggtcggctcctttaaactgcgcggacaacgtattttccgcatggcaccgattcatcaccactatgaactgaaaggctggccggaaccgcgcgtcattgtgcgtttctggattatttcgctgatgctggttctgattggtctggcaacgctgaaggtacgttaa

SEQ ID NO: 457684 - DNA, 1317 bp, Shigella boydii
atggctgattatcagggtaaaaatgtcgtcattatcggcctgggcctcaccgggctttcctgcgtggactttttcctcgctcgcggtgtgacgccgcgcgttatggatacgcgtatgacaccgcctggcctggataaattacccgaagccgtagaacgccacacgggcagtctgaatgatgaatggctgatggcggcagatctgattgtcgccagtcccggtattgcacgggcgcatccatccttaagcgctgccgctgatgccggaatcgaaatcgttggcgatatcgagctgttctgccgcgaagcacaagcaccgattgtggcgattaccggttctaacggcaaaagcacggtcaccacgctagtgggtgaaatggcgaaagcggcgggggttaacgttggtgtgggtggcaatattggcctgccagcgttgatgctgcttgatgctgagtgcgaactgtacgtgctggaactgtcgagcttccagctggaaaccacttccagcttacaggcggtggcggcgaccattctgaacgtgactgaagatcatatggaccgctatccgtttggtttgcagcaataccgtgcggcaaaattgcgtatttacgaaaatgcgaaagtttgtgtcgtcaatgctgatgatgccttaacaatgccgattcgcggtgctgatgaacgctgcgtcagctttggcgtcaacatgggtgactatcacctgaatcatcagcagggagaaacctggctgcgagtgaaaggcgagaaagtgctgaacgtgaaagagatgaaactttctgggcagcataactacaccaatgcgctggcagcactggcactggcagacgcagctggtttgccgcgcgccagcagcctgaaagcgttaaccaccttcaccggtctgccgcatcgctttgaagtggtgctggagcacaatggcgtacgctggattaacgattcgaaagccactaacgtcggcagtacggaagcggcgttgaatggcttgcaggtagacggcacgctgcatttgttgctgggcggcgatggtaaatcggcggacttcagtccactggcgcgctatctgaatggcgacaacgtgcgtttgtactgttttggtcgtgacggtgcgcagctggcggcgctacgcccggaagtggcagaacaaaccgaaactatggaacaggcgatgcgcttgctggctccgcgtgttcagccgggcgatatggttctgctctccccggcctgtgccagccttgatcagttcaagaactttgaacaacgaggcaatgagtttgcccgtctggcgaaggagttaggttga

SEQ ID NO: 457685 - DNA, 1245 bp, Shigella boydii
atgcgtttatctctccctcgcctgaaaatgccgcgcctgccaggattcagtatcctggtctggatctccacggcgctaaaaggctgggtgatgggctcgcgggaaaaagataccgacagcctgatcatgtacgatcgcaccttactgtggctgaccttcggccttgcggcgattggctttatcatggtgacctcggcgtcaatgcccatagggcaacgcttaaccaacgatccgttcttcttcgcgaagcgtgatggcgtctatctgatcctggcattcattctggcgatcattacgctgcgtctgccgatggagttctggcaacgctacagtgccacgatgctgctcggatctatcatcctgctgatgatcgtgctggtagtgggtagctcggttaaaggggcatcgcgttggatcgatctcggtttgctgcgtatccagcctgcggagctgacaaaactgtcgctgttttgttatatcgccaactatctggtgcgtaaaggcgacgaagtacgtaataacctgcgcggcttcctgaaaccgatgggcgtgattctggtgttggcagtgttactgctggcacagccagaccttggtacggtggtggtggtgtttgtgactacgctggcgatgttgttcctggcgggagcgaaattgtggcagttcattgccattatcggtatgggcatttcagcggttgtgttgctgatactcgccgaaccgtaccgtatccgccgtgttaccgcattctggaacccgtgggaagatccctttggcagcggctatcagttaacgcaatcgctgatggcgtttggtcgcggcgaactttggggacaaggtttaggtaactcggtacaaaaactggagtatctgccggaagcgcacactgactttattttcgccattatcggcgaagaactggggtatgtcggtgtggtgctggcacttttaatggtattcttcgtcgcttttcgcgcgatgtcgattggccgcaaagcgttagaaattgaccaccgtttttccggttttctcgcctgttctattggcatctggtttagcttccaggcgctggttaacgtaggcgcggcggcggggatgttaccgaccaaaggtctgacattgccgctgatcagttacggtggttcgagcttactgattatgtcgacagccatcatgatgctgttgcgtattgattatgaaacgcgtctggagaaagcgcaggcgtttgtacgaggttcacgatga

SEQ ID NO: 457686 - DNA, 1068 bp, Shigella boydii
atgagtggtcaaggaaagcgattaatggtgatggcaggcggaaccggtggacatgtattcccgggactggcggttgcgcaccatctaatggctcagggttggcaagttcgctggctggggactgccgaccgtatggaagcggacttagtgccaaaacatggcatcgaaattgatttcattcgtatctctggtctgcgtggaaaaggtataaaagcactgatagctgcgccgctgcgtatcttcaacgcctggcgtcaggcgcgggcgattatgaaagcgtacaaacctgacgtggtactcggtatgggcggctatgtatcaggtccaggtggtctggccgcgtggtcgttaggcattccggttgtacttcatgaacaaaacggtattgcgggcttaaccaataaatggctggcgaagattgccaccaaagtgatgcaggcgtttccaggcgctttccctaatgcggaagtggtgggtaacccggtgcgtaccgatgtgctggcgctgccgttgccgcagcaacgtttggctggacgtgaaggtccggttcgtgtgctggtagtgggtggttcccagggcgcacgcattcttaaccagacaatgccgcaggttgctgcgaaactgggtgattcagtcactatctggcatcagagcggtaaaggttcgcaacaatccgttgaacaggcgtatgccgaagcggggcaaccgcagcataaagtgacggaatttattgatgatatggcggcggcgtatgcgtgggcggatgtcgtcgtttgccgctccggtgctttaacggtgagtgaaatcgccgcggcaggactaccggcgttgtttgtgccgtttcaacataaagaccgccagcaatactggaatgcgctaccgctggaaaaagcgggcgtagccaaaattatcgagcagccacagcttagcgtggatgctgtcgccaacaccctggccgggtggtcgcgagaaaccttattaaccatggcagaacgcgcccgcgctgcatccattccggatgccaccgagcgagtggcaaatgaagtgagccgggctgcccgggcgtaa

SEQ ID NO: 457687 - DNA, 1476 bp, Shigella boydii
atgaatacacaacaattggcaaaactgcgttccatcgtgcccgaaatgcgtcgcgttcggcacatacattttgtcggcatcggtggtgccggtatgggcggtattgccgaagttctggccaatgaaggttatcagatcagtggttccgatttagcgccaaatccggtcacgcagcagttaatgaatctgggagcgacgatttatttcaaccatcgcccggaaaacgtacgtgatgccagcgtggtcgttgtttccagcgccatttctgccgataacccggaaattgtcgcagctcatgaagcgcgtattccggtgatccgtcgtgccgaaatgctggctgagttaatgcgttttcgtcatggcatcgccattgcaggaacgcacggcaaaacgacaaccaccgcgatggtttccagcatctacgcagaagcggggctcgacccaaccttcgttaacggcgggctggtaaaagcggcgggggttcatgcgcgtttggggcatggtcggtacctgattgccgaagcagatgagagtgatgcatcgttcctgcatctgcaaccgatggtggcgattgtcaccaatatcgaagccgaccacatggatacctaccagggcgactttgagaatttaaaacagacttttattaattttctgcacaacctgccgttttacggtcgtgcggtgatgtgtgttgatgatccggtgatccgcgaattgttaccgcgtgtgggacgtcagaccacgacttacggcttcagcgaagatgccgacgtgcgtgtagaagattatcagcagattggcccgcaggggcactttacgctgctgcgccaggacaaagagccgatgcgcgtcaccctgaatgcgccaggccgtcataacgcgctgaacgccgcagctgcggttgcggttgctacggaagagggaattgacgacgaggctattttgcgtgcgctggagagcttcctggggactggtcgccgttttgatttcctcggtgaattcccgctggagccagtgaatggtaaaagcggtacggcaatgctggtcgatgactacggccaccacccgacggaagttgacgccaccattaaagcggcgcgcgcaggctggccggataaaaacctggtaatgctgtttcagccgcaccgttttacccgtacgcgcgacctgtatgatgatttcgccaatgtgctgacacaggttgataccctgttgatgctggaagtgtatccggctggcgaagcgccaattccgggagcggacagccgttcgctgtgtcgcacaattcgtggacgtgggaaaattgatcccattctggtgccggaccctgcgcaggtagccgagatgctggcaccggtattaaccggtaacgacctgattctcgttcagggggctggtaatatcggaaaaattgcccgttctttagctgaaatcaaactgaagccgcaaactccggaggaagaacaacatgactga

SEQ ID NO: 457688 - DNA, 921 bp, Shigella boydii
atgactgataaaatcgcggtcctgttgggcgggacttccgctgagcgggaagtttctctgaattctggcgcagcggtgttagccgggctgcgtgaaggtggtattgatgcgtatcctgtcgacccgaaagaagtcgacgtgacgcaactgaagtcgatgggttttcagaaagtgtttatcgcgctacacggtcgcggcggtgaagatggtacgctgcagggcatgctcgagctgatgggcttgccttataccggcagcggagtgatggcatctgcgctttcaatggataaactacgcagcaaactgctgtggcaaggtgccggtttaccggtcgcgccgtgggtagcgttaacccgcgcagagtttgaaaaaggcctgagcgataagcagttagcagaaatttctgctctgggtttgccggttatcgttaagccgagccgcgaaggttccagtgtgggaatgtcaaaagtagtagcagaaaatgctctacaagatgcattaagattggcatttcagcacgatgaagaagtattgattgaaaaatggctaagtgggccggagttcacggttgcgatactcggtgaagaaattttaccgtcaatacgtattcaaccgtccggaaccttctatgattatgaggcgaagtatctctctgatgagacacagtatttctgccccgcaggtctggatgcgtcacaagaggccaatttgcaggcattagtgctgaaagcatggacgacgttaggttgcaaaggatggggacgtattgacgttatgctggacagcgatggacagttttatctgctggaagccaatacctcaccgggtatgaccagccacagcctggtgccgatggcggcacgtcaggcaggtatgagcttctcgcagttggtagtacgaattctggaactggcggactaa

SEQ ID NO: 457689 - DNA, 831 bp, Shigella boydii
atgtcgcaggctgctctgaacacgcgaaacagcgaagaagaggtttcttctcgccgcaataatggaacgcgtctggcggggatccttttcctgctgaccgttttaacgacagtgttggtgagcggctgggtcgtgttgggctggatggaagatgcgcaacgcctgccgctctcaaagctggtgttgaccggtgaacgccattacacgcgtaatgacgatatccggcagtcgatcctggcattgggtgagccgggtacctttatgacccaggatgtcaacatcatccagacgcaaatagaacaacgcctgccgtggattaagcaggtgagcgtcagaaagcagtggcctgatgaattgaagattcatctggttgaatatgtgccgattgcgcggtggaatgatcaacatatggtagacgcggaaggaaacaccttcagcgtgccgccagatcgcaccagcaagcaggtgcttccaatgctgtatggcccggaaggcagcgccaatgaagtgttgcagggctatcgcgaaatggggcagatgctggcaaaggacagatttactctgaaggaagcggcgatgaccgcgcggcgttcctggcagttgacgctgaataacgatattaagctcaatcttggccggggcgatacgatgaaacgtttggctcgctttgtagaactttatccggttttacagcagcaggcgcaaaccgatggcaaacggattagctacgttgatttgcgttatgactctggagcggcagtaggctgggcgcccttgccgccagaggaatctactcagcaacaaaatcaggcacaggcagaacaacaatga

SEQ ID NO: 457690 - DNA, 1263 bp, Shigella boydii
atgatcaaggcgacggacagaaaactggtagtaggactagagattggtaccgcgaaggttgccgctttagtaggggaagttctgcccgacggtatggtcaatatcattggcgtgggcagctgcccgtcacgtggtatggataaaggcggggtgaacgacctcgaatccgtggtcaagtgcgtacaacgcgccattgaccaggcagaattgatggcagattgtcagatctcttcggtatatctggcgctttctggtaagcacatcagctgccagaatgaaattggtatggtgcctatttctgaagaagaagtgacgcaagaagatgtggaaaacgtcgtccataccgcgaaatcggtgcgtgtgcgcgatgaacatcgtgtgctgcatgtgatcccgcaagagtatgcgattgactatcaggaagggatcaagaatccggtaggactttcgggcgtgcggatgcaggcaaaagtgcacctgatcacatgtcacaacgatatggcgaaaaacatcgtcaaagcggttgaacgttgtgggctgaaagttgaccaactgatatttgccggactggcatcaagttattcggtattgacggaagatgaacgtgaactgggtgtctgcgtcgtcgatatcggaggtggtacaatggatatcgccgtttataccggtggggcattgcgccacactaaggtaattccttatgctggcaatgtcgtgaccagtgatatcgcttacgcctttggcacgccgccaagcgacgccgaagcgattaaagttcgccacggttgtgcgctgggttccatcgttggaaaagatgagagcgtggaagtgccgagcgtaggcggtcgtccgccacggagtctgcaacgtcagaccctggcagaggtgatcgagccgcgctataccgagctgctcaacctggtcaacgaagagatattgcagttgcaggaaaagcttcgccaacaaggggttaaacatcacctggcggcaggcattgtattaaccggtggcgcagcgcagatcgaaggtcttgcagcctgtgctcagcgcgtgtttcatacgcaagtgcgtatcggcgcgccgctgaacattaccggtttaacggattatgctcaggagccgtattattcgacggcggtgggattgcttcactatgggaaagagtcacatcttaacggtgaagctgaagtagaaaaacgtgttacagcatcagttggctcgtggatcaagcgactcaatagttggctgcgaaaagagttttaa

SEQ ID NO: 457691 - DNA, 1152 bp, Shigella boydii
atgtttgaaccaatggaacttaccaatgacgcggtgattaaagtcatcggcgtcggcggcggcggcggtaatgctgttgaacacatggtgcgcgagcgcattgaaggtgttgaattcttcgcggtaaataccgatgcacaagcgctgcgtaaaacagcggttggacagacgattcaaatcggtagcggtatcaccaaaggactgggcgctggcgctaatccagaagttggccgcaatgcggctgatgaggatcgcgatgcattgcgtgcggcgctggaaggtgcagacatggtctttattgctgcgggtatgggtggtggtaccggtacaggtgcagcaccagtcgtcgctgaagtggcaaaagatttgggtatcctgaccgttgctgtcgtcactaagcctttcaactttgaaggcaagaagcgtatggcattcgcggagcaggggatcactgaactgtccaagcatgtggactctctgatcactatcccgaacgacaaactgctgaaagttctgggccgcggtatctccctgctggatgcgtttggcgcagcgaacgatgtactgaaaggcgctgtgcaaggtatcgctgaactgattactcgtccgggtttgatgaacgtggactttgcagacgtacgcaccgtaatgtctgagatgggctacgcaatgatgggttctggcgtggcgagcggtgaagaccgtgcggaagaagctgctgaaatggctatctcttctccgctgctggaagatatcgacctgtctggcgcgcgcggcgtgctggttaacatcacggcgggcttcgacctgcgtctggatgagttcgaaacggtaggtaacaccatccgtgcatttgcttccgacaacgcgactgtggttatcggtacttctcttgacccggatatgaatgacgagctgcgcgtaaccgttgttgcgacaggtatcggcatggacaaacgtcctgaaatcactctggtgaccaataagcaggttcagcagccagtgatggatcgctaccagcagcatgggatggctccgctgacccaggagcagaagccggttgctaaagtcgtgaatgacaatgcgccgcaaactgcgaaagagccggattatctggatatcccagcattcctgcgtaagcaagctgattaa

SEQ ID NO: 457692 - DNA, 918 bp, Shigella boydii
atgatcaaacaaaggacacttaaacgtatcgttcaggcgacgggtgtcggtttacataccggcaagaaagtcactctgacgttacgccctgcgccggccaacaccggggtcatctatcgtcgcaccgacttgaatccaccggtagatttcccggccgatgccaaatctgtgcgtgataccatgctctgtacgtgtctggtcaacgagcatgatgtacggatttcaaccgtagagcacctcaatgctgctctcgcgggcctgggcatcgataacattgttatcgaagttaacgcgccggaaatcccgatcatggacggcagcgccgctccgtttgtatacctgctgcttgacgccggtatcgacgagttgaactgcgccaaaaaatttgttcgcatcaaagagactgttcgtgtcgaagatggcgataagtgggctgaatttaagccgtacaatggtttttcgctggatttcaccatcgattttaaccatccggctattgattccagcaaccagcgctatgcgatgaacttctccgctgatgcgtttatgcgccagatcagccgtgcgcgtacgttcggtttcatgcgtgatatcgaatatctgcagtcccgtggtttgtgcctgggcggcagcttcgattgtgccatcgttgttgacgattatcgcgtactgaacgaagacggcctgcgttttgaagacgaatttgtgcgtcacaaaatgctcgatgcgatcggtgacttgttcatgtgtggtcacaatattattggtgcatttatcgcttataaatccggtcatgcactgaataacaaactgctgcaggctgtcctggcgaaacaggaagcctgggaatatgtgaccttccaggacgacgcagaactgccgttggccttcaaagcgccttcagctgtactggcataa

SEQ ID NO: 457693 - DNA, 588 bp, Shigella boydii
atgctgtggacttcaggctttaatgataagatttgtgcgctaaatacgtttgaattcgatcgggatggcaataacgtgagtggaatactgacgcgctggcgacagtttggtaaacgctacttctggccgcatctcttattagggatggtcgcggcgagtttcggtttgcctgcgctcagcaacgccgccgaaccaaacgtgcccgcaaaagcgacaacccgcaaccacgagccttcagccaaagttaactttggtcaattggccttgctggaagcgaacacacgccgcccgaattcgaactattccgttgattactggcatcaatatgccattcgcacggtaatccgtcatctttctttcgcaatggcaccgcaaacactgcccgttgctgaagaatctttgcctcttcaggcgcaacatcttgcattactggatacgctcagcgcgctgctgacccaggaaggcacgccgtctgaaaagggttatcgcattgattatgcgcattttaccccacaagcaaaattcagcacgcccgtctggataagccaggcgcaaggcatccgtgctggccctcaacgcctcacctaa

SEQ ID NO: 457694 - DNA, 2706 bp, Shigella boydii
atgctaatcaaattgttaactaaagttttcggtagtcgtaacgatcgcaccctgcgccggatgcgcaaagtggtcaacatcatcaatgccatggaaccggagatggaaaaactctccgacgaagaactgaaagggaaaaccgcagagtttcgtgcacgtctggaaaaaggcgaagtgctggaaaatctgatcccggaagctttcgccgtggtacgtgaggcaagtaagcgcgtctttggtatgcgtcacttcgacgttcagttactcggcggtatggttcttaacgaacgctgcatcgccgaaatgcgtaccggtgaaggtaaaaccctgaccgcaacgctgcctgcttacctgaacgcactaaccggtaaaggcgtgcacgtagttaccgtcaacgactacctggcgcaacgtgacgccgaaaacaaccgtccgctgtttgaattccttggcctgactgtcggtatcaacctgccgggcatgccagcaccggcaaagcgcgaagcttacgcagctgacatcacttacggtacgaacaacgaatacggctttgactacctgcgcgacaatatggcgttcagccctgaagaacgtgtacagcgtaaactgcactatgcgctggtggacgaagtggactccatcctgatcgatgaagcgcgtacaccgctgatcatttccggcccggcagaagacagctcggaaatgtataaacgcgtgaataaaattattccgcacctgatccgtcaggaaaaagaagactccgaaaccttccagggcgaaggccacttctcggtggacgaaaaatctcgccaggtgaacctgaccgaacgtggtctggtgctgattgaagaactgctggtgaaagagggcatcatggatgaaggggagtctctgtactctccggccaacatcatgctgatgcaccacgtaacggcggcgctgcgcgctcatgcgctgtttacccgcgacgtcgactacatcgttaaagatggtgaagttatcatcgttgacgaacacaccggtcgtaccatgcagggccgtcgctggtccgatggtctgcaccaggctgtggaagcgaaagaaggtgtgcagatccagaacgaaaaccaaacgctggcttcgatcaccttccagaactacttccgtctgtatgaaaaactggcggggatgaccggtactgctgataccgaagctttcgaatttagctccatctacaagctggataccgtcgttgttccgaccaaccgtccaatgattcgtaaagatctgccggacctggtctacatgactgaagcggaaaaaattcaggcgatcattgaagatatcaaagaacgtactgcgaaaggccagccggtgctggtgggtactatctccatcgaaaaatcggagctggtgtcaaacgaactgaccaaagccggtattaagcacaacgtcctgaacgccaaattccacgccaacgaagcggcgattgttgctcaggcaggttatccggctgcggtgactatcgcgaccaatatggcgggtcgtggtacagatattgtgctcggtggtagctggcaggcagaagttgccgcgctggaaaatccgaccgcagagcaaattgaaaaaattaaagccgactggcaggtacgtcacgatgcggtactggaagcaggtggcctgcatatcatcggtaccgagcgtcacgaatcccgtcgtatcgataaccagttgcgcggtcgttctggtcgtcagggggatgctggttcttcccgtttctacctgtcgatggaagatgcgctgatgcgtatttttgcttccgaccgagtatccggcatgatgcgtaaactgggtatgaagccaggcgaagccattgaacacccgtgggtgactaaagcgattgccaacgcccagcgtaaagttgaaagtcgtaacttcgacattcgtaagcaactgctggaatatgatgacgtggctaacgatcagcgtcgcgccatttactcccagcgtaatgaactgctggatgtcagcgatgtgagcgaaaccatcaacagcattcgtgaagatgtgttcaaagccaccattgatgcctacattccgccacagtcgctggaagaaatgtgggatattccggggctgcaggaacgtctgaagaacgatttcgacctcgatttaccaattgccgagtggctggataaagaaccagaactgcatgaagagacgctgcgtgagcgcattctggcgcagtccatcgaagtgtatcagcgtaaagaagaagtggttggtgctgagatgatgcgtcacttcgagaaaggcgtcatgctgcaaacgcttgactccctgtggaaagagcacctggcagcgatggactatctgcgtcagggtatccacctgcgtggctatgcacagaaagatccgaagcaggaatacaaacgtgaatcgttctccatgtttgcagcgatgctggagtcgttgaaatatgaagttatcagtacgctgagcaaagttcaggtacgtatgcctgaagaggttgaggagctggaacaacagcgtcgtatggaagccgagcgtttagcgcaaatgcagcagcttggccatcaggatgacgactctgcagccgcagctgcattggcggcgcaaaccggtgagcgcaaagtaggacgtaacgatccttgcccgtgcggttctggtaaaaaatacaagcagtgtcatggccgcctgcaataa

SEQ ID NO: 457695 - DNA, 390 bp, Shigella boydii
atgaaaaagctgcaaattgcggtaggtattattcgcaacgagaacaatgaaatctttataacgcgtcgcgcagcagatgcgcacatggcgaataaactggagtttcccggcggtaaaattgaaatgggcgaaacgccggaacaggcggtggtgcgtgaacttcaggaagaggtcgggattaccccacaacatttttcgctatttgaaaaactggcatatgaattcccggacaggcatataactctgtggttctggctggtcgaaagttgggaaggggtgccgtggggtaaagaagggcaacccggtgagtggatgtcgctggtcggtcttaatgccgatgattttccgccagccaatgaaccggtaattgcgaagcttaagcgtctgtag

SEQ ID NO: 457696 - DNA, 198 bp, Shigella boydii
atgtcagaaactattacggtgaattgcccaacctgcgggaaaacggtggtgtggggtgaaatcagcccgtttcggccattttgctccaaacgttgtcagctgatcgacctcggagaatgggctgctgaagaaaaacgaatccccagcagtggcgatctttccgaaagcgatgactggagcgaagagccaaagcagtga

SEQ ID NO: 457697 - DNA, 744 bp, Shigella boydii
atgcagacccaggtcctttttgaacatccactaaatgaaaaaatgcgtacatggctgcgcattgagtttttgattcagcaactcaccgttaatttacccatcgttgaccacgctggcgcgctgcatttcttccgtaatgtcagtgaattactggatgttttcgagcgcggcgaagtccgcactgagctgttgaaagaacttgaccggcagcaacgtaaactccagacctggattggcgtgcctggcgtggaccagagccgtattgaagcattaattcagcagttaaaagcggcggggagcgtattaatttccgcgccgcgtatcgggcaatttctgcgtgaagatcgtttgattgctctggtgcgtcagcgactgagcatcccaggcggctgttgcagctttgatttacctacattgcacatttggctgcatctaccccaggcgcagcgcgacagccaggtagaaacctggattgccagcctgaacccgctcacccaggcacttaccatggtgctggatttaattcgccagtcggcccccttccgtaaacaaaccagcctgaatggtttttatcaggataacggtggcgatgccgacttgctgcgcctgaatctgtcgctcgattcacagctttatccgcaaatttccggacataagagccgttttgccattcgttttatgccgctggacagtgaaaacggacaggtaccggaacgtctagatttcgaactggcctgttgctaa

SEQ ID NO: 457698 - DNA, 621 bp, Shigella boydii
atgaggtatatagttgccttaacgggaggcattggcagtggcaagagtaccgttgccaatgcgtttgctgatctcggaattaacgtcattgatgccgatattattgcgcgtcaggtggttgaaccaggtgcacctgcgctacatgccattgctgatcactttggcgctaacatgattgctgctgatggaacattgcagcgccgggccttgcgcgagcggatcttcgccaacccggaagagaaaaactggcttaacgccctgctgcatccgctgattcagcaagagacgcaacaccagatccagcaagctacttccccctatgtactgtgggttgtgccattgctggtagaaaactcactgtataaaaaagcgaatcgagtgctggtggtggatgtcagcccagaaacgcaacttaagcgcaccatgcagcgcgatgatgtaactcgcgagcatgtcgaacaaatccttgctgctcaggcaacgcgcgaagcccgccttgccgtggcagatgacgtcattgataataacggcgcaccggatgctatcgcatcggatgttgcccgcctgcacgcacactatttgcagcttgcgtcgcagtttgtctcacaggaaaaaccgtaa

SEQ ID NO: 457699 - DNA, 1044 bp, Shigella boydii
atgcgtattgaagaagatctgaagttaggttttaaagacgttctcatccgccctaaacgctccactcttaaaagccgttccgatgttgaactggaacgtcaattcaccttcaaacattcagatcagagctggtccggcgtgccgattatcgccgcaaatatggacaccgtaggtacattttctatggcctctgcgctggcttcttttgatattttgactgctgtgcataaacactattctgtcgaagagtggcaagcgtttatcaacaattcttccgctgatgtgctgaaacatgtgatggtttctaccggtacgtctgatgcggatttcgaaaaaactaaacagattctcgacctgaacccggcattaaactttgtttgtattgatgtggcgaatggttattccgaacacttcgtgcagttcgttgcgaaagcgcgtgaagcgtggccgaccaaaaccatttgtgctggcaacgtagtgactggtgaaatgtgtgaggagcttatcctctccggtgctgatatcgttaaagttggcattggcccaggttctgtttgtacaactcgcgtcaaaacaggcgtcggttatccgcagctttctgcggtaatcgaatgtgccgatgcggcgcacggtctgggcggaatgatcgtcagcgacggtggctgcaccacgccgggcgatgtcgcaaaagcctttggcggcggtgccgatttcgtcatgcttggcggcatgctggcgggccacgaagagagcggcggtcgcatcgttgaggagaacggcgagaaatttatgctgttctacggcatgagctccgagtctgcgatgaaacgtcacgttggcggcgttgcggaatatcgcgcagcagaaggtaaaaccgttaagctgccgctgcgaggcccggttgaaaataccgcgcgtgatattttgggcggcctgcgttcagcttgtacatacgttggggcttcacgcctgaaagaactgaccaagcgcaccacatttatccgtgtgcaggaacaagaaaaccgcatcttcaacaacctgtaa

SEQ ID NO: 457700 - DNA, 1203 bp, Shigella boydii
atggcgagtaagcaactctggcgctggcatggcataaccggcgacggcaatgcgcaagatgggatgctatgggcagagagccgtgctttgctgctcatggcactacagcaacagatggttaccccacttagcctgaagcgaatcgccatcaattctgcgcagtggcgaggagataaaagcgcggaagtcattcatcaactggcgacgctactcaaagccgggttaacgctttctgaagggctggcactgctggcggaacagcatcccagtaagcaatggcaagcgttgctgcaatcgctggcgcacgatctcgaacagggcattgctttttccaatgccttattaccctggtcagaggtatttccgccactctatcaggcgatgatccgcacgggtgaactgaccggtaagctggatgaatgctgctttgaactggcgcgtcagcaaaaagcccagcgtcagttgaccgacaaagtgaaatcagcgttacgttatcccatcatcattttagcgatggcaatcatggtggttgtggcaatgctgcattttgttctgccggagtttgccgctatctataagaccttcaacaccccactaccggcactaacgcaggggatcatgacgctggcagactttagtggcgaatggagctggctgctggtgttgttcggctttctgctggcgatagccaataagttgctgatgcgccgaccgacttggcttatagtgcggcagaaattgctgttacgcatcccgattatgggttcactgatgcggggacaaaaactcacgcagatctttacgattctggcgctgacacaaagtgcaggcattacttttttgcagggcgtagagagcgtcagagaaacaatgcgctgcccgtactgggtgcaacttctgacacaaatccagcacgatatcagtaacggtcatcccatctggctggcgctaaaaaataccggggagtttagcccgctctgtttgcaattagtgagaacaggagaggcatccggctcgctggacctcatgttagacaacctcgcccatcatcatcgggataacacaatggcgctggcggataacctcgcagccttactggaaccggcgttgctgatcataacgggaggaattatcggtacgctggtggtggcgatgtatctgccaattttccatttaggcgatgcgatgagtgggatgggataa

SEQ ID NO: 457701 - DNA, 378 bp, Shigella boydii
atgctctcatcagcgcttacgctggtaatagcccagcgtctggtacgtaaattttgcccacattgtcgccagcagcaaggggagcccatccatattccagacaatgtatggccgtcgccgctgccccactggcaggcacccggttgtgtacattgctaccacggtttttatggtcgtaccgccttgtttgaagtcctgcccattacaccagccatacgccagcttatttccgctaataccgacgttgaatcgctggaaacgcacgcacgacaggcgggtatgcgtacgctttttgaaaacggctgcctagccgtggagcaaggcttaaccacctttgaagagttaatccgcgtactggggatgccgcatggcgagtaa

SEQ ID NO: 457702 - DNA, 900 bp, Shigella boydii
atgaatattccacagctcaccgccctgtgtctgcgttatcagggagtcttgctggatgccagcgaagaggtggttcatgttgcggtagtcgatgcaccttcgcatgagttgctggacgcattgcatttcgctaccaccaaacgtattgagatcacctgctggacgcgccaacaaatggaaggccacgccagtcgcacacaacagacattgcccgtagctgttcaggagaagcatcagtcgaaagcagagttgctgactcgaacgttacaatctgcgctggaacaacgtgcgtctgatattcatatcgaaccagcggacaatgcctaccgcatccgcttgcgtatcgacggcgtattgcatcctttaccggatgtttcaccggatgccggagtcgcattaaccgccagattaaaagtgctgggaaacctggatattgcggaacatcgcctgccgcaggacgggcaattcactgtcgaactggcaggaaacgccgtctcatttcgtattgcgaccttaccatgtcggggtggtgaaaaggtagtattaaggttgttacagcaggtgaaccaggcactggatgttaacacgctgggaatgcagccgttacaactggcggactttgctcatgccttgcaacaaccacagggactggtgctggtaactggccctacaggcagcggcaaaacggtcacgctttatagtgccctgcaaaagctgaataccgctgacattaatatttgtagcgtcgaagatccggttgagatccccatagccggactaaaccagacgcaaatccatccgcgtgccgggctcacctttcagggcgttttgcgtgcgttattgcgccaggatcctgacgtcatcatgatccgatggcgaaacggcagaaattgccattaa

SEQ ID NO: 457703 - DNA, 189 bp, Shigella boydii
atgagtgtggcaaaaggcgtggtgtcgctgaccgggcaagaaagtctcaatggactaagcgtcgtcatgacgccaggttgggataacgcaaacggcgtcaccggctgggcgcgcaactgcaatattcaaagtgacagcgcattgcagcaagcctgcgaagatgtcttccgctttgatgacgccaactaa

SEQ ID NO: 457704 - DNA, 573 bp, Shigella boydii
gtggcaaagagcgtacccgcaatttttcttgaccgtgatggcaccattaatgtcgatcacggctatgtccatgagatcgacaactttgaatttatcgacggtgttattgacgccatgcgcgagctaaaaaaaatgggctttgtgctggtggtagtaaccaaccagtctggcattgctcgcggtaaatttaccgaagcacagtttgaaacgctgaccgagtggatggactggtcgctggcggaccgagatgtcgatctggatggtatctattattgcccgcatcatccgcagggtagtgttgaagagtttcgccaggtctgcgactgccgtaaaccacatccggggatgcttttgtcagcacgcgattatttgcatattgatatggccgcttcttatatggtgggcgataaattagaagatatgcaggcagcggctgcggcgaacgtgggaacaaaagtgctggtgcgtacgggtaaacctattacgtctgaagcagaaaacgcggcggattgggtgttaaatagcctggcagacctgccgcaagcgataaaaaagcagcaaaaaccggcataa

SEQ ID NO: 457705 - DNA, 1032 bp, Shigella boydii
atgataaaactttcgaatatcaccaaagtgttccaccagggcacccgcaccatccaggcgttgaacaacgtcagcctgcatgtgccagctggacaaatttatggcgttatcggtgcctcaggcgcgggtaagagtacgcttatacgttgtgtaaacctgctggagcgcccaaccgagggtagcgtgctggtcgatggccaggaactgaccacgctgtcagaatccgagttgaccaaagctcgccgccagattggtatgattttccagcattttaacctgctctcttcgcgtactgtttttggcaacgtggctctgccgctggagctggacaacacaccgaaagacgagatcaaacgtcgcgtgacggaattgctgtcattggttggtcttggcgataagcatgatagctacccgtcgaatctttccggtgggcagaaacaacgtgtggcgattgcccgtgcattagccagcaatcccaaagtattgctgtgtgatgaagccaccagcgcgctggacccggcaacgacacgttctattctcgaactgctgaaagacattaaccgccgtctgggtttgacgattctgttgatcacccacgaaatggacgttgtgaagcgtatttgtgattgcgtggcggtcatcagcaatggcgaactgatcgagcaggacacggtaagtgaagtgttctcgcatccgaaaacgccgctggcgcagaagtttattcagtcgaccctgcatctggatatcccggaagattaccaggaacgtctgcaagcggagccatttactgactgcgtgccgatgctgcgtctggagtttaccggtcaatcggtcgatgccccactgctttctgaaaccgcgcgtcgtttcaacgtcaacaacaacattattagcgcgcagatggactacgccggtggcgttaagttcggcatcatgctgactgaaatgcacggcacacaacaagatacgcaagccgccattgcctggctgcaggaacaccatgtaaaagtagaggtactgggttatgtctga

SEQ ID NO: 457706 - DNA, 654 bp, Shigella boydii
atgtctgagccgatgatgtggctgctggttcgtggcgtatgggaaacgctggcaatgaccttcgtatccggtttttttggctttgtgattggtctgccggttggcgttctgctttatgtcacgcgtccggggcaaattattgctaacgcgaagctgtatcgtaccgtttctgcgattgtgaacattttccgttctatcccgttcattatcttgctggtatggacgattccgtttacccgcgttattgttggtacatcgattggtttgcaggcagcgattgttccgttaaccgttggtgcagcaccgtttattgcccgtatggtcgagaacgctctgctggagatcccaaccgggttaattgaagcttcccgtgcaatgggtgccacgccgatgcagatcgtccgtaaagtgctgttaccggaagcattgccgggtctggtgaatgcggcaactatcaccctgattaccctggtcggttattccgcgatgggtggtgctgtcggtgccggtggtttaggtcagattggctatcagtatggctacatcggctataacgcgacggtgatgaatacggtactggtattgctggtcattctggtttatttaattcagttcgcaggcgaccgcatcgtccgggctgtcactcgcaagtaa

SEQ ID NO: 457707 - DNA, 816 bp, Shigella boydii
atggcgttcaaattcaaaacctttgcggcagtgggagccctgattggatcactggcactggtaggctgcggtcaggatgaaaaagatccaaaccacattaaagtcggcgtgattgttggtgccgaacagcaggttgcagaagtcgcgcagaaagttgcgaaagacaaatatggcctagacgttgagctggtaaccttcaacgactatgttctgccaaacgaagcattgagcaaaggcgatatcgacgccaacgccttccagcataaaccgtaccttgatcagcaactgaaagatcgtggctacaaactggtcgcagtaggcaacacttttgtttatccgattgctggttactccaagaaaatcaaatcactggatgaactgcaggatggttcgcaggttgccgtgccaaacgatccaactaaccttggtcgttcactgctgctgctgcaaaaagtgggcttgatcaaactgaaagatggcgttggcctgctgccgaccgtacttgatgttgttgagaacccaaaaaatctgaaaattgttgagctggaagcaccgcagctgcctcgatctctggacgacgcgcaaatcgctctggcagttatcaataccacctatgccagccagattggcctgactccagcgaaagacggtatctttgtcgaagataaagactccccgtacgtaaacctgatcgtaacgcgtgaagataacaaagacgccgagaacgtgaagaaattcgtccaggcttatcagtctgatgaagtttacgaagcagcaaacaaagtgtttaacggcggcgctgttaaaggctggtaa

SEQ ID NO: 457708 - DNA, 405 bp, Shigella boydii
atgcgtgctttaccgatctgtttagtagcactcatgctaagcggctgttccatgttaagcagatcccctgtcgaacccgttcaaagcactgcaccccagccgaaagcggagcctgcaaaaccgaaagcgccgcgcgccacgccggtccgaatttataccaatgcagaagaattagtcggcaaaccgttccgcgatctcggtgaagtcagtggcgactcttgccaggcctctaatcaggactctccgccgagcattccaaccgcgcgtaagcggatgcaaatcaacgcctctaaaatgaaagccaatgcggtattactgcatagctgcgaagtcaccagcggtacgccaggctgctatcgtcaggctgtatgtatcggctctgcgcttaacattacggcgaaatga

SEQ ID NO: 457709 - DNA, 708 bp, Shigella boydii
atgagcagtttccagttcgagcaaataggcgttattcgctcgccctataaagaaaaattcgccgttccgcgccagccaggtctggtaaaaagcgccaacggcgaactgcatctcattgctccctacaaccaggccgacgccgttcgcggcctggaagcgttcagccatttatggatccttttcgtctttcatcaaacgatggaaggcggctggcgtccgactgtgcgtccaccgcgcctcggcggtaacgccagaatgggggttttcgcaacacgctctactttccgccctaacccaattggtatgtcgctggtagagctgaaagaggttgtttgccataaagacagcgtgattctgaagctcggcagtctggatctggtcgatggtacgccggtagtggatatcaaaccgtatctcccctttgccgaatcgcttcccgatgccagtgccagctatgcgcaaagtgcgccagctgcagagatggcggtgagttttaccgcagaggtcgaaaaccagcttttgacgctggagaagcgttatccgcagttaacgctgtttatccgcgaagtactggcgcaggacccgcgcccggcctatcataaaggtgaggaaacgggcaaaacctatgccgtctggctacatgattttaacgttcgctggcgcgtcaccgacgcaggttttgaagtctttgcgctggaaccgcgttaa

SEQ ID NO: 457710 - DNA, 1719 bp, Shigella boydii
atgcgtactagccaatacctgctctccactctcaaggagacacctgccgacgccgaggtgatcagccatcagctgatgctgcgcgccgggatgatccgcaagctggcctccgggttatatacctggctgccgaccggcgtgcgcgttctgaaaaaagtcgaaaacatcgtgcgtgaagagatgaacaacgccggtgcaatcgaggtgtcgatgccggtggttcagccagccgatttgtggcaagagagtggtcgttgggaacagtacggtccggaactgctgcgttttgttgaccgtggcgagcgtccgttcgtactcggcccaactcatgaagaagttatcactgacctgattcgtaacgagcttagctcttacaaacagctgccgctgaacttctatcagatccagaccaagttccgcgacgaagtgcgtccgcgtttcggcgtcatgcgttcccgcgaattcctgatgaaagatgcttactctttccatacttctcaggaatccctgcaggaaacctacgatgcaatgtatgcggcctacagcaaaatcttcagccgcatggggctggatttccgcgccgtgcaagccgacaccggttctatcggcggcagcgcctctcacgaattccaggtgctggcgcagagcggtgaagacgatgtggtcttctccgacacctctgactatgcagcgaacattgaactggcagaagctatcgcgccgaaagaaccgcgcgctgctgctaccctggaaatgacgctggttgatacgccgaacgcgaaaaccatcgcggaactggttgaacagttcaatctgccgattgagaaaacggttaagactctgctggttaaagcggttgaaggcagcagcttcccgctggttgcgctgctggtgcgcggtgatcacgagctgaacgaagttaaagcagaaaaactgccgcaggttgcaagcccgctgactttcgcgaccgaagaagaaattcgtgctgtggttaaagccggtccgggttcactgggtccggtaaacatgccgattccggtggtgattgaccgtaccgttgcggcgatgagtgatttcgctgctggtgctaacatcgatggtaaacactacttcggtatcaactgggatcgcgatgtcgctaccccggaagttgcagatatccgtaacgtggtggctggcgatccaagcccggatggccagggtacgctgctgatcaaacgtggtatcgaagttggtcacatcttccagctgggtaccaagtactccgaagcactgaaagcctccgtacagggtgaagatggccgtaaccaaatcctgacgatgggttgctacggtatcggggtaacgcgtgtggtagctgcggcgattgagcagaactacgacgaacgcggcatcgtatggcctgacgctatcgcgccgttccaggtggcgattctgccgatgaacatgcacaaatccttccgcgtacaagagcttgctgagaaactgtacagcgaactgcgtgcacaaggtatcgaagtgctgctggatgaccgcaaagagcgtccgggcgtgatgtttgctgatatggaactgatcggtattccgcacactattgtgctgggcgaccgtaacctcgacaacgacgatatcgaatataaatatcgtcgcaacggcgagaaacagttaattaagactggtgacatcgtcgaatatctggtgaaacagattaaaggctga

SEQ ID NO: 457711 - DNA, 825 bp, Shigella boydii
atggataaaccaaaggcgtactgccgcctgcttctccccagctttcttttactttcggcttgtaccgttgatatcagccagccagacccatcagccacagcagtagatgccgaggcaaaaacatgggctgtcaaattccagcatcaaagctctttcaccgaacaatcaataaaagaaataacggcacctgatctcaaacccggcgatttgctgttctcctcaagccttggggtaacctcatttggaatccgcgtcttcagcacttcctctgtgagtcacgttgcaatctttctgggtgataataacgttgcagaagcgacaggcgctggcgtccagattgtttcccttaaaaaagcgatgaagcatagtgataagcttttcgtcttacgagtcccggatcttaccccgcaacaagccacagatatcaccgcgtttgccaataaaatcaaagatagcggttataactatcgcggcattgtcgaatttattccctttatggtgactcgccagatgtgctcactgaatccgttctccgaggattttcgccaacagtgcgtcagcggcctggcgaaagcgcagttaagcagtgtgggcgaaggagacaaaaagtcgtggttttgttcggaatttgtcactgatgcatttgccaaagccggacatccacttacactggcgcaatcgggctggattagccctgccgatctgatgcatatgcgtattggtgatgtctctgcgtttaagccagaaacgcagttacagtatgttgggcacctgaagccagggatttatatcaaggcgggtcgctttgttggtttgacccggtga

SEQ ID NO: 457712 - DNA, 711 bp, Shigella boydii
atggtgaaaaaagcgatagtgacagcgatggctgtaatcagcctctttactctgatgggatgtaataaccgggccgaagtcgatacgctttctccagcacaggctgccgaactgaaaccgatgccgcaaagttggcgcggcgtgctgccgtgtgctgattgtgaaggaatcgaaacctctctgttcctcgaaaaagacggaacatgggtgatgaatgagcgttatctcggtgctcgtgaagaaccttcctccttcgcttcctacggtacatgggcgcgaaccgctgacaagctggtattaaccgacagcaaaggtgaaaagtcatattatcgggcgaaaggcgatgcgctggagatgctcgatcgtgaaggcaatccgattgaatcgcagttcaactatacgctggaaccggcacaatccagtttacctatgacgccgatgaccctgcgaggcatgtatttttatatggctgatgcggcgaccttcactgattgcgcgaccggaaaacgtttcatggtagcgaataacgcagagctggagcgtggctacctggctgcgcgcggtcacagtgaaaaaccggtgttactgtcagtagaaggtcactttacgcttgaggctaatccggatactggtgcgccaaccaaagtattagcgcccgatacggcgggtaaattttacccgaataaggattgcagtagtttggggcagtaa

SEQ ID NO: 457713 - DNA, 423 bp, Shigella boydii
atgattgtgatttcccgacatgttgctattcccgatggtgagcttgagatcaccgccattcgtgcgcagggcgcgggcgggcagcatgttaataagacctcaacggccattcatctgcgttttgacattcgggcgtccagcctgccagagtattacaaagagcgtctgctcgccgccagccatcatttgatcagcagtgatggcgtgattgtcattaaggcacaggaataccgcagtcaggaactgaaccgcgaagccgcgctagcccggctggtggcagtgattaaagatttaacaacagaacaaaaagcccgacgacccacgcggcccacccgtgcatcgaaagagcgcaggctggcatcgaaagcacaaaaatcaagcgtgaaggcgatgcgcggcaaagtacgcagcggtcgggaataa

SEQ ID NO: 457714 - DNA, 546 bp, Shigella boydii
atggcgcttaaagcgacaatttataaagcgacggttaatgtggccgatctcgaccgcaaccagtttctcgatgcctctctgacgctggcgcgccacccttcagaaacccaggagcgtatgatgctgcgcctgctggcgtggctgaaatatgctgatgaacgtctgcaatttacccgtggtttgtgtgccgatgatgagccggaagcgtggctgcgtaacgatcacctgggcattgatttgtggattgagctggggctgccggatgagcggcggattaagaaagcctgcacccaggccgcagaagtggcgctgtttacctataatagtcgggcggcgcaaatctggtggcagcaaaatcagagcaaatgtgtgcagtttgccaatctttccgtctggtatctggacgatgaacaactggcgaaagtaagcgcctttgccgatcgtaccatgacgctgcaggcaacgattcaggatggcgtgatctggttatcggacgataagaataatctggaagttaacttaaccgcctggcaacaaccttcatga

SEQ ID NO: 457715 - DNA, 201 bp, Shigella boydii; identical to SEQ ID NO: 3723

SEQ ID NO: 457716 - DNA, 261 bp, Shigella boydii
atgtcaatgaatgatacgtatcaaccaatcaattgtgatgattacgataatcttgagctcgcctgccagcatcatttaatgctgacacttgagctgaaagatggcgaaaaattgcaggcaaaagccagcgatttagtctcccgcaaaaatgtggagtatctggtcgtcgaggccgctggcgaaacccgtgagctacgtctggataaaattaccagctttagccacccggaaatcggtacggtggtggtgagcgagtcctga

SEQ ID NO: 457717 - DNA, 1299 bp, Shigella boydii
atgacactcacgctcaatagacaacttctcacctcacgccagattttggtcgcctttagcggcgggcttgactccaccgttctgctgcatcagttggtgcagtggcggacggaaaatccgggcgtcactctgcgcgctattcatgtgcatcacggtttaagtgccaatgccgatgcctgggttacgcattgcgaaaacgtctgccaacagtggcaggtgccgctggtggtcgaacgcgtacaacttgcgcaagaggggctggggattgaggcccaggcgcggcaggcgcgttatcaggcatttgcccgtaccctattgcccggcgaagtgctggtcaccgcgcaacatctcgacgatcaatgtgaaacctttctgctggcgctaaaacgcggtagcggccctgccgggctttcggctatggcggaagtttcggagtttgccggaacacggcttatccgcccgttgcttgcccgcacgcggggggaactggcgcagtgggcattggcgcatggtttacgctggattgaagacgaaagtaatcaggacgactcatacgatcgtaactttctgcgcctgcgcgtagtgccgttattgcagcagcgttggccgcattttgcggaagcaacggcccgcagcgccgcactttgtgctgaacaagagagtctgttggatgaactgctggcggatgatttagcacactgccaaacgtcgcaggggacgctgcagattgcgccaatgctggcgatgagtgatgcccgccgcgcggcgattatccgtcgctggctggcagggcagaatgcaccaatgccttcccgcgacgcgctggtgcggatctggcaggaagtggcgctggcgcgggaagatgcctccccctgtttacgcttgggcgcgtttgaaatccgccgctatcagtcgcaactgtggtggattaaatccgtcaccgggcaaagtgaaaccattgtgccgtggcagacgtggctacaaccgctggaattaccggcggggctgggaagcgtacagcttactgcgggaggcgatattcgccctccgcgtgcagacgaagcggtcagcgtgcgtttcaaatcggcaggattgctgcatattgtcgggcgcaacggcggacgtaagctgaagaaaatctggcaagagttaggcgtgccgccgtggctacgtgacaccacgccactgctgttttatggcgaaacgctgattgcggcggcaggggtatttgtgacgcaagaaggtgtggctgaaggtgagaatggcgtaagttttgtctggcagaaaacgcttagttaa

SEQ ID NO: 457718 - DNA, 390 bp, Shigella boydii
atgctgggtttaaaacaggttcaccatattgcgattattgcgacggattatgcggtgagcaaagctttctactgcgatattcttggtttcacgctgcaaagcgaagtctatcgcgaagcgcgcgactcgtggaaaggggatttggcgcttaatgggcaatatgtgattgagcttttctcttttccgttcccgccggagcgccccagccgaccggaagcttgcggcctgcgtcatctggcttttagcgttgatgacatcgatgcggcagtggcgcaccttgaaagccataacgtgaagtgtgaagccatccgtgtcgatccatacacgcaaaaacgcttcaccttctttaacgatccggacgggctgccgttggaactgtatgagcagtaa

SEQ ID NO: 457719 - DNA, 2142 bp, Shigella boydii
atgaacatcattgccattatgggaccgcatggcgtcttttataaagatgagcccatcaaagaactggagtcggcgctggtggcgcaaggctttcagattatctggccacaaaacagcgttgatttgctgaaatttatcgaacataaccctcgaatttgcggcgtgatttttgactgggatgagtacagtctcgatttatgcagcgatatcaatcaacttaatgaatatctcccgctttatgccttcatcaacacccactcgacgatggatgtcagcgtgcaggatatgcggatggcgctctggttttttgaatatgcgctggggcaggcggaagatatcgccattcgtatgcgtcagtacaccaacgaatatcttgataacattacgccgccgttcacgaaagccttgtttacctacgttaaagagcggaagtacaccttttgtacgccggggcatatgggcggcaccgcatatcaaaaaagcccggttggctgcctgttttatgattttttcggcgggaataccctcaaggctgatgtctctatttcggtcaccgagcttggttcgttgctcgaccacaccgggccacacctggaagcggaagagtacatcgcgcggacttttggcgcggaacagagttatatcgttaccaacggaacatcgacgtcgaacaaaattgtgggtatgtacgccgcgccatccggcagtacgctgttgatcgaccgcaattgtcataaatcgctggcgcatctgttgatgatgaacgatgtagtgccagtctggctgaaaccgacgcgtaatgcgttggggattcttggtgggatcccgcaccgtgaatttactcgcgacagcatcgaagagaaagtcgctgccaccacgcaggcacaatggccggttcatgcggtgattaccaactccacctatgatggcttgctctacaacaccgactggatcaaacagacgctggatgtcccgtcgatccacttcgattccgcctgggtgccgtacacccattttcatccgatctaccaggggaaaagtggtatgagcggcgagcgtgttgcgggaaaagtgatcttcgaaacgcaatcgacccacaaaatgctggcggcgttatcgcaggcttcgctgatccacattaaaggcgagtatgacgaagaggcgtttaacgaagcctttatgatgcataccaccacctcgcccagttatcccattgttgcttcggttgagacggcggcggcgatgctgcgtggtaatccgggcaaacggctgattaaccgttcggtggagcgggcgctgcattttcgcaaagaggtccagcggttgcgggaagagtctgacggttggtttttcgatatctggcaaccgccgcaggtggatgaagccgaatgctggcccgttgcgccaggcgaacagtggcacggctttaacgatgcggatgccgatcatatgtttctcgatcccgttaaagtcactattttgacaccggggatggacgaacagggcaatatgagcgaggaggggatcccggcggcgctggtggcaaaattcctcgacgaacgtgggatcgtagtagagaaaaccggcccttataacctgctgtttctctttagtattggtatcgataaaaccaaagcaatgggattattgcgtgggttgacggaatttaaacgctcttacgatctcaacctgcggatcaaaaatatgctacccgatctctatgctgaagatcccgatttctaccgcaatatgcgtattcaggatctggcgcaagggatccataagctgattcgtaaacacgatcttcccggtttgatgttgtgggcattcgatactttgccggaaatgatcatgacgccacatcaggcatggcagagacagattaaaggtgaagtagaaaccattgcgctggaacaactggtcggtagagtatcggcaaatatgatcctgccttatccaccgggcgtaccgctgttgatgccaggagaaatgctgaccaaagagagccgcacggtactcgattttctactgatgctttgttccgtagggcaacattaccccggttttgaaacggatattcacggcgcgaaacaggacgaagacggcgtttaccgcgtacgagtcctaaaaatggcgggataa

SEQ ID NO: 457720 - DNA, 960 bp, Shigella boydii
atgagtctgaatttccttgattttgaacagccgattgcagagctggaagcgaaaatcgattctctgactgcggttagccgtcaggatgagaaactggatattaacatcgatgaagaagtgcatcgtctgcgtgaaaaaagcgtagaactgacacgtaaaatcttcgccgatctcggtgcatggcagattgcgcaactggcacgccatctacagcgtccttataccctggattacgttcgcctggcatttgatgaatttgacgaactggctggcgaccgcgcgtatgcagacgataaagctatcgtcggtggtatcgcccgtcttgacggtcgtccggtgatgatcattggtcatcaaaaaggtcgtgaaaccaaagaaaaaattcgccgtaactttggtatgccagcgccagaaggttaccgcaaagcactgcgtctgatgcaaatggctgaacgctttaagatgcctatcatcacctttatcgacaccccgggggcttatcctggcgtgggcgcagaagagcgtggtcagtctgaagccattgcacgcaacctgcgtgaaatgtctcgcctcggcgtaccggtagtttgtacggttatcggtgaaggtggttctggcggtgcgctggcgattggcgtgggcgataaagtgaatatgctgcaatacagcacctattccgttatctcgccggaaggttgtgcgtccattctgtggaagagcgccgacaaagcgccgctggcggctgaagcgatgggtatcatcgctccgcgtctgaaagagctgaaactgatcgactccatcatcccggaaccgctgggcggcgctcaccgtaacccggaagcgatggcggcatcgttgaaagcgcaactgctggcggatctggccgatctcgatgtgttaagcactgaagatttaaaaaatcgtcgttatcagcgcctgatgagctacggttacgcgtaa

SEQ ID NO: 457721 - DNA, 3483 bp, Shigella boydii
atgtctgaaccacgtttcgtacacctgcgggtgcacagcgactactcgatgatcgatggcctggccaaaactgcaccgttggtaaaaaaggcggcggcgttgggtatgccagcactggcgatcaccgatttcaccaacctttgtggtctggtgaagttctacggagcgggacatggcgcagggattaagcctatcgtcggggcagattttaacgtccagtgcgacctgctgggtgatgagttaacccacctgacggtactggcggcgaacaataccggctatcagaatctgacgttgctgatctcaaaagcgtatcagcgcgggtacggtgccgctgggccgatcatcgatcgcgactggcttatcgaattaaatgaagggttgatccttctttccggcgggcgcatgggcgacgtcggacgcagtcttttgcgtggtaacagcgcgctggtagatgagtgtgtcgcgttttatgaagaacacttcccggatcgctattttctcgagctgatccgcaccggcaggctggatgaagaaagctatctgcacgcggcggtggaactggcggaagcgcgcggtttgcccgtcgtggcgactaacgatgtgcgctttatcgacagcagcgactttgacgcacacgaaatccgcgtcgcgatccacgacggctttaccctcgacgatcctaaacgcccgcgtaactattcgccgcagcaatatatgcgtagcgaagaggagatgtgtgagctgtttgccgacatccccgaagcccttgccaacaccgttgagatcgccaaacgctgtaacgtaactgtgcgtcttggtgaatacttcctgccgcagttcccgaccggggacatgagcaccgaagattatctggtcaagcgtgcaaaagagggcctggaagagcgtctggcctttttattccctgacgaggaagaacgtgttaagcgccgcccggaatatgacgaacgtctggagactgaacttcaggttatcaaccagatgggcttcccgggctacttcctcatcgttatggaatttatccagtggtcgaaagataacggcgtaccggtagggccaggccgtggctccggtgcgggttcactggtggcctacgcgctgaaaatcaccgacctcgatccgctggaatttgacctgctgttcgaacgtttccttaacccggaacgtgtctccatgcctgacttcgacgttgacttctgtatggagaaacgcgatcaggttatcgagcacgtagcggacatgtacggtcgtgatgcggtatcgcagatcatcaccttcggtacaatggcggcgaaagcggtgatccgcgacgtaggccgcgtgctggggcatccgtacggctttgtcgatcgtatctcgaaactgatcccgcccgatccggggatgacgctggcgaaagcgtttgaagccgagccgcagctgccggaaatctacgaagcggatgaagaagttaaggcgctgatcgacatggcgcgcaaactggaaggggtcacccgtaacgccggtaagcacgccggtggggtggttatcgcgccgaccaaaattaccgattttgcgccgctttactgcgatgaagagggcaaacatccggtcacccagtttgataaaagcgacgttgaatacgccggactggtgaagttcgacttccttggtttgcgtacgctcaccatcatcaactgggcgctggagatgatcaacaagcggcgggcgaagaatggcgagccgccgctggatatcgccgcgatcccgctggatgacaagaaaagcttcgacatgctgcaacgctcggaaaccacggcggtattccagcttgaatcgcgcggcatgaaggacctgatcaagcgtctgcaacctgactgcttcgaagatatgatcgcactggtggcgctgttccgcccaggtccgttgcaatcagggatggtggataactttatcgaccgtaaacatggtcgcgaagaaatctcctatccggacgtacagtggcagcatgaaagcctgaaaccggtactggagccaacctacggcatcatcctgtatcaggaacaggtcatgcagattgcgcaggtgctttctggttataccctcggtggcgcggatatgctgcgtcgtgcgatgggtaagaaaaagccggaagagatggctaagcagcgttctatatttgctgaaggtgcagaaaagaacggaatcaacgccgaactggcgatgaaaatcttcgacctggtggagaaattcgcgggttacggatttaacaaatcgcactctgcggcctatgctttggtgtcatatcaaacgttatggctgaaagcgcactatccggcggagtttatggcggcggtaatgaccgccgatatggacaacaccgagaaggtggtgggcctggtggatgagtgctggcggatggggctgaaaatcctgccaccagatataaactccggtctttaccatttccacgtcaacgacgacggcgaaatcgtgtatggtattggcgccatcaaaggggtaggtgaaggtccgattgaggccatcatcgaagcccgtaataaaggcggctacttccgcgaactgtttgatctctgcgcccgtaccgacaccaaaaagttaaaccggcgggtgctggaaaaactgatcatgtccggggcgtttgaccgtcttgggccacaccgcgcggcgctgatgaactcgctgggtgatgcgttaaaagcggcagatcaacacgcgaaagcggaagctatcggtcaggccgatatgttcggcgtgctggccgaagagccggaacaaattgaacaatcctacgccagctgccaaccgtggccggagcaggtggtgttagatggggaacgtgaaacgttaggtctgtaccttacgggacaccctatcaaccagtatttaaaagagattgagcgttatgtcggaggcgtaaggctgaaagacatgcacccgacagaacgtggtaaagtcatcacggctgcggggctcgttgttgccgcgcgggttatggtcaccaagcgcggcaatcgtatcggtatctgcacgctggatgaccgttccgggcggctggaagtgatgttgtttactgacgccctggataaataccagcaattgctggaaaaagaccgcatacttatcgtcagcggacaggtcagctttgatgacttcagcggtgggcttaaaatgaccgctcgcgaagtgatggatattgacgaagcccgggaaaaatatgctagcgggcttgctatctcgctgacggacaggcaaattgatgaccagcttttaaaccgactccgtcagtctctggaaccccaccgctctgggacaattccagtacatctctactatcagagggcggatgcacgcgcgcggttgcgttttggcgcgacgtggcgtgtctctccgagcgatcgtttattaaacgatctccgtggcctcattggttcggagcaggtggaactggagtttgactaa

SEQ ID NO: 457722 - DNA, 597 bp, Shigella boydii
atgatcgaatttgtttatccgcacacgcagctggttgcgggtgtggatgaagtcggacgcgggccgttagttggcgcggtcgtcaccgctgcggtgatccttgacccggcgcgcccgattgccgggctgaatgattccaaaaagctgagcgaaaaacgccgtctggcgctctgtgaagagatcaaagagaaagcgttgagctggagtctgggccgcgcggaaccccacgaaatcgacgagctgaacattcttcatgcgaccatgctggcgatgcagcgtgccgtcgctgggctgcatattgcgccggaatatgtgttgattgatggtaaccgctgcccgaaattaccgatgcctgcgatggctgtggtgaaaggcgatagccgcgtaccggaaatcagtgccgcgtctatcctggcgaaagtgacgcgtgacgccgaaatggcggcgctggatattgttttcccgcaatatggttttgcccaacacaaagggtacccaaccgcttttcatctggaaaaactggctgaacacggcgcgaccgaacaccatcggcgcagctttgggcctgtcaaacgcgcactgggacttgcgtcctga

SEQ ID NO: 457723 - DNA, 1149 bp, Shigella boydii
atgactgaacagcgtccattaacgattgccctggtcgccggagaaacctccggcgatatcctgggggccggtttaatccgcgctctgaaagaacgtgtgcccaacgcccgctttgttggtgttgccgggccacgaatgcaggctgaaggctgcgaagcctggtacgaaatggaagaactggcggtgatgggcattgttgaagtgctcggtcgtctgcgtcgcttactgcatattcgtgccgatctgacaaagcgttttggcgaactgaagccagatgtttttgttggtattgatgcgcctgacttcaatattactcttgaaggtaacctcaaaaagcagggtatcaaaaccattcattacgtcagtccgtcagtctgggcgtggcgacagaaacgtgttttcaaaataggcagagccaccgatctggtgctcgcatttctgcctttcgaaaaagcgttttatgacaaatacaacgtaccgtgccgctttatcggtcataccatggctgatgccatgccattagatccagataaaaatgccgcccgtgatgtgctggggatccctcacgatgcccactgcctggcgttgctaccggggagccgtggtgcagaagttgaaatgcttagtgccgatttcctgaaaacggcccagcttttgcgccagacatatccggatctcgaaatcgtggtgccactggtgaatgccaaacgccgcgagcagtttgaacgcatcaaagctgaagtcgcgccagacttttcagttcatttgctggatgggatgggccgtgaggcgatggtcgccagcgatgcggcgctactggcgtcgggtacggcagccctggagtgtatgctggcgaaatgcccgatggtggtgggatatcgcatgaagccttttaccttctggttggcgaagcggctggtgaaaactgattatgtctcgctgccaaatctgctggcgggcagagagttagtcaaagagttattgcaggaagagtgtgagccgcaaaaactggctgcggcgctgttaccgctgttggcgaacgggaaaatcagccacgcgatgcacgataccttccgtgaactgcatcagcagatccgctgcaatgccgatgagcaggcggcacaagccgttctggagttagcacaatga

SEQ ID NO: 457724 - DNA, 789 bp, Shigella boydii
gtgattgataaatccgcctttgtgcatccaaccgccattgtggaagagggcgcgtcaattggcgcgaacgcacacattggtcctttttgtatcgttggaccccatgtcggaattggtgagggtaccgtactgaaatctcacgttgtcgtgaatggtcatactaaaattggccgcgataatgagatttatcagttcgcctccatcggcgaagttaaccaggatctgaaatatgctggcgaaccgacccgtgtggaaatcggcgatcgtaaccgcattcgcgaaagcgtcaccattcatcgtggcacagtccagggcggtggattgacgaaggtgggcagcgacaacttactgatgatcaacgcgcacattgcgcacgattgtacggtaggtaaccgctgtattctcgccaacaacgcaacgctggcgggtcacgtatcggttgacgacttcgcgatcatcggcggcatgaccgcagtccatcagttctgcatcattggtgcgcacgtgatggttggcggctgctccggtgtggcgcaggacgtccctccttatgtcattgcgcagggtaaccacgcaacgccgttcggtgtcaatatcgaagggctgaagcgccgcggattcagccgtgaggcgattaccgctatccgcaatgcgtataagctgatttatcgtagcggtaaaacgctcgatgaagtgaaaccggaaattgctgaactggcggaaacatatccggaagtgaaagcctttaccgatttcttttcacgctcaacgcgcggtctgattcgttaa

SEQ ID NO: 457725 - DNA, 456 bp, Shigella boydii
ttgactactaacactcatactctgcagattgaagagattttagaacttctgccgcaccgtttcccgttcttactggtggatcgcgtgctggattttgaagaaggtcgttttctgcgcgcagtaaaaaatgtctctgtcaatgagccattcttccagggccatttccctggaaaaccgattttcccgggtgtgctgattctggaagcaatggcacaggcaacaggtattctggcgtttaaaagcgtaggaaaactggaaccgggtgagctgtactacttcgctggtattgacgaagcgcgcttcaagcgcccggtcgtgcctggcgatcaaatgatcatggaagtcactttcgaaaaaacgcgccgcggcctgacccgttttaaaggggttgctctggtcgatggtaaagtagtttgcgaagcaacgatgatgtgtgctcgtagccgggaggcctga

SEQ ID NO: 457726 - DNA, 1026 bp, Shigella boydii
atgccttcaattcgactggctgatttagcgcagcagttggatgcagaactacacggtgatggcgatatcgtcatcaccggcgttgcgtccatgcaatctgcacaaacaggtcacattacgttcatggttaacccaaaataccgtgagcatttaggcttgtgccaggcgtccgcggttgtcatgacccaggacgatcttcctttcgcgaaaagtgccgcgctggtagtgaagaatccctacctgacttacgcgcgcatggcgcaaattttagataccacgccgcagcccgcgcagaacattgcacccagtgcggtgatcgacgcgacggcgaagctggggaacaatgtatcgattggcgctaacgcggtgattgaatccggcgttgaactgggcgataacgtgattatcggtgccggttgcttcgtaggtaaaaacagcaaaatcggtgcaggttcgcgtctctgggcgaacgtaaccatttaccatgagatccagatcggtcagaattgcctgatccagtccggaacagtggtaggcgcagacggctttggttatgccaacgatcgtggtaactgggttaagatcccacagattggtcgcgtaattattggcgatcgcgtggagatcggtgcctgcactaccatcgatcgcggcgcgctggatgacactgttattggcaatggcgtgatcattgataaccagtgccagattgcacataacgtcgtgattggcgacaatacggcggttgccggtggcgtcattatggcgggcagcctgaaaattggtcgttactgcatgatcggcggagccagcgtaatcaacgggcatatggaaatatgcgacaaagtgacggttacgggcatgggtatggtgatgcgtcccatcactgaaccaggcgtctattcctcaggcattccgctgcaacccaacaaagtctggcgcaaaaccgctgcactggtgatgaacattgatgacatgagcaagcgtctgaaatcgcttgagcgcaaggttaatcaacaagactaa

SEQ ID NO: 457727 - DNA, 486 bp, Shigella boydii
gtgaaaaagtggttattagcggcaggtctcggtttagcactggcaacttctgctcaggcggctgacaaaattgcaatcgtcaatatgggcagcctgttccagcaggtagcgcagaaaaccggtgtttctaacacgctggaaaatgagttcaaaggccgtgccagcgaactgcagcgtatggaaaccgatctgcaggctaaaatgaaaaagctgcagtccatgaaagcgggcagcgatcgcactaagctggaaaaagacgtgatggctcagcgccagacttttgctcagaaagcgcaggcttttgagcaggatcgcgcacgtcgttccaacgaagaacgcggcaaactggttactcgtatccagactgctgtgaaatccgttgccaacagccaggatatcgatctggttgttgatgcaaacgccgttgcttacaacagcagcgatgtaaaagacatcactgccgacgtactgaaacaggttaaataa

SEQ ID NO: 457728 - DNA, 2433 bp, Shigella boydii
atggcgatgaaaaagttgctcatagcgtcgctgctgtttagcagcgccaccgtatacggtgctgaagggttcgtagtgaaagatattcatttcgaaggccttcagcgtgtcgccgttggtgcggccctcctcagtatgccggtgcgtacaggcgacacggttaatgatgaagatatcagtaataccattcgcgctctgtttgctaccggcaactttgaggatgttcgcgtccttcgtgatggtgatacccttctggttcaggtaaaagaacgtccgaccattgccagcattactttctccggtaacaaatcggtgaaagatgacatgctgaagcaaaacctcgaggcttctggtgtgcgtgtgggcgaatccctcgatcgcaccaccattgccgatatcgagaaaggtctggaagacttctactacagcgtcggtaaatatagcgccagcgtaaaagctgtcgtgaccccgctgccgcgcaaccgtgttgacctaaaactggtgttccaggaaggtgtgtcagctgaaatccagcaaattaacattgttggtaaccatgctttcaccaccgacgaactgatctctcatttccaactgcgtgacgaagtgccgtggtggaacgtggtaggcgatcgtaaataccagaaacagaaactggcgggcgaccttgaaaccctgcgcagctactatctggatcgcggttatgcccgtttcaacatcgactctacccaggtcagtctgacgccagataaaaaaggtatttacgtcacggtgaacattaccgaaggcgatcagtacaagctttctggcgttgaagtgagcggcaaccttgccgggcactccgctgaaattgagcagctgactaagatcgagccgggcgagctgtataacggcaccaaagtgaccaagatggaagatgacatcaaaaagcttctcggtcgctatggttatgcctatccgcgcgtacagtcgatgcctgaaattaacgatgccgacaaaaccgttaaattacgcgtgaacgttgatgcgggtaaccgtttctacgtgcgtaagatccgttttgaaggtaacgatacctcgaaagatgccgtcctgcgtcgcgaaatgcgtcagatggaaggtgcatggctgggaagcgatctggtcgatcagggtaaggagcgtctgaatcgtctgggcttctttgaaactgtcgataccgatacccaacgtgttccgggtagcccggaccaagtagatgtagtctacaaggtgaaagaacgtaacaccggtagcttcaacttcgggattggttacggtactgaaagtggcgtgagcttccaggctggcgtgcaacaggataactggttaggtacaggttatgctgttggtatcaacgggaccaaaaacgattaccagacctatgctgaattgtcggtaaccaacccgtacttcactgtagatggtgtaagcctcggtggtcgtctcttctataatgacttccaggcagatgacgccgacctgtccgactataccaacaagagttatggtacagacgtgacgttgggcttcccgatcaacgaatataactcgctgcgtgcaggtctgggttatgtacataactccctgtccaacatgcagcctcaggttgcgatgtggcgttatctgtactctatgggtgaacatccgagcacctctgatcaggataacagcttcaaaacggacgacttcacgttcaactatggttggacctataacaagcttgaccgtggttacttcccgacagatggttcacgtgtcaacctgaccggtaaagtgaccattcctggatcggataacgaatactacaaagtgacgttagacacggcgacttatgtgccgatcgatgacgatcacaaatgggttgttctggggcgtacccgctggggttatggtgatggtttaggcggcaaagagatgccgttctacgagaacttctatgccggtggttccagcaccgtccgtggcttccagtccaataccattggtccgaaagcagtttacttcccgcatcaggccagtaattatgatccggactatgattacgaatgtgcgactcaggacggcgcgaaagacctgtgtaaatcggatgatgctgtaggcggtaacgccatggcggttgccagcctcgagttcatcaccccgacgccgtttattagcgataagtatgctaactcggttcgtacttccttcttctgggatatgggtaccgtttgggatacaaactgggattccagccaatattctggatatccggactatagtgatccaagcaatatccgtatgtctgcgggtatcgcattacaatggatgtccccattggggccgttggtgttctcctacgcccagccgttcaaaaagtacgatggagacaaggcagaacagttccagtttaacatcggtaaaacctggtaa

SEQ ID NO: 457729 - DNA, 1353 bp, Shigella boydii
atgctgagttttctctgggatttggcttcgttcatcgttgcactgggtgtacttatcaccgtgcatgaatttggtcatttctgggttgcccggcgttgtggtgttcgcgttgagcgtttctcaatagggtttggtaaggcgctctggcggcgaactgataagctcggcaccgaatatgttatcgccctgatcccgctgggcggttatgtcaaaatgctggatgagcgcgcagaaccggtcgttccggaactccgccaccatgccttcaataataaatctgttggccaacgagcggcgattattgccgcaggtccggttgcaaacttcatttttgctatctttgcctactggctggtttttattattggtgtgcctggcgtacgtccggtggttggtgaaatggcagccaattcgatagctgcggaagcacaaattgcaccaggtacggaactaaaagccgtagatggtatcgaaacgcctgattgggatgccgtgcgtttgcagttggtcgataaaattggcgatgaaagcaccaccattacagtagcgccatttggcagcgaccaacggcgggatgtaaagctcgatttacgtcactgggcgtttgagcctgataaagaagatccggtatcttcgctggggattcgtcctcgtgggctgcaaattgaacctgtactggaaaatgtgcagccaaactcggcggcaagcaaggcaggtttgcaagcaggcgacaggatcgttaaagtcgatggtcagcccttaacgcagtgggtgacctttgtgatgcttgtccgggataacccgggtaaatccttagcgttagaaatcgaaaggcagggaagtcccttgtctttgacattaatcccggagagtaaaccgggtaatggtaaagcgattggttttgtcggtattgagccgaaagtcattcctttgccagatgagtataaagttgtacgccagtatgggccgttcaacgccatcgtcgaagccacggacaaaacgtggcagctgatgaagctgacggtcagtatgctgggaaaattgatcaccggtgatgtgaaactgaacaacctcagtgggccgatctctatcgccaagggggctgggatgacagcggaactcggggtagtttattacctgccgtttcttgcgcttattagcgtgaacttagggataattaacctgtttccgttgcccgtacttgacggggcgcatctgctgttccttgcgatcgaaaagatcaagggcggaccggtatccgagcgggttcaagacttttgttatcgcattggctcgattctgctggtgctgttaatggggcttgcacttttcaatgatttctctcggttatga

SEQ ID NO: 457730 - DNA, 858 bp, Shigella boydii
ttgctgaagtatcgcctgatatctgcttttgtgttaatacccgtcgtcatcgcggcgttgtttctgttgccgccggtggggttcgccattgtaacgctggtggtctgcatgctggcagcgtgggaatggggacagcttagcggttttaccactcgttcgcagcgagtatggttggcggtgttatgcgggttattgttggcgctgatgctttttctgttgccggaatatcaccgaaatattcatcaaccgctggttgaaatctcactttgggcttcgctgggttggtggattgtcgcgctattgctggtgctgttttacccaggttccgcagcaatctggcgtaattctaaaacattgcgccttatttttggcgtgctaaccattgttcccttcttctggggcatgctggcgttacgggcctggcactatgacgagaatcattacagtggcgcaatatggctgctctatgtcatgatcctggtatggggcgctgactccggcgcatatatgtttggcaaattgtttggtaaacataagctggcaccgaaggtttctccgggtaaaacctggcaaggctttataggtggactcgctactgcagcggtaatctcatggggttatggcatgtgggcgaatctcgacgtcgctcccgtcaccttactcatttgctctattgtcgcagcgttagcctcagtgctcggcgatctgaccgagagtatgtttaagcgtgaagcaggaattaaggacagcggtcatttaattccaggacacggtggtattttagatcgtattgatagcctgacggctgcggtaccggtctttgcttgcttgttgttactggtattcaggacgctttaa

SEQ ID NO: 457731 - DNA, 759 bp, Shigella boydii
atgttgtctgctactcaaccacttagcgaaaaattgccagcgcatggctgccgtcatgttgcgatcattatggacggcaatggtcgctgggcaaaaaagcaagggaagattcgtgcctttgggcataaagccggggcaaaatccgtccgccgggctgtctcttttgcggccaacaacggtattgaggcgttaacgctgtatgcctttagtagtgaaaactggaaccgaccagcgcaggaagtcagtgcgttaatggaactgtttgtgtgggcgctcgatagcgaagtaaaaagtctgcaccgacataacgtgcgtctgcgtattattggcgataccagtcgctttaactcgcgtttgcaagaatgtattcgtaaatctgaagcgctaacagccgggaataccggtctgacgctgaatattgcggcgaactacggtggacgttgggatatagtccagggagtcaggcaactggctgaaaaggtgcagcaaggaaacctgcaaccagatcagatagatgaagagatgctaaaccagcatgtctgtatgcatgaactggcccctgtagatttagtaattaggactgggggggagcatcgcattagtaactttttgctttggcaaattgcctatgccgaactttactttacagatgttctctggcccgatttcgatgaacaagactttgaaggggcgttaaatgcctttgctaatcgagagcgtcgtttcggcggcaccgagcccggtgatgaaacagcctga

SEQ ID NO: 457732 - DNA, 1197 bp, Shigella boydii
atgaagcaactcaccattctgggctcgaccggctcgattggttgcagcacgctggacgtggtgcgccataatcccgaacacttccgcgtagttgcgctggtggcaggcaaaaatgtcactcgcatggtagaacagtgcctggaattctctccccgctatgccgtaatggacgatgaagcgagtgcgaaacttcttaaaacgatgctacagcaacagggtagccgcaccgaagtcttaagcgggcaacaagccgcttgcgatatggcagcgcttgaggatgttgatcaggtgatggcagccattgttggcgctgctgggctgttacctacgcttgctgcgatccgcgcgggtaaaaccattttgctggccaataaagaatcactggttacctgcggacgtctgtttatggacgccgtaaagcagagcaaagcgcaattgttaccggtcgatagcgaacataacgccatttttcagagtttaccgcaacctatccagcataatctgggatacgctgaccttgagcaaaatggcgtggtgtccattttacttaccgggtctggtggccctttccgtgagacgccattgcgcgatttggcaacaatgacgccggatcaagcctgccgtcatccgaactggtcgatggggcgtaaaatttctgtcgattcggctaccatgatgaacaaaggtctggaatacattgaagcgcgttggctgtttaacgccagcgccagccagatggaagtgctgattcacccgcagtcagtgattcactcaatggtgcgctatcaggacggcagtgttctggcgcagctgggggaaccggatatgcgtacgccaattgcccacaccatggcatggccgaatcgcgtgaactctggcgtgaagccgctcgatttttgcaaactaagtgcgttgacatttgccgcaccggattatgatcgttatccatgcctgaaactggcgatggaggcgttcgaacaaggtcaggcagcgacgacagcattgaatgccgcaaacgaaatcaccgttgctgcttttcttgcgcaacaaatccgctttacggatatcgctgcgttgaatttatcggtactggaaaaaatggatatgcgcgaaccacaatgtgtggacgatgtgttatctgttgatgcgaacgcgcgtgaagtcgccagaaaagaggtgatgcgtctcgcaagctga

SEQ ID NO: 457733 - DNA, 558 bp, Shigella boydii
gtgattagcgatatcagaaaagatgctgaagtacgcatggacaaatgcgtagaagcgttcaaaacccaaatcagcaaaatacgcacgggtcgtgcttctcccagcctgctggatggcattgtcgtggaatattacggcacgccgacgccgctgcgtcagctggcaagcgtaacggtagaagattcccgtactctgaaaatcaacgtgtttgatcgttcaatgtctccggccgttgaaaaagcgattatggcgtccgatcttggcctgaacccgaactctgcgggtagcgacatccgtgttccgctgccgccgctgacggaagaacgtcgtaaagatctgaccaaaatcgttcgtggtgaagcagaacaagcgcgtgttgcagtacgtaacgtgcgtcgtgacgcgaacgacaaagtgaaagcactgttgaaagataaagagatcagcgaagacgacgatcgccgttctcaggacgatgtacagaaactgactgatgctgcaatcaagaaaattgaagcggcgctggcagacaaagaagcagaactgatgcagttctga

SEQ ID NO: 457734 - DNA, 726 bp, Shigella boydii
atggctaccaatgcaaaacccgtctataaacgcattctgcttaagttgagtggcgaagctctgcagggcactgaaggcttcggtattgatgcaagcatactggatcgtatggctcaggaaatcaaagaactggttgaactgggtattcaggttggtgtggtgattggtgggggtaacctgttccgtggcgctggtctggcgaaagcgggtatgaaccgcgttgtgggcgaccacatggggatgctggcgaccgtaatgaacggcctggcaatgcgtgatgcactgcaccgcgcctatgtgaacgctcgtctgatgtccgctattccattgaatggcgtgtgcgacagctacagctgggcagaagctatcagcctgttgcgcaacaaccgtgtggtgatcctctccgccggtacaggtaacccgttctttaccaccgactcagcagcttgcctgcgtggtatcgaaattgaagccgatgtggtgctgaaagcaaccaaagttgacggcgtgtttaccgctgatccggcgaaagatccaaccgcaaccatgtacgagcaactgacttacagcgaagtgctggaaaaagagctgaaagtcatggacctggcggccttcacgctggctcgtgaccataaattaccgattcgtgttttcaatatgaacaaaccgggtgcgctgcgccgtgtggtaatgggtgaaaaagaagggactttaatcacggaataa

SEQ ID NO: 457735 - DNA, 852 bp, Shigella boydii
atggctgaaattaccgcatccctggtaaaagagctgcgtgagcgtactggcgcaggcatgatggattgcaaaaaagcactgactgaagctaacggcgacatcgagctggcaatcgaaaacatgcgtaagtccggtgctattaaagcagcgaaaaaagcaggcaacgttgctgctgacggcgtgatcaaaaccaaaatcgacggcaactacggcatcattctggaagttaactgccagactgacttcgttgcaaaagacgctggtttccaggcgttcgcagacaaagttctggacgcagctgttgctggcaaaatcactgacgttgaagttctgaaagcacagttcgaagaagaacgtgttgcgctggtagcgaaaattggtgaaaacatcaacattcgccgcgttgctgcgctggaaggcgacgttctgggttcttatcagcacggtgcgcgtatcggcgttctggttgctgctaaaggcgctgacgaagagctggttaaacacatcgctatgcacgttgctgcaagcaagccagaattcatcaaaccagaagacgtatccgctgaagtggtagaaaaagaataccaggtacagctggatatcgcgatgcagtctggtaagccgaaagaaatcgcagagaaaatggttgaaggccgcatgaagaaattcaccggcgaagtttctctgaccggtcagccgttcgttatggaaccaagcaaaactgttggtcagctgctgaaagagcataacgctgaagtgactggcttcatccgcttcgaagtgggtgaaggcatcgagaaagttgagactgactttgcagcagaagttgctgcgatgtccaagcagtcttaa

SEQ ID NO: 457736 - DNA, 726 bp, Shigella boydii
atggcaactgtttccatgcgcgacatgctcaaggctggtgttcacttcggtcaccagacccgttactggaacccgaaaatgaagccgttcatcttcggtgcgcgtaacaaagttcacatcatcaaccttgagaaaactgtaccgatgttcaacgaagctctggctgaactgaacaagattgcttctcgcaaaggtaaaatccttttcgttggtactaaacgcgctgcaagcgaagcggtgaaagacgctgctctgagctgcgaccagttcttcgtgaaccatcgctggctgggcggtatgctgactaactggaaaaccgttcgtcagtccatcaaacgtctgaaagacctagaaactcagtctcaggacggtactttcgaaaagctgaccaagaaagaagcgctgatgcgcactcgtgagctggagaaactggaaaacagcctgggcggtatcaaagacatgggcggtctgccggacgctctgtttgtaatcgatgctgaccacgaacacattgctatcaaagaagcaaacaacctgggtattccggtatttgctatcgttgataccaactctgatccggacggtgttgacttcgttatcccgggtaacgacgacgcaatccgtgctgtgaccctgtacctgggcgctgttgctgcaaccgtacgtgaaggccgttctcaggatctggcttcccaggcggaagaaagcttcgtagaagctgagtaa

SEQ ID NO: 457737 - DNA, 795 bp, Shigella boydii
atggctatctcaatcaagaccccagaagatatcgaaaaaatgcgcgtcgctggccgactggctgccgaagtgctggagatgatcgaaccgtatgttaaaccgggcgtcagcaccggcgagctggatcgcatctgtaatgattacattgttaatgaacaacacgcggtttctgcctgcctcggctatcacggctatccgaaatccgtttgcatctctattaatgaagtggtgtgccacggtatcccggacgatgcgaagctgctgaaagatggcgatatcgttaacattgatgtcaccgtaatcaaagatggtttccacggcgatacctcgaaaatgtttatcgtcggtaagccgaccatcatgggcgaacgtctgtgccgcatcacgcaagaaagcctgtacctggcgctgcgcatggtcaaaccaggcattaacctgcgcgaaatcggtgcggcgattcagaagtttgtcgaagcagaaggcttctccgtcgttcgtgaatattgcggacacggtattggtcgcggcttccatgaagaaccgcaggtgctgcactatgactcccgtgaaaccaacgtcgtactgaaacctgggatgacgttcaccatcgagccaatggtcaacgcgggtaaaaaagagatccgcaccatgaaagatggctggacggtaaaaaccaaagatcgcagcttgtctgcacaatatgagcatactattgtggtgactgataacggctgcgaaattctgacgctacgcaaggatgacaccatcccggcgataatctcgcacgacgaataa

SEQ ID NO: 457738 - DNA, 2673 bp, Shigella boydii
atgaatacccttccagaacagtacgcaaacaccgctctccccaccctgcccggtcaaccgcaaaatccatgcgtctggccccgtgatgaattaaccgtcggtgggataaaagcccatatagatactttccagcgttggctgggtgatgcctttgacaatgggatctctgcagaacagttgattgaggcgcgcaccgagtttatcgaccagctcctgcaacgattatggattgaagcgggattcagccagattgccgacctggcattggtcgccgtcggtggctacggtcgtggcgagctgcatccactttctgacatcgatttactgattttaagccgtaaaaagctcccggacgatcaggcgcaaaaagtgggcgagctgttaacgctgctctgggatgtaaagctggaagtcggtcatagtgtgcgcacgcttgaagagtgcatgctggaagggttatcggatttaaccgtcgccaccaatttaatcgaatcccgcttattaattggcgatgttgcgctcttcctcgaactgcaaaaacatatttttagcgaaggattctggccttccgacaagttctacgcggcgaaagttgaagaacagaaccagcgccatcagcgttaccacggcaccagctacaatcttgaaccagacatcaaaagtagccctggcggcttgcgcgatatccacactctgcaatgggtggcccgccgtcattttggcgcaacatcgctggatgaaatggttgggtttggcttcttaacctcagcggagcgggcggaattaaacgaatgtctgcatatactgtggcgtattcgctttgccctgcatctggtcgtcagccgttacgataatcgcctgttattcgatcgccaacttagcgtcgctcagcgtctgaattacagtggtgaaggcaacgaaccggtcgagcggatgatgaaggattacttccgcgttacacgccgcgtcagtgaactcaaccagatgctgctgcaactgttcgatgaagccatcctcgcccttcctgccgacgaaaaaccacgtccaatcgacgatgagtttcagctacgcggtacgctaatcgacctgcgtgatgaaacactatttatgcgccagccggaagccatcttgcgtatgttctacaccatggtgcgcaacagtgcgatcaccggcatttactccaccacgctgcgccagttacgccatgcccgtcgccatctgcaacaaccgctgtgtaatattccggaagcacgaaaactgtttttgagcattctgcgtcaccccggagcggtgcggcgcgggctattgccaatgcatcgccatagcgtgctcggcgcgtatatgccgcaatggtcgcatatcgtcgggcagatgcagtttgatctgttccacgcctacacggtggatgaacatactatccgcgtgatgctgaaactggagagttttgccagtgaagaaacgcgccagcgccatccgttgtgtgtggacgtctggccgcgcctgccgtcaactgagctgattttcatcgccgcgctgtttcacgatatcgccaaaggacgcggcggcgaccactccattctcggtgctcaggatgtagtgcattttgcagaactccacgggctgaactcacgcgaaacacagctggttgcctggctggttcgccagcacttgctgatgtcggtgacagcacaacgccgcgatattcaggaccctgaagtcatcaagcagtttgccgaagaagttcaaacggaaaatcgtctgcgctatctggtatgcctgacagtggctgacatttgcgccaccaacgaaacgctgtggaatagctggaagcaaagtctgttgcgcgaactctattttgccaccgaaaagcagctacgacgcggaatgcaaaacacgccggatatgcgcgaacgggttcgccatcaccaactccaggcactggcactactgcgcatggataacatcgacgaagaggcgctgcaccaaatttggtcacgctgtcgtgctaactattttgtccgccatagcccaaatcaactggcctggcatgcccgccatttattacagcatgatttaagcaaaccactggtattgcttagcccgcaggctacgcgtggaggcaccgagatttttatctggagcccggaccgcccctatctgtttgccgccgtctgtgccgaattagaccgccgcaatttaagtgttcacgacgcacaaattttcaccactcgcgacggtatggcgatggatacctttatcgtgctggaacccgatggcagcccgctgtccgcagatcgtcatgaggttattcggtttggtctggagcaagtactgacgcaaagtagctggcagccaccgcagccccgtcgccaacccgccaaattacgccattttactgttgaaaccgaagtaacgtttttgccgacccataccgaccgcaaatcgttccttgagcttatcgcgctcgaccagccaggactgctggcgagagtcgggaaaatttttgccgatctgggaatttcgcttcatggtgcccgaattacaaccattggcgagcgagtagaagatttattcataattgccaccgctgaccggcgtgcgcttaataacgagttgcagcaggaagtgcatcagcggttgacagaggccctcaatccaaacgataaagggtga

SEQ ID NO: 457739 - DNA, 825 bp, Shigella boydii
atgcagcagttacagaacattattgaaaccgcttttgaacgccgtgccgagatcacgccagccaacgcagacaccgttacccgcgaagcggtaaatcaggtgatctccctgctggattccggtgcactgcgtgtagcggaaaaaattgacggtcagtgggtgacgcatcagtggttgaaaaaagcggtgctgctctctttccgtattaatgataatcaggtgatcgaaggggcagaaagccgctacttcgacaaagtgccgatgaaattcgccgactacgacgaagcacgtttccagaaagaaggcttccgcgttgtgccaccagcggcggtacgtcagggtgcgtttattgcccgtaacaccgtgctgatgccgtcttacgtcaacatcggcgcatatgttgatgaaggcaccatggttgatacctgggcgaccgtcggttcttgtgcgcagattggtaaaaacgtccacctttccggtggcgtgggcatcggcggcgtgctggaaccgctgcaggctaacccaaccatcattgaagataactgcttcattggcgcacgctctgaagtagttgaaggggtgattgtcgaagaaggttccgtcatttccatgggcgtatacattggtcagagcacccgtatttacgaccgtgaaaccggcgaaatccactacggtcgcgttccggcggggtctgtggttgtttcaggtaatctgccgtcaaaagatggcaaatacagcctctactgtgcggttatcgttaagaaagttgacgcgaaaactcgcggcaaagtcggcattaacgaactgctgcgtaccatcgactaa

SEQ ID NO: 457740 - DNA, 813 bp, Shigella boydii
atgatttcacgccgccgattgttgcaggctactgccgcgacgatagccacgagctcaggtttcggttatatgcattactgggagccaggctggtttgaattaatccgtcaccgcctcgccttttttaaagacaacgcagcaccattcaaaattctttttctggccgatctccattactctcgttttgttcctttaagcctgatttctgacgcgattgctcttggcatagaacaaaagcccgatttgatattactgggcggcgattacgtattatttgatatgccgctgaatttttcggcgtttagtgatgtcctctccccccttgccgaatgtgcgccgacgtttgcctgcttcggcaaccacgatcgccctgttggtacagaaaaaaatcacttaattggcgagacgttgaaatcagtgggcatcacggtgttgtttaaccaggctacggtgatcgccacgccgaacaggcaattcgaactggtaggcaccggtgacttatgggccggacaatgcaaaccacctcccgccagcgaagcaaatctgccaagactgatgctggcacataatcccgacagcaaagaagtcatgcgtgatgaaccctgggatctgatgctgtgcggccatactcacggcgggcaactgcgcgtaccgttggttggtgaaccttttgcccctgtcgaagataaacgttacgtcgccggattaaatgcctttggcgaacgacacatctacacaacccgtggcgtgggcagtttgtatggtttgcgtctgaactgccgcccggaagtaacgatgctggaactggtgtag

SEQ ID NO: 457741 - DNA, 387 bp, Shigella boydii
atgtacgacaatctgaaaagtctgggtattaccaatcctgaagaaattgatcgttacagcctccggcaggaagccaacaacgatattctgaaaatctatttccagaaagacaaaggcgagtttttcgccaagagcgttaagtttaaatatccgcgtcagcgtaaaacggtcgtcgctgatggtgtgggtcagggttataaagaagtccaggaaatcagcccgaatctacggtatatcattgatgagcttgatcaaatctgccagcgtgaccgcagcgaagttgatcttaagcgtaagatcctcgacgacttacgtcacctggagtcagtcgtaaccaataagatcagcgagattgaagccgatctggaaaaactaacgcgtaaataa

SEQ ID NO: 457742 - DNA, 1116 bp, Shigella boydii
gtggcacgtaccatgcgcatcatcgataccaatatcaacgtaatggatgcccgtgggcgaattatcggcagcggcgatcgtgagcgtattggtgaattgcacgaaggtgcattgctggtactttcacagggacgagtcgtcgatatcgatgacgcggtggcacgtcatctgcacggtgtgcggcaagggattaatctaccgttacggctggaaggtgaaattgtcggcgtaattggcctgacaggtgaaccagagaatctgcgtaaatatggcgaactggtctgcatgacggctgaaatgatgctggaacagtcgcggttgatgcacttgttggcgcaggatagccgtttgcgggaggaactggtgatgaacctgattcaggcagaggagaatactcccgcacttactgaatgggcgcaacggctggggatcgatctcaatcaaccgcgagtggtggctattgttgaggtcgacagcggtcagcttggtgtggacagcgcaatggcggagttacaacaactgcaaaacgcgctgactacgcccgagcgtaataatctggtggcgattgtctcgctaaccgaaatggtggtgttgaaaccggcgttgaactcttttgggcgctgggatgcagaagatcatcgtaagcgagttgaacaactgattacccgcatgaaagagtacggccagctgcgttttcgcgtttcactgggcaactattttaccggtcctggcagtattgcccgatcctatcgtacggcgaaaacgacgatggtggtgggtaaacagcggatgccagaaagtcgctgctatttttatcaggatctgatgttacctgtgttactcgacagtttgcgtggcgactggcaggccaacgaactggcgcgaccgctggcgcggctgaaagcgatggacaataacggcttgctgcgacgaacgctggcggcgtggtttcgtcacaatgtgcaaccgctggcaacgtcaaaggcgttgtttattcatcgtaataccctggagtatcggcttaattgtatatcggaactgaccgggcttgatttgggcaattttgatgacaggttgctgctgtatgtggcgttacaactggatgaagagcggtag

SEQ ID NO: 457743 - DNA, 1425 bp, Shigella boydii
atgaaaaaaaccacattagcactgagtgcactggctctgagtttaggtttggcgttatctccgctctctgcaacggcggctgagacttcttcagcaacgacagcccagcagatgccaagccttgcaccgatgctcgaaaaggtgatgccttcagtggtcagcattaacgtagaaggtagcacaaccgttaatacgccgcgtatgccgcgtaatttccagcagttcttcggtgatgattctccgttctgccaggaaggttctccgttccagagctctccgttctgccagggtggccagggcggtaatggtggcggccagcaacagaaattcatggcgctgggttccggcgtcatcattgatgccgataaaggctatgtcgtcaccaacaaccacgttgttgataacgcgacggtgattaaagtccagctgagcgatggccgtaagttcgacgcgaagatggtcggcaaagatccgcgctctgatatcgcgctgatccaaatccagaacccgaaaaacctgaccgcaattaagatggcggattctgatgcactgcgcgtgggtgattacaccgtagcgattggtaacccgtttggtctgggcgagacggtaacttccgggattgtctctgcgctggggcgtagcggcctgaatgctgaaaactacgaaaacttcatccagaccgatgcagcgatcaaccgtggtaactccggtggtgcgctggttaacctgaacggcgaactgatcggtatcaacaccgcgatcctcgcaccggacggcggcaacatcggtatcggttttgcaatcccgagcaacatggtgaaaaacctgacctcgcagatggtggaatacggccaggtgaaacgcggtgagctgggtattatggggactgagctgaactccgaactggcgaaagcgatgaaagttgacgcccagcgcggtgctttcgtaagccaggttctgcctaattcctccgctgcaaaagcgggcattaaagcgggtgatgtgatcacctcactgaacggtaagccgatcagcagctttgccgcactgcgtgctcaggtgggtactatgccggtgggcagcaaactgaccctgggcttactgcgcgacggtaagcaggttaacgtgaacctggaactgcagcagagcagccagaatcaggttgattccagctccatcttcaacggcattgaaggcgctgagatgagcaacaaaggcaaagatcagggcgtggtagtgaacaacgtgaaaacgggcactccggctgcgcagatcggcctgaagaaaggtgatgtgattattggcgcgaaccagcaggcagtgaaaaacatcgctgaactgcgtaaagttctcgacagcaaaccgtctgtgctggcactgaacattcagcgcggcgacagcaccatctacctgttaatgcagtaa

SEQ ID NO: 457744 - DNA, 1518 bp, Shigella boydii
atggcacagattgatttccgaaaaaaaataaactggcatcgtcgttaccgttcaccgcagggcgttaaaaccgaacatgagatcctgcggatcttcgagagcgatcgcgggcgtatcatcaactctccggcaattcgtcgtctgcaacaaaagacccaggtttttccactggagcgcaatgccgccgtgcgcacgcgtcttacccactcgatggaagtccagcaggtggggcgctacatcgccaaagaaattctaagccgtatgaaagagcttaaattactggaagcatacggcctggatgaactgaccggcccctttgaaagcattgttgagatgtcatgcctgatgcacgatatcggcaatccgccgtttggtcattttggcgaagcggcgataaatgattggtttcgccagcgtttgcacccggaagatgccgaaagccagcctctgactgacgatcgctgcagcgtggcggcactacgtttacgggacggggaagaaccgcttaacgagctgcggcgcaagattcgtcaggacttatgtcattttgaggggaatgcacaaggcattcgtctggtgcatacattgatgaggatgaatctcacctgggcacaggttggcggtattttaaaatatacccgtccggcgtggtggcgtggcgaaacgcctgagacacatcactatttaatgaaaaagccgggttattatctttctgaagaagcctatattgcccggttgcgtaaagaacttaatttggcgctttacagtcgttttccattaacgtggattatggaagcagccgacgacatctcctattgtgtggcagaccttgaagatgcggtagagaaaagaatatttaccgttgagcagctttatcatcatttgcacgaagcgtggggccagcatgagaaaggttcgctcttttcgctggtggttgaaaatgcctgggaaaaatcacgctcaaatagtttaagccgcagtacggaagatcagttttttatgtatttacgggtaaacaccctaaataaactggtaccctatgcggcacaacgatttattgataatctgcctgcgattttcgccggaacgtttaatcatgcattattggaagatgccagcgaatgcagcgatcttcttaagctatataaaaatgtcgctgtaaaacatgtgtttagccatccagatgtcgagcagcttgaattgcagggctatcgggtcattagcggattattagagatttatcgtcctttattaagcctgtcgttatccgactttactgaactggtagaaaaagaacgggtgaaacgtttccctattgaatcgcgcttattccacaaactctcgacgcgccatcggctggcctatgtcgaggctgtcagtaaattaccgtcagattatcctgagtttccgctatgggaatattattaccgttgccgcctgctgcaggattatatcagcggtatgaccgacctctatgcgtgggatgaataccgacgtctgatggccgtagaacaataa

SEQ ID NO: 457745 - DNA, 699 bp, Shigella boydii
atgaaaatcggcatcattggtgcaatggaagaagaagttacgctgctgcgtgacaaaatcgaaaatcgtcaaactatcagtctcggcggttgcgaaatctataccggccaactgaatggaaccgaggttgcgcttctgaaatcgggcatcggtaaagtcgctgcggcgctgggtgccactttgctgttggaacactgcaagccagatgtgattattaacaccggttctgccggtggcctggcaccaacgttgaaagtgggcgatatcgttgtctcggacgaagcacgttatcacgacgcggatgtcacggcatttggttatgaatacggtcagttaccaggctgtccggcaggctttaaagctgacgataaactgatcgctgccgctgaggcctgcattgccgaactgaatcttaacgctgtacgtggcctgattgttagcggcgacgctttcatcaacggttctgttggtctggcgaaaatccgccacaacttcccacaggccattgctgtagagatggaagcgacggcaatcgcccatgtctgccacaatttcaacgtcccgtttgttgtcgtacgcgccatctccgacgtggccgatcaacagtctcatcttagcttcgatgagttcctggctgttgccgctaaacagtccagcctgatggttgagtcactggtgcagaaactggcacatggctaa

SEQ ID NO: 457746 - DNA, 795 bp, Shigella boydii
atggctaagtcactgttcagggcgctggtcgccctgtcttttctcgcgccactgtggctcaacgcggcaccgcgcgtcatcacgctttctcccgccaacactgaacttgcctttgccgccgggatcacgccggttggggtcagcagctattccgactatcctccacaagcgcaaaagattgagcaggtttccacctggcaggggatgaatctggaacgcattgtcgcgctgaaacccgatctggtgattgcctggcgtggaggtaatgccgagcggcaggttgaccagctggcttcgctgggaataaaagtgatgtgggtcgatgcgacaagcattgaacaaattgccaatgcgttacgtcaactggccccctggagtccgcaaccggataaggccgaacaagccgcgcaatccctgctggatcagtacgcgcaattgaaagcgcaatatgctggtaaacctaaaaaacgtgtttttctgcaattcggcattaatccgccatttaccagtggaaaagagtcgattcaaaaccaggtactcgaagtttgtggcggagaaaacatctttaaagacagccgggttccttggccgcaagttagccgcgaacaggtgttagcacgctcgccacaggcgattgtcattacaggcggaccggaccaaattcctaaaatcaaacaatactggggtgaacagctcaaaattcccgttattcctctcacgagtgactggtttgacgtgcaagcccacgtattatcctcgctgcacaacagctctgtaatgcgctttcacaggtag

SEQ ID NO: 457747 - DNA, 624 bp, Shigella boydii
atgctcgtctattggctggatatagtcggcacagcggtatttgccatctccggcgttttgttagccggaaaattgcgtatggacccttttggtgttctggtgctgggcgtggttaccgctgtaggcggcgggacaattcgcgacatggcgctggatcacggcccggtattttgggtgaaagatcccaccgatctggtcgttgcaatggtaaccagcatgctgaccatcgtgctggtgcgccagccaagacgcttaccaaaatggatgttgccggtgctggacgccgttggtctggcggtgtttgtcggcattggcgtgaataaagcctttaatgcggaagccggtccgttaatcgcggtttgtatgggcgtcattactggcgttggcggcgggatcattcgtgatgtactggcccgcgaaatccccatgattttacgtacagaaatctacgcaactgcctgtattatcggcggtattgtccacgctacggcttattacacattttccgtaccactggaaacagccagtatgatgggcatggtcgtgacgctattgattcggctggcggctattcgttggcatcttaagctaccgacgtttgcgctggatgagaatgggcgttga

SEQ ID NO: 457748 - DNA, 345 bp, Shigella boydii
atgagtgatgacgtagcactgccgctggagtttaccgacgcagcagccaacaaagttaaaagcctgatcgctgacgaagataacccgaatctgaaattacgcgtgtatatcaccggtggcggttgcagcggcttccagtatggtttcacctttgatgatcaggtgaacgaaggcgatatgaccatcgaaaaacagggcgttggcctggtggttgatccgatgagcctgcaatatctggtcggtggttccgttgactataccgaaggactggaaggttctcgtttcatcgtgaccaacccgaacgcgaaaagcacctgcggttgcggttcttcctttagcatctaa

SEQ ID NO: 457749 - DNA, 1422 bp, Shigella boydii
atgaaaactgatactccctctttagaaacaccgcaggccgcgcgcctgcgacgcagacaactgattcgccaacttcttgagcgcgataaaaccccgttagccattttgtttatggcggcagtcgtcggcacgcttgtcgggctggcagcggttgcttttgacaaaggtgtcgcctggttgcagaaccaacgtatgggggcgctggtacatactgctgataattatccgcttctgttaaccgtcgcttttctctgttcggcggtgctggcgatgttcggctactttttggtgcgcaaatacgcgccggaagcaggtggttcggggatcccggaaattgaaggggcgctggaagatcaacgtcccgttcgctggtggcgtgtgttgccggtgaaattctttggcgggctggggacactcggcggaggcatggtgctggggcgcgaagggccaaccgtgcagatcggcggcaatatcggtcgcatggtactcgatattttccgcctgaaaggtgatgaagctcgccatacgctgctggcaaccggtgctgctgcggggctggctgcggcctttaacgcgccgctggcgggtattttgtttattatcgaagagatgcgtccgcagtttcgctatacgttaatttcgattaaagcggtatttattggcgtcattatgtcgaccattatgtaccggatttttaatcatgaagttgcgttgattgacgtcggtaaactttctgatgcgccgcttaatacgcagtggctttatctgatcctcggtattatttttggcattttcggccctatttttaataaatgggtgctggggatgcaggatttgctgcaccgtgtgcacggcggcaatattaccaaatgggtgctaatgggcggtgcgattggcggtctgtgtggattgctggggtttgtggcaccagcaacgtcgggcggcggttttaacctgattcctatcgctaccgcagggaatttcagcatgggaatgctggtgtttatcttcgtcgcgcgggtcattaccaccttactgtgcttctcttccggcgcgccgggcggtatttttgccccgatgctggcgctgggtactgtgctgggaaccgctttcggaatggttgtcgttgagctgtttccgcaatatcaccttgaggcggggacttttgctattgccggaatgggggcgttactggcggcatctattcgcgcgccgttaacggggatcattttggttctggagatgaccgataactaccagctcattttgccaatgattattaccggtcttggcgcaacactattagcgcaatttaccggcgggaaaccgctatattcggcgattcttgcgcgcacgctggcaaaacaggaagctgagcaactggcgcgaagcaaggccgcatcagccagcgagaatacttga

SEQ ID NO: 457750 - DNA, 1281 bp, Shigella boydii
atgagtaagtctgaaaatctttacagcgcagcgcgcgagctgctccctggcggtgtgaactcccctgttcgcgcctttactggcgtgggcggcactccactgtttatcgaaaaagcggacggcgcttatctgtacgatgttgatggcaaagcctatatcgattatgtcggttcctgggggccgatggtgctgggccataaccatccggctatccgcaatgccgtgattgaagccgccgagcgtggtttaagctttggtgcaccgaccgaaatggaagtgaaaatggcgcaactggtgaccgaactggtcccgaccatggatatggtacgcatggtgaactccggcactgaagcgaccatgagcgccatccgcctggcccgtggttttaccggtcgcgacaaaatcattaaatttgaaggttgttaccacggtcacgctgactgcctgctggtgaaagccggttctggcgcactcacgttaggccagccaaactcgccgggtgttccggcagatttcgccaaacataccttaacctgtacttataacgatctggcttctgtacgcgccgcgtttgagcaatacccgcaagagattgcctgtattatcgtcgagccggtggcaggcaatatgaactgtgttccgccgcagccagagttcctgccaggtctgcgtgcgctgtgcgacgaatttggcacgttgctgatcatcgatgaagtgatgaccggcttccgcgtggcactggctggcgcacaggattattacggcgtagtgccagatttaacctgcctcggcaaaatcatcggcggtggaatgccggtaggcgcattcggtggtcgtcgtgatgtaatggatgcgctggccccgacgggtccggtctatcaggcgggtacgctttccggtaacccgattgcgatggcagcgggtttcgcctgtctgaatgaagtcgcgcagccgggcgttcacgaaacgctggatgagctgacaacacgtctggcagaaggtctgctggaagcggcagaagaagccggaactccgctggtcgttaaccacgttggcggcatgttcggtattttctttaccgacgccgagtccgtgacgtgctatcaggatgtgatggcctgtgacgtggaacgctttaagcgtttcttccatatgatgctggacgaaggtgtttacctggcaccgtcagcgtttgaagcgggctttatgtctgtggcgcacagcatggaagatatcaataacaccatcgatgctgcacgtcgggtatttgcgaagttgtga

SEQ ID NO: 457751 - DNA, 1983 bp, Shigella boydii
gtgagtaaacgaattgcgcttttcccggcgttattgctggcgctgctggtgattgtcgctacggcgctgacctggatgaacttttcgcaggcgctgccgcgtagccagtgggcgcaggccgcctggtcgccggatattgacgtcatcgagcagatgatttttcactacagcttgctgccgcgtctggctatttcgctgctggtgggcgcaggcctggggctggtgggcgtgctgtttcagcaagtgctgcgtaatccgctggcggaaccgacgacacttggcgttgctacaggcgcgcaactggggattaccgtcactacgctctgggcgatcccaggggcgatggcgagtcagtttgctgcgctggcgggcgcttgcgttgttggcttaattgtctttggcgtcgcgtgggggaaacggctttcgccggtaacgctgatcctcgcggggctggtagtgagcctttattgtggggcaatcaatcagttactggttatcttccaccatgaccaactgcaaagcatgttcctgtggagcaccggaacgctgacgcaaaccgactggggcggtgttgagcgtttatggccgcagttgctgggcggtgtgatgctgacgttgctgctacttcgcccgttaaccctgatggggcttgatgatggcgtggcgcgcaatctcgggctggccttgtcgctcgcgcgtctggcggcgctgtcgctggcgattgtcatcagtgcgctgctggtgaacgcggtggggattatcggctttatcgggttgtttgcgccgttgctggcaaaaatgctggggtcgcggcgtctgctgccgcgactgatgctggcgtcgttgattggtgcgctgatcctctggctttccgatcaaatcatcctctggctgactcgcgtgtggatggaagtgtccaccggttcggtcactgcgttgatcggtgcgccgctgctactgtggctgttgccgcgtttacgcagcattagcgcgccggatatgaaggtcaacgatcgtgtcgcggctgaacgccaacatgtgctggcgtttgccctcgcgggcggcgtgctgctgttgatggctgtggtggtggcgctgtcgtttggtcgtgatgcgcacggctggatgtgggcgagcggggcgttgctcgatgatttaatgccctggcgctggccgcgaattatggcggcgctatttgcgggcgtcatgctggcggtggcgggctgtattattcagcgactgaccggcaacccgatggcaagcccggaagtgctggggattagctccggcgcagcgtttggcgtggtactgatgctgtttctggtaccgggtaatgcttttggctggctgttacccgcgggaagtatcggtgccgcggtgacgctgttgattattatgatcgccgccgggcgcggtggattttccccacaccgcatgttactggcggggatggcgttaagtaccgcattcaccatgcttttaatgatgttgcaggcgagtggtgacccgcgaatggcgcaagtgctcacctggatctctggttcgacctacaacgccaccgatgcgcaggtctggcgtaccggaattgtgatggtgattttgctggcgattaccccgctgtaccgccgctggctgaccattttacctctgggcggtgataccgcacgagctgtgggaatggcgctgacgccgacgcgaattgcgctgctgctgttagcggcttgcctgacggcgaccgcgacgatgactattggaccgttgagttttgttggtttaatggcaccgcatattgcgcggatgatgggttttcgacggacgatgccacacatcgtaatttcggcgctggtgggtggtttactgctggtattcgctgactggtgtgggcggatggtgctgtttccattccagatcccggcggggctgctgtcgacctttatcggcgcgccatattttatctatttgttgagaaagcagagccgttaa

SEQ ID NO: 457752 - DNA, 891 bp, Shigella boydii
atgagcggcttacctcttatttcgcgccgtcgactgttaacggcgatggcgctttctccgttgttatggcagatgaataccgcccacgcggcggctattgatcccaatcgtattgtggcgctggagtggttgccggtggaattactgctggcgctcggcatcgtgccttacggcgtggcggataccatcaactatcgcctgtgggtcagcgaaccaccattgccggactcagtgatcgacgtcggtttgcgcacagaacctaaccttgaactgctgaccgaaatgaaaccgtcgtttatggtctggtcggcaggatatggcccttcagcagaaatgctggcacgtattgcgccggggcgtggatttaacttcagcgacggcaaacagccgctggcgatggcgcgtaaatcactgacggaaatggcagatttacttaacctgcaaagcgcagcagaaacgcatttagcgcaatatgaagactttatccgcagcatgaaaccccgctttgtgaagcgtggtgcacgcccgttattgctgacgacgcttatcgatccgcgccatatgttggtcttcggtccaaacagcttgttccaggaaattcttgatgagtacggcatcccaaatgcctggcaaggggaaaccaacttctggggcagtaccgccgtcagtatcgatcgtctggcagcgtataaagacgttgatgtgctctgttttgatcacgacaacagcaaagacatggatgcgctaatggcaaccccgctgtggcaggccatgccgtttgtccgcgctggacgctttcagcgcgtacccgcagtctggttttatggtgcgacgctctcggcaatgcactttgtgcgcgttctggataacgccatcggaggtaaagcgtga

SEQ ID NO: 457753 - DNA, 798 bp, Shigella boydii
atgcaggaatacacgaatcattccgataccacttttgcactgcgtaatatctcctttcgtgtgcccgggcgcacgcttttgcatccgctgtcgttaacctttcctgccgggaaagtgaccggtctgattggtcacaacggttctggtaaatccactctgctcaaaatgcttggccgtcatcagcctccgtcagaaggggagattcttcttgatgcccagccgctggaaagctggagcagcaaagcgtttgcccgcaaagtggcttatttgccgcagcagcttcctccggcagaagggatgaccgtgcgtgaactggtggcgattggtcgttacccgtggcatggcgcgctggggcgctttggggcggcagatcgcgaaaaagtcgaggaagctatctcgctggttggcttaaaaccgctggcgcatcggctggttgatagtctctctggcggcgaacgtcagcgggcgtggatcgccatgctggtggcgcaggatagccgttgtctgttgctcgacgaaccgacctcggcgctggatatcgcccaccaggttgatgtgctggcgctggtgcaccgtttaagtcaggagcgtggcctgacggtcattgccgtgttgcacgatatcaatatggcggcacgctactgtgattatctggtcgccctgcgcggtggtgaaatgattgctcagggaacgcctgcggaaattatgcgcggcgataccctcgaaatgatttatggcatcccgatgggtattttgccgcatccggcgggtgctgcacctgtgagttttgtttattga

SEQ ID NO: 457754 - DNA, 2190 bp, Shigella boydii
atggcgcgttccaaaactgctcagccaaaacactcactgcgtaaaatcgcagttgtagtagccacagcggttagcggcatgtctgtttatgcacaggcagcggttgaactgaaagaagacactatcaccgttaccgctgcacctgcgccgcaagaaagcccatgggggcctgctgcaactattgcggcgaagcactctgctactgcgactaaaacggatacaccaattgaaaaaacgccgcagtctatttcggttgtgacaaatgaagagatgcagatgcatcaatttcagtctgtaaaagaagcattaggttatacacctggcgttacggttagcagtcgtggtgcttctaatacatatgattttgttatcattcgtggtttctcatctgttggtctgaatcaaaataattaccttgatggactaaaacttcagggcaacttttataacgatgctgtgattgatccttacatgctcgagagggttgaactgatgcgtgggccgacgtctgttctctatggaaaaagtaatcctggtgggattatttctatggtgagtaagcgtccgaccactgaacccctgaaagaaattcagtttaaaatggggacggataatctgtttcagaccggattcgatttcagtgatgcactggatgataacggtgagttctcttaccgtttgacgggcctcgctcgctcaacaaacgaacagcagaaaaactctgaatctcagcgttataccattgctccatcattctcatggcgtccagacgacaaaaccaattttactttcctgtcctatttccagaatgaaccagaaacgggttattacggttggttgccgaaagaggggaccgttgagccattgcctaatggtaagcgtctaccgactgacttcaatgaaggtgcatcgaataatacatactcccgtaaccagaaaatggtgggatatagttttgaacatggttttaatgacaccttcaccgtgcgtcagaatctgcgtttcagtgaaatgaaaacctcacagaaaagtgtttatggcacagggattgctggtgatggtcataccctaaaccgcgggacagtggtggataatgagcgtctacaaaactttagcgttgatacccaacttgaaagtaagtttgctacaggtgacgtcgagcatactttgctgacaggggtagacttcatgcggatgcgtaatgatatcaatgccagctttggatccgcaccatccatcgatctttataacaaatatcactctgaatactttgcatttggtagcgcagagccataccagatgaatgaaagcaaacaaacaggtatttatgttcaggatcaggcggaatggaataaatgggtattcactctggggggacgctacgattggtctaagcaagcgaccactgttcgtgaaaactcttatacgccgactgaaggttatattgagcgcaatgatcatcagttcacctggcgcggtggtgtaaattacttattcgataatggtatttcaccttactttagctatagccagtcctttgaaccgagtgctttcgatctgtggagcaacccacgcatttcctataagccatcgaaaggtgaacagtatgaagctggcgtaaaatatgttccgaatgatatgccggtcgttgttacgggcgcagtctatcaattgacgaaaacaaataacctgacagcagacccaacaaacccattagcgcaagtcccagcaggtgagattcgcgctcgtggtgtggaacttgaagcaaaagcggcgttaaatgccaatattaacttgacggcttcttatacctacaccgatgcggaatacaccaaagacaccaatctcaaaggtaaaactccagaacaagtaccggagcatatggcatctctctggggggattataccttcaatgaagggccgctttctggtttaacattgggaacaggtggtcgttttattggttccagctatggtgatccggcaaacacttttaaagtgggtagcgcagctgtaatggatgctgttgtaaaatatgatctggcacgctttggtatggcgggatccagccttgctgtgaacgtcaacaatttgctcgatcgtgagtatgttgccagttgcttccagacttatggctgcttctggggcgcagaacgtcaggtcgttgcaaccgcaaccttccgtttctaa

SEQ ID NO: 457755 - DNA, 2523 bp, Shigella boydii
atggccgggaatgaccgcgagccaattggacgcaaagggaaaccgacgcgtccggtcaaacaaaaggtaagccgtcgtcgttacgaagatgacgatgattacgacgattatgatgactatgaggatgaagaaccgatgccgcgcaaaggtaagggcaaaggcaaagggcgtaagcctcgtggcaaacgcggctggctatggctactgctaaaactggctatcgtttttgccgtgctgatcgccatttacggcgtttatctcgatcaaaaaattcgtagccgtattgatggcaaggtctggcaactgcctgcggcagtttatggccgaatggtcaatcttgagccagatatgaccatcagcaagaacgagatggtgaagctgctggaggcgactcagtatcgtcaggtgtcgaaaatgacccgtcctggcgaatttaccgtgcaggccaacagcattgagatgatccgccgtccgtttgatttcccggacagtaaagaagggcaggtgcgtgcgcgtctgacctttgatggtgatcatctggcgaccatcgtcaatatggagaacaaccgtcagttcggctttttccgtcttgatccgcgtctgatcaccatgatctcctcgccaaacggtgagcaacgtctgtttgtgccgcgcagtggtttccctgatttgctggtggatactttgctggcgacagaagaccgccatttctacgagcatgatgggatcagcctctactcaattgggcgtgcggtgctggcaaacctgaccgcaggtcgcacggtgcagggtgcgagtacgctgacgcaacagctggtgaaaaacctgttcctctccagcgagcgctcttactggcgtaaagcgaacgaagcctacatggcgctgatcatggacgcgcgttacagcaaagaccgtattcttgagctgtatatgaacgaggtgtatctcggtcagagcggcgacaacgaaatccgcggcttcccgctggcaagcttgtattactttggtcgcccggtagaagagctaagcctcgaccagcaggcgctgttagtcggtatggtgaaaggggcgtccatctacaacccgtggcgtaacccgaaactggcgctggagcgacgtaatctggtgctgcgtctgctgcaacagcaacagattattgatcaagaactctatgacatgttgagtgcccgtccgctgggggttcagccgcgcggtggggtgatctctcctcagccagcctttatgcaactggtgcgtcaggagctgcaggcaaaactgggcgataaggtaaaagatctctccggcgtgaagatcttcactacctttgactcggtggcccaggacgcggcagaaaaagccgccgtggaaggcattccggcactgaagaaacagcgtaagttgagcgatcttgaaactgcgattgtgatcgtcgaccgctttagtggtgaagttcgtgcgatggtgggaggttctgagccgcagtttgcgggctacaaccgtgcgatgcaggcgcgtcgttcgattggttcccttgcaaaaccagcgacttatctgacggctttaagccagccgaaaatctatcgcctgaacacgtggattgccgatgcgccaatcgcgctgcgtcagccgaatggccaggtctggtcaccgcagaacgatgaccgtcgttatagcgaaagcggcagagtgatgctggtggatgcgttgacccgttcgatgaacgtgccgacggtaaatctggggatggcgctggggctgcctgcagttacggatacctggatcaaactgggcgtaccgaaagatcagctgcatccggttccggcgatgctgctgggggcgttgaacttaacgccaatcgaagtggcgcaggcgttccagaccatcgccagcggtggtaaccgtgcaccgctttctgcactgcgttcggtaatcgcggaagatggcaaggtgctgtatcagagcttcccgcaggcagaacgcgctgttccggcgcaggcggcgtatctgacactatggaccatgcagcaggtggtacaacgtggtacgggtcgtcagcttggggcgaaatacccgaacctgcatctggcagggaaaacagggactaccaacaataacgtagatacttggtttgcaggcattgacggcagcacggtgaccatcacctgggtaggccgtgataacaaccagccgaccaaactgtatggagccagcggggcaatgtcgatttatcagcgttatctggctaaccagacgccaacgccgctgaatcttgttccgccagaagatattgcagatatgggcgtggactacgacggcaactttgtttgcagcggtggcatgcgtgtcttgccggtctggaccagcgatccgcaatcgctgtgccagcagagcgagatgcagcagcagccgtcaggcaatccgtttgatcagtcttctcagccgcaacagcaacctgctcagcaagagcagaaagacagcgacggtgtagccggttggatcaaggatatgtttggtagtaattaa

SEQ ID NO: 457756 - DNA, 2430 bp, Shigella boydii
gtgtcgtcgttgcccgttgctgccgtcttacctgaattacttaccgctctcgattgtgcgccgcaggtattattaagtgcgccgaccggggccgggaaatcaacctggctgccgctgcaactgctggcgcatcccggcattaacgggaaaattatcctgctggagccgcgtcgtctggcggcgcgtaacgtcgcgcaacggctggaggagctgcttaacgaaaagccaggcgataccgttggctaccggatgcgtgcgcaaaactgcgtcgggccgaatacccgcctggaagtagttaccgaaggcgtgctgacgcggatgatccagcgtgacccggagttgagcggtgttggattggtgatccttgatgaatttcatgagcgtagcttgcaggcggatttggcgttggcgctgttactcgatgtgcaacaaggtctgcgtgatgaccttaaactgctaattatgtcggctacgctggacaacgaccgcttgcagcaaatgctgccagaagcgtccgtcgtcatctcagaagggcgctcgtttccggttgaacgccgttatttaccgctgcccgcgcatcagcgttttgacgatgccgttgcggtagccaccgctgaaatgctgcgtcaggaaagcggatcattactgttatttttacctggcgtcggagaaattcagcgtgtgcaggaacaactggcttcgcgcatcggcagtgatgtattgctctgcccgctgtatggcgcgttgtcgctgaacgatcagcgaaaagcgatcctcccggcaccgcaagggatgcgcaaagtggtgctggcgaccaatattgctgaaaccagtttaaccatcgaaggtattcgtctggtggtggattgtgcccaggagcgtgtggcgcgttttgatccgcgcacggggctaacgcgactgattactcaacgcgttagccaggcatccatgacgcagcgtgccgggcgcgccgggcgtctggagccgggtatctgcctgcatctaatcgccaaagaacaagcagaacgcgctgccgcgcaaagtgaaccggaaatcttacaaagcgatctttccggtttgctgatggaattactgcaatggggatgcagcgatccggcgcagatgagctggctggatcaaccgccaacggtgaatctactggccgcgaaacgcctgttacaaatgctgggggcgctggagggtgaacggcttagtgcgcaggggcaaaaaatggcagcgctgggtaacgatccgcgtttagcggcaatgctggttagcgcgaagaacgacgacgaagctgctaccgcggcaaaaattgccgccattctcgaagagccgccacggatgggcaatagtgacctgggcgtggcgttttcgcgcaatcaaccagcctggcagcaacgtagtcagcaactgttaaaacgcttaaacgtacgtggcggtgaggcagacagttcgcttatcgcgccgctacttgccggggcgtttgccgatcgcattgctcgtcgccgtgggcaagatggacgctatcaacgggcaaacggcatgggagcgatgctcgatgccgacgacgcgctaagccgccacgaatggttgatcgcaccgttattattgcagggcagcgcctcgccggatgcgcggattttactggcgctgccggtcgatattgatgagttagtacaacgctgcccgcagctggtacagcagtctgacactgtggagtgggatgacgcgcaaggtacgctgaaagcctggcgtcggctgcaaatcggtctgctgacggtgaaagtgcagccgctggcgaaaccctcggaagacgagttgcatcaggcgatgcttaatggcatccgtgataaaggtttaagcgtgctcaactggacggcggaagcggaacagctacgcttgcgtttgttatgcgccgcaaagtggttgccggaatatgactggccagcggttgatgatgaaagtttattggcgacgctggaaacgtggctgctgccacatatgactggcgtacattcactacgcggcctgaaatcactcgacatttatcaggcactacgcggattacttgattggggaatgcagcaacgtctggatagtgaattgcctgcgcattacactgtgccgacgggaagccggatcgctattcgttatcatgaagataacccgcccgcgctggcggtgagaatgcaagagatgtttggcgaggccaccaatccgacgatcgcccaggggcgcgtgccgctggtgctggagttgctttcacctgcccaaaggccattacaaatcacacgagatttgagcgccttctggaaaggagcgtaccgtgaggtgcaaaaagagatgaaagggcgttatcccaaacatgtctggccggacgacccggcaaatactgcaccgacgcgacggacgaaaaagtattcgtaa

SEQ ID NO: 457757 - DNA, 531 bp, Shigella boydii
atgtctgaaccgcaacgtctgttctttgctatcgacttacctgcagaaatccgcgaacagattatccactggcgcgccacacacttcccacctgaggcgggacgtccggtcgccgccgataatttgcatctgactctggcatttttaggcgaagtgagcgccgagaaagagaaggcgctttctcttttagccggacggattcgtcaacctggtttcacactcacgcttgatgacgccggacaatggctgcgttcgcgtgtggtgtggttagggatgcgtcagccgccacgcggcttaatccagctggcgaatatgctccgttcacaggctgcccgcagcggttgttttcaaagcaatcgtccgtttcatccacatattaccttattgcgcgacgccagcgaggcggtgacaatcccgccgccaggttttaactggtcttatgcggtgacggagttcaccctttacgcctcctcgtttgcccgtggacgcacacgctacacgccgctaaaacgctgggcgctaatgcaataa

SEQ ID NO: 457758 - DNA, 705 bp, Shigella boydii
atggaattctctccccctctacagcgcgcgacgctaattcagcgttacaaacgttttttagccgatgtgatcacacccgatggtcgcgaattaacgctacactgcccgaatacgggtgcgatgaccggttgtgcaacgcgtggcgataccgtctggtattcgacttcagacaacaccaaacggaaatacccacacacctgggaactaactcaaagccagagcggcgcatttatttgcgtcaatacgctttgggctaacaggttgacgaaagaggctatccttaatgaatcaatttcagaactgtcaggctatagctcgctgaaaagcgaagtaaaatatggcgcagaacgcagccgtattgactttatgttgcaggcggattcgcgtccagactgctatattgaagtgaaatcggttacgttagcggagaacgaacagggatattttcccgatgcggtcactgaacgaggtcagaaacaccttcgggagttgatgaacgtagcggctgaaggcctgcgtgcggttatctttttcgccgtgctgcattcagccattacacggttttcacccgcgcgccacatcgatgagaaatacgcgcaactattgtcagaagctcaacagaggggggtagaaattctggcttacaaagcggaaatttctgctgaaagcatggctcttaaaaaatcactgccggttacattgtag

SEQ ID NO: 457759 - DNA, 456 bp, Shigella boydii
atgcaagaagggcaaaaccgtaaaacatcgtccctgagtattctcgccatcgctggggtggaaccatatcaggagaagccgggcgaagagtatatgaatgaagcccagctggcgcacttccgtcgtattctggaagcatggcgtaatcaactcagggatgaagtcgatcgcaccgttacacatatgcaggatgaagcagccaacttcccggacccggtagaccgtgcagcccaggaagaagagttcagcctcgaactgcgtaaccgcgatcgcgagcgtaagctgatcaaaaagatcgagaagacgctgaaaaaagtggaagacgaagatttcggctactgcgaatcctgcggtgttgaaattggtattcgccgtctggaagcgcgcccgacagccgatctgtgcatcgactgcaaaacgctggctgaaattcgcgaaaaacagatggctggctaa

SEQ ID NO: 457760 - DNA, 927 bp, Shigella boydii
atgctcccgccttattttttgttcaaagagatgacagacacacagtatattggccgcttcgccccctctccttccggcgagcttcattttggctctctgatcgccgcgctcggcagctatttgcaggctcgcgcccggcaaggtcgctggctggtacgcatagaagatatcgacccgcctcgtgaagttcccggtgccgcagaaactatcctgcgccagctggaacattacggtctgcactgggacggcgatgttctctggcaatcgcaacgtcacgacgcctatcgtgaagcactcgcctggttacatgaacaaggactaagttattactgcacctgtacgcgtgcgcgtattcaaagcattgtcggtatttacgacggtcattgccgggtgttgcatcatggaccagacaacgccgcagtgcgtatccgccagcagcatccggtcacgcaatttactgaccagctgcgcggcattattcacgccgacgaaaaactggcacgggaagattttatcattcatcgccgtgatgggttgttcgcctacaacctggctgttgtggttgatgatcatttccagggcgttacagaaatagtgcgtggggctgatctgattgaaccaacagtaaggcaaatctcgctgtaccagctttttggctggaaagtgccagattacattcatctgccgctggcgcttaatccacaaggcgctaaactttccaagcagaatcatgcgcctgcgttgccgaaaggcgatccacgcccggtactaatcgcggcacttcaatttctggggcagctggcagaagcacactggcaggatttcagcgtcgagcaaatccttcagtcagccgtcaaaaactggacgctgaccgccgtgcccgagtcggcaattgtaaattcaacattctcaaatgcgtcatgctga

SEQ ID NO: 457761 - DNA, 1365 bp, Shigella boydii
gtgctaagccgcgaggaaagcgaggctgaacaggcagtcgcccgtccacaggtgacggtgatcccgcgtgagcagcatgctatttcccgcaaagatatcagtgaaaatgccctgaaggtaatgtacaggctcaataaagcgggatacgaagcctggctggttggcggcggcgtgcgcgacctgttacttggcaaaaagccgaaagattttgacgtaaccactaacgccacgcctgagcaggtgcgcaaactgttccgtaactgccgccttgtgggtcgccgtttccgtctggctcatgtgatgtttggcccggagattatcgaagttgcaaccttccgtggacaccacgaaggtaacgtcagcgaccgcacgacctcccaacgcgggcaaaacggcatgttgctgcgcgacaacattttcggctccatcgaagaagacgcccagcgccgcgatttcactatcaacagcctgtattacagcgtagcggattttaccgtccgtgattacgttggcggcatgaaggatctgaaggacggcgttatccgtctgattggtaacccggaaacgcgctaccgtgaagatccggtacgtatgctgcgcgcggtacgttttgccgccaaattgggtatgcgcatcagcccggaaaccgcagaaccgatccctcgcctcgctaccctgctgaacgatatcccaccggcacgcctgtttgaagaatcgcttaaactgctacaagcgggctacggttacgaaacctataagctgttgtgtgaatatcatctgttccagccgctgttcccgaccattacccgctacttcacggaaaatggcgacagcccgatggagcggatcattgaacaggtgctgaagaataccgatacgcgtatccataacgatatgcgcgtgaacccggcgttcttgtttgccgccatgttctggtacccactgctggagacggcacagaagatcgcccaggaaagcggcctgacctatcacgacgctttcgcgctggcgatgaacgacgtgctggacgaagcctgccgttcactggcaatcccgaaacgtctgacgacgttaacccgcgatatctggcagttgcagttgcgtatgtcccgtcgtcagggtaaacgcgcatggaaactgctggagcatcctaagttccgtgcggcttatgacctgttggccttgcgagctgaagttgaacgtaacgctgaactgcagcgtctggtgaaatggtggggtgagttccaggtttccgcgccaccagatcaaaaagggatgcttaacgagttggatgaagagccgtcaccgcgtcgccgtactcgtcgtccacgcaaacgcgcaccgcgtcgtgagggtaccgcatga

SEQ ID NO: 457762 - DNA, 480 bp, Shigella boydii
atgacagtggcgtatattgccataggcagcaatctggcctctccgctggagcaggtcaatgctgccctgaaagcattaggcgatatccctgaaagccacattcttgccgtttcttcgttttaccgcactccaccgctggggccgcaagatcaacccgattacctcaacgcctccgtggcgcttgaaacttcgctcgccccggaagagttactcaaccatacacagcgcatagaactgcaacaggatcgtgttcgtaaagctgaacgctggggaccacgcacgctggatctcgatatcatgctgtttggtaatgaagtgataaataccgaacgcctgaccgttccgcactacgatatgaagaatcgtggatttatgctgtggccgctgtttgagattgcaccggagctggcgtttcctgatggggagacgttgcgtgaagtcttacatacaagagcatttgacgaattaagcaaatggtaa

SEQ ID NO: 457763 - DNA, 375 bp, Shigella boydii
atgtctaaaaaattaggttttgccctgtctggtcttatgctggcaatggttgcaggtactgcttctgctgatatggatggtggtcagttaaatatcagtggtctggttgttgataacacctgtgaaacccgcgttgacggcggtaataaagatggtctgatcctgctgcaaactgcaactgttggtgaaatcgatgctggcgtgctgaatgacaccgttggcgctaaagccaaacctttcagcatcaccgttgactgcagcaaagcaaatccgaatccaggtagtacagctaaaatgaccttcggttctgttttctttggtaatagcaaaggaacgctgaacaacgacatgtcggtaatgctgccaacttactga

SEQ ID NO: 457764 - DNA, 738 bp, Shigella boydii
atggaaagccctactccacagcctgctcttggttcggcgaccttcatggaaggatgcaaagacagtttaccgattgttattagttatattccggtggcctttgcgttcggtctgaatgcgacccgtctgggattctctcctctcgaaagcgtttttttctcctgcatcatttatgcaggcgcgagccagttcgtcattaccgcgatgctggcagccgggagtagtttgtgggttgctgcactgaccgtcatggcaatggatgttcgccatgtgttgtatggcccgtcactgcgtagccgtattattcagcgtctgcaaaaatcgaaaaccgccctgtgggcatttggcctgacggatgaggtttttgccgctgcaaccgcaaaactggtacgcaataatcgccgctggagcgagaactggatgatcggcattgccttcagttcatggtcatcgtgggtatttggtacggtaataggggcattctccggcagcggcttgctgcaaggttatcccgccgttgaagctgcattaggttttatgcttccggcactctttatgagtttcctgctcgcctctttccagcgcaaacaatctctttgcgttaccgcagcgttagttggtgcccttgcaggcgtaacgctattttctattcccgtcgccattctggcaggcattgtctgtggctgcctcactgcgttaatccaggcattctggcaaggagcgcccgatgagctatga

SEQ ID NO: 457765 - DNA, 336 bp, Shigella boydii
atgagctatgaggttctgctgcttgggttactggttggcgtggcgaattattgcttccgctatttgccgctgcgcctgcgtgtgggtaatgcccgcccaaccaaacgtggcgcggtaggtattttgctcgacaccattggcatcgcctcgatatgcgctctgctggttgtctctaccgcaccagaagtgatgcacgatacacgccgtttcgtgcccacgctggtcggcttcgcggtactgggtgccagtttctataaaacacgcagcattatcatcccaacactgcttagtgcgctggcctatgggctcgcctggaaagtgatggcgattatataa

SEQ ID NO: 457766 - DNA, 531 bp, Shigella boydii
atggatagttcgtttacgcccattgaacaaatgctaaaatttcgcgccagccgccacgaagattttccttatcaggagatccttctgactcgtctttgcatgcacatgcaaagcaagctgctggagaaccgcaataaaatgctgaaggctcaggggattaacgagacgttgtttatggcgttgattacgctggagtctcaggaaaaccacagtattcagccttctgaattaagttgtgctcttggatcatcccgtaccaacgcgacgcgtattgccgatgaactggaaaaacgcggttggatcgaacgtcgtgaaagcgataacgatcgccgctgcctgcatctgcaattaacggaaaaaggtcacgagtttttgcgcgaggttttaccaccgcagcataactgcctgcatcaactctggtccgcgctcagcacaacagaaaaagatcagctcgagcaaatcacccgcaaattgctctcccgtctcgaccagatggaacaagacggtgtggttctcgaagcgatgagctaa

SEQ ID NO: 457767 - DNA, 1173 bp, Shigella boydii
atgagcgcaaatgcggagactcaaaccccgcagcaaccggtaaagaagagcggcaaacgtaagcgtctgctcctccttctcaccttgctctttataattattgccgtagcgatagggatttattggtttttggtactgcgtcatttcgaagaaaccgatgacgcatacgtggcagggaatcagattcaaattatgtctcaggtgtctggcagcgtgacgaaagtctgggccgataacaccgattttgtaaaagaaggcgatgttctggtcactctcgacccgacagatgctcgccaggcgtttgaaaaagccaaaactgcactggcttccagcgttcgccaaacctaccagctgatgattaacagcaaacagttacaggcgaatattgaggtgcaaaaaatcgccctcgcgaaagcacaaagcgactacaaccgccgtgtgccgctgggcaatgccaacctgattggtcgcgaagagctgcaacacgcccgcgacgccgtcaccagtgcccaggcgcaactggacgtcgctattcaacaatacaatgccaatcaggcgatgattctggggactaaactggaagatcagcctgccgtgcaacaggctgccaccgaagtacgtaacgcctggctggcgctggagcgtacccgtattgtcagtccgatgaccgcttatgtctcccgccgcgcggtacagcctggggcgcaaattagcccaacgacgccgctgatggcggtcgttccagccaccaatatgtgggtggatgccaactttaaagagacgcagattgccaatatgcgtatcggtcagccggtcactatcaccacggatatttacggcgatgatgtgaaatacaccggtaaagtggttggtctggatatgggcacaggtagcgcattctcactgcttccggcgcaaaatgcgaccggtaactggatcaaagtcgttcagcgtctacctgtgcgtatcgaactggaccagaaacagctggagcaatactcgctgcgcattggtttgtccacgctggtgagcgtcaataccactaaccgtgacggtcaggtactggcaaataaagtacgttcaacaccggtcgcggtaagtaccgcgcgtgaaatcagcctggcacctgtcaataaactgatcgacgatatcgtaaaagctaacgctggctaa

SEQ ID NO: 457768 - DNA, 1548 bp, Shigella boydii
atgcaacagcaaaaaccgctggaaggcgcgcaactggtcattatgacgattgcgctgtcactggcgacattcatgcaggtgctggactccaccattgctaacgtggcgatccccactatcgccgggaatctgggctcatcgctcagccagggaacgtgggtaatcacttctttcggggtggcgaatgccatctcgatcccgcttaccggctggctggcaaagcgcgtcggggaagtgaaactgttcctttggtccaccatcgcctttgctattgcgtcgtgggcgtgtggtgtctccagcagcctgaatatgctgatcttcttccgtgtgattcaggggattgtcgctgggccgttgatcccactttcgcaaagtcttttgctgaataattacccgccagccaaacgctcaatcgcgctggcgttgtggtcgatgacggtgattgtcgcgccaatttgcggcccaatcctcggcggttatatcagcgataattaccactggggctggatattcttcatcaacgtgccaattggcgtggcggtggtgttgatgacactgcaaaccctgcgcggacgcgaaacccgcaccgaacggcggcggattgatgccgtggggctggcactgctggttattggtatcggtagcctgcagattatgctcgaccgcggtaaagagctggactggttttcatcacaggaaattatcattcttaccgtggtggcggtggtggcggtggtggctatctgcttcctgattgtctgggagctgaccgacgataacccgatagtcgatctgtcgttgtttaagtcgcgcaacttcaccatcggctgcttgtgtatcagcctcgcgtatatgctctacttcggcgcgattgttctgctgccgcagttgttgcaggaggtctacggttacacggcgacctgggcaggtttggcctctgcgccggtagggattattccggtgatcctgtcgccgattatcggccgcttcgcgcataaactggatatgcggcggctggtaaccttcagctttattatgtatgtcgtctgcttctactggcgtgcctatacctttgaaccaggtatggattttggcgcgtcggcctggccgcagtttatccagggggttgcggtggcctgcttctttatgccgctgaccaccattacgctgtctggtttgccaccggaacgactggcggcggcatcgagcctctctaactttacgcgaacgctggcggggtctatcggcacgtcgataaccacgaccatgtggaccaaccgcgagtcgatgcaccatgcgcagttgactgagtcggtaaacccgttcaacccgaatgcccaggcgatgtacagtcaactggaagggcttgggatgacgcaacagcaggcatcaggctggattgcccagcagatcactaatcaggggctgattatttccgccaatgagatcttctggatgtcagccgggatattcctcgtcctgctggggctggtgtggtttgctaaaccgccctttggcgcaggtggcggcggaggtggtgcgcactaa

SEQ ID NO: 457769 - DNA, 516 bp, Shigella boydii
atgccgttgttagatagcttcacagtcgatcatacccggatggaagcgcctgcagttcgggtggcgaaaacaatgaacaccccgcatggcgacgcaatcaccgtgttcgatctgcgcttctgcgtgccgaacaaagaagtgatgccagaaagagggagccatactctggagcacctgtttgctggttttatgcgtaaccatcttaacggtaatggtgtagagattatcgatatctcgccaatgggctgccgcaccggtttttatatgagtctgattggtacgccagatgagcagcgtgttgctgatgcctggaaagcggcaatggaagacgtgctgaaagtgcaggatcagaatcagatcccggagctgaacgtctaccagtgtggcacttaccagatgcactcgttgcaggaagcgcaggatattgcgcgtagcattctggaacgtgacgtacgcatcaacagcaacgaagaactggcactgccgaaagagaagttgcaggaactgcacatttag

SEQ ID NO: 457770 - DNA, 1557 bp, Shigella boydii
ttgatcccggacgtatcacaggcgctggcctggctggaaaaacatcctcaggcgttaaaggggatacagcgtgggctggagcgcgaaactttgcgtgttaatgctgatggcacactggcaacaacaggtcatcctgaagcattaggttccgcactgacgcacaaatggattactaccgattttgcggaagcattgctggaattcattacaccagtggatggtgatattgaacatatgttgacctttatgcgcgatctgcatcgttatacggcgcgcaatatgggcgatgagcggatgtggccgttaagtatgccatgctacatcgcagaaggtcaggacatcgaactggcacagtacggcacttctaacaccggacgctttaaaacgctgtatcgtgaagggctgaaaaatcgctacggcgcgctgatgcaaaccatttccggcgtgcactacaatttctctttgccaatggcattctggcaagcgaagtgcggtgatatctcgggcactgatgccaaagagaaaatttctgcgggctatttccgcgttatccgcaattactatcgtttcggttgggtcattccttatctgtttggtgcatctccggcgattttttcttctttcctgcaaggaaaaccaacgtcgctgccgtttgagaaaaccgagtgcggtatgtattacctgccgtatgcgacctctcttcgtttgagcgatctcggctataccaataaatcgcaaagcaatcttggtattaccttcaacgatctttacgagtacgtagcgggccttaaacaggcaatcaaaacgccatcggaagagtacgcgaagattggtattgagaaagacggtaagaggctgcaaatcaatagcaacgtgctgcaaattgaaaacgaactgtatgcgccgattcgtccaaaacgcgttacccgcagcggcgagtcaccttctgatgcgctgttacgtggcggcattgaatatattgaagtgcgttcgctggacatcaacccgttctcgccgattggtgtagatgaacagcaggtgcgattcctcgacctgtttatggtctggtgtgcgctggctgatgcaccggaaatgagcagtagcgaacttgcctgtacacgcgttaactggaaccgggtgatcctcgaaggtcgcaaaccgggcctgacgctgggtatcggctgcgaaaccgcgcagttcccgttaccgcaggtgggtaaagatctgttccgcgatctgaaacgcgtcgcgcaaacgttggatagcattaacggcggcgaagcgtatcagaaagtgtgtgatgaactggtcgcctgcttcgataatcccgatctgactttctctgcccgtatcttaaggtctatgattgatactggtattggcggaacaggcaaagcgtttgcagaagcctaccgtaatctgctgcgtgaagagccgttggaaattctgcgcgaagaggattttgtagccgagcgcgaggcatctgaacgccgtcagcaggaaatggaaaccgctgataccgaaccgtttgcggtgtggctggaaaaacacgcctga

SEQ ID NO: 457771 - DNA, 429 bp, Shigella boydii
gtgagtgaagcgttatcgcttttctcgttgtttgcccgtagttttctcagcgctacactattacccggcaactccgaagtcgtgctggtggcaatgttgctttccgggatcagttatccctgggttttagttttaacagcaacaatgggtaatagccttggagggttaactaacgttatccttgggcgtttctttccattgcgtaaaacatcgcgctggcaagagaaagctactggctggctgaaacgctatggtgcagtcacgctattattaagctggatgcccgtggttggcgatttactgtgtctgttagcgggatggatgcgcatctcgtggggaccggtaatcttttttttgtgccttggtaaagcgttacgctatgttgcagttgcagcagctaccgttcagggcatgatgtggtggcactaa

SEQ ID NO: 457772 - DNA, 564 bp, Shigella boydii
atgtacgagcgttatgcaggtttaatttttgatatggatggcacaatcctggatacggagcctacgcaccgtaaagcgtggcgcgaagtattagggcactacggtcttcagtacgatgttcaggcaatgattgcgcttaatggatcgcccacctggcgtattgctcaggcaattattgagctgaatcaggccgatctcgacccgcatgcgttagcgcgtgaaaaaacagaagcagtaagaagtatgctgctggatagtgtcgagccgcttcctcttgttgaagtggtgaaaagttggcatggtcgtcgcccaatggctgtaggaacggggagtgaaagcgccatcgctgaggcattgctggcgcacctgggattacgccgttattttgacgccgtcgtcgctgctgatcacgtcaaacaccataaacccgcgccagacacatttttgtgcgcgcagcgtatgggcgtgcaaccgacgcagtgtgtggtctttgaagatgccgatttcggtattcaggcggcccgtgcagcaggcatggacgccgtggatgttcgcttgctgtga

SEQ ID NO: 457773 - DNA, 186 bp, Shigella boydii
atgctgattctgactcgtcgagttggtgagaccctcatgattggggatgaggtcaccgtgacagttttaggggtgaagggcaaccaggtacgtattggcgtaaatgccccgaaggaagtttctgttcaccgtgaagagatctaccagcgtatccaggctgaaaaatcccagcagtccagttactaa

SEQ ID NO: 457774 - DNA, 2631 bp, Shigella boydii
atgagcaagagcaccgctgagatccgtcaggcgtttctcgactttttccatagtaagggacatcaggtagttgccagcagctccctggtaccccataacgacccaactttgttgtttaccaacgccgggatgaatcagttcaaggatgtgttccttgggctcgacaagcgtaattattcccgcgctaccacttcccaacgctgcgtgcgtgcgggtggtaaacacaacgacctggaaaacgtcggttacaccgcgcgtcaccataccttcttcgaaatgctgggcaacttcagcttcggcgactatttcaaacacgatgccattcagtttgcatgggaactgctgaccagcgaaaaatggtttgccctgccgaaagagcgtctgtgggttaccgtctatgaaagcgacgacgaagcctacgaaatctgggaaaaagaagtcgggatcccgcgcgaacgtattattcgcatcggcgataacaaaggtgcgccatacgcatctgacaacttctggcagatgggtgacactggtccgtgcggcccgtgcaccgaaatcttctacgatcacggcgaccacatttggggtggccctccgggaagtccggaagaagacggcgaccgctacattgagatctggaacatcgtcttcatgcagttcaaccgccaggcagatggcacgatggaaccgctgccgaagccgtctgtagataccggtatgggtctggagcgtattgctgcggtgctgcaacacgttaactctaactatgacatcgacctgttccgcacgttgatccaggcggtagcgaaagtcactggcgcgaccgatctgagcaataaatcgctgcgcgtaatcgctgaccacattcgttcttgtgcgttcctgatcgcggatggcgtaatgccgtccaatgaaaaccgtggttatgtactgcgtcgtatcattcgtcgcgcagtgcgtcacggcaatatgctcggcgcgaaagaaaccttcttctacaaactggttggtccgctgatcgacgttatgggctctgcgggtgaagacctgaaacgccagcaggcgcaggttgagcaggtgctgaagactgaagaagagcagtttgcccgtactctggagcgcggtctggcgttgctggatgaagagctggcaaaactttctggtgatacgctggatggtgaaacggctttccgtctgtacgacacctatggcttcccggttgacctgacggctgatgtttgtcgtgagcgcaacatcaaagttgacgaagctggttttgaagcagcaatggaagagcagcgtcgtcgcgcgcgcgaagccagcggctttggtgccgattacaacgcaatgatccgtgttgatagtgcatctgaatttaaaggctatgaccatctggaactgaacggcaaagtgaccgcgctgtttgttgatggtaaagcggttgatgccatcaatgcaggccaggaagctgtggtcgtgctagatcaaacaccattctatgcggaatccggcggtcaggttggtgataaaggcgaactgaaaggcgctaacttctccttcgcggtggaagatacgcagaaatacggccaggcgattggtcacatcggtaaacttgctgcgggttctctgaaagtgggcgacgctgtgcaggctgatgttgatgaggctcgtcgcgcccgtattcgtctgaatcactccgcaacgcacctgatgcacgctgcgctgcgccaggttctggggactcatgtatcgcagaaaggttcactggttaacgacaaggtgctgcgcttcgacttctcacacaacgaagcgatgaaaccggaagagattcgtgtggtcgaagacctggtgaacgcacagattcgtcgcaatttgccgatcgaaaccaacatcatggatctcgaagcggcgaaagcgaaaggtgcgatggcgctgttcggcgagaagtatgatgagcgtgtacgcgtgctgagcatgggcgatttctccaccgagctgtgtggcggtactcacgccagccgcactggtgatattggtctgttccgcatcatctctgaatcgggtactgctgcaggcgttcgtcgtatcgaagcggtaaccggagaaggcgctatcaccaccgttcatgcagacagcgatcgcttaagcgaagtcgcgcatctgctgaaaggcgatagcaataatctggcggataaagtgcgctcagtactggaacgtacgcgtcagttagaaaaagaactacaacagcttaaagaacaagctgccgcacaggagagcgcaaatctttccagtaaggcaattgatgttaatggtgttaagctgttggttagcgagcttagcggtgttgagccgaaaatgttgcgtaccatggttgacgatttaaaaaatcagctggggtcgacaattatcgtgctggcaacggtagccgaaggtaaggtttctctgattgcaggcgtatctaaggacgtcacagatcgtgtgaaagcaggggaactgattggtatggtcgctcagcaggtgggcggcaagggtggtggacgtcctgacatggcgcaagccggtggtacggatgctgcggccttacctgcagcgttagccagtgtgaaaggctgggtcagcgcgaaattgcaataa

SEQ ID NO: 457775 - DNA, 501 bp, Shigella boydii
atgacagaatcaacgtcccgtcgcccggcatatgctcgcctgttggatcgtgcggtacacattctggcggtgcgcgatcacagtgagcaagaactgcgacgtaaactcgcggcaccgattatgggcaaaaatggcccagaagagattgatgctacggcagaagattacgagcgcgttattgcctggtgccatgaacatggctatctcgatgacagccgatttgttgcgcgctttatcgccagccgtagccgcaaaggttatggacctgcacgtattcgtcaggaactgaatcagaaaggtatttcccgcgaagcgacagaaaaagcgatgcgtgaatgtgacatcgactggtgcgcactggcgcgcgatcaggcgacgcgaaaatatggtgaacctttgccaactgtcttttcagaaaaagttaagatccagcgttttctgctctatcgtggctatctgatggaagatatccaggatatttggcgaaattttgccgactga

SEQ ID NO: 457776 - DNA, 1062 bp, Shigella boydii
atggctatcgacgaaaacaaacagaaagcgttggcggcagcactgggccagattgagaaacaatttggtaaaggctccatcatgcgcctgggtgaagaccgttccatggatgtggaaaccatctctaccggttcgctttcactggatatcgcgcttggggcaggtggtctgccgatgggccgtatcgtcgaaatctacggaccggaatcttccggtaaaaccacgctgacgctgcaggtgatcgccgcagcgcagcgtgaaggtaaaacctgtgcgtttatcgatgctgaacacgcgctggacccaatctacgcacgtaaactgggcgtcgatatcgacaacctgctgtgctcccagccggacaccggcgagcaggcactggaaatctgtgacgccctggcgcgttctggtgcagtagacgttatcgtcgttgactccgtggcggcactgacgccgaaagcggaaatcgaaggcgaaatcggcgactctcacatgggccttgcggcacgtatgatgagccaggcgatgcgtaagctggcgggtaacctgaagcagtccaacacgctgctgatcttcatcaaccagatccgtatgaaaattggtgtgatgttcggtaacccggaaaccactaccggtggtaacgcgctgaaattctacgcctctgttcgtctcgacatccgtcgtatcggcgcggtgaaagagggcgaaaacgtggtgggtagcgaaacccgcgtgaaagtggtgaagaacaaaatcgctgcaccgtttaaacaggctgaatttcagatcctctacggcgaaggtatcaacttctacggcgaactggttgacctgggcgtaaaagagaagctgatcgagaaagcaggcgcgtggtacagctacaaaggtgagaagatcggtcagggtaaagcgaatgcaactgcctggctgaaagataacccggaaaccgcgaaagagatcgagaagaaagtacgtgagttgctgctgagcaacccgaactcaacgccggatttctctgtagatgacagcgaaggcgtagcagaaactaacgaagatttttaa

SEQ ID NO: 457777 - DNA, 498 bp, Shigella boydii
atgactgacagtgaactgatgcagttaagtgaacaggttgggcaggcgctgaaagcccgtggcgcaaccgtaacaactgccgagtcttgtaccggtggttgggtagcgaaagtgattaccgatattgccgatagctccgcctggtttgaacgcggatttgtcacctacagtaacgaagccaaagcgcagatgatcggcgtacgcgaagagacgctggcgcagcatggcgcggtgagtgaacccgtcgtggtggaaatggtgataggcgcactgaaagcggctcgtgctgattatgccgtgtctattagtggtatcgccgggccggatggcggcagtgaagagaagcctgtcggcaccgtctggtttgcttttgccactgcccgcggtgaaggcattacccggcgggaatgcttcagcggcgaccgtgatgcggtgcgtcgtcaggctactgcgtatgcattgcagaccttgtggcaacaatttctacaaaacacttga

SEQ ID NO: 457778 - DNA, 1191 bp, Shigella boydii
ttgagttatgtaaagtccgtatcgggcagtgactaccgcttccttgtgcggggcgtgatgctttaccatacttgcccctggttgaatctgttaaatggccccctcatgttcaagcgtcgttatgtaacattgcttcccctttttgtgttgcttgccgcctgtagcagcaagccaaaacctactgagactgaaacgaccaccggaacgccgtctggcggcttcctgcttgagccgcagcacaatgtgatgcagatgggcggcgatttcgctaataacccgaatgcccagcagttcatcgacaaaatggtgaacaaacacggtttcgatcgtcagcagttgcaggaaattctctcccaggcgaagcgtctggattcggtactgcggctgatggataaccaggcaccaaccacatcggtgaaaccgccatcaggtccgaacggcgcatggctgcgttatcgcaaaaaatttattacgccggacaacgtgcagaacggtgtggttttctggaatcagtatgaagatgcgttgaatcgcgcgtggcaggtgtatggcgtaccgccggaaattatcgtcgggattatcggcgttgaaacccgctgggggcgcgtgatggggaaaactcgcatcctcgatgcgctggcaacgctgtcatttaactacccacgccgcgcggagtatttctctggcgagctggaaaccttcctgctgatggcgcgcgacgagcaggacgatccgctcaatctgaaaggttcctttgccggggcgatgggctacggacagtttatgccgtcgtcttacaaacaatatgcggtagatttcagcggcgacgggcatatcaacctgtgggatccggttgatgcgatcggtagcgtggcgaactatttcaaagcgcacggctgggtgaaaggcgatcaggtcgcggtaatggcaaacggtcaggctccaggcttgccaaatggcttcaaaaccaggtacagcatttcgcagcttgccacggcaggtttaacgccacagcagccgctgggcaaccatcaacaagccagcctgctgcgtctggatgtcggtaccggttaccagtactggtacggtctgccgaacttctacaccattacccgttataaccacagcacccattacgcaatggcggtctggcagttaggacaagccgtggcgctggcgcgcgtgcagtaa

SEQ ID NO: 457779 - DNA, 564 bp, Shigella boydii
atgatagaaaccattactcatggtgcagagtggtttatcgggctgttccaaaagggcggagaggtgtttaccgggatggtgaccggcattcttccgctgttgattagcctgctggttatcatgaacgcactgattaattttatcggtcagcatcgtattgaacgttttgctcaacgttgcgccggtaaccctgtttcccgttacctgctgctaccgtgcattggcacgtttgtcttttgcaatccgatgaccttaagcctgggtcgctttatgccggaaaagtacaaacccagctactacgcggcggcctcttatagctgccactcaatgaatggcctctttccccatatcaaccctggcgaactgtttgtttatcttggcattgccagcggtctgacaacgctgaacctgccacttggcccactggcggtgagctatctgctggttggtctggtcaccaacttctttcgcggctgggtgaccgatctgaccaccgccatttttgagaaaaagatgggcattcaacttgaacaaaaagttcacctggcaggagcaacatcatga

SEQ ID NO: 457780 - DNA, 960 bp, Shigella boydii
atgacgcgtattcggatcgaaaaaggaacgggtggctggggcggcccgcttgagctggaagccacgccgggcaaaaaaatcgtctatatcaccgccggtacccggcctgcgattgttgacaaactggcacaacttactggctggcaggctattgacggatttaaagaaggtgaacccgcggaggcggaaattggtgtcgcggtaatcgactgtggcggcacattacgctgcggcatctatccgaaacgacgtattcccaccattaatatccactcgacgggcaagtccggtccgctggcgcagtacattgtggaagatatttatgtctctggcgtaaaagaagaaaacatcactgtagtgggtgatgcgacaccacaaccctcttccgtgggacgtgactatgacaccagtaagaaaatcaccgaacaaagcgatggtttactggcgaaggtgggaatgggcatggggtccgccgttgcggtgctgtttcaatctggtcgtgacaccatcgacactgtattaaaaaccattctgccgtttatggcattcgtctcggcgctcattggcatcattatggcttctggccttggtgactggattgcccacggtcttgctccgctggcgagccatccactgggtctggtcatgctggcgctcatctgctccttcccactgctttcacctttcctcggcccaggcgcagttatcgcacaggttatcggcgtattgattggcgtgcagattggtctcggcaatattccgccgcatctggctttaccggcactgtttgccatcaacgcgcaggcggcctgcgacttcatcccggtcggtttgtcgctggcggaagcccgtcaggacacggttcgcgtcggtgtcccttctgtactggtgagccgctttttaaccggcgcaccgactgtactgatcgcctggtttgtctccggttttatctatcaatag

SEQ ID NO: 457781 - DNA, 372 bp, Shigella boydii
atgaccgttatttataagaccaccatcacccgtatcggcgcgagtgccactgacgccctcagcgaccagatgctcatcacctttcgtgaaggcgcgccagcggacctcgaagagtattgcttcattcattgccacggcgagttgaaaggtgcactccatcccggtttgcaatttacgctcgggcagcatcgctatccggtgaccgctgttggcagtgtggcggaagacaaccttcgcgaactgggtcatgtcaccctgcgcttcgatggtttaaacgaagcggaatttccgggcactgtccatgtggcaggccctgtacccgacgatatcgcgccgggatcggttttgaagtttgaatctgttaaggagtaa

SEQ ID NO: 457782 - DNA, 780 bp, Shigella boydii
atgaatcaggttgccgttgtcatcggtggtgggcaaaccttaggcgcgttcctgtgccacggtctggttgccgaggggtatcgcgtcgcggttgtcgatattcagagcgacaaagccgcaaatgtggcacaagaaattaacgccgaatatggtgaaagtatggcgtacggttttggtgctgacgccactagcgagcaaagcgttctggcgctctctcgtggggtagatgaaatctttggtcgcgtggatttgctggtctatagcgccggaatagcaaaagcagcctttatcagcgacttccagctcggcgattttgaccgttcgctacaagtgaatctggtgggttatttcctgtgtgcccgtgaattttcgcgtttgatgatccgcgacgggattcagggtcgcattattcagatcaactcgaaatccggcaaagtgggcagcaaacacaactctggctacagcgcagcgaaatttggtggcgtcgggctgactcaatcactggcgctggatctggcggagtacggcattacggtgcattcactgatgctcggtaacctgctgaaatcgccgatgttccagtcactgttgccacaatacgcgaccaagctgggtatcaaaccggatcaagtcgagcagtattacatcgacaaagtaccgctcaaacgcggctgcgattatcaagatgtgctgaatatgctgctgttctacgccagtcctaaggcgtcgtactgcaccggacagtcgatcaatgtcaccggcggtcaggtgatgttctga

SEQ ID NO: 457783 - DNA, 360 bp, Shigella boydii
atggtatccgcactcatcaccgtcgccgttatcgcctggtgtgcgcaactggccttaggcggctggcaaatttctcgttttaaccgtgccttcgacacactatgccagcaagggcgggttggcgtgggccgttccagcgggcgctttaaaccgcgggtcgtggtcgccatcgcgctggacgatcagcagcgcatcgtcgacaccttgtttatgaaaggactgaccgtcttcgcccgaccgcaaaaaattcccgcaattaccggtatgcatgcgggtgatttacagcccgatgtgatctttccccatgatccactatcacagaatgctctatcattggcgcttaaactgaaacgtggataa

SEQ ID NO: 457784 - DNA, 774 bp, Shigella boydii
atgaaacctcgtcagcgtcaggccgccattctggagtatctgcaaaagcagggtaaatgctcggttgaagaattggcgcaatactttgacaccacaggcacaaccattcgcaaagatctggtcattctggaacatgccggaaccgtcattcgtacttatggcggagtggtgttgaataaagaggaatccgatccgcctatcgatcataaaacactcatcaacacccacaagaaagagctgattgcagaagctgccgttagttttatccatgatggcgattcgatcattcttgatgctggcagtaccgttttgcagatggttcccctgctctcgcgctttaataacatcacggtgatgaccaacagcctgcatatcgtcaatgcgctatccgaactggataacgaacaaactatcctgatgccaggcggaacgtttcgtaaaaaatcggcctcatttcacggacagctggcagagaatgccttcgaacatttcagtttcgataaattgtttatgggcaccgacggcatcgatctcaatgcgggcgtaaccaccttcaacgaggtttataccgtcagtaaggcaatgtgcaatgccgcgcgcgaagtgattttgatggcggactcatcaaagtttggccgtaaaagccccaacgtagtttgcagtcttgaaagcgtcgataagctgattaccgacgcaggtatcgatccggcgtttcgtcaggcgctggaagagaaagggatcgatgtgatcataaccggagagagcaatgagtga

SEQ ID NO: 457785 - DNA, 258 bp, Shigella boydii
atgagtgaagcactactgaacgcgggacgtcagacgttaatgctggagttgcaggaagcaagccgtttaccggaacgtctgggcgatgattttgttcgcgccgccaatatcatcctgcactgcgaaggcaaagtggtggtttcgggaattggcaaatcgggccacattggtaagaaaatcgccgcaacacttgccagtaccggcacaccggcttttttgtccatccggcagaagcactgcacggcgatctggggatga

SEQ ID NO: 457786 - DNA, 711 bp, Shigella boydii
atgattgaaagccgcgatgtgatgctgtttatctcttactccggtggcgcgaaggaactggatctgattattccgcgtctggaagataaatctatcgcgctgctggcgatgaccggcaaaccgacgtcaccgctgggcctggcggcaaaagcggtgctggatatctccgtagaacgcgaagcctgcccgatgcaccttgcgccgacctccagcaccgtcaataccctgatgatgggtgacgcgctggcgatggcggtcatgcaggcgcgcggatttaatgaagaagattttgcccgctcccacccagccggggcacagggcgctcgcttgctgaataaagtgcatcatctgatgcgccgtgacgatgccatcccacaggtggcgttaaccgccagcgtgatggatgcgatgctggaactcagccgcaccggtctggggctggtggcggtatgtgacgctcaacaacaggtacaaggcgtctttaccgacggcgatttacgtcgctggctggtaggcggcggcgcactcaccacgccagttaatgaagcgatgacgacaggcggcaccacgttacaggcgcaaagtcgcgccatcgacgccaaagagatcctgatgaagcgcaaaatcactgccgcaccggtggtggatgaaaacggcaaactcaccggcgcaattaacctgcaggatttctatcaggccgggattatttaa

SEQ ID NO: 457787 - DNA, 1515 bp, Shigella boydii
atgagtttttccgttgatgtgctggcgaatatcgccatcgaattgcagcgtgggattggtcatcaggatcgttttcagcgcctgatcaccacgctacgtcaggtgctggagtgcgatgcgtctgcgttgctacgttacgattcgcggcagtttattccgcttgccatcgacggtctggcaaagggtgtactcggtagacgctttgcgctggaagggcatccacggctggaagcgattgcccgcgccggggatgtggtgcgctttcccgcagacagcgaattgcccgatccctatgacggtttgattcctgggcaggagagtctgaaggttcacgcctgcgttggtctgccattgtttgccgggcaaaacctgatcggcgcactgacgctcgacgggatgcagcccgatcagttcgatgttttcagcgacgaagagctacggctgattgctgcgctggcggcgggagcgttaagcaatgcgttgctgattgaacaactggaaagccagaatatgatgccaggcgatgccacgccgtttgaagcggtgaaacagacgcagatgattggcttgtcccctggcatgacgcaactgaaaaaagagattgagattgtggcggcgtccgatctcaacgtcctgatcagcggtgagacgggaaccggtaaggagctggtggcgaaagcgattcatgaagcctcgccacgggcggtgaatccgctggtctatctcaactgtgctgcactgccggaaagtgtggcggaaagtgagttgttcgggcatgtgaaaggagcgtttactggcgctatcagtaaccgcagcgggaagtttgaaatggcggataacggcactctgtttctggatgagatcggcgagttgtcgttggcattgcaggccaagctgctgagggtgttgcagtatggcgatattcagcgcgttggcgatgaccgtagtttgcgggtcgatgtgcgcgtgctggcggcgactaaccgcgacttacgcgaagaggtgctggcagggcgatttcgcgctgacttgtttcatcgcctgagcgtgtttccactttcggtgccgccgctgcgtgagcggggcgatgatgtcattctgctggcggggtatttctgcgaacagtgtcgtttgcggctggggctctcccgcgtggtattaagtgccggagcgcgaaatttactgcaacactatcgttttccggggaacgtgcgcgaactggaacatgctattcatcgggcggtagtgctggcgagagccacccgcaacggcgatgaagtgattcttgaggcgcaacattttgcttttcctgaggtgacgttgccgccgccagaagcggcggcggtgcccgttgttaagcaaaacctgcgtgaagcgacagaagcgttccagcgtgaaactattcgccaggcactggcacaaaatcatcataactgggctgcctgcgcgcggatgctggaaaccgacgtcgccaacctgcatcggctggcgaaacgtctgggaatgaagaattaa

SEQ ID NO: 457788 - DNA, 1440 bp, Shigella boydii
atgtctattgtggtgaaaaataacattcattggggtggtcaacgtgactgggaagtgcgtgattttcacggtacggaatataaaacgctgcgcggcagcagttacaacagctacctcatccgcgaagaaaaaaacgtgctgatcgacaccgtcgaccataaattcagccgcgaatttgtgcagaacctgcgtaatgaaatcgatctggcggatatcgattacatcgtgattaaccatgcagaagaggaccacgctggggcgctgaccgaactgatggcgcaaattcccgatacgccgatttactgtactgccaacgctatcgactcgataaatggtcatcaccatcatccggagtggaattttaatgtggtgaaaactggtgacacgctggatatcggcaacggcaaacagctcatttttgtcgaaacgccaatgctgcactggccggacagcatgatgacttacctgacaggcgacgcggtgctgttcagtaacgatgctttcggtcagcactactgcgacgagcatctgttcaacgatgaagtggatcagacggagcttttcgagcagtgccagcgttactacgccaatatcctgacgccgttcagccgcctggtaacaccgaaaattaccgagatcctgggctttaacttaccagtcgatatgatagcgacctctcacggcgtggtatggcgcgataacccgacgcaaattgtcgagctgtacctgaaatgggcggctgattatcaggaagacagaatcaccattttctacgacaccatgtcgaataacacccgcatgatggctgacgctatcgcccaggggattgcggaaaccgacccacgcgtggcggtgaaaattttcaacgtcgcccgaagcgataaaaacgaaatcctgaccaatgtcttccgctcaaaaggcgtgctggtcggcacttcgacgatgaataacgtgatgatgccgaaaatcgccgggctggtggaggagatgactggtttacgcttccgtaacaaacgcgccagtgctttcggctctcacggctggagcggcggtgcggtggatcgtctttccacgcgcctgcaggatgcgggtttcgaaatgtcgcttagcctgaaagcgaaatggcgaccagaccaggacgctctggagttatgccgtgaacacggtcgcgaaatcgcccgtcagtgggcgctcgagccgctgccgcagagcacggtgaataaggtagtcaaagaagaaacctctgccaccacgacggctgacctcggcccacggatgcagtgcagcgtctgccagtggatttacgatccggcaaaaggcgagccaatgcaggacgttgcgccaggaacgccgtggagtgaagtcccggataacttcctctgcccggaatgctccctcggcaaagacgtctttgaagaactggcatcggaggcaaaatga

SEQ ID NO: 457789 - DNA, 1134 bp, Shigella boydii
atgagtaacggcattgtgatcatcggttcgggcttcgccgcccgccaactggtgaaaaatattcgcaaacaggacgccactattccattaaccctgattgccgccgacagcatggatgagtacaacaaacctgacctcagccatgttatcagtcaggggcaacgtgccgatgaccttacccgccagacggcgggtgaatttgccgagcagtttaatctgcacctgtttccacaaacctgggtgacggatatcgatgccgaagcccgtgtggtgaaaagccagaataatcagtggcaatacgacaagctagtactggcaaccggtgccagtgcctttgtcccgcctgtgcctgggcgtgagttaatgctgacgttaaatagtcagcaagagtatcgcgcctgtgaaacgcaactgcgggatgcccgacgcgtgttgattgttggcggtggtttgattggtagcgaactggcgatggatttttgtcgtgcaggcaaagcggtcacgctaatcgacaacgctgccagtattctggcgtcgttaatgccaccggaagtaagcagccgcttgcagcatcggttgacggaaatgggcgttcatctgctgttgaaatctcagttacaggggctggaaaaaacggattctggcattctggcaacgctggaccaccagcgtagtatcgaagtggatgcggtaattgccgccaccggactgcgcccggaaacagccctggcacgacgcgccgggctgacgattaatcgcggcgtttgcgtcgatagttatctgcaaaccagtaatgacgatatttatgcgctgggcgattacgcggaaatcaacggtcaggtactgccattcctgcagccgattcaacttagcgcgatggtgctggcaaaaaatcttctcggcaataacacgccgctgaaactaccgacgatgctggtgaaaatcaaaacgccggaattaccgctgcatctggcaggcgaaacccagcgtcaggatttacgctggcaaattaataccgaacgccagggaatggtggctcgcggtgttgacgatgctgaccagcttcgcgcctttgtggtcagtgaggatcggatgaaagaggcatttggattgttgaaaacattgccgatgtag

SEQ ID NO: 457790 - DNA, 2253 bp, Shigella boydii
atggcaaaaaacacatcttgcggtgtccaactgcgtattcgtggcaaagtgcagggcgtcggttttcgtccgtttgtctggcagctggcacagcaattaaatcttcacggcgatgtctgtaatgacggcgatggcgtagaagtccggctgcgggaagacccggaaacgtttcttgttcaattgcatcagcactgcccgccgctggcgcgtattgatagcgtcgagcgtgagccgtacatctggtcacaactgcccactgagttcaccatccgccagagcgcgggaggtgccatgaatacgcaaattgtcccggatgccgctacttgccctgcttgccttgccgaaatgaataccccaggcgaacggcgttatcgttatccgtttatcaactgtacccactgcggcccgcgtttcaccattattcgcgccatgccttacgaccgcccgtttaccgtgatggcggcgtttccgttgtgtccggcttgtgacaaagagtaccgcgacccgctcgatcgtcgcttccacgcccagccggtggcctgcccagagtgtggcccgcatcttgaatgggtaagtcatggtgaacatgcagaacaagaggcggcattacaggcggctatcgcacagttaaaaatgggcaacattgtcgccatcaaagggattggcggatttcatcttgcctgcgatgcacgtaacagtaacgcggtggcgacacttcgggcgcgcaaacatcgcccggcgaaaccgctggcggtcatgttgccagtggctgacggtttaccagacgctgcgcgccagttgcttaccacgcccgccgcgccgattgtgctggtggataaaaaatacgttcctgagctttgtgatgatatcgcccctgaccttaacgaagtcggggtaatgttgcctgcgaacccgctccagcatttgctgttacaggaactgcaatgcccgctggtgatgacctccggcaacctgagcggtaaaccaccagctatcagcaacgaacaggcgctggcggatttgcagggcattgccgacggattcttgatacataaccgcgacatcgtgcagcggatggatgattcggtggtgcgcgaaagcggcgaaatgctgcgccgttcgcgggggtatgtgccggatgcgctggctttgcctccgggctttaaaaatgttccgcctgtgctgtgtctcggagcggatctgaaaaataccttctgcctggtgcgcggtgaacaagcggtgttgagtcagcatctgggcgatttaagtgacgatggcatccagatgcagtggcgcgaagcgttacgcctgatgcaaaacatctacgattttaccccgaaatacgttgtgcatgacgcgcatccgggctatgtctccagccagtgggcgcgtgaaatgaatctgccgacgcaaacggtactgcatcatcatgcccatgcagcggcgtgtctggcagagcatcagtggccgctggatggcggtgatgtcattgctttgacgctcgacggtatcggtatggggaagaacggcgctttgtggggcggcgagtgcctgcgggtgaactatcgcgaatgtgagcacctgggcggcttgcctgcagtggcgcttccgggtggcgatttggcagcgaagcagccgtggcgaaacctgctggcgcagtgcctgcgctttgtgccggagtggcagaattaccctgaaacagcaagtgtgcaacagcaaaactggagcgtgctggcgcgggccattgagcgtggaattaacgcgccgctggcgtcatcgtgtgggcggttgttcgatgcagtggcggcggcactgggctgtgcgccagccacgttaagttatgaaggtgaagcggcttgtgctctggaggcgctcgcagcctcatgccacggagtgacgcatccggtgacgatgccgctggtggacaatcaactggatctcgccgctttctggcagcagtggctgaactggcaggcacaggttaatcaacgcgcgtgggcgtttcatgatgcgctggcgcagggttttgccgcgttgatgcgtgagcaggccacgatgcgtggtatcactacgctggtatttagcggcggggttattcataaccgtttgctgcgtgcacgtctgtcgcattatctcgctgatttcacattgctctttcctcagagtttaccggcgggtgatggcggtttgtctctggggcagggggttattgctgcggcgcgttggttagcgggtgaagtccagaacggataa

SEQ ID NO: 457791 - DNA, 528 bp, Shigella boydii
atgaaccgtttcatcattgctgacgcgagtaaatgtattggttgccgtacctgtgaagtggcgtgcgtggtttctcatcaggaaaatcaggactgtgcatcgctgaccccggaaacatttttaccgcgtatccatgtcattaaaggtgtgaacatttccacggcgacagtttgccgtcagtgtgaagatgcaccgtgcgctaacgtctgcccgaatggtgctatcagccgtgataaagggtttgttcatgtgatgcaggaacgttgcattggttgcaaaacctgcgttgtggcttgcccgtatggcgcgatggaagtggtggtacgtccggtgattcgcaacagcggcgcggggctgaatgtacgggctgacaaagccgaagccaataaatgtgacctgtgcaaccatcgtgaagacggcccggcgtgtatggcggcttgcccgactcatgcgctgatttgtgtcgatcgtaataaacttgaacaactgagtgcagaaaaacgccgccgtacggcgctgatgttctaa

SEQ ID NO: 457792 - DNA, 1014 bp, Shigella boydii
atgatgacgacgatgctggaagtggcgaagcgcgccggggtttcaaaagcgaccgtttcccgcgtgctttcaggtaatggctacgtcagccaggagactaaagatcgcgtgtttcaggcggtagaagagagcggttaccgcccaaacttgctggcgcgcaatctgtcggcgaagagtactcagacgctggggctggtagtgaccaacacgctttaccacggcatttattttagtgaattactctttcatgccgcgcgaatggcggaagagaaagggcggcagttgctattggcagatggtaaacacagcgccgaagaagagcgccaggcgattcagtatctgctggatttgcgctgcgacgccattatgatttacccgcgttttttaagcgtggatgagatcgatgacatcattgacgcgcacagtcagccgataatggtgcttaatcgccgcctgcgcaaaaacagcagccatagcgtctggtgcgatcataaacagaccagctttaatgccgtggcagagttgataaacgccggacatcaggagattgctttccttaccggctcgatggattcccccaccagcattgaacgtcttgctgggtataaagacgcgctggcgcagcatggtattgcgctcaatgaaaaacttatcgctaacggtaaatggacgcccgccagcggggccgaaggggtagaaacgttgctcgaacgtggggctaaatttagcgcgttagttgccagtaacgacgatatggcgataggtgcgatgaaagcgttgcacgagcgcggcgtagcggtgccagagcaggtgtcagttatcggattcgatgatatcgcaattgccccctatatcgttccggcgctctccagcgtaaaaattccggtgactgagatgattcaggaaattattggacggctgatttttatgctcgatggcggggatttctcaccgccgaaaaccttcagcggaaaactgatccaccgcgactcactcattgctctttcgcgataa

SEQ ID NO: 457793 - DNA, 1401 bp, Shigella boydii
atggccaaaaattatgcggcgctggcacgctcggtgatagcggcactgggcggcgttgataacatctcggcggtcacgcactgtatgacgcgtttgcgctttgttatcaaagatgaccagcttatcgacagcccgacgttaaaaaccatccccggcgtgctcggcgtggtacgtagtgacaaccagtgtcaggtgattatcggcaataccgtttcacaagcctttcaggaagtcgtcagcctgctgccgggagatatgcagcccgcacagcccgtgggtaaacccaaactcacgctgcgtcgcattggtgcggggatcctcgatgcgctgatcggcaccatgtcaccgctgatcccggcgattatcggcggatcgatggtcaaactgctggcgatgatcctcgagatgagcggcgtgctgacaaaaggatcgccgaccttaaccattctgaatgtgattggtgacggtgctttcttcttcctgccgctgatggtcgcggcatctgccgccatcaaatttaaaaccaatatgtcgctggcgattgccatcgcgggtgtgctggtacatccgagttttattgaactgatggcgaaagcggcccagggtgaacatgtcgaatttgccctgattccggtcaccgcggtgaaatacacctacacagcgatcccggcgctggtgatgacttggtgcctgtcatatatcgaacgctgggtggatcgcattacaccggcggtgaccaaaaacttcctcaagccaatgctgattgtgttgattgccgcaccgctggcaatcctgctgattggcccgattggtatctggatcggtagcgccatttcggcgctggtttacaccattcatggttatctgggctggctttcagtcgccattatgggcgcgctgtggcctctgctggtaatgaccgggatgcaccgcgtctttacgccaaccatcattcagaccattgccgaaaccggcaaagaagggatggtcatgccgtcagagatcggcgctaacctgtcgctgggcggttcatcactggcggtggcgtggaaaacgaaaaaaccggaactgcgccagacggcgctggctgcggcggcatcagccattatggcggggatttccgaaccggcgttatacggcgtggcgatccgcctgaaacgtccgcttatcgccagtcttatcagcggttttatttgcggcgcggttgccggtatggcggggcttgccagccactcaatggcagcgccggggctatttaccagcgtgcaattcttcgatccggcgaatccaatgagcatcgtctgggtgttcgcggtcatggcgctggcggtggtgctgtcgtttatcctcacactgttgctcggctttgaggatattcctgttgaggaagcggctgcctag

SEQ ID NO: 457794 - DNA, 1425 bp, Shigella boydii
atgtcagtatttccagaaggttttttatggggcggcgcgcttgccgccaaccaatctgaaggtgcgttccgtgaaggcggaaaagggctgaccaccgtcgatatgatcccacacggcgagcatcgaatggcggtgaaactggggctggaaaaacgttttcagttgcgcgatgacgagttttatcccagccatgaggcgacggatttttatcatcgttataaagaagatatcgccctgatggcagagatgggattcaaggttttccgtacctcaattgcctggagccgtctctttccgcagggcgatgaaatcacgcccaatcagcagggcattgctttttatcgttctgtctttgaagagtgtaaaaagtacggtatcgaaccgctggtcacgttgtgccacttcgatgtgccgatgcatctggtcaccgaatatggctcctggcgtaaccgcaagctggtggagtttttcagccgctacgccagaacctgctttgaagcatttgatggtctggtgaaatactggctaaccttcaatgaaatcaacattatgttgcatagcccgttctccagcgcgggtctggtgtttgaagaaggtgaaaatcaggatcaggtgaaatatcaggccgcgcatcaccagctggttgccagtgcgctagccgccaaaatcgcccatgaggttaacccgcaaaatcaggtgggctgtatgctggcgggcggcaacttctacccttacagctgcaaaccggaagatgtctgggcggcgctggagaaagatcgggaaaacctgttttttatcgatgtgcaggcgcgcggcgcgtatccggcttactctgcccgcgtatttcgcgaaaaaggggtaaccatagataaagcgctgggcgatgatgagatcctgaaaaacaccgtcgattttgtctctttcagctattacgcctcgcgctgcgcctcggcggagatgaacgccaacaacagcagtgcggcgaacgtggtgaaatcgctgcgtaacccgtatctgcaagtgagcgactggggctggggaattgatccactcggtctgcgtatcaccatgaatatgatgtacgatcgttatcagaagccgctgtttctggtggaaaacggcctcggcgcaaaagatgaacttgctgccaatggcgagattaacgatgactatcgcatcagctatttacgcgaacatatccgcgcaatgggcgaagcgattgcagatggcattccgctgatgggctacaccacatggggctgtattgatttagtttccgcctctacgggtgaaatgagcaaacgctacggttttgtctacgtagaccgtgacgacgcaggcaacggcacgctgacgcgcacacgtaagaaatcgttctggtggtataaaaaagtgattgccagtaatggggaagatttagagtaa

SEQ ID NO: 457795 - DNA, 471 bp, Shigella boydii
gtgactgacgttttactctgtgttggcaatagcatgatgggcgatgatggcgcaggtccgctgctggcggaaaagtgcgccgccgcgccgaaaggtaactgggtggtgattgacggcggtagtgcaccggaaaacgacatcgtcgccatccgtgaactgcgccctacgcggttactgattgtcgacgccacggatatggggctaaaccccggcgagatccgcatcatcgacccggatgatatcgccgagatgtttatgatgactacccataacatgcctctgaactatcttatcgaccagttgaaagaagatattggcgaagtgattttcctcggcatacagccggatatcgtcggcttttactacccgatgacccagccgattaaagatgcggtagaaaccgtttatcaacgactggaaggctgggaagggaatggcggcttcgcgcagttagcggtggaagaagagtag

SEQ ID NO: 457796 - DNA, 411 bp, Shigella boydii
atgagtgaaaaggtggtgttcagtcaactgagccgtaaatttattgatgagaacgatgccacgcccgccgaggcgcagcaggtggtctattacagcctggcgattggtcaccaccttggggttatcgattgcctggaagcggcgctcacctgcccgtgggatgaatatctggcatggattgccactctggaggcgggcagtgaagcccgccgcaaaatggaaggcgtaccgaagtacggtgagatcgtcatcgacattaaccatgtgccgatgctggccaacgcattcgataaagcccgggcagcgcaaacttcgcagcagcaggaatggagtacaatgctgttaagtatgctgcatgatattcatcaggaaaacgccatctatttgatggtgaggagattgcgtgactga

SEQ ID NO: 457797 - DNA, 411 bp, Shigella boydii
gtgcaatgcgatcccctgcgctgcgtgtggggcggtacggataaaattgtccctgtggatgtttatatccctggctgcccgccaacgcctgccgccacgctgtacggctttgcaatggcgctcggcctgctggagcagaaaattcacgcccgtgggccgggtgaactggatgaacaaccggcggagatcctgcatggcgatatggtgcagccgctgcgcgtgaaagtggatcgcgaagcacgccgcctggcgggttatcgttacggtcgtcagattgccgatgacttcctgacacagttagggcagggcgaagaacaggttgcacgctggctggaagcggaaaacgatccgcgtctgaacgagattgtcagccatctgaatcatgttgtagaagaggtgcgtatccgatga

SEQ ID NO: 457798 - DNA, 312 bp, Shigella boydii
atgagcaatttattaggcccccgtgacgccaacggcattccggtcccgatgacggtggatgaatccatcgccagcatgaaggcgtcgttactgaaaaaaatcaaacgttctgcctatgtttaccgcgtggactgcggcggctgcaacggctgcgaaatcgaaattttcgccactttatcgccgctgtttgatgcagaacgcttcggcattaaagtcgttccttcaccgcgtcatgcggatattttactgtttaccggcgcggtcacccgtgcaatgcgatcccctgcgctgcgtgtggggcggtacggataa

SEQ ID NO: 457799 - DNA, 543 bp, Shigella boydii
atgtttacctttatcaaaaaagttatcaaaaccggcacggcgacctcgtcttatccgctggagccgattgcggttgataaaaacttccgtggtaagccagagcagaacccgcagcagtgcatcggctgcgcggcctgcgtcaatgcctgcccgtcaaacgccttaacggttgaaactgacctcgccacaggagagctggcctgggagtttaatctcgggcgctgcatcttctgtggacgctgcgaagaagtttgcccgacggcggcgattaagctgtcgcaagagtacgaactggcggtgtggaagaaagaagacttcctgcaacagtctcgcttcgcgctgtgcaactgtcgcgtctgcaatcatcctttcgccgtccagaaagagatcgactacgccattgcgctgcttaagcacaacggcgacagccgcgcggaaaaccaccgcgaaagctttgagacttgcccggaatgtaagcgccagaaatgccaggtgccgtccgaccgtattgaactgactcgccatatgaaagaggccatctga

SEQ ID NO: 457800 - DNA, 1710 bp, Shigella boydii
atgtctgaagaaaaattaggtcaacattatctcgccgcgctgaatgaggcatttccgggcgtcgtgctggaccacgcctggcagaccaaagatcagctgactatcaccgtaaaggtgaactatctgccggaagtggtggagtttctctactacaagcaggggggctggctgtcggtgctttttggtaacgacgaacgcaaactgaatggtcattacgccgtttattacgtgctgtcgatggagaaggggactaagtgctgggtaacggttcgcgtcgaagttgatgccaacaaaccggagtatccgtccgtgacgccgcgcgttccggcggcggtgtggggcgagcgcgaagtgcgcgatatgtacggtttgattccggttggtctgccggatgaacgccgtctggtgctgccggatgactggccggatgaactttatccgctgcgtaaagacagcatggattatcgtcagcgtccggcaccgaccaccgatgctgaaacctacgagttcatcaacgaactgggcgacaagaaaaacaacgtcgtgccgattggtccgctgcacgtcacttctgacgaaccgggccacttccgtctgttcgtcgatggcgaaaacattatcgacgcagactaccgcttgttctatgtccatcgcggtatggaaaaactggcggaaacccgcatgggttataacgaagtgaccttcctctctgaccgtgtgtgcgggatctgcggcttcgcccacagcaccgcctacaccacgtcggtggaaaacgcgatgggtattcaggtgccagaacgtgcgcagatgatccgcgccattctgctggaggtggaacgcctgcactcgcatctgctcaacctcggcctcgcctgccactttaccggcttcgactccggctttatgcagttcttccgcgtgcgtgaaacctccatgaaaatggccgagatcctcaccggtgcgcgtaaaacctacggcctgaacctgatcggcgggattcgtcgcgatctgttgaaagatgacatgatccagacccgccagctggcgcaacagatgcgtcgtgaagtgcaggagctggtggatgtgctgctgagcacaccgaacatggaacagcgcaccatcggcattggtcgtctggacccggaaattgcccgcgatttcagtaacgttggcccgatggtccgcgccagcggacacgctcgcgatacccgcgctgatcacccgtttgttggttatggcctgctgccaatggaagtccacagcgagcagggctgcgacgttatttcgcgtctgaaagtgcgtatcaacgaagtctataccgcgctgaacatgatcgactacggtctggataacctgccgggtggcccgctgatggtggaaggctttacctacattccgcaccgtttcgcgctgggctttgccgaagcgccgcgcggtgatgatatccactggagcatgactggcgacaaccagaagctgtaccgctggcgctgccgtgccgcgacctacgcgaactggccgaccctgcgctacatgctgcgtggcaacactgtttccgatgcgccgctgattatcggtagcctggacccttgctactcctgtaccgaccgcatgactgtggtcgatgtacgtaagaagaagagcaaagtggtgccgtacaaagaactcgagcgctacagcattgagcgtaaaaactcgccgctgaaataa

SEQ ID NO: 457801 - DNA, 924 bp, Shigella boydii
atgagtgttttatatccgttaattcaggcgctggtgttatttgccgttgcgccgctgctctccggtattacccgcgtggcgcgcgcccgtctgcataaccgtcgcgggccgggcgtgttgcaggagtatcgcgacattatcaaactgctgggccgccagagcgttggcccggatgcctctggctgggtgttccgcctgacgccgtatgtgatggtgggcgtcatgctgactatcgctactgcgctgccggtggtgaccgtcggttctccgctgccgcaactgggcgatttgatcaccttactgtatctcttcgccatcgcgcgtttcttctttgccatttccggtctggataccggtagcccgtttaccgctatcggtgcgagccgtgaagcgatgcttggcgtgctggtcgaaccgatgttgctgcttggtctgtgggttgccgcacaggttgccggttccaccaacatcagcaacattaccgacaccgtttatcactggccgctgagccaaagcatcccgctggtgctggcgctctgcacctgtgcgttcgccacttttatcgaaatgggcaaactgccgttcgacctggcggaagccgagcaggagttgcaggaaggtccgctctctgagtatagcggcagcggctttggcgtcatgaaatggggtatcagcctgaaacagctggtggtgttgcagatgttcgtcggggtgtttattccgtggggacaaatggaaaccttcaccgccggtggactgctgctggcgctggtgattgccatcgtaaaactggtggtcggcgtcctggttatcgcgctgttcgaaaacagcatggcccgtctgcgtcttgatattactccgcgcattacctgggctgggtttggctttgcatttttagcgttcgtctccttgctggcggcgtga

SEQ ID NO: 457802 - DNA, 195 bp, Shigella boydii
atggtgattaccgctcacggttttgccatgccggttaaacaggcgtttgcgccagtgctgaaactgcgcaaatggctgaatccggtgtcgctggtgccgggctggcagtgcgaaggtagtgcgttgctgttccgccggatggcgctggttgaactggcggtactggtggtgattattgtttcacgaggagcctga

SEQ ID NO: 457803 - DNA, 1542 bp, Shigella boydii
atgagcgcaatttccctgatcaatagcggcgtggtgtggtttgtcgccgccgctgttctggcatttctcttttcttttcaaaagacgctaagtggctggatagccggaattggcggcgcggttggtagcctgtatacggcagccgcgggcttcactgtgctgactggcgcggttggcgtgagcggtgcgctgtcgctggtaagctacgatgtgcaaatctccccgcttaacgcgatttggctgattacgctcggtctgtgcggtctgtttgtcagcctctacaacattgactggcatcgccacgcgcaggtgaagtgcaacggcttgcagatcaatatgttgatggctgccgccgtctgcgccgtcatcgccagcaacctcggcatgttcgtggtaatggccgaagtcatggccttgtgtgcggtgttcctcaccagcaacagcaaagagggcaaactgtggtttgcgctggggcgtcttggcactctgctgctggcgattgcttgctggctgctgtggcagcgttatggcacgctggatctgcgcctgctggatatgcgtatgcaacagctgccgctcggttccgatatctggctgctcggtgtgattggctttggcctgctcgccgggattattccgctgcacggctgggtgccgcaggcacatgctaacgcctctgcgccagctgccgcgttgttttctacggtagtcatgaaaattggcctgctgggcattttaaccctgtcactgctgggcggtaatgcaccgctgtggtgggggatcgtgctgctggtgctcggcatgatcaccgcgtttgtcggtggtctgtatgcgctgatggagcacaacatccagcgcctgctggcttaccacaccctggaaaatatcggcattatcctgctggggctgggcgctggcgtaacgggtatcgcgctcgaacaaccggcgctgattgctcttggcctggtcggtggtctgtaccatctgcttaaccatagcctgttcaaaagcgtactgttcctcggggcggggagcgtctggttccgtaccggtcatcgcgatatcgaaaaactcggtggtattggcaagaaaatgccggttatctccatcgccatgttagtcgggttgatggcaatggctgcgctgccgccgctgaacgggtttgccggggaatgggttatctatcaatcctttttcaaactgagcaatagtggcgcgtttgttgcccgtctgctggggccgctgctcgctgtgggtctggcaattaccggtgcgctggcggtgatgtgtatggcgaaagtctatggcgtcacgttcctcggcgcgccgcgtaccaaagaagccgaaaacgccacctgtgcgccgctcctgatgagcgtaagcgtagtggcactggcgatttgctgcgtaattggcggtgttgctgcgccgtggctgctgccgatgctctctgctgccattcatcattatggcgatttgcaaaggcgaccgcctgccgtcacgttcccgcggtgcggcctgggtgtgcggctacgaccatga

SEQ ID NO: 457804 - DNA, 612 bp, Shigella boydii
gtgaatcgttttgtaattgctgactccacgctctgtatcggctgccacacttgtgaggcagcctgttcagagacgcatcgccagcacggcctgcaatcaatgccgcgcctgagagtgatgctgaatgaaaaagaatctgcgccgcagctctgtcaccactgtgaagatgcaccctgcgcggtggtctgcccggttaacgtcatcacccgcgttgatggggccgtgcagttgaatgaaagcctgtgcgtaagctgcaagctgtgcggcatcgcctgcccgtttggcgcaattgaattttccggcagccgtccgctggatattcctgcaaatgccaataccccgaaagcgccaccggcaccgcctgctccggcgcgtatcagtacgctgcttgactgggtgccgggtattcgcgcgatcgccgtcaaatgtgacctttgtagctttgatgaacaaggtccggcctgcgtgcggatgtgcccgaccaaagccctgcatctggtggataacaccgatatcgcccgcgtcagcaaacgtaagcgtgagctgacttttaatacggactttggcgatctcaccttgtttcagcaggctcaaagtggagaggctaaatga

SEQ ID NO: 457805 - DNA, 462 bp, Shigella boydii
atgactatttgggaaataagcgagaaagccgattacatcgcacagcggcatcgtcgcctacaggaccagtggcacatctactgcaattcgctggttcaggggatcacgttatcgaaagcgcgcctgcatcacgccatgagctgcgcgccggacaaagaactctgtttcgtcctttttgaacattttcgtatttacgtcaccctggcggatggctttaacagccacaccatcgagtattacgtcgaaacaaaagagggcgaagacaaacagcggattgcgcaggcgcaactgagcattgacggcatgattgatggcaaggtcaacatccgcgatcgcgaacaggttctggaacactatctcgaaaaaatcgctggcgtttacgacagcttatacaccgccattgaaaacaatgtgccggtgaatttaagccaactggtaaagggacaaagcccggcagcatga

SEQ ID NO: 457806 - DNA, 351 bp, Shigella boydii
atgcacgaaataaccctctgccaatgggcactggaattgatcgaacagcaggccgcaaaacacggcgcaaaacgcgtaactggggtctggctcaaaattggcgcattttcttgtgtcgaaaccagctctcttgccttttgttttgatctggtttgccgcggcagcgtggcggaaggttgtaaactgcacctcgaagaacaagaggtcgaatgctggtgtgaaacatgccaacagtatgtgacgctattgacccagcgcgtccgccgctgtccacagtgtcatggtgacatgctacagattgtggcagacgacggtttacagattcggcggatagaaatagaccaggagtga

SEQ ID NO: 457807 - DNA, 873 bp, Shigella boydii
atgtgtacaacatgcggttgcggtgaaggcaacctgtatatcgagggtgatgaacataaccctcattccgcgtttcgtagcgcgccatttgccccggcggcacgcccgaagatgaaaatcaccggcattaaagcgcctgaatttacccccagccagactgaagaaggcgacctgcattacggtcatggcgaagcgggcactcacgcaccgggcatgagccagcgtcggatgctggaagtcgaaattgacgtgctggacaaaaacaaccgtctggctgaacgcaaccgcgcgcgctttgctgcccgcaagcaactggtgctcaacctggtttccagcccaggttccggtaaaaccaccctgctgacggaaaccctaatgcgcctgaaagacagcgttccgtgcgcggttattgaaggtgaccagcaaaccgtgaacgatgccgcacgcattcgcgctaccggcacaccagcgattcaggtgaacacaggtaaaggctgccatcttgacgcacagatgattgccgacgccgcaccgcgtctgccactggacgataacggtattctgtttatcgaaaacgttggcaacctcgtatgcccggccagcttcgatctcggtgaaaaacacaaagtggcggtgctttccgttaccgaaggtgaagacaaaccgctgaaatatccgcatatgtttgccgccgcctcgctgatgctgctcaacaaagttgacctgttgccgtatctcaactttgacgttgagaagtgcatcgcctgcgcccgcgaagtcaatccagaaattgaaatcatccttatttccgccaccagcggtgaagggatggaccagtggctgaactggctggagacacagcgatgtgcatag

SEQ ID NO: 457808 - DNA, 273 bp, Shigella boydii
atgtgcataggcgttcccggccagatccgcaccattgacggcaaccaggcaaaagtcgacgtctgcggcattcagcgcgatgtcgatttaacgttagtcggcagctgcgatgaaaacggtcagccgcgcgtgggccagtgggtactggtacacgttggctttgccatgagcgtaattactgaagccgaagcacgcgacactctcgacgccttacaaaacatgtttgacgttgagccggatgtcggcgcgctgttgtatggcgaggaaaaataa

SEQ ID NO: 457809 - DNA, 1122 bp, Shigella boydii
atgcgttttgttgatgaatatcgcgcgccggaacaggtgatgcagttaattgagcatctgcgcgaacgtgcttcacatctctcttacaccgccgaacgccctctgcggattatggaagtgtgcggtggtcatacccacgctatttttaaattcggcctcgaccagttactgcctgaaaacgttgagtttatccacggtccgggttgcccggtgtgcgtactgccgatgggtagaatcgacacctgcgtggagattgccagccatccggaagtcatcttctgtacctttggcgacgccatgcgcgtaccagggaaacagggatcgctgttgcaggcaaaagcacgcggtgccgatgtgcgcatcgtttactcgccgatggatgcgttgaaactggcgcaggagaatccaacccgcaaagtggtgttcttcggcttaggttttgaaaccaccatgccgaccaccgccatcactctgcaacaggcgaaagcgcgtgatgtgcagaatttttacttcttctgccagcacattacgcttatcccgacgctgcgcagtttgctggaacagccggataacggtatcgacgcgttcctcgcgccgggccacgttagtatggttatcggcactgatgcctataattttatcgccagcgattttcatcgtccgctggtggtcgctggtttcgaaccccttgatctactgcaaggcgtggtgatgctggtggagcagaaaatagcggcccacagcaaggtagagaatcagtatcgtcgggtggtaccggatgccggtaacctgctggcgcaacaggcgattgccgatgtgttctgtgtcaacggcgacagcgaatggcgcggcttaggcgtgattgaatcttctggcgtgcacctgacgccggattatcaacgattcgatgccgaagcacatttccgcccggcaccgcagcaggtctgcgatgacccgcgcgcgcgttgtggtgaggtattaacgggcaaatgtaagccgcatcaatgcccgctgtttggtaacacctgtaatcctcaaaccgcatttggtgcactgatggtctcctccgaaggagcgtgcgccgcgtggtatcagtatcgtcagcaggagagtgaagcgtga

SEQ ID NO: 457810 - DNA, 1011 bp, Shigella boydii
gtgaataatatccaactcgcccacggcagcggcggccaggcgatgcagcaattaatcaacagcctgtttatggaagcctttgccaacccgtggctggcagagcaggaagaccaggcacgtcttgatctggcgcagctggtagcagaaggcgatcgtctggcgttctccaccgacagttacgtcattgacccgctgttctttcctggcggtaatatcggcaagctggcgatttgcggcaccgcgaatgacgttgcggtcagtggcgctattccgtgctatctctcctgtggctttatcctcgaagaaggattgccgatggagacactgaaagccgtagtgaccagcatggcagaaaccgcccgcacggcaggcattgccatcgttactggcgatactaaagtggtgcagcgcggcgcggcagataaactgtttatcaacaccgctggcatgggcgcaattccggcgaatattcactggggcgcacagacgctaaccgcaggcgatgtattgctggttagcggtacactcggcgaccacggggcgactatccttaacctgcgtgaacaactggggctggatggtgaactggtcagcgactgcgcggtgctgacgccgcttattcagacgctgcgtgacattcccggcgtgaaagcgctgcgtgatgccacccgtggtggtgtaaacgcggtggttcatgagttcgcggcagcctgcggttgtggtattgaaatttctgaatcagcactgccggttaaacctgctgtgcgcggcgtttgcgaactgctgggactggacgcccttaactttgccaacgaaggcaaactagtaatagctgttgaacgcaacgcagcagagcaagtgctggcagcgttacattcccatccactggggaaagacgcggcgctaattggtgaagtggtggaacgtaaaggtgttcgtcttgccggtctgtatggtgtgaaacgaaccctcgatttaccacacgccgaaccgcttccgcgtatatgctaa

SEQ ID NO: 457811 - DNA, 915 bp, Shigella boydii
atgtcatatacaccgatgagtgatctcggacagcaagggttgttcgacatcactcggacactattgcagcagcccgatctggcctcgctgtgtgaggctctttcgcaactggtaaagcgttctgcgctcgccgacaacgcggctattgtgttgtggcaagcgcagactcaacgtgcgtcttattacgcatcgcgtgaaaaagacacccccattaaatatgaagacgaaactgttctggcacacggtccggtacgccgcattttgtcgcgccctgatacgctgcattgcagttacgaagaattttgtgaaacctggccgcagctggtcgcaggtgggctataccccaaatttggtcactattgcctgatgccactggcggcggaagggcatatttttggtggctgtgaatttattcgttatgacgatcgtccctggagcgaaaaagagttcaatcgtctgcaaacatttacgcagatcgtttctgtcgtcaccgaacaaatccagagccgcgtcgtcaacaatgtcgactatgagttgttatgccgggagcgcgataacttccgcatcctggttgccattaccaacgcggtgctttcccgcctggatatggacgaactggtcagcgaagtcgccaaagaaatccattactatttcgacattgacgatatcagtatcgtcttacgcagccaccgtaaaaacaaactcaacatctactccactcactatcttgataaacaacatcccgcccacgaacagagcgaagtcgatgaagccggaaccctcaccgaacgcgtgttcaaaagtaaagagatgctgctgatcaatctccacgagcgggacgatttagccccctatgaacgcatgttgttcgacacctgggcaaccagattcaaaccttgtgcctgttaccgctga

SEQ ID NO: 457812 - DNA, 1164 bp, Shigella boydii
atgtctggcgacaccatgctgggcgtgctgaaactggcgcaatgcgaagagaaagtgtttaccactaccaatctgaatttgctgcgccagattgccgaacgtgtggcaatcgctgtcgataacgccctcgcctatcaggaaatccatcgtctgaaagaacggctggttgatgaaaacctcgccctgaccgagcagctcaacaatgttgatagtgaatttggcgagattattggccgcagcgaagccatgtacagcgtgcttaaacaagttgaaatggtggcgcaaagtgacagtaccgtgctgatcctcggtgaaactggcacgggtaaagagctgattgcccgcgcgatccataatctcagtgggcgtaataatcgccgcatggtcaaaatgaactgcgcggcgatgcctgccggattgctggaaagcgatctgtttggtcatgagcgtggggcttttaccggtgccagcgcccagcgcattggtcgttttgaactggcggataaaagctccctgttcctcgacgaagtgggcgatatgccactggagttacagccgaagttgctgcgtgtattgcaggaacaggagtttgaacgtctcggcagcaacaaaatcattcagacggacgtacgtttaattgccgcgactaaccgcgatctgaaaaaaatggtcgccgaccgagagttccgtagcgatctctattaccgcctgaacgtattcccgattcacctgccgccactacgcgagcgtccggaagatattccgctgctggcgaaagcctttaccttcaaaattgcccgtcgtctggggcgcaatatcgacagcattccagccgagacgctgcgcaccttgagcaacatggagtggccgggtaacgtacgcgaactggaaaacgtcattgagcgcgcagtattgctaacacgcggcaacgtgctgcagctgtcattgccagatattgctttaccggagcctgaaacgccgcctgccgcaacggttgtcgctcaggagggcgaagatgaatatcagttgattgttcgcgtgctgaaagaaaccaacggcgtggttgccgggcctaaaggcgctgcgcaacgtctggggctgaaacgcacgaccctgctgtcacggatgaagcggctgggaattgataaatcggcattgatttaa

SEQ ID NO: 457813 - DNA, 354 bp, Shigella boydii
atgtccggcaagcgtatctctcgtgaaaaactgacgattaaaaaaatgatcgatctttatcaagcgaaatgcccgcaggcgtcagcggagccggagcattacgaggcgttgtttgtttacgcgcaaaagcggctggataaatgtgtgttcggcgaagagaaaccagcctgtaagcagtgtccggtgcactgttaccagcctgcaaagcgtgaagagatgaaacagattatgcgttgggccgggccgagaatgctgtggcgtcatccgatcttaaccgtgcgtcatctcatcgatgacaagcgtccggtgccagaactgccggaaaaatatcgtccgaaaaaacctcgtgaatag

SEQ ID NO: 457814 - DNA, 234 bp, Shigella boydii
atggctctgaaggaggaggtttattcaaccgacgcaattttgcgtacttgcttcataagcatcacgcaaaagctgcaaaacagcatctttcccggaaccagcatcaagaactcgccgttcgcttcttcccctgaaatgattaactccggtatcatgtgcgccttatgtgattacaacgaaaataaaaaccatcacaccccatttaatatcagggaaccggacataaccccatga

SEQ ID NO: 457815 - DNA, 2562 bp, Shigella boydii
atgagtgcaatagaaaatttcgacgcccatacgcccatgatgcagcagtatctcaggctgaaagcccagcatcccgagatcctgctgttttaccggatgggtgatttttatgaactgttttatgacgacgcaaaacgcgcgtcgcaactgctggatatttcactgaccaaacgcggtgcttcggcgggagagccgatcccgatggcggggattccctaccatgcggtggaaaactatctcgccaaactggtgaatcagggagagtccgttgccatctgcgaacaaattggcgatccggcgaccagcaaaggtccggttgagcgcaaagttgtgcgtatcgttacgccaggcaccatcagcgatgaagccctgttacaggagcgtcaggacaacctgctggcggctatctggcaggacagcaaaggtttcggctacgcgacgctggatatcagctccgggcgttttcgcctgagcgaaccggccgaccgcgaaacgatggcggcagagctgcaacgcactaatccggcggaactgctgtatgcagaagatttcgccgagatgtcgctgattgaaggccgtcgcggcctgcgccgtcgcccgctgtgggagtttgaaatcgacaccgcgcgccagcagttgaatctgcaatttggcacccgcgatctggtcggttttggcgtcgagaacgcgccgcgcggactttgtgctgccggttgtctgttgcagtatgcgaaagatacccaacgcacgaccctgccgcatattcgttctatcaccatggaacgtgagcaggacagcatcattatggatgccgcgacacgtcgtaacctggaaattactcagaacctggcgggcggtgcggaaaatacgctggcttctgtgctcgactgcaccgtcacgccgatgggtagtcgtatgctgaaacgctggctgcatatgccagtgcgcgatacccgcgtgttgcttgagcgccagcaaactattggcgcattgcaggatttcaccgccgggctacagccggtactgcgtcaggtcggcgaccttgaacgtattctggctcgtctggctttacgaactgctcgcccacgcgatctggcccgtatgcgccacgctttccagcaactgccggagctgcgtgcacagttagaaactgtcgatagtgcaccggtacaggcgctacgtgagaagatgggcgagtttgccgagctgcgcgatctgctggagcgagcaatcatcgacacaccgccggtgctggtacgcgacggtggtgttatcgcatcgggctataacgaagagctggatgagtggcgcgcgctggctgacggcgcgaccgattatctggagcgtctggaagtccgcgagcgtgaacgtaccggcctggacacgctgaaagttggctttaatgcggtgcacggctactacattcaaatcagccgtgggcaaagccatctggcacccatcaactacatgcgtcgccagacgctgaaaaacgccgaacgctacatcattccagagctaaaagagtacgaagataaagttctcacctcaaaaggcaaagcactggcactggaaaaacagctttatgaagagctgttcgacctgctgttgccgcatctggaagcgttgcaacagagcgcgagcgcgctggcggaactcgacgtgctggttaacctggcggaacgggcctataccctgaactacacctgcccgaccttcattgataaaccgggcattcgcattaccgaaggtcgccatccggtagttgaacaagtactgaatgagccatttatcgctaacccgctgaatctgtcgccgcagcgccgtatgttgattattaccggcccgaacatgggcggtaaaagtacctatatgcgccagaccgcactgattgcgctgatggcctacatcggcagctatgtaccggcacaaaaagtcgagattggacctatcgatcgcatctttacccgcgtaggcgcggcagatgacctggcttccgggcgctcaacctttatggtggagatgactgaaaccgccaatattttacataacgccaccgaatacagtctggtgttaatggatgagatcgggcgtggaacgtccacctacgatggtctgtcgctggcgtgggcgtgcgcagaaaatctggcgaataagattaaggcattgacgctgtttgccacccactatttcgagctgacccagctaccggagaaaatggaagacgtcgccaacgtgcatctcgatgcgctggagcacggagacaccattgcctttatgcatagcgtgcaggatggcgcggcgagcaaaagctacggcctggcggttgcagctctggcaggcgtgccaaaagaggtgattaagcgcgcacggcaaaaactgcgtgagctggaaagcatttcgccgaacgccgccgctacgcaagtggatggtacgcaaatgtctttgctgtcagtaccggaagaaacctcgccagcggtcgaagctctggaaaacctggacccggattcactgactccgcgtcaggcgctggaatggatttatcgcttgaagagcctggtgtaa

SEQ ID NO: 457816 - DNA, 588 bp, Shigella boydii
atggtgaataatcaattattacaatcccgcttacatcaactctctttttgccctgaaaccgacttacttatttctgtcggcgataatattgatcgtgggccggagagtcttgacgtcctgcgcctgctaaaccagccctggtttatctccgttaaaggcaaccacgaagcaatggcgctggatgcgttcgcgaccggcgatggcaatatgtggcttgccagcggtggtgactggtttttcgatttaaatgattcagagcaacaagaggcaatagatctgttgctgaaattccatcaccttccacatattattgaaatcactaacgacataataaaatatgtcatcgcacatgcagattatccgggtgatgaatatctctttggcaaagaaatagcggagagcgaattactctggcctgtttatcgtgtgcagaaatcgcttaatggcgagttacaacaaataaacggcgctgattattttatatttggacatatgatgtttgataacattcagacgttcgctaaccagatttatattgataccggatcgccgaaaagtgggcggctgtcattttataaaataaggtag

SEQ ID NO: 457817 - DNA, 747 bp, Shigella boydii
atggagcgcataggggccagtcgcgcgatggtgagcttgttaagccgcccgttaaaactcattcgctcaccgtatattattctgtcggcaacttacgtcatcggtcaaatcatggcgcagtttattaccagcgcctccggtctgggtatgttgctgatggtcaccttatttccgacactggtgagtctgggagtaagtcgtctctctgcggtggcggttatcgcaaccacaatgtccattgagtggggaattctggaaacgaactccatttttgcagcccaggtcgcgggaatgaaaattgccacttacttcttccactaccagcttccggtcgcctcttacgtcattatctcggtggcgatctcccactttttcgtgcaacgcgcttttgacaaaaaagataaaaatatcaatcacgaacaagcagagcaaaaagctctcgataatgtcccgccgctctattacgccattttacctgtgatgccgttaatcctgatgctcggctcgctgttcctcgcccacgtcgggctgatgcagtcagaactgcatctggtggtggtgatgttactgagtttgacggtgacgatgtttgttgagttcttccgcaagcataacttgcgcgaaacaatggacgatgtgcaggcgttttttgacggcatgggtacgcagtttgccaacgtggtaacgctggtggtcgcgggtgaaatatttgcgaaaggcggtgatgctgccaacttactgatttag

SEQ ID NO: 457818 - DNA, 279 bp, Shigella boydii
atgttcggcataattatatctgtcatcgtattaattacgatgggctatttgatcctgaaaaactacaaacctcaggtggtgctggctgccgcaggtatcttcctgatgatgtgcggtgtctggttagggttcggtggtgtactcgatcccgccaaaagcagcggctacttgatcgtcgatatttataatgaaatcctgcgcatgctgtccaaccgcattgccggattggggctatcgattatggcggtgggcggtatgcccgctacatggagcgcatag

SEQ ID NO: 457819 - DNA, 792 bp, Shigella boydii
atgggccttatgaacgcatttgattcgcaaaccgaagattcttcacctgcaattggtcgcaacttgcgtagccgcccgctggcgcgtaaaaaactctccgaaatggtggaagaagagctggaacagatgatccgccgtcgtgaatttggcgaaggtgaacaattaccgtctgaacgcgaactgatggcgttctttaacgtcgggcgtccttcggtgcgtgaagcgctggcagcgttaaaacgcaaaggtctggtgcaaataaacaacggcgaacgcgctcgcgtctcgcgtccttctgcggacactatcatcggtgagctttccggcatggcgaaagatttcctttctcatcccggtgggattgcccatttcgaacaattacgtctgttctttgaatccagtctggtgcgctatgcggctgaacatgccaccgatgagcaaatcgatttgctggcaaaagcactggaaatcaacagtcagtcgctggataacaacgcggcattcattcgttcagacgttgatttccaccgcgtgctggcggagatccccggtaacccaatcttcatggcgatccacgttgccctgctcgactggcttattgccgcacgcccaacggttaccgatcaggcactacacgaacataacaacgttagttatcaacagcatattgcgatcgttgatgcgatccgccgtcatgatcctgacgaagccgatcgtgcgttgcaatcgcatctcaacagcgtctctgctacctggcacgctttcggtcagaccaccaacaaaaagaaataa

SEQ ID NO: 457820 - DNA, 894 bp, Shigella boydii
atggcaacgaatttacgtggcgtaatggctgcactcctgactccttttgaccaacaacaagcgctggataaagcgagtctgcgtcgcctggttcagttcaatattcagcagggcatcgacggtttatacgtgggtggttcgaccggcgaggcctttgtacaaagcctttccgagcgtgaacaggtactggaaatcgtcgccgaagaggcgaaaggtaagattaaactcatcgcccacgtcggttgcgtcagcaccgccgaaagccaacaacttgcggcatcggctaaacgttatggcttcgatgccgtctccgccgtcacgccgttctactatcctttcagctttgaagaacactgcgatcactatcgggcaattattgattcggcggatggtttgccgatggtggtgtacaacattccagccctgagtggggtaaaactgaccctggatcagatcaacacacttgttacattgcctggcgtaggtgcgctgaaacagacctctggcgatctctatcagatggagcagatccgtcgtgaacatcctgatcttgtgctctataacggttacgacgaaatcttcgcctctggtctgctggcgggcgctgatggtggtatcggtagtacctacaacatcatgggctggcgctatcaggggatcgttaaggcgctgaaagaaggcgatatccagaccgcgcagaaactgcaaactgaatgcaataaagtcattgatttactgatcaaaacgggcgtattccgcggcctgaaaactgtcctccattatatggatgtcgtttctgtgccgctgtgccgcaaaccgtttggaccggtagatgaaaaatatctgccagaactgaaggcgctggcccagcagttgatgcaagagcgcgggtga

SEQ ID NO: 457821 - DNA, 1491 bp, Shigella boydii
atgagtactacaacccagaatatcccgtggtatcgccatctcaaccgtgcacaatggcgcgcattttccgctgcctggttgggatatctgcttgacggttttgatttcgttttaatcgccctggtactcaccgaagtacagggtgaattcgggctgacgacggtgcaggcggcaagtctgatctccgcagcctttatctctcgctggttcggcggcctgatgctcggcgctatgggtgaccgctacgggcgtcgtctggcaatggtcaccagcatcgttctcttctcggccgggacgctggcctgcggctttgcgccaggctacatcaccatgtttatcgcgcgtctggtcatcggcatggggatggcgggtgaatacggttccagcgccacctatgtcattgaaagctggccaaaacatctgcgtaacaaagccagtggttttctgatttcaggcttctctgtgggggccgtcgttgccgctcaggtctatagcctggtggttccggtctggggctggcgtgcgctgttctttatcggcattttgcctatcatctttgctctctggctgcgtaaaaacatcccggaagcggaagactggaaagagaaacatgcaggtaaagcaccagtacgcacgatggtagatattctctaccgtggtgaacatcgcattgccaatatcgtaatgacactggcggcggctactgcgctgtggttttgcttcgccggtaacctgcaaaatgccgcgatcgtcgctgttcttggactgttatgcgccgcaatctttatcagctttatggtgcaaagtacgggtaaacgctggccaacgggcgtaatgctgatggtggtcgtgttgtttgctttcctctactcatggccgattcaggcgctgctgccaacgtatctgaaaaccgatctggcttataacccgcatactgtcgccaatgtgctgttctttagcggctttggggctgcggtggggtgctgtgtcggcggcttcctcggtgactggctgggaacccgcaaagcctacgtttgtagcctgttggcctcgcagctgttgattattccggtatttgcgattggcggcgcaaacgtctgggtgctcggtctgttactgttcttccagcaaatgcttggacaagggatcgccgggatcttaccgaaactgattggcggttatttcgataccgaccagcgtgcagcgggcttgggctttacctacaacgttggcgcattgggcggcgcactggccccaatcatcggcgcgttgatcgctcaacgtctggatctgggtactgcgctggcatcgctatcgttcagtctgacatttgtggtgatcctgctgattggtctggatatgccttcccgcgttcagcgttggctgcgcccggaagcattgcgtactcatgacgctatcgacggcaaaccatttagcggtgccgtgccatttggcagcgccaaaaacgatttagtcaaaaccaaaagttaa

SEQ ID NO: 457822 - DNA, 690 bp, Shigella boydii
atgtcgttacttgcacaactggatcaaaaaatcgctgctaacggtggcctgattgtctcctgccagccggttccggacagcccgctcgataaacccgaaatcgtcgctgccatggcattagcggcagaacaggcgggcgcggttgccattcgcattgaaggtgtggcaaatctgcaagccacgcgtgcggtggtgagcgtgccgattattggaattgtgaaacgcgatctggaggattctccggtacgcatcacggcctatattgaagatgttgatgcgctggcgcaggcgggcgcggacattatcgccattgacggcaccgaccgcccgcgtccggtgcctgttgaaacgctgctggcacgtattcaccatcacggtttactggcgatgaccgactgctcaacgccggaagacggcctggcatgccaaaagctgggagccgaaattattggcactacgctttctggctataccacgcctgaaacgccagaagagccggatctggcgctggtgaaaacgttgagcgacgccggatgtcgggtgattgccgaagggcgttacaacacgcctgctcaggcggcagatgcgatgcgccacggcgcgtgggcggtgacggtcggttctgccattacgcgtcttgaacacatttgtcagtggtacaacacagcgatgaaaaaggcggtgctatga

SEQ ID NO: 457823 - DNA, 876 bp, Shigella boydii
atgaccacgttggcgattgatatcggcggtactaaacttgccgccgcgctgattggcgctgacgggcagatccgcgatcgccgagaacttccgacaccagccagccagactccgcaggcgttgcgtgatgccttagccgcgttagtcgccccgttgcaagctcatgcgcagcaggttgccatcgcttcaaccggaattattcgcgacggcagcttgctggcgctgaatccgcataatcttggtggattgctacactttccgttagtcaaaacgctggaacaactttccaatttgccgaccattgccattaacgacgcgcaggccgcagcatgggcagagtatcaggcgctggaaggcgatataaccgatatggtgtttatcaccgtttccactggcgtcggcggcggtgtagtgagcggcggtaaactgcttaccggccctagcggtctggcggggcacatcgggcatacgcttgccgatccacacggcccagtctgcggctgtggacgcacaggttgcgtggaagcgattgcttctggtcgcggtattgcagcggcagcgcaaggtgaactcatgggcgcggatgcgagaactattttcacacgcgccgggcagggcgacgagcaggcgcagcaactgattcaccgctccgcacatgtgctggcaaggctgatcgctgatattaaagccacaactgattgccagtgcgtggtggtcggtggcagcgttggtctggcagaagggtatctggcgttggtgaaaacgtatctggcgcaggagccagcggcatttcatgttgatttactggcggcgcactaccgccacgatgcaggtttacttggggctgcgctgttggcccagggagaaaaattatga

SEQ ID NO: 457824 - DNA, 465 bp, Shigella boydii
atgatgatgggtgaagtacagtcattaccgtctgctgggttacatcctgcgttacaggacgcgttaacgctggcattagctgccagaccgcaagaaaaagcgccgggtcgttacgaattacagggcgacaatatctttatgaatgtcatgacgtttaacactcaatcgcccgtcgagaaaaaagcggaattgcacgagcaatacattgatatccagctgttattaaacggtgaggaacggattctgtttggcatggcaggcactgcgcgccagtgtgaagagttccaccatgaggatgattatcagctttgcagcaccattgataacgagcaagccatcatcttaaaaccgggaatgttcgccgtgtttatgccaagtgaaccgcataaaccaggatgcgttgtcggcgagccgggtgagattaaaaaggtggtggtgaaggttaaggctgatttaatggcttaa

SEQ ID NO: 457825 - DNA, 306 bp, Shigella boydii
atgatttacattgaacagcttgaattaatccataaaagtggtgatgtgttgtatccagtaaaaataaccagaaaatcatcaggaaaaactgccttccatcttgttccattcggcttaaataagactcacgaccttctagaggtggaagatgcttcagaagcaattcggctggtgattgatgaacgtcattccattcgctgcagtacacttacagcaactattacgaataaaaagggcaagcgaattaagcggacaggtatatacagtatcaagggtgttaacataaaagaatacaacgtcaggtaa

SEQ ID NO: 457826 - DNA, 480 bp, Shigella boydii
atggaatcgctctcagagagaacctcaacaggctaccagcaaatccacgacggtattattcacctggtcgatagcgcccggacggaaacggtacgtagcgttaacgcgctgatgaccgcgacatactgggaaattggccgacgaattgtcgaatttgaacaaggtggcgaggcaagggctgcgtatggtgcgcagctaatcaagcgactatcaaaggatttaagtctaaggtataagcgtgggttctctgcaaaaaacttacgccaaatgaggcttttttacctcttttttcaacatgttgaaattcgccagacagtgtctggcgaattaacaccattgggaattccgcagacaccatctgcagaattcccatcggcaaagatttggcagacgctgtctgccaaattgagaggctgtttgatatttccacagcttttgtattgcatctcctattttcggtttgtatattcatgcaaataa

SEQ ID NO: 457827 - DNA, 1419 bp, Shigella boydii
atgagtcagaatgtttatcaatttatcgacctgcagcgcgttgatccgcctaagaaaccgctgaagatccgcaaaattgagtttgttgaaatttacgagccgttttccgaaggccaggccaaagcgcaggctgaccgctgcctgtcgtgcggcaacccatactgcgagtggaaatgtccggtacacaactacatcccgaactggctgaagctcgccaacgaggggcgtatttttgaagcggcggaactgtcgcaccagaccaacaccctgccggaagtttgcggacgagtctgcccgcaagaccgtctgtgcgaaggttcctgcactctgaacgatgagtttggcgcggtgaccatcggcaacattgagcgttatatcaatgataaagcgttcgaaatgggctggcgtccggatatgtccggcgtgaagcaaaccggtaaaaaagtggcgattatcggcgcaggcccggcaggtctggcgtgtgcggatgtcctgacgcgtaacggcgtaaaagccgttgtcttcgaccgtcatccagaaattggcgggctgctgaccttcggtattccggccttcaagctggaaaaagaggtaatgacgcgtcgccgtgaaatcttcaccggcatgggtattgaattcaaactcaataccgaagtgggccgcgacgtgcagctggacgatctgctgagtgattacgatgccgtcttccttggcgtcgggacttatcagtcaatgcgcggcgggctggaaaacgaagacgccgatggcgtgtacgcagcgctgccgttccttatcgccaacaccaaacagttaatgggctttggtgaaacccgcgacgaaccgttcgtcagcatggaaggcaaacgcgtggtggtccttggcggtggcgacactgcgatggactgcgtgcgtacgtccgtgcgccagggagcgaagcacgttacctgtgcctatcgtcgtgatgaagagaacatgccgggttcccgccgcgaagtgaaaaacgcgcgggaagaaggcgtagagttcaaattcaacgtccagccactggggattgaagtgaacggtaacggcaaagtcagcggcgtaaaaatggtacgtaccgaaatgggcgaaccggatgccaaaggccgtcgccgcgcggagatcgttgcaggttccgaacatatcgttccggcagatgcagtgatcatggcgtttggtttccgtccacacaacatggaatggctggcaaaacacagcgtcgagctggattcacaaggccgcatcatcgccccggaaggcagcgacaacgccttccagaccagcaacccgaaaatctttgctggcggcgatatcgtccgtggttccgatctggtggtaaccgctattgccgaaggtcgtaaggcggcagacggtattatgaactggctggaagtttaa

SEQ ID NO: 457828 - DNA, 4554 bp, Shigella boydii
atgacacgcaacccccgtcgccacgctctttctgtgcccgtgcgcagcggttcggaagtggggttcccgcagagcctgggggaggttcacgatatgttgtacgataaatcccttgagagggataactgtggtttcggcctgatcgcccacatagaaggcgaacctagccacaaggtagtgcgtactgcaatacacgcactggcccgcatgcagcaccgtggcgcgattctcgccgatggtaaaaccggtgacggttgcggcttgctgttacaaaaaccggatcgcttttttcgcatcgttgcgcaggagcgcggctggcgtttagcaaaaaactacgctgtcgggatgctcttcctgaataaagatcctgaactcgcggctgccgcacgccgcatcgttgaagaagagctgcaacgcgaaaccttgtcgattgtgggctggcgtgatgtccccactaacgaaggcgtgctgggtgaaatcgccctctcctctctgccccgcattgagcaaattttcgttaacgctccggcaggctggcgtccgcgggatatggagcgccgtctgtttatcgcccgccgccgcattgaaaagcgtctcgaagccgacaaagacttctacgtctgtagcctgtcgaatctggtgaacatctataaaggtctgtgtatgccggcggatctgccgcgcttttatctggatcttgcggacctgcgtctggaatcggccatctgcctgttccaccagcgcttctccactaacaccgtaccgcgctggccgctggcgcagccgttccgctacctggcgcataacggtgaaatcaacaccatcaccggtaaccgccaatgggcgcgtgcgcgtacctataaattccagacgccgcttatccctgatctgtacgacgccgcaccgttcgtcaacgaaaccggctctgactccagttcgatggataacatgctggaactgctgctggcaggcgggatggatatcatccgcgccatgcgtctgttagtgccacccgcctggcagaacaacccggatatggacccggaactgcgtgccttctttgactttaactccatgcatatggagccgtgggatggcccggcgggcatcgtgatgtccgacggtcgttttgccgcctgtaacctcgaccgtaacggtctgcgtccggcgcgctacgtcatcaccaaagataagctcatcacctgcgcctctgaagtcggtatctgggattaccagcctgacgaagtggtcgaaaaaggccgcgtcgggccaggcgaactgatggttatcgacacccgcagtgggcgtattctgcactcggcagaaaccgatgacgatctgaaaagccgccatccatataaagagtggatggagaaaaacgtccgccgactggtaccgtttgaagatctgcccgatgaagaagtgggtagccgcgaactggacgacgacacgcttgccagctaccagaaacagtttaactacagcgcggaagagctggactccgtaattcgcgtactgggcgaaaacggtcaggaagcggtcggttcgatgggcgatgataccccattcgccgtgctctccagtcagccgcgcattatttacgactacttccgccagcagtttgcccaggtgactaacccgccaatcgacccgctgcgtgaagcgcatgttatgtcgctcgccaccagtatcggtcgtgaaatgaacgtcttttgcgaagcagagggccaggcgcaccgtttaagctttaaatcgccgattctgctctactccgatttcaaacagctcacgacgatgaaagaggagcactaccgcgcagatacgctggatatcacctttgacgtcactaaaaccacgctcgaagcgacagtcaaagagctgtgcgacaaagccgaaaaaatggtacgtagcggcaccgtgctgctggtgctctccgaccggaatatcgctaaagatcgcctgccggttccagccccgatggcggttggcgcgatccagacccgtctggtcgatcaaagcctgcgttgcgatgccaacatcatcgtcgaaaccgccagcgcccgcgatccgcaccacttcgccgtgttgctgggcttcggcgcgacggctatttatccataccttgcctatgaaacgctgggccgcctggtagacacccatgcgattgccaaagattatcgtaccgtgatgctcaactaccgtaacggcatcaacaaaggcttgtacaaaatcatgtccaaaatgggcatctccaccatcgcctcttaccgctgctcgaaactgtttgaagcggtcggtctgcacgatgatgtagtgggcctgtgcttccaggggacggtcagccgcattggtggggcgagctttgaagacttccagcaggatctgctgaacctgtcgaaacgtgcctggctggcgcgtaagcccatcagccagggcggcctgctgaaatacgtccacggcggcgaataccacgcttacaacccggacgtggtgcgcacgctgcaacaggcggtacaaagcggcgagtacagcgactatcaggaatacgcgaagctggttaatgagcgtccggcaaccacgctgcgcgatctgctggcaattacgccgggtgaaaacgcggtcaacattgctgatgttgaaccggcaagcgaactgtttaaacgctttgataccgccgcgatgtctatcggcgcgttaagcccggaagcccacgaggcgctggcggaagcgatgaatagcatcggcggtaactcgaactccggtgaaggcggcgaagacccggcgcgctatggcactaacaaagtgtcgcgcatcaagcaggtggcttctggtcgcttcggcgttactccggcgtatctggtcaatgccgacgtcattcagattaaagtcgcccagggcgcgaagccgggcgaaggcggtcagttgccgggtgacaaagtcactccttacatcgccaaactgcgctattcggtgcccggagtgacgctgatctccccgccgccgcaccacgatatctactctatcgaggacttagcgcagctcattttcgacctcaagcaggttaacccgaaagcgatgatctccgtgaagctggtttccgaaccgggcgtaggcaccatcgcgactggtgtggcaaaagcttatgccgatttaatcaccatcgcaggctatgacggtggcaccggcgcaagcccgctgtcgtcagtgaaatacgcaggttgcccgtgggagctggggcttgttgaaacccagcaggcgctggttgccaatggtctgcgtcataagatccgtttgcaggtcgatggcggcctgaaaaccggtgttgatatcatcaaagcggcgattctcggcgcagaaagcttcggcttcggcactggcccaatggtcgcgctcggctgtaaatatctgcgtatttgccacctgaacaactgcgcaacgggtgtggcaactcaggatgacaaactgcgtaagaatcactatcacggcctgccgttcaaggtgacgaattactttgagtttatcgcccgtgaaacccgcgagctgatggcacagctgggggtaacgcggctggtggatctgattggtcgcaccgacctgctgaaagagctggacggtttcaccgccaaacagcagaaactggcgctgtcgaagctgctggagaccgccgaaccgcatctaggtaaggcactctactgcaccgaaaacaacccgccgtttgataacggcctgctgaacgcgcagttgctgcaacaggcgaaaccgtttgtcgatggacgccagagcaaaaccttctggttcgatatccgcaataccgatcgctccgtgggcgcgtcgctttcaggctatatcgcccagacgcacggcgatcaggggctggcagccgatcctatcaaagcgtacttcaacggcaccgcaggccagagtttcggtgtatggaacgcgggcggcgtggaactgtacctgaccggggatgccaacgactatgtcggtaaaggcatggcgggcggcttaatcgccattcgtcctccggttggttccgccttccgcagccatgaagcaagtattatcggcaacacctgcctgtatggcgcgaccggtggtcgtctgtatgccgcaggccgcgcgggtgaacgtttcggcgtgcggaactccggtgctatcaccgtggtagaaggcattggcgacaacggctgtgaatatatgacgggcggtattgtctgtattctgggtaaaaccggcgttaacttcggtgcgggcatgaccggcggcttcgcttacgttctcgatgaaagcggtgatttccgcaaacgcgttaacccggaactggtcgaggtcttaaacgttgacgatctggcgatccatgaagagcatctgcgcggtcttatcaccgagcatgttcagcatactggctctcagcgcggtgaagagattctggcgaactggtcaaccttcgccactaaatttgcgctggttaaaccgaagtccagtgatgtaaaagcactgctgggtcaccgtagtcgtagcgcagcagagttgcgcgtgcaggcgcagtaa

SEQ ID NO: 457829 - DNA, 930 bp, Shigella boydii
atgcagttacagaaattagtcaatatgtttggtggtgatctcacccgtcgttatgggcaaaaggtgcataagctgacgctgcacggcggttttagctgccctaaccgtgacggtaccatcgggcgtggtggctgcacattctgtaatgttgcctcgtttgccgatgaagcgcagcagcatcgttccattgccgagcaactggcgcaccaggcgaatttagttaaccgcgctaaacgctatctggcctactttcaggcgtatactagcacctttgcggaagttcaggtgctgcgttctatgtatcagcaggcggtgagccaggccaatattgtcggtttgtgtgttggtacccgcccggactgcgtgccggatgcggtgctggatctgctttgcgaatataaggaccagggttacgaagtgtggctggagctggggctacaaaccgcccacgacaaaacactgcatcgcatcaaccgcggccatgattttgcctgttatcagcgtacaacccagctggcacgtcagcgcgggctgaaggtgtgttcccacttaattgtcggcctgcctggcgaagggcaggctgaatgtttgcaaacgctggagcgagtggttgaaaccggcgtggacggcataaagctgcatccgctgcatattgtgaaaggcagcattatggcgaaagcctgggaagcggggcgtttgaacggtattgaacaggaggattacacgctcactgccggagaaatgattcgccatacgccaccggaagtgatctaccaccgcatttccgccagcgcccgtcgcccgacgctgcttgctccgctgtggtgcgaaaatcgatggacgggaatggtcgagctggatcgctatctgaatgaacatggcgtacagggatcggcgctgggacgtccgtggctacctccaacggagtag

SEQ ID NO: 457830 - DNA, 2337 bp, Shigella boydii
atgaagcaaattcgtctgctggcgcagtattatgttgacctgatgatgaagttaggtctggtgcgcttctcaatgttgctggcgctggccctcgtcgttcttgccattgtggtacaaatggcggtaaccatggtgctgcatggtcaggtcgaaagcattgatgttattcgttctatcttctttggtttgctgattacgccgtgggcggtctactttctatcggtggtcgtcgagcaactggaggagtcacgacaacgtctgtcacggctggtgcaaaaactggaggagatgcgcgagcgcgatttgagcctcaacgttcagttaaaagataatattgcccagctaaatcaggaaattgccgttcgtgaaaaagcggaagcagaactgcaggaaaccttcggccaactgaaaattgaaatcaaagagcgcgaagagacacaaattcagctcgagcagcaatcctcattcttacgttccttccttgatgcttcacccgacctggttttttatcgtaacgaagataaagagttttccggctgtaaccgcgcgatggagctgctgaccggaaaaagcgaaaaacaactggttcacctgaaacctgctgatgtttactcaccggaagccgccgcaaaagtcattgaaaccgatgaaaaagtgttccgtcataatgtgtcactgacctatgaacagtggctggattacccggacgggcgcaaagcctgctttgaaatccgtaaagtgccgtactacgaccgcgtgggtaaacgtcacggtttgatgggctttggtcgcgacattaccgagcgtaagcggtatcaggatgcgcttgaacgggccagccgcgacaaaacgacgtttatctccaccatcagtcacgaattgcgtacaccgctgaacggtatcgtcggtctgagccgcattctgctggataccgaactcaccgccgagcaggaaaaatatctcaagaccatccatgtttcggccgtcacgctggggaatatctttaacgatattatcgacatggataagatggaacggcgcaaggtccagcttgataatcaaccggttgatttcaccagcttccttgccgatctggaaaatctctccgcattgcaggcgcaacaaaaaggattgcgctttaacctggagccgacgctgccattaccgcatcaggtcattaccgacgggacgcgtttacggcagatcctgtggaacctcatcagtaacgccgtcaaattcacccagcaaggccaggttaccgtgcgcgtgcgctacgatgaaggcgatatgctgcattttgaagtggaagactctggtatcggcattccgcaggatgagctggataaaattttcgccatgtattaccaggtgaaagacagtcatggcggtaaacctgccaccggcaccggtattggtctggccgtttctcgtcgtctggcgaaaaatatgggcggcgatattacggttaccagcgaacagggcaaaggttcaacctttacgttgacgatccacgcaccgtcggtagcagaagaggtcgatgatgcgtttgatgaagacgatatgcctttaccggcgctgaatgtgctgctggtggaagacattgaactgaacgtgattgttgcgcgttctgtgctggaaaaattaggtaacagcgttgatgtcgccatgaccggcaaggcggcgctggagatgtttaaaccgggcgaatacgacctggtgttgctggatattcagttgccagatatgaccgggctggatatctctcgtgaactgacgaagcgttatccgcgcgaggatttaccgccgctggtggccttaaccgctaacgtgctgaaagacaaacaagagtacctcaatgctggaatggatgatgtgctgagtaagccgctttcggttccggcgctaaccgcgatgatcaagaaattctgggatacccaggatgatgaggagagtacggtgacgacagaagagaacagtaaatcagaagcattgctcgatattcccatgctggaacagtatctcgaacttgtaggaccgaagctgatcaccgacgggttagcggtgtttgagaagatgatgccgggctatgtcagcgtgctggagtcgaatctgacggcgcaggataaaaaaggcattgttgaggaaggacataaaattaaaggtgcggcggggtcagtggggttacgccatctgcaacagctgggtcagcaaattcagtctcctgaccttcctgcctgggaagataacgtcggtgaatggattgaagagatgaaagaagagtggcgtcacgacgtagaagtgctgaaagcgtgggtggcaaaagccactaaaaaatga

SEQ ID NO: 457831 - DNA, 654 bp, Shigella boydii
atgaagaaaattggcgtaattctgagcggatgcggcgtctatgacggttctgaaattcatgaagcggtgttgacgttgttagctatttcacgcagcggtgcgcaggcggtctgctttgcaccggataagcagcaggttgatgttatcaaccatttaactggcgaagcgatgacggaaacgcgcaacgtgctgattgaagcggcacgaataacgcgcggtgaaatccgtcctctggcccaggccgatgccgctgaactggatgcgttgattgtgccgggggggtttggcgcggcgaagaatttaagcaattttgccactcttggtagcgaatgcaccgttgaccgtgaattaaaggcgctggcacaagcgatgcatcaggccggaaaaccgcttggttttatgtgtattgccccggcgatgctgccgaaaattttcgatttcccgctgcgtttgaccatcggtactgatatcgataccgcagaagtgctggaagagatgggcgcggagcatgtgccctgtcctgtcgatgatatcgtggttgatgaagacaataagattgtcaccaccccagcatatatgctggcgcagaacattgcagaagcggcgagcggcattgataagctggtttcccgcgtgctggttctggctgaatga

SEQ ID NO: 457832 - DNA, 525 bp, Shigella boydii
atggatcaaatctcgccgtggatgggactggcggtgattgccgcagaagatcagaaatttcctgagcactggggctttgatgtcgcttccattgagaaagccctggcgcacaacgagcgcaatgaaaactgtattcgcggtgcttcaacgatttctcagcagacggccaaaaatctctttttatgggatgggcgtagctgggtacgaaaagggctggaagctggattaacgctggggatagaaatagtctggagcaaaaagcgtatcctgacggtttacctgaatatcgccgaatttggcgacggtgtgtttggcgtcgaagctgcggcacaacgttatttccacaaacccgcgagcaaacttacccggtcggaagctgcattactggcagctgtattacctaatccacttcgtttcaaagtctcctcaccatcgggctacgtgcgtagccgtcaggcgtggattttacggcagatgtatcagttaggcggtgagccgtttatgcaacaacaccagctggattaa

SEQ ID NO: 457833 - DNA, 642 bp, Shigella boydii
atgattcgcttatctgaacaaagtcccctgggcaccggaagacatcggaaatgttatgcgcatccggaagatgcccaacgctgtatcaagattgtctaccatcgtggcgatggtggcgatggtggcgataaagagatccgccgtgagttaaagtactacgcgcatcttggtcgccggttaaaagactggagtggaataccgcgctatcacggtaccgttgagacggattgcggaaccggttatgtctacgatgtgattgcagattttgacggcaaaccctccattacgctgaccgaatttgctgaacaatgccgttacgaagaagacattgcacaactgcgccagcgactgaaacagctgaagcgttatttgcaggataaccgtatcgtgacgatgtcgctgaagccgcagaatatcctctgtcaccacatcagtgagtcagaggttatcccggtcgtctgcgacaacattggtgaaagcacattgattccactggcgacctggtcgaagtggtgttgtctgcgtaagcaagagcggttatggaaacgatttatcgcccaaccggcgctggctattgccctgcagaaagatctgcaacctcgtgagagcaaaacgctggccctcacttcgcgcgaagcttaa

SEQ ID NO: 457834 - DNA, 273 bp, Shigella boydii
atgaccgtcaagcaaactgttgaaatcacaaacaagctgggcatgcatgcccggcctgcaatgaagctgtttgaattaatgcagggttttgacgctgaagtgctgttacgtaatgacgaaggcaccgaggccgaagccaacagcgttattgcgctgctgatgttggattctgccaaaggacggcagattgaagttgaagcgaccggcccacaggaagaggaagcactggccgccgttatcgccctctttaactctggttttgatgaagattaa

SEQ ID NO: 457835 - DNA, 855 bp, Shigella boydii
atggtactgatgatcgtcagcggacgttcaggttcaggtaaatctgtcgccctgcgtgcgctggaagatatgggtttttactgcgtggataaccttcccgtagtgttgttacccgatctggctcgaaccctggccgatcgcgagatttctgccgccgtcagcattgatgttcgtaatatgccggagtcaccagaaatattcgaacaggcgatgagtaacctgcctgacgctttctcaccgcaactcctgttcctggatgccgaccgtaataccttaattcgtcgttacagtgacacgcgccgactgcatccgctttccagcaaaaacctgtcgctggaaagtgctatcgacaaagaaagcgatttgctggagcctctgcgttcgcgagcggatctgattgtcgatacctcagaaatgtccgttcacgagctggctgaaatgctgcgtacccgtctgctgggtaaacgtgaacgcgaactgaccatggtctttgagtctttcggcttcaaacacggtatccctatcgatgcagattacgtctttgacgtgcgcttcttgccgaacccgcactgggatccgaaactgcgtccaatgacaggtcttgataaacctgtcgccgcgttcctcgaccgccacacagaagtacacaattttatctaccagacgcgaagctatcttgagctatggttacctatgctggaaaccaacaaccgtagctacttgacggtcgccattggttgtaccggcgggaagcaccgttcggtgtatattgcagagcaactggcagactacttccgctcgcgcggtaaaaacgtccagtcacgccatcgtacgctggaaaaacgtaaaccatga

SEQ ID NO: 457836 - DNA, 492 bp, Shigella boydii
atgacaaataatgatacaactctacagcttagcagtgttcttaacagggaatgtacgcgaagccgcgttcactgtcagagcaaaaaacgcgccctggaaatcatcagcgagctggcggcgaaacaacttagcctgccgcctcaggtggtttttgaagctatcctgacgcgggaaaaaatgggcagtaccggtatcggcaatggtattgccattccgcatggcaaactggaagaagatactctgcgcgccgttggcgttttcgttcagctcgaaacgcctatagctttcgatgccatcgacaaccaaccggtggacttactttttgccctgctggtgccggcagaccaaactaaaacgcacctgcatactctgtcgctggtggcgaaacgtctggcggacaaaaccatctgccgccgtttacgcgcagcccagagcgatgaagagctgtatcaaatcattacggataccgaaggtactccggatgaagcgtag

SEQ ID NO: 457837 - DNA, 288 bp, Shigella boydii
atgcagctcaacattaccggaaatcacgtcgagatcaccgaggcactgcgcgaatttgttagagccaaatttgccaaacttgagcaatattttgaccgaatcaaccaggtctatgttgttctgaaagtggagaaagtcacccacacctcagatgcaacactgcatgtaaacggtggtgaaattcatgccagcgcggaaggtcaggacatgtacgctgccattgatggcttaattgataagctggcacgccagttgaccaaacataaagataaactgaaacaacactaa

SEQ ID NO: 457838 - DNA, 1434 bp, Shigella boydii
atgaagcaaggtttgcaactcaggcttagccaacaactggcgatgacgccacagcttcaacaggcgattcgtctgttgcagttgtcgacgctggaacttcagcaggagctacagcaggcgctggagagtaatccgctgcttgagcaaatcgacactcatgaagaaatcgacacccgcgaaacgcaagacagtgaaacgctggacaccgccgacgcgctcgaacaaaaagagatgccggaagagctgccgctcgatgccagttgggacaccatttacaccgctggtacaccatccggcaccagcggtgactacattgacgatgagctgccggtctatcagggcgaaacgacgcagaccttgcaggattacctgatgtggcaggtcgagctgacaccgttttccgacactgaccgcgctattgctacctctatcgtcgatgccgttgatgacaccggttatctgactgtcccgctggaagatattctcgaaagtatgggcgatgaagagatcgacatcgacgaggttgaagccgtccttaagcggatccaacggtttgatccggtcggtgtagcggcaaaagatctgcgtgactgcctgctaatccaactctcccaattcgataaaaccacgccgtggctggaagaggccagactgatcattagcgatcatctcgatctgttagccaatcacgacttccgcactttaatgcgcgtcacgcgtctgaaagaagatgtgctgaaagaagccgtcaatctgatccagtcgctcgatccgcgccccgggcagtcgatccagactggcgaacctgagtatgtcattccagatgtgctggtgcgtaagcataacggtcactggacggtagaactcaacagtgacagcattccgcgtctgcaaatcaaccagcactacgcctcgatgtgcaataacgcgcgcaacgatggtgacagccagtttatccgcagcaatctgcaggatgccaaatggttgatcaagagtctggaaagccgtaacgatacgctactgcgcgtgagtcgctgtatcgttgaacagcagcaagccttctttgagcaaggtgaagaatatatgaaaccgatggtactggccgatatcgcccaggctgtcgaaatgcatgaatcgacgatatctcgcgtgaccacgcaaaaatacctgcatagtccacgaggcatttttgaactgaagtatttcttttccagtcacgtcaataccgagggcggcggcgaagcttcctccacggcgattcgtgcgctggtgaagaaattaatcgcggcggaaaacccagcgaaaccgttgagcgacagcaagttaacctctttgctgtcggaacaaggtatcatggtggcacgccgcactgttgcgaagtaccgagagtctttatccattccgccgtcaaaccagcgtaaacagctcgtttga

SEQ ID NO: 457839 - DNA, 726 bp, Shigella boydii
atggcaacattaactgcaaagaaccttgcaaaagcctataaaggccgtcgcgtggtagaagacgtcagcctgaccgtcaactccggggaaattgtcggtctgctggggccaaacggtgccggtaagaccaccactttctatatggttgttggcattgtgccgcgcgatgcgggcaacatcattattgatgatgacgatatcagtctgctgcctctgcatgcacgcgcgcgccgcggtatcggctatctgccacaggaagcctccattttccgtcgcctcagcgtttacgataacctgatggcggtactgcaaattcgtgacgacttgtctgctgaacaacgtgaagaccgcgcgaacgagctgatggaagagtttcacattgagcacctgcgtgacagcatggggcagtcactctccgggggtgaacgtcgccgtgtagaaattgcccgcgcactggctgcgaatccgaaatttattctactcgacgaaccgtttgccggggttgacccgatctcggttatcgacattaaacgcatcattgaacacctgcgcgacagcggcctgggcgtactgatcactgaccacaacgtgcgtgaaacactggcggtttgtgaacgcgcttatatcgtcagtcaggggcatttgattgcccacggcacgcctacagaaatcttacaagacgaacacgttaagcgtgtataccttggggaagacttcagactctga

SEQ ID NO: 457840 - DNA, 558 bp, Shigella boydii
atgaaattcaaaacaaacaaactcagccttaatcttgtgcttgccagctcacttctggccgccagcattccggcatttgccgtaaccggagacactgatcagccgatccacattgaatcggaccagcaatctcttgatatgcaaggcaacgtggttacctttaccggtaatgtcatcgtcacccagggcaccatcaaaattaatgccgacaaagtggtcgttacccgtccgggcggcgaacaaggtaaagaagtgattgacggctacggtaaaccggcaacgttctaccagatgcaggacaacggtaaacccgttgaaggtcatgcttcccagatgcactacgaactggcaaaagattttgtcgttctgacgggtaatgcttatctgcagcaggtcgatagcaacattaagggcgataagatcacttacctggtgaaagagcagaaaatgcaggctttcagcgacaaaggcaagcgcgtaacaaccgttctggtgccgtcgcagctgcaggacaaaaacaacaaaggccagaccccggcacagaagaagggtaattaa

SEQ ID NO: 457841 - DNA, 576 bp, Shigella boydii; identical to SEQ ID NO: 262541

SEQ ID NO: 457842 - DNA, 567 bp, Shigella boydii
atgagcaaagcaggtgcgtcgcttgcgacctgttacggccctgtcagcgccgacgttatagcaaaagcagagaacattcgtctgctgatcctcgacgttgatggcgtactgtcagatggcctgatttatatgggcaataacggcgaagagctgaaagcgttcaatgttcgtgacggttatggcattcgttgtgcgctcacctctgatattgaagtcgctatcattaccgggcgaaaggctaaactggtagaagatcgttgtgccacattggggatcactcacttgtatcaggggcagtcaaacaaactgatcgcctttagcgatctgctggaaaaactggcgattgccccggaaaatgtggcttatgtcggcgatgatctcatcgactggccggtaatggaaaaagtgggtttaagcgtcgccgtggccgatgctcatccactgttgatcccgcgcgccgattatgtgacgcgcattgctggcggttgtggcgcagtgcgagaagtttgcgacttattactcctggcgcagggcaaactggatgaagccaaagggcaatcgatatga

SEQ ID NO: 457843 - DNA, 987 bp, Shigella boydii
atgtcgcacgtagagttacaaccgggttttgactttcagcaagcaggtaaagaagtcctggcgattgaacgtgaatgcctggcggagcttgatcaatacatcaatcagaatttcacgcttgcctgtgaaaagatgttctggtgtaaagggaaagttgtcgtcatggggatggggaaatcggggcacatcgggcgcaaaatggccgcaacgtttgccagcaccggtacaccttcatttttcgtccatcctggtgaagccgcgcatggtgatttaggcatggtcaccccacaggatgtggtgattgctatctctaactcaggtgaatccagcgaaatcacggccttaattccagtgcttaagcgtcttcacgtaccgttaatctgcatcaccggtcgcccggagagcagcatggcgcgcgccgcagatgtgcatctgtgtgttaaagtagcgaaagaagcctgtccgttagggctggcaccgaccagcagcaccaccgccacgctggttatgggcgatgccctcgctgtcgcgctgttaaaagcacgcggctttactgctgaagattttgcgctctcacacccaggcggcgcactgggtcgtaaacttctgctgcgcgtaaacgatattatgcatacgggcgatgagatcccgcatgttaagaaaacggccagtctgcgtgacgcattgctggaagttacccgcaaaaatcttggtatgactgtcatttgcgatgacaatatgatgattgaaggcatctttaccgacggtgatttacgccgtgtcttcgatatgggcgtggatgttcgtcagttaagtattgccgatgtgatgacgccggggggaatacgcgtgcgccctggcattctggccgttgaggcactgaacttaatgcagtcccgccatatcacctccgtgatggttgccgatggcgaccatttactcggtgtgttacatatgcatgatttactgcgtgcaggcgtagtgtaa

SEQ ID NO: 457844 - DNA, 978 bp, Shigella boydii
atgcttttagctacggcactgttaattgttggtttacttttggtcgtttacagtgccgaccgcctggtttttgccgcgtctattctttgccgaacctttggcatcccgccgctgatcatcggcatgacggtggtcagtattggtacatcgttaccagaaatcatcgtctcgcttgccgcgtctctgcacgaacaacgcgatttagccgttggtacagccctcggctcaaacattatcaatattttgctgatcctcggtctggctgcgctggttcgtccttttaccgtccattccgatgttctgcgtcgtgaattacccttaatgttgttggtcagcgtagtggccggttccgtactctatgacggacaacttagtcgcagcgatggtatctttctcctctttctggctgtgctatggctgctgttcattgttaaacttgcacgtcaggctgaacgtcaggggactgacagcctgaccagagagcagcttgcagagctgccgcgtgacggcggattgcccgtcgcgtttttatggctcggcattgcgcttatcatcatgccagtggccacgcggatggtggttgataacgccacggtgctggcgaattactttgccatcagcgagttgacgatgggtctgacggcaattgctatcggaaccagcctgccggaactggcaaccgcaatagcggggggtcgcaaaggtgaaaacgacattgctgtcggaaatatcattggcgcaaacatttttaatattgtcatcgtgttgggtttacccgcgctgataacgccaggagagattgatccattggcgtacagtcgtgactacagcgtgatgttgctggtgagcattatttttgcgttgctgtgctggcggcgctccccgcaacggggccgtggtgtaggggtattattaactggcggatttatcgtatggctggcgatgttgtactggttatcgccaatactcgttgaataa

SEQ ID NO: 457845 - DNA, 810 bp, Shigella boydii
atggagcagtctgtggcgaatttagtcgatatgcgcgatgtcagttttacgcgtggcaatcgctgcatcttcgataatatttccctgaccgtgccgcgagggaagatcacggcgatcatggggccatcgggcatcggtaaaacgacgctactccgtctgattggcgggcaaatcgcaccagatcatggtgagatccttttcgatggtgagaatattccggcgatgtctcgttcgcgcctgtatacagtgcgcaaacggatgagcatgttatttcagtccggggcgttgttcactgatatgaacgtatttgacaacgtcgcctatccactgcgcgaacatacccaacttcccgcgccattgttgcatagtacggtgatgatgaagctggaggccgtggggctgcgtggagcggctaaactaatgccttctgaactttccggtgggatggcgcggcgtgcagcgctggcgcgtgcgattgcgctggagccggatctcatcatgtttgatgaaccttttgttgggcaagatcccatcaccatgggcgtactggtgaagctgatttctgagctgaacagcgcgctgggcgtgacttgtgtggtggtttctcacgatgtgccggaagtgttaagtattgcggatcacgcctggatcctggcggacaaaaaaattgtcgctcatggcagtgcccaggcgttgcaggcgaatcctgatccgcgcgtacgtcagtttctggacgggatagctgacgggcctgttccgttccgctatcctgccggcgattatcacgctgatcttttaccagggagttaa

SEQ ID NO: 457846 - DNA, 783 bp, Shigella boydii
atgctgttaaatgcgctggcgtcgctcggacataaagggattaaaaccctgagaacgttcgggcgggccgggttaatgttattcaatgcgctggtcggcaaaccggaatttcgcaaacatgcgccgctgctggtgcgccagctctataatgtcggcgtcctgtcgatgctgattattgtggtttctggcgtgttcatcggaatggtgttggggctgcaaggttatctggttctgaccacttatagtgcggaaaccagtctgggtatgctggtggcgttatcgctactgcgtgaactggggccggtggttgccgcgttgttgtttgccgggcgtgctggttcggcgctaaccgcagaaatcggcctgatgcgcgctacagagcaactctccagtatggagatgatggcggtggatccgctgcgtcgggttatttctccccgtttctgggctggggttatttcattaccactgttgacggttattttcgtcgccgtggggatctggggcggatctctggtcggcgtcagttggaaaggcattgatagcgggttcttctggtcggcaatgcaaaatgccgtcgactggcgtatggatctggtcaactgtctgattaagagcgtggtgttcgccatcacggtgacgtggatttcgttgtttaacggctacgacgccatcccgacgtctgccgggattagccgggcaaccactcgcaccgttgtccactcgtctctggctgttctggggctggattttgtgctgaccgcattgatgtttgggaattga

SEQ ID NO: 457847 - DNA, 552 bp, Shigella boydii
atgcaaacgaaaaaaaatgaaatttgggtgggtatctttttattagcagcactgctggcggctctgtttgtttgcctgaaggcggcgaacgtgacgtccatacgtactgaaccgacctacacgctttatgcgacgttcgataacattggcggcctgaaagcgcgctctccggtcagtattggtggcgttgttgtgggccgggtggcggatattacgctggacccgaaaacctatctgccacgcgtaacgctggaaattgaacaacgttataaccacattccagataccagttcgctgagcattcgtacttccggcctgctgggggaacaatatctggcattaaacgtcggttttgaagacccggaactggggactgctatcctgaaggatggcgatacaattcaggacactaagtctgcgatggtgctggaagatctcattggtcagttcctttacggtagtaaaggcgatgacaataagaatagtggcgatgcgccagctgctgcgccaggtaataatgaaaccactgaacctgtgggtacaacgaaataa

SEQ ID NO: 457848 - DNA, 636 bp, Shigella boydii
atgtttaaacgtttaatgatggtcgctttgctggtgattgcaccgctgagtgcggcaaccgcggcagaccagaccaatccttataagctgatggacgaggcggcgcagaaaacgttcgatcgcctgaagaatgagcaaccgcaaattcgggccaacccggattatctgcgtaccattgttgatcaggaactgctgccatacgtacaggtgaaatacgccggtgcgctggtgctgggccagtattacaagagtgcgacccctgctcaacgtgaagcctactttgccgctttccgtgagtacctgaagcaggcttacggtcaggcgctggcgatgtatcacggtcaaacctatcagattgcgccagaacagccgctgggcgataaaaccattgtgccgattcgcgttaccattattgatccgaatggccgcccgccggtgcgtctggacttccagtggcgtaaaaactcccagacgggcaactggcaggcttacgacatgattgctgaaggcgtcagtatgatcaccaccaaacaaaacgagtggggaacgctgctgcgtaccaaaggtatcgacggcctgactgcgcaactgaaatcgatttctcaacagaaaatcactctggaagagaaaaaataa

SEQ ID NO: 457849 - DNA, 294 bp, Shigella boydii
atgagcgagtcactgagctggatgcagacgggtgacacgctggcgttatccggagagctggatcaggacgttttgctaccgctttgggaaatgcgtgaggaagcggtgaaggggattacctgcatcgatcttagccgtgtgtcccgcgtggatacggggggactggcactgctgctccatcttatcgatctggcgaaaaagcagggcaacaatgtgacgcttcagggggtaaacgacaaagtgtataccctggcgaaattgtataatttgcctgctgatgttctgcctcgttaa

SEQ ID NO: 457850 - DNA, 270 bp, Shigella boydii; identical to SEQ ID NO: 1092

SEQ ID NO: 457851 - DNA, 1260 bp, Shigella boydii
atggataaatttcgtgttcaggggccaacgaagctccagggcgaagtcacaatttccggcgctaaaaatgctgctctgcctatcctttttgccgctctactggcggaagaaccggtagagatccagaacgtcccgaaactgaaagacgtcgatacatcaatgaagctgctaagtcagctgggtgcgaaagtagaacgtaatggttctgtgcatattgatgcccgcgacgttaatgtattctgcgcaccttacgatctggttaaaaccatgcgtgcttctatctgggcactggggccgctggtagcgcgctttggtcaggggcaagtttcactgcctggcggttgtacgatcggtgcgcgtccggttgatctacacatttctggcctcgaacaattaggcgcgaccatcaaactggaagaaggttacgttaaagcttccgtcgatggtcgtctgaaaggcgcacatatcgtgatggataaagtcagcgttggcgcaacggtgaccatcatgtgtgctgcaaccctggcggaaggtaccacgattattgaaaacgcagcgcgtgaaccggaaatcgtcgataccgcgaacttcctgattacgctgggtgcgaaaattagcggtcagggcaccgatcgtatcgtcatcgaaggtgtggaacgtttaggcggcggtgtctatcgcgtgctaccggatcgtatcgaaaccggtactttcctggtggcggcggcgatttctcgcggcaaaattatctgccgtaacgcgcagccagatactctcgacgccgtgctggcgaaactgcgtgacgctggagcggacatcgaagtcggcgaagactggattagcctggatatgcatggcaaacgtccgaaggctgttaacgtacgtaccgcgccgcatccggcattcccgaccgatatgcaggcccagttcacgctgttgaacctggtggcagaagggaccggattcatcaccgaaacggtctttgaaaaccgctttatgcatgtgccggagcttagccgtatgggcgcgcatgccgaaatcgaaagcaataccgttatttgtcatggtgttgaaaaactttctggtgcacaggttatggcaaccgatctgcgtgcatcagcaagcctggtgctggctggctgtattgcggaagggacgacggtggttgatcgtatttatcacatcgatcgtggctacgaacgcattgaagacaaactgcgcgctttaggtgcaaatattaagcgtgtgaaaggcgagtaa

SEQ ID NO: 457852 - DNA, 279 bp, Shigella boydii
atggaaagtaatttcattgactggcatccccctgacatcattgcaggtttgcgcaagaaaggaacgtcaatggcggcggaatctcgcagaaatggtttgagttcctcaacgctggcaaacgcattatcgcgcccatggccgaaaggagagatgattattgcgaaagccctgggaactgacccctgggttatctggccatcacgctaccatgatccgcagacccatgagtttatcgacagaacgcagttgatgcgtagctacactaaaccgaaaaaatga

SEQ ID NO: 457853 - DNA, 972 bp, Shigella boydii
atgaatttagaaaaaatcaatgagttaaccgcgcaagatatggcgggtgttaatgcggcaatccttgagcagcttaattccgacgtccaactgatcaatcagttaggctattacatcgtcagcggcggcggtaaacgtattcgtccgatgattgctgtactggctgcacgagctgttggctatgagggaaatgcgcatgtcaccattgctgccctgatcgagtttatccacacggcgactctgctacacgacgacgttgtggatgaatcagatatgcgcaggggtaaagctaccgccaacgctgcatttggcaatgccgccagcgtgctggtaggcgattttatttatacccgcgcgttccagatgatgaccagcctcggttcactcaaagtgctggaagtcatgtcagaagctgtaaacgtcatcgcagaaggtgaagttctgcaactgatgaacgttaacgatccggacatcactgaagaaaactacatgcgcgttatctatagtaaaaccgcgcgtctgtttgaggctgccgcgcagtgttccgggattctggctggctgtacgccggaggaggagaaaggcctgcaggattatgggcgctatctcggcactgctttccagttgatcgacgatttactcgattacaatgccgatggcgaacagttaggtaaaaacgtcggcgacgatctgaacgaaggtaaaccgacgctgccgctgctgcatgcgatgcatcatggcacaccagaacaggcacagatgatccgtaccgccatcgaacagggtaacggtcgccatcttctggaaccggttctggaagcaatgaacgcttgtggatctcttgaatggacgcgtcagcgcgccgaggaagaagcagacaaagccatcgcagcgttacaggtgctcccggacaccccttggcgagaagcactcatcggcctcgcgcacatcgctgttcaacgcgatcattaa

SEQ ID NO: 457854 - DNA, 312 bp, Shigella boydii; identical to SEQ ID NO: 1096

SEQ ID NO: 457855 - DNA, 258 bp, Shigella boydii
atggcacataaaaaggctggcggctccacacgtaacggtcgcgattcagaagctaaacgcttgggcgttaagcgtttcggtggcgaatccgttctggcgggtagcatcatcgttcgtcaacgtggtaccaaattccacgctggcgctaacgtaggttgcggtcgtgaccacactctgtttgctaaagcagacggtaaagtgaaattcgaagttaaaggcccgaaaaaccgtaaatttatcagcatcgaagctgaataa

SEQ ID NO: 457856 - DNA, 966 bp, Shigella boydii
atgaagcagcaggcaggcattggcattcttttggcgctcaccacagcaatttgctggggggcgttgccaatcgcaatgaagcaggtgctggaggtgatggaacctccgacaatcgtgttttaccgtttcttgatggcgagtattggcctgggtgccattcttgcggtgaagaagaggttgccgccattacgcgtgtttcgtaagctacgctggttgattttgttggcagtggcgaccgccgggctgtttgggaacttcatcctgttcagctcatccttgcaatacctgagtccgaccgcttcgcaggtgattgggcaactctcgccagttggcatgatggttgccagcgtatttatcctgaaagagaaaatgcgcagcactcaggttgtaggggcattgatgctcctgagcggcctggtgatgttttttaacaccactctggtcgagatatttacaaagctcactgattacacctggggagtcatctttggggtcggtgcggcgacggtttgggtgagttatggcgtggcgcaaaaggttttattgcgtcggctggcctcaccgcagatcctgtttttgctgtacactttatgtacaattgcgctcttccctctggcaaagccaggagtgatagcgcagcttagccactggcagctcgcatgtttaattttttgcggactgaatacattggtaggatatggcgccctggcggaagcgatggctcgctggcaggcagcgcaggtgagcgcgatcatcacgctcaccccactgtttacgctgtttttttcagatcttttatcactggcctggcccgatttcttcgccagaccgatgttaaaccttttaggttatctcggtgcgtttgtcgtggttgcgggcgcgatgtattccaccattggtcatcgtatttggggcggattacgtaagcatacaacggtggtatcgcaaccccgcgcaggcgaatga

SEQ ID NO: 457857 - DNA, 1173 bp, Shigella boydii
atgaagtttgttgatgaagcatcgattctggtcgttgcaggtgatggcggtaatggttgcgtgagcttccgccgcgaaaagtatattccgaaaggcggcccggatggcggcgacggtggtgatggtggtgacgtatggatggaagccgacgaaaacctgaacacgcttatcgattatcgttttgaaaaatctttccgtgcagagcgcggtcagaacggcgcaagccgcgattgtaccggtaagcgcggtaaagacgtgacgattaaagtgccggtaggtacgcgtgtaatcgaccagggtactggtgaaaccatgggcgatatgactaaacacggtcagcgtctgctggttgctaagggcggctggcacggtctgggcaatacccgtttcaaatcgtccgttaaccgtacaccacggcagaaaaccaacggtacgccgggtgataagcgtgagctgctgctggagctgatgctgctggctgacgtcggtatgttggggatgccaaacgcgggtaaatcgacctttattcgcgcggtatcggcggctaaaccgaaagtggcggattatccgtttaccactctggtgccaagtctgggtgtggtacgaatggacaacgaaaagagcttcgttgttgccgatattccaggactgattgaaggcgctgcggaaggcgcaggtctgggtatccgcttcctgaagcacctggaacgttgccgcgtcctgttgcacctcatcgatatcgatccgattgacggcaccgatccggttgaaaacgcgcgtattattatcagcgagctggaaaaatacagccaggatctggcggcgaaaccgcgttggttagtgttcaataagatcgatctgctggataaggcagaagctgaagagaaagcgaaagcgattgctgaagcgctgggctgggaagataaatattatctgatctctgcggcgagtggactgggcgtgaaagatctctgctgggatgtgatgacctttatcattgaaaacccggtcgtgcaggctgaagaagcgaaacagccagagaaagtcgaattcatgtgggatgattatcatcgccagcagcttgaagagattgctgaagaggatgatgaggactgggatgatgactgggacgaagacgacgaagaaggcgttgagttcatttacaagcgttaa

SEQ ID NO: 457858 - DNA, 1434 bp, Shigella boydii
atgcgattttccagatttatcatcggattgaccagctgtatagcgttcagtgttcaggccgcgaatgttgatgagtacgttactcaactccccgctggtgccaaccttgccctgatggtgcaaaaagtcggcgcgtcggcccccgctattgattaccacagtcagcagatggcgctgcccgccagtacgcagaaagtgattactgcgctggcggcgttgattcaactcggccccgattttcgtttcaccacgacgcttgaaaccaaaggcaatgtggaaaacggcgtacttaagggtgacttagtggcgcgatttggtgccgatccgacgttaaaacgtcaggatattcgcaatatggtcgcgactttgaaaaaatctggcgtcaaccaaatcgatggcaatgtgttgatagatacctccattttcgccagccacgataaagcccccggctggccatggaatgacatgacacaatgctttagcgctccgcctgccgctgccatagttgaccgcaactgtttctccgtctcgctctacagtgccccaaaacctggtgatatggcttttatacgcgtggcatcttattaccccgttacgatgttcagccaggtacgcaccctcccccgaggttctgccgaagcgcaatactgcgaactggatgtcgtaccaggcgacctgaaccgctttacgctgacgggatgcctgccacaacgttctgagccgctcccgttggcttttgccgtgcaggatggagccagctatgccggggcaattctgaaagatgagttaaaacaggcaggtatcacctggagcggaacactgctgcgccagactcaggttaacgaacctggaacggtagttgccagtaaacagtcggccccgttgcacgatctgcttaagattatgctgaaaaagtcggacaacatgatcgccgatacggttttccgcatgataggccatgcgcgcttcaatgtgcctggaacatggcgggccgggtcggacgccgtgcgtcagatcctgcgccagcaagccggtgtcgatattggaaacaccattattgccgatggttcagggctttcgcggcataacctgattgcccccgccaccatgatgcaggtgttgcaatacattgcccaacacgacaatgaacttaactttatctccatgctgccgctggcgggctatgatggctctttgcagtaccgtgcaggtctgcatcaggcgggcgtggatggaaaagtctcagcgaaaaccggttcgttgcagggggtatataacctggcgggattcattaccacagcgagcgggcaacgaatggcgtttgtacaatatctttctggctatgcagtagaaccggcggatcagcgtaatcgccgtattccgttagtgcgttttgaaagccgtttgtataaagatatttatcagaacaattag

SEQ ID NO: 457859 - DNA, 477 bp, Shigella boydii
atgcaagctattccgatgaccttacgcggcgctgaaaaattacgcgaagagctggattttctgaaatctgtgcgccgtcctgaaatcattgctgctatcgcggaagcgcgtgagcatggcgacctgaaagaaaacgccgaataccacgcagctcgtgaacagcagggtttctgcgaaggccgtattaaagacatcgaagccaagctgtcgaacgcgcaggtgattgatgtcaccaaaatgcccaacaatgggcgcgttatttttggtgctaccgtaacggtgctgaatctggattctgacgaagaacagacttatcgcatcgttggcgatgacgaagctgactttaaacaaaacctgatttctgtaaactcgcctattgctcgtggcctgatcggcaaagaagaagatgatgttgtggtcatcaaaacgccgggcggcgaagtagaatttgaagtaattaaggtggaatacctgtaa

SEQ ID NO: 457860 - DNA, 294 bp, Shigella boydii
atgaatctgagtactaaacaaaaacagcacctgaaaggtctggcacatccgctcaagccagttgttctgcttggcagtaatggtttgaccgaaggggtgctggccgagattgaacaagcgttagagcaccatgaactcatcaaggtgaaaatcgccaccgaagatcgcgaaacaaaaaccttgatcgtggaagctatcgtgcgcgaaaccggcgcctgtaatgtacaggtcatcggtaaaacgctggtgctttatcgcccaactaaagaacgtaaaatctcgctgccacgctaa

SEQ ID NO: 457861 - DNA, 630 bp, Shigella boydii
atgacaggtaagaagcgttctgccagctccagccgctggcttcaggaacactttagcgataaatatgttcaacaggcacagaaaaaggggttacgttcccgtgcctggtttaaacttgatgaaatacagcaaagtgacaaactctttaaaccgggaatgacggttgtcgaccttggtgctgctccgggtggttggtcacaatatgtggtcacccaaattggcggcaaaggccgcatcatcgcttgcgatcttttacctatggatcctatcgttggtgtggactttcttcagggcgattttcgtgatgaactggtgatgaaagcactgctggagcgcgttggcgacagcaaagtccaggttgtcatgtccgatatggcaccaaacatgagcggaacaccggcggtggatatcccccgtgccatgtatctggtggaactggcgttagaaatgtgtcgtgatgtattagcgccaggtggcagttttgtagtgaaggtgttccagggcgaaggtttcgatgagtatctaagggaaattcgctccctgtttacgaaggtcaaagttcgtaagccggactcttctcgtgcacgttcgcgggaagtgtatattgtagcgaccgggcgtaaaccctaa

SEQ ID NO: 457862 - DNA, 1944 bp, Shigella boydii
ttgagtgacatggcgaaaaacctaatactctggctggtcattgccgttgtgctgatgtcagtattccagagctttgggcccagcgagtctaatggccgtaaggtggattactctaccttcctacaagaggtcaataacgaccaggttcgtgaagcgcgtatcaacggacgtgaaatcaacgttaccaagaaagatagtaaccgttataccacttacattccggttcaggatccgaaattactggataacctgttgaccaagaacgtcaaggttgtcggtgaaccgcctgaagaaccaagcctgctggcttctatcttcatctcttggttcccgatgctgttgctgattggtgtctggatcttcttcatgcgtcaaatgcagggcggcggtggcaaaggtgccatgtcgtttggtaagagcaaagcgcgcatgctgacggaagatcagatcaaaacgacctttgctgacgttgcgggctgcgacgaagcaaaagaagaagttgctgaactggtagagtatctgcgcgagccgagccgcttccagaaactcggcggtaagatcccgaaaggcgtcctgatggtcggtcctccgggtaccggtaaaacgttgctggcgaaagcgattgcaggcgaagcgaaagttccgttctttactatctccggttctgacttcgtagaaatgttcgtcggtgtgggtgcatcccgtgttcgtgacatgttcgaacaggcgaagaaagcggcaccgtgcatcatctttatcgatgaaatcgacgccgtaggccgccagcgtggcgctggtctgggcggtggtcacgatgaacgtgaacagactctgaaccagatgctggttgagatggatggcttcgaaggtaacgaaggtatcatcgttatcgccgcgactaaccgtccggacgttcttgacccggccctgctgcgtcctggccgtttcgaccgtcaggttgtggttggcttgccagatgttcgcggtcgtgagcagatcctgaaagttcacatgcgtcgcgtaccattggcacccgatatcgacgcggcaatcattgcccgtggtactcctagtttctccggtgctgacctggcgaacctggtaaacgaagcggcactgttcgctgctcgtggcaacaaacgcgttgtgtcgatgattgagttcgaaaaagcgaaagataaaatcatgatgggtgcggaacgtcgctccatggtgatgacggaagcgcagaaagaatcgacggcttaccacgaagcgggtcatgcgattatcggtcgcctggtgccggaacacgatccggtgcacaaagtgacgattatcccacgcggtcgtgcgctgggtgtgactttcttcttgcctgagggcgacgcaatcagcgccagccgtcagaaactggaaagccagatttctacgctgtacggtggtcgtctggcagaagagatcatctacgggccggaacatgtttctaccggtgcgtccaacgatattaaagttgcgaccaacctggcgcgtaacatggtgactcagtggggcttctctgagaaattgggtccactgctgtacgcggaagaagaaggtgaagtgttcctcggccgtagcgtagcaaaagcgaaacatatgtccgatgaaactgcacgtatcatcgaccaggaagtgaaagcactgattgagcgtaactataatcgtgcgcgtcagcttctgaccgacaatatggatattctgcatgcgatgaaagatgctctcatgaaatatgagactatcgacgcaccgcagattgatgacctgatggcacgtcgcgatgtacgtccgccagcgggctgggaagaaccaggcgcttctaacaattctggcgacaatggtagtccaaaggctcctcgtccggttgatgaaccgcgtacgccgaacccgggtaacaccatgtcagagcagttaggcgacaagtaa

SEQ ID NO: 457863 - DNA, 849 bp, Shigella boydii
atgaaactctttgcccagggcacttcactggaccttagccatcctcacgtaatggggatcctcaacgtcacgcctgattccttttcggatggtggctcgcataactcgctgatagatgcggtgaaacatgcgaatctgatgatcaacgctggcgcgacgatcattgacgttggtggcgagtccacgcgcccaggggcggcggaagttagcgttgaagaagagttgcaacgtgttattcctgtggttgaggcaattgctcaacgcttcgaagtctggctctcggtagatacatccaaaccagaagtcatccgtgagtcagcgaaagttggcgctcacattattaacgatatccgctccctttccgaacctggcgctctggaggcggcggcagaaaccggtttaccggtttgtctgatgcatatgcagggaaatccaaaaaccatgcaggaagctccgaagtatgacgatgtctttgcagaagtgaatcgctactttattgagcaaatagcacgttgcgagcaggcgggtatcgcaaaagagaaattgttgctcgaccccggattcggtttcggtaaaaatctctcccataactattcattactggcgcgcctggctgaatttcaccatttcaacctgccgctgttggtaggtatgtcacgaaaatcgatgattgggcagctgctgaacgtggggccgtccgagcgcctgagcggtagtctggcctgtgcggtcattgccgcaatgcaaggcgcgcacattattcgtgttcatgacgtcaaagaaaccgtagaagcgatgcgggtggtggaagccactctgtctgcaaaggaaaacaaacgctatgagtaa

SEQ ID NO: 457864 - DNA, 1338 bp, Shigella boydii
atgagtaatcgtaaatatttcggtaccgatgggattcgtggtcgtgtaggggatgcgccgatcacacctgattttgtgcttaagctgggttgggccgcgggtaaagtgctggcgcgccacggctcccgtaagatcattattggtaaagacacgcgtatttctggctatatgctggagtcagcactggaagcgggtctggcggcagcgggcctttccgcactcttcactggcccgatgccaacaccggccgtggcttatctgacgcgtaccttccgcgcagaggccggaattgtgatatctgcatcgcataacccgttctacgataatggcattaaatttttctctatcgacggcaccaaactaccggatgcggtagaagaggccatcgaagcggaaatggaaaaagagatcagctgtgttgattcggcagaactgggtaaagccagccgtatcgttgatgctgcgggtcgctatatcgagttttgcaaagccacgttcccgaacgaacttagcctcagcgaactgaagattgtggtggattgcgcaaacggtgcgacttatcacatcgcgccgaacgtgctgcgtgaactgggggcgaacgttatcgctatcggttgtgagccgaacggtgtaaacatcaatgccgaagtgggggctaccgacgttcgcgcgctccaggctcgtgtgctggctgaaaaagcggatctcggtattgccttcgacggcgacggcgatcgcgtgattatggttgaccatgaaggcaataaagtcgatggtgatcagatcatgtatatcatcgcgcgtgaaggtcttcgtcagggccagctgcgtggtggtgctgtgggtacattgatgagtaacatagggcttgagctggcgctgaaacagttaggtattccatttgcgcgcgcgaaagtgggtgaccgctacgtactggaaaaaatgcaggagaaaggctggcgtatcggtgcagagaattccggtcatgtgatcctgctggataaaaccactaccggtgacggcatcgttgctggcttgcaggtgctggcggcgatggcacgtaaccatatgagcctgcacgacctttgcagcggcatgaaaatgttcccgcagattctggttaacgtgcgttacaccgcaggtagcggcgatccgcttgagcatgagtcagttaaagccgtgaccgcagaggttgaagctgcgctgggcaaccgtggacgcgtgttgctgcgtaaatccggcaccgaaccgttaattcgcgtgatggtggaaggcgaagacgaagcgcaggtgactgaatttgcacaccgcatcgccgatgcagtaaaagccgtttaa

SEQ ID NO: 457865 - DNA, 333 bp, Shigella boydii
atgtacgaagctcttttggtagttttccttattgtggcaattggccttgttggtctgatcatgctgcagcaaggtaaaggcgctgatatgggagcctccttcggagcaggcgcttccgctacgctgtttggttcaagtggttctggtaacttcatgacccgcatgacggcgctgctggcaacgttattcttcatcatcagtctggtgctgggtaacatcaatagcaacaaaaccaataaaggtagcgaatgggaaaatctgagtgcaccggcgaaaaccgaacaaactcaaccagctgctccggctaagccgaccagcgatatcccgaactaa

SEQ ID NO: 457866 - DNA, 690 bp, Shigella boydii
atgacagtattcaacaaatttgctagaagttttaaatctcattggttgttgtatctttgtgttattgtttttggtattacgaacttagtcgcctcttccggcgcgcatatggttcagcgattgctgttcttcgtcctgaccatcctggttgtaaaacgtatatcatcccttccgcttcgcctgcttgttgccgcaccatttgtgttactgactgcggcagacatgagtattagcctctattcatggtgtacctttggtacaactttcaatgatggatttgcgattagtgtgctccagagtgatccggatgaagttgtcaaaatgctggggatgtatatcccttatctatgtgcctttgcttttttatcccttcttttttgggtagtaataataaaatatgatgtttccttgccgacaaaaaaagtgacaggaatattattgctgattgtcatttcgggcagtttattttccgcttgtcaatttgcttataaagatgcaaaaaataaaaaaacgttcagtccatatatactagcgtcgcgatttgctacctatacgccgtttttcaatctcaactattttgctttagcagcgaaaaagcatcaaagattaggtaatgactccaacttactgatagtgttttatgttcagataatgcccgatgaccttgtcatgcagctccaccgattttga

SEQ ID NO: 457867 - DNA, 243 bp, Shigella boydii
atgaccgaatttacaactcttcttcagcaaggaaacgcctggttcttcatccccagcgccatcttacttggtgcgcttcatggtctggaaccagggcactcaaaaacgatgatggcggcgtttatcatcgccatcaaaggcaccattaaacaggcggtgatgctcggactggcagcaaccatttcgcagaccgcggtggtctggttgattgcctttggcgggatggtgatcagtaagcgctga

SEQ ID NO: 457868 - DNA, 273 bp, Shigella boydii
atgtctcatacaatccgtgataaacagaaactgaaagcgcgtgccagtaagattcagggccaggtcgtggcgctcaagaaaatgctcgacgagccgcacgaatgcgctgcagttttacaacagattgctgctatccgtggcgcggtaaacggtctgatgcgggaagtgattaaaggtcatctgacggaacacatcgttcaccagggggatgagctaaaacgtgaagaagatctggatgtcgttctgaaggtgctggattcatatatcaaataa

SEQ ID NO: 457869 - DNA, 789 bp, Shigella boydii
atgcaagtcgacctgctgagttccgcgcaatctgcgcacacgttacacctttttcaccaacattcccctcttgtgcactgcatgaccaacgatgtggtgcaaacctttactgccaataccttgctggcgctcggtgcatcgccagcgatggttatcgaaaccgaagaggccagtcagtttgcggctattgctagtgcgttgctgattaacgttggcacgctgacgcagccacgcgcacaggcgatgcgtgccgccgttgagcaagcaaaaagctctcaaaccccctggacgcttgatcctgtagcggtgggtgcactcgattatcgccgccgtttttgtctggaacttctgtctcataagccaaccgccatacgtggtaatgcttcggaaatcatggcattagctggcgttgctaatggtggacggggagtggataccactgacgccgcagctaacgcaatacccgctgcacaaacactggcacgggaaactggcgcaatcgtcgtggtcacaggcgaggtggattatgttaccgatgggcatcgtatcgttggcattcacggtggcgatccgctaatgactaaagtggtaggaactggctgtgcattatcggcggttgttgctgcctgttgtgcgttaccaggcgatatgctggaaaatgtcgcatctgcctgtcactggatgaaacaagccggagagcgcgcagtcgccagaagcgaggggccaggcagttttgttccacatttccttgatgcgctctggcaattgacgcaggaggtgcaggcatga

SEQ ID NO: 457870 - DNA, 801 bp, Shigella boydii
atgaaacgaattaacgctctgacgattgccggtactgatcccagtggtggtgcggggattcaggccgatcttaaaaccttctcggcacttggcgcttatggttgctcagttattactgcactggtggcgcaaaatacccgtggcgtacagtcggtgtatcgcattgagcctgattttgtcgccgcccagctcgattcggtgttcagcgatgtgcgaatcgacaccactaaaatcggtatgttggcggaaaccgatattgttgaagcggtggcagaacggttgcaacgttatcagatccaaaacgtggtactcgacaccgttatgctggcaaaaagcggcgacccgctgctttcaccttcggcggttgctacgctgcgcagtcgattattgccacaggtttcattaataacgccaaacttgcccgaagctgccgccttgctcgacgcgccacacgcgcgcaccgaacaggaaatgctggaacaagggcgatcgctgttggcgatgggctgtggcgcagtgctaatgaaaggtggtcatctggatgatgagcaaagcccggactggctgtttacccgcgagggtgaacaacggtttaccgcaccgcgcattatgaccaaaaacacccacggtactggttgtacactctctgcggcgttggctgcactacgcccgcgccatacaaactgggctgacaccgtacaggaggcaaaaagctggctttcatcggcgttagcccaggccgacacgctggaagttggtcacggtattggtccggttcaccacttccacgcctggtggtga

SEQ ID NO: 457871 - DNA, 819 bp, Shigella boydii
atgcagctaagaattaccagtcgaaaaaaactcaccgctctattatgcgctcttgggctaatttccatcgttgcaatttatccgcgtcagacggtgaattttttctattcgacagcagttcagattacagactacatccacttctacggttatcgcccggttaaatctttcgctattcgtattcctgccagttacaccattcacggaatagatgtttcgcgctggcaggagcggatcgactggcagcgtgtggcaaaaatgcgcgataacggtattcgcttacaatttgcctttattaaggcgacggaaggcgaaaagctggtggacccctatttttcgcgtaactggcaactaagccgtgaaaatggcctgctgcgcggggcatatcattatttctccccgtcggtagcagcaccggttcaggtgcgattatttctgcaaacggtagatttctcacaaggcgatttccctgcggtactggacgtagaagagcgaggaaaattatcggcaaaagaattacgcaagagggtaagtcagtggctaaaaatggtcgaaaaaagtacggggaaaaagccgattatttactcaggagccgttttttatcacacgaatctggcgggctatttcaatgaatatccgtggtgggtggctcactactatcaacgtcgtccggacaatgacggcatggcctggcgcttctggcagcattccgaccgtggacaggtagatggcatcaatggtccggtggattttaatgtgtttaatggcacggtggaggagttgcaggggttcgttgatgggattaaagaaacgccttaa

SEQ ID NO: 457872 - DNA, 747 bp, Shigella boydii
atggaacaagcgcatacccagctgattgcccaactgaacgaacgtattttagcggcggataacacgccgctttatattaagtttgccgaaacggtaaaaaatgccgtgcgcagcggggtgctggagcatggcaatattttgcccggtgagcgtgatttaagtcagttaaccggcgtttcgcgcattacggtgcgcaaggcgatgcaggcgctggaagaagagggtgtggtgacgcgttcgcgtggttacggcacgcagatcaacaacatcttcgaatactcgttgaaagaagcgcgaggtttttctcagcaggtggtattgcgcgggaaaaagcccgatacgctatgggttaacaagcgtgtcgtgaaatgtcccgaagaagtcgcgcagcagctggcggtcgaagcaggaagtgatgtctttttgcttaagcgtattcgctatgtcgatgaagaagcggtatcgattgaggaatcgtgggttccggcgcatttaattcatgatgttgatgccatcgggatttcactttatgactatttccgcagccagcacatttacccacaacgtacgcgttcccgcgttagcgcccggatgccggatgccgagtttcagtcacatattcagttagatagcaaaataccggtgctggtgatcaagcaagtggcgcttgaccaacagcaacggcctattgagtacagcattagccactgtcgcagcgatctatacgtttttgtgtgcgaggagtaa

SEQ ID NO: 457873 - DNA, 951 bp, Shigella boydii
atgagcggcgctcgattacacacgctgctgcctgaattaaccacgcgtcagtcggtgatggtcgtcggcgcggcggtcattgacgtgatcgccgacgcttatgtcctcccctggcgtgggtgcgatatcgaactgaaacagcagagcgttaacgttggcggctgcgcactgaatattgccgtggcgttaaagcgcctcggcatcgaagcgggtaatgccttgccgctcggtcagggggtatgggcggagattattcgcaaccggatggcgaaagaggggttaatcagcctgatcgataacgccgaaggcgataacggctggtgtctggcgctggttgagccggatggcgaacgtacttttatgtcattcagcggtgtggaaaatcagtggaatcgccagtggctggcgcgattaaccgttgcgcctggcagcctgctctatttttccggttatcaactggcctcgccctgcggcgaattgttagtggaatggctggaagagctgcaagacgtgacgccgtttatcgattttggcccacgtattggcgatatcccggacgcattactggcgcggatcatggcctgtcgacctttagtgtcactcaatcgtcaagaggctgagattgccgccgaacgttttgctttatccgcagagataacaacacttggcaagcaatggcaggagaaatttgccgcgccgttgatcgttcgtctcgataaagaaggcgcatggtatttcagcaacgacgcttctggctgcattccggcatttccaacgcaagttgtcgacaccattggggcgggcgacagtcatgccgggctggcctctggtctgccactggcggatgccgtattactgggcaatgcagtggcgtcgtgggttgtcgggcatcggggcggtgattgtgcgccaacgcgcgaggaattactcctcgcacacaaaaacgtatag

SEQ ID NO: 457874 - DNA, 1005 bp, Shigella boydii
atgaaaacagaacgtattctcggtgctctttatgggcaggcgttaggggatgcgatggggatgccctccgagctttggccacgcagccgcgttaaagcacactttggctggattgaccgttttcttcctggaccaaaggagaataacgcggcctgttattttaaccgcgccgaattcaccgacgatacctcgatggcgctgtgtctggcggatgcgttactggaacgtgaaggcaagatcgatccgaatcttattgggcgtaatattctcgactgggcgctgcgtttcgacgcctttaacaaaaacgtactaggtccgacctcgaagattgctctcaacgccattcgcgacggtaaacccgttgctgaactggaaaacaatggcgtgaccaacggcgcggcaatgcgcgtctcgccattaggttgtttgcttccggcgcgtgatgttgattcctttattgatgatgtggcgctggcgtccagcccgacccataaatccgatctggcggttgcgggcgcggtagtcatcgcatgggcgatttctcgtgccattgacggagaaagctggtcagcgattgtagattcactgccttcaattgcgcgacatgcccagcaaaaacgcatcaccaccttcagcgcctcactggcagcacgtctggagattgcgctgaaaattgtgcgcaatgccgacggcactgaatccgccagcgaacagctgtatcaggtcgttggcgcaggtaccagcactatcgagtccgttccgtgcgccattgcgctggttgaactggcacaaaccgacccgaaccgttgcgccgtcctctgcgctaaccttggcggcgatacagacaccatcggtgctatggcgacggcaatctgcggcgcgttgcatggcattaacgctatcgatcctccgttaaaggcggagctggatgcggtaaatcagcttgatttcaaccgctatgccacagcgctggcgaaatatcgtcaacaacgggaggcggtatga

SEQ ID NO: 457875 - DNA, 1278 bp, Shigella boydii
atgaaaacaacagcaaagctgtcgttcatgatgtttgttgaatggtttatctggggcgcgtggtttgtgccattgtggttgtggttaagtaaaagcggttttagtgccggagaaattggctggtcgtatgcctgtaccgccattgcggcgatcctgtcgccaattctggttggctccatcactgaccgctttttctcggcgcagaaagtgctggcggtattgatgttcgcaggcgcgctgctgatgtatttcgctgcgcaacagaccacttttgccgggttcttcccgttactgctggcctactcgctaacctatatgccgaccattgcgctgactaacagcatcgcttttgccaacgtgccggatgttgagcgtgatttcccgcgcattcgtgtgatgggcactatcggctggattgcctccggtctggcatgtggtttcttgccgcaaatactggggtatgccgatatctcaccgactaacatcccgctgctgattaccgccggaagttctgctctgctcggtgtgtttgcgtttttcctgcccgacacgccaccaaaaagcaccggcaaaatggatattaaagtcatgctcggcctggatgcgctgatcctgctgcgcgataaaaacttcctcgtctttttcttctgttcattcctgtttgcgatgccactggcgttctattacatctttgccaacggttatctgaccgaagttggcatgaaaaacgccaccggctggatgacgctcggccagttctctgaaatcttctttatgctggcattgccgtttttcactaaacgctttggtatcaaaaaggtgttattgcttggtctggtcaccgctgcgatccgctatggcttctttatttacggtagtgcggatgaatatttcacctacgcgttactgttcctcggtattttgcttcacggcgtaagttacgatttttactacgttaccgcttacatctatgtcgataaaaaagcccccgtgcatatgcgtaccgctgcgcaggggctgatcacgctctgctgccagggcttcggcagtttgctcggctatcgtcttggcggtgtgatgatggaaaagatgttcgcttatcaggaaccggtaaacggactgactttcaactggtccgggatgtggactttcggcgcggtgatgattgccattatcgccgtgctgttcatgatttttttccgcgaatccgacaacgaaattacggctatcaaggtcgatgatcgcgatattgcgttgacacaaggggaagttaaatga

SEQ ID NO: 457876 - DNA, 1053 bp, Shigella boydii
atgacagatattgcgcagttgcttggcaaagacgccgacaaccttttacagcaccgttgtatgactattccttctgaccagctttatctccccggacatgactacgtagaccgcgtgatgattgacaataatcgcccgcctgcggtgttacgtaatatgcagacgttgtacaacaccgggcgtctggctggcacaggatatctttctattctgccggttgaccagggcgttgagcactctgccggagcttcatttgctgctaacccgctctactttgacccgaaaaacattgttgaactggcgatcgaagcgggctgtaactgtgtggcgtcaacttacggcgtgctggcgtcggtatcgcggcgttatgcgcatcgcattccattcctcgtcaaacttaatcacaacgagacgctaagttacccgaatacctacgatcaaacgctgtatgccagcgtggagcaggcgttcaacatgggcgcggttgcggttggtgcgactatctattttggctcggaagagtcacgtcgccagattgaagaaatttctgcggcttttgaacgtgcgcacgagctgggcatggtgacagtgctgtgggcctatttgcgtaactccgcctttaagaaagatggcgttgattaccatgtttccgccgacctgactggtcaggcgaaccatctggcggcgaccattggcgcggacatcgtcaaacagaaaatggcggaaaataacggcggttataaagcgattaattacggttataccgacgatcgcgtgtacagcaagttaaccagcgaaaacccgattgatctggtgcgttatcagttagctaactgctatatgggccgggcagggttgataaactccggcggtgctgcaggcggtgaaactgacctcagtgatgcagtgcgtactgcggttatcaacaaacgcgctggcggaatggggctgattcttggacgtaaggcgttcaagaaatcgatggctgacggcgtgaaactgattaacgccgtgcaggacgtttatctcgatagcaaaattactatcgcctga

SEQ ID NO: 457877 - DNA, 855 bp, Shigella boydii
atgtacgtggtatcgacaaagcagatgctgaacaacgcacagcgcggcggttatgcggttccggcattcaatattcacaatctcgaaacgatgcaagtggtggtggaaaccgctgccaacctgcatgcgccggtcatcatcgccggaacgcctggcacatttactcatgctggtacagaaaatctgttggcgctggtcagcgcgatggcgaagcaatatcaccatccactggcaattcatctcgaccatcacacgaaatttgacgatatcgctcagaaggttcgttctggcgtgcgctcagtcatgattgacgcctcgcatttgccttttgcgcaaaatatttcacgggtcaaagaggtggtggatttttgccatcgctttgatgtcagcgtcgaagcggagctggggcaacttggcggccaggaagatgatgtgcaagtcaatgaagccgatgctttttataccaaccccgctcaggcgcgtgaatttgccgaggcaaccggaattgattccctggcggtcgccatcggcacggctcatggtatgtatgccagcgcaccggcgcttgatttttctcgactggagaacattcgccagtgggtgaacttaccgctggtgctgcatggcgcgtcaggattatcgactaaggatattcagcaaaccatcaaactggggatatgcaaaatcaacgttgcaacggagctgaaaaatgccttctcgcaggcgttaaaaaattacctgaccgagcaccccgaagcgaccgatccccgggattatttgcagtcggctaaatccgcaatgcgcgatgtggtgagcaaagtgattgccgattgtggctgcgagggcagggcataa

SEQ ID NO: 457878 - DNA, 498 bp, Shigella boydii
atgaaaacgttaattgcccggcataaagctggtgaacatatcggcatatgttcagtctgttctgcccatccgttggttatcgaagcggcgctggcatttgatcgcaacagcacgcgcaaagtgctgattgaagcaacgtcaaaccaggtcaatcaatttggcggttataccggaatgacaccggcagactttcgcgaatttgtttttacgattgccgataaagttgggtttgcacgcgaacgcattattctcggcggcgatcatctggggccaaactgctggcagcaagaaaatgcggatgcggcgatggaaaaatccgtcgagctggtaaaagcatatgttcgtgctggcttcagtaaaattcatcttgatgcgtcaatgtcctgcgcgggggatcccataccgttagcaccagaaacggttgcggaacgagctgctgtgctttgctttgctttgctgcggaaagtgtggcgacagattgccagcgtgagcaactga

SEQ ID NO: 457879 - DNA, 825 bp, Shigella boydii
ttgctttgctttgctgcggaaagtgtggcgacagattgccagcgtgagcaactgagctatgtcattggcaccgaagttccggttccgggcggtgaggccagcgccattcagtcagtacacatcacccatgttgaagatgccgccaatactttacgtacgcatcaaaaggcctttattgcccgtgggctgacagaggcgttaacacgtgtgattgccatcgtggtgcagccgggtgtggaatttgatcacagcaatattatccattatcagccgcaggaagcgcaggcgctggcgcaatggatagaaaacacccgaatggtttatgaagcacattctaccgattaccagacccgaacggcttattgggaattagtccgcgatcactttgcaatattgaaagtcggtcccgcattaacctttgctttacgcgaggcgatatttgcactggcacaaattgagcaggaacttatcgcccccgaaaatcgcagcggttgcctggcggtaattgaagaagtgatgctcgacgaaccgcaatactggaaaaaatattatcgtacgggttttaacgattcattactggatattcgttacagcctgtcggatcgtattcgttattactggccgcatagtcggattaaaaatagcgtcgaaacgatgatggtgaatcttgaaggcgtggacatcccactgggcatgattagtcagtatcttcccaaacaatttgaacgcattcagtccggggaattatcagcaataccgcatcagctgattatggataaaatttatgatgttttgcgcgcctatcgctacggctgtgcggaataa

SEQ ID NO: 457880 - DNA, 453 bp, Shigella boydii
atgactaacctgtttgttcgtagcggaatttcttttgtcgatcgtagcgaagttttaacccatatcggtaatgagatgctcgccaaaggtgtggttcatgataccaggccacaggcattaattgccagagaagcagaattccctaccgggataatgcttgagcagcacgccattgcaataccgcattgtgaggcgattcatgctaagtcgtcagccatttatctgttaaggccaacaaataaagttcattttcagcaagcggatgatgataacgacgtggaggtatcgttggttattgcgttgattgtggaaaatccgcagcagcaattgaaacttttacgctgtttatttggcaagttacaacagcccgatatcgtcgagacactaatcactcttcctgaaacccagttaaaggaatacttcacaaagtatgttttagattcagacgaataa

SEQ ID NO: 457881 - DNA, 285 bp, Shigella boydii; identical to SEQ ID NO: 21347

SEQ ID NO: 457882 - DNA, 1356 bp, Shigella boydii
atgttttcagaagtcatgcgttatattctcgacctcggccctacggtgatgcttccgattgtcatcattattttttctaaaatattaggcatgaaggcaggcgattgctttaaagcgggtctgcatatcgggattggctttgttggcattggccttgtgattggcttaatgctggattccattggtccggcggcgaaagcgatggcggaaaatttcgacctgaatctgcatgtggtcgatgtcggctggccgggctcttcaccaatgacctgggcgtcgcaaattgcgctggtggcgattccgattgcgattctggttaacgtggcgatgttactgacccgtatgacgcgggtggtaaatattgatatctggaatatctggcatatgaccttcaccggcgcgttgctgcatctggcaaccggttcatggatgatagggatggcaggtgtggtaattcacgcggcgtttgtttataagctcggcgactggtttgcccgcgatacccgaaatttctttgagctggaaggtattgctattccgcacggtacgtcggcgtatatggggccgattgcggtgctggtcgatgctatcatcgagaaaatcccaggcgttaaccgaattaaatttagcgccgacgatattcagcgcaaatttggtccatttggcgagcctgtcaccgtgggttttgtgatggggctgattatcggcatcctcgcgggttacgatgtcaaaggtgtattgcagctggcggtaaaaacggcggcagtgatgctgctaatgccacgggtgattaaacccatcatggatggtttaacgcccatcgctaagcaggcccgtagtcgtttacaggcgaagttcggcggtcaggagttcctgattggcctggatcccgcattactgctggggcatacggcggtggtatcggcaagcctgatttttatcccgctcaccattttaattgctgtttgtgttccgggtaatcaggtgctgccgtttggcgatcttgccaccatcggcttctttgtggcgatggcagtcgccgtgcatcgtggaaatctgttccgcaccttaatctcgggtgtcatcatcatgagcatcactctgtggatcgcgacgcaaactattggtttgcacacccaactggcggctaatgctggggcgttaaaagccgggggtatggtgacttcaatggatcagggcggttctcccattacctggttactgattcaggttttctccccgcaaaatattcccggtttcattattatcggtgcaatttatctgaccggtattttcatgacctggcgtagagcgcgtggctttattaaacaagagaaagtcgttctcgcagaataa

SEQ ID NO: 457883 - DNA, 1041 bp, Shigella boydii
atgaaatcagtggtgaatgatactgatggtatcgtgcgcgttgcagaaagcgtcattcctgaaattaaacatcaggatgaggtgcgggtaaaaattgccagctcgggcttatgtggttccgatttacccaggatatttaaaaatggtgcacattattatccaataacgttaggccatgaatttagcggctatattgatgcggtgggatccggtgttgatgatttacaccctggcgatgcggttgcctgtgtgccgttattaccctgttttacttgtccagagtgtctgaaagggttttattcccagtgcgcaaaatatgattttattggctcgcggcgtgatggtggatttgctgaatatattgtcgttaagcgaaaaaatgtctttgctctacccacggatatgcctattgaggatggggcttttattgagccgattaccgttggtctgcatgcttttcatttagcgcaaggttgtgagaataaaaacgttattattattggtgccggaaccattggcctgctggctattcagtgcgctgtcgcgctgggagcaaagagtgtgacggctatcgacattagctcagaaaaactggcactggcaaaatttttcggtgcgatgcaaacatttaacagtagcgaaatgagcgcgccgcaaatgcagagcgttttacgcgaactgcgttttaatcagcttatcctcgagacggctggcgtaccgcaaactgtcgaactggcggtagagattgccggtcctcatgcccaactggcgctggtgggcacgttgcatcaggatctgcatttaacatcggcaacgtttggcaaaatattgcgtaaagagctgacggttatcggcagttggatgaactattccagcccttggccggggcaggagtgggaaacggcgagccggttgctgacagaacgtaagttaagcctggagccattaatcgctcaccgtggaagctttgaaagcttcacccaggcggtgcgtgacatcgctcgtaatgccatgccgggcaaagtgttgctcattccatga

SEQ ID NO: 457884 - DNA, 780 bp, Shigella boydii
atgacgatgaattcattcgagcgaaggaataagatcatccaattagtgaatgaacagggaaccgtgcttgttcaggatctggcgggagtatttgctgcctcggaagcgacaatccgtgccgatttgcgctttctcgaacaaaaaggcgtggttacgcgctttcatggcggtgcggcgaaaataatgtccggtaatagtgaaaccgagacccaggaagtcgggtttaaagagcgatttcagctcgccagcgcgccaaaaaacagaatagcgcaggcggcagtcaaaatgatccatgaagggatgaccgttattctcgacagcggaagtaccacaatgcttatcgccgaaggattaatgaccgctaaaaatatcacggtgattaccaacagtctcccggcagcgtttgccctttccgaaaataaagacattactctggtcgtctgtggtggcacggtccgccataaaacgcgctcgatgcatggttccattgccgagcgttcattgcaggatattaatgccgatttaatgtttgtcggtgctgatggtattgatgcggttaatggtattacgacctttaatgaaggttattcgattagcggtgcgatggtcaccgccgctaataaagtgattgccgttctcgattcatcgaaatttaaccgtcgcggttttaatcaggtactgccaatcgaaaaaattgacattattattaccgatgatgctgtatcagaggtggataaactggcattgcagaagacacgggtaaaattaattacggtgtag

SEQ ID NO: 457885 - DNA, 900 bp, Shigella boydii
atggcagaatttcccgccagcttactgattcttaatggcaaaagtactgacaatctacccttgcgcgaagcaattatgctgttgcgtgaggaaggaatgacgatccatgtgcgggtcacctgggagaaaggtgatgccgcacgatttgtagaggaggcccggaagttgggcgtcgcaacggtgattgccggtggtggcgatggcaccattaatgaagtttctacggcgttgattcagtgtgagggggatgacatacccgcgctgggaattttgccattaggaaccgccaatgattttgccaccagtgtagggattcctgaggcactggataaggcgctgaaactggcaattgccggtaatgccattgcgatagatatggcgcaggtcaacaaacaaacctgttttattaatatggcgacaggcgggtttgggacgcgtattaccacagaaacgccggaaaaattaaaagccgcgctgggtggcgtctcatacatcattcatggcttaatgcgtatggatactctgcaaccggaccgttgtgaaatccgcggtgaaaactttcactggcaaggtgacgccctggtcattggtattggtaacgggcgtcaggccggtggcggtcaacaattgtgcccgaacgcgttaattaacgatggcttgctgcaactgcgcatttttaccggcgatgaaattcttccggctctcgtatcaactttaaaatctgacgaagataacccgaatattatcgaaggcgcttcgtcgtggtttgatatacaagctccacacgaaatcacttttaatcttgatggcgaaccgttgagtggacaaaactttcatattgaaatacttccggcggcgttgcgttgtcgattaccaccagattgtccattattgcgttaa

SEQ ID NO: 457886 - DNA, 318 bp, Shigella boydii
atgaaaaagatagctgctatatcattaactagtgtttttcttatatctggttgtgctgtgcataatgatgagacaagtatcggtaaatttggtcttgcatataaaagtaatattcagcgtaaactcgataaccaatactacaccgaagccgaagcttctttagccaggggtagaatatctggtgcagaaaatatagtaaaaaatgatgcaactcatttctgtgttactcagggcaaaaaaatgcaaatagttgagctgaagacagaaggtgtaggattacatggtgtcgctcgtctgacattcaaatgtggagagtga

SEQ ID NO: 457887 - DNA, 1362 bp, Shigella boydii
atgtttaaaccggaactcctttccccggcgggaacgctgaaaaatatgcgttacgctttcgcttatggcgcagatgctgtttatgcgggccagccgcgttattccctgcgtgtgcgcaacaacgaattcaaccacgaaaatcttcagctcggcatcaatgaagcccacgcgctggggaaaaagttttatgtcgtggtcaacattgcaccgcacaacgccaagctgaaaacctttatccgtgacctgaaaccggtggtggaaatggggccggatgcgctgattatgtccgatccagggctgattatgctggtgcgtgagcacttccctgaaatgccgatccacctttcggtgcaggctaacgccgtgaactgggcgacggtgaaattctggcagcaaatgggcctgacccgcgtgatcctctctcgcgagctgtcgctggaagagattgaagagatccgcaatcaggtgccggatatggagatcgagatcttcgttcacggcgcgctgtgcatggcctactccggtcgctgcctgctctctggctatatcaacaagcgcgacccgaaccagggcacctgcaccaacgcctgccgctgggagtacaacgtccaggaagggaaagaagatgatgttggcaacatcgtacacaagtacgagccgattccggtgcaaaatgttgagccgacgctgggtatcggcgcaccaaccgacaaagtgtttatgatcgaagaggcccagcgtccgggcgagtatatgaccgcgtttgaagatgagcacggcacttacatcatgaactcgaaagatctgcgcgccatcgcccatgtagaacgcctgaccaaaatgggcgtgcattcgctgaaaatcgaaggtcgtaccaaatctttctactattgtgcacgcaccgcacaggtttaccgcaaagctatcgatgacgccgctgcgggaaaaccgttcgataccagcctgctggaaactctggaaggtctggcgcatcgtggctataccgaaggtttcctgcgtcgtcatactcacgacgattatcagaactacgaatacggttattcagtttctgaccgccagcagtttgttggtgagtttaccggtgagcgcaagggggacctcgcggcggtagcggtgaaaaataaattctccgttggcgacagccttgagctgatgacgccgcaaggcaacattaattttacccttgagcacatggaaaacgccaaaggcgaagctatgccgatagcaccaggcgatggttatactgtgtggctcccggtcccgcaggatcttgagctcaattacgcgctgctgatgcgtaatttctccggggaaaccacgcgtaatccccacggtaagtga

SEQ ID NO: 457888 - DNA, 297 bp, Shigella boydii; identical to SEQ ID NO: 260534

SEQ ID NO: 457889 - DNA, 252 bp, Shigella boydii
atggccagaacgatgacggttgatctcggcgatgagttgcgtgaatttatcgagtccttaattgaatccggcgactatcgcacccaaagcgaagtgatccgtgagtcactgcgattacttcgagaaaagcaagcagagtctcgcctgcaagcgttacgtgacatgctcgcagaagggttgagtagtggtgaagctcagccgtgggaaaaggacgcgttcttacggaaggtgaaagcagggataaggaaataa

SEQ ID NO: 457890 - DNA, 333 bp, Shigella boydii
atggctggttggtttgaactcagtaagagcagtgataatcagttccggtttgtgctaaaagcgggcaatggtgagactatcctcaccagcgagctgtataccccaaaagcctctgcggaaaagggcatcgcgtcggtgcgtagcaacagcccgcaagaagaacgctatgagaaaaaaacggcaagtaacggcaaattctatttcaatctgaaagccgctaatcatcaaattatcggctccagccagatgtacgccaccgcgcaatctcgtgaaaccggaattgcctccgttaaagccaatggcacaagccagacggtgaaagacaatacgtaa

SEQ ID NO: 457891 - DNA, 723 bp, Shigella boydii
atgaccgagttaccaatcgacgaaaacacaccgcgtattttgatcgtggaagatgaaccgaagctggggcagttgctcattgattatctgcgtgctgcgagctatgcgccgacgcttatcagccacggcgatcaggtactgccgtatgtgcgccagacaccaccggatctgatcctgttagatctgatgctccctggcaccgatggcctgacgctgtgccgggaaattcgtcgtttttctgacattccgatcgtgatggtgacggcaaaaatcgaagagatcgatcgcctgctggggctggagattggcgcagatgactacatctgcaagccgtacagcccacgggaagtggtagcgcgcgtcaaaaccattttgcgccgttgcaaaccgcagcgcgagttgcagcaacaggatgctgaaagcccgttgattatcgacgaaggtcgttttcaggcttcatggcgcggtaaaatgcttgacctgacgcctgcggaatttcgtctgctgaaaacgctctctcatgaaccaggaaaagtgttctcccgcgagcatttgctcaatcatctttatgacgactaccgcgtagtaaccgaccgcaccatcgacagccacattaaaaacctgcgccgcaagctggaatctctcgacgccgaacagtcatttatccgcgccgtttacggcgtcggttaccgctgggaagccgacgcctgccgcatcgtttag

SEQ ID NO: 457892 - DNA, 1404 bp, Shigella boydii
atgaagttctggcgacccggtattaccggcaaactgtttctggcgattttcgccacctgcattgtcttgctgatcagtatgcactgggcggtgcgtatcagttttgagcgtggctttattgattacatcaagcatggtaatgaacagcgattacaactgttaagtgatgcgcttggcgagcagtatgcgcagcatggcaactggcgcttcctgcgcaacaatgatcgctttgtctttcagatcctgcgttcatttgaacacgataattcggaagataaacccggcccgggtatgccaccgcacggctggcgtacccagttctgggtggttgatcaaaacaacaaagtgctggttggtccgcgagcgccgattccacctgacggtacacggcgacccattctggtcaacggtgcggaagttggcgcggtgatcgcctcccccgttgagcggttaacgcgcaatactgatatcaatttcgataaacaacagcggcaaaccagctggttgattgtcgccctggcaacgttactcgcggcacttgccacttttctgctggcgcgcggtttactggcaccggtaaaacgacttgtcgatggcacgcacaaactggcggcgggcgatttcactacccgcgtaacgcccaccagtgaagatgaactgggcaaactggcgcaagacttcaaccagcttgccagcacactggagaaaaaccagcaaatgcggcgcgattttatggccgatatttctcacgaactgcgtacgccattagcggtgctgcgcggtgaactggaagccattcaggatggcgtgcgtaaattcacgccggagacggtggcgtctttacaggcggaggtcggtacactgaccaaactggttgacgatctccatcagttgtcgatgtctgatgaaggcgctctcgcctatcaaaaagcaccggtagatttgatcccactgctggaagtggcgggcggcgcatttcgcgaacgattcgccagtcgtggcctgaaactgcaattttccctgccagacagtattaccgtatttggcgatcgcgaccgtttaatgcagttattcaataacttactggaaaacagcctgcgctacactgacagcggcggcagcctgcaaatctctgccgggcagcgcgacaaaacggtgcgcctgacctttgccgacagtgcgccaggtgtcagtgacgatcagctacaaaaattgtttgaacgtttttatcgcaccgaaggttcccgcaaccgtgccagcggcggttccgggctggggctggcgatttgcctgaacattgttgaagcacataatggtcgcattattgctgcccattcgccttttggcggggtaagcattacagtagagttaccgctggaacgggatttacagagagaagtatga

SEQ ID NO: 457893 - DNA, 1416 bp, Shigella boydii
atgacagatcttcccgacagcacccgttggcaattgtggattgtggctttcggcttctttatgcagtcgctggacaccaccatcgtaaacaccgcccttccctcaatggcgcaaagcctcggggaaagtccgttgcatatgcacatggtcattgtctcttatgtgctgaccgtggcggtgatgctgcccgccagcggctggctggcggacaaagtcggcgtgcgcaatattttctttaccgccatcgtgctgtttactctcggttcactgttttgcgcgctttccggcacgctgaacgaactgttgctggcacgcgcgttacagggcgttggcggcgcgatgatggtgccggtcggcagattgacggtgatgaaaatcgtaccgcgcgagcaatatatggcggcgatgacctttgtcacgttacccggtcaggtcggtccgctgctcggtccggcgctcggcggtctgctggtggagtacgcgtcgtggcactggatctttttgatcaacattccggtggggattatcggtgcgatcgccacattgctgttaatgccgaactacaccatgcagacgcggcgctttgatctctccggatttttattgctggcggttggcatggcggtattaaccctggcgctggacggcagtaaaggtacaggtttatcgccgctgacgattgcaggcctggtcgcagttggcgtggtggcactggtgctttatctgctgcatgccagaaataacaaccgtgccctgttcagtctgaaactgttccgtactcgtaccttttcgctgggcctggcggggagctttgccggacgtattggcagtggcatgttgccctttatgacaccggttttcctgcaaattggcctcggtttctcgccttttcatgccggactgatgatgatcccgatggtgctcggcagcatggggatgaagcgaattgtggtacaggtggtgaatcgctttggctatcgtcgggtactggtggcaaccacgcttggcctgtcgctggtcaccctgttgtttatgactaccgccctgctgggctggtactacgttttgccgttcgtcctgtttttacaagggatggtcaactcgacgcgtttctcctccatgaacaccctgacgctgaaagatctcccggacaatctggcgagcagcggaaacagcctgctgtcgatgattatgcaattgtcgatgagtatcggcgtcactatcgccgggctgttgctgggactttttggttcacagcatgtcagcgtcgacagcggcaccacacaaaccgtctttatgtacacctggcttagcatggcgttgatcatcgcccttccggcgttcatctttgccagagtgccgaacgatacgcatcaaaatgtagctatttcgcggcgaaaaaggagcgcgcaatga

SEQ ID NO: 457894 - DNA, 3078 bp, Shigella boydii
gtgaagttttttgccctcttcatttaccgcccggtggcgacgattttactgtcggtcgccattaccctgtgcggcatactgggcttccgtatgctgccggtcgccccgctgccgcaggtcgattttccggtgattatggtcagcgcctcgctgcccggtgcgtcgccggagacaatggcgtcttccgttgccacgccgctggagcgttcacttgggcgcattgtcggggtcagtgaaatgacctccagcagttcgctcggcagcacgcgtattattttgcagtttgattttgaccgggatatcaacggtgcggcgcgtgatgtgcaggcggcgatcaacgccgcacaaagtctgctgcccagtgggatgcccagccgcccgacttatcgcaaagcgaacccgtcggatgcgccaattatgatcctcacgctaacctccgatacttattcgcagggtgaattgtacgatttcgcctcgacgcagctggctccgacgatttcgcaaatcgacggtgtcggtgatgtcgatgtcggcggcagctcgctgcccgccgtgcgcgtcgggctgaacccgcaggcgctgtttaatcagggcgtgtcgctggatgacgtacgcactgccatcagcaatgccaacgtgcgtaaaccgcagggggcactggaagatggcactcaccgctggcagatccagaccaatgatgagctaaaaaccgccgctgaatatcagccgttgattattcactacaacaacggcggcgcggttcgtctgggcgatgtggcgacggtgaccgactcagtgcaggatgtgcgcaacgccgggatgaccaacgccaaaccggctattttgctgatgatccgcaagctgccggaagccaatattatccagacggttgacagcatccgggcaaaattaccggagttgcaggaaaccattccggcggcgattgatctgcaaattgcccaggatcgctcccccaccattcgcgcctcgctggaagaagtcgagcaaacgctgattatctcggtggcgctggtgattctggtggtgtttttattcctgcgctcgggtcgcgccactattattcccgccgttgcggtgccggtttcgctgattggtacgtttgcggcgatgtacctgtgcggattcagtctcaataacctttcgttaatggcgctcaccatcgctactggtttcgtggtggatgacgccatcgtggtgctggaaaacattgcacgtcatctggaagcgggaatgaaaccgttgcaagccgcactgcaaggtactcgcgaagtcggttttacggtgctgtcgatgagtctgtcactggtggcggtgttcctgccgctgctgttgatgggcggattgccgggccgactgttacgcgagtttgccgtgacgctttctgtcgccattggtatttcgttgctggtttccctgacgctaacgccaatgatgtgtggctggatgctgaaagccagcaagccgcgcgagcaaaagcgactgcgtggttttggccgcatgttggtagccctgcaacaaggctatggcaagtcgctgaaatgggtgctcaatcatacccgtctggtgggcgtggtgctgcttggcaccattgcgctgaatatctggctgtatatctcgatcccgaaaaccttcttcccggagcaggacactggcgtgttgatgggcgggattcaggcggatcagagtatttcgtttcaggcgatgcgcggtaagttgcaggatttcatgaaaattatccgtgacgatccggcagtggataatgtcaccggctttacaggcggttcgcgagtgaacagcgggatgatgtttatcaccctcaagccacgcgacgaacgcagcgaaacggcgcagcaaattatcgaccgtctgcgcgcaaaactggcgaaagaaccgggggcgaatctgttcctgatggcggtacaggatattcgcgttggtgggcgtcagtcgaacgccagctaccagtacacgttgttatccgacgacctggcggcactgcgcgaatgggagccaaaaatccgcaaaaaactggcgacgttgccggaactggcggacgtgaactccgatcagcaggataacggcgcggagatgaatctggtttacgaccgcgacaccatggcacggctgggaatcgacgtgcaggccgccaacagcctgttaaataacgccttcggtcagcggcaaatctcgaccatttatcagccgatgaaccagtataaagtggtgatggaagtggatccgcgctatacccaggacatcagcgcgctggaaaaaatgttcgtcattaataacgaaggcaaagcgatcccgctgtcgtatttcgctaaatggcaaccggcgaatgccccactatcggtgaatcatcagggattatcggcagcctcgaccatctcgttcaacctgccgaccggaaaatcgctctcggacgccagtgcggcgatcgatcgcgcaatgacccagcttggtgtgccttcgacggtgcgcggcagttttgccggcacggcgcaggtgttccaggagacgatgaactcacaggtgatcctgattatcgccgccatcgccacggtgtatatcgtgctgggtatcctttacgagagttacgtacatccgctgacgatcctctccaccctgccctcggcgggcgttggagcgctgctggcgctggagctgttcaatgccccgttcagcctaatcgccctgatagggatcatgctattaatcggcatcgtgaagaaaaacgccattatgatggtcgattttgcgcttgaagcccaacggcacggtaacctgacgccgcaggaagctattttccaggcctgtctgctgcgttttcgcccgattatgatgactaccctggcggcgctgtttgacgcgctgccgctggtgttgtcgggcggtgacggctcggagctgcggcaacccctggggatcaccattgtcggcggactggtaatgagccagctccttacgctgtataccacgccggtggtgtatctctttttcgaccgtctgcggctgcgtttttcgcgtaaacctaaacaaacggtaaccgagtaa

SEQ ID NO: 457895 - DNA, 3123 bp, Shigella boydii
atgcaggtgttacctccgagcagcacaggcggcccgtcgcgcctgtttattatgcgtcctgtcgccaccacgctgctgatggtggcgatcttactcgccgggattatcggttatcgcgccctgcccgtttcggcgctgccggaagtggactatccgaccattcaggtggtcacgctctacccaggtgcgagcccggatgtcatgacctctgccgttaccgcgccgctcgaacgccagttcgggcagatgtctggcctgaaacagatgtcgtcgcaaagttccggcggtgcgtcagttatcaccttacagttccagctaacattaccgctggatgtcgccgagcaggaagtgcaggccgcgattaacgctgcgaccaacttgttgccgagcgatctgcctaacccgccggtttacagcaaagtgaacccggcagatccgccgatcatgacgctcgccgttacctcaaccgccatgccgatgacgcaagtggaagatatggtggaaacccgcgtcgcgcagaaaatctcgcagatttccggcgtcggcctggtgacgctttccggcggccagcgtccggctgttcgcgtcaaacttaacgctcaggcgattgccgccctcggcctgaccagcgaaaccgtgcgcaccgccattaccggcgctaacgttaactcggcaaaaggtagcctcgacggcccttcccgcgcggttacgctttccgcgaatgaccaaatgcaatctgcggaagaatatcgccagttgattatcgcctaccagaacggcgcgccgattcgtctgggcgatgtcgcaaccgtagagcaaggtgcagaaaacagctggctcggcgcatgggcgaacaaagaacaggccattgtgatgaatgttcagcgccagcccggtgctaacattatctccaccgccgacagcatccggcagatgctgccacagctcaccgagagtttgccgaaatcggtggaggtgacggtactttctgaccgtaccaccaatatccgcgcatccgtcgacgatactcagtgtgaattgatgatggctatcgcgctggtagtaatgattatctacctgtttttgcgcaatattccggcgaccatcattcccggcgtcgcagtgccgctgtcgttaatcggcaccttcgcggttatggtgtttctcgatttttcaatcaataacctgacgctgatggcgttaactatcgccaccgggttcgtggtcgatgacgccatcgtggtgatcgaaaatatttcccgctatatcgaaaaaggcgaaaaaccgttggcggcggcgctcaaaggcgcaggtgaaatcggctttaccattatctcgctgaccttctcgctgattgcggtgttgatcccactgctgtttatgggcgatatcgtcgggcgactgttccgcgaatttgctattaccctggcggtagcgattttaatctcagccgtggtgtcgctaaccctgacaccgatgatgtgcgcacggatgctcagccaggagtcgttgcgtaaacagaaccgcttctcccgtgcctcggaaaaaatgttcgacaggataatcgccgcctatggtcgtggactggcgaaagtgctgaatcatccgtggctgaccttaagcgtggcgctcagcacgctgctgcttagcgttctattgtgggtgttcattccgaaaggtttcttcccggtacaggataacggcattattcagggcactttgcaggcaccgcaatccagctcctttgccaatatggcccagcggcaacgccaggtcgcggacgtgattttgcaggatccggcagtgcaaagtctgacctcatttgttggcgttgatggcactaacccgtcgctgaacagtgcgcgtttgcagatcaacctcaaaccgctggatgaacgtgatgatcgggtgcaaaaagtcatcgcccgtctgcaaacggcggtggataaagtgccgggcgtcgatctcttcctgcaaccaacgcaggacctgaccatcgatactcaggtcagccgcacccagtaccagtttaccttgcaggccacgtcactggatgcgctcagtacctgggtgccacagttgatggaaaaactccagcaactgccacagctttctgatgtctccagcgactggcaggacaaagggctggtggcgtatgtcaatgttgatcgtgacagcgccagccgtctggggatcagcatggcagatgtcgataacgccctgtacaacgcgtttggtcagcggctgatttccactatttatactcaagccaaccagtatcgcgtggtgctggaacacaacaccgaaaataccccaggcctcgcggcgctgggtaccattcgcctgaccagcagcgacggtggcgtggttccgctaagttcgattgccaaaattgagcagcgttttgcaccgctctccatcaaccatctggatcagttcccggtaacaaccatctcctttaacgtgccggataattattcgctgggcgatgcggtgcaggcgattatggacactgaaaagacgctgaatctaccggtggatatcaccacgcagttccagggctgcaccctcgccttccagtcggcgctgggcagcactgtctggctgattgtcgcagcggtggtggcgatgtatatcgtgctcggcattctgtacgagagctttattcatccaatcaccattctctcgacgttgcccacggcaggtgttggcgcactgctggcgttaatgattgccggtagcgaactggatgtgattgcgattatcggcattattttgctgatcggtatcgtgaagaaaaacgccatcatgatgatcgacttcgcgctggctgccgagcgcgagcaaggcatgtcgccgcgcgatgcaatctaccaggcttgtctgctgcgttttcgtccgatcctgatgaccaccctggcggctctgcttggcgcgctgccgctgatgttgagtaccggggtcggcgcggaactgcgtcgtccgttaggcattggtatggtcggtggtctggttgtcagccaggtactgacgctgtttaccacgccagtgatttatctgctgttcgaccgcctggcattgtggactaaaagccgctttgcctgtcatgaagaggaggcgtaa

SEQ ID NO: 457896 - DNA, 1368 bp, Shigella boydii
atgtgcccgccattcagacgattcccgatagtgtttcataattcctccatttttctcccttattggctggctacactagtatcattccgcgaaacgtttcaggaagagaaactcttaacgatgaaaggcagttataaatcccgttgggtaatcgtaatcgtggtggttatcgccgccatcgccgcattctggttctggcaaggccgcaatgactcccagagtgcagccccaggggcgacgaaacaagcgcagcaatcgccagcgggtggtcgccgtggtatgcgttccggcccattagccccggttcaggcggcgaccgccgtagaacaggcagttccacgttacctcaccgggcttggcaccattaccgccgctaatactgttacggtgcgcagccgcgtggatggtcaactgatggcgttacatttccaggaaggccagcaggtcaaagcaggcgatttactggcagaaattgaccccagccagttcaaagttgcattagcacaagcccagggccaactggcaaaagataaagccacgcttaccaacgcccgccgtgatctggcgcgttatcagcaactggcaaaaaccaatctcgtctcccgccaggagctggatgcccaacaggcgctggtcagtgaaaccgaaggcaccattaaggctgatgaagcaagcgtcgccagcgcgcagctgcaactcgactggagccgcatcaccgcaccagtcgatggtcgcgttggtctcaagcaggttgatgttggtaaccaaatctccagtggtgataccaccgggatcgtggtgatcacccagacgcatcctatcgatttgctctttaccctgccggaaagcgatatcgctaccgtcgtgcaggcgcaaaaagccgggaaaccgctggtggtagaagcctgggatcgcaccaactcgaagaaattaagtgaaggcacgctgttaagtctcgataaccaaatcgatgccactaccggtacgattaaagtgaaagcacgctttaataatcaggatgatgcgctgtttcccaatcagtttgttaacgcgcgcatgttagtcgacaccgaacaaaacgccgtagtgatcccaacagccgccctgcaaatgggcaatgaaggccattttgtctgggtgctgaatagcgaaaacaaggtcagcaaacatctggtgacgccgggcattcaggacagtcagaaagtggtgatccgtgcaggtatttctgcgggcgatcgcgtggtgacagacggcattgatcgcctgaccgaaggggcgaaagtggaagtggtggaagcccagagcgccaccactccggaagagaaagccaccagccgcgaatacgcgaaaaaaggagcacgctcctga

SEQ ID NO: 457897 - DNA, 129 bp, Shigella boydii
atgatgagtatcttcatcatgaccctttccttatttatggccccttcctcgggaggggctttcccgtttcagcgtcccgctgaaatcgtcggcttacctcctttcgccatgcaagcagtctatcgctaa

SEQ ID NO: 457898 - DNA, 660 bp, Shigella boydii
atgagcgaacaaatcacgtttgccaccagcgattttgccagtaacccggaaccacgttgcccctgcattttgctgctggatgtttctggttctatgaacggtagacccattaatgaacttaacgccggattggttacctttcgcgatgagctgcttgccgattcgctggccttaaaaagagttgaactcggcattgtgacgttcggcccggtgcatgtggaacaaccctttaccagcgccgctaattttttcccgcccatcctgtttgcccagggcgatacaccaatgggcgctgccattaccaaagccctggatatggtagaggagcggaaacgtgagtatcgtgcaaatggtatttcgtattatcgcccgtggattttcctgatcaccgatggcgctccaaccgatgagtggcaggctgccgccaacaaagtgtttcagggggaagaagataagaagtttgccttcttttccatcggtgttcagggggcggatatgaagactctggcacaaatcagcgttcgtcagcctttgccactgcagggattacaattccgtgaactgtttagctggttatccagttcgctgcgttcggtttcccgctccacgccgggaacggaagttgtgctggaagcgccaaaaggctggacgtcagtgtga

SEQ ID NO: 457899 - DNA, 681 bp, Shigella boydii
atgcaggttgcctggctaaatgaccagcagccattactggtgatgttccttgctgatggcgcaggtagcgtttcgcagggaggagaaggcgcgaagctcgccgtcaatgaagcgatggcgtttatggtgcaaaaagtacaggacggtgaattggggcttaatgatgtcctcgccacaaatatggtactgaccattcgtcaacgactttttgccgaggcagaagccaaagcattagcagttcgcgattttgcctgcacgtttctgggattgatttcatcggctaacggcacattgattatgcaaattggcgacggcggtgtagtggtggattttggtcgtggtctggaactgccgctcacgccgatggtgggtgaatatgccaatatgacgcatttcattagcgatgaagatgctgtttccagactggaaactttcaccagcactgagcgtgcgcataaagttgcagcatttacggatggtattcagcgactggcgttaaatatgctggataattctccgcatgtgcctttctttaccccgtttttcaatggactggcggcagcaacgcaggaacaactcgatttattacctgaattgttaaagcagtttttgtccagcccggcggtaaacgagcgtaccgatgatgataaaacgttggcactggcgctgtggttaccatga

SEQ ID NO: 457900 - DNA, 1941 bp, Shigella boydii
atgaaacccactttatatactgctactggtgagtgcgttacgccaggccgtgaactgggcaaaggtggcgaaggcgcggtttatgatatcaatgagtttgtcgatagcgtcgccaagatttatcacacgccgccacccgccttaaaacaggacaaacttgcctttatggctgcgacagctgacgcgcagttgttgaattatgtcgcctggccgcaggcaacgcttcacggtgggcgaggcggaaaggttatcggttttatgatgccaaaagtttctggtaaagaaccgattcatatgatctatagcccggcacatcgtcgccagagttaccctcattgtgcgtgggattttctactctatgttgcgcgcaatattgcttcatcttttgctacggttcacgagcacgggcacgtcgtgggggacgtaaaccagaacagctttatggtaggtcgcgacagcaaagtggtgttgatcgatagtgactcctttcagattaacgccaatggcacactgcatttatgcgaagtcggcgtgtcgcattttacgccgccagagctacaaaccttgccatcatttgtcggttttgaacgtaccgcgaatcacgataattttggccttgcgttgctgatttttcacgtcttgtttggtgggcggcatccttattctggtgtgccgcttatctctgatgcgggtaatgcgctggagacggatattgcccatttccgttatgcctacgcgtcagacaaccagcgacgtggtttaaaaccgccgccacgatcgattccgctgtcgatgttaccgggcgatgttgaagccatgtttcagcaggcgtttacggaaagtggcgtagcaaccgggcgtccgacggctaaagcgtgggtagcagcactggattctctacgccaacagttaaagaaatgtaccgtttcggcaatgcatgtttatcccgctcatttgaccgactgcccgtggtgtacgctggataatcaaggcgttatctattttattgatctcggcgaagaggtcattaccaccggcggtgattttgtgctggcgaaagtctgggcgatggtgatggcgtcagtagcgccgccagcattgcaactgccattacccgatcatttccaaccgactggcaggccgcttcctttaggcctgttacggcgcgaatacatcattctgattgagatcgcactgtcagcgttatcgctgctgctttgcggccttcaggcagaaccgcgttatattattttggttcctgtgctggcggctatctggattattggcagtctgacaagcaaagcgtacaaagcagaagttcagcaacgccgtgaggcatttaatcgcgcgaaaatggactatgaccatttagtcagccagagccaacagttgggcgggctggaaggttttatcgccaaacggacgatgctcgaaaaaatgaaggacgaaattctcgggttaccggaagaagaaaaacgtgctctggcagcacttcacgacaccgcaagggaacggcagaagcagaagtttctggagggattttttattgatgttgcctctattcccggcgttggccctgcgcgtaaagcggcgttacggtcctttggtattgaaacagcagcggatgttacccgtcgtggggttaagcaagttaaagggtttggtgatcatctgacccaggcggtcatcgactggaaagcgagctgtgaacgccgttttgtgttcaggccgaacgaagcggtaacgcctgcagaaagacaagcggtaatggcgaaaatggccgccaaacgacatcggctggaattggcgttgactgtcggcgcgacagagttgcagcgattccgccttcatgctccagcacggaccatgccgttgatggaaccgttacgtcaggcggcagaaaaactggctcaggcgcaggcagatttaagtcgctgctga

SEQ ID NO: 457901 - DNA, 1353 bp, Shigella boydii
gtgtttattggttttgattacggtacagcaaactgttcagtggcgatcatgcgtgacggtaaaccgcacttgctaaaaatggaaaacgacagcacgctgctgccttcaatgctttgcgcgccaacgcgtgaggcggtaagcgaatggctgtaccgccatcatgatgttccggcagacgacgatgaaacgcaggcgctgttacgtcgggcgattcgttataaccacgaagaagatatcgatgttacggcgaaaagcgtgcagttcggtctttcctcactggcacagtacattgatgatccggaagaagtgtggtttgtgaaatcaccaaaatcgttcctcggtgccagcggcttaaaaccgcagcaggtagcgctgtttgaggatctggtctgcgcaatgatgttgcacattcgccagcaggcgcaggcacagctgccagaaacgattactcaggcggtgattggtcgcccgatcaactttcagggtctgggcggtgatgaagcaaacacccaggcgcaagggattctggaacgcgcggcgaagcgtgccggattcagggacgtggtattccagtacgagccggtagcggctgggctggattacgaagccaccttacaggaagaaaaacgggtactggtggtggatatcggcggtggtacgactgactgttcattgctgctgatggggccgcagtggcgttcgcgtctcgatcgtgaagccagcctgctgggtcacagtggttaccgtattggcggtaacgatctggatatcgcactagcgtttaaaaacctgatgccactgctgggtatggggggcgaaaccgaaaaaggcatcgccctgccgattctgccgtggtggaatgcggtggccatcaacgacgtacctgcgcagagtgatttctacagtagtgccaacggtcgtctgcttaacgatctggtacgcgatgcccgcgaaccggaaaaagtggccctgctacagaaaatctggcgtcagcgtttaagctatcgcctggtgcgtagcgcagaagagtgcaaaattgctctttcaagcgtagcggaaacccgcgcctcactgccgtttatcagcgatgaactggctacgctgattagccagcaagggctggaaagcgccctcagccagccactggcgcggattctggaacaggtgcaactggccctggataacgcccaggaaaaaccggatgtcatctacctgaccggcggtagcgcccgttcgccgctgattaaaaaagcgctggcagaacagttgccgggcattccgattgcaggcggcgatgactttggctccgtcaccgccgggctggcacgctgggcggaagtggtgtttcgttaa

SEQ ID NO: 457902 - DNA, 849 bp, Shigella boydii
atgtataccctgaactggcagccgccgtatgactggtcgtggatgttgggatttctcgccgcccgtgcagtgagtggtgtggaaacggtcgctgacgattattatgcccgtagtctggcggtgggcgaatatcgcggcgtggtgactgctattccggatatagcccgccatactctgcacataaatttaagtgcaggtttagaacccgttgccgctgagtgtctggcgaaaatgagccgcctgcttgatctgcaatgtaacccgcagattgttaacggtgcgttgggcaagttaggcgcggcgcggcccggattgcgtttacccggcagtgttgatgcttttgagcagggcgtgcgggcgattttaggccaactggtgagcgtggcgatggcggcaaaattgaccgccaaagtggtacagctttatggcgaacggctggatgattttccggagtatatctgcttccccacgcctcagcggctggcagcagccgacccgcaggcattaaaagcgttaggcatgccattgaaacgggcagaggcgctgattcatctggcaaatgcggcgctggagggcagcttaccaatgacaataccgggcgacgtagaacaagcgatgaaaacgctgcaaacttttccggatatcggacgctggacggcgaattatttcgctttgcgtggctggcaggcgaaagatgttttcctgccggatgattatctgattaaacagcgatttccgggaatgacaccggcgcaaatccgccgttatgccgaacgctggaagccctggcgttcttatgcgctgttgcatatctggtatacggaaggctggcaaccagacgaagcatga

SEQ ID NO: 457903 - DNA, 3318 bp, Shigella boydii
atgagcaaacaatcacagcatgtattaattgccctgccccacccgctgcttcaccaggtcagtttaggtttagtctcgtttatcttcacccttttctcgcttgagctttcgcagtttggcacccaactcgccccactgtggttcccgacgtccatcatgatggtggcgttttatcgccatgccgggcgcatgtggccgggaattgcgctgagctgttcgctgggaaatatcgccgcatccatcctgcttttttccaccagctcgctgaacatgacctggacgaccatcaatattgttgaagccgtggtcggggcagtgctgctacgtaaattgctgccgtggtataaccccttgcaaaatctggctgactggctgcgtctggcactcggcagcgccattgttccacctctgttggggggtgttctggttgtcctgctgacgcccggagacgatcctctcagggcatttttgatatgggtactgtcagaatccatcggcgctctggcactggtgccgctgggattgttatttaaaccacactatctgctgcgccatcgcaacccacggttgctttttgagtcgctgctcacgttagccatcacactgacgttaagctggctttcgatgctgtatctgccgtggccttttactttcattattgtgctgttgatgtggagcgccgtgcgcctgccacgaatggaagcctttttgatcttccttaccacggtgatgatggtgtcgctgatgatggccgcggatccctccctgcttgctacgccgcgtacgtacctgatgagccatatgccgtggctaccgtttttgctgatcctgctgcccgccaacatcatgaccatggtgatgtatgcctttcgtgcggaacgcaaacacatttccgaaagcgaaacccgttttcggaacgcgatggaatattccgctatcggcatggcgttagtgggcaccgagggacaatggctgcaatccaacaaagcactctgccagtttctcggttacagtcaggaagagctgcgcggactcaccttccagcaactgacctggccggaggatctcaataaagatctccaacaggttgaaaagctgataagcggtgaaataaacacctattcaatggaaaaacgttactacaaccgcaatggcgatgttgtctgggcgttgcttgccgtctcactggtgcgccacacggatggcacgccgctctattttatcgctcagattgaagacattaacgagctaaaacgcaccgaacaggtcaatcagcaactgatggagcacatcacgctggctaacgaagcgggcgggattggcatctgggagtgggagttgaagccgaatatttttagctgggataagcggatgttcgagctgtatgaaattcctccacatatcaaaccgaactggcaggtgtggtacgagtgcgtgctgccggaagatcgccagcatgccgaaaaagtgattcgtgattcgttgcaatcatgctcgccctttaaactggaatttcgcattaccgtaaaagacggtattcgccatatccgcgccctcgccaaccgggtactgaataaagaaggcgaagtcgaacgcctgctcggcattaatatggatatgactgaggttaaacagcttaacgaggcattgtttcaggaaaaagagcgcctgcacattacgctggactccatcggcgaagccgtggtctgtattgatatggcgatgaaaattacctttatgaatccagtggcggagaagatgagcggctggacgcaggaagaagcgttaggtgttccgctcctgacggtgttgcatattacttttggcgacaacggaccattaatggagaacatttacagtgccgacacctcacgttccgcgatcgaacaagatgtggtgttgcactgtcggagcggcggcagttacgacgtgcattacagtattacgccgttaagtactctggacggcagcaatattggttcggttctggtgattcaggacgttaccgaatcacgcaaaatgctgcgccagctgagctacagcgcctcccatgatgcactgacgcatctcgccaaccgcgccagttttgagaaacaactgcgtatcctgctgcaaacggtaaacagtacgcatcagcgacatgcactggtgtttatcgatcttgatcgctttaaagcggtgaatgacagcgccgggcatgcggcgggcgacgctttgctgcgcgaactggcgtcgttgatgctgagtatgctgcgctccagtgacgtgctggcgcggctcggcggtgatgaatttggtctgctgctgccagactgcaatgttgaaagcgctcgttttatcgctacacgtattatcagtgctgtgaatgactatcactttatatgggaaggccgggtacatcgggtaggtgccagcgccgggattaccttgatcgatgacaataatcatcaggcggcagaagtgatgtcgcaggctgatatcgcctgttatgcctccaaaaatggtggccggggccgggtgacggtttacgaaccgcagcaagctgccgcacatagcgaacgggcggcgatgtcgcttgatgaacagtggcggatgattaaagagaatcagttgatgatgctcgcccacggtgtcgctttgccacggatcccggaagcgcgtaatttgtggctgatttcacttaagctctggagttgcgaaggcgagattattgatgaacaaacatttcgtcgtagcttcagcgatccggcgcttagccatgctcttgaccgccgggtattccacgaatttttccagcaggccgcaaaagcggttgccagtaaaggcataagcatcgccctccccctttccgttgccggtttgagtagcgccacgctggtgaatgatctgcttgagcagctggaaaacagccctctaccaccacggttattacatctgattattccggctgaagcgattttagagcacgcagaaagcgtgcaaaaactgcggctggcgggatgtcggatagtgctcaaccaggtgggccgcgatctgcaaatcttcaactcgctgaaagcgaatatggcagattacctgctacttgatggtgagttatgcgccaacgtgcagggtaatttgatggatgagatgctgattacgattattcaggggcacgctcagcgactcgggatgaaaaccatcgccgggccagtcgttttacccttagtgatggatacgctttctggcatcggcgtcgatctgatttatggtgatgtgattgccgatgcccaaccgctggatttgctggtgaatagtagttatttcgcgattaactga

SEQ ID NO: 457904 - DNA, 642 bp, Shigella boydii
atgactgatcagtctcatcagtgcgtcattatcggtatcgctggcgcatcggcttccggcaagagtcttattgccagtaccctttatcgtgaattacgtgagcaagtcggtgatgaacacatcggcgtaattcccgaagactgctattacaaagatcaaagccatctgtcgatggaagaacgcgttaagaccaactacgaccatcccagcgcgatggatcacagtctgctgcttgagcatttacaagcgttgaaacgcggctcggcaattgacctgccggtttacagctatgttgaacatacgcgtatgaaagaaacggtgacggttgagccgaagaaggtcatcattctcgaaggcattttgttgctgacggatgcgcgtttgcgtgacgaacttaacttctccattttcgttgataccccgctggatatctgcctgatgcgccgcatcaagcgtgacgttaacgagcgtgggcgttcaatggattccgtgatggcgcaatatcaaaaaaccgtgcgcccgatgttcctgcaattcattgagccttctaaacaatatgcggacattatcgtgccgcgcggcgggaaaaaccgcatcgcgatcgatatattgaaagcgaaaataagtcagttctttgaataa

SEQ ID NO: 457905 - DNA, 582 bp, Shigella boydii
atgcgtctgtgtgaccgagatattgaagcctggcttgatgaaggccgtttgtcgatcaacccacgtccgccagtggagcgtattaacggcgcgacggtggatgtacgcctgggcaataaatttcgtaccttccgtggtcacacggcagcgtttatcgatctgagcggtcccaaagatgaagtgagcgccgcgcttgaccgcgtgatgagcgatgagatcgttctcgacgagggcgaggcgttctatcttcacccaggagagctggcgctggcggtgacgctggagtcggtgacgctgccagccgatctggtgggctggctggacgggcgttcctcactggcgcgtctggggctgatggtgcacgtcaccgcgcaccgtatcgatccgggctggtctggttgcattgtgctggagttctacaactccggtaagctgccgctggcgctgcgtccgggcatgttaattggtgcgctgagctttgagccgctttccggcccggcggcgcgaccttacaaccgccgtgaagatgcgaaatatcgcaaccagcagggcgcggtagccagccgaatcgataaagactaa

SEQ ID NO: 457906 - DNA, 1854 bp, Shigella boydii
atgagacgatttctgacgacgctgatgatactcctggtcgtgctggtggccgggttatctgcgttagtgttgctggtgaatccgaatgatttccgcgactatatggtcaagcaagttgctgcacgtagcggttatcaattgcagctcgacgggccactgcgttggcacgtctggccgcagcttagtatcctctccgggcgaatgtctctcaccgcccagggcgcgacccagccactggttcgcgccgacaacatgcgcctggacgtggcgcttttaccactactgagtcatcaactgagcattaagcaggtgatgctaaaaggggcggtgatccaactgacgccgcagacggaagcggtgcgcagtgaagacgctccggttgcaccgcgcgacaataccttgccggatctgtcagacgatcgcggatggtcgtttgatatatccagtcttaaggtggtggacagcgttctggtgttccagcatgaagatgacgagcaggtgacaatccgcaatatccgcctgcaaatggaacaagatccccaacatcgtggctcatttgagttctccgggcgggttaatcgcgatcagcgcgatctcacgatatcccttaacggtacggtagatgcttctgattatccgcatgatttaacggcggctattgaacaaattaactggcagttgcagggtgcagatttaccaaaacaaggtattcaggggcaggggagtttccaggcccagtggcaggagtcacataaacgcctttcatttaaccaaattagtttgaccgccaatgacagtacgctgagcgggcaagcacaggttacgctgacagagaaaccggaatggcagctgaggctgcaattcccgcaactgaatcttgacaacctcatcccgcttaatgaaacagcgaatggtgaaaacggtgccgcgcagcaggggcagagccaatcaacgttgccgcgcccggttatttcttcgcgtattgatgaaccggcctatcagggactgcaaggctttacggctgatattttgttgcaggccagtaacgtgcgctggcgcggaatgaattttacagatgttgccacgcaaatgaccaacaagtcgggtttgctggaaattactcaactgcagggcaaacttaacggtggacaggtttcactgccgggcacgctggacgcgacatcaataaatccgcggataaacttccagccacggctggaaaacgttgagattggtaccattctgaaggcgtttaactatccgatttcgttgaccggaaaaatgtcactggctggtgatttctccggtgctgacatagatgccgacgcattccgccacaactggcaaggacaggcacatgtcgaaatgaccgacacgcgcatggaagggatgaacttccagcagatgattcagcaagcggtagaacgtaatggtggtgatgtgaaggccgctgaaaactttgataacgtgacgcggcttgaccgctttaccaccgatttgacgttgaaggatggcgtcgtgacgttaaacgacatgcaaggtcaatcgcctgtgctggcgcttacaggggaaggtatgttgaatctggcagatcaaacctgcgacacccagtttgatattcgggtcgtgggtggctggaacggggaaagcaaactgattgatttcctcaaagaaacgccagtaccgctgcgggtttatggcaactggcagcaactcaattacagtctgcaagtggatcagttactgcgcaaacatctacaggacgaagcgaaacgtcgcctgaatgactgggccgagcggaataaagattcccgcaatggcaaagatgtgaagaagttgctggagaagatgtag

SEQ ID NO: 457907 - DNA, 1584 bp, Shigella boydii
atggaatggattgccgatccgtctatctgggccgggttaatcacgctgattgtgatcgaactggtcctcggcattgataacctggtctttattgccatcctcgccgaaaaactaccgccgaagcagcgcgaccgcgcacgggttaccgggctgctgctggcgatgttaatgcgcctgttactgctggcgtcaatctcctggctggtcaccctgactcaaccgctgttcagcttccgctcgtttacctttagcgcccgcgacttaatcatgctgtttggtggtttcttcctgttgttcaaagccacgatggagctgaacgaacggctggaagggaaagacagcaataatcccacacaacgcaaaggtgcgaagttctggggcgtggtgacgcaaattgtggtactggacgccatcttctcactcgactcagtgattaccgccgtcgggatggtcgaccatttactggtcatgatggccgccgtggttatcgctatcagcctgatgttgatggccagcaagccgttaacgcaatttgttaacagtcacccgaccatcgttattctctgcttaagcttcctgttgatgattggctttagcctggtggcagaaggtttcggcttcgtcattccgaaaggctacctgtacgctgccattggtttctcggtgatgatcgaggcgctcaatcagttggctatctttaaccggcgacgttttctttccgctaaccagacactgcgccagcggactaccgaagcggtaatgcgtctgcttagcgggcaaaaagaggatgcggaactggacgccgaaaccgcgtccatgctggtggatcatggtaaccagcagatctttaatccgcaggaacggcggatgattgagcgggtacttaatcttaaccagcgtactgtcagcagcattatgacgtcgcgccacgatattgagcatatcgatctcaacgcgccggaagaagaaatccgccagttgctggagcgaaatcagcatacgcggctggtggttactgatggcgatgacgcggaagatttgctcggtgttgttcacgttatcgacctgttacaacaatcactgcgcggcgaaccgctcaacctgcgggtgttgattcgccagccgctggtgttcccggaaaccttgccgttgttacctgccctggagcagttccgtaatgcccgcacacactttgcttttgtggtggatgagtttggctcggtggaagggattgtgacattaagtgacgtcactgaaaccattgccggtaacttaccgaacgaagtggaagagatcgacgcccgccatgatattcagaagaatgcggacggttcctggacggcgaatggtcatatgccgctggaggatctggtgcaatatgtgccgctgccgctggatgaaaaacgtgaatatcacaccattgccgggctgttgatggagtatttgcagcgtattccaaaacctggcgaagaagttcaggtgggggattatttgcttaaaacgttgcaggtagaaagccatcgcgtgcagaaggtgcagattataccgctgcgtaaggatggcgagatggagtacgaggtgtga

SEQ ID NO: 457908 - DNA, 2163 bp, Shigella boydii
atgcggtggatcctgttcatcctcttctgcctgctgggcgcacctgcccacgcggtatccatacccggcgttacaaccacaacgacaacggactcaacgactgaaccggccccggaaccggatatcgaacaaaaaaaagcggcctatggcgcactggcggatgtgctggataacgacacctcgcgtaaagaattgatcgaccagttgcgtactgtcgccgcgacgccccctgcggaaccggtcccgaagatcgtgccgccgacgctggttgaagagcaaaccgtgctgcaaaaggtcaccgaagtcagccgccattatggtgaagccctttccgcccgcttcgggcaactttatcgcaatattaccggctccccgcataagccgtttaatccacaaacattcagcaatgcgctgacccatttttcaatgttagcggtattagtgtttggtttttactggctgattcgcctgtgcgcactgccgctgtatcgcaaaatgggcctgtgggcgcggcaaaaaaatcgtgagcgcagtaactggttgcagcttccggcgatgattatcggggcgtttattatcgacctactgttactggcactgacattatttgtcggccaggtattaagcgacaacctgaatgcaggcagtcgcaccatcgctttccaacaaagtttgtttctcaacgcctttgccctgattgaatttttcaaagctgtactacgcctgattttttgcccaaacgtggctgaactgcgcccgttcacgattcatgacgagaccgcccgttactggagtcgtcgcctgagctggttaagcagtttgataggttatggcctgattgtggccgtgccgattatctctaatcaggtgaatgtacagataggtgcgctggcgaacgtcatcattatgctgtgcatgaccgtctgggcgttgtacctgatctttcgcaataaaaaagagattacccaacatttgctcaactttgcggagcattcgctggcctttttcagcctgtttatccgcgcctttgcgctggtgtggcgctggctggcaagcgcctattttatcgtgctgtttttcttttcgttgttcgatccgggcaacagcctgaaatttatgatgggtgcaacggtgcgcagcctggcgattattggtatcgcagcgtttgtttccggtatgttttcccgctggctggcgaaaaccatcaccctctcgccacatactcagcgtaactatccggagttgcaaaaacggctgaatggctggctttcggcggcgctgaaaacggcgcgtattctgaccgtctgcgtggcggtaatgttgctgttgagcgcatggggattgttcgatttctggaactggctgcaaaacggtgcggggcagaaaaccgtagatatcctgatccgtatcgcacttattctttttttctcggcggttggctggacggtgctcgccagtttgatcgaaaaccggctggcttcggatattcatggccgcccgctacccagcgcccgtacgcgtaccctgctgacgctgtttcgtaacgcgctggcggtgattatcagtaccatcaccatcatgattgtgttgtcggaaatcggcgtcaatatcgcgccattgctggcaggtgccggggcattaggtctggctatctcgtttggttcgcaaacgctggtgaaagatatcattaccggggtgtttattcagtttgaaaacggcatgaacactggagatttggtgactatcgggccgttgaccggcacagtggaacggatgtcgattcgctccgtgggcgtgcgccaggataccggggcgtatcacatcattccgtggtcttcgataaccacctttgctaacttcgtccgcggtattggttcggtagtggcaaactacgatgttgatcgccatgaagatgctgataaagccaatcaggcactgaaagatgcggtagcggaattgatggaaaacgaagaaattcgcgggctgattattggtgaaccgaattttgccgggattgtcggcttaagcaataccgcgtttacactgcgtgtttcgttcaccacgctgccactcaaacagtggacggtacgctttgccctcgacagccaggtgaaaaaacatttcgacctggtgggcgttcgcgcgccagtgcagacttattag

SEQ ID NO: 457909 - DNA, 927 bp, Shigella boydii
atgtccgcccagaaaccggggttgcatccgcgcaaccgtcatcacagccgctacgatctcgccacgctttgtcaggtcaatcctgaactcaggcaattcctcacgcttacacccgccggggagcaaagcgtagactttgccaatccgctggcggtgaaggcgctcaataaggcgttgctggcccatttttacgccgtagcgaactgggatatccccgacggttttctctgcccaccagtaccgggccgggcggattatattcatcaccttgccgatttactggctgaagcaagcggaacaattccagcgaatgccagcattctggatatcggcgttggtgcgaactgtatttatccgctgattggcgtacatgaatatggctggcgttttaccggtagtgaaaccagcagccaggcgttaagcagtgcgcaggcgattatcagtgctaatccggggcttaaccgcgccattcgtctgcgtcggcaaaaagaaagtggggcaatttttaacggcatcatccataaaaacgagcaatacgacgcgaccttgtgtaacccgccattccacgattccgccgctgcagcgcgggcaggtagtgagcgtaaacgccgtaacctggggctgaacaaagacgatgcactgaactttggtggtcagcaacaggagttgtggtgtgaaggtggtgaagtcgcctttatcaaaaagatgattgaagagagcaaaggcttcgcgaagcaggtgatgtggtttacctcgctggtatctcgtggtgaaaacttaccgccgttgtatcgtgctctgaccgacgtgggcgcggtgaaggtggtaaaaaaagagatggcccaggggcaaaagcagagtcgctttattgcctggacctttatgaacgacgagcagcgccgccgttttgtcaatcgccagcgttaa

SEQ ID NO: 457910 - DNA, 261 bp, Shigella boydii
atgaaaaagtgcctcacactactgattgccaccgtcctgagcggaatctctctcacggcttatgccgcgcaaccgatgagtaacctggacagcggtcagctacggcccgccggtaccgtttcggcaactggcgcatcaaacctaagcgatctggaggataaactggcagaaaaagcgcgcgaacaaggcgcgaaaggttatgtcattaattccgcaggcggaaatgaccagatgttcggtactgcaaccatctacaaataa

SEQ ID NO: 457911 - DNA, 2283 bp, Shigella boydii
atggaaaacaatcgcaatttccctgccagacaatttcattcgctcacgttctttgccggtctttgtattggcatcacgcctgtggctcaggcactcgccgccgaagggcaaactaacgcggatgacacgctggttgtcgaagcatcaacgccttcgctttatgcgccacaacaatctgccgatccgaaattctcgcgtccggtagcggatactacccgcacgatgacggtgatttctgaacaagtgattaaagatcagggcgcaaccaaccttaccgacgcgctcaaaaacgtccccggcgtgggtgcgttttttgcgggtgagaacggtaactccaccactggcgacgccatttatatgcgtggtgccgatacctctaacagtatttatattgatggcattcgcgatatcggcagcgtctcgcgcgacaccttcaataccgagcaggtcgaagtgattaaagggccgtccggcaccgactacgggcacagcgcaccgacgggctcaatcaatatgatcagcaaacagccgcgcaatgattccggcattgacgcctccgccagtattggcagcgcctggttccgccgcggcacgctggacgtcaatcaggtcattggtgataccaccgcggtgcgcctgaatgtaatgggcgaaaaaacgcacgatgccggacgcgacaaagtcaaaaatgagcgttacggcgtcgccccttctgtcgcttttggccttggtacagcgaatcgtttgtatcttaattatctgcatgtcacccagcacaacacgccagacggcggcattccgaccatcggtttgccgggctattctgccccatctgcgggaacggcggccctgaatcattccggaaaagttgatactcataacttttacggcacggattccgattacgacgattcgaccaccgacaccgccaccatgcgttttgagcacgacatcaacgataacaccaccattcgcaatactacccgttggtcgcgcgtaaagcaggattacctgatgacggcgattatgggcggggcgtcgaatattactcagcccaccagcgatgtgaatagctggacctggtcacgcacggcgaataccaaagatgtgagtaataaaattctcaccaaccagaccaacctgacctcgacgttctataccggttctatcggtcatgatgtcagtaccggcgtggaatttacccgtgaaacgcagactaactacggcgttaatccggtgacgttacccgcggtaaatatttatcatcctgacagcagcattcatcccggcggcctgacgcgcaacggcgcaaacgccaatggtcagacggataccttcgcaatttacgcctttgatacgctgcaaatcacccgtgattttgagctgaacggcgggatccgtctggataattatcatactgaatatgacagtgccaccgcctgcggcggcagcggacgcggtgccatcacctgcccagctggtgtggcaaaaggttctccggtcaccaccgtcgacaccgccaagtcgggcaatctggtgaactggaaagccggggcgctgtatcacctgacggaaaacggtaatgtctatattaactatgccgtttcccagcagcctccgggcggcaacaacttcgcccttgcgcagtctggcagcggtaacagtgccaaccgcaccgattttaaaccgcaaaaagccaacaccagcgagattggcaccaaatggcaggttctggataaacgcctgttgctcaccgccgcactgttccgtactgatatcgaaaatgaagttgagcaaaatgatgacggaacttactcgcaatacggtaagaaacgtgtcgaaggctatgagatatccgtggccgggaatatcactcccgcgtggcaggtgattggcggctatacccagcaaaaagcaaccatcaaaaacggcaaagatgttgcccaggatggttcctcatcgctgccgtataccccggagcacgccttcaccttatggagccagtatcaggcaaccgatgatatctctgttggcgcgggcgcacgctatatcggcagtatgcataaaggttcagacggcgcggtgggaacgccagcgtttaccgaaggttactgggtcgccgatgccaaactggggtatcgggttaatcgcaatctcgacttccagctaaacgtttacaacctgtttgataccgattacgtcgcctcaatcaacaagagcggctaccgttatcacccgggcgagccaagaaccttcttgctcacagccaatatgcatttctga

SEQ ID NO: 457912 - DNA, 675 bp, Shigella boydii
atgtaccacattcccggcgtgttatcgccacaggacgtcgctcgttttcgcgaacaactggaacaagccgaatgggtggatggacgcgtcaccaccggcgcacaaggtgcgcaagttaagaacaatcaacaggtagacacccgcagcacgttatacgccgccctgcaaaatgaggtgctgaacgcggttaaccaacatgctttattctttgccgcggccttgccgcgtaccctttccacgccgctgtttaatcgctatcagaacaatgaaacctatggttttcatgtggatggcgcagtacgcagccatccacaaagcggctggatgcgcactgacctttctgccacgctgtttttaagcgatccacaaagctacgacggcggcgaactggtcgttaatgacaccttcggacaacatcgggtaaaactcccggcaggtgatctcgtgttgtatccctccagcagcctgcattgcgtgacacccgtaacccgcggcgtacgagtggcatcatttatgtggatccagtcgatgatccgcgatgataaaaagcgcgccatgctgtttgaactagacaaaaatattcagtcgctgaaaagccgctatggtgaaaatgaagagatcctgtcgctgctcaatctttatcataatctgctgcgggaatggtcggagatctga

SEQ ID NO: 457913 - DNA, 267 bp, Shigella boydii
atggcatccggttgggctaacgatgacgccgtcaacgaacagatcaacagtacaattgaagatgcgattgcccgcgctcggggtgaaattccgcgtggcgaaagcctgtatgaatgtgaagagtgcggtgcccccatcccgcaagcccgtcgggaagccattcctggcgtgcgcttatgtattcattgtcagcaggagaaagatttacaaaaaccagcgtatacaggatataatcgcagaggttcgaaagacagccagttacgttaa

SEQ ID NO: 457914 - DNA, 231 bp, Shigella boydii
atggctctttcaactctatcatttggcgtgttcgcggcggaaccggtaacggcatcccaggcacagaacatgaataaaatcggcgtggtttctgccgatggcgcatccaccctcgatgccctggaagcgaaactggctgagaaagccgcggcagccggtgccagtggatacagcatcacttctgccaccaacaacaataaattaagcggtactgcggtaatttataagtaa

SEQ ID NO: 457915 - DNA, 1086 bp, Shigella boydii
atggaaagtggtcatcgctttgatgctcagacgctgcacagttttattcaggctgtatttcgtcagatgggtagcgaggaacaagaagcgaaattagtggccgatcatttaatcgcggcaaacctagcagggcatgattctcatggtattggcatgatcccaagctatgtgcgttcctggagtcaggggcatctgcaaattaaccatcatgccaaaatcgttaaagaggcgggggcggcagtcacgctcgatggcgatcgcgcattcggtcaggtcgcggcacacgaagcgatggcgctggggattgagaaagcgcatcagcacggtattgctgccgtggcgctacataactcgcatcatatcggccgtatcggttactgggcggagcagtgtgcagcggcggggtttgtctctatccactttgttagcgtggtcggtattccaatggtcgcaccgttccacggtcgcgacagccgctttggcaccaatccgttctgtgtggttttccctcgtaaagataatttcccgctgttgcttgattacgccaccagcgccatcgcatttggtaaaactcgcgtcgcctggcataaaggcgtccccgtgccgccaggttgcctgattgacgttaacggcgtgccgacgaccaatccggcggtaatgcaggagtcgccgttggggtcgctgttgacctttgccgaacataaaggctacgcccttgcagcgatgtgtgaaattcttggcggggcgctttctggcggtaaaacgacgcatcaggaaacgttacaaaccagtcccgatgccattcttaactgcatgaccactatcatcatcaacccggaactgttcggcgcgccggattgtagcgcgcagactgaagcctttgccgagtgggtgaaagcctcgccgcatgatgacgataagccgattttgctaccgggcgagtgggaagtgaacacgcgtcgcgaacggcaggagcaggggattccattggatgcgggaagctggcaggccatttgtgatgcggcgcggcagattggtatgtcggaagagacgttacaggctttctgtcagcagttagccagctaa

SEQ ID NO: 457916 - DNA, 963 bp, Shigella boydii
atggactatcgcaaaatcattaaagagatcgggcgcgggaaaaaccacgcgcgcgatttagaccgggatactgcgcgcggtctgtatgcccatatgctcaatggtgaagtccctgaccttgagttgggcggcgtattgattgcgctacgtatcaaaggggaaggggaagcagagatgctcggcttttacgaagccatgcaaaatcacaccatcaagctgacgccgcctgcaggcaagccgatgccgattgtcatccccagttacaacggcgcgcgtaaacaggccaacctgacgccgttgttggctattctcctgcacaaactcggttttcctgtggtggttcaaggggttagcgaagatccaactcgcgtgctgacagaaaccattttcgaattgatgggtattacaccaacgttgcacggcgggcaggcgcaggcgaagctcgacgaacatcaaccggtgtttatgcctgtcggcgcgttttgcccgccgctggaaaaacaactggcgatgcgctggcggatgggcgtgcgtaacagtgcacataccctggcgaaactggcgacgccatttgccgaaggtgaggcgctgcgtctttccagcgtttcgcatccggaatacatcgggcgagtcgcgaagttctttagcgatatcggcgggcgggcgctactaatgcatggtactgaaggcgaagtgtatgctaatccgcagcgctgcccgcagatcaatctcattgaccgtgaagggatgcgggtgctgtatgaaaaacaggacactgctggtagcgagttactgccacaagcaaaagacccagaaaccacggcgcagtggattgagcgttgccttgctggcagcgaaccgattcccgaatcgctgaaaatccagatggcttgctgcctggaggctacgggtgaagcggcaactatcagcgacggcctggcgcgcgttaatcaggcattttaa

SEQ ID NO: 457917 - DNA, 2286 bp, Shigella boydii
gtgctcgaacgggcattaaaccgcattatgttggtggttattgcgagccgctttccagaaacagaaaaaccattacccctgaaaaccgaaaaatgccacaatattggctgtttatacagtatttcaggttttctcatggcattaaccgccgcgcttaaagcgcaaattgccgccgggtataaggcgcttcaggaacagatccccgactttattccccgtgcgccgcagcggcagatgattgcggacgtcgccaaaacgctggccggagaagaagggcggcatctggcgattgaagcccccaccggcgttgggaaaacgctctcctatttgatccccggcatcgccattgcccgcgaagagcaaaaaacgctggtggtgagtaccgccaacgtggcgttgcaggatcagatttacagcaaagatttaccgctgctgaaaaagatcattcccgatcttaaattcactgccgctttcgggcgtgggcgctacgtttgtccgcgtaatctgacggcgctcgccagcactgaacccacgcaacaggatctgctggcgtttcttgacgacgaactgacgccaaataatcaggaagagcaaaaacgttgtgcgaagctgaagggcgatctcgacacttataaatgggatggtctgcgcgatcatacggatatcgctatagatgatgatctctggcgtcgtttgagtaccgacaaagccagctgcctcaaccgtaactgttactactatcgtgaatgcccgttttttgttgctcgtcgggagattcaggaagcggaagtggtggtggcaaaccatgcgctggtgatggcggcgatggaaagcgaagccgtactgcctgacccgaaaaatctgctgctggtgctggacgaaggtcatcacctgccagatgtggcccgggatgcgctggagatgagcgctgaaatcaccgcgccctggtatcgactacagctggacttgttcacgaaactggtcgctacctgcatggagcagtttcgcccgaagaccatcccaccgctggcgatccctgaacgtttgaatgcgcattgtgaagagttgtatgagcttatcgcctcgttaaacaacattctcaatctctacatgcctgccgggcaggaggcagagcaccgttttgcgatgggcgaactgcctgatgaagtgctggagatctgccagcggctggcaaaactcaccgagatgctgcgtggtctggcggagttatttcttaacgatttaagtgagaaaaccggcagccacgatattgtgcgtctgcatcggttgattttgcagatgaaccgcgcgttggggatgttcgaggcgcaaagcaaactctggcggctggcgtctctggcgcaatcttccggtgcgccggtgaccaaatgggcgacgcgggaagagcgcgaagggcagctgcatctctggtttcactgcgtgggaatacgtgtcagcgatcagctggaaaggctgctgtggcgcagtattccgcacattattgtcacctccgcaaccttgcgttcgctgaacagtttttcgcgtttgcaggagatgagcgggctgaaagagaaagcgggcgaccgttttgtggcgctggattccccctttaaccactgcgaacagggcaaaattgttattccccggatgcgctttgagccttccatcgacaacgaagagcagcatattgccgaaatggcggcctttttccgtgagcaggtggagagcaaaaaacatctcggtatgttggtactgtttgccagcggacgggcgatgcagcgctttctcgactatgtgacggatttacgcctgatgctgctggtgcagagcgatcagccgcgttatcgcttagttgaactgcaccgcaaacgcgttgccaacggtgagcgtagtgtgctggtgggcttacagtcatttgccgaagggcttgatttgaaaggtgatctgctcagccaggtgcatatccacaaaatcgcttttccgcccatcgacagcccggtggtgatcaccgaaggggaatggctgaaaagcctcaaccgctatccgtttgaggtgcaaagcctgccgagcgcctcgtttaacctgattcagcaggttgggcgactgattcgaagccacggttgctggggcgaagtggttatctacgacaaacgcttgctgaccaaaaattatggcaagcgactactggatgcattaccggtatttccgatagagcaaccggaagtccctgaaggtatagttaaaaagaaagaaaaaacgaaatccccacgccgtcggcggcgttaa

SEQ ID NO: 457918 - DNA, 450 bp, Shigella boydii
atgcaagacaccatcataaatttctacagcaccagcgatgactacggtgatttttctaactttgccgcctggcccatcaaggttgacgggaaaacctggcccacctccgaacactattttcaggcacaaaaattccttgatgaaaaataccgcgaagagatccgtcgggtttcttcccccatggtcgccgctcgcatggggcgtaatcgttccaagccacttcgtaaaaactgggagtcggttaaagaacaggtgatgcgtaaagcacttcgtgctaaattcgaacagcatgcagaactgcgtgcgctcttgctggcaaccgcgcccgcaaaactggttgagcatacggaaaacgatgcttactggggagacggtggtaatggtaagggcaagaatcgactgggctaccttttaatggagttgcgcgaacaattggctatagagaagtaa

SEQ ID NO: 457919 - DNA, 1365 bp, Shigella boydii
atgtctttcgattctttgggtttaagccctgatatcctgcgcgccgttgccgagcagggttaccgtgaacccacccctattcagcagcaggcgatccctgcggtgctggaaggccgcgacctgatggctagcgcccagaccggtaccggtaaaacagcgggctttacgctgccgctgttgcaacacctgatcactcgccagccgcacgccaaagggcgtcgtccggtacgtgcgctcattcttaccccgacccgtgaactggctgcgcagattggcgaaaacgtccgtgattacagcaaatatttgaacattcgttcgctggtggtgtttggcggtgtcagcattaacccgcaaatgatgaagctgcgcggcggcgttgatgttctggtggcaacaccgggacgtttgctggacctggaacatcaaaatgcagtgaagctggatcaggttgaaatcctcgtcctcgatgaagctgaccgcatgctcgacatgggctttatccacgatatccgtcgcgtgttaacaaaactgccagcgaaacgccagaacctgctgttctctgcgaccttctctgacgatattaaagccctggcggaaaaactgttgcacaacccgctggaaatcgaagtggcacgccgcaataccgcgtctgatcaggtgacccagcacgttcactttgtcgataagaaacgcaaacgcgaattgctgtcgcacatgattggtaaagggaactggcagcaggtgctggtgtttacccgtaccaaacacggcgctaaccatctggctgagcagctcaataaagatggcatccgtagtgcggcgatccacgggaataaatcgcaaggtgcgcgtacccgtgcgctggctgattttaaatcgagtgacattcgcgtactggtggcgaccgatatcgctgcgcgcggtctggatatcgaagagttgccgcacgtcgtcaactatgaactgccaaacgtaccggaagattatgtccaccgtatcgggcgtaccggtcgtgcggctgctaccggtgaagcgttgtcgctggtgtgtgttgatgaacacaaactgctgcgtgatatcgaaaaactgctgaaaaaagagatcccgcgcattgcgattccgggctatgagccggacccgtcaatcaaagccgaaccgatccagaacggtcgccagcaacgtggcggcggcggtcgtgggcaaggtggtggtcgcggtcaacagcaaccacgccgtggggaaggtggcgcaaaatctgcaagcgcgaaacctgcagaaaaaccgtctcgccgcctcggcgatgccaaaccggcaggcgaacaacaacgtcgccgccgtccgcgtaaacctgccgctgcgcagtaa

SEQ ID NO: 457920 - DNA, 672 bp, Shigella boydii
atgaataatcctgccatgacaatcaagggtgaacaggcgaaaaaacagctgattgctgccgcactggcgcagtttggtgaatatggaatgaacaccaccactcgcgagatagccgcccaggccgggcagaatatcgctgccatcacctactacttcggttcgaaagaagatttgtacctcgcctgcgcccagtggattgccgattttattggcgagcagttccgtccgcatgccgaggaagccgaacgcttgttcgcgcaaccacagcctgatcgggctgccatccgtgaactgatccttcgcgcctgcaggaacatgattaagctgctcacccaggatgacaccgtcaacctcagcaagtttatctcccgtgagcagctctctcccacggcagcctaccacctggtgcacgaacaggtgattagtccgctacacagccacctgacacgcctgattgccgcctggaccggctgcgacgccaatgacacccgcatgatccttcatacccatgcgttgattggtgagattctggcgttccgtcttggcaaagaaacaattctgttacgtaccggctggaccgcgttcgatgaagaaaagaccgaactgatcaaccagacggtgacctgtcatatcgacctgattttgcaaggattatcgcaaaggagtttgtag

SEQ ID NO: 457921 - DNA, 996 bp, Shigella boydii
atgaaaaaacctgtcgtgatcggactggcggtagtggtacttgccgccgtggttgccggaggctactggtggtatcaaagccgccaggataacggcctgaagctgtatggcaacgtggatattcgtacggtgaatcttagtttccgtgttggggggcgcgttgaatcgctggcggtggacgaaggtgatgcgatcaaagcgggccaggtgctgggcgaactggatcacaagccgtatgagattgccctgatgcaggtgaaagcgggcgtctcggtggcacaggcgcagtatgacctgatgcttgccgggtatcgcgatgaagaaatcgctcaggccgccgcagcggtgaaacaggcgcaagccgcctatgactatgcgcagaacttctataaccgccagcaaggactgtggaaaagccgcaccatttcggcaaatgacctggaaaatgcccgctcctcgcgcgaccaggcacaggcaacgctgaaatcagcacaggataaattgcgtcagtaccgttccggtaaccgtgaacaggacatcgctcaggcgaaagccagcctcgaacaggcgcaggcgcaactggcgcaggcggagctgaatttacaggactcaacgttgatagcaccgtctgatggcacactgttaacgcgcgcggtggagccaggcacggttctcaatgaaggtggcacggtgtttaccgtttcactaacgcgtccggtgtgggtgcgcgcttatgttgatgaacggaatcttgaccaggcccagccggggcgcaaagtgctgctttataccgatggtcgcccggacaagccgtatcacgggcagattggtttcgtttcgccgactgctgaatttaccccgaaaaccgtcgaaacaccggatctgcgtaccgacctcgtctatcgcctgcgtattgtggtgaccgacgccgatgatgcgttacgccagggaatgccggtgacggtgcaattcggtaacgaggcaggacatgaatga

SEQ ID NO: 457922 - DNA, 1737 bp, Shigella boydii
atgaatgatgccgttatcacgctgaacggcctggaaaaacgctttccgggcatggacaagcccgccgtcgcgccgctcgattgtaccattcacgccggttatgtgacggggctggtggggccggatggtgcaggtaaaaccacgctaatgcggatgctggcgggattactgaaacccgacagcggcaatgccacgatgattggctttgatccaatcaaaaacgacggcgcgctgcacgccgtgctcggctatatgccgcagaaatttggtctgtatgaagatctcacggtgatggagaacctcaatctgtacgcggatttgcgcagcgtcaccgacgaggcacgtaagcaaacttttgctcgcctgctggagtttacgtctcttgggccgtttaccggacgcctggcgggcaagctctccggtgggatgaaacaaaaactcggtctggcctgtaccctggtgggcgaaccgaaagtgttgctgctcgatgaacccggcgtcggcgttgaccctatctcacggcgcgaactgtggcagatggtgcatgagctggcaggcgaagggatgttaatcctctggagtacctcgtatctcgacgaagccgagcagtgccgtgacgtgttactgatgaatgaaggcgagttgctgtatcagggggaaccaaaagccctgacacaaaccatggccggacgcagctttctgatgaccagtccacacgagggcaaccgcaaactgttgcaacgcgccttgaaactgccacaggtcagcgacggcatgattcaggggaaatcggtacgtctgatcctcaaaaaagaggccacaccagacgatattcgccatgccgacgggatgccggaaatcaacatcaacgaaactacgccgcgttttgaagatgcatttattgatttgctgggtggtgccggaacctcagaatcgccgctgggtgcaatattgcatacggtagaaggcacacccggcgagacggtgatcgaagcgaaagaactgaccaagaaatttggtgattttgccgccaccgatcacgtcaactttgccgttaaacgtggggagatttttggtttgctggggccaaacggcgcgggtaaatcgaccacctttaagatgatgtgcggtttgctggtgccgacttccggccaggcgctggtgctggggatggatctgaaagagagttccggtaaagcgcgccagcatctcggctatatggcgcaaaaattttcgctctacggcaacctgacggtcgaacagaatttacgctttttctctggtgtgtatggcttacgcggtcgggcgcagaacgaaaaaatctcccgtatgagcgaggcatttggcctgaaaagtatcgcctcccacgcgaccgatgaactgccattaggttttaaacagcggctggcgctggcctgttcgctgatgcatgaaccggacattctgtttctcgacgaaccaacgtccggcgttgatcccctcacccgccgcgaattttggctgcatatcaacagcatggtagagaaaggcgtcacggtgatggtcaccactcactttatggatgaagcagaatattgcgaccgcatcggcctggtgtaccgtgggaaattaattgccagcggcacgccggatgatttgaaagcgcagtcggccaacgacgagcaacccgatcccaccatggagcaagcctttattcagttgatccacgactgggataaggagcatagcaatgagtaa

SEQ ID NO: 457923 - DNA, 1134 bp, Shigella boydii
atgagtaacccgatcctgtcctggcgtcgcgtacgggcgctgtgcgttaaagagacgcggcagatcgttcgcgatccgagtagctggctgattgcggtagtgatcccgctgctactgctgtttatttttggttacggcattaacctcgactccagcaagctgcgggtcgggattttactggaacagcgtagcgaagcgacgctggatttcacccacaccatgaccggttcgccctacatcgacgccaccatcagcgataaccgtcaggaactgatcgccaaaatgcaggcggggaaaattcgcggtctggtggttattccggtggattttgcggaacagatggagcgcgccaacgccaccgcaccgattcaggtgatcaccgacggcagtgagccgaataccgctaactttgtacaggggtatgtcgaagggatctggcagatctggcaaatgcagcgagcggaggacaacgggcagacttttgaaccgcttattgatgtacaaacccgctactggtttaacccggcggcgattagccagcacttcattatccccggtgcggtgaccattatcatgacggtcatcggcgcgattctcacctcgctggtggtggcgcgagaatgggaacgcggcaccatggaggctctgctctctacggagattacccgcacggaactgctgctgtgtaagctgatcccttattactttctcgggatgctggcgatgttgctgtgtatgctggtgtcagtgtttattctcggcgtgccgtatcgcgggtcgctgctgattctgttttttatctccagcctgtttttactcagtaccctggggatggggctgctgatttccacgattacccgcaaccagttcaatgccgctcaggtcgccctgaacgccgcttttctgccgtcgattatgctttccggctttatttttcagatcgacagtatgcccgcggtgatccgcgcggtgacgtacattattcccgctcgttatttcgtcagcaccctgcaaagcctgttcctcgccgggaatattccagtggtgctggtggtaaacgtgctatttttgatcgcttcggcggtgatgtttatcggcctgacgtggctgaaaaccaaacgtcggctggattag

SEQ ID NO: 457924 - DNA, 1107 bp, Shigella boydii
atgtttcatcgcttatggacgttaatccgcaaagagttgcagtcgctgctgcgcgaaccgcaaacccgcgcgattctgattttacctgtgcttattcaggtgattctgttcccgttcgccgccacgctggaagtgactaacgccaccatcgccatctacgatgaagataacggcgagcattcggtggagctgacccaacgttttgcccgcgccagcgcctttactcatgtgctgctgctgaaaagcccacaggagatccgcccaaccatcgacacacaaaaggcgttactcctggtgcgtttcccggctgacttctcgcgcaaactggataccttccagaccgcgccgttgcagttgatcctcgacgggcgtaactccaacagtgcgcaaattgccgccaactacctgcaacagatcgtcaaaaattatcagcaggagctgctggaaggaaaaccgaaacctaacaacagcgagctggtggtacgcaactggtataacccgaatctcgactacaaatggtttgtggtgccgtcactgatcgccatgatcaccactatcggcgtaatgatcgtcacttcactttccgtcgcccgcgaacgtgaacaaggtacgctcgatcagctactggtttcgccgctcaccacctggcagatcttcatcggcaaagccgtaccggcgttaattgtcgccaccttccaggccaccattgtgctggcgattggtatctgggcgtatcaaatccccttcgccggatcgctggcgctgttctactttacgatggtgatttacggtttatcgctggtgggattcggtctgttgatttcatcactctgctcgacacaacagcaggcgtttatcggcgtgtttgtctttatgatgcccgccattctcctttccggttacgtttcgccggtggaaaacatgccagtatggctgcaaaacctgacgtggattaaccctattcgccactttacggacattaccaagcagatttatttgaaggatgcgagtctggatattgtgtggaatagtttgtggccgctactggtgataacggccacgacagggtcagcggcgtacgcgatgtttagacgtaaggtgatgtaa

SEQ ID NO: 457925 - DNA, 411 bp, Shigella boydii
atgaagtggcaacaacgtgttcgtgtcgcaacgggtctaagttgctggcagattatgttgcatttactggtagtggcgctgctggtggtgggctggatgagtaagactctggttcacgtcggcgtgggattatgcgcactgtattgtgtcacggtagtgatgatgttggtgtttcagcgccaccccgagcaacgctggcgtgaggtggcagacgtgctggaagagctgaccacgacctggtattttggtgcagcgctgattgtgctgtggctgttgtcccgcgtactggaaaacaactttttgctggcaattgcagggctggcaatccttgccggcccggcggtagtgtctttgctggcgaaagataagaagttacatcaccttacgtctaaacatcgcgtacgccgctga

SEQ ID NO: 457926 - DNA, 762 bp, Shigella boydii
atgcccgatcaaacacaacaattttcgttcaaggtgctcaccatcaacattcaaaaaggttttaccgcgtttaaccgacgcttcattttgccggaacttcgcgacgcggtgcgtaccgtcagcgccgatattgtttgcctgcaggaagtgatgggcgcgcacgaagttcatccgctgcatgtggaaaactggcccgatacctcgcactacgagtttctcgccgacactatgtgccgcgattttgcctacggtcgcaatgccgtatacccggaagggcatcacggcaacgccgtactgtcgcgttatcccattgaacattatgagaatcgcgatgtttcggtcgatggtgcggaaaagcgcggcgtgctctactgccgcattgtgccgccgatgaccggaaaagcgattcatgtgatgtgcgtacatctgggcctgcgtgaggcgcaccgtcaggcgcagcttgcgatgctcgccgaatgggtgaatgagctaccggacggcgaaccggtattggtggcgggtgatttcaatgactggcggcaaaaagctaatcatccgttaaaagtgcaggccggactggatgagatttttacccgcgcccacggacgcccagcgcgcacgtttccggtgcaatttcctctactacgactggacaggatctacgtcaaaaatgccagcgccagcgcgccaaccgcgttgccgctgcggacatggcgacacctttctgatcatgcccctttaagtgcggagattcatttatga

SEQ ID NO: 457927 - DNA, 1242 bp, Shigella boydii
atgaaatgtagctggcgcgaaggcaataagatccagttgctggaaaacggcgagcaatattatcccgcggtgtttaaggcgattggcgaggcacaagaacgcatcattcttgaaacgtttatctggtttgaggataacgtcggcaaacagctacatgcggcactactggcagcagcgcaacgcggggttaaagcggaagtcttgctggatggctacggttcgccggatctcagcgatgagtttgtcaataaactgacggcagctggcgtagtgttccgctactacgatccccgccctcgcctttttggtatgcgcaccaatgtgtttcgccggatgcatcgcaaaattgtggtgatcgacgcgcgtatcgcctttattggcgggctgaattactccgccgagcatatgtccagctacggtccagaggctaaacaggattacgcggtacgccttgaagggccgattgtcaaagatattctccagtttgagctggaaaacctgcctggacagagcgcggcacggcgctggtggcgacgtcatcacaaagcggaagagaaccgccagccgggagaagcgcaggtattgctggtctggcgcgataacgaagaacatcgcgatgatattgaacgccattatctgaaaatgctcactcaggcgcggcgggaagtgattatcgccaacgcctacttcttccccggctatcgatttttacacgccttgcgtaaagcggcacggcgcggggtgcggatcaaactgatcattcagggcgaaccggatatgccgattgtcagagtcggtgcgcgcttgctgtataactatctggttaaaggcggcgttcaggtttttgagtaccgccgccgcccgctccacggcaaagtggcattgatggacgatcactgggcgacagtagggtccagtaatctcgatccgctcagtttgtcactgaatctcgaagcaaatgtcatcatccacgatcgtcattttaaccagacgctgcgcgataatctgaacggcattattgccgcagattgtcagcaggtggatgaaaccatgctgcccaaacgcacctggtggaacctgaccaaaagcgtgctggcgttccactttttacgccacttcccggcgctggttggctggcatccggcacacacaccacgtctgacgcaggttgatccccccgcacaaccgacaatggaaacgcaggatcgggtagaaactgaaaacacgggggtaaaaccctga

SEQ ID NO: 457928 - DNA, 957 bp, Shigella boydii
atgagtaaatcacacccgcgctggcgcttagcaaagaagatcctcacctggctgttttttatcgcggtgattgtgttgctggtggtctacgccaaaaaagtggactgggaagaggtctggaaggtcatccgcgactacaatcgcgttgcgctgcttagtgcggtcgggctggtggtcgtcagctatctgatttacggctgctatgacctgctcgcccgcttttactgcggtcacaaactggcgaagcgccaggtgatgctggtgtcgtttatctgctacgccttcaacctgacgctcagtacctgggtcggcggcattggtatgcgctatcgtttgtactcccgactagggttaccgggcagcactattacgcggattttctcgctcagtattaccaccaactggctgggctatattttactggcagggattatctttaccgcaggcgtggtggagttgccggatcactggtatgtcgctcaaactacgctgcgtattctcggcattggcttactgatgattatcgcggtttatttgtggttttgcgctttcgcgaagcaccgccatatgaccatcaaagggcaaaagctggtgctgccttcatggaaattcgccctcactcagatgctgatttccagcgttaactggatggtaatgggggcgattatctggctgttacttggtcaaagcgtgaactatttctttgtactgggcgtgttactggttagtagtattgctggcgtcatcgtgcatattccggcggggatcggtgtgctggaagcggtgtttatcgcactactggctggggagcatacctcgaaagggagcattatcgccgcgctgctcgcttatcgcgtcctgtattactttatcccgctgctgctggcgctgatctgttacctgctactggaaagccaggcgaagaagctacgggcgaaaaatgaagcggcgatgtga

SEQ ID NO: 457929 - DNA, 714 bp, Shigella boydii
atggaatcatactcacaaaacagcaataaattagattttcagcacgagaccaggatattaaacggtatatggctcattaccgctttaggtttggtggcaaccgcaggactggcctggggagctaagtatctcgaaattacggcaaccaaatatgattcaccaacaatgtatgtcgccatagggttattattagtttgtatgtatggcttaagtaaggatatcaacaagataaatgccgtcatcgcaggcgtaatatatctgtttttactctctttggtggcgattgtcgttgcaagtttagttcctgtatatgccattatcattgtgttcagcactgcgggcgcgatgtttttaatcagtatgctggccggtttattatttaatgttgatcctggttctcaccgttttatcattatgatgacgttgacagggttggccctggtaatcatcgtgaatgcggcattaatgagtgaacggcccatttgggtaataagttgcttagtgattgtgttatggccaggcattatctcgcatggacgaaataagctccttgaactggcaggaaaatgccatagtgaagagttgtggagtccggttcgttgcgcttttacaggtgcattaacactctattactattttatcggcttctttgggatacttgccgcgatagctataacgcttgtctggcaaaggcatacgcgtttttttcattag

SEQ ID NO: 457930 - DNA, 705 bp, Shigella boydii
atggacagattcccacgttctgattcaatcgtacaaccccgggctggcttgcaaacttatatggcgcaagtctatggctggatgaccgttggcttgttgctgaccgcatttgttgcctggtatgcggctaattccgcggccgtgatggagctgttgttcactaaccgtgtctttttaatcggtctgatcatcgcgcaattagcattggttattgtgttatcagcgatgattcaaaagctgagcgcaggtgtaacgacgatgctctttatgctttattcggcgctgacgggtcttacgctttccagtatattcattgtctataccgctgcttctatcgccagtactttcgtcgttactgccgggatgttcggcgcaatgagcctgtacggttacaccacgaagcgcgatttaagtggctttggcaatatgctgtttatggcgttaatcggcattgtgctggcatcgctggtcaacttctggctgaaaagcgaagcattgatgtgggcagttacctacatcggcgtgattgtctttgtcggattgacggcgtatgacactcagaaattgaaaaatatgggtgagcagattgatacccgcgacacgtcgaacctgcgcaaatattccattcttggcgcgttaaccttgtatctggacttcatcaacctgttcctgatgttgctgcgaatttttggcaaccgccgttaa

SEQ ID NO: 457931 - DNA, 453 bp, Shigella boydii
atggcagaaaccaaaattgttgttggtccgcagccgttcagcgtaggagaagagtacccgtggctggcggagcgtgacgaagacggtgcggtagtcacctttactggtaaggtgcgcaaccataacctgggcgacagcgtcaaagcattaaccctcgaacactatccggggatgactgaaaaagcactggcagaaattgttgatgaagcgcgtaaccgctggccgctggggcgcgtcactgcgattcaccgcatcggggaattatggccgggcgatgaaatcgtttttgtcggtgtcaccagtgcgcatcgcagcagtgcgtttgaagccgggcagtttattatggattatctcaaaacccgcgcaccgttctggaagcgcgaagccacgccggaaggcgaccgctgggttgaagctcgggagagcgatcagcaggcggcaaaacgctggtag

SEQ ID NO: 457932 - DNA, 246 bp, Shigella boydii
atgattaaagttctttttttcgcgcaggtgcgcgagttggtgggaacagatgcaaccgaagtggctgcggatttcccaactgttgaagcgttacgccagcacatggctgcgcagagcgatcgctgggcgctggcgctggaagatggcaaattactggctgccgtcaaccagacgctggtgagttttgaccatccgctgactgacggcgacgaagtagctttcttcccgccggtaaccggaggttaa

SEQ ID NO: 457933 - DNA, 486 bp, Shigella boydii
atgtcgcaactgacccatatcaacgccgctggcgaagcgcacatggtggatgtctccgccaaagcggaaaccgtgcgtgaagcgcgggcggaagcctttgtcaccatgcgcagcgagacgctggcgatgattattgatggtcgccaccacaaaggcgacgtatttgccactgcgcgtattgccggtattcaggcggcaaaacgcacctgggatctgatcccgctctgtcatccgctgatgctcagcaaagttgaagtcaatttacaggccgagccggagcacaatcgggtgcgtatagaaaccttatgccgcctgaccgggaaaaccggtgtcgaaatggaagcattaaccgcggcctccgtggcggcgctgaccatttatgacatgtgcaaagcggtgcaaaaagatatggtgattggtccggtacgtttgctggcgaagagcggcggcaagtcgggtgactttaaggtggaagcggatgattaa

SEQ ID NO: 457934 - DNA, 513 bp, Shigella boydii
atgagtcaggtaagcactgaatttatcccgacccgtattgctattcttacggtttctaatcgtcgcggtgaagaagacgatacctccggtcactatctgcgcgattcggcgcaagaagcgggccatcacgttgtcgataaagccattgtgaaagaaaaccgctacgctattcgcgctcaggtatctgcgtggatcgccagcgacgatgtacaagtggtattgattacgggtggtactggcctgacggaaggtgatcaggctcccgaagcattgctgccgttgttcgaccgtgaagttgaaggttttggtgaagtgttccggatgttgtcgtttgaagagattggcacttccacgttgcaatctcgtgcggtagcgggcgtcgccaacaaaacgctgattttcgccatgccgggttcgaccaaagcgtgccgtaccgcatgggaaaatatcatcgcgccgcagctggatgcccgtacgcgtccgtgtaatttccatccacatttgaagaaataa

SEQ ID NO: 457935 - DNA, 990 bp, Shigella boydii
atggcttcacaactgactgatgcatttgcgcgtaagttttactacttgcgcctgtcgattaccgatgtgtgtaactttcgttgcacctactgcctgccggatggctacaaaccgagcggcgtcaccaataaaggctttcttaccgtcgatgaaattcgccgggttacgcgcgccttcgccagtctgggcaccgaaaaagtgcgcctgacaggaggtgagccgtctttacgccgcgactttaccgatatcatcgccgctgtgcgggaaaacgacgctatccgccagattgcggtcaccaccaatggttaccgtctggaacgcgatgtggcgaactggcgcgatgcgggacttactggcattaacgtcagtgtcgacagtctggacgcccgccagtttcacgctattaccgggcaggataaattcaaccaggtcatggcagggattgatgctgcatttgaggccggttttgagaaggtcaaagtcaataccgtgctgatgcgtgatgttaatcatcaccagctcgacacctttctgaactggatccagcatcgccctatccagctgcgtttcatcgaactgatggaaacgggcgagggcagcgagctcttccgtaagcatcacatctctggtcaggttctgcgtgacgagctactgcgtcgcggctggatccaccaattacgtcaacgcagcgacggtcccgcgcaagtcttttgccatccagattacgccggagagattggccttatcatgccgtatgaaaaagacttctgcgccacttgcaaccgcctgcgcgtttcctccattggtaaactctatctctgcctgtttggtgaaggcggcgttaacctgcgcgatctgctggaagacgatacccagcaacaggcgctggaagcgcgtatttcagtggcgctgcgggagaagaaacagacccatttcctgcatcaaaacaacaccggtattacgcaaaacttatcgtacattggcggctaa

SEQ ID NO: 457936 - DNA, 909 bp, Shigella boydii
atgcgcaatcgtacgctggctgatcttgatcgtgtcgttgctctcggcggagggcatggactgggacgcgttctctcatcactttcgtctttgggttctcgtttaacgggtatcgtcaccaccacggataatggtggctcgacggggcgtattcgccgttcagaaggcggcattgcctggggcgatatgcgcaactgcctcaaccaactgataacggaaccgagcgtcgcctccgcgatgtttgaataccgttttggcggcaatggcgaactttccgggcacaaccttggaaacttgatgttaaaggcgctggatcaccttagcgtgcggcctctggaagccatcaatttaattcgtaatctgctgaaagtggatacgcatttgattccaatgtcagagcatcccgtcgatctgatggcgattgacgatcaggggcatgaagtttacggcgaggtcaatatcgaccagttaactacgccgattcaagagttattattaacgccgaatgtacccgcaacgcgtgaggcagttcacgctatcaatgaagcggatctcatcattattgggcctggcagtttttataccagcctgatgccaattctgctgctgaaggaaatcgcccaggcattacgccgcacgccagcgccgatggtttatatcggcaatctggggcgtgagttgagtttacctgcggctaatttgaagctggaaagcaagctggcaattatggagcagtatgttggtaaaaaagtcattgatgcggtcatcgtcgggccaaaagtggatgtctcggcggtgaaagagcggattgtgatccaggaggtactggaggccagcgatattccgtatcgtcatgaccgccagttgttacataacgcgctggaaaaggcgttacaggctttaggttaa

SEQ ID NO: 457937 - DNA, 2022 bp, Shigella boydii
atgagtaaaccgttcaaactgaattccgcttttaaaccttctggcgatcagccagaggcgattcgacgtctcgaagaggggctggaagatggcctggcgcaccagacgttacttggcgtgactggctcagggaaaaccttcaccattgccaatgtcattgctgaccttcagcgcccaaccatggtacttgcgcccaacaaaacgctggcggcccagctgtatggcgaaatgaaagagttcttcccggaaaacgcggtggagtatttcgtctcctactacgactactatcagccggaagcctatgtaccgagttccgacactttcattgagaaagatgcctcggttaacgaacatattgagcagatgcgtttatccgccaccaaagcgatgctggagcggcgtgatgtggttgtagtggcctctgtttccgcgatttatggtctgggcgatcctgatttatatctcaagatgatgctccatctcacggtcggtatgattatcgatcagcgcgcgattctgcgccgactggcggagctgcaatacgctcgtaatgatcaagcattccagcgtggtactttccgcgttcgtggcgaggtgattgatatcttcccggcagaatcggatgacattgcacttcgcgtggaactgtttgacgaggaagtggaacgattgtcgttatttgacccgctgaccgggcagattgtttccactattccacgttttaccatctacccgaaaacgcactacgtcacaccgcgcgagcgcatcgtacaggcgatggaggagatcaaagaagaactggccgccagacgcaaagtgctgttggaaaacaacaaactgctggaagagcagcggctgacccagcgtacccagtttgatctggagatgatgaacgagctgggctactgttcggggattgaaaactactcgcgcttcctctccggtcgtggaccgggtgagccaccgccgacgctgtttgattacctgcctgccgatgggctgctggtcgtcgatgaatctcacgtcaccattccacaaattggcggcatgtatcgcggtgaccgggcgcgtaaagagacactggtggagtacggcttccgcctgccatcagcgctggataaccgtccgcttaagtttgaagagttcgaagcattagcgccgcaaaccatctatgtttcggcgacgccgggtaattacgagctggaaaaatccggcggcgatgtggtggatcaggtggtgcgtccaaccggattgcttgacccgattatcgaagtgcggccggtggcgacacaggttgatgatcttctttcggagattcgtcagcgagcggcaattaacgaacgcgtactggtcaccacactgaccaagcggatggcggaagatcttaccgaatatctcgaagaacatggcgagcgcgtgcgttatcttcactcagatatcgacaccgtcgaacgtatggagattatccgcgacttgcgtctgggtgagttcgacgtgctggtagggatcaacttactgcgcgaaggtctggatatgccggaagtgtcgctggtggcgatcctcgacgctgacaaagaaggcttcctgcgttccgaacgttcgttgatccagaccattggtcgtgcggcacgtaacgttaacggtaaagcgattctctacggcgataagatcaccccatcaatggcgaaagcgattggcgaaaccgaacgtcgccgtgagaaacagcagaagtacaacgaggaacacggcattacgccgcaaggcttgaacaagaaagtggtcgatatcctggcgctggggcagaacattgccaaaaccaaagcgaagggcagaggaaaatcgcgcccgattgttgagccggataatgtgccgatggatatgtcgccgaaagcgttgcagcagaaaatccatgaactggaagggctgatgatgcaacacgcgcagaatctggagttcgaagaagcggcacaaattcgtgaccagttgcatcagttgcgtgagttgtttattgccgcatcgtaa

SEQ ID NO: 457938 - DNA, 678 bp, Shigella boydii
gtgagtaaacgttattttgtcaccggaacggataccgaagtggggaaaaccgtcgccagttgtgcacttttacaagccgcgaaggcagtaggttatcggacggcaggttataaaccggtcgcctctggcagcgaaaagaccccggaaggcttacgtaatagtgacgcgctggcgttacagcacaacagcagcctgcagctggattacgcaatagtaaatccttacaccttcgcagaacccacttcgccgcacatcatcagtgcgcaagagggcaggccgatagaatcattggtaatgagcgccggattacgcgcgcttgaacaacaggctgactgggtgttagtggaaggtgctggcggctggtttacgccgctttctgacactttcacttttgcagattgggtaacacaggaacaactgccggtgatactggtagttggtgtgaaactcggctgtattaatcacgcgatgttgactgcgcaggcaatacaacacgccggactgactctggcgggttgggtggcgaacgatgttacgcctccgggaaaacgtcacgctgaatatatgaccacgctcacccgcatgattcccgcgccgctgctgggagagatcccctggcttgcagaaaatccagaaaatgcggcaaccggaaagtacataaaccttgccttgttgtag

SEQ ID NO: 457939 - DNA, 756 bp, Shigella boydii
atggcaacggttaataaacaagccattgcagcggcatttggtcgggcagccgcgcactatgagcaacacgcagagttacagcgccggagtgctgacgtcttactggcaatgctcccacagcgtaaatacacccacgtactggacgcggggtgtgggccaggctggatgagccgccactggcgagagcgtcacgcacaggtgacggcgttagatctctcaccgccaatgcttgtgcaagcccgccagaaagatgctgcagaccattatctggcgggagatatcgaatccctgccgttagcgactgcgacgttcgatcttgcatggagcaatctcgcggtgcagtggtgcggtaatttatccacggcactccgcgagctgtatcgggtggtgcgccccggaggcgtggtggcgtttaccacgctggtgcagggatcgttacccgaactgcatcaggcgtggcaggcggtggacgagcgtccgcatgctaatcgctttttaccgccagatgaaatcgaacagtcgctgaacggcgtgcattatcaacatcatattcagcccatcacactatggtttgatgatgcgctcagtgccatgcgttcgctgaaaggcatcggtgctacgcatcttcatgaagggcgcgacccgcgaatattaacgcgttcgcaattgcagcgattgcaactggcctggccgcaacaacaggggcgatatcctctgacgtatcatctttttttgggagtgattgctcgtgagtaa

SEQ ID NO: 457940 - DNA, 1155 bp, Shigella boydii
atgagctggcaggagaaaatcaacgcggcgctcgatgcgcggcgtgctgccgatgccctgcgtcgccgttatccagtggcgcaaggagccggacgctggctggtggcggatgatcgccagtatctgaacttttccagtaacgattatttaggtttaagccatcatccgcaaattatccgtgcctggcagcagggtgcggagcaatttggcgtcggtagcggcggttccggtcacgtcagcggttatagcgttgcgcatcaggcgctggaagaagaactggccgagtggctgggctattcgcgggcactgctatttatctctggttttgccgctaatcaggcggtcattgccgcgatgatggcaaaagaggaccgcattgtcgctgaccggcttagccatgcctcattgctggaggctgccagtttaagcccgtcgcagcttcgccgttttgttcataacgatgtcactcatctggcgcgactgcttgcttccccctgtccggggcagcaactggtggtgacagaaggcgtgttcagcatggacggcgatagtgcgccactggcggaaatccagcaggtaacgcaacagcacaatggctggttgatggtcgatgatgcccacggcacgggcgttatcggggagcaggggcgcggcagctgctggctgcaaaaggtaaaaccagaattgctggtggtgacttttggcaaaggatttggcgtcagcggggcagcggtgctttgctccagtacggtggcggattatctgctgcaattcgcccgccaccttatctacaacaccagtatgccgcccgctcaggcgcaggcattacgtgcgtcgctggcggtcattcgccgtgatgagggggatgcacggcgcgaaaaactggtgtcactcattgcgcgttttcgtgccggagtacaggatttgccgtttacgcttgctgattcatgcagcgccatccagccattgatcgtcggtgataacagccgtgcgttacaactggcagaaaaactgcgccagcaaggctgctgggtcacggcgattcgcccgccaaccgtacccgctggtactgcgcgactgcgcttaacgctaaccgcagcgcatgaaatgcaggatatcgaccgtctgctggaggtgctgcatggcaacggttaa

SEQ ID NO: 457941 - DNA, 1041 bp, Shigella boydii
atggctcaccgcccacgctggacattgtcgcaagtcgcagaattatttgaaaaaccgttgctggatctgctgtttgaagcgcagcaggtgcatcgccagcatttcgatcctcgtcaggtgcaggtcagcacgttgctgtcgattaaaaccggtgcttgcccggaagattgcaaatattgcccgcaaagctcgcgctataaaaccgggctggaagccgagcggttgatggaagttgaacaggtgctggagtcggcgcgcaaagcgaaagcggcgggatcgacgcgtttttgcatgggcgcggcgtggaagaatcccaacgaacgcgatatgccgtacctggagcagatggtgcagggggtaaaagatttagggctggaggcgtgtatgacgctgggcacgttgagtgaatctcaggcgcagcgcctcgcgaacgccgggctggattactacaaccacaacctcgacacctcgccggagttttacggcaatatcatcaccacccgcacttatcaggaacgcctcgatacgctggaaaaagtgcgcgatgccgggatcaaagtctgttctggcggcattgtgggcttaggcgaaacggtaaaagatcgcgccggattattgctgcaactggcaaacctgccgacgccgccggaaagcgtgccaatcaacatgctggtgaaggtgaaaggcacgccgcttgccgataacgatgacgttgatgcctttgattttattcgcaccattgcggtcgcgcggatcatgatgccgacctcttacgtgcgcctttctgccggacgcgagcagatgaacgaacagactcaggcgatgtgctttatggcaggcgcaaactcgattttctacggttgcaaactgctgaccacgccgaatccggaagaagataaagacctgcaactgttccgcaaactggggctaaatccgcagcaaactgccgtgctggcaggggataacgaacaacagcaacgtcttgaacaggcgctgatgaccccggatactgacgaatattacaacgcggcagcactatga

SEQ ID NO: 457942 - DNA, 1290 bp, Shigella boydii
atgacaaaggacgatcttgcctttgaccaacgccatatctggcacccatacacatccatgacctccccgctgccggtttatccggtggtgagcgccgaaggttgcgagctgattttgtctgacggcagacgcctgattgacggtatgtcgtcctggtgggcggcgatccacggctacaatcacccgcagcttaatgcggcgatgaagtcgcaaattgatgccatgtcgcatgtgatgtttggcggtatcacccatgcgccagccattgagctgtgccgcaaactggtggcgatgacgccgcaaccactggaatgcgtttttctcgcggactccggttccgtagcggtggaagtggcgatgaaaatggcgttgcagtactggcaagccaaaggcgaagtgcgccagcgttttctgaccttccgcaatggttatcatggcgatacctttggcgcgatgtcggtgtgcgatccggacaactcaatgcacaacctgtggaaaggctatctgccagaaaacctgtttgctcccgccccgcaaagccgcatggatggtgaatgggatgaacgcgatatggttggctttgcccgcctgatggtggcgcatcgtcatgaaatcgcggcggtgatcattgaaccgattgtccagggcgcaggcgggatgcgcatgtaccatccggaatggttaaaacgaatccgcaaaatgtgcgatcgcgaaggtatcttgctgattgccgacgagatcgccaccggatttggtcgtaccggcaaactgtttgcctgtgaatatgcagaaatcgcgccggacattttgtgcctcggtaaagccttaaccggcggcacaatgaccctttccgccacactcaccacgcgcgaggttgcagaaaccatcagtaacggcgaagccggctgctttatgcacgggccaacttttatgggcaatccgctggcctgcgcggctgcaaacgccagcctggcgattctcgaatctggcgactggcagcaacaggtggcggctattgaagtacagctgcgcgagcaacttgcccccgcccgtgatgccgaaatggttgccgatgtgcgcgtgctgggggcaatcggcgtagtcgaaacaactcgtccggtgaatatggcggcgctgcaaaaattctttgtcgaacagggggtatggatccggccttttggcaaactgatttacctgatgccgccctatattattctcccgcaacagttgcagcgtctgaccgcagcggttaaccgtgcggtgcaggatgaaacatttttttgccaataa

SEQ ID NO: 457943 - DNA, 477 bp, Shigella boydii
atgaaactcatcagtaatgatctgcgcgatggcgataagctgccgcatcgtcatgtctttaacggcatgggttacgatggcgataatatttcaccgcatctggcgtgggatgatgttcctgcgggaacgaaaagttttgttgtcacctgctacgacccggatgcgccaaccggctccggctggtggcactgggtagttgttaatttacccgctgatacccgcgtattaccgcaagggtttggctctggtctggtagcaatgccagacggcgttttgcagacgcgtaccgattttggtaaaaccggatacgatggcgcagcgccgccgaaaggcgaaacccatcgctacatttttaccgttcacgcgctggatgtagagcatattgatgtcgatgaaggagccagcggcgcgatggtcgggtttaacgttcatttccactctctggcaagcgcatcgattaccgcgatgtttagttaa

SEQ ID NO: 457944 - DNA, 1284 bp, Shigella boydii
gtgaacacattttcagtttcccgtctggcgctggcattggcttttggcgtgacgctgaccgcctgtagctcaacaccacccgatcaacgtccttctgatcaaactgcgcctggtacctcttctcgcccgattctgtcggcaaaagaagcgcagaatttcgatgctcaacactattttgcatccctgacaccaggtgctgcagcgtggaatccttccccgattaccctgcctgcgcaacctgactttgttgtcggcccggcgggcactcaaggtgtaacgcataccacgattcaggcggcggtagatgcggcaattatcaagcgtaccaacaagcgccagtatattgccgtgatgcctggtgagtatcagggaacggtgtatgtccctgctgctccgggtggaattactctgtacggtacaggtgaaaaaccgattgatgtgaagattgggctttcccttgatgggggcatgagccctgccgactggcgtcacgacgtcaacccgcgcggcaaatatatgccaggtaaaccagcgtggtatatgtacgatagctgccagagcaaacgcagcgacagtatcggtgttctctgctctgcggtcttctggtcacaaaacaatggcctgcaactgcaaaacctgaccatcgaaaacacgctgggcgatagcgtagatgcaggtaaccatccggcggtggcactgcgtactgatggtgaccaggtacagattaacaacgttaacattctcggtcgtcagaacaccttctttgtcaccaacagcggtgtgcagaaccgtctggaaacgaatcgtcagccgcgtacgctggtgaccaacagctacattgaaggggatgtggatatcgtttctggtcgcggcgcagtggtgttcgataacaccgaattccgcgtggtgaactcacgtactcagcaagaagcgtatgtgtttgcaccggctacgctgtccaacatttactacggtttcctcgccgtaaacagccgtttcaatgctttcggtgatggtgtggcgcaactgggccgctcgctggatgttgatgccaataccaacggtcaggtggtgatccgtgatagcgccatcaacgaaggttttaacacggctaaaccgtgggccgatgcggtgatctctaatcgtccgtttgcgggtaataccggcagcgtagatgataacgacgaaatacagcgcaatctgaatgacactaactacaaccgcatgtgggaatacaataaccgcggcgtgggtagtaaagtggttgcagaggcgaagaagtaa

SEQ ID NO: 457945 - DNA, 2262 bp, Shigella boydii
ttggagtcattacctgaaaaaggcgtgtttctcgccagtaataacgaaataattgccgaagaacatttcaccggcgaaattaaaaaagaagaagccaaaaaaggcactattgcctggtctattctctcttctcataatacgtccggaaatatggataaacttaaaattaagtttgattcattagcctctcacgatattacctttgttggtattgtacagaccgctaaagcgtccggaatggaacgtttcccgctgccgtatgtgctgaccaactgccataactcactctgcgccgtcggcggcaccattaacggtgatgaccatgtttttggtttatcggcagctcagcgttatggcggtatttttgtgcctccgcatattgcggtcatccatcaatatatgcgtgagatgatggcaggcgggggcaaaatgatcctcgggtcagacagccacacccgttacggtgcattagggacaatggcagtcggtgagggcggcggtgagttggtaaaacagctgcttaatgacacctgggatatcgactatccgggcgtggttgcggtgcatctgaccggaaaacctgcgccgtatgtggggccacaggatgtggcgctggctatcattggcgcggtgttcaaaaacggttacgtcaaaaacaaagtcatggagttcgttggaccgggcgttagcgcgctctctaccgatttccgtaacagcgttgacgtgatgaccacggaaaccacctgtttaagctccgtctggcaaactgatgaagaagtgcataactggctggcgctgcacggtcgcggccaggattactgccagcttaaccctcaaccgatggcgtactacgatggctgcatcagcgttgatttaagcgccatcaaatcaatgattgcgctgccgttccacccgagcaacgtgtatgaaatcgacacactgaaccagaacctgaccgacattctgcgtgagattgaaattgagtccgaacgcgtggcgcacggtaaagccaaactctcgctgctggataaagtggaaaatggtcgcctgaaagtgcagcaggggattatcgcgggctgttctggcggtaactacgaaaacgtcatcgcggcggcgaatgcactgcgcggtcaatcctgtggcaatgacaccttctcgctggcggtttacccgtcatcacagccggtgtttatggatttagccaaaaaaggtgtggtagcagatttgattggcgcaggcgcaatcatcagaaccgcgttctgcggcccatgctttggcgcgggcgatacgccaatcaacaacggattaagtattcgccacaccacgcgtaacttcccgaaccgcgaaggctctaagccagctaatgggcagatgtcagcggtggcgttgatggacgctcgttctatcgctgcgactgcggcaaacggtggctatttaacctctgccagcgaacttgattgctgggacaacgtgccggagtacgccttcgatgtaacgccgtataaaaaccgtgtttatcagggccttgtgaaaggggcaactcagcaaccgctgatttacggaccgaacattaaagactggccggaattgggtgcgctgactgacaatatcgtcctgaaagtgtgctcgaagatcctcgacgaagtgaccaccaccgacgaactgattccttccggtgaaacctcttcttatcgttcaaatcagattggtctggcggagtttaccctgtcacgccgcgatcccggttatgttggcagaagtaaagcgactgctgagctggaaaatcagcgtctggcggggaatgtcagcgagctgacagaggtgtttgcgcgcattaagcagattgctggtcaggagcatattgatccgctgcaaactgaaattggcagcatggtatatgcggtgaaaccaggcgatggttctgcgcgtgaacaggcggcgagctgccagcgtgtgattggcggtctggcgaatattgccgaagagtacgcgactaaacgctaccgttctaacgtcatcaactgggggatgttaccgctgcagatggcggaagtgccaacctttgaagtgggggattacatttacatccctggcattaaagcggcgctggataatccgggtacgacgtttaaaggttatgtgatccatgaagatgcgccggtaacggaaattacgctctatatggaaagtctgactgctgaagagcgcgagattatcaaggcgggtagtttgattaacttcaataaaaaccgtcagatgtaa

SEQ ID NO: 457946 - DNA, 315 bp, Shigella boydii
atgaatccgataagttcaaatgataatgatagtgtagacttgcgaaatataaaatgccctgaaggttcagagagagtaggcgattatcacactcacggtttttactctgacgataaaggaaataaagtaacaaaagaaaatgatgtttatgatagtctaaatttttcaagcaaagatttaacgaattcttatatgaatggaatgggaaaaaaagaatacagtagttacttgggaacaccaaataatacctatctaaaatataatcccaaagctaaagggaatggagttacaattatcagacaagggagtaattaa

SEQ ID NO: 457947 - DNA, 237 bp, Shigella boydii
atgaaggcaatacaatgttgttatttccttgctttagtctccagtaatttaatggctggagttatgggtaatgataatatatttttaagtaattcggattcagctgttttatattgtgtggctaaaatatttccagatggagaaaatattttaatatataaagtaaatataattaatgctagttcaaaaaaagatgttttttttatgaaagcccaacaccaacccacaatgacataa

SEQ ID NO: 457948 - DNA, 279 bp, Shigella boydii
atgtcatttgagaaaaaagagcagaatgaggtaaaaatctttggctgtgtattcagtctggtaatcatccaaggaaagctcatcagaagggtgatgactccaattagtagaacatatatttttgataaaagcaccgatgactttttcatgaagttctacagagcgcgagaaacagatggttctgcgggccagacgtttgattcgggttctcagggtcagattgttgcgctcaatgcgctgagtaaaaatcttaccagtcagatgcttttccttcggtaa

SEQ ID NO: 457949 - DNA, 273 bp, Shigella boydii
atggtcacagttaaccttcattgcccccgttgccagtccgttcaggtttaccgtcacgggcagaacccaaaaagacatgatcgattccgcggccgtgactgtcaccgggtatttcagctcagttactgttacgagccccgtaaaccgggagttaaagaccaaatcgctgaaatgactttcaacggtgccggggttcgcgatactgcccgtacgctgaaaatcggcattaatacagtcatccgaactttaaaaaactctcgccacgaagaataa

SEQ ID NO: 457950 - DNA, 609 bp, Shigella boydii
atgaaaaacaggctgctgatcctcagcctgctggtttctgtacctgcctttgcctggcagccacaaaccggcgacatcatctttcagatctctcgctcatcgcaaagtaaagcgatccaactggcgacccattccgattatagccacaccggtatgctggtgatacgcaacaaaaagccctacgtttttgaagcggtcggcccggtgaaatacaccccgctcaagcagtggatcgcccatggtgaaaagggcaaatacgttgttcgccgcgttgaaggcggactgagtgttgaacaacagcaaaaactggcgcaaacggtaaaacgttatctcggtaaaccgtatgatttcagcttctcatggagcgacgatcgccagtactgttcggaagtggtgtggaaggtttaccagaacgcgctgggaatgcgcgtgggcgagcagcagaagttgaaagagttcgatctcagcaacccgctggtccaggctaagctcaaagaacgctacggcaaaaatattccgcttgaggaaacggtagtttcaccacaagccgttttcgacgcgccacaactcaccacggttgccaaagagtggccgctgttttcgtggtaa

SEQ ID NO: 457951 - DNA, 318 bp, Shigella boydii; identical to SEQ ID NO: 261467

SEQ ID NO: 457952 - DNA, 1161 bp, Shigella boydii
atgacgcgtaaacaggccaccatcgcagtgcgtagcgggttaaatgacgacgaacagtatggttgcgttgtccctcccatccatctttccagcacctataactttaccggatttaatgaaccgcgcgcgcatgattactcgcgtcgcggcaacccaacgcgcgatgtggttcagcgtgcgctggcagaactggaaggcggtgctggcgcagtacttactaataccggcatgtccgcgattcacttggtcacgaccgtctttttgaaacctggcgatctgctggttgcgccgcacgactgctacggcggtagctatcgcctgttcgacagtctggtgaaacgcggttgctatcgcgtgttgtttgttgatcaaggcgatgaacaggcattacgggcagcgctggcagaaaaacccaaactggtactggtagaaagcccaagtaatccattgttacgcgtcgtggatattgcgaaaatctgccatctggcaagggaagtcggggcggtgagcgtggtggataacaccttcttaagcccggcattacaaaatccgctggcattgggtgccgatctggtgttgcattcatgtacgaaatatctgaacggtcactctgacgtggtggctggcgtggtgattgctaaagacccggacgttgtcactgaacttgcctggtggacaaacaatattggcgtgacgggcggcgcgtttgacagctatctgctgctacgcgggttgcgaacgctggtgccgcgtatggagctggcccagcgcaacgcgcaggcgattgtgaaatatctgcaaacccagccgttggtgaaaaaactgtatcacccgtcgctgccggaaaatcaggggcatgaaattgccgcgcgccagcaaaaaggctttggcgcaatgttgagttttgaactggatggagatgagcagacgctgcgtcgtttcctgggcgggctgtcgttgtttacgctggcggaatcattagggggagtggaaagtttaatctctcacgccgcaaccatgacacatgcaggcatggcaccagaagcgcgtgctgccgccgggatctccgagacgctgctgcgtatctccaccggtattgaagatggcgaagatttaattgccgacctggaaaatggcttccgggctgcaaacaaggggtaa

SEQ ID NO: 457953 - DNA, 2433 bp, Shigella boydii
atgagtgtgattgcgcaggcaggggcgaaaggtcgtcaactgcataaatttggtggcagtagtctggctgatgtgaagtgttatttgcgtgttgcgggcattatggcggagtactctcagcctgacgatatgatggtggtttccgccgccggtagcaccactaaccagttgattaactggttgaaactaagccagaccgatcgtctctctgcgcatcaggttcaacaaacgctgcgtcgctatcagtgcgatctgattagcggtctgctacccgctgaagaagctgatagcctcattagcgcttttgtcagcgaccttgagcgcctagcggcgctgctcgacagcggtattaacgacgcagtgtatgcggaagtggtgggccacggggaagtatggtcggcacgcctgatgtctgcggtacttaatcaacaagggctgccagcggcctggcttgatgcccgcgagtttttacgcgctgaacgcgccgcacaaccgcaggttgatgaagggctttcttacccgttgctgcaacagctgctggtgcaacatccgggcaaacgtctggtggtgaccggatttatcagccgcaacaacgccggtgaaacggtgctgctggggcgtaacggttccgactattccgcgacacaaatcggtgcgctggcgggtgtttctcgcgtaaccatctggagcgacgtcgccggggtatacagtgccgacccgcgtaaagtgaaagatgcctgcctgctgccgttgctgcgtctggatgaggccagcgaactggcgcgcctggcggctcccgttcttcacgcccgtactttacagccggtttctggcagcgaaatcgacctgcaactgcgctgtagctacacgccggatcaaggttccacgcgcattgaacgcgtgctggcctccggtactggtgcgcgtattgtcaccagccacgatgatgtctgtttgattgagtttcaggtgcccgccagtcaggatttcaaactggtgcataaagagatcgaccaaatcctgaaacgcgcgcaggtacgcccgctggcggttggcgtacataacgatcgccagttgctgcaattttgctacacctcagaagtggccgacagtgcgctgaaaatcctcgacgaagcgggattacctggcgaactgcgcctgcgtcaggggctggcgctggtggcgatggtcggtgcaggcgtcacccgtaacccgctgcattgccaccgcttctggcagcaactgaaaggccagccggtcgaatttacctggcagtccgatgacggcatcagcctggtggcagtactgcgcaccggcccgaccgaaagcctgattcaggggctgcatcagtccgtcttccgcgcagaaaaacgcatcggcctggtattgttcggtaagggcaatatcggttcccgttggctggaactgttcgcccgtgagcagagcacgctttcggcacgtaccggctttgagtttgtgctggcaggtgtggtggacagccgccgcagcctgttgagctatgacgggctggacgccagccgcgcgttagccttcttcaacgatgaagcggttgagcaggatgaagagtcgttgttcctgtggatgcgcgcccatccgtatgatgatttagtggtgctggacgttaccgccagccagcagcttgctgatcagtatcttgatttcgccagccacggtttccacgttatcagcgccaacaaactggcgggagccagcgacagcaataaatatcgccagatccacgacgccttcgaaaaaaccgggcgtcactggctgtacaatgccaccgtcggtgcgggcttgccgatcaaccacaccgtgcgcgatctgatcgacagcggcgatactattttgtcgatcagcgggatcttctccggcacgctctcctggctgttcctgcaattcgacggtagcgtgccgtttaccgagctggtggatcaggcgtggcagcagggcttaaccgagcctgatccgcgtgacgacctctccggcaaagacgtaatgcgcaagctggtaattctggcgcgtgaagcgggttacaacattgaaccggaccaggtacgtgtggaatcgctggtgcctgctcattgcgaaggcggcagcatcgaccatttctttgaaaatggcgatgaacttaacgagcagatggtgcaacggctggaagcggcccgcgaaatggggctggtgctgcgctacgtggtgcgtttcgatgccaacggcaaagcgcgtgtgggcgtggaggcggtgcgtgaagaccatccgctggcatcactgctgccgtgcgataacgtctttgccatcgaaagccgctggtatcgcgacaacccgctggtgatccgtgggcctggcgcggggcgcgacgtcaccgccggggcgattcagtcggatatcaaccggctggcacagttgttgtaa

SEQ ID NO: 457954 - DNA, 891 bp, Shigella boydii
atgagcttttttcacgccagccagcgggatgccctgaatcagagcctggcagaagtccaggggcagattaacgtttcgttcgagtttttcccgccgcgtaccagtgaaatggagcagaccctgtggaactccatcgatcgccttagcagcctgaaaccgaagtttgtatcggtgacctatggcgcgaactccggcgagcgcgaccgtacgcacagcattattaaaggcattaaagatcgcactggtctggaagcggcaccgcatcttacttgcattgatgcgacgcccgacgagttgcgcaccattgcacgcgactactggaataacggtattcgtcatatcgtggcgctgcgtggcgatctgccgccgggaagtggtaagccagaaatgtatgcttctgacctggtgacgctattaaaagaagtggcagatttcgatatctccgtggcggcgtatccggaagttcacccggaagcaaaaagcgctcaggcggatttgcttaatctgaaacgtaaagtcgatgccggagccaaccgcgcgattactcagttcttcttcgatgtcgaaagctacctgcgttttcgtgaccgctgtgtatcggcgggcattgatgtggaaattattccgggaattttgccggtatctaactttaaacaggcgaagaaatttgccgatatgaccaacgtgcgtattccggcgtggatggcgcaaatgttcgacggcctagatgatgatgccgaaacccgcaaactggtgggcgcgaatattgccatggatatggtgaagattttaagccgtgaaggagtgaaagatttccacttctatacgcttaaccgcgctgaaatgagttacgcgatttgccatacgctgggtgttcgacctggtttataa

SEQ ID NO: 457955 - DNA, 2181 bp, Shigella boydii
atgagcacgtcagacgatatccataacacgacagccactggcaaatgcccgttccatcagggcggtcacgaccagagcgcgggggcgggcacaaccactcgcgactggtggccaaatcaactccgtgttgacctgttaaaccaacattctaatcgttctaacccgctgggtgaggactttgactaccgcaaagaattcagcaaattagattactacggcctgaaaaaagatctgaaagccctgctgacagaatctcagccgtggtggccagccgactggggcagctacgccggtctgtttattcgtatggcctggcacggcgcaggtacttaccgttcaatcgatggacgcggcggcgcgggtcgtggtcagcaacgttttgcaccgctgaactcctggccggataacgtaagcctcgataaagcgcgtcgcctgttgtggccaatcaaacagaaatatggtcagaaaatctcctgggccgacctgtttatcctcgcaggtaacgtggcgctggaaaactccggcttccgtaccttcggttttggtgccggtcgtgaagacgtctgggaaccggatctggatgttaactggggtgatgaaaaagcctggctgactcaccgtcatccggaagcgctggcgaaagcaccgctgggtgcaaccgagatgggtctgatttacgttaacccggaaggcccggatcacagcggcgaaccgctttctgcggcagcagctatccgtgcgaccttcggcaacatgggcatgaacgacgaagaaaccgtggcgctgattgcgggtggtcatacgctgggtaaaactcacggtgccggtccgacatcaaatgtaggtcctgatccagaagctgcaccgattgaagaacaaggtttaggctgggcgagcacttacggcagcggcgttggcgcagatgccattacctctggtctggaagttgtctggacccagacgccgacccagtggagcaactatttcttcgagaacctgttcaaatatgagtgggtacagacccgcagtccggctggagcaatccagttcgacgcggtagacgcaccggaaattatcccggatccgttcgatccgtcgaagaaacgtaaaccgacaatgctggtgaccgacctgacgctgcgttttgatcctgagttcgagaagatctctcgtcgtttcctcaacgatccgcaggcgttcaacgaagcctttgcccgtgcctggttcaaactgacgcacagggatatggggccgaaatctcgctacatcgggccggaagtgccgaaagaagatctgatctggcaagatccgctgccgcagccgatctacaacccgaccgagcaggacattatcgatctgaaattcgcgattgcggattctggtctgtctgttagtgagctggtatcggtggcctgggcatctgcttctaccttccgtggtggcgacaaacgcggtggtgccaacggtgcgcgtctggcattaatgccgcagcgcgactgggatgtgaacgccgcagccgttcgtgctctgcctgttctggagaaaatccagaaagagtctggtaaagcctcgctggcggatatcatcgtgctggctggtgtggttggtgttgagaaagccgcaagcgccgcatgtttgagcattcatgtaccgtttgcgccgggtcgcgttgatgcgcgtcaggatcagactgacattgagatgtttgagctgctggagccaattgctgacggtttccgtaactatcgcgctcgtctggacgtttccaccaccgagtcactgctgatcgacaaagcacagcaactgacgctgaccgcgccggaaatgactgcgctggtgggcgggatgcgtgtactgggtgccaacttcgatagcagcaaaaacggcgtcttcactgaccgcgttggcgtattgagcaatgacttcttcgtgaacttgctggatatgcgttacgagtggaaagcgactgacgaatcgaaagagctgttcgaaggacgtgaccgcgaaaccggcgaagtgaaatacacagccagccgtgcggatctggtatttggttctaactctgtcctgcgtgcggtagcggaagtttacgccagcagcgatgcccacgagaagtttgttaaagacttcgtagcggcatgggtgaaagtgatgaacctcgaccgtttcgacctgctgtaa

SEQ ID NO: 457956 - DNA, 915 bp, Shigella boydii
atgtctgccgcaggaaagagcaacccactggcaatcagtggcctggttgtgctcacacttatctggagttatagctggattttcatgaagcaagtcaccagttacatcggtgccttcgactttaccgccttacgctgcattttcggcgctctcgttttattcatcgtccttttattacgtggtcgcggaatgcacccgacgccgtttaaatacaccttagccattgccctgttacaaacctgcgggatggttggtctggcgcagtgggcgttggtcagcggaggtgcggggaaggtggcgatcctgagctataccatgccgttctgggtggtgattttcgccgcgttgtttctcggtgaacgcctgcgacgtgggcaatatttcgcgattctgattgccgctttcggcttatttttggtgttgcagccgtggcaactcgatttctcttcgatgaaaagtgccatgctggcaatcctctccggtgttagttggggggcgagcgcgattgttgctaaacgcctatacacccgtcatccgcgcgtggatttattatcgttaacatcctggcagatgctctatgcggcgctggtgatgagtgtggtcgctttactggtgccgcaacgtgaaattgactggcagcccaccgtgttctgggcgctggcctacagtgcgattctggcgacggcgctggcgtggagcttatggttgtttgtattgaaaaacttgcctgccagtattgccagcttaagcacgctggccgttcccgtttgcggcgtactcttttcctggtggctgctcggtgagaatccgggggccgttgaaggtagcggtattgtgctgattgtgctgattgtgctggcactggcgctggtgagccgtaagaaaaaagaagctgtcagtgtaaaaagcatctga

SEQ ID NO: 457957 - DNA, 618 bp, Shigella boydii
atgaaagcttcactggcgctgctcagcctgctaacggcatttaccagccactccttaaaatctcccgccgttccaccaaccgtggtacaaatccaggccaataccaaccttgccatcgcagacggtgccagacagcaaatcggcaacacgctattttacgatccggcgtatgtgcggcttacctatcctggcggtgatgtcccgcaagaacgcggtgtatgttccgatgtggtgatccgtgcattgcgcagccagaaggtcgatttgcagaaactggttcacgaagatatggcgaagaattttgccgagtacccgcaaaaatggaagttaaagcgcccggacagcaacatcgatcaccgtcgggtgcctaatctggaaacctggtttagccgccacaacaaaacacgccccatcagtaaaaatgccggtgactatcaagcgggcgatattgtctcctggcgattagataacgggctggcgcatattggggtggtgtcagatggcttcgcccgcgacggtacgccactggtgatacataacattggcgcaggcgcgcaggaagaagatgtgctgtttagctggcggatggtggggcattatcgttattttgttaaataa

SEQ ID NO: 457958 - DNA, 1104 bp, Shigella boydii
atggaccgcattattcaatcaccgggtaaatacatccagggcgctgatgtgattaatcgtctgggcgaatacctgaagccgctggcagaacgctggttagtggtgggtgacaaatttgttttaggttttgctcaatccactgtcgagaaaagctttaaagatgctggactggtagtagaaattgcgccgtttggcggtgaatgttcgcaaaatgagatcgatcgtctgcgtggcatcgcggagactgcgcagtgtggcgcaattctcggtatcggtggcggaaaaaccctcgatactgccaaagcactggcacatttcatgggtgttccggtagcgatcgcaccgactatcgcctctaccgatgcaccgtgcagcgcattgtctgttatctacaccgatgagggtgagtttgaccgctatctactgttgccaaataacccgaatatggtcattgtcgacaccaaaatcgtcgctggcgctcctgcacgtctgttagcggcgggtatcggcgatgcgctggcaacctggtttgaagcacgcgcctgttcccgtagcggcgctaccactatggcgggcggcaagtgcacccaggcggcgctggcactggcagaactgtgctacaacactctgctggaagaaggcgaaaaagcgatgcttgccgccgaacagcatgtagtaacccctgcgctggaacgcgtgattgaagcgaacacctatttaagcggtgttggttttgaaagcggcggactggcggcggctcatgcggtgcataacggcctgaccgctatcccggacgcgcatcactattatcacggtgaaaaagtggcattcggtacgctgacgcagctggtactggaaaacgcgccggttgaggaaatcgaaaccgtagctgcacttagccatgcggtaggtttgccaataactctcgctcaactggatattaaagaagatgtcccggcgaaaatgcgaattgtggcagaagcggcatgtgcagaaggtgaaaccatccacaacatgcctggcggcgcgacgccagatcaggtatacgccactctgctggtagccgaccagtacggtcagcgtttcctgcaagagtgggaataa

SEQ ID NO: 457959 - DNA, 663 bp, Shigella boydii
atggaactgtatctggacaccgctaacgtcacagaagtcgaacgtctggcacgcatattccccattgccggggtgacaactaacccgagcattatcgctgccagcaaggagtccatctgggaaattctgccgcgtctgcaaaaagcgattggtgatgagggcattctgtttgctcagactatgagtcgtgacgcgcagggtatggtggaagaagcgaagcgcctgcgcgacgccattccgggcattgtggtgaaaatcccggtgacttccgaaggtctggccgccattaagatgctgaaaaaagagggtattactacgcttggcaccgcagtgtacagtgctgcacaagggttactggccgcgctggcaggggcaaaatacgttgctccgtatgttaaccgcgtagatgcccagggcggggacggcattcgtacggttcaggagctgcaagcgctgttagaaatgcacgcaccagaaagcatggtgctggcggccagctttaaaacgccgcgtcaggcgctggactgtttactggcaggatgtgaatccatcaccctgcccttagatgtagcgcaacaaatgctcaacacccctgcggtagagtcagctatagagaagttcgaacacgactggaatgccgcatttggcactactcatctctaa

SEQ ID NO: 457960 - DNA, 2502 bp, Shigella boydii
atggccctgattgtggaatttatttgtgagctacctaacggcgtacatgcgcgtccggcaagccacgttgaaacgctgtgtaatactttttcatcacaaattgagtggcataacctgcgcactgaccgcaagggcaacgccaaaagcgcccttgcgctgattggcaccgatacgctggcgggcgataactgccagttactgatttccggggccgacgaacaggaagcgcaccagcgtttaagccaatggctgcgcgatgaattcccccactgcgatgcgccgctggcggaagttaaatctgacgaactggaaccactgccggtttcactgaccaatctgaatccgcaaattatccgcgcccgcaccgtgtgcagcggtagtgcaggcggcattctgacgccgatctcttctttagatctcaatgcgctgagtaatcttcccgcagccaaagacgttgacgccgagcaatccgcactggaaaatggcctgacgctggtactgaaaaacattgagtttcgtctgctggatagcgacggtgctaccagcgcgatactggaagctcaccgatccctggctggcgatacatctttacgtcagcacttactggcaggcgtcagcgagggattaagctgtgccgaagcgattgtcgccagtgcgaatcacttttgcgaagagttcgcccgttccagcagcagctacctgcaagaacgtgccctggacgtacgcgacgtctgcttccagttactccagcaaatctacggtgagcaacgcttcccggcaccgggcaaactgacgcagcccgccatttgtatggctgatgaactgactcccagccagttcctcgaactggataaaaatcacctcaaaggtctgttactgaaaagtggcggcaccacctcacataccgtaattcttgcccgttcgttcaacattccgacactggttggtgtagatattgatgcccttactccgtggcagcatcaaacgatttatatcgacggcaacgccggggcgattgtggttgagccaggggaagccgtggcccgttattatcagcaagaagcccgcgtacaggacgcccttcgtgagcaacagcgtgtctggctgacccaacaagcccgtaccgctgacggtatccgcattgaaattgccgctaacatcgctcactccgtggaagcgcaggccgcattcggcaatggtgcggaaggcgttggtttgttccgcactgaaatgctctatatggatcgcaccagtgcaccgggcgaaagcgagctgtacaacattttttgtcaggcgctggagtctgccaacggacgcagcattattgtgcgcactatggacattggcggcgacaaacccgttgattatctgaacattccggcagaagctaacccgttcctcggttatcgcgctgtgcgtatttatgaagaatacgcctcgctgttcaccacacaactacagtcgatcctgcgcgcctccgctcacggcagcctgaaaatcatgatcccgatgatctcctcaatggaagagatcttatgggtgaaagaaaaactggcggaagccaaacagcaactgcgtaacgaacacattccgtttgatgagaagatccagcttggcattatgctggaagtaccgtcggtgatgttcatcatcgatcaatgctgcgaagagattgatttctttaatattggtagtaatgacctgacgcaatatctgctggcagtggatcgcgataacgctaaggttactcgtcactacaacagcctgaatccggcattcttgcgggcgctcgattacgccgtgcaggcggtgcatcgccagggcaaatggattggtctgtgcggtgagctgggagcgaaaggttccgtgctgccgttgctggtcggcttagggctggatgaactcagcatgagcgcaccatcaattccggcggcgaaagcgcggatggcgcaacttgatagccttgagtgccgcaagttgctcaaccaggcaatggcctgccgtacttcgctggaagtggaacacctgctggcgcaattccgcatgacccaacaggacgcaccgctggtcaccgccgagtgcatcacgctggaaagtgactggcgcagcaaagaagaagtgctcaaaggcatgaccgataacctgctgctggcgggccgctgccgctatccgcgtaaactggaagccgacttatgggcgcgcgaggccgttttctctaccggtctgggctttagttttgccattccacacagcaaatcagaacacattgagcaatccaccatcagcgtggcgcgtctgcaagcgccggtgcgctggggcgatgatgaagcgcaattcatcattatgttaaccctgaacaaacacgctgcgggcgatcagcacatgcgcattttctcgcgcctcgctcgccgcatcatgcacgaagaattccgtaacgcgctggttaacgccgcctctgccgacgctatcgccagcctgctgcaacatgaactggaactgtaa

SEQ ID NO: 457961 - DNA, 282 bp, Shigella boydii
atgaatgagttggtgcagatcctgaaaaatacccgtcagcatttaatgacgggcgtttcacacatgattcccttcgtggtatcgggcggtattttgctggcggtttccgtcatgttgtatggcaaaggcgcagtgccggatgccgtagccgatccgaatttgaaaaaactgtttgatatcggcgttgcaggtttgacgctgatagtgcctttcctcgccgcttacattggttactccattgcagagcgttctgcgctggctccgtgcgctatcggtgcctag

SEQ ID NO: 457962 - DNA, 735 bp, Shigella boydii
gtggtgcattacctgaagaaaattccggtgcataaagttctgcgctcggtgatgcctatcttcattattcctatcgtcggcacactgattaccgcaggcatcatgatgtggggcttgggcgagcctgtaggggcgttgaccaacagcctgactcagtggcttcaagggatgcagcagggcagcattgttatgctggcggtgatcatgggtctgatgctggcgttcgatatgggcggtccggttaacaaagtggcctatgccttcatgctgatttgcgttgctcagggtgtttataccgtggtggtcatcgctgccgtgggtatttgtatcccgccgctggggatggggctggcgacgctgattggtcgtaaaaatttctccgcagaagagcgcgaaaccggcaaagcggcactggtgatgggctgtgttggcgttactgaaggggcgattcctttcgccgctgccgatccgctgcgtgtcattccttccatcatggtcggttcagtttgtggtgcagtaactgcggcgctggtcggtgcgcagtgctatgcaggctggggtggtctgattgtgctgccggtggttgaaggcaagctgggttatatcgcagcagtggctgtcggagcagtggtgacggctgtttgtgtgaacgtgctgaaaagtctggcgcgtaaaaatgggtcttcgactgatgaaaaagaagacgacctggatttggattttgaaattaattaa

SEQ ID NO: 457963 - DNA, 321 bp, Shigella boydii
atgacgaaaattattgcagtaaccgcatgtccttcaggtgttgcccatacctatatggcagcagaggcgctggaaagtgccgcgaaagcgaaaggctgggaagtgaaagtagaaacccaggggtcaattggtctggaaaatgaactgactgcggaagatgtggcgagcgctgatatggtgattctgaccaaagatatcggcatcaagtttgaagagcgttttgctggcaagaccatcgtgcgcgtcaacatcagcgatgcagtaaaacgtgctgacgccattatgagcaaaattgaagctcacctggcgcaaaccgcttaa

SEQ ID NO: 457964 - DNA, 2298 bp, Shigella boydii
atgacgaatcgtatctctcgcctcaaaactgcactgtttgccaatacccgtgaaatctcgctggagcgggcgctgctttataccgccagccatcggcaaaccgaaggcgaaccggtgatattgcgccgggcgaaagcaacagcgtatatccttgaacatgttgaaatttcgattcgtgatgaagaactgattgccggtaaccgcaccgtaaaaccgcgcgccgggattatgtcgccggaaatggacccttactggctgctgaaagagctggatcaattcccgacgcgtccgcaggaccgctttgctatcagcgaagaagataaacgtatctatcgtgaagagttgttcccgtactgggaaaaacgttcgatgaaagatttcatcaacgggcagatgacggatgaagtaaaagccgcgaccagcacgcagattttcagcattaaccagacggataaaggccaggggcacattattattgattacccacgcctgttgaatcacgggctgggggagttggtggcacagatgcagcaacattgtcagcaacagccggagaatcacttttatcaggcagcgctgttactgctggaagcctcgcagaaacacattttgcgttacgccgtactggcggaaacgatggcggcaaactgcacagatgcccagcgtcgcgaagaactgctgactattgcggagatctctcgccataacgccgaacataagccgcagacgttctggcaggcgtgccagttattctggtacatgaacatcattctgcaatacgaatccaacgccagttcgctgtctttagggcgcttcgaccagtatatgttgccgttctatcaggcatctttaacccagggcgaagatccggcgttcctgaaagaactgctcgaatctttatgggtgaaatgcaacgacatcgtgctgttgcgctccaccagcagcgcgcgttatttcgcaggtttcccgaccggctataccgcactgctcggcgggttaaccgagaacggacgtagcgcggtgaacgtgctttcgttcctttgccttgacgcctatcaaagcgtgcaattaccgcaaccgaacctcggcgtgcgcactaacgccttgatcgacacgccattcctgatgaaaaccgccgaaaccattcgcctcggcaccggtattccgcaaatctttaacgatgaagtggtggtaccagcgttcctcaaccgtggcgtttcgctggaagatgcgcgcgactattccgtagtgggctgtgtggaattatctattcccggcagaacctacggcttgcatgacatcgcgatgtttaatctgctgaaagtgatggaaatctgcctgcatgaaaatgaaggcaatgctgcgctgacttatgaaggtttactggagcagatccgcgccaagatcagccactacatcaccctgatggttgagggcagcaatatttgtgatatcggccatcgcgactgggcacctgtaccgctgctctcgtcttttatcagcgattgtctggaaaaaggtcgcgatattaccgatggcggcgcgcgttataacttctccggcgtacaggggatcggtatcgccaacctgagcgattctctccatgcgttgaaagggatggtttttgagcaacagcgtttaagttttgacgaattgctgtcggtattaaaagccaactttgcaacgccagaaggcgaaaaagtccgcgctcgcttaattaaccgctttgagaaatatggtaacgatatcgacgaggtggataacattagcgccgaactgttgcgccactactgcaaagaagtggaaaaataccagaacccgcgcggtggttacttcacgccgggatcgtataccgtttctgctcacgtcccgttgggatcggtggttggcgcgacgccagacggtcgttttgccggagaacagctggcagacggcggcttgtcacctatgctgggccaggacgaacaagggccaacagcggtactgaagtcagtcagtaagctcgataatacgctgctgtctaacggtacgttgctgaacgtgaaattcactccggcgaccctggaaggtgaagcgggattacgcaaactggccgacttcttacgggcgtttacccagcttaagttgcagcatattcagtttaacgtggtgaacgccgacacgttgtgggaagcgcaacagcgcccacaagattatgccgggctggtggtgcgcgttgccggatacagcgccttctttgtcgaactgtcgaaggagatccaggatgacatcatccgccggacagcgcatcagctgtaa

SEQ ID NO: 457965 - DNA, 879 bp, Shigella boydii
atgacatcatccgccggacagcgcatcagctgtaacgttgtggaaacgcgccgcaatgatgtggcgcgcattttcaacattcagcgttattcactgaatgacggcgagggcattcgtacggtggtcttttttaaaggctgtccgcatctttgcccgtggtgtgctaatccggagtcgatctccggcaaaatccagacggtacgcagagaggcgaaatgtctgcactgtgcgaaatgtttgcgtgatgcggatgaatgcccctccggggcgtttgaacggattggtcgcgatatcagccttgacgctctggaacgggaagtgatgaaagatgacattttttttcgcacgtccggcggcggcgtcacgctttctggcggcgaagtgttaatgcaggcggagtttgctacccgttttttacagcgactgcggctgtggggtgtctcatgtgccattgaaactgccggagacgcaccagtcagcaagctgttaccgctggcgaaattgtgcgatgaagtgttgttcgatttaaaaattatggacgcgactcaggcgcgggatgtggtgaagatgaacctgccacgcgtactggagaacctgcgtttgctggtgagtgagggtgtcaacgtgatcccgcgtttgccgctgatccccggtttcacactcagccgggagaatatgcagcaggcgctggacgtgctgatcccgctgaatatcaggcagatccatctgttgccgtttcatcagtacggcgagccgaaataccgcctgctggggaaaacatggtcgatgaaggatgttgctgcgccgtcatcagccgatgtggcaacgatgcgcgaaatggcagaacgggccggatttcaggttaccgtgggaggttaa

SEQ ID NO: 457966 - DNA, 342 bp, Shigella boydii
atggcatacctggtggcagtaaccgcctgcgtaagcggcgtggcgcatacttatatggcggcggaacggctggaaaagttgtgccagttagagaagtggggcgtcagcattgaaactcagggcgcgctgggaacggagaatcgtttagcggacgaggatatccgtcgggcggatgttgctctgttgattacggatatcgagcttgccggtgccgagcgatttgaacattgccgctatgtgcaatgcagcatctacgcattcctgcgtgagccgcagcgggtaatgagcgcggtgcgcaaagtgctttctgcgccgcagcaaacccatcttattctggagtag

SEQ ID NO: 457967 - DNA, 558 bp, Shigella boydii
gtgcaatgggatggcaaacaatatcaaaatctggcgaagcaacacgtcgcccgacgcggcccacgtataggttcttttctgctacaaacgctcaatgaaatgcaaatgcagccgcaggagcagcaaacggcaaggcttatcgtagccagcctgcttagccactgccgcgatttgctcggcagccaaatccagaccgcctcacgcagccaggcactatttgaagctattcgcgattatatcgacgaacgctatgcctccgcgcttacccgcgaatctgtcgcacaggcattctatatttcaccaaactatctctcgcacctgtttcaaaaaacgggggccattggttttaacgaatacctgaatcacacgcgactggagcacgctaagacgttattgaaaggctatgacctgaaggtaaaagaagtggcgcacgcctgcggctttgtcgacagcaactacttctgccgtctgtttcgtaaaaacaccgaacgctcgccgtcggaatatcgccggcagtaccacagccaactgacagaaaaaccgactactccagaataa

SEQ ID NO: 457968 - DNA, 276 bp, Shigella boydii
atgtatcacgacatcagctatctgctctcccgcctgatcaacggcccgctgtccctgcgccagatttactttgccagcagtaacggcccggtgcccgatcttgcgtatcaggtcgattttccacggctggaaattgtgctggaaggtgagtttgttgataccggcgctggagcaacgttagttcccggcgatgtgctgtacgttgccgctggtggctggaatttcccacaatggaaaacacccgctaccacctttagcgtgctgtttggcaaatag

SEQ ID NO: 457969 - DNA, 1734 bp, Shigella boydii
atgcattccacagaagtccaggctaaacccctttttagctggaaagccctgggttgggcactgctctacttttggtttttctctactctgctacaggccattatttacatcagtggttatagtggcaccaacggcattcgcgactcgctgttattcagctcgctgtggttgatcccggtattcctctttccgaagcggattaaaattattgccgcagtaatcggcgtggtgctatgggcggcctctctggcggcgctatgctactacgtcatctacgggcaggagttctcgcagagcgttctgtttgtgatgttcgaaaccaacaccaacgaagccagcgagtatttaagccagtatttcagcctgaaaattgtgcttatcgcgctggcctatacggcggtggcagttctgctgtggacacgcctgcgcccggtctatattccaaagccgtggcgttatgttgtctcttttgccctgctttatggcttgattctgcatccgatcgccatgaatacgtttatcaaaaacaagccgtttgagaaaacgttggataacctggcctcgcgtatggagcctgccgcaccgtggcaattcctgaccggctattatcagtatcgtcagcaactaaactcgctaacaaagttactgaatgaaaataatgccttgccgccactggctaatttcaaagatgaatcgggtaacgaaccgcgcactttagtgctggtgattggcgagtcgacccagcgcggacgcatgagtctgtacggttatccgcgtgaaaccacgccggagctggatgcgctgcataaaaccgatccgaatctgaccgtgtttaataacgtagttacgtctcgtccgtacaccattgaaatcctgcaacaggcgctgacctttgccaatgaaaagaacccggatctgtatctgacgcagccgtcgctgatgaacatgatgaaacaggcgggttataaaaccttctggatcaccaaccagcagacgatgaccgcccgcaataccatgctgacggtattttcgcgccagaccgacaagcagtactacatgaaccagcaacgtacgcagagtgcgcgtgaatacgacaccaacgtgctgaagccgttccaggatgtgctgaatgaccctgcgccgaagaaactgatcatcgttcatctgctgggtacgcatatcaaatacaaataccgctacccggaaaatcagggcaagtttgatggcaataccgatcatgttccgccaggattaagcgcagaagagctggaatcatataacgattatgacaacgctaacttgtataacgatcatgtggttgccagcctgattaaagactttaaagcggcagacccgaacggattccttgtttacttctctgaccacggtgaagaggtttacgacacgccgccgcacaaaactcaggggcgtaacgaagacaacccgacgcgccacatgtacaccattccgttcctgctgtggacgtcggaaaaatggcaagcgactcatccccgtgatttctcacaggatgtcgatcgtaaatacagcctggcggaactgatccacacctggtcagatttggcgggcttatcttacgacggttacgatccaacccgttcagtggtgaatccgcagttcaaagaaactacccgctggattggtaacccgtacaagaaaaacgcgctgatcgattacgacactctgccgtatggcgaccaggtaggtaatcagtaa

SEQ ID NO: 457970 - DNA, 2652 bp, Shigella boydii
atgaacgaacaatattccgcattgcgtagtaatgtcagtatgctcggcaaagtgctgggagaaaccatcaaggatgcgttgggagaacacattcttgaacgcgtagaaactatccgtaagttgtccaaatcttcacgcgctggcaatgatgctaaccgccaggagttactcaccaccttacaaaatttgtcgaacgacgagctgctgcccgttgcgcgtgcgtttagtcagttcctgaacctggccaacaccgccgagcaataccacagcatttcgccgaaaggcgaagctgccagcaacccggaagtgatcgcccgcaccctgcgtaaactgaaaaaccagccggaactgagcgaagacaccatcaaaaaagcagtggaatcgctgtcgctggaactggtcctcacggctcaccctaccgaaattacccgtcgtacactgatccacaaaatggtggaagtgaacgcctgcttaaaacagctcgataacaaagatatcgctgactacgaacacaaccagctgatgcgtcgcctgcgccagttaatcgcccagtcatggcataccgatgaaatccgtaagctgcgtccaagcccggtagatgaagccaaatggggctttgccgtagtggaaaacagcctgtggcaaggcgtaccaaattacctgcgcgaactgaacgaacaactggaagagaacctcggctacaaactgcccgtcgaatttgttccggtccgttttacttcgtggatgggcggcgaccgcgacggcaacccgaacgtcactgccgatatcacccgccacgtcctgctactcagccgctggaaagccaccgatttgttcctgaaagatattcaggtgctggtttctgaactgtcgatggttgaagcgacccctgaactgctggcgctggttggcgaagaaggtgccgcagaaccgtatcgctatctgatgaaaaacctgcgttctcgcctgatggcgacacaggcatggctggaagcgcgcctgaaaggcgaagaactgccaaaaccagaaggcctgctgacacaaaacgaagaactgtgggaaccgctctacgcttgctaccagtcacttcaggcgtgtggcatgggtattatcgccaacggcgatctgctcgacaccctgcgccgcgtgaaatgtttcggcgtaccgctggtccgtattgatatccgtcaggagagcacccgccataccgaagcgctgggcgagctgacccgctacctcggtatcggcgactacgaaagctggtcagaggccgacaaacaggcgttcctgatccgcgaactgaactccaaacgtccgcttctgccgcgcaactggcaaccaagcgccgaaacgcgcgaagtgctcgatacctgccaggtgattgccgaagcgccgcaaggctccattgccgcctacgtgatctcgatggcgaaaacgccgtccgacgtactggctgtccacctgctgctgaaagaagcgggtatcgggtttgcgatgccggttgctccgctgtttgaaaccctcgatgacctgaacaacgccaacgatgtcatgacccagctgctcaatatcgactggtatcgcggcctgattcagggcaaacagatggtgatgattggctattccgactcagcaaaagatgcgggcgtgatggcagcgtcctgggcgcaatatcaggcacaggatgcattaatcaaaacctgcgaaaaagcgggtattgagctgacgttgttccacggtcgcggcggttccattggtcgcggcggcgcacctgcccatgcggcactgctgtcacaaccgccaggaagcctgaaaggcggcctgcgcgtaaccgaacagggcgagatgatccgctttaaatatggtctgccagaaatcaccgtcagcagcctgtcgctttataccggggcgattctggaagccaacctgctgccaccgccggagccgaaagagagctggcgtcgcattatggatgaactgtcagtcatctcctgcgatgtctaccgcggctacgtacgtgaaaacaaagattttgtgccttacttccgctccgctacgccggaacaagaactgggcaaactgccgttgggttcacgtccggcgaaacgtcgcccaaccggcggcgtcgagtcactacgcgccattccgtggatcttcgcctggacgcaaaaccgtctgatgctccccgcctggctgggtgcaggtacggcgctgcaaaaagtggtcgaagacggcaaacagagcgagctggaggctatgtgccgcgattggccattcttctcgacgcgtctcggcatgctggagatggtcttcgccaaagcagacctgtggctggcggaatactatgatcaacgcctggtagacaaagcactgtggccgttaggtaaagagttacgcaatctgcaagaagaagacatcaaagtggtgctggcgattgccaacgattcccatctgatggccgatctgccgtggattgcagagtctattcagctacggaatatttacaccgacccgctgaacgtattgcaggccgagttgctgcaccgctcccgccaggcagaaaaagaaggccaggaaccggatcctcgcgtcgaacaagcgttaatggtcactattgccgggattgcggcaggtatgcgtaataccggctaa

SEQ ID NO: 457971 - DNA, 1152 bp, Shigella boydii
atgaaaaacaaattaccgccatttatcgagatttaccgcgctctgattgccacaccttcaataagcgctacggaagaggcactcgatcaaagcaatgcagatttaatcactctgctggcggactggtttaaagatttgggcttcaatgtggaagtgcagcctgttccaggaactcgcaacaaattcaatatgctggcaagtatcggacagggggctggcggcttgttgctggcggggcataccgatacggtgccatttgatgacggtcgctggacgcgcgatccgtttacactgacggagcatgacggcaagctttacggcttaggcaccgccgacatgaaaggcttttttgcgtttatccttgatgcgctacgcgatgtcgacgtcacgaaactgaaaaaaccgctctacattctggcgactgctgatgaagaaaccagtatggccggagcgcgttattttgccgaaactaccgccctgcgcccggattgcgccatcattggcgaaccgacgtcactacaaccggtacgcgcacataaaggtcatatctctaacgccatccgtattcagggccagtcggggcactccagcgatccagcacgcggagttaacgctatcgaactaatgcacgacgccatcgggcatattttgcaattgcgcgataacctgaaagaacgttatcactacgaagcatttaccgtgccataccctacgctcaacctcgggcatattcacggtggcgacgcttctaaccgtatttgcgcttgctgtgagttgcatatggatattcgtccgctgcctggcatgacattcaatgaacttaatggtttgctcaacgatgcattggctccggtgagcgaacgctggccgggtcgtctgacggtcgacgagctgcatccgccgatccctggctatgaatgccctccgaatcatcaactggttgaagtggttgagaaattgcttggagcaaaaaccgaagtggtgaattactgtaccgaagcgccgtttattcaaacgttatgcccgacgctggtgctcggtccgggttccatcaatcaagctcatcagcctgatgaatatctggagacgcggtttattaaacccacccgtgagttgattatccaggtaattcaccatttttgctggcattaa

SEQ ID NO: 457972 - DNA, 1005 bp, Shigella boydii
atgttgaatacgctgattgtgggtgccagcggctacgctggcgcagagctagtgacctatgtaaatcgccatccgcatatgaacataaccgctttgactgtttcagcgcaaagcaatgatgcgggaaagttaatctccgatttgcatccgcagctaaaaggcatcgttgagctgccgttgcagccgatgtcggatatcagcgagtttagcccaggggtggacgtagtgtttctcgccaccgcccatgaagttagccacgatttagcgccgcagtttcttgaagcgggctgcgtggtgttcgacctttccggcgcgtttcgtgttaacgacgccaccttctatgaaaaatattacggctttacccatcaatacccggaacagctggaacaggcagcctacggtctggcggagtggtgcggtaataaattaaaagaagcgaatttgattgcggtgccaggctgttatccgacggcggcacagctggcgctgaaaccgttgattgatgccgatcttcttgacctcaatcagtggccggcgatcaacgccaccagcggcgtgagcggtgcaggacgtaaggcagcgatttcaaatagtttttgtgaagttagcctgcaaccgtatggcgtctttactcatcgccatcaaccagagatcgccacacacctcggtgctgacgttatcttcaccccacatctgggcaatttcccgcgcggcattctcgaaaccattacctgccgcctgaaatcgggtgtgacccaggcgcaagtcgcgcaagtgttacagcaggcgtatgcccataaaccgctggtgcggctgtatgacaaaggcgttccggcgctgaaaaatgtcgttgggctgccattttgcgatatcgggtttgccgttcagggcgagcatctgattattgtggcgaccgaagacaacttactgaaaggcgcggcggcacaagcggtacagtgcgccaatattcgtttcggctatgcggaaacgcagtctcttatttaa

SEQ ID NO: 457973 - DNA, 777 bp, Shigella boydii
atgatgaatccattaattatcaaactgggcggcgtactgctggatagtgaagaggcgctggaacgtctgtttagcgcactggtgaattatcgtgagtcacatcagcgtccgctggtgattgtgcacggcggcggttgcgtggtggatgagctgatgaaagggctgaatctgccggtgaaaaagaaaaacggcctgcgggtgacgcctgctgatcagatagacattatcaccggagcactggcgggaacggcaaataaaaccctgttggcatgggcgaagaaacatcagattgcggccgtaggtttgtttctcggtgatggcgacagcgtcaaagtgacccagcttgatgaagagttaggtcatgttggactggcgcagccaggttcgcctaagcttatcaactccttgctggagaacggttatctgccggtggtcagctccattggcgtaacagacgaagggcaactgatgaacgtcaatgccgaccaggcggcaacggcgctggcggcaacgctgggcgcggatctgattttgctctccgacgtcagcggcattctcgacggcaaagggcaacgcattgccgaaatgaccgccgcgaaagcagaacaactgattgagcagggcattattactgacggcatgatagtgaaagtgaacgcggcgctggatgcggcccgcacgctgggccgtccggtagatatcgcctcctggcgtcatgcggagcagcttccggcactgtttaacggtatgccgatgggtacgcggattttagcttaa

SEQ ID NO: 457974 - DNA, 1374 bp, Shigella boydii
atggcactttggggcgggcgttttacccaggcagcagatcaacggttcaaacaattcaacgactcactgcgctttgattaccgtctggcggagcaggatattgttggctctgtggcctggtccaaagccctagtaacggtcggcgtgttaaccgcagaagagcaggcgcaactggaagaggcgctgaacgtgttgctggaagatgttcgcgccaggccacaacaaatccttgaaagcgacgccgaagatatccatagctgggtggaaggcaaactgatcgacaaagtgggccagttaggcaaaaagctgcataccgggcgtagccgtaatgatcaggtagcgactgacctgaaactgtggtgcaaagataccgttagcgagttactgacggctaaccggcagctgcaatcggcgctggtggaaaccgcacaaaacaatcaggacgcggtaatgccaggttacactcacctgcaacgcgcccagccggtgacgttcgcgcactggtgcctggcctatgttgagatgctggcgcgtgatgaaagccgtttgcaggatgcgcttaagcgtctggatgtcagcccattaggctgtggcgcgctggcgggaacggcctatgaaatcgaccgtgaacagttagcaggctggctgggctttgcttcggcgacccgtaacagtctggacagcgtttctgaccgtgaccatgtgttggaactgctgtcggctgccgctatcggcatggtgcatctgtcgcgttttgctgaagatctgattttctttaacaccggcgaagcggggtttgtggagctttctgaccgcgtgacttccggttcatcattaatgccgcagaagaaaaacccggatgcgctggagctgattcgcggtaaatgcggtcgggtgcagggtgcgttaaccggcatgatgatgacgctgaaaggtttgccgctggcttacaacaaagatatgcaggaagacaaagaaggtctgttcgacgcgctcgatacctggctggactgcctgcatatggcggcgctggtgctggacggcattcaggtgaaacgtccacgttgccaggaagcggctcagcagggttacgccaacgccaccgaactggcggattacctggtggcgaaaggcgtacctttccgcgaggcgcaccatatcgtgggtgaagcggtggtggaagccattcgtcagggcaaaccgctggaagatctgccgctcgacgagttgcagaaattcagccacgtgattggcgaagatgtctatccgattctgtcgctacaatcgtgcctcgacaagcgtgcggcaaaaggcggtgtctcaccgcagcaggtggcccaagcgattgcttttgcgcaggcgcggttggggtaa

SEQ ID NO: 457975 - DNA, 918 bp, Shigella boydii
atgaatattcgtgatcttgagtacctggtggcattggctgaacaccgccattttcggcgtgcggcagattcctgccacgttagccagccgacgcttagcggccaaattcgtaagctggaagatgagctgggcgtgatgttgctggagcggaccagccgtaaagtgttgttcacccaggcgggaatgctgctggtggatcaggcgcgtaccgtgctgcgtgaggtgaaagtccttaaagagatggcaagccagcagggcgagacgatgtccggaccgctgcatattggtttgattcctacggttggaccgtacctgctgccgcatattatcccgatgctgcaccagacatttccaaagctggaaatgtatctgcatgaagcacagacccaccagttactggcgcaactggacagcggcaaactcgattgcgtgatcctcgcgctggtgaaagagagcgaagcattcattgaagtgccgttgtttgatgagccaatgttgctggctatctatgaagatcacccgtgggcgaaccgcgaatgcgtaccgatggccgatctggcaggggaaaaactgctgatgctggaagatggtcactgtttgcgcgatcaggcaatgggtttctgctttgaagccggggcggatgaagatacacacttccgcgcgaccagcctggagacactgcgtaacatggtggcggcaggtagcgggatcactttactgcctgcgctggctgtgccgccggagcgcaaacgcgatggggttgtttatttgccgtgtattaagccggaacctcgccgcacgattggcctggtttatcgtcctggctcaccgctgcgcagccgctatgagcagctggcagaggccatccgcgcaagaatggatggccatttcgataaagtgttaaaacaggcggtttaa

SEQ ID NO: 457976 - DNA, 1401 bp, Shigella boydii
atgccacattcctacgattacgatgccatagtaataggttccggccccggcggcgaaggcgctgcaatgggcctggttaagcaaggtgcgcgcgtcgcagttatcgagcgttatcaaaatgttggcggcggttgcacccactggggcaccatcccgtcgaaagctctccgtcacgccgtcagccgcattatagaattcaatcaaaacccactatacagcgaccattcccgactgctccgctcttcttttgccgatatccttaaccatgccgataacgtgattaatcaacaaacgcgcatgcgtcagggattttacgaacgtaatcactgtgaaatattgcaggggaacgctcgctttgttgacgagcatacgttggtgctggattgcccggacggcagcgtcgaaacactaaccgctgaaaaatttgttattgcctgcggctctcgtccatatcatccaacagatgttgatttcacccatccacgcatttacgacagcgactcaattcttagcatgcaccacgaaccgcgccatgtacttatctatggtgctggagtgatcggctgtgaatatgcgtcgatcttccgcggtatggatgtaaaagtggatctgatcaacacccgcgatcgcctgctggcatttctcgatcaagagatgtcagattctctctcctatcacttctggaacagtggcgtagtgattcgtcacaacgaagagtacgagaagatcgaaggctgtgacgatggtgtgatcatgcatttgaagtcgggtaaaaaactgaaagctgactgcctgctctatgccaacggtcgcaccggtaataccgattcgctggcgttacagaacattgggctggaaactgacagccgcggacagctgaaggtcaacagcatgtatcagaccgcacagccgcacgtttacgcggtgggcgacgtgattggttatccgagcctggcatcagcggcctatgaccaggggcgcattgccgcgcaggcgctggtaaaaggcgaagccaccgcacatctgattgaagatatccctaccggcatttacaccatcccggaaatcagctctgtgggcaaaaccgaacagcagctgaccgcaatgaaagtgccatatgaagtgggccgcgcccagtttaaacatctggcacgcgcacaaatcgtcggcatgaacgtgggcacgctgaaaattttgttccatcgggaaacaaaagagattctgggtattcactgctttggcgagcgcgctgccgaaattattcatatcggtcaggcgattatggaacagaaaggtggcggcaacactattgagtacttcgtcaacaccacctttaactacccgacgatggcagaagcctatcgggtagctgcgctaaatggcttaaaccgcctgttttaa

SEQ ID NO: 457977 - DNA, 705 bp, Shigella boydii
atgttcattctctggtatagtgccagcagtacttttggcaaggattcagacatcgtgatgggcataagagcgcaacaaaaagaaaaaacccgccgttcgctggtggaagccgcatttagccaattaagtgctgaacgcagcttcgccagcctgagtttgcgtgaagtggcgcgtgaagcgggcattgctcccacctctttttatcggcatttccgcgacgtagacgaactgggtctgaccatggttgatgagagcggtttaatgctacgccaactcatgcgccaggcgcgtcagcgtatcgccaaaggcgggagtgtgatccgcacctcggtctccacatttatggagttcatcggtaataatcctaacgccttccggttattattgcgggaacgctccggcacctccgctgcgtttcgtgccgccgttgcgcgtgaaattcagcacttcattgcggaacttgcagactatctggaactcgaaaaccatatgccgcgtgcgtttactgaagcgcaagccgaagcaatggtgacaattgtcttcagtgcgggtgccgaggcgttggacgtcggcgtcgaacaacgtcggcaattagaagagcgactggtactgcaactgcgaatgatttcgaaaggggcttattactggtatcgccgtgaacaagagaaaaccgcaattattccgggaaatgtgaaggacgagtaa

SEQ ID NO: 457978 - DNA, 360 bp, Shigella boydii
atgaaacaagcaaatcaagatagaggtacgctgctgctggcgttagttgctggcttatcgattaatggtactttcgcagcgctgtttagctccattgtgccattttctgtattcccgattatttccctggtgctgacggtttactgcctgcatcaacgttatcttaatcgcactatgccggtaggcttgccgggtctggcagctgcctgttttattctcggcgtactgctgtacagcacggtagttcgtgcggaatatccggatatcggctctaacttcttcccggcagtactctccgtcattatggtgttctggattggcgcgaagatgcgtaaccgtaagcaggaagttgctgagtaa

SEQ ID NO: 457979 - DNA, 1101 bp, Shigella boydii
atgacccccgaacaccttccaacagaacagtatgaagcgcagttagccgaaaaagtggtacgtttgcaaagtatgatggcaccgttttctgacctggttccggaagtgtttcgctcgccggtcagtcattaccggatgcgtgcggagttccgcatctggcacgatggcgatgacctgtatcacatcattttcgatcaacaaaccaaaagccgtatccgcgtggatagcttccccgccgccagtgaacttatcaaccagttgatgacggcgatgattgcgggtgtgcgtaataatcccgttctgcgccacaagttgttccagattgattacctcaccacgctgagtaatcaggcggtggtttccctgctataccataagaagctggatgatgagtggcgtcaggaagcggaggccctgcgcgatgcactgcgcgcgcagaatctgaatgtgcatctgattggtcgggcaacgaaaaccaaaatcgagctggatcaagattacatcgacgagcgtctgccggtcgcagggaaagagatgatctaccgtcaggtagaaaacagctttacccagccgaacgcggcgatgaatattcagatgctggaatgggcgctggacgtaaccaaaggctcaaaaggcgatttactggagctgtactgcggcaacggtaacttttcattagcgctggcgcgcaattttgatcgggtattagccaccgaaatcgctaagccgtcggttgctgctgcgcaatacaacatcgcagctaaccatattgataacgtacaaattattcgtatggcggcagaagaatttactcaggcgatgaatggtgtgcgcgagtttaaccgcctgcaagggatcgacttaaagagttatcagtgcgaaaccatttttgtcgacccaccgcgcagcggtctggacagtgaaaccgagaaaatggtgcaggcgtatccgtgtattttgtacatctcctgtaacccggaaacgttatgcaagaatctggaaacattaagccagacgcacaaggtcgaacgtctggctctgtttgatcagttcccctacacgcaccatatggagtgcggcgtattactgaccgcgaagtaa

SEQ ID NO: 457980 - DNA, 387 bp, Shigella boydii
atgattaaaaaagcttcgctgctgacggcgtgttctgtcacagccttttccgcttgggcacaggataccagcccggatactctcgtcgttactgctaaccgttttgaacagccgcgcagcactgtgcttgcaccaaccaccgttgtgacccgtcaggatatcgaccgctggcagtcgacctcggtcaatgatgtgctgcgccgtcttccgggcgtcgatatcacccaaaacggcggttcaggtcagctctcatctatttttattcgcggtacaaatgccagtcatgtgttggtgttaattgatggcgtacgcctgaatctggcgggggtgagtggttctgccgaccttagccagttccctattgcgtgcgcttgtccagcgtgttga

SEQ ID NO: 457981 - DNA, 1518 bp, Shigella boydii
gtggttctgccgaccttagccagttccctattgcgtgcgcttgtccagcgtgttgaatatatccgtgggccgcgctccgctgtttatggttccgatgcaataggcggggtggtgaatatcatcacgacgcgcgatgaacccggaacggaaatttcagcagggtggggaagcaatagttatcagaactatgatgtctctacgcagcaacaactgggggataagacacgggtaacgctgttgggcgattatgcccatactcatggttatgatgttgttgcctatggtaataccggaacgcaagcgcagacagataacgatggttttttaagtaaaacgctttatggcgcgctggagcataactttactgatgcctggagcggctttgtgcgcggctatggctatgataaccgtaccaattatgacgcgtattattctcccggttcaccgttgctcgatacccgtaaactctatagccaaagttgggacgccgggctgcgctataacggcgaactgattaaatcacaactcattaccagctatagccatagcaaagattacaactacgatccccattatggtcgttatgattcgtcggcgacgctcgatgagatgaagcaatacaccgtccagtgggcaaacaatgtcatcgttggtcacggtagtattggtgcgggtgtcgactggcagaaacagactacgacgccgggtacaggttatgttgaggatggatatgatcaacgtaataccggcatctatctgaccgggctgcaacaagtcggcgattttacctttgaaggcgcagcacgcagtgacgataactcacagtttggtcgtcatggaacctggcaaaccagcgccggttgggaattcatcgaaggttatcgcttcattgcttcctacgggacatcttataaggcaccaaatttggggcaactgtatggcttctacggaaatccgaatctggacccggagaaaagcaaacagtgggaaggcgcgtttgaaggcttaaccgctggggtgaactggcgtatttccggatatcgtaacgatgtcagtgacttgatcgattatgatgatcacaccctgaaatattacaacgaagggaaagcgcggattaagggcgtcgaggcgaccgccaattttgataccggaccactgacgcatactgtgagttatgattatgtcgatgcgcgcaatgcgattaccgacacgccgttgttacgccgtgctaaacagcaggtgaaataccagctcgactggcagttgtatgacttcgactggggtattacttatcagtatttaggcactcgctatgataaggattactcatcttatccttatcaaaccgttaaaatgggcggtgtgagcttgtgggatcttgcggttgcgtatccggtcacctctcacctgacagttcgtggtaaaatagccaacctgttcgacaaagattatgagacagtctatggctaccaaactgcaggacgggaatacaccttgtctggcagctacaccttctga

SEQ ID NO: 457982 - DNA, 858 bp, Shigella boydii
atggctaccaaactgcaggacgggaatacaccttgtctggcagctacaccttctgaaccacgtcccaccgtgctggtgtttgactccggcgtcggtgggttgtcggtctatgacgagatccggcatctcttaccggatctccattacatttatgctttcgataacgtcgctttcccgtatggcgaaaaaagcgaagcgtttattgttgagcgagtggtggcaattgtcaccgcggtgcaagaacgttatccccttgcgctggctgtggtcgcttgcaacactgccagtaccgtttcacttcctgcattacgcgaaaagttcgactttccggttgttggtgtcgtgccggcgattaaacctgctgcacgtctgacggcaaatagcattgtcggattactggcaacccgcggaacagttaaacgttcttatactcatgagctgatcgcgcgtttcgctaatgaatgccagatagaaatgctgggctcggcagagatggttgagttggctgaagcgaagctacatggcgaagatgtttctctggatgcactaaaacgtatcctacgcccgtggttaagaatgaaagagccgccagataccgttgtattgggttgcacccatttccctctactacaagaagaactgttacaagtgctgccagagggaacccggctagtggattctggcgcagcgattgctcgccgaacggcctggttgttagaacatgaagccccggatgcaaaatctgccgatgcgaatattgccttttgtatggcaatgacgccagaagctgaacaattattgcccgttttacagcgttacggcttcgaaacgctcgaaaaactggcagttttaggctga

SEQ ID NO: 457983 - DNA, 885 bp, Shigella boydii
atgaaaaaaacattactggcagccggtgcggtactggcgctctcttcgtcttttactgtcaacgcagctgaaaacgacaaaccgcagtatctttccgactggtggcaccagagcgttaacgttgtcggaagctatcacacccgtttcggaccgcagatccgcaacgatacctaccttgagtacgaagcattcgctaaaaaagactggttcgacttctatggttatgcggatgcgccggtattcttcggcggtaactccgatgctaaaggtatctggaaccacggttctccgctgtttatggaaatcgaaccacgtttctccatcgacaagctgaccaatactgaccttaacttcggtccgttcaaagagtggtacttcgcgaacaactacatttacgacatgggtcgtaataaaaatggtcgccagagcacctggtacatgggtctgggtaccgacatcgatactggtctgccgatgagcctgtccatgaacgtctatgcgaaataccagtggcagaactatggcgcagcgaacgaaaacgagtgggacggttaccgtttcaaaattaaatactttgtgccgattaccgatctgtggggcggtcagctgagctacatcggcttcaccaacttcgactggggttccgatttaggggatgacagcggtaacgcaatcaacggtattaagacccgtactaataactctatcgcttccagccatattctggctctgaactacgatcactggcactactctgtcgtagctcgttactggcacgacggtggtcagtggaacgacgatgcagaactgaacttcggcaacggcaacttcaacgttcgctctaccggctggggtggttacctggtagtaggttacaacttctga

SEQ ID NO: 457984 - DNA, 540 bp, Shigella boydii
atgaatactaacgtttttcgactgctcctgctgggaagcctgttcagccttagcgcctgtgtgcagcaaagtgaagtgcgacagatgaaacacagcgtcagcacgctgaaccaggagatgacgcaactcaatcaagaaacagtcaaaatcactcagcaaaacaggctgaatgcaaaatccagcagtgggggttaccttctgcctggagcgaaaacaccggcaagactggaaagccagatcggtactttacgtatgtcgctggtgaatattacgcctgatacagatggcaccccccttacactacgtattcagggtgagtcgaatgatcccttgcccgcattcagcggaactgttgaatatgggcaaattcagggaacaatagacaactttcaggaaatcaatgtgcagaatcaattgattaatgcccctgccagcgtcctcgcccccagcgatgttgatattccgttacaattaaaggggatttctgtggatcagttaggctttgtacgtatccacgacattcaacctgttatgcagtaa

SEQ ID NO: 457985 - DNA, 450 bp, Shigella boydii
atgcattgcccattctgtttcgccgtggacactaaggtaattgactctcgtctcgtgggcgggggttcatccgtacgccgccgtcggcagtgtctggtgtgtaatgaacgtttcaccacctttgaagtggcggagctggttatgccgcgtgttgtaaaaagcaacgacgtgcgtgaaccgtttaatgaagagaaattgcgtagcggaatgctgcgggcgctggaaaaacgtccggtgagttccgatgacgttgaaatggcaatcaatcatattaaatcgcagctgcgcgccaccggtgagcgcgaagtaccgagcaagatgattggcaatctggtgatggagcaattgaaaaagctcgataaagtcgcctatatccgttttgcctctgtctaccgcagtttcgaagatatcaaagaatttggcgaagagatcgcgcgcctggaggactaa

SEQ ID NO: 457986 - DNA, 1104 bp, Shigella boydii
gtgcaggacgagtattacatggcgcgggcgctaaagctggcgcaacgaggacgttttaccacccaccccaacccaaatgtcgggtgcgtcattgtcaaagatggcgaaattgtcggtgaaggttaccatcaacgagcgggtgaaccacatgccgaagtacacgcgttgcgtatggcgggtgaaaaagccaaaggtgcaacggcgtatgtgacactcgaaccttgcagccatcacggccgtacgccgccttgctgtgatgctttaattgccgcaggtgtggcgcgcgtggttgcctcgatgcaagatcctaacccgcaggtcgctgggcgtggactttaccgtctgcaacaggctggcattgacgtcagccacggcctgatgatgagtgaagccgagcaattgaataaaggctttctcaagcggatgcgcaccggctttccttatattcagttaaaacttggcgcatcgcttgatggtcgcacggcgatggcgagcggcgaaagccagtggatcacttcgccccaggcgcggcgtgatgtacaacgactgcgcgcgcaaagtcatgccattttaaccagcagcgccacggtgctggcggatgatcctgccttaacggtgcgttggtccgaactggatgaacaaactcaggcgctctacccgcaacaaaatctccgccagccggtacgtattgtgattgatagccaaaatcgcgtgacgccggaacatcacattgtgcagcagcccggcgaaacctggttcgcgcgtacgcaggaagattctcgtgagtggccggaaacggtgcgtaccttgctgattccagagcataaaggtcatctggatctggttgtactgatgatgcaactgggtaaacagcagattaacagcatctgggtggaagcggggccaacgctcgctggcgcattgctgcaggcgggtttagtcgatgagctgattgtctatatcgcacctaaactattaggcagcgacgcccgtggattatgcaccctgccagggcttgagaaattagccgacgccccccaatttaaattcaaagagatacgtcatgtaggcccggatgtttgcctgcatttagtgggtgcatga

SEQ ID NO: 457987 - DNA, 471 bp, Shigella boydii
atgaacattattgaagctaacgttgctaccccggacgctcgcgtcgccatcaccatcgcgcgtttcaacaactttatcaatgacagcctgctggaaggtgcaattgacgcactgaaacgtatcggtcaggtaaaagatgaaaacattaccgttgtttgggtgcctggtgcctatgagctgccgctggcggcgggtgcactggctaaaaccggtaaatacgacgcggtgattgcgctgggtacggttattcgtggtggcactgcccattttgaatatgtcgctggtggtgcaagcaacggcctggcgcatgttgcccaggacagcgaaattccggttgcttttggggttctgaccactgaaagcattgaacaagcgatcgaacgtgctggcaccaaagctggcaacaaaggtgcagaagctgcactgaccgcgcttgaaatgattaatgtattgaaagccatcaaggcctga

SEQ ID NO: 457988 - DNA, 420 bp, Shigella boydii
gtgaaacctgctgctcgtcgccgcgctcgtgagtgtgccgtccaggcgctctactcctggcagttgtcccagaacgacatcgctgatgttgaataccagttcctggctgaacaggatgtaaaagacgttgacgtcctgtacttccgtgagctgctggccggggtggcgactaataccgcatacctcgacggactgatgaagccatacctgtcccgtctgctggaagaactgggacaggtagaaaaagcagtactgcgcattgcgctgtacgaactgtctaaacgtagcgatgtgccatacaaagtggccattaacgaagcgatcgaactggcgaaatcgttcggcgcagaagacagccataagttcgtcaacggtgtactcgataaagcagcacctgtgattcgccctaacaaaaagtaa

SEQ ID NO: 457989 - DNA, 978 bp, Shigella boydii
atggcatgtggcgagttctccctgattgcccgttattttgaccgtgtaagaagttctcgtcttgatgtcgaactgggcatcggcgacgattgcgcacttctcaatatccccgagaaacagaccctggcgatcagcactgatacgctggtggcgggcaaccacttcctccctgatatcgatcctgctgatctggcgtataaagcactggcggtgaacctaagcgatctggcagcgatgggggccgatccggcctggctgacgctggcattaaccttgccggacgtagacgaagcgtggcttgagtccttcagcgacagtttgtttgatcttctcaattattacgatatgcaactcattggcggcgataccacgcgtgggccattatcaatgacgttgggtatccacggctttgttccgatgggacgagccttaacgcgctctggggcgaaaccgggtgactggatctatgtgaccggtacaccgggcgatagcgccgccgggctggcgattttgcaaaaccgtttgcaggttgccgatgctaaagatgcggactacttgatcaaacgtcatctccgtccatcgccgcgtattttacaggggcaggcactgcgcgatctagcaaattcagctatcgatctctctgacggtctgatttccgatctcgggcatatcgtgaaagccagcgactgcggcgcacgtattgacctggcattgctgccgttttctgatgcgctttctcgccatgttgaaccggaacaggcgctgcgctgggcgctctctggcggtgaagattacgagttgtgtttcacggtgccggaactgaaccgtggagcgctggatgtggctctcggacacctgggcgtaccgtttacctgtatcgggcaaatgaccgccgatatcgaagggctttgttttattcgtgacggtgaacctgttacgttagactggaaaggatatgaccattttgccacgccataa

SEQ ID NO: 457990 - DNA, 519 bp, Shigella boydii
atgaccattttgccacgccataaagatgtcgcgaaaagtcgcctgaagatgagtaatccgtggcatctacttgctgtcggattcggaagtggattaagcccgatcgttcctgggacgatgggctcgctggcagcgattccgttctggtatctgatgacctttttgccctggcagctctactcgctggtggtgatgctggggatctgtatcggcgtctatctttgtcatcagaccgcaaaagatatgggcgtgcacgatcacggcagcattgtttgggacgaatttattggtatgtggatcacgctcatggcgctgccgaccaatgactggcagtgggttgccgccgggtttgtgattttccgtattctggatatgtggaaaccgtggccgatccgctggtttgatcgcaatgtgcatggcggcatggggatcatgatagatgatattgtcgccggggtgatctccgctggcatcctgtactttattggtcatcactggccgctgggcattctgtcgtag

SEQ ID NO: 457991 - DNA, 975 bp, Shigella boydii
atgcaatacaaccccttaggaaaaaccgaccttcgcgtttcccgactttgcctcggctgtatgacctttggcgagccagatcgtggtaatcacgcatggacactgccggaagagagcagccgtcccataattaaacgcgcactggaaggcggcataaatttctttgataccgccaatagctattccgatggtagcagcgaagagatcgttggtcgcgcactgcgggatttcgcccgtcgtgaagacgtggtcgttgccaccaaagtgttccatcgcgttggtgatttaccggaaggattatcccgtgcacaaattttgcgctctatcgacgacagcctgcgacgtctcggcatggattatgtcgatatcctgcaaattcatcgctgggattacaacacgccgatcgaagagacgctggaagccctgaacgacgtggtaaaagccgggaaagcgcgttatatcggcgcgtcatcaatgcacgcttcgcagtttgctcaggcactggaactccaaaaacagcacggctgggcgcagtttgtcagtatgcaggatcactacaatctgatttatcgcgaagaagagcgcgagatgctgccactgtgttatcaggagggcgtggcggtgattccgtggagcccgctggcgcgggggcgactgacgcgtccgtggggagaaactaccgcacgactggtgtctgatgaggtggggaaaaatctctataaagaaagcgatgaaaatgacgcgcagatcgcagagcggttaacgggcgtcagtgaagaactcggtgcaacacgagcacaagttgcgctggcttggttgttgagtaaaccgggcattgccgcaccgattatcggtacatcgcgggaagaacagcttgatgagctattgaacgcggtggatatcactttgaagccggaacagattgccgaactggaaacgccgtataaaccgcatccggtagtaggatttaaataa

SEQ ID NO: 457992 - DNA, 1863 bp, Shigella boydii
atgagttttgatattgccaaatacccgaccctggcactggtcgactccacccaggagttacgactgttgccgaaagagagtttaccgaaactctgcgacgaactgcgccgctatttactcgacagcgtgagccgttccagcgggcacttcgcctccgggctgggcacggtcgaactgaccgtggcgctgcactatgtctacaacaccccgtttgaccaattgatttgggatgtggggcatcaggcttatccgcataaaattttgaccggacgccgcgacaaaatcggcaccatccgtcagaaaggcggcctgcacccgttcccgtggcgcggcgaaagcgaatatgacgtattaagcgtcgggcattcatcaacctccatcagtgccggaattggtattgcggttgctgccgagaaagaaggcaaaaatcgccgtaccgtctgtgtaatcggcgatggcgcgattaccgcaggcatggcgtttgaagcgatgaatcacgcgggcgatatccgtcctgatatgctggtggtcctcaacgacaacgaaatgtcgatttccgaaaatgtcggcgcgctcaacaaccatctggcgcagctgctttccggtaagctttactcttcactgcgcgaaggcgggaaaaaagttttctctggcgtgccacccattaaagagctgctcaaacgtaccgaagaacatattaaaggcatggtagtccctggcacgttgtttgaagagctgggctttaactacatcggcccggttgacggtcacgatgtgctggggcttatcaccacgctgaagaacatgcgtgacctgaaaggcccgcagttcctgcatatcatgaccaaaaaaggtcgtggttatgaaccggcagaaaaagacccaatcactttccacgccgtgcctaaatttgatccctccagcggttgtttgccgaaaagtagcggcggtttaccgagctattcaaaaatctttggcgactggttgtgcgaaacggcggcgaaagataacaagctgatggcgattactccggcgatgcgtgaaggttccggcatggtcgagttttctcgtaaattcccggatcgctacttcgacgtggcaattgccgagcaacacgcagtgacctttgccgccggtctggcgattggtgggtacaaacccattgtcgcgatctactccactttcctgcaacgcgcctatgatcaggtgctgcatgacgtggcaattcaaaagcttccggtcctgttcgccatcgaccgcgcgggcattgttggtgctgacggtcaaacccatcagggtgcttttgatctctcttacctgcgctgcataccggaaatggtcattatgaccccgagcgatgaaaacgaatgtcgccagatgctctataccggctatcactataacgatggcccgtcagcggtgcgctacccgcgtggcaacgcggtcggcgtggaactgacgccgctggaaaaactaccaattggcaaaggcattgtgaagcgtcgtggcgagaaactggcgatccttaactttggtacgctgatgccagaagcggcgaaagtcgccgaatcgctgaacgccacgctggtcgatatgcgttttgtgaaaccgcttgatgaagcgttaattctggaaatggccgccagtcatgaagcactggttaccgtagaagaaaacgccattatgggcggtgcaggcagcggagtgaacgaagtgctaatggcccatcgtaaaccagtccccgtgctgaacattggcctgcctgacttctttattccgcaaggaacgcaggaagaaatgcgcgccgaactcggcctcgatgccgccggtatggaagccaaaatcaaggcctggctggcataa

SEQ ID NO: 457993 - DNA, 900 bp, Shigella boydii
atggactttccgcagcaactcgaagcctgcgttaagcaggccaaccaggcgctgagccgttttatcgccccactgccctttcagaacactcccgtggtcgaaaccatgcagtatggcgcattattaggtggtaagcgtctgcgacccttcctggtttatgccaccggtcatatgtttggcgttagcacaaacacgctggacgcacccgctgccgccgtagagtgtatccacgcttactcattaattcatgatgatttaccggcgatggatgatgacgatctgcgtcgcggtttgccgacctgccatgtgaagtttggagaagcaaacgcgattctcgctggcgacgctttacaaacgctggcgttctcgattttaagcgatgctgatatgccggaagtgtcggatcgcgacagaatttcgatgatttctgaactggcgagcgccagcggtattgccggaatgtgcggtggtcaggcattagatttagacgcggaaggcaaacacgtacctctggacgcgcttgagcgtattcatcgtcataaaaccggcgcattgattcgcgccgccgttcgccttggtgcattaagcgccggagataaagggcgtcgtgctctgccagtactcgacaagtacgcagagagcatcggccttgccttccaggttcaggatgacatcctggatgtggtaggagatactgcaacgttgggaaaacgccagggtgccgaccagcaacttggtaaaagtacctaccctgcacttctgggtcttgagcaagcccggaagaaagcccgggatctgatcgacgatgcccgtcagtcgctgaaacaactggctgaacagtcactcgatacctcggcactggaagcgctagcggactacatcatccagcgtaataaataa

SEQ ID NO: 457994 - DNA, 243 bp, Shigella boydii
atgccgaagaaaaatgaggctcccgccagctttgaaaaggcgctgagcgagctggaacagattgtaacccgtctggaaagtggcgacctgccgctggaagaggcgctgaacgagttcgaacgcggcgtgcagctggcacgtcaggggcaggccaaattacaacaagccgaacagcgcgtacaaattctgctgtctgacaatgaagacgcctctctaaccccttttacaccggacaatgagtaa

SEQ ID NO: 457995 - DNA, 1449 bp, Shigella boydii
atgaagtttatcattaaattgttcccggaaatcaccatcaaaagccaatctgtgcgcttgcgctttataaaaatccttaccgggaacattcgtaacgttttaaagcactatgatgagacgctcgctgtcgtccgccactgggataacatcgaagttcgcgcaaaagatgaaaaccagcgtctggctattcgcgacgccctgacccgtattccgggtatccaccatattctcgaagtcgaagacgtgccgtttaccgacatgcacgatatttttgagaaagcgttggttcagtatcgcgatcagctggaaggcaaaaccttctgcgtacgcgtgaagcgccgtggcaaacatgattttagctcgattgatgtggaacgttacgtcggcggcggtttaaatcagcatattgagtccgcgcgcgtgaagctgaccaatccggaagtgactgtccatctggaagtggaagacgatcgtctcctgctgattaaaggccgctacgaaggtattggcggtttcccgatcggcacccaggaagatgtgctgtcgctcatttccggtggtttcgactccggtgtttccagttatatgttgatgcgtcgcggctgccgcgtgcattactgtttctttaaccttggcggcgcggcgcatgaaattggcgtgcgtcaggtggcgcattatctgtggaaccgttttggcagctcccaccgcgtgcgttttgtcgctattaatttcgaaccggtcgtcggggaaattctcgagaaaatcgacgacggtcagatgggcgttatcctcaaacgtatgatggtgcgtgccgcgtctaaagtggctgaacgttacggcgtacaggcgctggtcaccggcgaagcgctcggccaggtgtccagtcagacgctgaccaacctgcgcctgattgataacgtctccgatacgctgatcctgcgtccgctgatttcttacgacaaagagcacatcatcaacctggctcgccagattggcaccgaagactttgctcgcacgatgccggaatattgcggtgttatctccaaaagcccgacggtgaaagcggttaagtcgaagattgaagcggaagaagagaaattcgacttcagcattctcgataaagtggttgaagaagcgaataacgttgatatccgcgaaatcgcccagcagaccgagcaggaagtggtggaagtggaaaccgtcaatggcttcggcccgaacgacgtgatcctcgatatccgttctatcgatgaacaggaagataagccactgaaagtcgaagggattgatgtagtttctctgccgttctataaactgagcaccaagtttggcgatctcgaccagaacagaacctggctactgtggtgtgagcgcggggtgatgagccgtctgcaggcgctctatctgcgcgagcagggctttaacaatgtgaaggtatatcgcccgtaa

SEQ ID NO: 457996 - DNA, 591 bp, Shigella boydii
atgagcgcatcggcactggtttgcctcgcccctggtagtgaagagactgaagccgtcaccacgatcgacctcttggttcgcggcggtatcaaagtcaccactgccagcgtagccagcgatggcaacctggcaattacctgctcgcgcggcgtgaagctgctggcggatgcgccgctggtcgaggtggctgatggcgaatatgacgtgatcgtactgcctggtggcattaaaggcgcagagtgttttcgcgatagcactctgctggttgaaaccgttaaacagttccaccgttccgggcgtatcgtcgcggctatttgcgccgcgccagccaccgtgctggtgccgcacgatatcttcccgattggtaatatgaccggcttcccgacgctgaaagacaaaattcccgctgaacaatggcaggacaagcgcgtcgtctgggatgcacgggtaaaattgctgaccagccaggggccggggacagctatcgactttggtctgaaaattatcgacctgctggttgggcgcgagaaagcccatgaagtggcatcacaactggtgatggcggcagggatttataattattacgagtag

SEQ ID NO: 457997 - DNA, 912 bp, Shigella boydii
atgaaaattaccgtattgggatgcggtgccttagggcaattatggcttacagcactttgcaaacagggtcatgaagttcagggctggctgcgcgtaccgcaaccttattgtagtgtgaatctggttgagacagatggttcgatatttaacgaatcgctgaccgccaacgatcccgattttctcgccaccagcgatctgctcctggtgacgctgaaagcatggcaggtttccgatgccgtcaaaagcctcgcgtccacactgcctgtaaccacgccaatactgttaattcacaacggcatgggcaccatcgaagagttgcaaaatattcagcagccattactgatgggcaccaccacccatgccgcccgccgcgacggcaatgtcattattcatgtggcaaacggtatcacgcatattggtccggcacggcaacaggatggcgattacagttatctggcggatattttacaaaccgtgttgcctgacgttgcctggcataacaatattcgcgccgagctgtggcgcaagctggcagtcaactgcgtgattaatccactgaccgccatctggaattgcccgaacggtgaattacgtcatcatccgcaagaaattatgcaaatatgcgaagaagtcgcggcagtgatcgaacgcgaagggcatcatacttcagcggaagatttgcgtcattacgtgatgcaggtgattgatgccacagcggaaaatatctcgtcgatgttgcaggatatccgcgcgctgcgccacaccgaaatcgactatatcaatggttttctcttacgccgcgcccgcgcgcatgggattgccgtaccggaaaacacccgcctgtttgaaatggtaaaaagaaaggagagtgaatatgagcgcatcggcactggtttgcctcgcccctggtag

SEQ ID NO: 457998 - DNA, 492 bp, Shigella boydii
atgccatctttcgatattgtctctgaagttgatcttcaggaagcacgtaacgcggtcgataacgcgagccgcgaagtggagtcccgttttgacttccgtaacgttgaagcctcatttgagctgaacgacgccagcaaaaccatcaaagtgttgagcgagtccgatttccaggtcaatcagttgctggatattctgcgtgccaagctgctgaagcgcggcattgaaggcagttcactggatgtaccggaaaatatcgttcatagcggtaaaacctggtttgtggaagcgaaactgaagcagggcattgagagcgcgacccagaaaaaaatcgtcaagatgatcaaagacagcaaactgaaagtgcaggcgcaaattcagggcgatgagatccgcgtgactggcaaatctcgtgatgatttgcaggctgtcatggcgatggtgcgcggtggcgatctgggtcagccgttccagttcaaaaacttccgcgattaa

SEQ ID NO: 457999 - DNA, 1365 bp, Shigella boydii
atgaacgattataaaatgacgccaggtgagaggcgcgcgacctggggtttagggaccgtattctcgttgcgcatgctgggcatgtttatggttctgccggttctgaccacgtatggcatggctctgcaaggtgccagcgaagcattaatcggtattgccattggtatttatggtctgactcaggccgtttttcagattccgtttggcctgctttccgaccgtattggtcgcaaaccattaattgtcggtgggctggcggtgtttgccgccggtagcgttatcgctgcgctctctgactccatctggggaattattctgggccgggcgctacaaggctccggtgcgattgccgctgccgttatggcgctgctttccgatctcacgcgcgaacaaaaccgcaccaaagcaatggcgtttatcggcgtgagctttggcattacctttgccattgcgatggtgcttggcccgatcatcactcacaaacttgggctgcacgcgctgttctggatgatcgctattctggcaacgaccggcattgcgttgaccatttgggttgtgcccaacagtagcactcacgtacttaatcgtgagtccggaatggtgaaaggcagtttcagtaaagtgctggcggaaccgcggctgctgaaactcaactttggcattatgtgtctgcatattttgctgatgtcgacgtttgttgccctgcccggacaactggctgatgcagggttcccggcggctgaacactggaaggtctatctggcgacaatgctaatcgcctttggctcggtcgtgcctttcattatctacgctgaagttaagcgcaaaatgaagcaagtctttgtcttctgcgtcgggttgatcgtggttgcggaaattgtgttgtggaacgcgcaaacgcagttctggcaactggtggtcggcgtgcagcttttctttgtagcgtttaatttgatggaagcccttctgccttcacttatcagtaaagagtcgccagcaggttacaaaggtacagcgatgggtgtttactccaccagccagtttcttggcgtggcgattggcggttcactgggcggctggattgacggcatgtttgacggtcagggcgtatttctcgctggcgcaatgctggccgcagtgtggctggcagtcgccagtaccatgaaagaaccggcgtatgtcagcagtttgcgcattgaaatcccggcgaacattgccgcaaacgaggcgttaaaagtgcgtttgctagaaactgaaggcatcaaagaagtgttgattgcagaagaagaacattcagcttatgtgaaaatcgacagcaaagtgacgaatcgctttgatgttgaacaggcaattcgccaggcataa

SEQ ID NO: 458000 - DNA, 891 bp, Shigella boydii
atgatgtttaagcaatacctgcaagtaacgaaaccaggcatcatctttggcaacctgatctcggtgattgggggattcctgctggcctcaaagggcagcattgattatcccctgtttatctacacgctggttggggtgtcactggttgtggcgtcgggttgtgtgtttaacaactacatcgacagggatatcgacagaaagatggaaaggacgaagaatcgggtgctggttaaaggcctgatctctcctgctgtctcgctggtgtacgtcaccttgctgggtattgctggctttatgctgctgtggtttggcgcgaatccgctggcctgctggctgggggtgatgggctttgtggtttatgtcggcgtctatagcctgtacatgaaacgccactcagtctacggcacattgattggttcgctctccggcgctgcgccgccggtgattggctactgtgcagtaaccggcgagttcgatagcggcgcagcgatcctgctggctatcttcagcctgtggcagatgcctcactcctatgccatcgccattttccgctttaaggattaccaggcggcaaacattccggtattgccagtggtaaaaggcatttcggtggcgaagaatcacatcacgctgtatatcatcgcctttgccgttgccacgctgatgctctctcttggcggttacgctggatataaatatctggtggtcgccgcggcggttagcgtctggtggttaggtatggctctgcgcggttataaagttgctgatgacagaatctgggcgcgcaagctgttcggcttctctatcatcgccatcactgccctctcggtgatgatgtccgttgattttatggtaccggactcgcatacgctgctggctgctgtgtggtaa

SEQ ID NO: 458001 - DNA, 330 bp, Shigella boydii
atgagtcattctaccgatcacagcggcgcgtcccatggcagcgtaaaaacctacatgacaggctttatcctgtcgatcattctgacggtgattccgttctggatggtgatgacaggggctgcctctccggccgtaattctgggaacaatccgggcaatggcagtggtacaggttctggtgcatctggtgtgcttcctgcacatgaataccaaatcagatgaaggctggaacatgacggcgtttgtcttcaccgtgctaatcatcgctatcctggttgtaggctccatctggattatgtggaacctcaactacaacatgatgatgcactaa

SEQ ID NO: 458002 - DNA, 615 bp, Shigella boydii
atggcaactgatactttgacgcacgcgactgcccacgcgcacgaacacgggcaccacgatgcaggcggaaccaaaatcttcggattttggatctacctgatgagcgactgcattctgttctcaatcttgtttgctacctatgccgttctggtgaacggcaccgcaggcggcccgacaggtaaggacattttcgaactgccgttcgttctggttgaaactttcttgctgttgttcagctccatcacctacggcatggcggctatcgccatgtacaaaaacaacaaaagccaggttatctcctggctggcgttgacctgtttgtttggtgccggatttatcgggatggaaatctacgaattccatcacctgattgttaacggcatgggtccggatcgcagcggcttcctgtcagcgttctttgcgctggtcggcacgcacggtctgcacgtcacttccggtcttatctggatggcggtgctgatggtacaaatcgctcgtcgcggcctgaccagcactaaccgtacccgcatcatgtgcctgagcctgttctggcacttcctggatgtggtttggatctgtgtgttcactgttgtttatctgatgggggcgatgtaa

SEQ ID NO: 458003 - DNA, 1992 bp, Shigella boydii
atgttcggaaaattatcacttgatgcagtcccgttccatgaacctatcgtcatggttacgatcgctggcattattttgggaggtctggcgctcgttggcctgatcacttacttcggtaagtggacctacctgtggaaagagtggctgacctccgtcgaccataaacgcctcggtatcatgtatatcatcgtggcgattgtgatgttgctgcgtggttttgctgacgccattatgatgcgtagccagcaggctcttgcctcggcgggcgaagcgggcttcctgccacctcaccactacgatcagatcttcaccgcgcacggcgtgattatgatcttcttcgtggcgatgcctttcgttatcggtctgatgaacctggtggttccgctgcagatcggcgcgcgtgacgttgcgttcccgttcctcaacaacttaagcttctggtttactgttgttggtgtgattctggttaacgtttctctctgcgtgggcgaatttgcgcagaccggctggctggcctatccaccgctatcgggaatagagtacagtccgggagtcggtgttgattactggatatggagtctccagctatccggtataggtacgacgcttaccggtatcaacttcttcgttaccattctgaagatgcgcgcaccgggcatgaccatgttcaagatgccagtatttacctgggcatcactgtgcgcgaacgtactgattattgcttccttcccaattctgacggttaccgtcgcgttgttgaccctggatcgctatctgggcacccatttctttaccaacgatatgggtggcaacatgatgatgtacatcaacctgatttgggcctggggccacccggaagtttacatcctgatccagcctgttttcggtgtgttctccgaaattgcggcaaccttctcgcgtaaacgtctgtttggttatacctcgctggtatgggcaaccgtctgtatcaccgtgctgtcgttcatcgtttggctgcaccacttctttacgatgggtgcgggcgcgaacgtaaacgccttctttggtatcaccacaatgattatcgccatcccgaccggggtgaagaccttcaactggctgttcaccatgtatcagggccgtatcgtgttccattctgcgatgctgtggaccatcggttttatcgtcactttctcggtgggcgggatgactggcgtgctgctggcagtaccgggcgcggacttcgttctgcataacagcctgttcctgattgcgcacttccataacgttatcatcggcggcgtggtcttcggctgcttcgcagggatgacctactggtggcctaaagcgttcggtttcaaactgaatgaaacctggggtaaacgcgcgttctggttctggatcatcggcttcttcgttgcctttatgccgctgtatgcgctgggcttcatgggcatgacccgtcgtttgagccagcagattgacccgcagttccacaccatgctgatgattgcagctagcggtgcagtactgattgcgctgggtattctctgcctcgttattcagatgtacgtttctattcgcgaccgcgaccagaaccgtgacctgactggcgacccgtggggtggccgtacgctggagtgggcaacctcttccccgcctccgttctataactttgccgttgtgccgcacgttcacgagcgtgatgcattctgggaaatgaaagagaaaggcgaagcgtataaaaagcctgaccactatgaagaaattcatatgccgaaaaacagcggtgcaggtatcgtcattgcagctttctccaccatcttcggtttcgccatgatctggcatatctggtggctggcgattgttggcttcgcaggcatgatcatcacctggatcgtgaaaagcttcgacgaggacgtggattactacgtgccggtggcagaaatcgaaaaactggaaaaccagcatttcgatgagattactaaggcagggctgaaaaatggcaactga

SEQ ID NO: 458004 - DNA, 786 bp, Shigella boydii
atgagactcaggaaatacaataaaagtttgggatggttgtcattatttgcaggcactgtattgctcagtggctgtaattctgcgctgttagatcccaaaggacagattggtctggagcaacgttcactgatactgacggcatttggcctgatgttgattgtcgttattcccgcaatcttgatggctgttggtttcgcctggaagtatcgtgcgagcaataaagatgctaagtacagcccgaactggtcacactccaataaagtggaagctgtggtctggacggtacctatcttaatcatcatcttccttgcggtactgacctggaaaaccactcacgctcttgagcctagcaagccgctggcacacgacgagaagcccattaccatcgaagtggtttccatggactggaaatggttcttcatctacccggaacagggcattgctaccgtgaatgaaatcgctttcccggcgaacactccggtgtacttcaaagtgacctccaactccgtgatgaactccttcttcattccgcgtctgggtagccagatttatgccatggctggtatgcagactcgcctgcatctgatcgccaacgaacccggtacttatgacggtatctccgccagctacagcggcccgggcttctcaggcatgaagttcaaagctattgcaacaccggatcgcgccgaattcgaccagtgggtcgcaaaagcgaagcagtcgccgaacaccatgtctgacatggctgcgttcgaaaaactggccgcgcctagcgaatacaactag

SEQ ID NO: 458005 - DNA, 1476 bp, Shigella boydii
atgtccagtcaatatttacgtatttttcaacagccgcgttcagccatattgctgatcctgggttttgcttccgggctaccgctcgccctgacatccggtaccttacaggcctggatgacggtcgagaatattgatctcaaaaccattggtttcttctctctggtaggccaggcttacgtttttaaattcctctggtcaccgctgatggaccgctacacgcccccattttttgggcggcggcgcggttggctgctcgccacgcaaatcctgttattagtcgccattgcggcgatgggttttctcgaacctggcacccaactccgctggatggcggcactggcggtggtgatcgctttttgctcggcctcccaggatattgtcttcgatgcgtggaaaaccgatgtgctcccggcagaagaacgtggtgcgggcgcggcaatcagcgtgctgggttaccgtttagggatgctggtttccggcggcttagccctgtggctggcagataaatggctgggctggcagggcatgtactggttgatggcggcgctgttgatcccttgtattatcgcgacgttgcttgcaccagaaccgaccgacaccattcctgtgccaaaaacgctggaacaagcggttgttgcacctctgcgagatttctttggtcgcaataatgcctggcttattttgcttcttatcgtgctgtataagctgggcgacgcattcgccatgagcctgacaaccacgtttttgattcgcggcgtcgggtttgatgcgggtgaagtaggcgtggttaacaaaacgcttggcttactggcgaccattgtgggcgcattgtacggtgggattttgatgcagcgcctgtcgctgttccgggcgctgctgattttcggcattttacaaggtgcgtctaacgctggttactggctgctgtcgattactgataagcatctctacagcatgggcgcagccgtctttttcgaaaacctctgtggcgggatgggcacatcagcctttgtcgcgctgttaatgacgctgtgtaataagtcattttccgctactcaatttgccctgctctcagcgctttccgctgtaggacgagtttatgtcggccccgtggcgggttggtttgttgaagcacacggctggtcgacattctatctattctccgtcgccgctgccgtaccggggcttattttgctgctggtttgccgccagacgcttgaatatacacgagtaaatgacaactttatctcccgtaccgaatatccggcaggttatgcctttgccatgtggacactggcggcgggcgtcagcctgttggccgtgtggttactgctgttgacgatggacgcgctggatttgacgcacttctctttcctgcctgctctgctggaagtcggggttttagtcgccctttctggcgtcgtgcttggtggtttgctggattatctggctctacgaaaaacgcatctgacgtaa

SEQ ID NO: 458006 - DNA, 579 bp, Shigella boydii
atgttcaaaaaaatcctcttcccgttagttgctctgtttatgcttgcaggatgcgcaaaaccgccaacaactattgaaatttccccgacgattacactgccacagcaggatccaagcctgatgggcgtcaccgtaagcattaatggtgccgatcagcgtaccgatcaggcgctggcaaaagtcacccgcgataatcaaatcgttaccctgaccgcctcccgcgatctgcgtttcctgctgcaagaagtgctggaaaaacagatgaccgcgcgtggttacatggttggtccgaatggcccggttaatctgcaaatcatcgttagccaactgtatgctgacgtgtcccagggcaacgtgcgctacaacatcgctaccaaagcggatatcgccatcatcgctaccgcgcagaatggcaacaaaataaccaaaaactatcgtgccagctacaacgttgaaggtgcgttccaggcctccaacaaaaatatcgccgatgcggttaacagtgtgctgaccgataccatcgctgatatgtctcaggacaccagcattcacgaattcatcaagcagaacgcgcgttaa

SEQ ID NO: 458007 - DNA, 315 bp, Shigella boydii; identical to SEQ ID NO: 138

SEQ ID NO: 458008 - DNA, 1299 bp, Shigella boydii
atgcaagtttcagttgaaaccactcaaggccttggccgccgtgtaacgattactatcgctgctgacagcatcgagaccgctgttaaaagcgagctggtcaacgttgcgaaaaaagtacgtattgacggcttccgcaaaggcaaagtgccaatgaatatcgttgctcagcgttatggcgcgtctgtacgccaggacgttctgggtgacctgatgagccgtaacttcattgacgccatcattaaagaaaaaatcaatccggctggcgcaccgacttatgttccgggcgaatacaagctgggtgaagacttcacttactctgtagagtttgaagtttatccggaagttgaactgcagggtctggaagcgatcgaagttgaaaaaccgatcgttgaagtgaccgacgctgacgttgacggcatgctggatactctgcgtaaacagcaggctacctggaaagaaaaagacggcgctgttgaagcagaagaccgcgtaaccatcgacttcaccggttctgtagacagcgaagagttcgaaggcggtaaagcgtctgatttcgtactggcgatgggccagggtcgtatgatcccgggctttgaagacggtatcaaaggccacaaagctggcgaagagttcaccatcgacgtgaccttcccggaagaataccacgcagaaaacctgaaaggtaaagcagcgaaattcgctatcaacctgaagaaagttgaagagcgtgaactgccggaactgactgcagaattcatcaaacgtttcggcgttgaagatggttccgtagaaggtctgcgcgctgaagtgcgtaaaaacatggagcgcgagctgaagagcgccatccgtaaccgcgttaagtctcaggcgatcgaaggtctggtaaaagctaacgacatcgacgtaccggctgcgctgatcgacagcgaaatcgacgttctgcgtcgccaggctgcacagcgtttcggtggcaacgaaaaacaagctctggaactgccgcgcgaactgttcgaagaacaggctaaacgccgcgtagttgttggcctgctgctgggcgaagttatccgcaccaacgagctgaaagctgacgaagagcgcgtgaaaggcctgatcgaagagatggcttctgcgtacgaagatccgaaagaagttatcgagttctacagcaaaaacaaagaactgatggacaacatgcgcaatgttgctctggaagaacaggctgttgaagctgtactggcgaaagcgaaagtgactgaaaaagaaaccactttcaacgagctgatgaaccagcaggcgtaa

SEQ ID NO: 458009 - DNA, 624 bp, Shigella boydii
atgtcatacagcggcgaacgagataactttgcaccccatatggcgctggtgccgatggtcattgaacagacctcacgcggtgagcgctcttttgatatctattctcgtctacttaaggaacgcgtcatttttctgactggccaggttgaagaccacatggctaacctgattgtggcgcagatgctgttcctggaagcggaaaacccagaaaaagatatctatctgtacattaactccccaggcggggtgatcactgccgggatgtctatctatgacaccatgcagtttatcaagcctgatgtcagcaccatctgtatgggccaggcggcctcgatgggcgctttcttgctgaccgcaggggcaaaaggtaaacgtttttgcctgccgaattcgcgcgtgatgattcaccaaccgttgggcggctaccagggccaggcgaccgatatcgaaattcatgcccgtgaaattctgaaagttaaagggcgcatgaatgaacttatggcgcttcatacgggtcaatcattagaacagattgaacgtgataccgagcgcgatcgcttcctttccgcccctgaagcggtggaatacggtctggtcgattcgattctgacccatcgtaattga

SEQ ID NO: 458010 - DNA, 1275 bp, Shigella boydii
atgacagataaacgcaaagatggctcaggcaaattgctgtattgctctttttgcggcaaaagccagcatgaagtgcgcaagctgattgccggtccatccgtgtatatctgcgacgaatgtgttgatttatgtaacgacatcattcgcgaagagattaaagaagttgcaccgcatcgtgaacgcagtgcgctaccgacgccgcatgaaattcgcaaccacctggacgattacgttatcggccaggaacaggcgaaaaaagtgctggcggtcgcggtatacaaccattacaaacgtctgcgcaacggagataccagcaatggtgtcgagttgggcaaaagtaacattctgctgatcggtccgaccggttccggtaaaacgctgctggctgaaacgctggcgcgcctgctggatgttccgttcaccatggccgacgcgactacactgaccgaagccggttatgtgggtgaagacgttgaaaacatcattcagaagctgttgcagaaatgcgactacgatgtccagaaagcacagcgtggtattgtctacatcgatgaaatcgacaagatttctcgtaagtcggacaacccgtctattacccgtgacgtttccggtgaaggcgtacagcaggcactgttgaaactgatcgaaggtactgttgctgccgttccaccgcagggcgggcgtaagcatccgcagcaggaatttttgcaggttgatacctccaagatcctgtttatttgtggcggtgcgtttgccggtctggataaagtgatttcccaccgtgtagaaaccggctccggcattggttttggcgcgacggtaaaagcgaagtccgacaaagcaagcgaaggcgagctgctggcgcaggttgaaccggaagatctgatcaagtttggtcttatccctgagtttattggtcgtctgccggttgtcgcaacgttgaatgaactgagcgaagaagctctgattcagatcctcaaagagccgaaaaacgccctgaccaagcagtatcaggcgctgtttaatctggaaggcgtggatctggaattccgtgacgaggcgctggatgctatcgctaagaaagcgatggcgcgtaaaaccggtgcccgtggcctgcgttccatcgtagaagccgcactgctcgataccatgtacgatctgccgtccatggaagatgtcgaaaaagtggttatcgacgagtcggtaattgatggtcaaagcaaaccgttgctgatttatggtaagccggaagcgcaacaggcatctggtgaataa

SEQ ID NO: 458011 - DNA, 2355 bp, Shigella boydii
atgaatcctgagcgttctgaacgcattgaaatccccgtattgccgctgcgcgatgtggtggtttatccgcacatggtcatccccttatttgtcgggcgggaaaaatctatccgttgtctggaagcggcgatggaccatgataaaaaaattatgctggtcgcgcagaaagaagcttcaacggatgagccgggtgtaaacgatcttttcaccgtcgggaccgtggcctctatattgcagatgctgaaactgcctgacggcaccgtcaaagtgctggtcgaggggttacagcgcgcgcgtatttctgcgctctctgacaatggcgaacacttttctgcgaaggcggagtatctggagtcgccgaccattgatgagcgggaacaggaagtgctggtgcgtactgcaatcagccagttcgaaggctacatcaagctgaacaaaaaaatcccaccagaagtgctgacgtcgctgaatagcatcgacgatccggcgcgtctggcggataccattgctgcacatatgccactgaaactggctgacaaacagtccgttctggagatgtccgacgttaacgaacgtctggaatatctgatggcaatgatggaatcggaaatcgatctgctgcaggttgagaaacgcattcgcaaccgcgttaaaaagcagatggagaaatcccagcgtgagtactatctgaacgagcaaatgaaagctattcagaaagaactcggtgaaatggacgacgcgccggacgaaaacgaagccctgaagcgcaaaatcgacgcggcgaagatgccgaaagaggcaaaagagaaagcggaagcagagttgcagaagctgaaaatgatgtctccgatgtcggcagaagcgaccgtagtgcgtggttatatcgactggatggtacaggtaccgtggaatgcgcgcagcaaggtcaaaaaagacctgcgtcaggcgcaggaaatccttgataccgaccattatggtctggagcgcgtgaaagatcgcatccttgagtaccttgcggttcaaagccgtgtcaacaaaatcaagggaccgatcctctgcctggtagggccgccgggggtaggtaaaacctctcttggtcagtccattgccaaagccaccgggcgtaaatatgtccgtatggcgctgggcggcgtgcgtgatgaagcggaaatccgtggtcaccgccgtacttacatcggttctatgccgggtaaactgatccagaaaatggcgaaagtgggcgtgaaaaacccgctgttcctgctcgatgagatcgacaaaatgtcttctgacatgcgaggcgatccggcctctgcactgcttgaagtgctggatccagagcagaacgtagcgttcagcgaccactacctggaagtggattacgatctcagcgacgtgatgtttgtcgcgacgtcgaactccatgaacattccggcaccgctgctggatcgtatggaagtgattcgcctctccggttataccgaagatgaaaaactgaacatcgccaaacgtcacctgctgccgaagcagattgaacgtaatgcactgaaaaaaggtgagctgaccgtcgacgatagcgccattatcggcattattcgttactacacccgtgaggcgggcgtgcgtggtctggagcgtgaaatctccaaactgtgccgcaaagcggttaagcagttactgctcgataagtcattaaaacatatcgaaattaacggcgataacctgcatgactacctcggtgttcagcgtttcgactatggtcgcgctgataacgaaaactgtgtcggtcaggtaaccggtctggcgtggacggaagtgggcggtgacttgctgaccattgaaaccgcatgtgttccgggtaaaggcaaactgacctataccggttcgctcggcgaagtgatgcaggagtctattcaggcggcgttaacggtggttcgtgcgcgtgcggaaaaactggggatcaaccctgatttttacgaaaaacgtgacatccacgtccacgtaccggaaggtgcgacgccgaaagatggtccgagtgccggtattgctatgtgcaccgcgctggtttcttgcctgaccggtaacccggttcgtgccgatgtggcaatgaccggtgagatcactctgcgtggtcaggtactgccgatcggtggtttgaaagaaaaactcctggcagcgcatcgcggcgggattaaaacagtgctaattccgttcgaaaataaacgcgatctggaagagattcctgacaacgtaattgccgatctggacattcatcctgtgaagcgcattgaggaagttctgactctggcgctgcaaaatgaaccgtctggcatgcaggttgtgactgcaaaatag

SEQ ID NO: 458012 - DNA, 273 bp, Shigella boydii; identical to SEQ ID NO: 143

SEQ ID NO: 458013 - DNA, 1872 bp, Shigella boydii
atgatggacagcttacgcacggctgcaaacagtctcgtgctcaagattattttcggtatcattatcgtgtcgttcatattgaccggcgtgagtggttacctgattggcggaggcaataactacgccgcaaaagtgaatgaccaggaaatcagccgtgggcagttcgagaacgcctttaacagcgagcgtaatcgcatgcagcaacagctgggcgatcaatactccgagctggcagcgaatgaaggctatatgaaaaccctgcgtcaacaggtgctgaatcgtctgatcgacgaggcgctgttggatcagtacgctcgtgagctgaaactgggtatcagtgatgagcaggttaaacaggcgattttcgcgaccccagccttccaggttgatggcaaatttgataacagccgctataacggtatcctcaaccagatggggatgaccgccgatcagtacgcccaggcgctgcgtaaccagctcactacccaacagctgattaacggtgttgccggtaccgattttatgctgaaaggtgaaaccgacgagctggcggcactggtcgcgcaacaacgcgtggtgcgtgaggcgactatcgatgttaacgcgctggcggcgaagcagcctgtgaccgaacaggagattgccagctactacgaacaaaacaaaaacaatttcatgacgccggaacaattccgcgtgagttacatcaagctggatgccgcaacgatgcagcaaccggttagcgatgcggatatccagagctactacgatcagcatcaggatcaattcacccagccgcagcgtacccgctacagcatcatccagaccaaaactgaagatgaagcgaaagcggtacttgatgagctgaataaaggcggtgattttgctgcattagccaaagaaaaatctgccgatattatctctgcccgtaacggcggcgatatgggttggttagaagatgccactatccccgacgaactgaaaaatgctggtctaaaagaaaaaggccaactgtctggtgtcatcaaatcttcggtcggtttcctgattgtacgtctggacgacattcatccagcgaaagtgaaatcgttagacgaagtacgtgacgacattgcggcgaaagtgaaacacgaaaaagccctcgatgcgtactatgcgctgcagcagaaagtgagcgatgcggcaagcaacgacaccgagtctctggccggtgcagagcaagctgccggcgttaaagccactcagacgggttggttcagcaaagataacctgccggaagagttgaacttcaagccggttgccgacgctatctttaacggcggtctggtaggtgaaaacggcgcgccgggcatcaactctgacatcatcaccgtagacggcgaccgtgcattcgtgctgcgcatcagcgagcacaaaccggaagcggtgaaaccgttggcagatgttcaggaacaagttaaggcactggttcagcacaacaaagctgaacaacaggcgaaagtggatgctgagaaactgctggttgatttgaaagccggcaaaggtgcggaagctatgcaggctgccggtctgaaatttggcgagccgaaaaccttaagccgttccggtcgtgacccgattagccaggcggcgtttgcactgccactgccagcgaaagacaaaccgagctacggtatggcgaccgatatgcaaggtaatgtggttctgctggcgctggatgaagtgaaacaaggttcaatgccggaagatcagaaaaaagcgatggtgcagggtatcacccagaacaacgcacaaatcgtctttgaagctctgatgagtaacctgcgtaaagaggcgaaaatcaaaattggcgatgcgctggaacagcaataa

SEQ ID NO: 458014 - DNA, 372 bp, Shigella boydii
atgaaacacggaattaaagcactgctcattaccctgtccctggcctgtgccggaatgtctcatagcgcgctggcggcagcttctgtggcgaaaccgacggcggtagaaaccaaagcggaagctcctgcagcacaaagtaaagcagcagtaccggcgaaagccagtgacgaagaaggcacccgggtcagcattaataatgccagcgcggaagagctagcccgcgcgatgaatggcgttggcctgaagaaagcgcaggcgattgtcagttatcgcgaagagtacggtccgtttaaaacagtggaggatttaaagcaggtgccggggatgggcaattcgctggtggaacgtaatctggcggtattaaccctgtaa

SEQ ID NO: 458015 - DNA, 399 bp, Shigella boydii
atgcaaacacaaatcaaagttcgtggatatcatctcgacgtttaccagcacgtcaacaacgcccgctaccttgaatttctcgaagaagcccgctgggatgggttggaaaatagcgacagttttcagtggatgacggcccataacatcgccttcgtcgtggtcaatatcaatattaactatcgtcgcccagcggtattaagtgacctgttaactattaccagtcagttgcagcaattaaacggtaaaagcggcatcttaagccaggtcattacactggagccggaagggcaggtggtagcggatgcgcttattacgtttgtttgtattgatcttaaaacgcagaaagcattagctctggaaggggaattgcgcgaaaagctggagcagatggttaagtaa

SEQ ID NO: 458016 - DNA, 696 bp, Shigella boydii
atgaaacgtgctgtcgttgtgttcagtggaggccaggattccaccacctgtctggtgcaggcattacaacaatatgatgaagtccattgcgtgacgttcgattacggtcagcgacatcgcgcagaaatcgacgtggcacgcgaactggcgctgaaactgggagcacgcgcgcataaggttcttgatgtaacgctgctcaacgagctggcggtcagcagcctgacacgtgacagcattccggtgcctgattatgaacctgaagccgatggcatcccgaatacgtttgtcccagggcgtaatattttgttcctgacgctggcggcaatatatgcgtatcaggtaaaagcagaagccgtaattaccggcgtctgtgaaacggatttctccggctacccggattgccgcgatgagtttgtgaaagcactaaaccatgccgtcagtttgggcatggcgaaagatattcgttttgaaacgccgctgatgtggattgataaagcggaaacctgggcgctggcagattattacggcaaactggatttagtccgtaacgaaacgttgacctgctataacggcattaaaggcgacggttgcggtcattgtgcggcatgtaatttacgcgccaacggtttgaatcattatctggccgataaaccgacggtgatggcagcgatgaagcagaaaaccgggttgaggtaa

SEQ ID NO: 458017 - DNA, 1701 bp, Shigella boydii
atgcgattgctcaaccgtcttaaccagtatcaacgtctgtggcaaccttcagccggaaagccgcaaaccgtcaccgtcagcgaactggccgaacgctgtttttgcagcgaacgccatgttcgtacgctgttgcgtcaggcacaggaggcgggatggctggagtggcaggcgcagtcaggacgcggaaagcgcggacaattacgctttctggtcacgccggaatcgctacgcaatgcgatgatggaacaggcactggaaaccggaaagcagcaagatgtgctggagctggcgcaactggccccaggtgagctacgcactctgttacagccgtttatgggcggacaatggcaaaacgatacacccacgttgcgtattccctactatcgcccgctcgaaccgctacaaccaggctttttgcccggccgtgccgagcagcatctcgccgggcagatattttccggcctgacccgcttcgataataatactcagcgcccgattggcgatttagcgcatcactgggaaacctctactgacgggttacgctgggacttttatcttcgttcaaccctacactggcataacggcgatgcagtaaaagcctcacacttacaccagcgattattgatgctgttacaactgccagcactggatcaattatttattagcgtgaagcgtattgaagtcacccatccgcagtgtctgaccttctttttacatcgccccgattactggcttgcgcaccggctggcgagctattgcagccatctggcgcatccgcaattcccactgatcggcactggtccttttcgcttaacacaattcacagcggagctggtgcgcctggagagccatgattattaccatttgcgtcatccgctgcttaaagcggttgagtactggataactccgccgcttttcgaaaaagatttgggaaccagttgtcggcatcccgtgcaaatcaccatcggcaaaccggaggagctgcaacgggtcagccaggtcagtagtggcatcagtttaggtttttgctatttaacgttgcgcaaaagtccccgactctccctctggcaggcgcgaaaagtgatctccattattcatcaatccggtttattacaaacgttagaagtcggagaaaacctgatcaccgccagtcatgcattactgccaggctggactattccgcactggcaagtaccggatgaagtcaaactaccgaaaaccttgacgctggtttatcacctaccgatagaacttcataccatggcagaacgcctacaggcgacactggcagcggaaggctgtgaactcacaattatttttcataacgcaaaaaactgggacgacacgaccctactggcacacgcagacctcatgatgggcgacagattaattggcgaagcaccggaatatactctggagcaatggctacgttgcgatccactatggccacatgttttcgacgctccagcatatgcacatctgcaatcgacgctggacgcggtgcaagtaatgcctgatgaggaaaaccgatttaatgccctgaaagcggtttttagccagttaatggcagacgcgacgctgacgccgctgttcaactatcactatcgcattagtgcccctcccggcgtgaacggtgtgcgactgacaccgcgcggctggtttgaatttaccgaagcctggcttcccgcgccgtcgcaatga

SEQ ID NO: 458018 - DNA, 819 bp, Shigella boydii
atggctcgtctggcagcatttgatatggatggcactttattgatgcctgaccatcatttaggtgagaaaaccctctctactttggcgcgactgcgtgaacgcgacattaccctcacttttgccacggggcgtcatgcgctggagatgcagcatattctcggggcactatcgctggatgcatatttgattaccggcaacggaacgcgcgtgcattctctggaaggtgaacttttacatcgtgatgatttacctgcggatgtcgcggagctggtgctgtatcagcaatgggatacccgagccagcatgcatatcttcaatgacgacggttggtttaccgggaaagagatccctgcgttgttgcaggcatttgtctatagcggttttcgttatcagataatcgatgtcaaaaaaatgccactcggcagcgtcaccaagatctgcttctgtggcgatcacgacgatcttacacgcttgcagatccagctatacgaagcattaggcgagcgtgcacatttgtgtttttccgccacggattgcctcgaagtactgccggtgggctgcaataaaggcgctgcattgacggtgctgacccaacatttaggtttatcgttgcgcgattgcatggcctttggtgatgcgatgaacgatcgcgaaatgttaggcagcgtcggtagcgggtttattatgggcaatgcgatgccgcaactgcgcgcggagctcccgcatttaccggtgattggacattgccgaaatcaggctgtctctcactatttgacgcactggctggactatccacatctaccttattcccccgaataa

SEQ ID NO: 458019 - DNA, 459 bp, Shigella boydii
atgttagataaaattgaccgtaagctgctggccttactgcagcaggattgcaccctctctttgcaggcactggctgaagccgttaatctgacaaccaccccttgctggaagcgcctgaaacggctggaggacgacggtatccttatcggcaaagtcgccctgctggatccggaaaaaataggcctcggcctgaccgcctttgtgctgataaaaacgcaacatcacagcagcgaatggtattgccgctttgtcacggtggttaccgaaatgccagaagtgctggggttctggcgcatggctggtgaatacgattatctgatgcgcgtccaggttgccgacatgaaacgctacgacgagttttataagcgtctggtaaacagcgtgccggggctgtcggacgtcacttccagcttcgcgatggaacagattaaatacaccacttctttacccatcgaataa

SEQ ID NO: 458020 - DNA, 1662 bp, Shigella boydii
gtgcgattatttgctcaattaagctggtatttccgtcgggaatggcgtcgctatctcggggctgtcgccttgcttgtcattatcgcgatgctgcaactggttccgccaaaagtggttggtattgttgtcgatggcgtgacagaacaacactttactaccgggcagatcctgatgtggatcgccaccatggtgctgattgccgttgtggtttatttcctgcgttacgtctggcgggtattgctgtttggtgcgtcttatcaactggctgttgaactgcgtgaagattattaccgtcagctaagccggcagcatcctgagttttacctgcgtcatcgcacgggtgacctcatggctcgtgcgaccaatgacgtcgatcgcgtcgtgtttgcagccggagaaggggtgctgacgctggtggattcactggtgatgggctgcgctgtgttgattatgatgtctacgcaaattagctggcagttgaccttatttgccctgttgccgatgccagtgatggcgatcatgatcaagcgcaacggcgatgccttgcatgaacgctttaagctggcacaggcggcgttttctagtcttaatgaccgcacccaggaaagcctcaccagtatccgcatgatcaaagcctttggtctggaagatcgccagtcggcgttatttgccgcggatgccgaagataccggcaaaaaaaacatgcgggtggcgcgtattgatgctcgtttcgacccgaccatctatatcgcgattggtatggcgaacttgctggcgattggcggcggtagttggatggtggtgcagggcagtttaacgctgggccagctcaccagttttatgatgtatttaggtctgatgatttggccaatgctggcgctggcatggatgtttaacattgtggaacgtggtagtgctgcatacagccgtattcgcgcgatgctggcggaagcgccggtggtgaacgatggtagcgaacccgtgccggaagggcgtggcgaactggatgtaaatattcaccagttcacgtatccgcagactgaccatcctgcgctggaaaacgtcaatttcgccctgaaacccggtcagatgctgggtatctgcgggccgactggttccggcaaaagtaccctgttgtcgctcattcagcgtcatttcgacgtcagcgagggggatattcgctttcatgatattcctctgacgaagttacaactcgatagctggcgtagccgcctggcggtagttagccagacaccgttccttttttccgacaccgtagcgaacaacatcgcgttgggttgcccgaatgccacccagcaagagattgagcatgtcgcgcggttagccagcgtacatgacgatattttgcgtctaccgcaaggttacgatacagaagtgggcgagcgcggcgtgatgctttccggtgggcaaaaacagcgtatctccattgctcgagcgttattagtcaacgcggaaatcctcatccttgatgatgcgctttcggcggtggacggacgcacagagcaccagatcctgcataacctgcgtcagtggggacagggaagaacggtaatcatcagtgcccatcgcctttcggcactgacggaagccagtgaaaatgtaatgaacgcatcccacacaattaaacacggagcagtatga

SEQ ID NO: 458021 - DNA, 1119 bp, Shigella boydii
atgtcaccgaggccacaaaaaaacagcactgacgtagccggtctttacgaaaagtttgatcgcagaactggcagagtttactaccagtataaaaatcctgtgactggaaaatttcacggactcggaacagacaaaggtaaggcagaaaaaatcgcttccacagccaatcagcgaatagctgcagcagaagctgaatatttcatgcgcaaaattgatgaaagtccgtcagcaacaaaacgtcggggtatcagattaaaggcatgggttgatcgatatctgaaaatacaggacacgcgactgaaaaatggagatattgcagctacaactcacaaagaaaaaactcgaatggctgcatacctagtttcccgtctgggaaaccacccattgaaagaactggaagtaagagactttgcattaatactggatgagtggctggataaagacatggtcagcacagcgagagtaaatcgtggattatgggttgatatttataaagaagcacagcatgcaggggaagttcctcctggatggaatcctccggaggctacccgtaaaccgatccctaaagtaaccagagccaggctcaccatggaagactggcaaaaaatttacaatgcaacgcctgaaaaacactttatccgtaacgcaatgcttcttgcgattgttactggtcagcgccgtgatgacatttgccacatgcgtttttcagatgtgtggaacgaacacttgcatatcacccagggaaaaaccggaatgcgtctggcgttaccgcttacactacgctgtgatgccattgggataacgttaaaagaagttattgatgggtgccgagacagaatattaagtccatatctaatccatagtcggcaccagaaacaaccgaagccgatgagtaaagacaacctgagcgactactttgccaaagcacgggatctggctgggataattccaccagcaggaaaaactccgccaacatttcatgaacaacgctctctatcagaacggctgtaccgtgcacagggtatcgatacaaaaacattactaggacataaagtccaggcaaccaccgatcgctataacgatactcgaggtcaggaatgggttaagctggttatttga

SEQ ID NO: 458022 - DNA, 795 bp, Shigella boydii
atgatcggtcgactgcttcgcggcggttttatgaccgctatctacgcgtacctgtatatcccaatcattattttgattgtgaactcctttaacagctcgcgctttggcatcaactggcagggttttaccaccaaatggtatagcctgctgatgaacaacgacagcctgttacaggcagcgcagcattcactaacaatggcggtgttttcggcgacgtttgctacgcttatcggttcactgacggcagttgcgctgtaccgttatcgctttcgcggtaagccgttcgttagcggaatgctgtttgtggtaatgatgtcaccagatatcgtgatggcaatttcgctgctggtgctgtttatgctgctgggtattcagcttggcttctggtcgctgctgttctcgcatatcaccttctgcctgccatttgtggtggtgacggtgtattcgcgcctgaaaggttttgacgtgcggatgctggaagcggcgaaagatctcggtgccagcgaatttaccattctgcgaaaaatcatactgccactggcaatgccagcggtggcagcgggctgggtgttaagctttaccctgtcgatggacgatgtggtagtttcttcgttcgtcaccggaccaagttatgaaattctgccgttaaaaatttattcgatggtcaaagtcggcgtatcgccggaagttaacgcgctggcaaccatattactggtgctgtcgctggtgatggttattgccagtcagcttattgctcgtgataaaacgaaaggtaacacaggggacgttaaatga

SEQ ID NO: 458023 - DNA, 1047 bp, Shigella boydii
atgaaaaaatggtcacgccacctgctcgcggcgggtgctctggcactgggcatgagcgccgctcacgccgatgacaacaacacgctgtatttctacaactggaccgagtacgtgccgccaggactgcttgaacagttcaccaaagaaaccggtattaaggttatctattcgacttacgagtcgaacgaaaccatgtacgccaagctgaaaacgtacaaagacggtgcgtatgacctggtggttccttcaacctattacgtcgataaaatgcgtaaagaagggatgatccagaagatcgacaagtcgaagttaacgaacttcagcaatctcgatccagacatgctcaacaagccttttgacccgaataacgactactccattccgtatatctggggggcgacggcgattggtgttaacggtgatgcggtggatccgaaatctgtcaccagctgggcctatctgtggaagccagagtacaaaggcagcctgctgttgaccgacgatgcccgtgaagtgttccagatggcgctgcgtaagctgggctattccggtaacaccaccgatccgaaagagattgaagctgcatataacgagctgaaaaaactgatgccaaacgtcgcagcgtttaactccgataacccggctaacccgtacatggaaggcgaagttaacctcggcatgatctggaacggttctgctttcgttgcacgccaggcgggtacgcctattgacgtggtgtggccgaaagaaggcggcatattctggatggacagcctggcgatcccggcaaatgccaaaaacaaagaaggcgcgctgaaattgatcaacttcctgctgcgcccggatgtggcaaaacaggttgctgaaactatcggttatccaacgccaaaccttgcggcgcgtaagctgttaagtccagaagtggcgaacgataaaacgctctacccggatgctgaaaccattaaaaatggcgaatggcagaatgacgttggcgcagccagcagcatttatgaagagtattatcagaagctgaaagcaggacgttaa

SEQ ID NO: 458024 - DNA, 822 bp, Shigella boydii
atgctgtcgcgtcgggatcatcggttaagtcgttttcgtaaaaataaacgccgcctgcgcgagcgtttgcgtcagcgtatttttttcagagataaagtggtgccggaagcaatggaaaaaccaagagtactcgtactgacaggggcaggaatttctgcggaatcaggtattcgtacctttcgcgccgcagatggcctgtgggaagaacatcgggttgaagatgtggcaacgccggaaggtttcgatcgcgatcctgaactggtgcaagcgttttataacgcccgtcgtcgacagctgcagcagccaaaaattcagcctaacgccgcgcatcttgcgctggctaaactgcaagacgctctcggcgatcgctttttgctggtaacgcagaatatagacaacctgcatgaacgcgcaggtaataccaatgtcattcatatgcatggggaattgctgaaagttcgttgttcgcaaagtggtcaggttctcgactggaccggagacgttacgccagaagataaatgccattgttgccagttcccggcacccttgcgcccgcacgtcgtttggtttggcgaaatgccactcggcatggatgaaatttatatggcgttgtcgatggctgatattttcattgccattggtacttccgggcatgtttatccggcggctgggtttgttcacgaagcgaaactgcatggcgcgcacaccgtggaactgaatctcgaaccaagtcaggtcggtaatgaatttgccgagaaatattacggcccggcaagccaggtggtgcctgagtttgttgaaaagttgctgaagggattataa

SEQ ID NO: 458025 - DNA, 537 bp, Shigella boydii
atggggttgattcttggtaccggcgttggcggtgggctgattttcaacggcaaaccgattaccggtaaaagctacattaccggcgagtttggccatatgcgtctgccggttgatgcgttaaccatgatggggttggatttcccgttacgccgctgcggctgtggtcagcatggctgcattgagaattatctgtctggtcgcggttttgcgtggctgtatcaacactattatcatcaacagttgcaggctcccgaaattattgcgctttataatcaaggcgatgagcaggcaagggcgcacgttgagcgttatctggatttattagcggtttgtctgggaaatatcctgaccattgttgaccctgacctggtcgtcattggtggtggcttatcgaatttcccggcaatcacaacgcaactggcggacaggctgcctcgtcatctcttacctgtagctcgtgttccgcgcattgaacgcgcgcgccacggtgatgcgggaggaatgcgtggtgcggccttcctacatctaaccgattaa

SEQ ID NO: 458026 - DNA, 345 bp, Shigella boydii
atgtattacgggtttgatattggtggaacaaaaattgcgcttggcgtgtttgatagcggtcggcagttgcagtgggaaaagcgggtgccgacaccgcgtgacagctatgacgcatttttagatgcagtgtgcgagctggtagccgaagctgatcaacgttttggctgtagaggttctgtcggcattggtataccgggaatgccggaaacagaagatggtacgctgtatgccgccaatgtccccgctgccagcggtaaaccgctgcgtgccgacctgagcgcacgtcttgatcgcgatgtacgccttgataacgatgccaactgttttgccctttcagaagcctga

SEQ ID NO: 458027 - DNA, 1239 bp, Shigella boydii
atgcctttatcgttattaattggcctgcgttttagtcgcggacggcggcgcggtggcatggtgtcgctgatctccgtcatttctaccattggcattgccctcggtgtggcggtattgatcgtcggcttaagcgcgatgaacggctttgaacgcgaactgaataaccgcattctggcggtgttgccgcatggtgaaatcgaagcggtaaatcagccatggactaactggcaggaagcactggataaagtgcagaaagtgccgggtattgccgccgctgcgccgtatatcaatttcaccgggctggtggaaagtggagcgaatctgcgcgcaatccaggtgaagggcgttaacccacaacaggaacagcgtctgagcgcattaccctcgtttgttcagggggatgcgtggcgcaattttaaagcgggcgaacagcaaattatcatcggcaaaggcgtggcggatgcgctgaaagtgaagcagggcgattgggtgtcgatcatgatccccaactcgaatcctgagcataaactgatgcagccaaaacgtgtgcgtttgcacgttgcgggtattttgcagttgagtggccaactcgatcacagttttgccatgatcccgctggcggatgcccaacaatatcttgatatgggttccagcgtgtcaggtattgcccttaaaatgacggatgttttcaacgccaataagctggtacgcgatgcgggtgaaatgaccaacagctatgtttatattaaaagctggattggtacttacggctatatgtatcgcgatatccagatgatccgcgccattatgtatctggcgatggtactggtgattggcgtggcctgtttcaacatcgtctccaccttagtgatggcggtgaaagacaagagtggcgatatcgcagtattaagaacgctgggggcgaaagatggtttaattcgcgccatctttgtctggtatggattgctggcagggctgttcggcagcctgtgtgggctgattatcggcgtagttgtttcactgcaacttaccccgattattgagcggattgaaaagctgatcggtcatcagttcctctccagcgatatctattttattgacttcctgccatcggaattgcactggctggacgtcttctacgtactggtcacagcattgttgctgagtcttttggcaagttggtatccggcgcggcgcgccagtaatattgaccctgcgcgagtccttagcggccagtaa

SEQ ID NO: 458028 - DNA, 702 bp, Shigella boydii
atgaataagatcctgttgcaatgcgacaacctgtgcaaacgctatcaggaaggcagtgtgcaaaccgatgtactgcacaatgtcagtttcagcgtcggcgaaggtgaaatgatggcgatcgtcggtagctctggttccggtaaaagcaccttgctgcacctgctgggcggactggatacgccaacctccggcgatgtgatctttaacggtcaaccgatgagcaaactgtcgtcggcagcaaaagcagaactgcgcaaccagaaactgggctttatttatcagtttcaccacctgctgccggattttaccgccctggaaaacgtggctatgccgctgctgattggcaagaaaaagcccgctgaaatcaacagccgtgcactggagatgttaaaagcggtggggctggagcatcgtgcgaatcaccgcccatctgaactttctggcggcgaacgccagcgtgtagcgattgcccgtgcgctggtcaataatccgcgtctggtactggcggatgagcctaccggtaacctcgatgcgcgtaacgccgacagcatcttccagttgcttggggaattgaatcgcttgcagggcaccgccttcctggtggttactcacgacctgcaactggcgaaacgtatgagccgccagttagaaatgcgtgatggacgtctgacggcggaactgagcctgatgggggcggagtaa

SEQ ID NO: 458029 - DNA, 1200 bp, Shigella boydii
atgtaccaacctgtcgctttatttattggcctgcgttacatgcgtgggcgtgcagcggatcgcttcggtcgtttcgtctcctggctttctaccatcggcattaccctcggggtgatggcgctggtcacagtattgtcagtgatgaacggctttgagcgcgagctgcaaaacaacatccttggcctgatgccacaggcaattctctcttctgagcatggctctcttaacccgcagcaactcccggaaacggcagtcaaactggacggcgttaatcgcgtcgcacctattactaccggtgatgtggtactgcaaagcgcgcgcagcgtggcggtcggggtgatgctgggtatcgatccggcgcaaaaagatccactaacgccgtatctggtcaatgtgaaacaaactgacctcgagccggggaaatataatgtcatcctcggcgaacaacttgcctcacagctaggcgttaatcgcggtgatcaaatccgcatgatggtaccatctgccagccagttcacgccgatggggcgtattccaagtcagcgcctgttcaatgtgattggcactttcgccgccaacagtgaagtcgatggcaatgaaatgctggtgaatattgaggatgcctcgcgtctgatgcgttatccggcaggcaatattaccggctggcgtttgtggctggatgagccgctgaaagtcgactcattaagtcagcaaaaactgcctgaagacagcaaatggcaggattggcgtgatcgtaaaggcgagttgttccaggccgtacgcatggaaaaaaatatgatgggtttactgctgagcctgattgtcgccgttgcggcgtttaacattattacctcgctggggctgatggtgatggagaagcagggcgaagtagcgatcctgcaaacgcaaggcttaactccgcgacaaatcatgatgatctttatggtgcaaggggccagcgccgggattatcggtgcgatcctcggagcggcgcttggcgcactgcttgccagccagttaaataatctgatgccaataatcggcgtcctgcttgatggcgcggcgctgccgatggctatcgaacctttacaggtcattgttattgcgctggtggcgatggctatcgcgctgctgtctacgctttacccttcatggcgcgctgccgccacacaacccgctgaggctttacgttatgaataa

SEQ ID NO: 458030 - DNA, 1074 bp, Shigella boydii
atgaaacaaaaagagctatggattaaccagatcaaagggttatgtatttgtccggtggtgatttatcactcggtcattaccttttatccgcatatgaccacttttcagcatccgttatcggaagtcctgagcaaatgctggatctatttcaatctttaccttgcaccctttcgtatgccggtttttttctttatatccggctatttgattcgccgctatatcgacagcgtaccgtggggaaattgtctcgataaacggatctggaacatcttctgggtgctggcgctttggggcgtggtgcagtggctggcgttaagtgcgctgaaccagtggctggcacctgagcgcgatttaagcaatgcctccaatgccgcttatgccgattccaccggtgagttcctgcacgggatgatcaccgccagcaccagcttgtggtatctgtatgcgttaattgtctatttcgtggtatgtaaaatttttagccgtctggcgctgccactattcgccttgtttgtactgctgagtgtggcggttaatttcgttcccacgccgtggtggggaatgaacagtgtgatccgcaatttgccttattacagccttggcgcatggtttggcgcaacaataatgacctgtgttaaagaggtaccgttgcgccgccatctgctgatggcttctttgcttaccgttctggcggtcggtgcctggttgtttactatctcgctgctgttgtcgctggtatcgattgtggtgatcatgaagctgttttatcagtacgagcaacgattcggtatgcgctccaccagcctgctgaatgtgattggctccaacaccattgctatctacaccacccatcgcattctggttgaaatattcagcttaactctgcttgcgcaaatgaacgcagcacgctggtcgccgcaagtcgaactgacactcctgctggtttatccctttgtcagtttgttcatctgtactgttgcgggcttgctggtaagaaaactttcacagcgtgcattcagcgatctgttgttctccccgccttcactgcccgctgccgtcagttactcccgctaa

SEQ ID NO: 458031 - DNA, 3495 bp, Shigella boydii
atgcccccatatgttgaggcatatcctaacgagaatctgacaaccgttatgcctgaacaatatcgttatacgctgcccgtcaaagcgggtgagcagcgtctgctgggcgagttaaccggcgcagcctgtgcaacgctggtagcggaaattgccgaacgtcacgccggtccggtggtactcattgcaccagatatgcaaaatgctctgcgtttgcatgatgaaatcagtcagttcaccgatcagatggtgatgaatctggcggactgggaaactcttccctacgacagcttttcgcctcatcaggacattatctcctcgcgcctttccaccctttaccagctaccgacgatgcagcgtggcgtactgattgttccggtgaatacgcttatgcagcgcgtttgcccacacagttttctccacggtcatgcgctggtgatgaaaaaaggtcagcgcctgtcacgagatgcattacgaacccaactggacagcgccggttatcgctatgttgaccaggtgatggagcacggcgaatacgccacgcgcggcgcgttgctggatctcttcccgatggggagtgagctgccttatcgtcttgatttctttgatgatgaaatcgacagcctgcgggtgtttgacgtcgacagccagcgcacgctggaggaagtagaagcgatcaatctgctgcccgcgcacgaatttccgaccgataaagcggcaattgaactgttccgcagccagtggcgcgataccttcgaagtgaagcgcgatccggaacatatttaccagcaagtgagtaaaggcacattacctgccgggatcgagtactggcagccattgttcttcagcgaaccactgccgccgctgttcagttatttccctgccaataccttgctcgtgaatactggcgatctggaaaccagtgccgaacgtttccaggctgacacgctggcgcgttttgagaatcgcggcgtcgatccgatgcgcccgctgttgccaccacaatcgctctggctgcgggtggacgagctcttctcagagctgaaaaactggccccgggtgcagctaaaaactaaacatttaccgacaaaagccgcgaatgccaatttaggtttccagaaactgccagacctggccgttcaggcgcaacaaaaagcgccgctggatgcgctgcgtaagttcctcgagactttcgacggtccggtggtgttctcggtagaaagtgaaggtcgccgtgaagcgctgggtgaactgctcgcacgaattaaaattgctccgcaacgcattatgcgtcttgatgaagccagcgaccgtgggcgttatctgatgattggcgctgccgaacatggttttgtcgataaggtgcgtaatctggcgctgatctgcgaaagcgatctgctcggtgaacgtgttgcccgccgtcgtcaggattctcgccgcaccatcaaccccgatacactgatccgtaaccttgcggagctgcatattggtcagccggtggtccatctggagcacggtgtcgggcgctatgccggaatgaccacgctcgaagcgggcggcattactggcgagtatttgatgctcacctatgccaacgacgccaaactgtatgttccggtgtcgtcactgcatctgattagccgttacgcaggtggcgcggaagaaaacgccccgctgcataaacttggcggcgatgcgtggtcacgcgcgcggcagaaagcggcggaaaaagtgcgtgatgtggcggcggaattgctggatatctacgcgcaacgcgccgccaaagagggcttcgcgtttaaacacgatcgtgagcagtatcagttgttctgcgacagcttcccgtttgaaaccacgccggatcaggcgcaggccattaatgcggtacttagcgacatgtgtcagccgctggcaatggatcgtctggtgtgcggcgatgttggctttggtaaaacagaagtggcgatgcgcgccgctttcctggcagtagataaccacaagcaggtggcggtgttggtgcctaccacccttctcgcgcagcagcattacgacaacttccgcgaccgtttcgccaactggccggtacgtatcgaaatgatctcccgtttccgcagcgccaaagagcagacgcaaatccttgcggaagtggcggaagggaaaatcgatattctgatcggtacgcacaaactgctgcaaagtgacgtcaagtttaaagatttaggcctgctgattgtcgatgaagaacaccgcttcggggtgcgtcataaagagcgcattaaagcgatgcgcgcgaacgtggatattctgacgcttactgcaacgccgatcccacgcacgctgaatatggcaatgagcggaatgcgtgacctgtcgattatcgccacgccgcccgcccgtcgtctggcagttaaaacctttgtccgtgagtatgacagcctggtggtccgggaggcgatcctgcgtgaaattttgcgcggggggcaggtttattatctctacaatgatgtggaaaacatccagaaagctgccgaacggctggcagaactggtgccagaagcgcggatcgccatcggtcacgggcagatgcgcgagcgcgaactggaacgggtgatgaatgatttccatcatcaacgtttcaacgtgctggtttgtacaaccattatcgaaaccgggatcgacatcccgacagccaacaccattatcattgaacgcgcggatcacttcggtctggcgcagctgcaccagttacgcggtcgcgtcggacgttcacatcatcaggcatatgcatggctgctgacgccgcatccaaaagcgatgactaccgatgcacaaaaacgtcttgaagcgattgcctcgctggaagatctcggtgcaggctttgcgctggcaacgcacgatctggagatccgcggcgcgggtgaactgcttggcgaagaacaaagtggctcaatggaaaccatcggtttctcgctgtatatggagttgctggaaaacgccgtcgatgcactgaaagccggacgcgagccgtcgctggaagatctcaccagccagcaaacagaagtcgagctgcggatgccgtcgctattgccagatgatttcattcctgacgtgaatacgcgtttgtcgttctataaacgtattgccagcgccaaaacggaaaacgaactggaagagatcaaagtcgagcttatcgatcgcttcggcctgctgccggatccggcgcgtaccctgctggatgttgcccgtctgcgccagcaagcgcagaaactggggatcaggaagctggaaggtaatgagaaaggcggggtgatcgaatttgccgagaagaatcacgttaatccggcctggttgattggtttgctgcaaaaacagccgcagcattaccgccttgatggtccgacgcgcctgaaatttattcaggatttgagtgagcggaaaacgcgtatcgaatgggtacgccagtttatgcgtgaactggaagagaacgcgatcgcttaa

SEQ ID NO: 458032 - DNA, 960 bp, Shigella boydii
atgatcaaaacgcgtttttctcgctggctaacgttttttacgttcgccgctgccgtggcgctggcgctaccggcaaaagccaacacctggccgctgccgccagcgggcagtcgtctggttggcgaaaacaaatttcatgtggtggaaaatgacggtggttctctggaagccatcgccaaaaaatataacgtcggctttctcgctctgttacaggctaaccccggcgttgatccttacgtaccgcgcgcgggcagcgtgttaacgatcccgttgcaaaccctacttccagacgcgccgcgcgaaggcattgtgatcaacattgcggagctgcgtctctattactacccgacgggtaaaaattcggtaaccgtgtatccaataggtattggtcagttaggtggtgacacgctgacaccgacaatggtgaccaccgtttcagacaaacgtgcaaacccaacctggacgccaacggcaaacacccgcgcccgttataaagcacagggaattgagttgcctgcggtagtgccggctggaccggataacccaatgggccatcatgcgattcgtctggcggcctatggcggcgtttatttgcttcatggtacgaacgccgatttcggcattggcatgcgggtaagttctggctgtattcgtctgcgggatgacgatatcaaaacactctttagccaggtcaccccaggcaccaaagtgaatatcatcaacactccgataaaagtctctgccgaaccaaacggtgcgcgtctggttgaagtacatcagccgctgtcagagaagattgatgacgatccgcagctgctgccaattacgctgaatagcgcaatgcaatcatttaaagatgcagcacaaactgacgctgaagtgatgcaacatgtgatggatgtccgttccgggatgccggtggatgtccgccgtcatcaagtgagcccacaaactctgtaa

SEQ ID NO: 458033 - DNA, 246 bp, Shigella boydii
atgaaaaacgtaaaaaccctcatcgctgcggcgattttaagctccatgtcatttgccagctttgcggctgtcgaagttcagtcaacgccagaaggccaacaaaaagtcggtacaatcagtgctaaagcggggacaaatctgggatcgctggaagagcagctggcgcaaaaagcggatgagatgggcgcaaaatctttccgtattacttctgtaaccggtccgaataccctccatggaaagcagtaa

SEQ ID NO: 458034 - DNA, 696 bp, Shigella boydii
gtgaacggaggtgattatttttataataacctttcattcacagtcaccaggtacaacggcatcatggcaactgactcaacacaatgtgtaaaaaaaagccgtggccgcccaaaagtgttcgacagggatgccgcgcttgataaggccatgaaattgttctggcaacacggttatgaagcgacttctcttgcggacctcgtcgaagcgaccggagccaaagcgcccacgctatacgcggaatttaccaacaaagaggggttatttcgtgccgttctcgaccgctatatcgatcgttttgccgctaagcatgaagcacagctgttttgtgaagagaaaagcgtggagtctgcgctggctgactattttgctgccatcgccaactgctttaccagcaaagacaccccggcaggctgcttcatgatcaacaactgcaccaccctctccccagattcaggagatatcgccaatacgttgaaatcacgccatgcgatgcaagagcgcactttgcagcagtttttatgtcaacgacaagcgcgcggggaaatcccgacccactgtgacgtgacacatctggcagaattccttaattgtattattcaggggatgtcgatcagcgcacgcgaaggtgcatcgctggaaaaactaatgcagattgccggaacgactttgcgtttatggcccgaactggtgaaataa

SEQ ID NO: 458035 - DNA, 540 bp, Shigella boydii
gtgaataaatcaatgttggcgggtatcgggattggtgtcgcagctgcgctgggcgtagcggcagtggccagtctgaacgtgtttgaacgtggcccgcaatacgctcaggttgtttctgcaaccccaatcaaggaaacggttaaaacaccgcgtcaggagtgtcgcaacgtcacagtgacccatcgtcgaccggtgcaggatgaaaatcgcattaccgggtcggtgctcggcgctgttgctggcggcgtgatagggcatcagtttggcggtggtcgcggtaaagatgtcgccactgttgtgggggcgctgggtggtggatatgccggtaaccagatccagggctctctccaggaaagcgatacttacacgactacgcaacagcgttgtaaaacggtgtatgacaagtcagaaaaaatgctcggttatgatgtgacctataagattggcgatcagcagggcaaaatccgcatggaccgcgatccgggtacgcagatcccgctagatagtaatgggcaactgattttgaataacaaagtataa

SEQ ID NO: 458036 - DNA, 1305 bp, Shigella boydii
ttgactacgccattgaaaaagattgtgattgtcggcggcggtgctggtgggctggaaatggcaacacagctggggcataagctgggacgtaagaaaaaagccaaaattacgctggtcgatcgtaaccacagccacctgtggaaaccgctgctgcacgaagtggcgactggctcgcttgatgaaggcgtcgatgcgttgagctatctggcccatgcgcgcaatcatggtttccagttccagttgggttccgtcattgatattgatcgtgaagcgaaaacaatcactattgcagaactacgcgacgagaaaggtgaactgctggttccggaacgtaaaatcgcctatgacaccctggtcatggcgctgggtagcacctctaacgatttcaatacgccaggcgtcaaagagaactgcattttcctcgataacccgcaccaggcgcgtcgcttccaccaggagatgctgaatctgttcctgaaatactccgccaacctgggcgcgaatggcaaagtgaacattgcgattgtcggtggcggcgcgacgggtgtagaactctccgctgagttgcataacgcggtcaagcaactgcacagctacggttataaaggtctgaccaacgaagccctgaacgtaacgctagtagaagcgggagaacgtattttgcctgcattaccgccacgcatctctgctgcggcccatagtgagttaacgaaacttggcgttcgcgtgctgacgcaaaccatggtcaccagtgctgatgaaggcggcctgcacactaaagatggtgaatatattgaggctgatctgatggtgtgggcagccgggatcaaagcgccagacttcctgaaagatatcggtggtcttgaaactaaccgtatcaaccagctggtggtggaaccgacgctgcaaaccacccgcgatccagacatttacgctattggcgactgcgcgtcatgcacgcgtccggaagggggctttgttccgccgcgtgctcaggctgcacaccagatggcgacttgcgcaatgaacaatattctggcgcagataaacggtaagccgctgaaaaattatcagtataaagatcatggttcactggtatcgctgtcgaacttctccaccgttggtagcctgatgggtaacttgacgcgcggctcaatgatgattgaaggacgaattgcgcgctttgtatatatctcgctataccgaatgcatcagattgcgctgcatggttactttaaaaccggattaatgatgctggtggggagtattaaccgcgttatccgtccgcgtttgaagttgcattaa

SEQ ID NO: 458037 - DNA, 543 bp, Shigella boydii
atgattatctatttacacggttttgactctaacagtccgggtaaccacgagaaagtcttacaattgcagtttattgacccggatgtacgcttgataagctacagtacgcggcatccgaaacatgatatgcagcatctgcttaaagaagtggacaaaatgttgcaactgaacgtcgacgagcgtccgctgatttgcggcgttggtctgggcggatactgggcggaacggattggttttctttgcgatatccgccaggtgatcttcaaccctaatttgttcccttatgagaacatggaaggcaagattgatcgcccggaagagtatgccgatattgccactaagtgtgtgaccaacttccgcgagaagaatcgcgatcgttgcctggtgattttgtcgcgtaatgatgaagcgcttaacagccagcggacatctgaagagttgcatcattattacgagattgtctgggacgaagagcagacgcacaaattcaagaatatctccccgcatttgcagcgcattaaagcgttcaaaaccctcgggtaa

SEQ ID NO: 458038 - DNA, 1026 bp, Shigella boydii
gtgggtccagtaatgttggatgtcgaaggttacgaactggacgcggaagagcgtgaaatactggcgcatccgctggtgggagggctgattctctttacgcgtaactatcatgatcctgcccagttacgtgaactggtgcgccagatccgcgcagcatcgcgcaatcatctggtggtggcggtagatcaggaaggtggacgcgtgcagcgttttcgcgaaggttttacccgcttaccggcagcacaatcctttgctgcgctgttgggaatggaagagggcggcaaactggcgcaagaggcgggttggctgatggccagcgaaatgatcgctatggatattgatatcagctttgcgccagtgctggatgtaggacatatcagcgcggcgattggcgagcgttcttatcatgccgacccagaaaaagccctggcaatcgccagtcggtttattgatgggatgcatgaagccggaatgaaaacgaccgggaaacacttcccaggacacggtgcagtaactgcagattcacacaaagagacgccgtgcgacccacgcccgcaagcggaaattcgtgccaaagatatgtcggttttcagcacgttaatccgcgaaaataaactcgacgccattatgcctgcgcatgtgatctacagtgatgttgatccgcgtccggcgagcggttcttcctactggctgaaaaccgttttgcgtcaggaactgtgttttgacggtgtaattttctctgacgatttatcgatggaaggtgccgcgattatgggcagttatgccgaacgcgggcaggcatcactggacgcaggttgcgatatgatcctggtctgcaataatcgtaaaggggccgtcagcgtgttagataatctgtcaccgatcaaggcagaacgtgttacacgtttgtatcataaaggttcattttcgcgacaggaactgatggactcggctcgctggaaggcgagcagcacccgtctgaatcagttacatgaacgctggcaggaagagaaagcaggtcactaa

SEQ ID NO: 458039 - DNA, 825 bp, Shigella boydii
gtgccgtttcgcagtaataatcccatcacgcgcgacgaattgctgtcgcgctttttcccgcagtttcatcccgtcacgacgtttaatagtgggcttagtggcggtagttttctcattgaacatcagggccagcgttttgttgtgcgtcagccgcacgatcctgatgcgccgcagtccgcgttcttgcgccagtatcgggctttatcacaactacccgcaagcattgcaccgaagccgcatttatatctccgtgactggatggtagtcgactatctgcccggcgcggtaaaaacgtatttgccggataccaacgaactggcaggcttgctgtattatctacatcaacaaccacgttttggctggcgaataatgctgttgccgttactggaactgtactggcagcaaagcgatccggcgcggcggactgtgggttggctgcgaatgttaaaacgtctgcgcaaagcgcgggaaccacgacctttacgcttaagtccattgcatatggatgtccacgccggaaatttagtgcatagcgcatcagggttaaaactcatcgactgggagtatgccggagatggtgataccgcgctggaactggcggcggtgtgggtggaaaatactgaacagcaccggcaattggtcaatgactatgccactcgcgcgaagatttatccggcgcaattatggcgtcaggtcaggcgatggtttccctggctgctgatgctcaaagcagggtggtttgagtaccgctggcgacaaaccggcgatcaacaatttatcaggctggccgatgacacctggcggcagctattaataaaacaataa

SEQ ID NO: 458040 - DNA, 639 bp, Shigella boydii
atgacaaaaatgagtcgctacgccttgattaccgcgctggcgatgtttctcgccgggtgtgtggggcaacgtgaacctgcaccggtagaagaagtgaaaccagcgccggaacaaccagccgagccacaacagcctgtccccacagtgccctcggtgccgacgatcccgcagcagccaggcccaattgagcacgaagatcgaacggcaccgcctgcgccgcatattcgccattatgactggaatggcgcaatgcagccgatggtcagtaagatgcttggggctgacggggtgactgcgggtagcgtcctgctggttgatagcgttaacaaccgtactaacggttcgctgaatgccgcagaagcgaccgaaacgctgcgaaatgcgctggctaataacgggaaatttaccctggtttccgcccagcaactgtcgatggctaagcaacagttaggtttgtcgccgcaggacagtttaggcacccgtagtaaagccataggcattgcccgcaatgtcggcgctcattacgtgctgtactccagcgcctctggcaacgttaacgctccgaccctacaaatgcagctgatgctggtgcagacgggcgaaattatctggtcaggtaaaggtgccgtttcgcagtaa

SEQ ID NO: 458041 - DNA, 378 bp, Shigella boydii
atgagaaaaggatgctttgggctggtgtctctggtgttgttactgctggtgggctgtcgttcacatccggaaattccggtgaatgatgagcaatcgctggtgatggagtcatctttattggctgcgggcatcagtgcagaaaagcccgtcctttcgacgtctgatattcaaccttcagcatcctcaacgctttataacgaaaggcaaaaacccgttaccgttcattatcgtttttactggtatgacgccagagggctggagatgcatcctctggaaaggccacgcagcgttaccattcccgcacattcggcggtaacgctgtacggcagcgccaattttctgggggcgcacaaagtcagactttatctatatttgtaa

SEQ ID NO: 458042 - DNA, 360 bp, Shigella boydii
gtggcagaagaaactatattcagcaaaattattcgtcgtgagatcccctccgatatcgtctaccaggatgatctggtaacggcgtttcgcgatatttcgccgcaagcgccaacgcatattctgatcattccgaatatcctcattccgactgtgaacgacgtctcagctgagcatgagcaggcgctgggacgcatgatcaccgtagcggcaaaaattgctgagcaagaaggtattgccgaagatggctatcgtctgatcatgaataccaaccgccatggcggacaagaggtttaccacatccatatgcacttgttgggtggccgtccgctgggaccaatgctggcgcataaaggtctgtaa

SEQ ID NO: 458043 - DNA, 2190 bp, Shigella boydii
atgctttcaacacaatttaacagggataatcaatatcaagccatcaccaaaccgtcactacttgccggttgcatagcactggcactattaccttctgccgcttttgctgcaccagccactgaagaaacggtgattgttgagggttcagccacagctccagatgatggcgaaaatgattacagcgtaacgtctacctctgcgggtaccaaaatgcagatgactcaacgtgatattcctcagtcggtcactattattagccagcagcggatggaagatcagcagttacaaacgctgggcgaagtgatggaaaacacgctggggatcagcaaaagtcaggcggattccgatcgtgctctttattattcccgcggattccagatcgataactatatggttgatggtatccccacctattttgaatcgcgctggaatctgggcgatgcactttctgatatggcactgtttgaacgcgtagaagtagtgcgtggcgcgacaggactcatgaccgggacgggtaatccatctgcggcaattgatatggttcgaaaacacgcgaccagtcgtgaatttaaaggcgatgtctcggcggaatacggtagctggaacaaagaacggtatgtggcggatttacaaagcccactcaccgaagacggtaaaatccgcgcgcgaattgtcggcggctaccagaataacgactcatggctggaccgctacaacagtgaaaagaccttcttctccggcattgtcgatgctgatttaggcgatcttacgacgctttcagccggttacgaatatcagcgcattgatgttaatagccctacctggggcggtttaccgcgctggaatactgatggcagcagcaacagttacgatcgtgcacgcagtaccgcacctgactgggcgtacaacgataaagagatcaacaaggtctttatgaccctgaagcagcggtttgctgatacctggcaagcgacactgaatgccacccactctgaagtcgaatttgacagcaaaatgatgtatgtcgatgcctatgtaaacaaagcggatggtatgctggttgggccatacagtaattatggacctggctttgattatgtcggcggcaccggttggaacagtggcaaacgtaaagttgatgcgctggatttgttcgctgacggtagttatgaattgtttggtcgtcagcacaatctaatgtttggtggcagttacagcaaacaaaacaatcgttacttcagttcatgggccaacatcttcccggatgaaattggcagtttctacaactttaatggcaatttcccacaaaccgactggtcaccacagagcctggcacaggacgataccacacatatgaaatcgttatatgctgccactcgagtcacccttgccgatccgctgcatctgatcctcggcgcacgttataccaactggcgggttgatacgctgacttacagcatggagaaaaaccacaccacgccttacgctggtctggtgtttgacatcaatgacaactggtcgacctacgccagctatacctctattttccagccgcaaaatgatcgtgacagttcaggcaaatatctggctccaatcaccggtaacaactacgagctgggtctgaaatcggactggatgaatagccgtctgaccaccacgttagccatcttccgtattgagcaggataatgtcgctcagtccaccggtacacctatccccggcagcaacggcgaaaccgcctataaagcggtggatgggacagtcagtaaaggggtggaatttgaactcaacggcgcaattaccgacaactggcagctgacatttggcgcaacgcgctatattgcagaggataacgaaggaaacgccgttaatcctaatctgccacgcaccacggttaaaatgttcaccagctatcggttgcctgtcatgccagagttgacagtcggcggtggtgttaactggcaaaatcgcgtgtataccgacaccgtgacaccgtatggcaccttccgcgccgagcaaggtagctacgcgctggtggatctcttcacccgctaccaggtgacgaaaaacttctcgttacaggggaacgtcaataacctgttcgacaaaacctacgataccaacatggaaggttctatcgtctacggcgcaccgcgtaatttcagcattaccggcacgtatcaattctga

SEQ ID NO: 458044 - DNA, 1434 bp, Shigella boydii
atgtttaagaatgcatttgctaacctgcaaaaggtcggtaaatcgctgatgctgccggtatccgtactacctatcgcaggtattctgctgggcgtcggttccgcgaatttcagctggctgcccgccgttgtatcgcatgttatggcagaagcaggcggttccgtctttgcaaacatgccactgatttttgcgatcggtgtcgccctcggctttaccaataacgatggcgtatccgcgctggccgcagttgttgcctatggcatcatggttaaaaccatggccgtggttgcgccactggtactgcatttacctgctgaagaaatcgcctctaaacacctggcggatactggcgtactcggagggattatctccggtgcgatcgcagcgtacatgtttaaccgtttctaccgtattaagctgcctgagtatcttggcttctttgccggtaaacgctttgtgccgatcatttctggcctggctgccatctttactggcgttgtgctgtccttcatttggccgccgattggttctgcaatccagaccttctctcagtgggctgcttaccagaacccggtagttgcgtttggcatttacggtttcatcgaacgttgcctggtaccgtttggtctgcaccacatctggaacgtacctttccagatgcagattggtgaatacaccaacgcagcaggtcaggttttccacggcgacattccgcgttatatggcgggtgacccgactgcgggtaaactgtctggtggcttcctgttcaaaatgtacggtctgccagctgccgcaattgctatctggcactctgctaaaccagaaaaccgcgcgaaagtgggcggtattatgatctccgcggcgctgacctcgttcctgaccggtatcaccgagccgatcgagttcttcttcatgttcgttgcgccgatcctgtacatcatccacgcgattctggcaggcctggcattcccaatctgtattcttctggggatgcgtgacggtacgtcgttctcgcacggtctgatcgactttatcgttctgtctggtaacagcagcaaactgtggctgttcccgatcgtcggtatcggttatgcgattgtttactacaccatcttccgcgtgctgattaaagcactggatctgaaaacgccgggtcgtgaagacgcgactgaagatgcaaaagcaacaggtaccagcgaaatggcaccggctctggttgctgcatttggtggtaaagaaaacattactaacctcgacgcatgtattacccgtctgcgcgtcagcgttgctgatgtgtctaaagtggatcaggctggcctgaagaaactgggcgcagcgggcgtagtggttgcgggttctggtgttcaggcgattttcggtactaaatccgataacctgaaaaccgagatggatgagtacatccgtaaccactaa

SEQ ID NO: 458045 - DNA, 798 bp, Shigella boydii
atgtttttagtcgactcacactgccatctcgatggtctggattatgaatctttgcataaggacgtggatgacgttctggcgaaagccgccgcacgcgatgtgaaattttgtctggcagtcgccacaacattaacgggttatttacatatgcgggatctggtaggcgaacgtgacaacgtcgtattttcttgtggcgtgcatccactcaaccagaatgatccctacgatgtagaagatttacgtcgtctggcggcagaagagggtgttgtagcgctgggtgaaaccgggctggattattattacacaccggaaactaaagtacgtcagcaagagtccttcatccatcatatccagattggtcgtgaactgaacaagccggttatcgtccatacccgtgacgcccgtgccgatacgctggcaattctgcgcgaagaaaaagtgacggattgcggtggcgtactacactgttttacagaggacagagaaacggcgggtaaattactggatctcggattttacatctccttttccggcattgtgaccttccgtaatgcggagcaactgcgcgatgctgcgcgttatgtccccctggatcgattactggtggaaactgactcaccttaccttgcgccggtaccgcatcgaggaaaagagaatcaacctgcgatggttcgtgacgttgcagaatacatggctgtgttgaaaggtgttgccgttgaagaactggcgcaggtaaccaccgataacttcgcccgtctgtttcacatcgacgcttcccgccttcaatccatccgttga

SEQ ID NO: 458046 - DNA, 1005 bp, Shigella boydii
atgagatggtatccatggttacgacctgatttcgaaaaactggtagccagctatcaggccggaagaggtcaccatgcgctactcattcaggcgttaccgggcatgggcgatgatgctttaatctacgccctgagccgttatttactctgccaacaaccgcagggccacaaaagttgcggtcactgtcgtggatgtcagttgatgcaggctggcacgcatcccgattactacaccctggctcccgaaaaagggaaaaatacgctgggcattgatgcggtacgtgaggtcaccgaaaagctgaatgagcacgcacgcctaggtggtgcgaaagttgtctgggtaaccgatgctgccttactgaccgacgccgcggctaacgcattgctgaaaacgcttgaagagccaccagcagaaacctggtttttcctggctacccgcgagcctgaacgtttactggcaacattacgtagtcgttgtcggttacattaccttgcgccgccgccggaacagtacgccgtgacctggctttcacgcgaagtgacaatgtcacaggatgcattacttgccgcattgcgcttaagtgccggttcgcctggcgcggcactggcgttgtttcagggagataactggcaggctcgtgaaacattgtgtcaggcgttggcatatagcgtaccatcgggcgactggtattcgctgctggcggcccttaatcatgaacaagctccggcgcgtttacactggctggcaacgttgctgatggatgcgctaaaacgccatcatggcgctgcacaggtgaccaatgttgatgtgccgggcctggtcgccgaactggcaaaccatctttctccctcgcgcctgcaggctatactgggggatgtttgccacattcgtgaacagttaatgtctgtcacaggcatcaaccgcgagcttctcatcaccgatcttttactgcgtattgagcattacctgcaaccgggcgttgtgctaccggttcctcatctttaa

SEQ ID NO: 458047 - DNA, 642 bp, Shigella boydii
atgcgcagtaagtatatcgtcattgaggggctggaaggcgcaggcaaaactaccgcgcgtaatgtggtggttgagacgcttgagcaactgggtatccgcgacatggttttcactcgggaacctggcggtacgcaacttgccgaaaagttaagaagcctggtgctggatatcaaatcggtaggcgatgaagtcattaccgataaagccgaagttctgatgttttatgccgcgcgcgttcaactggtagaaacggtcatcaaaccagctctggctaacggcacctgggtgattggcgatcgccacgatctctccactcaggcgtatcagggcggaggacgtggtattgaccaacatatgctggcaacactgcgtgatgctgttctcggggattttcgccccgacttaacgctctatctcgatgttaccccggaagttggcttaaaacgcgcgcgtgcgcgcggcgagctggatcgtattgagcaagagtctttcgatttctttaatcgcacccgcgcccgctatctggaactggctgcacaagataaaagtattcataccattgatgccacccagccgctggaggccgtgatggatgcaatccgcactaccgtgacccactgggtgaaggagttggacgcatga

SEQ ID NO: 458048 - DNA, 1023 bp, Shigella boydii
atgaaaaaagtgttattgattatcttgttattgctggtggtactgggtatcgccgctggtgtgggcgtctggaaggttcgccatcttgccgacagcaaattgcttatcaaagaagagacgatatttaccctgaagccagggaccggacgtctggcgcttggtgaacagctttatgccgataagatcatcaatcgcccacgggtttttcaatggttgctgcgtatcgaaccggatctttctcactttaaagccgggacttaccgctttacaccgcagatgaccgtgcgcgagatgctgaaattgctggaaagcggtaaagaagcacagttcccgctgcgactggtagaagggatgcgtctgagcgactacctcaagcaattgcgtgaggctccgtatatcaagcacacgctgagtgacgataagtacgccaccgtagcgcaggcacttgaactggaaaacccggagtggattgaaggttggttctggccagacacctggatgtataccgccaataccaccgatgtcgcgttactcaagcgagcgcacaagaaaatggtgaaagcggtcgatagcgcctgggaagggcgtgcggacggtctgccttataaagataaaaaccagctggtgacgatggcatcaattatcgaaaaagaaaccgccgttgccagtgaacgcgatcaggttgcctcggtatttatcaaccgtttacgcattggtatgcgcctgcagaccgacccaaccgtgatttacgggatgggagagcgttataatggcaaactttctcgtgcagacctggaaacgccgacagcgtataacacctataccattaccggtttgccgccaggtgcgatagctacgccgggggcggattcgctgaaggctgctgcgcatccggcaaaaacgccgtatctctattttgtggccgatggtaaaggtggtcacacgtttaataccaatcttgccagccataacaagtctgtgcaggattatctgaaagtgcttaaggaaaaaaatgcgcagtaa

SEQ ID NO: 458049 - DNA, 810 bp, Shigella boydii
atgttcttaattaacggtcataagcaggaatcgctggcagtaagcgatcgggcaacgcagtttggtgatggttgttttaccaccgccagagttatcgacggtaaagtcagtttgttatcggcgcatatccagcgactacaggatgcttgtcagcggttgatgattttctgtgacttctggcctcagcttgaacaagagatgaaaacgctggcagcagaacagcaaaatggtgtgctgaaagtcgtgatcagtcgcggtagtggcgggcgagggtacagcacattgaacagtggaccggcaacgcggattctctccattacggtttatcctgcacattacgaccgtttgcgtaacgaagggatgacgttggcgctaagcccggtgcggctggggcgcaatccccatcttgcaggtattaaacatcttaatcggcttgagcaagtattgatccgctctcatcttgagcagacaaacgctgatgaggcgctggtccttgacagcgaagggtgggttacggaatgctgtgcggctaatttgttctggcggaagagcaatgtagtttatacgccgcgactggatcaggcaggtgttaacggcattatgcgacaattctgtatccgtttgctggcacaatcctcttatcagcttgtcgaagtgcaagcctctctggaagaggcgttgcaggcagatgagatggttatttgtaatgcgttaatgccagtgatgcccgtacgtgcctgtggcgatgtctccttttcgtcagcaacgttatatgaatatttagccccactttgtgagcgcccgaattag

SEQ ID NO: 458050 - DNA, 1242 bp, Shigella boydii
gtgtctaagcgtcgtgtagttgtgaccggactgggcatgttgtctcctgtcggcaataccgtagagtctacctggaaagctctgcttgccggtcagagtggcatcagcctaatcgaccatttcgatactagcgcctatgcaacgaaatttgctggcttagtaaaggattttaactgtgaggacattatctcgcgcaaagaacagcgcaagatggatgccttcattcaatatggaattgtcgctggcgttcaggccatgcaggattctggccttgaaataacggaagagaacgcaacccgcattggtgccgcaattggctccgggattggcggcctcggactgatcgaagaaaaccacacatctctgatgaacggtggtccacgtaagatcagcccattcttcgttccgtcaacgattgtgaacatggtggcaggtcatctgactatcatgtatggcctgcgtggcccaagcatctctatcgcgaccgcctgtacttccggcgtgcacaacattggtcatgctgcgcgtattatcgcgtatggcgatgctgacgtgatggttgcaggtggcgcagagaaagccagtacgccgctgggcgttggtggttttggcgcggcacgtgcattatctacccgcaatgataacccgcaagcggcgagccgcccgtgggataaagagcgtgatggcttcgtactgggcgatggtgccggtatgctggtactagaagagtacgaacacgcgaaaaaacgcggtgcgaaaatttacgctgaactcgtcggctttggtatgagcagcgatgcttatcatatgacgtcaccgccagaaaatggcgcaggcgcagctctggcaatggcaaatgctctgcgtgatgcaggcattgaagcgagtcagattggctacgttaacgcgcacggtacttctacgccggctggcgataaagctgaagcgcaggcggtgaaagccatcttcggtgaagctgcaagccgtgtgttggtaagctccacgaaatctatgaccggtcacctgttaggtgcggcgggggcagtagagtctatctactccatcctggcgctgcgcgatcaggctgttccgccaaccatcaacctggataacctggatgaaggttgcgatctggatttcgtaccgcatgaagcacgtcaggtcagcggaatggaatacacgctgtgtaactccttcggcttcggtggcactaatggttctttgatctttaaaaagatctaa

SEQ ID NO: 458051 - DNA, 237 bp, Shigella boydii; identical to SEQ ID NO: 3538

SEQ ID NO: 458052 - DNA, 735 bp, Shigella boydii
atgaattttgaaggaaaaatcgcactggtaaccggtgcaagccgcggaattggccgcgcaattgctgaaacgctcgcagcccgtggcgcgaaagttattggcactgcgaccagtgaaaatggcgctcaggcgatcagtgattatttaggtgctaacggcaaaggtctgatgttgaatgtgaccgacccggcatctatcgaatctgttctggaaaaaattcgcgcagaatttggtgaagtggatatcctggtcaataatgccggtatcactcgtgataacctgttaatgcgaatgaaagatgaagagtggaacgatattatcgaaaccaacctttcatctgttttccgtctgtcaaaagcggtaatgcgcgctatgatgaaaaagcgtcatggtcgtattatcactatcggttctgtggttggtaccatgggaaatggcggtcaggccaactacgctgcggcgaaagcgggcttgatcggcttcagtaaatcactggcgcgcgaagttgcgtcacgcggtattactgtaaacgttgttgctccgggctttattgaaacggacatgacacgtgcgctgagcgatgaccagcgtgcgggtatcctggcgcaggttcctgcgggtcgcctcggcggcgcacaggaaatcgccaacgcggttgcattcctggcatccgacgaagcagcttacatcacgggtgaaactttgcatgtgaacggcgggatgtacatggtctga

SEQ ID NO: 458053 - DNA, 930 bp, Shigella boydii
atgacgcaatttgcatttgtgttccctggacagggttctcaaaccgttggaatgctggctgatatggcggcgagctatccaattgtcgaagaaacgtttgctgaagcttctgcggcgctgggctacgacctgtgggcgctgacccagcaggggccagctgaagaactgaataaaacctggcaaacccagccagcgctgttgactgcatctgttgcgctgtatcgcgtatggcagcagcagggcggtaaagcaccggcaatgatggccggtcacagcctgggggaatactccgcgttggtttgcgctggcgtgattgatttcgctgatgcggtgcgtctggttgagatgcgcggcaagttcatgcaagaagccgtaccagaaggcacgggcgctatggcggcaatcatcggtctggatgatgcgtctattgcgaaagcgtgtgaagaagctgcagaaggtcaggtcgtttctccggtaaactttaactctccgggacaggtggttattgccggtcataaagaggcggttgagcgtgctggcgctgcctgtaaagctgcgggcgcaaaacgcgcgctgccgttaccagtgagcgtaccgtctcactgtgcgctgatgaaaccagcagccgacaaactggcagtagaattagcgaaaatcacctttaacgcaccaacagttcctgttgtgaataacgttgatgtgaaatgcgaaaccaatggtgatgccattcgtgacgcactggtacgtcagttgtataacccggttcagtggacgaagtctgttgagtacatggcagcgcaaggcgtagaacatctctatgaagtcggcccgggcaaagtgctaactggcctgacgaaacgcattgtcgacaccctgaccgcctcggcgctgaacgaaccttcagcgatggcagcggcgctcgagctttaa

SEQ ID NO: 458054 - DNA, 954 bp, Shigella boydii
atgtatacgaagattattggtactggcagctatctgcccgaacaagtgcggacaaacgccgatttggaaaaaatggtggacacctctgacgagtggattgtcactcgtaccggtatccgcgaacgccacattgccgcgccaaacgaaaccgtttcaaccatgggctttgaagcggcgacacgcgcaattgagatggcgggcattgagaaagaccagattggcctgatcgttgtggcaacgacttctgctacgcacgctttcccgagcgcagcttgtcagattcaaagcatgttgggcattaaaggttgcccggcatttgacgttgcagcagcctgcgcaggtttcacctatgcattaagcgtagccgatcaatacgtgaaatctggggcggtgaagtatgctctggtcgtcggttccgatgtactggcgcgcacctgcgatccaacagatcgtgggactattattatttttggcgatggcgcgggcgctgcggtgctggctgcctctgaagagccgggaatcatctccacccatctgcatgccgacggtagttatggtgaattgctgacgctgccaaacgccgaccgcgtgaatccagagaattcaattcatctgacgatggcgggcaacgaagtcttcaaggttgcggtaacggaactggcgcacatcgttgatgagacgctggcggcgaataatcttgaccgttctcaactggactggctggttccgcatcaggctaacctgcgtattatcagtgcaacggcgaaaaaactcggtatgtctatggacaatgtcgtggtgacgctggatcgccacggtaatacctctgcggcctctgtcccgtgcgcgctggatgaagctgtacgcgacgggcgcattaagccggggcagttggttctgcttgaagcctttggcggtggattcacctggggctccgcgctggttcgtttctag

SEQ ID NO: 458055 - DNA, 1071 bp, Shigella boydii
ttgacacgtctaaccctggcgttagatgtcatgggaggggattttggcccttccgtgacagtgcctgcagcattgcaggcactgaattctaattcgcaactcactcttcttttagtcggcaatcccgacgccatcacgccattacttgctaaagctgactttgaacaacgttcgcgtctgcagattattcctgcgcagtcagttatcgccagtgatgcccggccttcgcaagctatccgcgctagtcgtgggagttcaatgcgtatgaccctggagctggtgaaagaaggtcgagcgcaagcctgtgtcagtgccggtaataccggggcactgatggggctggcaaaattattactcaagcccttggaggggattgagcgtccggcgctggtgacggtattaccacatcagcaaaagggcaaaacggtggtcctcgatttaggggccaacgtcgattgtgacagcacaatgttggtgcaatttgccattatgggctcagttctggctgaagaggtggtggaaattcccaatcctcgcgtggcgttgctcaatattggtgaagaagaagtaaagggtctcgacagtattcgggatgcctcagcggtgcttaaaacaatcccttctatcaattatatcggctatcttgaagccaatgagttgttaactggcaagacagatgtgctggtttgtgacggctttacaggaaatgtcacgttaaagacgatggaaggtgttgtcaggatgttcctttctctgctgaaatctcagggtgaagggaaaaaacggtcgtggtggctactgttattaaagcgttggctacaaaagagcctgacgaggcgattcagtcacctcaaccccgaccagtataacggcgcctgtctgttaggattgcgcggcacggtgataaaaagtcatggtgcagccaatcagcgagcttttgcggtcgcgattgaacaggcagtgcaggcggtgcagcgacaagttcctcagcgaattgccgctcgcctggaatctgtatacccagctggttttgagctgctggacggtggcaaaagcggaactctgcggtag

SEQ ID NO: 458056 - DNA, 174 bp, Shigella boydii
atggccgtacaacagaataaaccaacccgttccaaacgtggcatgcgtcgttcccatgacgcgctgaccgcagtcaccagcctgtctgtagacaaaacttctggtgaaaaacacctgcgtcaccatatcactgccgacggttactaccgcggccgcaaggtcatcgctaagtaa

SEQ ID NO: 458057 - DNA, 522 bp, Shigella boydii
atgcaaaaggtaaaattacccctgactctcgatccggttcgtacggctcaaaaacgccttgattaccagggtatctatacccctgatcaggttgagcgcgtcgccgaatccgtggtcagtgtggacagtgatgtggaatgctccatgtcgttcgctatcgataaccaacgtctcgcagtgttaaacggcgatgcgaaggtgacggtaacgctcgagtgtcagcgttgcgggaagccgtttactcatcaggtctacacaacgtattgttttagtcctgtgcgttcagacgaacaggctgaagcactgccggaagcgtatgaaccgattgaggttaacgaattcggtgaaatcgatctgcttgcaatggttgaagatgaaatcatcctcgccttgccggtagttccggtgcatgattctgaacactgtgaagtgtccgaagcggacatggtctttggtgaactgcctgaagaagtgcaaaagccaaacccatttgccgtattagccagcttaaagcgtaagtaa

SEQ ID NO: 458058 - DNA, 624 bp, Shigella boydii
atggctatcatcaatacgctatatctgatggaaaaaaatatgcctaaacttattttagcctccacctcgccatggcgtcgcgctcttctggaaaaactgcaaatctcttttgaatgtgcagcaccagaggtcgacgaaaccccacgcagcgacgaatcaccgcgacagttggtgcttcgactggcacaagaaaaagcgcaatctctggcgtcacgttatccggatcatttaattattggttcagaccaggtatgtgttcttgatggcgaaatcaccggtaaaccgttaacggaagaaaatgcccgtctgcaattacgcaaagccagcggcaatatcgtcaccttctatactggactggcgttgtttaattcggcgaatgggtatctacaaacagaagtggagccttttgacgtccatttccgtcacctgagcgaggcggagattgataattacgtgcgtaaggagcatcccctgcactgcgcgggtagctttaagagtgaaggatttggcattacgctgtttgagcgtttagagggacgtgaccctaacacgctggttggtttaccgctaatcgcgctgtgtcagatgttacgtcgggaagggaaaaacccgctgatgggatag

SEQ ID NO: 458059 - DNA, 960 bp, Shigella boydii
atgaaaacagagactccatccgtaaaaattgttgctatcaccgctgacgaagcggggcaacgtatcgacaactttttgcgtacccaattgaaaggcgtaccaaaaagtatgatttaccgtattttgcgtaaaggcgaagtgcgggtgaacaaaaaacgtattaagcctgaatataaactcgaagcgggtgatgaggtgcgtatcccaccggttcgcgttgctgagcgggaagaagaggcggtttcgccacatctgcaaaaggtggcggcgctggcggacgtcatcttatatgaagatgatcatatcctggtgctgaataaaccttccggtacggcggtacatggcggcagtggtttaagcttcggcgttatcgaaggtttgcgggcgttgcgcccggaagcgcggttccttgaactggttcatcgtctcgaccgggacacttcaggtgtgttgctggtagcgaaaaaacgctcggcgttgcgttctctgcatgagcaattacgtgaaaaaggaatgcaaaaagattacctggcgctggtgcgcagtcagtggcagtcgcatgtgaagagcgttcaagcgccgttattgaaaaatattctgcaaagcggcgaacgtatcgtgcgtgtcagtcaggaaggcaaaccgtcggaaacacgctttaaagtggaagaacgctatgcatttgccaccctggtgcgttgtagcccggtaaccggacgtactcatcagatccgtgtgcatacacagtatgcgggtcatccgattgcctttgacgatcgctacggtgaccgtgaatttgacagacagctcactgaagcaggcacgggattaaatcgtctgttcctgcacgccgcagcgttgaagtttacccatccggggaccggtgaggtgatgcgtatcgaagcgccgatggatgaaggtttgaagcgttgtttgcaaaagctgcgtaacgcgcgctaa

SEQ ID NO: 458060 - DNA, 540 bp, Shigella boydii
atgaagaaagtttttctttgcgccatcttggcctccttaagctatccggctatcgcctcatcattgcaggatcaactctctgctgtagcagaagcggaacagcaaggtaaaaatgaagagcaaaggcagcatgacgaatgggtcgcggagcgcaacagggaaatccagcaagagaagcaacgtcgcgcaaatgcccaggtcgccgctaacaaaagagcggcaacggcagcagcaaataagaaagctcgtcaggataaactggacgccgaagcctctgcggacaaaaaacgcgatcaaagttatgaagatgagctacgcagcttagagattcagaaacaaaaactggcgctggcaaaagaagaagcccgcgttaagcgagaaaacgaatttatcgatcaggaactgaagcacaaagctgcgcaaaccgatttggtgcaatctgaagctgacgccaacagaaatatgactgaaggcggtcgcgatctgatgaaaagcgtgggcaaagcagaagagaacaaatcggacagctggtttaattaa

SEQ ID NO: 458061 - DNA, 1578 bp, Shigella boydii
atgacggaaaacattcataagcatcgcatcctcattctggacttcggttctcagtacactcaactggttgcgcgccgcgtgcgtgagctgggtgtttactgcgaactgtgggcgtgggatgtgacagaagcacaaattcgtgacttcaatccaagcggcattattctttccggcggcccggaaagtactactgaagaaaacagtccgcgtgcgccgcagtatgtctttgaagcaggcgtaccggtattcggcgtttgctatggcatgcagaccatggcaatgcagttgggcggtcacgttgaagcctctaacgaacgtgaatttggctacgcgcaggttgaagtcgtaaacgacagcgcactggttcgcggtatcgaagatgcgctgaccgcagacggtaaaccgctgctcgatgtctggatgagccacggcgataaagttaccgctatcccgtccgacttcgtcaccgtagccagcaccgaaagctgcccgtttgccattatggctaacgaagaaaaacgcttctatggcgtacagttccacccggaagtgactcacacccgccagggtatgcacatgctggagcgttttgtgcgtgatatctgccagtgtgaagccctgtggacgccagcgaaaattatcgacgatgctgtagctcgcatccgcgagcaggtaggcgacgataaagtcatcctcggcctctctggtggtgtggattcctccgtaaccgcaatgctgctgcaccgcgctatcggtaaaaacctgacttgcgtattcgtcgacaacggcctgctgcgtctcaacgaagcagagcaggttctggatatgtttggcgatcactttggtctgaacattgttcacgtaccggcagaagatcgcttcctgtcagcgctggctggcgaaaacgatccggaagcaaaacgtaaaatcatcgggcgcgttttcgttgaagtgttcgatgaagaagcgctgaaactggaagacgtgaagtggctggcgcagggcaccatctaccctgacgttatcgaatctgcggcttctgcaaccggtaaagcacacgtcatcaaatctcaccacaacgtgggcggcctgccgaaagagatgaagatgggcctggttgaaccgctgaaagagctgttcaaagacgaagtgcgtaagattggtctggagctgggcctgccgtacgacatgctgtaccgtcacccgttcccgggaccaggccttggcgttcgtgtgctgggtgaagtgaagaaagagtactgtgacctgctgcgccgtgctgacgccatcttcattgaagaactgcgtaaagcggacctgtacaacaaagtcagccaggcgttcactgtgttcctgccggtacgttccgttggcgtaatgggcgatggtcgtaagtatgactgggttgtctctctgcgtgctgtcgaaaccatcgactttatgaccgcacactgggcgcatctgccgtacgatttcctcggtcgcgtttccaaccgcattatcaatgaagtgaacggtatttcccgcgtggtgtatgacatcagcggcaagccgccagctaccattgagtgggaatga

SEQ ID NO: 458062 - DNA, 1467 bp, Shigella boydii
atgctacgtatcgctaaagaagctctgacgtttgacgacgttctcctcgttcctgctcattctaccgttctgccgaatactgctgacctcagcacccagctgacgaaaactattcgtctgaatatccctatgctttccgcagcaatggataccgtaacggaagcgcgcctggctattgctctggctcaggaaggcggtatcggctttatccacaaaaacatgtccattgaacgccaggcagaagaagttcgccgtgtgaaaaaacacgaatctggtgtggtgactgatccgcagactgttctgccaaccacgacgctgcgcgaagtgaaagaactgaccgagcgtaacggttttgcgggctatccggttgttaccgaagaaaacgaactggtgggtattatcaccggtcgtgacgtgcgttttgttaccgacctgaaccagccggttagcgtttacatgacgccgaaagagcgtctggtcaccgtgcgtgaaggtgaagcccgtgaagtggtgctggcaaaaatgcacgaaaaacgcgttgaaaaagcgctggtggttgatgacgaattccacctgatcggcatgatcaccgtgaaagacttccagaaagcggaacgtaaaccgaacgcctgtaaagacgagcaaggccgtctgcgtgttggtgctgcagttggcgcaggtgcgggtaacgaagagcgtgttgacgcgctggttgccgctggcgttgacgttctgctgatcgactcctcccacggccactcagaaggcgttttgcagcgtatccgtgaaacccgtgctaaatatccggatctgcaaatcatcggcggcaacgtggcaacagctgcaggtgcacgcgctttggcagaagctggttgcagcgcggttaaagtcggtatcggccctggttctatctgtacgactcgtatcgttactggcgtaggtgttccgcagatcactgccgttgctgacgcagttgaagcgctggaaggcacaggtattccggttatcgcagatggtggtattcgcttctccggcgacatcgccaaagctatcgccgctggcgcaagcgcggtaatggtgggttccatgctggcgggtactgaagaatctccgggtgaaattgaactctaccagggccgttcttacaaatcttaccgtggtatgggctctctgggtgcgatgtccaaaggttcttctgaccgttacttccagagtgacaacgctgccgacaaactggtgccggaaggtatcgaaggtcgcgtagcctataaaggtcgcctgaaagagatcattcaccagcagatgggcggcctgcgctcctgtatgggcctgaccggctgtggtactatcgacgaactgcgtactaaagcggagtttgtacgtatcagcggtgcgggcattcaggaaagccacgttcacgacgtgaccattactaaagagtccccgaactaccgtctgggctcctga

SEQ ID NO: 458063 - DNA, 1371 bp, Shigella boydii
atgttaccttctcaatcccctgcaatttttaccgttagtcgcctgaatcaaacggttcgtctgctgcttgagcatgagatgggacaggtttggatcagcggcgaaatctctaatttcacacaaccggcttccggtcactggtactttacactcaaagacgacaccgcccaggtacgctgcgcgatgttccgcaacagcaaccgccgggtgaccttccgtccacagcatggacaacaagttttagttcgcgccaatattacgctctacgagccgcgcggtgactaccagataatcgttgagagtatgcagccggccggtgaagggctgctgcaacagaagtacgaacagctcaaagcgaagttgcaggctgaaggtttgttcgatcagcaatacaaaaaaccacttccctcccctgcgcattgcgttggtgtgatcacctcaaaaaccggtgctgcgctacatgatattttgcatgtgttaaaacgtcgcgatccttctctaccggtgatcatctaccccaccgccgttcagggcgatgacgcaccggggcaaattgttcgcgccattgaactggcgaatcagcgcaatgagtgcgacgtgttgatcgttgggcgcggcggcggttcgctggaagatttatggagttttaacgacgaacgcgtagcgcgggcgatttttgccagccgcattccggtcgtcagcgccgtcgggcatgagacggatgtgaccattgccgattttgttgccgatctgcgtgcgccaacgccgtctgccgccgctgaagtagtgagccgtaatcagcaagagttactgcgccaggtgcaatcgacccgtcaacggctggagatggcgatggattattatctcgccaaccgcacgcgtcgctttacgcagatccatcaccgattacagcaacagcatccgcagctccggctggcacgccagcaaaccatgcttgagcgcctgcaaaagcggatgagctttgcgctggaaaatcaacttaagcgtaccgggcaacagcagcagcggttaacacagcggctgaatcagcaaaatccacagccgaagattcatcgcgcgcaaacgcgcattcagcaactggaatatcgtttagcagaaaccctgcgcgtacagcttagcgccacgcgtgaacgtttcggtaatgcagtaacgcacctcgaagccgtaagcccactgtcaacgctggcgcgtggatacagcgttactactgctactgacggcaatgtactgaaaaaagtgaagcaagttaaagcgggtgaaatgctaaccacacgtctggaagacggctggatagaaagtgaagttaaaaacatccagccagtaaaaaaatcgcgtaaaaaggtgcattaa

SEQ ID NO: 458064 - DNA, 216 bp, Shigella boydii
atggaactgcattgtccacaatgtcagcatgtgcttgatcaggataacggccatgcgcgttgcccatcctgcgcggaaattattgaaatgaaagctctttgtccagactgccatcaaccgttgcaggtgttaaaagcctgcggtgcagtagattacttctgtcagcacgggcatggcttgatatcgaaaaaacgcgttgaattcgtgctggcttaa

SEQ ID NO: 458065 - DNA, 1473 bp, Shigella boydii
atggtacctgtggtcgcgcttgtcgggcgccctaacgtaggaaaatccacgttatttaaccgtctaactcgcacccgagatgcgctggttgcggatttcccgggtctgactcgtgaccgtaagtacggtcgtgcggaaattgaaggccgtgagtttatctgtattgataccggcgggattgatggcacagaagacggtgtagaaacccgcatggcggaacagtcgctgctggcgattgaagaagcggacgtcgtactgtttatggtggatgcgcgcgcgggcctgatgccggcagatgaagcgattgccaaacatctgcgctcccgtgaaaaaccgaccttcctggtggcaaacaaaattgacggtctggatcccgatcaggcagtggttgatttctactcgcttggcttaggtgaaatctacccgatcgccgcgtctcacggtcgtggcgtattaagtctgctggagcatgtgctgctgccgtggatggaagatctcgcaccgcaagaggaagtcgacgaagacgctgaatactgggcgcaatttgaagcggaagagaacggcgaagaagaagaggaagacgacttcgacccgcaaagtctgccgatcaaactggcgattgtgggtcgtccgaacgtaggtaagtctacactcactaaccgtattcttggtgaagagcgcgttgttgtttatgacatgcctggcacgacgcgtgacagtatctacattccaatggaacgcgatggacgtgagtatgtgctcattgacaccgctggcgtacgtaaacgcggcaaaatcaccgatgctgtagagaaattctccgtaatcaaaacgttgcaggccattgaagatgccaacgtggtgatgttagtgattgatgcgcgcgaaggtatttccgatcaggatctctcgctgctgggctttattctcaatagtgggcgctcacttgtcattgtggtgaataagtgggatggcctgagccaggaagtgaaagagcaggtgaaagaaacgctggacttccgtctgggctttatcgattttgctcgtgtgcactttatctctgccttgcacggcagtggtgttggtaacttgtttgaatcagtacgtgaagcgtatgacagctccacccgtcgtgtggggacctctatgctgacgcgcatcatgacgatggctgttgaagatcaccaaccgccgctggtacgcggtcgtcgtgtgaagctgaaatatgcccacgctggtggttataacccgccgattgtggtgattcacggtaatcaggtgaaagacctgcctgattcctacaagcgctacttgatgaactacttccgcaaatcgctggacgtaatgggatcgccgattcgtattcagttcaaagaaggggaaaacccgtatgcgaacaagcgtaacaccctgacgccaacccagatgcgtaaacgtaagcgtctgatgaagcacatcaagaaaaataaataa

SEQ ID NO: 458066 - DNA, 1179 bp, Shigella boydii
atgcaattgcgtaaattactgctgccaggactgctttccgttacccttttaagcggctgttcgctgtttaacagcgaagaagatgtggtaaagatgtccccattgccaaccgttgaaaaccagtttacgccgaccacggcgtggagtacttctgttggtagcggcattggcaacttctattccaatcttcatccggcactggcggacaacgttgtctatgcagcggaccgcgctggtttggtaaaagcgctgaatgcggatgatggcaaagaaatctggtctgtcagcctggccgagaaagatggctggttctctaaagagcctgcattactttctggcggtgtgaccgtgtttggtgggcatgtctacattggcagcgaaaaggcgcaggtttacgcgctgaataccagcgatggtactgtggcatggcaaactaaagtcgcgggtgaagcactttcgcgcccggtggtcagcgacggtctggtgttaatccacaccagtaacggtcagttacaagcgctgaacgaagctgacggcgctgtcaaatggacagttaacctcgatatgccttcgctctctttgcgtggcgagtctgcgccggcaacggcttttggtgcggccgtcgtggggggcgataatggtcgcgtcagcgcagtgctgatggaacagggccagatgatttggcagcagcgtatttcccaggcgaccggttctaccgaaattgaccgtctaagcgatgttgacacgactcccgtcgttgttaacggcgttgttttcgcgctggcctataatggtaacctgacggcgcttgatctgcgcagtggtcagattatgtggaaacgcgaactgggttcggtgaatgatttcatcgtcgacggcaatcgcatctatctggtcgatcaaaatgaccgggtgatggcgttgaccattgatggcggcgttacgctgtggacacaaagcgatctgttgcatcgcctgctgacttctccggtgctgtatgatggcaacctggtggtcggtgacagtgaaggttatctgcactggattaatgtcgaagatggtcgtttcgttgcccagcaaaaagttgatagttccggtttccagactgaaccggttgccgctgacggcaaactgctgatccaggcaaaagacggaaccgtgtactctattacacgttaa

SEQ ID NO: 458067 - DNA, 621 bp, Shigella boydii
gtggaaatttacgagaacgaaaacgaccaggtagaagcggttaaacgcttttttgctgaaaatggcaaagcactggctgttggggtgattttgggcgttggcgcactgattggctggcgctactggaacagccatcaggttgattctgcacgctccgcttctcttgcctatcaaaatgcggttaccgcagtgagcgaaggcaaaccggatagcatcccggcggcggaaaaatttgctgctgaaaataaaaatacttatggtgcgctggcttctttggaacttgcgcagcaatttgttgacaaaaatgaactagagaaagctgccgcccagttacaacaggggctggcagacacgagcgatgaaaatctcaaagccgtgataaatctgcgtcttgctcgcgttcaggtacagctcaagcaggctgatgccgcgctgaaaacccttgataccatcaaaggtgaagggtgggctgccattgttgccgacctgcgtggtgaagcattgctgagcaaaggtgataagcaaggtgcgcgtagtgcatgggaagcaggcgtgaaaagcgatgttactccggcactgagcgaaatgatgcagatgaaaattaataatttgtccatctga

SEQ ID NO: 458068 - DNA, 1275 bp, Shigella boydii
gtggcaaaaaacattcaagccattcgcggcatgaacgattacctgcctggcgaaacggccatctggcagcgcattgaaggcacactgaaaaacgtgctcggcagctacggttacagtgaaatccgcttgccgattgtagagcagaccccgctattcaaacgtgcgattggtgaagtcaccgacgtggttgaaaaagagatgtacacctttgaggatcgcaatggcgacagcctgactctgcgccctgaagggacggcgggctgtgtacgcgccggcatcgagcatggtcttctgtacaatcaggaacagcgtctgtggtatatcgggccgatgttccgtcacgagcgtccgcagaaagggcgttatcgtcagttccatcagttgggctgcgaagttttcggtctgcaaggtccggatatcgacgctgaactgattatgctcaccgcccgctggtggcgcgcgctgggtatttccgaacacgtaactcttgagctgaattctatcggttcgctggaagcacgcgccaattaccgcgatgcgctggtggcattccttgagcagcataaagaaaagctggacgaagactgcaaacgccgcatgtacactaacccgctgcgcgtgctggattcaaaaaatccggaagtgcaggcgcttctcaacgacgctccggcattaggtgattatctggacgaggaatctcgtgagcattttgccggtctgtgcaaactgcttgagagcgcggggatcgcttacaccgtaaaccagcgtctggtgcgtggtctggattactataaccgtaccgttttcgagtgggtgactaacagtctcggctcccagggcaccgtgtgtgcaggcggtcgttatgacggtcttgtggaacaactgggcggtcgtgcaacaccggctgtcggttttgcgatgggcctcgaacgtcttgtattgttagtacaggccgttaatccggaatttaaagccgatcctattgtcgatatatacctggtggcttcaggtgctgatacacaatctgcggctatggcattagctgagcgtctgcgtgatgaattacagggcgtgaaattgatgaccaaccacggcggcggcaactttaagaaacagtttgcccgtgctgataaatggggtgcccgcgttgctgtggtgctgggtgagtctgaagtgactaacggcacagcagtagtgaaggatttgcgctctggtgagcaaacggcagttgcgcaggatagcgtagccgcgcatttgcgcacgttactgggttaa

SEQ ID NO: 458069 - DNA, 1119 bp, Shigella boydii
atgcataaccaggctccaattcaacgtagaaaatcaacacgtatttacgttgggaatgtgccgattggcgatggtgctcccatcgccgtacagtccatgaccaatacgcgtacgacagatgtcgaagcaacggtcaatcaaatcaaggcgctggaacgcgttggcgctgatatcgtccgtgtctccgtaccgacgatggacgaggcagaagcgttcaaactcatcaaacagcgggttaacgtgccgctggtggctgacatccacttcgactatcgcattgcgctgaaagtagcggaatacggcgtcgattgtctgcgtattaaccctggcaatatcggtaatgaagagcgtattcgcatggtggttgactgtgcgcgcgataaaaacattccgatccgtattggcgttaacgccggatcgctggaaaaagatctgcaagaaaagtatggcgaaccgacgccgcaggcgttgctggaatccgccatgcgtcatgttgatcatctcgatcgcctgaacttcgctcagttcaaagtcagcgtgaaagcgtctgacgtcttcctcgctgttgagtcttatcgtttgctggcaaaacagatcgatcagccgctgcatctggggatcaccgaagccggtggtgcacgcagcggggcagtaaaatccgccattggtttaggtctgctgctgtctgaaggcatcggcgacacgctgcgcgtatcgctggcggccgatccggtcgaagagatcaaagtcggtttcgatattttgaaatcgctgcgtatccgttcgcgagggatcaacttcatcgcctgcccgacctgttcgcgtcaggaatttgatgttatcggtacggttaacgcgctggagcaacgcctggaagatatcatcactccgatggacgtttcgattatcggctgcgtggtgaatggcccaggtgaggcgctggtttctacactcggcgtcaccggcggcaacaagaaaagcggcctctatgaagatggcgtgcgcaaagaccgtctggacaacaacgatatgatcgaccagctggaagcacgcattcgtgcgaaagccagtcagctggatgaagcgcgtcgaattgacgttcagcaggttgaaaaataa

SEQ ID NO: 458070 - DNA, 1014 bp, Shigella boydii
atgaatactgaagccacgcacgaccaaaatgaagcacttactaccggcgctcgcctgcgtaatgctcgcgaacaactaggacttagtcagcaggccgttgccgagcgactttgcctgaaggtttccacggtacgcgacattgaagaagataaggcacccgccgatcttgcttcaacattcctgcgcggatatatccgctcttatgcgcgtctggtacatattccagaagaagaactgctgccagggctggaaaagcaggctccactacgggctgcgaaagttgcgccgatgcagagtttttccctcggtaaacgccgcaaaaaacgtgacggctggctgatgaccttcacctggctggtgctgtttgtggttatcggcctgagcggtgcctggtggtggcaagaccacaaagctcagcaggaagagatcaccactatggccgatcaatcttcggcggaactgagcagtaatagcgagcaggggcagagtgttccgttaaatacgtcgacaactacagacccggctacaacgtccacgccgccagcgtctgtggatactaccgcaaccaacacgcaaacacctgccgtaactgcgccagcaccagctgttgatccgcaacagaatgcggttgtttcgccttcgcaggcaaatgttgataccgccgcgaccccggcaccaacggcagcaacaacgccagatggtgctgcgccgttgccaaccgatcaggctggcgtgaccacgccggtggctgatccgaatgcgctggtgatgaactttactgccgattgctggctggaggtcactgatgctaccggtaaaaaattgtttagcggtatgcagcgtaaagacggtaatttgaacttaaccggccaggcaccgtacaaactgaaaattggtgcgccagccgcagtacagatccagtatcaagggaaacctgtcgatctgagtcgttttatcagaactaaccaggttgcgcgtctgaccctcaatgccgaacaatcaccggcgcagtaa

SEQ ID NO: 458071 - DNA, 1155 bp, Shigella boydii
atgtctgaacaattagtcacacctgaaaacgtcaccacgaaagatggaaaaatcaacctgctggatctcaaccgtcagcagatgcgggagttttttaaagatttaggtgaaaaacccttccgcgccgatcaggtgatgaagtggatgtatcactattgctgcgacaactttgatgagatgaccgacatcaacaaagtgttgcgcggcaaactgaaagaggtggcggaaatccgcgcaccggaagtggttgaagaacagcgttcatccgacggcaccattaaatgggcgatcgccgttggcgatcagcgcgtcgaaacggtgtatatcccggaagacgaccgtgccacgctctgcgtctcttcgcaggtggggtgtgcgctggagtgtaaattctgttccaccgcccagcagggctttaaccgcaacctgcgggtgtcggaaattatcggccaggtgtggcgtgcggcgaaaatcgtcggcgcagcaaaagtcaccggtcagcgcccaatcactaacgtagtgatgatgggcatgggcgagccgctgctcaacctgaacaacgtcgttccggcgatggaaatcatgcttgatgatttcggttttggcctgtctaaacgtcgcgtcacgctttctacttccggtgtagttccggcgctggataaactgggcgatatgatcgacgttgcactggcaatttccctgcacgcgccgaacgacgaaattcgtgacgaaattgtgccgatcaacaaaaagtacaatatcgaaacgttccttgctgcggtgcgccgttatctggagaaatccaacgccaatcagggccgagtcactattgaatacgtgatgcttgaccacgttaacgacggcactgaacacgcgcaccaactggcggagctgctgaaagatacgccgtgtaagatcaacctgatcccgtggaacccgttcccgggcgcgccgtatggacgcagttcgaacagccgtatcgaccgtttctcaaaagtgctgatgagctacggtttcaccactattgtgcgtaaaactcgtggtgatgatatcgatgctgcctgtggtcagttggcgggcgatgttatcgaccgtacgaaacgtaccctgcgtaaacggatgcagggtgaagccatcgacattaaagcagtctga

SEQ ID NO: 458072 - DNA, 432 bp, Shigella boydii
atggctattgaacgtactttttccatcatcaaaccgaacgcggtagcaaaaaacgtcattggtaatatctttgcgcgctttgaagctgcagggttcaaaattgtcggcaccaaaatgctgcacctgaccgttgaacaggcacgtggcttttatgctgaacacgatggaaaaccgttctttgatggtctggttgaattcatgacctctggcccgatcgtggtttccgtgctggaaggtgaaaacgccgttcagcgtcaccgcgatctgctgggcgcgaccaatccggcaaacgcactggctggtactctgcgcgctgattacgctgacagcctgaccgaaaacggtacccacggttctgattccgtcgaatctgccgctcgcgaaatcgcttatttctttggcgaaggcgaagtgtgcccgcgcacccgttaa

SEQ ID NO: 458073 - DNA, 2313 bp, Shigella boydii
atgcttcgcttgttaaccaaacgcggctgctggataacgctggcagctgtgccatttctcctttttcttgcagcgtggggagcagataaactctggcctctaccgctgcatgaagtcaatcccgcacgagtggtcgtggcgcaggatggtacgccgctctggcgcttcgccgatgctgatggcatctggcgttatccggtaacaatcgaagatgtgtctccacgttaccttgaagcgctgatcaattatgaagatcgctggttctggaagcatccgggggtgaatccattctcggtggcgcgcgcagcatggcaagatctcacttcgggacgggttatttctggtggcagcacgctcactatgcaggttgctcgtctgcttgatcctcaccccaaaacatttggtggcaaaattctccagctctggcgcgcgttgcaactggagtggcatttgtctaagcgtgaaattctgatcttgtatcttaaccgcgctccgtttggcggtacgttgcaggggatcggtgcggcaagttgggcttatctcggaaaatcgcctgcgaatttaagctattccgaggcggcaatgctggcggtgttaccgcaagcgcccagccgagtgcgcccggatcgttggccggagcgtgccgaagccgcgcgtaataaagtgctcgaacggatggccgtgcaaggtgtgtggtcccgtgagcaggtaaaagagtcaagggaagaacccatctggctggcaccccgacaaatgccgcaactggcaccgctgttttcgcgcatgatgctcggtaaaagcaaaagcgacaaaatcgttactacgctggatgccggtcttcaacgacgtctggaagaactggcgcaaaactggaaagggcggttgccaccgcgcagctcactggcgatgatcgtggttgatcataccgatatgcgtgttcgcggctgggtgggatcggttgatctcaacgatgattcacgctttggtcatgttgatatggtcaatgcgatccgatcgccaggatcggtgctcaaaccgtttgtttatggtctggcgctggatgaaggcttgatccacccggcatcactgctgcaagacgtcccccggcgcaccggtgattatcgaccaggtaactttgatagcggttttcatggcccgatcagcatgagcgaggcgctggtgcgctcgctgaacttacctgctgtgcaggtgctggaagcctatggaccgaaacggtttgcggcaaagttacgcaatgttggattgccgttatatttgcccaacggtgctgcgccgaatctttcactcattctcggcggcgctggtgcaaaactggaagatatggcggcagcgtataccgcgtttgctcgccacggcaaggcaggcaaattgcgcttacagcctgacgatccgctgcttgaacggcctttaatgtcgtcgggggcggcgtggatcattcgccggattatggctgatgaagcgcaacccttgccggatagtgccttgccgcgcgtcgccccactggcatggaaaacgggcaccagctatggctatcgtgacgcctgggcgattggggttaacgctcgctatgtcattgggatctggactggcagaccggacggcacgcccgttgttggtcagtttggctttgccagtgccgtaccattgttgaatcaggtcaataatatcttactgtcgcgcagtgcgaatctgccggaagacccgcgcccgaactcagtcactcgtggcgttatctgctggccgggcggacagtctttgccggaaggtgacggtaactgtcgccgccgcctggcaacctggctgctggacgggagtcagccgccaactctattactgccggagcaggaaggcattaatggcattcgtttccccatctggctggatgaaaatggcaaacgtgttgccgctgattgcccgcaagcgcgacaagaaatgataaatgtctggccgctaccgctggaaccctggctgcccgcatcagaacgtcgcgctgtgcgcttaccaccggcctcgacaagttgcccgccatacggtcacgatgcccagctcccgctgcagctgacaggcgttcgcgatggcgcgattattaaacgtttaccgggcgcagcggaagcgactttgccgttgcaatcaagtggaggggcaggtgaacgctggtggtttctgaatggcgaaccgttaactgaacgcgggcgcaacgtgaccctgcatttgacggataaaggtgattatcaattgctggtgatggatgacgtggggcaaatcgcgacagtgaaatttgtcatgcaatag

SEQ ID NO: 458074 - DNA, 4962 bp, Shigella boydii
atgaaaaagttacgcgtagccgcctgcatgctaatgctggcgctggcagggtgcgacaacaacgataacgcgccaacagcggtgaaaaaagatgcgccttctgaagttactaaagcggcctcttcagaaaacgcgagttcagcaaaactctccgtgccggagagacaaaaactggcccaacagagtgctggtaaggtgctgacattgctggatctctctgaagtccaacttgatggtgcagccacgctggtgctgacgttctccatccctctcgacccggatcaggatttctcacgcgttattcatgtcgtcgataaaaaaagcggcaaagtggatggtgcctgggagctgtcagataatcttaaagagctacgtttacgccacctcgaaccgaaacgtgatttgatcgttactattggcaaggaggtcaaagcactcaacaacgcaaccttcagtaaagattacgaaaaaactataactacccgcgacatccaacccagcgtcggttttgccagccgtggttcgctgctgcctggcaaagtcgttgaagggctgccggtaatggcgctcaacgttaataatgtcgatgttaacttcttccgcgttaagccagaatctctgccagcattcattagccaatgggaataccgcaattcgctggcgaactggcagtcagacaaactgctgcagatggcggatctggtctacaccggacggtttgatctcaatcctgcgcgtaacacccgtgaaaaattattgctgccgctgggcgatatcaaaccgcttcagcaggcgggcgtgtatctggctgtgatgaatcaggctggacgttacgattacagtaatcccgcgacgctgtttacgttaagtgatatcggcgtttcagctcaccgttatcacaatcgtctggatatctttacccaaagtctggaaaacggcgcggcccagcaaggaattgaagtctctttattaaatgagaaagggcagactctgactcaggcaaccagtgacgctcaggggcatgtgcagctggaaaatgataaaaatgcggcattactgctggcacgtaaagacggtcagacaacgctactcgatttaaaacttccggcgctggacttagcagaatttaacattgctggcgcgccaggctatagcaaacagtttttcatgtttggcccacgcgatctttatcgcccaggtgaaacggtaatcctcaatggtttactgcgcgatgcagacggtaaagcattgcccgatcaccccatcaagttagacgtgattaaacctgacgggcaggtactcaggagcgtcgttagtcagccggagaatggcctctaccactttacctggccactcgatagcaatgcggcaaccggtatgtggcatattcgcgccaacacgggcgataaccagtaccggatgtgggatttccacgtcgaagattttatgccagagcgtatggcgctgaatctgaccggtgagaaaaccccgcttacgccgaatgatgaagtgaaattctccgtggtgggatactacctgtacggtgcgcctgctaatggtaatactttgcaagggcaacttttcctgcgcccactgcgtgaggctgtgtcagccttacctggttttgaattcggcgatatagctgccgaaaacctttcccgcacgctggatgaagttcagttgacgctggatgataaagggcgcggcgaagtttctacagaaagccagtggaaggaaacgcattccccattgcaggttattttccagggcagtttgctggaatcgggcggtcgcccggtgacgcgccgcgctgagcaggctatctggcctgccgatgcattgccggggctccgtccgcagttcgccttgaaatcggtttacgattatcgcactgacagcacggtgaaacagcccattgttgatgaaggcagtaacgccgcttttgacatcgtttatagcgatgcacaaggcgtgaaaaaagccgtgtcgggcttgcaggtgcgcctgattcgcgaacgccgcgattactactggaactggtcagaagatgaaggctggcagtcacagtttgatcaaaaagatctgatcgaaaatgaacaaactctggatctgaaagcggacgaaaccggcaaggtcagttttccggtagagtggggcgcttatcgtctggaagtcaaagcgccgaatgaagcggtcagtagtgttcgtttctgggctggctatagctggcaggacaacagcgacggtagcggcgcagtgcgacccgaccgtgtcacgctgaaactggataaagccagttatcgccctggcgacaccattaagttgcatatcgccgcgccaacggcgggtaaaggttatgcgatggtcgagtccagtgaagggccgctgtggtggcaagagattgatgttccggctcaagggctggatctgacgattccggtcgataaaacctggaatcgtcatgatctgtatttaagtacgctggtggtacgtcctggcgataaatctcgctccgcgacgccaaaacgcgcggttggtgtgttgcatctgccgcttggcgatgaaaaccgtcgcctcgatctggcgctggaaacaccagcaaaaatgcgtcccaatcaaccattaaccgtgaaaattaaagccagcactaaaaatggcgagaagcctaaacaggtgaatgtgctggtgtctgccgttgatagtggtgtgctgaatattactgactacgtcacgccagatccgtggcaggcgttctttggtcagaaacgctatggcgcagacatttacgatatttacggtcaggttattgaaggtcaggggcgtctggcagctctgcgtttcggtggcgatggtgatgagctgaaacgtggtggtaaaccgccggtcaatcacgtcaatattgtcgcgcagcaggcgctgccggtaacgctcaacgaacagggcgaaggctcggttacactgccgattggcgattttaacggtgaattgcgcgtcatggcgcaagcctggacggcagatgatttcggtagcaacgaaagcaaagtgatagttgccgcaccggtgattgctgaactgaacatgccgcgctttatggcgagtggcgatacctcgcgtctgacgctggatatcactaatcttaccgataaaccgcaaaaactgaacgttgccctgaccgccagtggtttgcttgaactggtcagcgattcacccgcagccgttgaattagcgccaggtgtgcgtactacgctgtttatcccagtgcgagcattgccgggttatggcgatggagaaattcaggccaccattagcgggttagcgttaccgggtgaaaccgttgccgatcagcataagcagtggaaaatcggcgtccgtccggcgttcccagcacaaacggttaattacggtacggcgttacagcctggtgagacatgggcgattccggcggatggattgcaaaacttctcgcctgttacgctggaagggcaattgttgttgagcggcaaaccaccgctgaacattgcacgttatatcaaagagttaaaagcgtatccgtacggctgtcttgagcaaaccgccagcggcctgttcccgtcactttataccaacgcagcccaactgcaggcgttgggcatcaaaggcgacagtgatgagaaacgccgtgcatcggtcgatatcggcatttcccgtttgctgcaaatgcaacgtgataacggcggctttgcgctgtgggataaaaacggtgacgaagagtactggctgacggcttacgtgatggatttcctggtccgcgcaggcgaacagggttacagcgtgccgacagacgccattaaccggggtaatgagcgtctgctgcgctatttacaagatccgggcatgatgtcgatcccgtacgcggataatctcaaagccagtaaattcgccgttcagtcttacgctgcgctggtgctggcccgtcagcaaaaagcaccactgggtgcgctgcgtgaaatctgggagcatcgtgcagatgccgcttctggtttaccgctgctgcaacttggcattgcgctgaaaaccatgggtgatgcaacgcgtggtgaagaagcgattgtgctggcgctgaaaacgccgagaaatagtgatgagcggatatggctgggtgattacggtagtccactgcgcgacaacgcgttaatgctctccttgctggaagaaaataaactgctacccgatgagcagtacactttgctgaacacactttcgcagcaggcgtttggtgaacgctgtctatcgacgcaggaaagtaacgcgttgttcctggctgcccgtacgattcaggatttaccgggtaaatggcaggcgcaaacctctttctcagctgagccgctgacaggcgagaaaacgctaaacagcaatctgaatagcgatcaacttgccaccttgcaggtgagaaacagtggcgatcagccgttatggttgcgtatggatgccagcggttatccgcaatccgcacctttaccggcgaacaatgtgctgcaaatcgagcgtcatattcttggtactgatggtaagagcaaatcgctggactcgttacgtagcggcgatctggtgctggtctggttgcaggtaaaagccagtaacagcgtgccggatgcgttagtcgtggatctgctgcctgcgggtctggaactggaaaatcagaatctggcgaacggtagcgccagcctggagcaaagtggtggcgaagtgcaaaacttactgaaccagatgcagcaggcgagcattaagcacattgagttccgtgacgatcgctttgtggcggcggttgccgttgatgaataccaaccggtaacgctggtgtatctggcgcgggcggtgacgccgggaacgtatcaggtaccgcaaccgatggtggaatcaatgtatgttccccaatggcgggcgaccggcgcggctgaagatctgctgattgtccgaccgtaa

SEQ ID NO: 458075 - DNA, 846 bp, Shigella boydii
atgtccacgacatggtttgtaggagccgactggctcgccgaacatattgatgacccggaaattcagattatcgatgcccgcatggcgtcgcctggacaggaagatcgtaacgttgctcaggagtatctgaatggacatattcccggcgcagtgttttttgatatcaaagcgctttctgatcacacttccccgcttccgcacatgctgccgcgcccggaaacgttcgccgtggcgatgcgtgaattaggcgttaaccaggataagcacctgattgtctatgacgaaggtaatcttttctcagccccacgagcatggtggatgctgcgcacctttagtgtagagaaagtgtcgattctggggggtggacttgcaggctggcagcgcgatgatctgctgttagaagaaggtgcagtagagctgccggaaggagagtttaacgccgcgtttaatcctgaagccgtggtgaaagtaaccgatgtattattggcaagccatgaaaatacggcgcaaattattgatgcccgcccggctgcacgttttaacgcagaagttgatgaacctcgcccaggtttacgtcgcggacatattcccggagcactgaatgttccgtggacggaactggtgcgcgaaggcgaactaaaaacgaccgatgaactggatgcgatattttttggtcgcggcgtcagctacgacaaaccaattatcgtcagctgcggctctggtgtaacggcagccgtggttttgttagcactcgcgacgctggatgtgccaaacgtgaaactgtacgacggcgcatggagtgaatggggcgcgcgggcagatttaccggttgagccagtgaaataa

SEQ ID NO: 458076 - DNA, 777 bp, Shigella boydii
atgtccgaaacaaaaaacgaacttgaagacctgctggaaaaagcagcaaccgaaccggcgcaccgcccggcctttttccgtactctactggaatccaccgtctgggtgcctggtacggcggcgcagggcgaggctgtggttgaagatagtgcgcttgatttacagcactgggaaaaagaagacggcaccagcgtcattccttttttcacctcgttagaagcgcttcaacaggcggttgaagacgaacaggcatttgtcgtaatgcccgttcgcacattgtttgagatgacccttggcgaaacgctcttccttaatgccaaactgccgaccggtaaagaatttatgccgcgtgaaatcagtttgttgattggtgaagagggaaatccgctgagcagccaggaaatcctggaaggcggtgaatcgctgatattatcggaagtcgcagagccgccagcacaaatgattgattcactcaccaccttatttaaaaccattaagccggtgaagcgtgcttttatttgttcaattaaagagaacgaagaggcacagcctaatttatttattggcattgaagccgatggtgatatcgaagaaattattcaggcgacgggaagtgtagcgaccgatacattacctggcgatgaaccaatcgatatttgtcaggtgaaaaaaggggaaaaaggaattagccactttattaccgaacatattgtgccattctatgaacgtcgctggggaggttttttgcgtgactttaaacaaaaccggataatctaa

SEQ ID NO: 458077 - DNA, 1284 bp, Shigella boydii
atgacagaagcgatgaagattaccctctctacccaacctgccgacgcgcgctggggagaaaaagcaacttacagcattaataatgacggcattaccctgcatttgaacggggcagacgatctggggctgattcagcgtgcggcgcgcaagattgacggtctgggcatcaagcatgttcagttaagcggtgaaggctgggatgcggatcgctgctgggcattctggcaaggttacaaagccccgaaaggcacgcgtaaagtggagtggccggatctggacgatgcccagcgccaggaactggataaccgcctgatgatcatcgactgggtgcgtgacaccatcaacgcaccggcagaagaattgggaccatcgcaactggcacagcgtgctgttgatctgatcagcaacgtcgcgggcgatcgtgtgacttatcggatcaccaaaggcgaagatctgcgtgagcaaggttatatggggctgcacaccgtcggacgcgcttcagaacgttctccggtattgctggcgctggattacaacccaactggcgataaagaagcgccagtgtacgcgtgcctggtaggtaaaggtatcacttttgactccggcggctacagcatcaaacagactgcgtttatggactcgatgaagtcggacatgggcggcgcggcaacggttaccggggcgctggcatttgccattacgcgcggactgaacaagcgcgtgaagctgttcctctgctgtgcggataacctgattagcggcaatgcgttcaagctgggcgatatcatcacctatcgcaacggtaaaaaagttgaagtgatgaacactgatgccgaagggcgtctggtgcttgccgatggtctgattgatgccagtgcgcagaaaccggaaatgatcattgatgcggcgaccctcaccggggcggcgaaaactgcgctgggtaatgattatcacgcgctgttcagttttgacgatgcgcttgccggtcgtttgctggcgagtgcctcacaagagaacgaaccattctggcgtctgccgctggcggaattccaccgcagccagctgccgtctaactttgccgaactgaacaataccggaagcgcggcgtatccggcaggcgcgagcacggcggcgggcttcctgtcgcactttgttgagaactatcagcaaggctggctgcatatcgactgctcggcgacttaccgtaaagcgccggttgaacagtggtctgcgggcgctacgggacttggtgtgcgcacgatagctaatctgttaacggcgtaa

SEQ ID NO: 458078 - DNA, 201 bp, Shigella boydii
atgggacttaagtggaccgatagccgcgaaattggcgaagcactgtacgatgcgtatcctgatcttgatccgaaaacggttcgattcaccgatatgcatcagtggatttgcgatctggaagatttcgacgacgacccgcaggcatccaacgagaaaatcctcgaagcgattttgttagtctggctggacgaggccgaataa

SEQ ID NO: 458079 - DNA, 336 bp, Shigella boydii
atgccaaagattgttattttgcctcatcaggacctctgccctgatggcgctgttctggaagctaatagcggtgaaaccattctcgacgcagcgctgcgtaacggtatcgagattgaacacgcctgtgaaaaatcctgtgcttgcaccacctgccactgcatcgttcgtgaaggttttgactcgctgccagaaagctcagagcaggaagacgacatgctggacaaagcctggggactggagcccgaaagccgtttaagctgccaggcacgcgttaccgacgaagatttagtagtcgaaatcccgcgttacactatcaaccatgcgcgtgagcattaa

SEQ ID NO: 458080 - DNA, 1851 bp, Shigella boydii
atggccttattacaaattagtgaacctggtttgagtgctgcgccgcatcagcgtcgtctggcggccggtattgacctgggcacaaccaactcgctggtagcgacagtgcgcagcggtcaggccgaaacgttagccgaccatgaaggccgtcacctgctgccatctgttgttcactatcaacagcaagggcattcggtgggttatgacgcgcgtactaacgcagcgctcgataccgccaacaccattagttctgttaaacgcctgatgggacgctcgctggctgatatccagcaacgctatccgcatttgccttatcaattccaggccagcgaaaacggcctgccaatgattgaaacggcggcggggctgctgaacccggtgcgcgtttctgcggacatcctcaaagcactggcggcgcgggcaactgaagccctggcaggcgagctggatggtgtcgttatcaccgttccggcgtactttgacgatgcccagcgtcagggcaccaaagacgcggcgcgtctggcggggttgcatgttctgcgcttacttaacgaaccgaccgctgcggctatcgcctacgggctggattccggtcaggaaggcgtgatcgccgtttatgacctcggtggcgggacgtttgatatttccattctgcgcttaagtcgcggcgtgtttgaagtgctggcaaccggcggtgattccgcgctcggcggcgatgatttcgaccatctgctggcggattacattcgcgagcaggcggacattcctgatcgtagcgataaccgcgttcagcgtgaactgctggatgccgccattgcagccaaaatcgcgctgagcgatgcggactccgtgaccgttaacgttgcgggctggcagggcgaaatcagccgtgaacaattcaatgaactgatcgcgccactggtaaaacgaaccttactggcttgtcgtcgtgcgctgaaagacgcgggcgtagaagctgatgaagtgctggaagtggtgatggttggcggttctactcgcgtgccgctggtgcgtgaacgggtaggcgaatttttcggtcgtccaccgctgacttccatcgacccggataaagtcgtcgctattggcgcggcgattcaggcggatattctggtgggtaacaagccggacagcgaaatgctgctgcttgatgtgatcccactgtcgctgggcctcgaaacgatgggcggcctggtggagaaagtgattccgcgtaataccactattccggtggcccgcgctcaggatttcaccacctttaaagatggtcagacggcgatgtctatccatgtaatgcagggtgagcgcgaactggtgcaggactgccgctcactggcgcgttttgcgctgcgtggtattccggcgctaccggctggcggtgcgcatattcgcgtgacgttccaggtcgatgccgacggtcttttgagcgtgacggcgatggagaaatccaccggcgttgaggcgtctattcaggtcaaaccttcttacggtctgaccgatagcgaaatcgcttcgatgatcaaagattcaatgagctatgccgagcaggacgtaaaagcccgtatgctggcagaacaaaaagtagaagcggcgcgtgtgctggaaagtctgcacggcgcgctggctgctgatgccgcgctgttaagcgccgcagagcgtcaggtcattgacaatgctgccgctcacctgagtgaagtggctcagggcgatgatgttgacgccatcgaacaagcgattaaaaacgtagacaaacaaacccaggatttcgccgctcgccgcatggaccagtcggttcgtcgtgcgctgaaaggccattccgtggacgaggtttaa

SEQ ID NO: 458081 - DNA, 516 bp, Shigella boydii
atggattacttcaccctctttggcttgcctgcccgttatcaactcgatacccaggcactgagcctgcgttttcaggatctacaacgtcagtatcatcctgataaattcgccagcggaagccaggcggaacaactcgccgccgtacagcaatctgcaaccattaaccaggcctggcaaacgctgcgtcatccgttaatgcgcgcggaatatttgctttctttgcacggttttgatctcgccagcgagcagcatactgtgcgcgacaccgcgttcctgatggaacagctggagctgcgcgaagaactggacgagatcgaacaggcgaaagatgaagcgcggctggaaagctttattaaacgtgtgaaaaagatgtttgatacccgccatcagttgatggttgaacagttagacaacgagacgtgggacgcggcggcggataccgtgcgtaagctgcgttttctcgataaactgcgaagcagtgccgaacaactcgaagaaaaactgctcgatttttaa

SEQ ID NO: 458082 - DNA, 324 bp, Shigella boydii
atgtcgattacactgagcgacagtgcagcagcgcgagtaaatacctttctggctaaccgcggcaaagggtttggcctgcgtctgggcgtgagaacctccggatgttcaggtatggcttatgtactggaatttgttgacgaaccgacgccggaagacatcgtgtttgaagacaaaggcgtgaaagtcgtggtcgatggcaaaagcctgcaatttctggacggtacgcagctggacttcgtaaaagaaggcctgaatgaagggtttaaattcaccaacccgaacgttaaagatgagtgtggttgcggcgaaagcttccacgtttga

SEQ ID NO: 458083 - DNA, 387 bp, Shigella boydii
atggcttacagcgaaaaagttatcgaccattacgagaatccgcgtaacgtgggttcctttgacaacaacgacgagaacgtcggcagcggcatggtgggtgcaccggcctgtggcgacgtgatgaagttgcagattaaagtcaacgatgaaggtatcattgaagacgcgcgttttaaaacttacggctgcggttctgctatcgcttccagctccctggtcaccgaatgggtgaaagggaagtctctcgtcgaagcgcaggcgatcaaaaacaccgatattgctgaagaacttgaactgccgccggtgaaaattcactgttctattctggcagaagacgcgatcaaagccgccattgcggactataaaagcaaacgtgaagcaaaataa

SEQ ID NO: 458084 - DNA, 1215 bp, Shigella boydii
atgaaattaccgatttatctcgactactccgcaaccacgccggtggacccgcgtgttgccgagaaaatgatgcagttcatgacgatggacggaacctttggtaacccggcctctcgttctcaccgtttcggctggcaggctgaagaagcggtagatatcgcccgtaatcagattgccgatctggtcggcgctgatccgcgtgaaatcgtctttacctctggtgcaaccgaatctgacaacctggcgatcaaaggtgcagccaacttttatcagaaaaaaggcaagcacatcatcactagcaaaaccgaacacaaagcggtactggatacctgccgtcagctggagcgcgaaggttttgaagtcacctacctggcaccgcagcgtaacggcattatcgacctgaaagaacttgaagcagcgatgcgtgacgacaccatccttgtttccatcatgcacgtaaataacgaaatcggcgtggtgcaggatatcgcggctatcggcgaaatgtgccgtgctcgtggcattatctatcacgttgatgcaacccagagcgtgggcaaactgcctatcgacctgagccagttgaaagttgacctgatgtctttctccggtcacaaaatctatggcccgaaaggtatcggtgcgctgtatgtacgtcgtaaaccgcgcgtacgcatcgaagcgcaaatgcacggcggcggtcacgagcgcggtatgcgttccggcactctgcctgttcaccagatcgtcggaatgggcgaggcctatcgcatcgcaaaagaagagatggcgaccgagatggaacgtctgcgcggcctgcgtaaccgtctgtggaacggcatcaaagatatcgaagaagtttacctgaacggtgacctggaacacggtgcgccgaacattctcaacgtcagcttcaactacgttgaaggtgagtcactgattatggcgctgaaagacctcgcagtttcttcaggttccgcctgtacgtcagcaagcctcgaaccgtcctacgtgctgcgcgcgctggggctgaacgacgagctggcacatagctctatccgtttctctttaggtcgttttactactgaagaagagatcgactacaccatcgagttagttcgtaaatccatcggtcgtctgcgtgacctttctccgctgtgggaaatgtacaagcagggcgtggatctgaacagcatcgaatgggctcatcattaa

SEQ ID NO: 458085 - DNA, 489 bp, Shigella boydii; identical to SEQ ID NO: 2622

SEQ ID NO: 458086 - DNA, 741 bp, Shigella boydii
atgctgcaaaatattcgaattgtgctggtggagacgtcacacaccggcaatatgggttctgttgcccgtgccatgaaaacaatgggattaaccaatctgtggctggttaatccactggtgaaacccgactcccaggcgattgccctggcagcaggggccagcgatgtgattggtaatgctcacatcgtcgatacgctcgacgaagcgttagccggttgtagcttggtggtgggcaccagcgcacgttcccgcacgctgccatggccgatgctcgacccgcgcgaatgcggcctgaaaagcgtcgctgaagcggcaaataccccggtggcgctggtgtttggtcgcgagcgcgtcggcttgaccaatgaagagttgcagaaatgccattatcatgtcgcgattgcggctaacccggaatacagctcgctgaacctggcgatggcggttcaggttattgcctatgaagtgcgcatggcctggctggcaactcaggaaaacggcgagcaggtcgagcatgaagagacgccgtatccgctggtcgatgatctggagcgtttttatggtcatctggaacaaacgctgctggcaaccggttttatccgtgaaaaccatccggggcaggtgatgaataaattgcgccgtctgtttacccgtgcgcgcccggaaagccaggaattgaatatcctgcgcgggattctggcttctattgagcagcagaataaaggtaacaaggccgaataa

SEQ ID NO: 458087 - DNA, 804 bp, Shigella boydii
atgcatccgatgctgaacatcgccgtgcgcgcagcgcgcaaggcgggtaatttaattgccaaaaactatgaaaccccggacgctgtagaagcgagccagaaaggcagtaacgatttcgtgaccaacgtagataaagctgccgaagcggtgattatcgacacgattcgtaaatcttacccacagcacaccatcatcaccgaagaaagcggtgaacttgaaggtactgatcaggatgttcaatgggttatcgatccactggatggtactaccaactttatcaaacgtctgccgcacttcgcggtatctatcgccgttcgtatcaaaggccgcaccgaagttgctgtggtatacgatcctatgcgtaacgaactgttcaccgccactcgcggtcagggcgcacagctgaacggctaccgtctgcgcggtagcaccgctcgcgatctcgacggtaccattctggcgaccggcttcccgttcaaagcaaaacagtacgccactgcctacatcaacatcgtcggcaaactgttcaacgaatgtgcagacttccgtcgtaccggttctgcggcgctggatctggcttacgtcgctgcgggtcgtgttgacggtttctttgaaatcggtctgcgtccgtgggatttcgcggcaggcgagctgctggttcgtgaagcgggcggcatcgtcagcgacttcaccggtggtcataactatatgctgaccggtaacatcgttgctggtaacccgcgtgttgtgaaagccatgctggcgaacatgcgtgacgagttaagcgacgctctgaagcgttaa

SEQ ID NO: 458088 - DNA, 855 bp, Shigella boydii
atggcgctgccagtgaacaaacgcgttctcaaaattctgtttattctctttgttgttgccttctgcgtttatttagtgccgcgcgttgccatcaacttcttctattatcctgacgataaaatttacggtcccgacccctggtcggcggaatccgtcgaatttacggctaaggacggtactcgtctgcaaggctggtttattccttcttcgacgggccctgctgacaatgccatcgtaaccatcattcatgctcacggcaatgccggaaatatgtccgcccactggccgctggtcagttggttacccgagcgtaatttcaacgtttttatgtttgattatcgcgggtttggtaaatcaaaaggcacgccgtcccaggccggattgctggacgatacgcaaagtgccatcaatgtggtgcgccatcgcagtgatgtaaacccacaacgactggtgctgttcgggcagagtattggcggggcgaatattcttgctgttattggtcaggatgatcgtgaaggcatacgtgcggtgatcctcgactccacatttgcctcttatgcaaccatcgccaatcagatgatccccggcagtggctacttacttgatgagagttacagcggcgaaaattatatcgccagcgtcagcccgatcccgcttttactcattcacggtaaagctgatcacgttatcccatggcagcacagcgaaaagttgtatagcctggcaaaagagacaaaacggttgatcctaatcccggatggcgaacacattgatgctttttccgatcgtcacggcgatgtttatcgcgaacagatggtggactttatccttagcgcgttgaatccgcagaactaa

SEQ ID NO: 458089 - DNA, 1296 bp, Shigella boydii
atgatgcctacgcttgctccaccatctgtcctttcggctccccagcgccgctgccagatcttgctgacgctctttcagccggggttgaccgccaccatggcaaccttcagcgagcttaatggtgtggatgatgatattgccagtcttgatatcagcgaaacaggacgggagatcctgcgctatcatcaactcacactgacgactggttatgacggtagctaccgggttgaaggtacagtgcttaaccaacgtttgtgtttatttcactggctacgacgtggtttccgtctgtgtccgtcatttattaccagccaattcacccccgccctgaagagtgaactgaagcggcgcggaattgcgcgtaacttttacgacgataccaatctacaagcgttagtgaatctctgctcccgacggctgcaaaaacgctttgaaacgcgcgatattcatttcctgtgtctgtatctgcaatattgtttgctgcaacaccacgctggaattacgcctcagtttaatccgctccaacgtcgctgggcggaatcctgccttgaatttcaggtagcgcaggaaattggacgccactggcagcgtcgggcgctccagcctgtaccgcctgatgagccactgtttatggcattacttttttccatgttgcgggttcccgatccattgcgtgatgcgcatcagcgagacagacaattgcgtcagtctatcaaacgtctggtaaaccattttcgtgagctgggaaatgttcgtttttatgatgaacaggggttatgcgatcagctttatacccacctcgcccaggcgttaaatcgcagtttgtttgccatcggtattgataataccctgccagaagagttcgccagactgtacccacgcctggtgcgcaccacccgcgcggcgctggccggatttgaaagtgaatacggcgtccatctttctgatgaggaaagtggtctggtcgcagtgattttcggtgcctggctaatgcaggaaaacgatctgcatgaaaaacagattattcttcttaccgggaatgatagcgagcgagaagcgcagattgagcagcagttacgcgaactaacgttactgccgctcaacattaaacatatgtcggtaaaggcatttttgcagacaggcgctccgcgcggcgcggcgcggcgcggcgcggcactgattattgcgccttataccatgccgttaccgctcttttcaccaccgctgatctatacggacctgacactgacaacacatcaacaggagcagatccgcaaaatgctcgaatcagcatga

SEQ ID NO: 458090 - DNA, 1140 bp, Shigella boydii
atggttttgcaatccacgcgctggttggcgctcggctatttcacatacttttttagttacggcatttttctacctttctggagcgtctggcttaaagggattggtttaacgccagaaaccatcggcctgttattgggggcaggtctggttgcccgttttctcgggagtttgctcatcgcgccccgcgtcagcgatccttctcgcctgatttccgccttgcgcgtgctggcaatgatgacacttctctttgctgtcgccttctgggcgggggcgcacgtagcgtggctgatgctggtgatgattggctttaacctctttttctcaccgctggtaccgttgaccgatgcactggcgaatacgtggcaaaagcagttcccgcttgattacggcaaagtgcgactgtggggctcggtggcgtttgtcattggctcggcgctgacgggcaaactggtcactatgtttgattatcaggtgatcctcgcgctgttaacattgggcgtggcatccatgctgctcggctttctcatccgtccgacgattcagccacaaggggcaagccgccagcaggagagcaccggttggtcagcgtggttggcgctggttcttcagaactggcgctttctggcctgcgtttgtttattgcagggggcacatgcggcctattacggttttagcgccatttactggcaggcagctggctactcggcctcggcggtggggtatttgtggtcgctgggcgtggtggcggaagtcattatctttgcgctgagtaataaacttttccgccgttgtagtgcacgcgatatgctgttgatctcggcgatttgcggcgtagtgcgctggggcattatgggagcaactacggcgttgccgtggttgatagtggtgcaaattctgcattgcggcaccttcacggtctgccacctggccgccatgcgctatattgccgctcgccagggtagcgaagtcatccgtttacaggcggtttactctgccgtcgcgatgggcggcagtatagctatcatgaccgttttcaccggtttcctgtatcaatatctgggccacggcgtgttctgggtaatggcgctggtggcgcttccggcaatgtttttgcgcccgaaagttgttccctcatgctga

SEQ ID NO: 458091 - DNA, 399 bp, Shigella boydii
gtggttgtgttaccggttgatcaccctttagcacatgaaaaagagatcaccgccgcgcaactggatggcgtgaatttcgtcagtaccgatccggcgtattccggttcgcttgcgccgatcgttaaagcgtggtttgcgcaagaaaacagccagccaaatatcgtccaggtggcaacgaatattctggtgaccatgaatctggtgggcatggggctgggcgtcactttgatacccggttatatgaataattttaataccggacaggttgtttttcgtcccattgccggaaatgtgccttccattgctttactgatggcgtggaagaaaggggagatgaagccggcattacgtgatttcatcgccattgtgcaggaacgtttggcaagcgtaacggcataa

SEQ ID NO: 458092 - DNA, 948 bp, Shigella boydii
atgagcaaaatatcagatttgaattattctcaacacattacattagccgacaattttaaacaaaaaagtgaagttttaaatacctggcgtgttggaatgaataattttgcccgtaatgccgaggggcaggataacacaagaaatatccttgatcctaagacatttttggaatttttggtaaaaatatttactctaggttatgtggattttagcaaacgctccaacgaagcgggaagaaatatgatggctcatattgagtcctcatcttatatcaaaaataatgatggcagtgagataataaagtttgttatgaataatcctgaaggggaacgagcggatttatctaaggtggaaatagaaatcacactttccactttcactactatggggactcgtcaaggacatacggctattatatttcaacaacctgatggttcgactaatcgttatgaaggaaagtcctttgaaagaaaagatgagagttcattacacctgattactaacaagattctggcatgttaccaacgcgaagctaacaaggaaatagctcgtctattaaatatttcgcaggagtttaataattctcaggacttgaataactcgcaggtgagttgtaaagattcagttgattctacgattacggatttattagaaaaaccattgaataatgcattattagcaataaggaaagaacatctgctattaatgccttatgtatgtaatgaatcgatttcatacttgcttggtgaaaaagggatactgaaagaaatagatgaccttaacgcagtaaataattatcttcttaataataagaaagctactgacaatgaaattaatgacatcaaagttaacctgtctcatattcttattgattccttagatgatgcaaaagttaaccttacaccggtcatcgattctggagacttttttaaaattcccatatattaa

SEQ ID NO: 458093 - DNA, 453 bp, Shigella boydii
atgatcatcggaaatattcataatcttcagccgtggctaccccaggagttacgccaggcgattgagcatatcaaagcacacgttacggcagaaacgccaaagggcaagcacgatatcgaaggcaatcgtctgttttatcttatctcggaagatatgaccgagccgcacgaagctcgccgtgcggagtaccatgcccgctatctcgacattcagattgtgttaaaaggtcaggaaggcatgaccttcagtacgcaacctgcaggcaccccggataccgactggttagctgataaagacatcgcatttttgccggaaggcgttgatgagaaaacagttatccttaatgaaggtgattttgttgtgttttatccgggggaagtgcataaaccgctgtgcgcagtgggcgcgccagcccgggttcgcaaagcagtagtgaagatgctgatggcgtga

SEQ ID NO: 458094 - DNA, 594 bp, Shigella boydii
atggtcactaaaaaacaatctcgcgttccaggtcgtcccagacgtttcgctcctgagcaggcagtctctgcggcaaaagtgctttttcaccaaaaaggtttcgatgctgtcagtgttgctgaagttactgattatcttggtattaaccccccgagcctctacgcggcttttggcaataaggctgggttatttagccgtgtactcaatgaatatgtcggtacggaagctattccgcttgccgatattcttcgtgatgatcgtccggtaggggagtgcctggctgaggtattaaaagaagcggcgcgcagatatagccaaaacggcggctgcgctggctgtatggttcttgaaggcattcatagtcatgatccacaagcgcgtgatattgccgttcaatattatcacgccgcagaaacgaccatttatgactatatcgccaggcggcatccacaaagcgcacaatgtgtgactgattttatgagtaccgtgatgtcagggctttctgcgaaggcacgggaggggcactccatcgaacaactctgtgcaacagctgcactggcgggggaagcgataaaaactattctcaaggagtga

SEQ ID NO: 458095 - DNA, 714 bp, Shigella boydii
atgggcgcttttacaggtaagacagttctcatcctcggtggtagccgtggaatcggtgccgctatcgtacgtcgtttcgtcaccgatggggccaatgtacgattcacctatgcggggtcgaaagatgccgctgaacgcctggcacaagagactggagcgacagcagtattcacagatagtgctgacaaagacgctgttattgatgtcgttcgtaagagcggcgcattggatatcctggtggtaaatgcaggtattggcgtctttggcgatgccctggaattaaatgccgacgatattgatcgccttttcaaaatcaatattcatgctccttaccatgcctctgttgaagccgcccggcagatgcccgaaggcggacgcatcttaatcatcggctccgtgaatggcgatcgtatgcctgttgcaggcatggctgcttatgccgccagtaaatctgccctgcaaggcatggcgcgcgggctggcccgtgatttcggaccgcgtgggatcaccatcaacgtcgtccagccagggccaattgataccgacgctaatcccgccaacgggccaatgcgcgatatgtcgcatagttttatggccatcaaaagacatgggcaaccggaagaggtcgctggtatggtcgcatggttagcagggccagaagccagttttgttaccgacgcgatgcataccattgatggcgcgtttggcgcataa

SEQ ID NO: 458096 - DNA, 396 bp, Shigella boydii
atggtagaaagaaccgctgttttccctgctggacgacattcactgtatgctgagcatcgttattctgcggctattcgttccggcgatttgctgtttgtttccgggcaagtaggaagtcgagaggacggaacaccagaacccgattttcagcaacaagtcagactggcctttgataatttgcatgcgaccctggcagctgcgggatgcacttttgacgatatcattgatgttacgagctttcataccgatccagaaaaacaatttgaagacatcatgacggtgaaaaatgaaatatttagcgcgccaccttatccaacctggacggcggtgggcgttacatggctggcaggctttgattttgaaattaaagtgatagcgcgcatccctgagctctaa

SEQ ID NO: 458097 - DNA, 936 bp, Shigella boydii
atggctaatccgctatatcagaaacatatcatttccataaacgaccttagtcgcgatgaccttaatctggtgctggcaacagcggcaaaactgaaagcaaacccgcaaccagagctgttgaagcacaaagtcattgccagctgcttcttcgaagcctctacccgtacccgcctctctttcgaaacttccatgcaccgcctgggtgccagcgtggtgggcttctccgacagcgccaatacatcactgggtaaaaagggcgaaacgctggccgataccatttcggttatcagcacttacgtcgatgcgatagtgatgcgtcatccgcaggaaggtgcggcgcgcctggccaccgagttttccggcaatgtaccggtactgaatgccggtgatggctccaaccaacatccgacgcaaaccttgctggacttattcactattcaggaaacccaggggcgtctggacaatctccacgtcgcaatggttggtgacctgaaatatggccgcaccgttcactccctgactcaggcgttagcgaagttcgacggcaaccgtttttacttcatcgcgccggacgcgctggcaatgccgcaatacattctggatatgctcgatgaaaaagggatcgcatggagtctgcacagctctattgaagaagtgatggcggaagtagacatcctgtatatgacccgcgtgcaaaaagagcgcctggacccatccgaatacgccaacgtgaaagcgcagtttgttcttcgcgccagcgatctccacaacgccaaagccaatatgaaagtactgcatccgctgccgcgtgttgatgaaattgcgacggatgttgataaaacgccacacgcctggtacttccagcaggcaggcaacgggattttcgctcgccaggcgttactggcactggttctgaatcgcgatctggtactgtaa

SEQ ID NO: 458098 - DNA, 462 bp, Shigella boydii
atgacacacgataataaattgcaggttgaagctattaaacgcggcacggtaattgaccatatccccgcccagatcggttttaagctgttgagtctgttcaagctgaccgaaacggatcagcgcatcaccattggtctgaacctgccttctggcgagatgggccgcaaagatctgatcaaaatcgaaaatacctttttgagtgaagatcaggtagatcaactggcattgtatgcgccgcaagccacggttaaccgtatcgacaactatgaagtggtgggtaaatcgcgccccagtctgccagagcgcatcgacaatgtgttggtctgcccgaacagcaactgtatcagccatgccgaaccggtttcatccagctttgccgtgcgaaaacgcgccaatgacatcgcgctcaaatgcaaatactgtgaaaaagagttttcccataatgtggtgctggccaattaa

SEQ ID NO: 458099 - DNA, 387 bp, Shigella boydii
atgagcaaaactatcgcgacggaaaatgcaccagcagctatcggtccttacgtacagggcgttgatctgggaaatatgatcatcacctccggtcagatcccggtaaatccgaaaacgggcgaagtaccggcagacgtcgctgcacaggcacgtcagtcgttggataacgtaaaagcgatcgtcgaagccgctggtctgaaagtgggcgacatcgttaaaactaccgtgtttgtaaaagatctgaacgacttcgcaaccgtaaacgccacttacgaagccttcttcaccgaacacaacgccaccttcccggcacgttcttgcgttgaagttgcccgtctgccgaaagacgtaaagattgagatcgaagcgatcgctattcgtcgctaa

SEQ ID NO: 458100 - DNA, 2697 bp, Shigella boydii
atgtttaaagaaatttttacccggctcattcgccatttaccttcccgtctggttcatcgtgatccattgcctggcgcgcagcagacagtgaatacggtggtcccgccgtccttaagtgcgcattgcctgaaaatggcggtgatgcccgaagaagaattgtggaaaacgttcgacacccatccggaagggttaaatcaggcggaagtggaatctgcccgcgaacaacatggtgaaaataaattacccgcacaacaactgtcgccgtggtgggtacatttatgggtctgctatcgcaacccctttaatattttactcaccattctcggcgctatttcttacgccacggaagatttatttgctgcgggcgttatcgcgctaatggtcgctatttctacgttgctgaactttattcaggaagcacgttccactaaagcggcagatgccctgaaagcgatggtcagcaataccgcgacggtgctgcgcgtaattaacgacaaaggcgaaaatggctggctggagatcccgatcgaccagctggtgcccggcgatattataaaactggcggcgggggatatgatcccggcagatttacgtatcttgcaagcgcgggatctgttcgtcgctcaggcgtcgttaaccggtgagtctctgcccgtggaaaaagccgctaccactcgccagccggagcacagcaatccgctggagtgcgacacgctgtgttttatgggcaccaccgtggtgagcggcacggcacaagcaatggtgattgctacaggtgccaatacctggtttggtcaactggcggggcgtgttagtgagcaggaaagcgagccgaatgcctttcagcaagggatcagccgcgtcagtatgctgctgattcgctttatgctggtgatggcaccggtggtgctgttaatcaatggctacaccaaaggcgactggtgggaagcggcgctgtttgcgctttcggtcgcggtaggcctaacgccggaaatgttgccgatgattgttacctcgacgctggcgcgcggcgcagtaaagctgtcgaaacagaaagtgatcgtcaaacatctggatgctattcagaactttggcgcaatggatattctgtgcactgataaaaccggcaccctgacgcaggataaaattgtgctggagaatcataccgatatctccggtaaaaccagcgaacgcgtgctgcatagcgcgtggttgaacagtcattatcagaccggacttaaaaacctgctcgatacagcggtgctcgaaggtacggatgaagagtcagcgcgctcgctggccagtcgttggcaaaaaatcgatgagattccgtttgatttcgagcgtcgccggatgtcggtggtagtggcagaaaataccgagcaccatcagctggtttgcaaaggtgcattgcaggaaatcctcaatgtgtgttcgcaggtgcgtcacaatggcgagattgtgccgctcgatgacatcatgctgcgtaagattaagcgggttactgatacgctgaatcgtcaggggctgcgcgtggttgcggtggcgacgaaatacctgccagcgcgtgaaggagattaccagcgggcggatgaatccgacctgatcctcgaaggatatattgcttttcttgatccgccaaaagagacaaccgctccggcactgaaggcattaaaagcgagtggaattaccgtaaaaatccttactggcgacagtgagttagttgcagcgaaagtgtgccatgaagtggggctggacgcgggagaggtggtcattggtagtgatattgaaacgctatctgacgacgaactggcaaatcttgcacagcgcaccacgctgtttgcccgcctgacgccgatgcataaagaacgcattgtgaccttactgaagcgcgaagggcatgtggttggctttatgggcgatggtattaatgatgcgcccgccttacgcgcggcggatatcggcatttctgtggacggcgcggtagatattgcccgtgaagcggctgatatcatcctgctggaaaaaagcctgatggtgctggaagagggggttattgagggacgtcgcactttcgccaacatgctgaaatacatcaaaatgacggcgagttctaactttggtaatgtgttcagcgtgctggtggcgagtgctttcttgcccttcctgccgatgttgccgttacacttgcttattcagaacctgctgtacgatgtgtcacaggtggcgatcccgtttgataacgtcgacgacgagcaaattcaaaagccgcagcgttggaatccggcggatctggggcgctttatgatcttcttcggaccgatcagctcgatcttcgatattctgacgttttgcctgatgtggtgggtattccatgccaacacgccggaaacgcaaacgctgttccagtcgggatggtttgtggtgggcttactgtcgcaaacgctgattgtgcatatgatccgcacccgccgtgtgccgtttattcagagctgtgcatcgtggccgttaatgatcatgaccgtgatcgtgatgattgtcgggatcgcattgccgttttcaccgctggccagttatctgcaattacaggcgttgccgttaagctatttcccgtggctggttgcgattctggcagggtatatgacgttaacccagttggtgaaaggattttatagccgtcgttacggctggcagtaa

SEQ ID NO: 458101 - DNA, 966 bp, Shigella boydii
atgcaaaatcggctgaccatcaaagacatcgcgcgcttaagcggcgtggggaaatctacagtttcccgggtgctgaataacgaaagcggcgtgagccagcgcacccgcgagcgtgttgaagcagtgatgaatcagcatggattttccccttcccgctctgcgcgcgctatgcgtgggcaaagcgataaagtggtcgccatcattgttacccgcctggattcgttgtcagaaaatctcgccgttcaaaccatgctgccagagttctatgaacaaggttacgacccaatcatgatggaaagtcagttttccccgcaattagttgccgaacatttgggggtgctgaaacggcgtaatatcgacggcgtagtgctgttcggttttaccggcataacagaagaaatgttagcccactggcagtcatcgctggttctgctggcgcgtgacgcaaaaggctttgcttcggtctgttatgacgacgaaggggcaatcaagatcctgatgcaacggctgtatgaccaggggcatcgtaatatcagttatctcggcgtgccgcacagtgacgtgacgaccggtaagcgacgtcacgaagcctacctggcgttctgcaaagcgcataaactgcatcccgttgccgctctgccaggccttgctatgaagcaaggctatgagaacgtagcaaaagtgattacgcctgaaactaccgccttactgtgcgcaaccgacacgctggcacttggcgcaagtaaatacctgcaagagcaacgcatcgacaccttgcaactggcgagcgtcggtaatacgccgttaataaaattcctccatccggagatcgtcaccgtagatcccggttacgccgaagctggacgccaggcggcctgccagttgatcgcacaggtaaccgggcgcagcgaaccgcaacaaatcatcatccccgccaccctgtccagatcgtttcctgaacgataa

SEQ ID NO: 458102 - DNA, 1422 bp, Shigella boydii
atgatgagcaaaataaaccaaacggatatcgatcggttgattgaactggtcggcgggcgcggcaatattgcgacggtgagccactgtattactcgcctacgctttgtcctcaaccaaccggccaatgccagaccgaaagaaattgagcaactccccatggtgaaaggctgtttcaccaatgccgggcaatttcaggtggtgattggcaccaacgtgggtgactactatcaagcactgatagcgtcaaccggacaggcgcaggttgataaagagcaggtaaaaaaagccgcccggcagaatatgaaatggcatgagcagttgatctctcatttcgcagagaccttcttcccgttgctgcccgcgttgattagcggcggtttgatcctcggttttcgcaatgtgatcggcgatttgcccatgagcaacggtcaaacgctggcgcaaatgtacccttccctgcaaacgatctacgattttctgtggttgatcggtgaagcgatcttcttctacctgccggtcgggatttgctggtcagcggtgaaaaaaatgggcggcacaccgatccttggtatcgtgcttggcgtgacactggtttccccccaactgatgaacgcttatctgctcgggcagcagctgccggaagtgtgggactttggcatgttcagcatcgccaaagtgggctatcaggcgcaggtgatcccggcactgttagccgggctggcgctgggcgttattgaaactcgccttaaacgcatcgtgccagattacctctatctggtggtggtgcccgtctgttcgctgatcctcgcggtgttcctcgcccatgcgctgattggtccgtttggtcgcatgattggcgatggcgttgcctttgcggtacatcacctgatgaccggcagctttgctccgattggcgcggcattgtttggcttcctgtacgccccgctggtgatcaccggggtacaccagaccacgcttgctattgatttgcagatgattcaaagcatgggtggtacgccagtgtggccactgattgcgctgtcgaatatcgctcagggctccgccgtgatcggcattatcatttccagccgcaagcacaatgaacgcgagatctccgtgcctgcggcgatctccgcctggcttggggtcactgagcctgcaatgtacggcatcaacctgaaatatcgcttcccgatgctgtgcgcgatgattggttctggtctggcaggattgctatgcggcctgaacggcgttatggcgaatggcatcggcgtaggcggcctgccgggaattctctcgattcaaccgaactactggcaggtgtttgcgctggcaatggctatcgccatcatcatcccgattgtactcacctcgtttatctatcagcggaaataccgcctgggcacgctggacattgtttaa

SEQ ID NO: 458103 - DNA, 1656 bp, Shigella boydii
atgactaatcctccccactggtggcaaaacggcgttatctaccagatttatccaaagagttttcaggacaccacgggtagcggtaccggcgatttacgtggcgttatccaacgcctggactatctgcataaactgggcgttgatgccatctggctaacccccttttatgtctctccccaggtcgataacggttacgacgtagcgaactatacggcgattgatcccacctacggcacgctggacgattttgacgaactggtgacgcaggcaaaatcgcgcgggattcgtatcattctcgatatggtgtttaaccatacctctacccaacatgcctggtttcgcgaggcgctgaacaaagaaagcccttaccgccagttttatatctggcgcgatggagaaccagaaacgccaccgaacaactggcgttcaaaatttggcggtagtgcgtggcgctggcatgcggaaagcgaacagtactatttgcatctctttgcaccagaacaggcggatctcaactgggagaatccagcggtacgcgcagtgctgaaaaaagtctgtgagttctgggccgatcgtggggtcgacgggttgcgcctggatgtggtgaatctgatctccaaagacccgcgtttccctgatgacctggatggcgacgggcgtcgcttctacaccgacgggccacgagcacacgagtttttgcacgagatgaaccgcgatgtgtttacgccacgcgggttaatgaccgtaggtgaaatgtcctccaccagccttgagcattgccagcgatacgcggcactgacaggcagtgaattgtcgatgacctttaattttcatcacctgaaggtcgattatcccggtggtgaaaaatggacgctggctaaacctgactttgtggcgttgaaaacattgttccgccactggcaacaaggaatgcacaacgtagcatggaatgccttgttctggtgtaaccacgatcagccgcgcattgtttctcgctttggtgatgaaggtgaataccgcgtgcctgcggcaaaaatgctggcgatggtgctgcatggcatgcagggaacgccgtatatctaccagggcgaagagattggcatgaccaacccgcatttcacgcgcattactgactatcgcgacgtagagagcctcaatatgtttgccgagctgcgcaacgatggtcgtgatgccgacgagttattggcaatccttgccagtaaatcccgtgacaacagccgcacgcccatgcaatggagcaacggcgataatgccggatttacggctggcgaaccgtggattggcctaggtgataactatcaacaaatcaacgtagaagccgcgctggccgatgattcctcggtgttttacacctaccaaaagttaatcgcactgcgtaagcaggaagccatcctgacatggggcaattaccaggatctgctgccaaacagccctgtattgtggtgctatcgccgtgaatggaaggggcaaaccttgctggtcattgccaaccttagccgtgagatccaaccctggcagccagggcaaatgcgcggcaactggcagcttgtgatgcataactacgaagaagcctcaccacaaccctgtgccatgaatttacggccttttgaggctgtctggtggttacagaagtaa

SEQ ID NO: 458104 - DNA, 2139 bp, Shigella boydii
atgacaccgcatgtgatgaaacgagacggctgcaaagtgccgtttaaatcagagcgcatcaaagaagcgattctgcgtgcagctaaagcagcggaagtcgatgatgccgattattgcgccactgttgctgcagttgtcagcgagcagatgcagggccgcaaccaggtggatatcaatgagatccagaccgctgttgaaaaccagctgatgtcaggtccatacaaacaactggctcgtgcttacatcgagtaccgtcacgatcgcgacattgaacgtgaaaaacgcggtcgcctgaatcaggagatccgtggtctggtcgagcagaccaacgcctcgttactcaacgaaaacgccaacaaagacagcaaggtgattccaacccagcgcgacctgctggccgggatcgtggctaaacactatgcacgtcagcacctgctgccgcgtgacgtggtgcaggcacatgagcgtggcgatattcactatcacgatctcgattactcgccgttcttcccgatgttcaactgcatgttgatcgacctgaaaggcatgctgacccagggctttaagatggggaacgccgagattgaaccgccgaagtcgatctctacggcaaccgctgtaactgcgcagattattgctcaggtcgccagccatatttatggcggcaccaccattaaccgtatcgatgaagtgctggcaccgtttgtcaccgccagctacaacaaacatcgcaagaccgcagaagagtggaacatcccggacgccgaaggctacgctaactctcgtaccattaaagagtgctacgatgccttccagtcgctggagtacgaagtaaacaccctgcacaccgccaacggtcagacgccgtttgtaacctttggttttggtctgggcaccagctgggagtcgcgcctgattcaggaatctatcctgcgtaaccgtatcgcaggcctcggtaaaaaccgtaaaactgcggtgttcccgaaactggtgtttgtgattcgcgatggcctgaaccataaaaaaggcgatccgaactacgacatcaaacagctggcgctggagtgcgcaagcaagcgcatgtatccggatatcctgaactacgatcaggtagtgaaagtcaccggttcgtttaaaactccgatgggctgccgcagcttcctcggcgtgtgggaaaatgaaaacggcgagcagatccacgatggtcgtaacaacctcggcgtgatcagcctgaacctgccgcgtattgctctggaagcaaaaggcgatgaagccaccttctggaagctgctggatgaacgtctggtgctggcacgtaaggcgctgatgacccgtatcgctcgtctcgaaggcgtgaaagcgcgcgtggccccgatcctctatatggaaggtgcttgtggcgtgcgtctcaatgctgacgatgatgtttctgaaatcttcaaaaacggtcgtgcgtctctttcgctgggttacatcggcatccacgaaaccattaacgcgctgttcggcggcgagcatgtttacgacaacgagcagcttcgcgcgaaaggtatcgccattgttgaacgtctgcgtcaggcagtggatcagtggaaggaagaaacgggttatggtttcagtctctacagcacgccgagtgaaaacctgtgcgaccgcttctgccgtctcgatactgctgagtttggcgtggtgccgggcgtgaccgataaaggttactacaccaacagtttccacctcgatgtggagaagaaggtgaacccgtacgacaagatcgactttgaagcgccttacccgccgctggcgaacggtggtttcatttgctacggcgagtatccaaacattcagcacaacctgaaggcgctggaagatgtctgggattacagctatcagcatgtaccgtattacggcaccaatacaccgattgatgagtgctacgagtgtggctttaccggtgagttcgagtgcaccagcaaaggcttcacctgcccgaaatgtggtaaccatgacgcctcccgtgtgtcggtaactcgccgcgtgtgcggatatttaggtagcccggatgcacgtccgtttaacgccggcaagcaggaagaagttaagcgccgcgttaaacatttgggaaatgggcagataggttga

SEQ ID NO: 458105 - DNA, 465 bp, Shigella boydii
atgaattatcatcagtactatcctgtcgacatcgtcaacggccccggcactcgttgcaccctgtttgtctccgggtgtgttcatgaatgccccggttgctataacaaaagcacatggcgggtaaattccggtcagccatttactaaagcaatggaagaccagatcattaacgatctgaatgacactcgtatcaaacgccagggtatttccctctccggcggcgatccgctgcatccgcaaaacgtgccggatattctgaaactggtacaacgcatccgcgccgagtgtccgggtaaagacatctgggtgtggacaggctataaactcgacgaactcaacgcagcgcaaatgcaggttgttgatttgattaacgtgctggtcgacggcaaatttgtgcaggatttaaaagacccttccctgatctggcgcggcagcagcaatcaggtggtgcatcatttgcgatga

SEQ ID NO: 458106 - DNA, 387 bp, Shigella boydii
atgcgaaaaagcctgttagctattcttgcagtctcctcgttggtattcagttcggcgtcgtttgccgctgatcttgaagacaatatggaaaccctcaacgacaatttaaaagtggtcgaaaaagccgataacgcggcgcaagtcaaagacgcgttaacgaagatgcgcgccgcagcgctggatgcgcaaaaagcaacgccgccgaagctcgaaggcaaatcaccggacagcccggagatgaaagacttccgtcacggtttcgatattctggtcggtcagattgacgacgcgctgaagctggcaaatgaaggtaaagtaaaagaagcgcaggctgccgcagagcaactgaaaacgacccgcaacgcctatcaccagaagtatcgttaa

SEQ ID NO: 458107 - DNA, 1353 bp, Shigella boydii
atggcacttgcaatgaaagtaatctctcaagttgaagcgcagcgcaagattctggaagaagcagtttccactgcgctggagttggcctcaggcaaatcggacggtgcggaagttgccgtcagcaagaccaccggcattagcgtaagcacgcgttatggtgaagtggagaatgttgaattcaatagcgatggcgcgctggggatcactgtttatcaccagaaccgcaaaggtagcgcatcatccaccgatttaagcccgcaggccattgcccgtactgtacaggcggcgctggatattgcccgttatacctcgccagatccctgtgccggcgtggcagacaaagagctgctggcctttgacgcaccagatctcgacttgttccaccctgcggaagtttccccggatgaagccattgaactggcggcccgcgcagaacaggcggcattgcaggcggacaaacgcatcaccaataccgaaggtggcagctttaacagccactacggtgttaaagtttttggcaacagccacggcatgttgcagggttactgctcaacgcgtcattcgctctccagctgtgtaattgccgaagaaaatggcgatatggagcgtgattacgcctacaccattggtcgtgcgatgagcgatctgcaaacgccagagtgggttggggccgactgtgctcgccgtactttatcgcgcctgtcaccgcgtaaactctccaccatgaaagcgcctgtcatttttgccaatgaagtggcaaccgggctttttggccatctggtgggggcgatagcgggtggatcggtttaccgtaaatctaccttcctgctggattcgctgggtaaacaaattctgccggactggctgaccattgaagagcatccgcatctgctgaaagggctggcgtcgacgccattcgacagcgaaggtgtgcgcaccgagcgtcgcgatattattaaagatggcatcctgactcagtggctgctgaccagctattcggcgcgaaaactggggctgaaaagcaccggacatgcgggcggtattcacaactggcggattgccggacaaggtctaagcttcgagcagatgctcaaagagatgggcaccgggctggtggtgacggaattgatgggccagggcgtgagtgcaattaccggtgattattcccgtggtgcggcgggcttctgggtagaaaacggcgaaattcagtatccggttagcgaaatcaccatcgcaggtaatttaaaagatatgtggcgcaatattgtcaccgtcggtaacgatattgaaacacgcagtaatatacagtgtggttctgtgctgttgccggagatgaaaatcgccggacagtaa

SEQ ID NO: 458108 - DNA, 552 bp, Shigella boydii
atgactaagcagcccgaagactggctcgacgacgttcccggtgatgacatcgaagacgaagacgatgaaattatctgggtcagtaaaagtgaaattaaacgtgatgccgaggagctaaaacgccttggcgcggaaattgttgatctggggaaaaacgcgctggataagatcccgttagatgcggatctgcgcgcggctattgagctcgcccagcgtattaagatggaaggtcgccgccgccagttgcagctcatcggtaagatgctgcgccagcgcgatgtagaaccgatccgtcaggcgctggataagctgaaaaaccgtcacaaccagcaggtggtgctgttccataaactggaaaacctgcgcgatcgtctgatcgatcaaggtgatgacgccatcgctgaggtattaaatctgtggcccgatgccgatcgtcagcaactgcgtactctgatccgcaacgcgaagaaagagaaagaagggaataagccgccgaaatccgcacgccagattttccagtatctgcgcgaactggcggagaatgaagagtaa

SEQ ID NO: 458109 - DNA, 1374 bp, Shigella boydii
atgcgcattcatattttaggaatttgtggcacgtttatgggcggtctggcgatgctggcgcgccagttaggccatgaagtaacgggttcggacgccaatgtgtatccgccgatgagcaccttacttgagaagcaaggcattgaactgattcagggttacgatgccagccagctcgatccgcagccggatctggtgattattggcaacgccatgacccgtggaaatccgtgtgtggaagcggtactggaaaaaaacatcccttatatgtcaggtccacagtggctgcacgattttgtgctgcgcgaccgctgggtgctggccgttgccggtacacacggcaaaaccaccaccgcgggaatggcgacctggattctggaacagtgtggttacaaaccgggatttgtgatcggcggtgtgccggggaactttgaggtttcggcgcgtctgggcgaaagcgacttctttgttatcgaagcggatgagtacgactgcgccttcttcgacaaacgctctaaatttgtccattactgcccgcgtacgctgatccttaacaaccttgagttcgatcacgccgatatctttgacgacctgaaagcgatccagaaacagttccaccatctggtgcgtatcgttccggggcagggccgtattatctggccggaaaatgacatcaacctgaaacagaccatggcgatgggctgctggagcgagcaggagctggtgggtgagcaggggcactggcaggcgaaaaagctgaccaccgatgcttccgaatgggaagtcttgctggatggcgaaaaagtgggcgaagtgaaatggtcgctggtaggcgaacataatatgcataatggcctgatggcgattgcggcggcccgccatgttggcgtagcgccggcagataccgctaacgcgctgggttcgtttattaatgctcgtcgccgtctggagttgcgtggtgaagcgaatggcgtcacggtatatgacgattttgcccatcacccgacggcgattctggcaacgctggcggcgctgcgtggcaaagttggtggtacagcgcgcattattgctgtgctggaaccgcgctcgaataccatgaaaatggggatctgcaaagacgatttggcaccttcattaggtcgtgccgatgaagtcttcctgctgcaaccggcgcatattccgtggcaggtggcagaagtggcagaagcctgcgttcagcctgcacactggagtggcgatgtggatacgctggcagatatggtggtgaaaaccgctcagcctggcgaccatattctggtgatgagcaacggcggttttggtgggatccatcagaaactgctggatggtctggcgaagaaggcggaagctgcgcagtaa

SEQ ID NO: 458110 - DNA, 999 bp, Shigella boydii
atgaaaacgttaggtgaatttattgtcgaaaagcagcacgagttttctcatgctaccggtgagctcactgctttgctgtcggcaataaaactgggcgccaagattatccatcgcgatatcaacaaagcaggactggttgatatcctgggtgccagcggtgctgagaacgtgcagggcgaggttcagcaaaaactcgacttgttcgctaatgaaaaactgaaagccgcactgaaagaacgcgatatcgttgcaggcattgcctctgaagaagaagatgagattgttgtctttgaaggctgtgaacatgcaaaatacgtggtgctgatggacccactggatggctcgtccaacatcgatgttaacgtctctgtcggtaccattttctccatctaccgccgagttacgcccgtcggcacgccggtaacggaagaagatttcctccagcctggtaacaaacaggttgcggcaggttacgtggtatacggctcctctaccatgctggtttacaccaccggatgcggtgttcacgcctttacttacgatccttcgctgggcgttttctgcctgtgccaggaacggatgcgcttcccggagaaaggcaaaacctactccatcaacgaaggaaactacattaagtttccgaacggggtgaagaagtacattaaattctgccaggaagaagataaatccaccaaccgcccgtatacctcacgttatatcggttcactggttgcggatttccaccgtaacctgctgaaaggcggtatttatctctacccaagcaccgccagccacccggacggcaaactgcgtttgctttatgagtgcaacccgatggcattcctggcggaacaagcgggcggtaaagcgagcgatggcaaagagcgtattctggatatcatcccggaaactctgcaccagcgccgttcgttctttgtcggcaacgaccatatggttgaagatgtcgaacgctttatccgtgagttcccggacgcgtaa

SEQ ID NO: 458111 - DNA, 993 bp, Shigella boydii
gtgataaaacgtaatttgccactgatgatcaccatcggcgtctttgtgctgggctatttctactgcctgacgcagtttcccggttttgcttccacaagagtgatctgcaatatcctgaccgataacgcttttctggggattattgccgttggtatgacctttgtgatcctctctggcggtatcgatctctccgtcggttcggtgatcgcctttactggcgtgtttctggcaaaagtggttggcgatttcggcctctcgccgctgctggcgtttccgctagtgctggtgatgggctgtgccttcggcgcatttatggggcttctgatcgacgccctgaagatcccggcatttatcattacgcttgcggggatgttctttttgcgcggcgtcagctatctcgtttcggaagagtcgattccgataaaccatcccatttatgacacgctctcaagccttgcgtggaaaatccccggcggcggtcaccttagtgcgatggggctgttgatgctggtggtggttatcggtattttccttgcgcatcgtacccgttttggcaatcaggtgtacgctattggcggcaacgcgacgtcggcgaacctgatggggatttctactcgcagcaccactattcgcatttatatgctctccaccggactggcaacactggcggggattgtcttctcgatttatacccaggccggatatgcactggcgggcgtaggtgtggaactggacgccatcgcgtcggtggtgattggcggtacgttgttaagtggtggcgtcgggacggtgcttgggacgctttttggcgtggcaattcagggactgatccagacttacatcaactttgacggcacgctgagttcctggtggacgaaaatcgccatcggtattttgttgtttatttttatagcattacagcgtgggttaacggtgctgtgggagaatcgtcagagttcgccagtgacaagagtcaacattgcgcagcgataa

SEQ ID NO: 458112 - DNA, 1023 bp, Shigella boydii
atgcctcaatctcttccggacaccactacgccaaaaaggcgctttcgctggccgacggggatgccgcagctggtagcactattgctggtgctgctggtcgacagcctggtagccccgcatttctggcaggtagtgcttcaggatgggcgtttgttcggtagccccatagacattcttaaccgtgcagcccccgttgcgttactggcgattggtatgacgctggtgatcgccaccggtgggattgatctctccgtaggggcggtgatggctatcgccggagccacaacggctgcgatgacggtcgcggaagtcagcctgccgattgttttgttaagcgccctgggcaccggcatcctggcgggattgtggaacggcatactggtagcgatcctcaaaattcagccatttgtcgccaccctgatcctgatggtcgccgggcgcggcgtggcgcaactgatcacctccggacagatcgtcacgtttaactcgccggatctctcatggtttggcagtggatcgctgttgttcctgccaacggcagtcattattgcggtactgacgcttctcctgttctggctgttgacccgcaaaacggcactggggatgtttatcgaagccgttggtatcaacattcgggcggcaaaaaatgccggggtaaacacgcggatcatcgtcatgctcacttatgtgttgagcgggctgtgtgcggcgattgcgggcattatcgtggcggcggatattcgcggtgccgatgccaacaacgccggattatggctggagctggacgccattctcgcggtggtgattggcggcggatcgctgatgggcgggcgctttaacctgctgctctcggtagtgggggcgctgattattcaggggatgaacaccggaattttgctttcgggctttccaccggagatgaaccaggtggtgaaagcggtggtggtgctttgcgtgctgattgtccagtcgcaacgctttatcagtctgattaaaggagtacgtagccgtgataaaacgtaa

SEQ ID NO: 458113 - DNA, 942 bp, Shigella boydii
atgcgtcagttgcgcgatcgcggcgtcagcctgatctttgtcactcactttctcgatcagatctatcaggtcagcgatcggatcaccgttttacgcaacggcagtttcgtaggctgtcgggaaacgcgcgagctaccgcagatcgaactggtaaaaatgatgctggggcgcgagctggatacccacgcgctacagcgtgccgggcgaacattgttgagcgacaaacccgttgccgcgttcaaaaattacggcaaaaaaggaacgatagcaccgtttgatctcgaagtgcgccccggcgagatcgtcggcctggcaggcttgctgggatccggacgtaccgaaaccgccgaagtgatcttcggtatcaaacctgctgacagcggcacggcgttgatcaaaggcaaaccgcaaaacctgcgatcgccacatcaggcttcggtactgggcatcggcttctgcccggaagacaggaaaaccgatggcatcatcgctgccgcctcggtgcgggaaaatatcatcctcgctctccaggcccagcgcggctggctacgacccatttcccgcaaagagcagcaagagattgccgaacgctttatccgccagcttggcattcgcacaccttcaactgaacaaccgattgaatttctctccggcggcaatcagcaaaaagtgttgctttcacgttggctactgacccgaccgcaatttctgatcctcgatgagccaacccgtggcattgatgttggtgcccacgccgagatcatccgcctgattgaaacgctatgcgccgatggtctggcgctgctggtgatctcctccgaactggaagaactggtgggctatgccgaccgggtgatcatcatgctcgatcgcaaacaggtggcggagatccggctggcagagctttccgttccggctatcatgaacgccattgcggcgtaa

SEQ ID NO: 458114 - DNA, 537 bp, Shigella boydii
atgacgacagaccaacaccaggaaatcctccgcaccgaaggattaagtaaatttttccccggcgtcaaagcgttagacaacgttgatttcagcctgcgccgtggcgaaatcatggcgctgctcggtgaaaacggggcgggaaaatcaacgctaatcaaagcattaactggtgtataccacgccgatcgcggcaccatctggctggaaggccaggttatctcaccgaaaaataccgcccacgcgcaacaactcggcattggcaccgtctatcaggaagtcaacctgctacccaatatgtcggtcgctgataatctatttataggccgcgaacccaaacgcttcggccttctacgccgcaaagagatggaaaagcgcgccaccgaactgatggcatcttacggtttctccctcgacgtgcgcgaaccgctcaaccgcttttcagtcgcgatgcagcaaatcgtcgccatttgccgggctatcgatctctccgccaaagtgctgatcctcgatgaacccaccgccagcctcgacacctag

SEQ ID NO: 458115 - DNA, 957 bp, Shigella boydii
atgtggaaacgcttacttgtagtctctgcagtctcggcagccatgtcgtctatggcgttggccgctccattaaccgtaggattttcgcaggtcggatcggaatccggctggcgcgccgcagaaaccaatgtggcgaaaagtgaggccgaaaaacgcggaattacgttgaaaattgccgatggtcagcaaaagcaggaaaaccagattaaagcggtacgttccttcgttgcacaaggggtggatgcgatctttatcgctccagtggttgcgacgggttgggaaccggtattaaaagaggcgaaagatgccgaaatcccggtcttcttgctcgaccgttccatcgatgtgaaagacaaatctctctatatgaccaccgttactgccgacaacatcctcgaaggtaagttgatcggtgactggctggtaaaagaagtgaatggcaaaccatgcaacgtggtggagctgcagggcaccgttggggccagcgtcgccattgaccgtaagaaaggctttgccgaagccattaagaatgcgccaaatatcaaaattatccgctcgcagtcaggtgacttcacccgcagtaaaggcaaagaagtcatggagagctttatcaaagcggaaaacaacggcaaaaacatctgcatggtttacgcccataacgacgacatggtgattggtgcaattcaggcaattaaagaagcgggcctgaaaccgggcaaagatattctgacaggttctatcgatggcgtaccggatatctacaaagcgatgattgatggcgaagcgaacgccagtgttgaactgacgccgaatatggcgggacccgcttttgacgcgctggagaaatacaaaaaagacggcaccatgcctgaaaagctgacgttaaccaaatccaccctttacctgcctgataccgcaaaagaagagttagagaagaagaaaaatatggggtattga

SEQ ID NO: 458116 - DNA, 531 bp, Shigella boydii
atgagcttactcaacgtccctgcgggtaaagatctgccggaagacatctacgttgttattgagatcccggctaacgcagatccgatcaaatacgaaatcgacaaagagagcggcgcactgttcgttgaccgcttcatgtccaccgcgatgttctatccgtgcaactacggttacatcaaccacaccctgtctctggacggtgacccggttgacgtactggtcccgactccgtacccgctgcagcctggttctgtgatccgttgccgtccggttggcgttctgaaaatgaccgacgaagccggtgaagatgcgaaactggttgcggttccgcacagcaagctgagcaaagaatacgatcacattaaagacgtaaacgatctgcctgaactgctgaaagcgcaaatcgctcacttcttcgagcactacaaagacctcgaaaaaggcaagtgggtgaaagttgaaggttgggaaaacgcagaagccgctaaagctgaaatcgttgcttccttcgagcgcgcaaagaataaataa

SEQ ID NO: 458117 - DNA, 342 bp, Shigella boydii
atgcgaatatttgtctacggcagtttacgccacaaacaaggcaacagtcactggatgaccaatgcccagttactgggcgatttcagtatcgataactaccagttgtatagcctgggccactatccaggcgcagttccggggaacggaacggtacacggtgaagtttatcgtattgacaacgccacgctggccgaacttgatgccttgcgcaccaggggcggtgaatacgcgcgccagttgattcagacgccgtacgggagtgcatggatgtacgtttatcaacgacccgtcgagggattaaagctaattgaaagcggcgactggttagacagggataagtaa

SEQ ID NO: 458118 - DNA, 3780 bp, Shigella boydii
atgagtttatggaaaaaaatcagcctcggcgtggttatcgttatcttactgttgctgggatcggtggcgtttctggtgggcaccaccagcggcctgcatcttgtatttaaagcggcggatcgctgggtgccaggactggatattggcaaggtcaccggcggctggcgcgatctcaccttgtctgacgttcgttatgagcagccaggcgtggcggtaaaagcgggtaatctgcatctggcggtcggtcttgagtgcctgtggaacagtagcgtttgtattaatgacctggcgctgaaagacattcaggtcaacatcgacagtaaaaaaatgcctccttctgaacaggttgaagaagaggaagatagcggtccgctggatctctccacgccgtatcccatcaccctgacacgggtggcgctggacaacgtcaacatcaagattgatgacaccacggtgtcggtgatggacttcacctccggcctgaactggcaggagaaaaccctgaccctgaaaccgacgtcgctgaaaggcctgctgattgctctgccgaaagtggcggaagtggcgcaggaagaagtggtcgaaccgaaaattgaaaatccgcagccggatgaaaagccgctcggcgaaacgctgaaagatctcttttctcgctcggtattgccggaaatgaccgacttgcatttgccgcttaacctgaacattgaagagtttaaaggcgagcagttacgcgtgacgggcgacacggacatcaccgtgcgcaccatgctgctgaaagtgagcagcattgacggcaatactaaactggacgccctagatatcgattccaaccaggggatcgtcaacgccagcggcacggcgcagctgtcagacaactggccggtggatatcaccctcaacagcacactgaacgtggagccgttgaaaggtgaaaaagtgaagctaaaagtgggcggcgcgctgcgcgaacagctggagattggcgttaatctttccggtccggtggatatggatttacgcgcccagacgcgactggcggaagccggattgccgctcaacgtggaagtgaacagcaaacagctttactggccgttcactggtgagaagcagtatcaggcggatgatctgaaactgaaacttaccggcaaaatgaccgattacacgctctctatgcgtacggcagtgaagggacaggagatcccgccagccaccattacccttgatgccaaaggtaatgaacagcaggtcaatctcgacaaactcaccgtcgcggcgctggaagggaaaactgaactcaaggcgttgctcgactggcagcaggccattagttggcgcggtgagctaacgcttaatggcattaacaccgccaaagagttcccggagtggccgtcgaaactcaatggcttgattaaaacccgcggtagcctgtacggcggcacctggcagatggaggtgccagaactgaagctgaccggtaacgtcaaacagaacaaagtgaacgttgacggcacgctgaaaggcaacagttatatgcagtggatgatccctgggcttcatctggaactggggccaaacagtgccgaagtgaaaggcgagctgggggtaaaagatctcaatcttgatgccaccatcaacgcgccggggctggataacgcgctgctggggcttggcggtacagcgaaagggctggtgaaagtacgcggcacggtggaagcgccacaactactggcagatatcaccgcgcgcggcctgcgctggcaggaactttccgtgacgcaggttcgcgtggaaggcgacattaaatccaccgatcagatcgccgggaaactcgacgtacgcgttgagcaaatttcgcagccggatgtaaatatcaacctcgtcaccctgaatgccaaaggcagcgaaaagcagcacgagctacagttgcggattcagggcgagcctgtctccgggcagcttaatctggcaggaagttttgatcgcaaagaagaacgctggaagggaactcttagcaatacccgcttccagacgctggtcggcccgtggtcgctgacccgcgatattgcgctggattaccgcaataaggagcaaaaaatcagcatcgggccacactgctggcttaacccgaatgcggaactgtgcgtgccgcaaactatcgatgcgggggccgaagggcgtgcggtggtgaatctcaaccgcttcgacttcgccatgctgaaaccgtttatgccagaaaccactcaggccagcggtatcttcacgggtaaagcggatgttgcctgggacaccacgaaagaggggctgccgcagggcagtatcaccctttcggggcgtaacgtgcaggtaacgcaaaccgtcaacgatgcggcgctgccggtggcgtttcagacactgaatctgacggcggaattgcgtaacaaccgtgccgaattgggctggaccatccgcctgaccaataacggccagtttgatggacaggtgctggtgaccgatccgcaaggccgccgtaatcttggtggcaacgtcaatatccgtaacttcaaccttgcgatgataaaccccatctttactcgtggggaaaaagcagcggggatggtgagtgccaacttgcgtctggatggtgatgtgcaaagcccgcagttgtttggtcagcttcaggttacgggtgtggatatcgacggcaactttatgccgtttgatatgcagccgagccagcttgcggtcaactttaacggtatgcgctcgacgcttgccggtacagtacggacccagcagggtgaaatctacctgaacggtgatgccgactggagccaaattgaaaactggcgggcacgagtaacggcgaaaggcagtaaagtgcggatcaccgtgccgccgatggtacgaatggatgtatcgccagatgttgtattcgaggctacaccaaacctgtttaccctcgatggtcgcgtggatgtcccgtgggcgcgcatcgtggtgcacgatctgccggaaagcgcagtaggcgtctccagcgatgtggtgatgcttaacgataacctgcaaccggaagagccgaaaacggcgtcgattccgattaacagtaacctgattgtccacgttggcaacaatgtgcgcattgacgcctttggcctgaaagcgcggctgacgggcgatcttaacgtcgttcaggacaaacaagggctgggcctgaacgggcagatcaacatccctgaagggcgcttccatgcctatggtcaggatctgattgtgcgtaagggtgagctactgttctctggtccgccagatcaaccgtatcttaatattgaagctattcgtaacccggatgctacagaagacgacgtaatcgccggagttcgcgtcactggtctggcggacgaaccgaaagcggagatcttctctgacccggcgatgtcgcaacaagctgcattgtcttatttgctacgtggacaagggctggagagcgatcagagcgacagtgcggcaatgacctcgatgctgattggtctgggggttgcgcaaagtggccagattgtgggtaaaatcggcgagacgtttggcgtaagcaatttagcgctcgacacccagggagtaggcgactcctcccaggtagtggtcagcggctatgtattgccaggtctgcaagtgaaatacggcgtgggtatatttgactctatagcaacactcacgttacgttatcgcctgatgcctaagctatatctggaagccgtgtctggtgtagaccaggcactggatttgctctatcagttcgagttttag

SEQ ID NO: 458119 - DNA, 1734 bp, Shigella boydii
gtgcgctatatccgacagttatgctgtgtaagcttactctgcttaagcggatctgccgtcgccgcgaacgtccgtctacaggtcgaggggttatcgggacagctggaaaagaacgttcgtgcgcagctttctacgattgaaagtgatgaagtgacgccagaccgccgctttcgcgcacgcgtcgatgatgccatccgtgaaggtctgaaagcgctgggttattaccagccgaccattgaatttgatctccgtccaccgccaaagaaagggcggcaggtattgatcgccaaagtcacgccaggtgtgccggtgttaattggcggcaccgatgtggtattgcgcggcggcgcgcggaccgataaagactatttgaaattgctcgatactcgcccggctattggtactgtactgaaccagggcgattatgaaaatttcaaaaagtccttaaccagtattgcgttgcgtaaaggttatttcgatagcgaatttaccaaagcgcagctgggcattgcgctcggcctgcataaagccttctgggatattgattataacagtggcgaacgttaccgctttgggcatgtgacctttgaaggatcacaaatccgcgatgaatacctgcaaaatctggtgccgtttaaagagggcgatgagtatgaatcgaaagatctggcggaactgaaccgccgactttctgctaccggctggtttaactcggtggtggtggctccacaatttgataaagcgcgcgaaacgaaagtattaccattgacgggcgtggtttcgccgcgaacagaaaacaccatcgaaaccggggtcggttactctacggacgtgggaccgcgcgtgaaagcgacgtggaaaaagccgtggatgaactcatacggtcacagtttgaccaccagtaccagtatttccgcgccggaacagaccctcgacttcagctataaaatgccgctgctgaagaatccactggaacaatattatttggtgcagggcggttttaagcgcactgacctgaacgataccgaatctgactccactacgctggtggcttctcgctactgggatctctccagcggctggcagcgtgccattaacctgcgctggagtctcgaccactttactcagggtgaaattaccaacaccacgatgctgttttatcctggggtgatgattagccgcacgcgttctcgtggtggcctgatgccaacctggggcgactcgcaacgctactctatcgactactccaacacggcctggggctcagatgtcgatttctccgttttccaggcgcagaacgtctggatccgcacactgtacgatcgccatcgtttcgttacacgcggcacgctgggctggattgaaaccggtgatttcgacaaagtaccgccggatctgcgttttttcgccgggggcgatcgcagtattcgcggctacaaatacaaatctatcgccccgaaatacgccaacggtgacctgaaaggggcctcgaagttgataaccggatcgctggaataccagtacaacgtgaccggaaaatggtggggcgcggtgtttgtcgatagtggcgaagcggtaagcgatattcgccgcagcgactttaaaaccggtaccggggtcggcgtgcgctgggaatcgccggtcgggccaatcaaactcgattttgccgtaccggtcgcggataaagacgaacacgggttacagttttacatcggtctggggccagaattatga

SEQ ID NO: 458120 - DNA, 639 bp, Shigella boydii
atgagtttatttgataaaaagcatctggtttcccccgccgatgccctgcctggacgtaacaccccgatgcccgtagccacgctgcatgcggtcaacggtcactcaatgaccaatgtacctgacggaatggagattgccatttttgcgatgggttgtttctggggtgtggagagtctgttctggcagttacccggcgtttacagcaccgccgcaggctataccggcggctatacgccaaatccgacttatcgggaagtgtgctccggtgatacgggtcatgccgaagcggtacgcattgtttacgatccttccgtcatcagctatgagcagttgctacaggtattttgggagaatcacgatcccgcccagggaatgcgtcagggcaatgaccacggcacgcagtatcgttcagcgatttatccgctgaccccagaacaggatgccgcagctcgcgccagtctggaacgttttcaggcggcgatgcttgccgccgatgacgatcgtcacatcaccacggaaatcgctaacgccacaccgttttattatgccgaagatgaccaccagcaatatctgcataaaaacccatatggttactgtggaattggcggaattggcgtctgtctgccgccggaagcatag

SEQ ID NO: 458121 - DNA, 1344 bp, Shigella boydii
atgttaaacagtattttagtcatactctgcttgatcgctgtaagtgcgttcttctcgatgtccgagatctcgcttgccgcctcacgcaaaatcaaacttaaactgctggctgatgaaggcaatataaatgcccaacgcgttctgaatatgcaggaaaatcccggcatgttctttaccgtggtccaaatcggtctgaacgcagtggcgattctcggcggtatcgtcggtgatgcggcattttctccagcttttcacagcctgttctcccgctatatgtcggcagagctctctgagcaactgagctttattctctctttctcgttagtgactggcatgtttatcctgtttgcggatttaaccccgaaacgcatcggtatgattgcgccagaagcggtggctttgcgtatcatcaacccgatgcgcttctgcctgtacgtttgcaccccgctggtgtggttcttcaacggcctggcgaacatgatcttccgtattttcaaactgccaatggtacgtaaagatgacatcacttctgatgacatctacgcggtagtggaagccggtgcgctggcgggcgtgttacgtaaacaggaacacgagctgattgaaaacgtctttgagctggaatcccgtaccgttccgtcttcaatgacaccgcgtgaaaacgtgatttggtttgatctccacgaagatgagcaaagcctgaagaataaggtggcggaacatccgcactctaagttcctcgtctgtaatgaagatattgaccacatcatcggttatgtcgattctaaagacctgctgaaccgcgtgctggctaaccaaagcctggcactgaacagcggcgtacaaattcgcaacacgctgattgtgccggatacgttaaccctttcagaggcgttggaaagttttaaaaccgcaggtgaagacttcgcggtgatcatgaacgagtacgcgctggtggtggggatcatcaccctcaacgacgtgatgaccacgctgatgggcgatctggtcggtcaggggctggaagagcagattgtcgcccgtgatgagaactcatggctgattgacggcggcaccccaattgacgacgtcatgcgcgtgctggatattgacgagttcccgcagtcgggcaactacgaaaccatcggcggctttatgatgtttatgctgcgtaagatcccgaaacgcaccgattcggtgaaattcgccggctacaaatttgaagtggtggatatcgataactaccgcatcgaccagctgctggtgacccggatcgacagcaaggccaccgccctttcgccaaaactgcctgacgctaaagataaagaagaaagcgtcgcgtaa

SEQ ID NO: 458122 - DNA, 207 bp, Shigella boydii; identical to SEQ ID NO: 1927

SEQ ID NO: 458123 - DNA, 555 bp, Shigella boydii
atgaccctacgcaagattctggcactcacctgcctgctgttgccgatgatggcttccgcacatcagttcgaaaccggtcagcgagtgccgccgattggcattaccgatcggggcgagttggtgcttgataaagatcagtttagctacaaaacctggaacagcgcgcagttagtgggaaaagtgcgagtactgcaacatattgctggtcgcacctctgcaaaagagaaaaacgcgacgctgattgaagcgattaaatcagcaaagttaccgcacgatcgttaccagaccaccaccattgttaacaccgacgacgcaattccgggttccggcatgtttgtgcgcagcagtctggagagtaataaaaagctttatccctggtcgcagtttattgtcgatagcaatggcgtcgcgcgcggtgcctggcagctggatgaagaaagttccgctgtagtggtgctggataaggatggtcgcgtgcaatgggccaaagacggggcgctcacacaggaagaggtgcagcaagtgatggacctgctgcaaaagttgctcaaataa

SEQ ID NO: 458124 - DNA, 264 bp, Shigella boydii
ttgggctttgcgcttaaaatctatggaggggatgaacgttttcgtaatggttcctctgttgttttggaggatgaagattactctcttatttataattttctggttaatgcaggttgccaacaagtcgaattagccgaacaagtggatgcgatagtaagtgcgaatctggccgtagatagtgatattaccgaagaggagatttgcgagaaatataaatcaaccattgaggcgtttaaaaaagagcaactagcgttaccagtatga

SEQ ID NO: 458125 - DNA, 303 bp, Shigella boydii
atgaaaaaaagaaattttagcgcagagtttaaacgcgaatccgctcaactggttgttgaccagaaatacacggtggcagatgccgccaaagctatggatgttggcctttccacaatgacaagatgggtcaaacaactgcgtgatgagcgtcagggcaaaacaccaaaagcctctccgataacaccagaacaaatcgaaatacgtaagctgaggaaaaagctacaacgcattgaaatggagaatgaaatattaaaaaaggctaccgcgctcttgatgtcagactccctgaacagttctcgataa

SEQ ID NO: 458126 - DNA, 687 bp, Shigella boydii
atggcgttggggctggcgcaagcgggctgtgacattgttggcattaacatcgttgaaccgactgaaaccatcgagcaggtcacggcgctggggcgtcgttttttaagcctgaccgccgatctgcgaaagattgatggcattcctggactgctggatcgcgcggtagctgaatttggtcatattgatatcctggtgaataacgccggattgattcgccgcgaagacgctctcgagttcagcgaaaaagactgggacgatgtcatgaacctgaatatcaagagcgtattcttcatgtctcaggcagcggcgaaacactttatcgcgcaaggcaatggcggcaagattatcaatatcgcgtcaatgctctccttccagggcgggatccgtgtgccttcttataccgcatcaaaaagcggcgtgatgggtgtgacgcgattgatggcgaacgaatgggctaaacacaacattaatgttaatgcgatagctccgggttacatggcgaccaacaatactcaacaactacgggcagacgaacaacgtagcgcggaaattctcgaccgcattccagctggtcgttggggactgccgagtgacctgatggggccgatagtgttccttgcctccagcgcttcagattatgtgaatggttataccattgccgtggatggcggttggctggcgcgttaa

SEQ ID NO: 458127 - DNA, 1419 bp, Shigella boydii
atggttactatcaatacggaatctgctttaacgccacgttctttgcgggatacgcggcgtatgaatatgtttgtttcggtagctgctgcggtcgcaggattgttatttggtcttgatatcggcgtaatcgccggagcgttgccgttcattaccgatcactttgtgctgaccagtcatttgcaggaatgggtggttagtagcatgatgctcggcgcagcaattggtgcgctgtttaatggttggctgtcgttccgcctggggcgtaaatacagcctgatggcgggggccatcctgtttgtactcggttctatagggtccgcttttgcgaccagcgtagagatgttaatcgccgctcgtgtggtgctgggcattgctgtcgggatcgcgtcttacaccgctcctctgtatctttctgaaatggcaagtgaaaacgttcgcggtaagatgatcagtatgtaccagttgatggtcacactcggcatcgtgctggcgtttttatccgatacagcgttcagttatagcggtaactggcgcgcaatgttgggggttcttgctttaccagcagttctgctgattattctggtggtcttcctgccaaatagcccgcgctggttggcggaaaaggggcgtcatattgaggcggaagaagtattgcgtatgctgcgcgatacgtcggaaaaagcgcgagaagaactcaacgaaattcgtgaaagcctgaagttaaaacagggcggttgggcactgtttaagatcaaccgtaacgtccgtcgtgctgtgtttctcggtatgttgttgcaggcgatgcagcagtttaccggtatgaacatcatcatgtactacgcgccgcgtatcttcaaaatggcgggctttacgaccacagaacaacagatgattgcgactctggtcgtagggctgacctttatgttcgccacctttattgcggtgtttacggtagataaagcagggcgtaaaccggctctgaaaattggtttcagcgtgatggcgttaggcactctggtgctgggctattgcctgatgcagtttgataacggtacggcttccagtggcttgtcctggctctctgttggcatgacgatgatgtgtattgccggttatgcgatgagcgccgcgccagtggtgtggatcctgtgctctgaaattcagccgctgaaatgccgcgatttcggtattacctgttcgaccaccacgaactgggtgtcgaatatgattatcggcgcgaccttcctgacgctgctcgacagcattggcgctgccggtacgttctggctctacactgcgctgaacattgcgtttgtgggcatcactttctggctcattccggaaaccaaaaatgtcacgctggaacatatcgaacgcaaactgatggcaggcgagaagttgagaaatatcggcatctga

SEQ ID NO: 458128 - DNA, 693 bp, Shigella boydii
atgaaaacaattggtttgctgggaggaatgagctgggaatccaccattccttactatcgtttgataaatgaaggcattaaacagcggcttggtgggcttcactctgcgcaagtgctgctacatagcgtcgattttcatgaaatagaagagtgccagcgtcgcggggaatgggataaaaccggggacattctggctgaggcggcgcttggcttacagcgggcgggcgcagaaggtattgtgttatgtaccaatacgatgcataaagtggcggatgccattgagtcacgttgcactctgcctttcttacacattgcggatgccaccggacgtgcaattaccggggccggaatgactcgtgtggcgctgctgggtacgcgttacaccatggaacaggatttttatcgcgggcggctgacggaacaattttccatcaattgtcttattcctgaagcggatgaacgggcgaaaattaatcagattatttttgaagaactgtgtctggggcaatttaccgaagcgtcacgcgcttattatgcgcaagtgattgctcgccttgcagaacagggcgcacagggcgtcatttttggctgcacagaaattggtttactggtgccagaagagcgcagtgttttgcctgtgtttgatactgcggcgatccatgccgaggatgctgtcgcttttatgctgtcgtag

SEQ ID NO: 458129 - DNA, 936 bp, Shigella boydii
atggccgccgttaacttacgtcatattgaaatttttcatgcggtaatgaccgccggaagcctgactgaggcggcacacctgctacacacctcacagccaaccgtcagccgcgaacttgcgcgctttgagaaggtgatcgggctgaaattgtttgagcgcgtacgtgggcgattacatcctaccgtgcaaggactgcgtctgtttgaagaagtgcaacgatcctggtacggactggatcgaattgtcagcgctgcagaaagtctgcgcgagtttcgccagggagaactgtctattgcctgcctgccggtcttttcgcaatcttttttaccgcagctcctgcaaccctttctggcacgttatcccgatgtcagcttaaatatcgtgccccaggaatcaccgctacttgaagagtggctctcggcccagcgtcatgatttaggactcactgagacactccatacgcctgcgggaacagaacgtaccgaattactctctttagatgaagtgtgtgtgttacctccgggtcatccgctggcggtaaaaaaggtattaacgccggatgattttcagggtgagaactacatcagcctttcccgtactgacagctatcgccagttgctggatcagctatttactgaacatcaggttaaacgacgcatgatcgtagaaacccacagcgccgcgtcaatctgcgcaatggtacgggcgggggtaggtgtttcggtggttaacccgctcaccgcactggattatgcggcaagcggtttagtggtgcggcggttcagtattgcggttccgttcaccgtcagcctgatccgccccctgcaccgcccgtcatcagcgctggtgcaggcgtttagtgagcatttacaagcggggttaccgaaactggtcacttctcttgacgctattttgtcgtcagctacgacagcataa

SEQ ID NO: 458130 - DNA, 1263 bp, Shigella boydii
atgccacattcactgttcagcaccgataccgatctcaccgccgaaaatctgctgcgtttgcccgctgaatttggctgcccggtgtgggtctacgatgcgcaaattattcgtcggcagattgcagcgctgaaacagtttgatgtggtgcgctttgcacagaaagcctgttccaatattcatattttgcgcttaatgcgtgagcagggcgtgaaagtggattccgtctcgttaggcgaaatagagcgtgcgttggcggcgggttacaatccgcaaacgcaccccgatgatattgtttttacggcagatgttatcgatcaggcgacgcttgaacgcgtcagtgaattgcaaattccggtgaatgcgggttctgttgatatgctcgaccaactgggccaggtttcgccagggcatcgggtatggctgcgcgttaatccggggtttggtcacggacatagccaaaaaaccaataccggtggcgaaaacagcaagcacggtatctggtacaccgatctgcccgccgcactggacgtgatacaacgtcatcatctgcagctggtcggcattcacatgcacattggttctggcgttgattatgcccatctggaacaggtgtgtggtgctatggtgcgtcaggtcatcgaattcggtcaggatttacaggctatttctgcgggcggtgggctttctgttccttatcaacagggtgaagaggcggttgataccgaacattattatggtctgtggaatgccgcgcgtgagcaaatcgcccgccatttgggccaccctgtgaaactggaaattgaaccgggtcgcttcctggtagcgcagtctggcgtattaattactcaggtgcggagcgtcaaacaaatggggagccgccactttgtgctggttgatgccgggttcaacgatctgatgcgcccggcaatgtacggtagttaccaccatatcagtgccctggcagctgatggtcgttctctggaacacgcgccaacggtggaaaccgtcgtcgccggaccgttatgtgaatcgggcgatgtctttacccagcaggaagggggaaatgttgaaacccgcgccttgccggaagtgaaggcaggtgattatctggtactgcatgatacaggggcatatggcgcatcaatgtcatccaactacaatagccgttcgctgttaccagaagttctgtttgataatggtcaggcgcggttgattcgccgtcgccagaccatcgaagaattactggctctggaattgctttaa

SEQ ID NO: 458131 - DNA, 1032 bp, Shigella boydii
atggcgaccataaaggatgtagcccgactggcaggcgtttcagtcgccaccgtttcccgcgtcattaataattcacccaaagccagcgaagcttcccggctggctgtgcatagtgcaatggagtctcttagctatcacccgaacgccaacgcccgtgcgctggcgcagcagaccactgaaacggtcggtctgatcgttggtgatgtttccgatccgtttttcggtgcaatggtgaaagcggtcgaacaggtggcttatcacaccggtaatttcttattgattggcaacggttaccacaacgaacaaaaagagcgtcaggctattgagcaactgatccgccatcgctgtgctgcgttggtcgtccatgccaaaatgatcccggatgccgatttagcctcattaatgaaacaaatgcccggtatggtgctgatcaaccgtatcctgcctggctttgaaaaccgttgtattgctcttgacgatcgttacggtgcctggctggcaacgcgtcatttaattcagcaaggtcatacccgcattggttatctgtgctctaaccactctatttctgacgccgaagatcgtctgcaagggtattacgatgcccttgctgaaagtggtattgcggccaatgaccggctggtgacatttggcgaaccagacgaaagcggcggcgaacaggcaatgaccgagcttttgggacgaggaagaaatttcactgcggtagcctgttataacgattcaatggcggcgggtgcgatgggcgttctcaatgataatggtattgatgtaccgggtgagatttcgttaattggctttgatgatgtgctggtgtcacgctatgtgcgtccgcgcctgaccaccgtgcgttacccaatcgtgacgatggcgacccaggctgccgaactggctttggcgctggcggataatcgccctctcccggaaatcactaatgtctttagtccgacgctggtacgtcgtcattcagtgtcaactccgtcgctggaggcaagtcatcatgcaaccagcgactaa

SEQ ID NO: 458132 - DNA, 2160 bp, Shigella boydii
atgctttttagcttttttcgaaatttgtgccgtgttttgtatcgcgttcgcgttacgggtgacacccaggcactgaagggcgagcgcgttctaattacgcctaatcacgtctcttttattgatggcattttgcttggactgtttttacctgtgcgtccagtgtttgccgtttacacctcaataagccaacagtggtatatgcgttggctgaaatcatttatcgactttgttcctctcgacccgacgcaacctatggctattaaacatctggtacgtctggtggaacagggccgaccagtggtgattttccctgaaggacgcatcaccactacaggctcgctgatgaaaatctacgatggcgcgggttttgtcgcggcgaagtctggtgcaacggttattcctgtgcgtattgaaggggcggaacttacgcacttcagccgcctgaaaggtctggttaaacgtcgcttgttcccgcaaattactctgcatattttgcctccaacgcaggtggcgatgccggatgcgtcgcgtgcccgtgaccgtcgcaaaatcgctggcgaaatgctgcatcaaataatgatggaagcgcgtatggcggtgcgcccgcgtgaaactctgtacgaatctttactgagtgcaatgtaccgcttcggagccgggaagaaatgtgtcgaagacgtcaactttaccccagactcctatcgcaaattgcttacgaaaacgctgtttgttggacgcatccttgaaaaatacagtgttgaaggcgaacgcatcggcttaatgctgcccaatgcaggcatcagtgcggcagtgatttttggggccatcgcgcgtcgccgcattcccgcaatgatgaactacactgctggggtaaaagggctgaccagtgctattacggcggctgaaatcaaaaccatcttcacttcccgccagtttctcgataaaggcaaactctggcatctgccggagcaacttactcaggtgcgctgggtctatctggaagatttaaaagcagatgtcaccactgccgacaaagtatggatcttcgctcatttgctgatgccgcgcctggcgcaggtaaaacagcagccggaagaagaggcgctgatcctctttacctccggttctgaaggccatccaaaaggcgtcgtccatagccataaaagcattctggcgaacgtcgagcagattaaaacgattgccgacttcaccaccaacgatcgctttatgtcggcattaccgctgtttcactcctttgggctgacggtaggcctgtttacgccactgcttacaggtgcagaagtgttcctttatccaagcccgctgcattaccgcattgtgccggagttggtgtatgaccgcagttgcaccgtgttgttcggtacctcgactttcctcggtcactacgcgcgtttcgccaacccgtatgacttctatcgtctacgctatgtggtggcaggcgcagaaaaactacaagaaagtaccaaacagctttggcaggataaatttggcctgcgcatccttgaaggctatggtgtaaccgagtgcgcgcctgtcgtttctatcaacgtaccgatggcggcgaaacccggtacggtagggcgtattctaccaggaatggatgcgcgcctgttgtcggttcctggtatcgaagagggcggacgcctgcaactgaaagggccgaacataatgaacggctatctgcgggtggagaagccaggtgtactggaagtgcccaccgccgagaatgttcgcggcgaaatggagcgcggctggtatgacactggcgatattgtgcgttttgacgagcagggctttgtgcagattcagggccgcgcaaaacgctttgccaaaattgcaggcgaaatggtgtcgctggaaatggtggaacaactggcacttggtgtttcgccagataaagtccatgccactgcgattaagagcgatgccagcaaaggcgaggcactggtgctgttcaccacagataacgaactgacgcgcgataagttgcaacagtatgcccgcgagcacggcgtgccggagcttgctgtaccgcgcgatattcgctatctgaaacagatgccattacttggcagcggcaaacctgactttgtcacgttgaaaagctggatagacgaagcggaacaacacgatgagtga

SEQ ID NO: 458133 - DNA, 1194 bp, Shigella boydii
atgagtgagtcagtgcacactaacacttcgttgtggtcgaaggggatgaaagcggttatcgtggcgcagtttctctctgcgtttggcgataatgccctactgtttgccactctggcgttactgaaagcgcagttctatccggagtggagccagcccatcctgcaaatggtgtttgtaggtgcttacattctttttgcgccgtttgtcgggcaggtggcggatagcttcgccaaaggccgggtgatgatgtttgccaacggcctgaagctgctgggcgcagccagtatctgctttggtatcaatccgtttctcggctatacgctggtgggggttggtgctgcagcctattcaccggcgaaatacggtattctcggcgaattaaccacgggtagtaagttagtgaaagctaacggtttaatggaagcttctaccatagcggcgattttgctcggttccgtagccggtggtgtgctggctgactggcatgtcctcgtcgccctggccgcatgcgcactggcctacggtggtgcggtcgttgccaatatctacattcccaaactggcggcggcgcgtccggggcagtcctggaatctcatcaacatgacccgcagtttcctgaatgcctgcacctcgctatggcgcaatggtgaaacgcgtttttcgctggtgggcaccagtttattctggggagcgggtgtcacgctgcgtttcctgttggtgctgtgggtaccggtggcgctgggcattaccgataacgctacgcccacctatctcaacgcgatggtagcgattggtatcgtggttggcgcaggtgcggcagcgaagttagttacgctggaaaccgtgtcacgctgtatgccagccgggattttgattggcgtggtggtactgattttttccctgcaacacgagctgctgccagcctatgccttgttgatgctgattggcgtgatggggggcttttttgtcgttccgctcaatgcgttgctacaggagcggggtaaaaaaagcgtcggggcggggaatgcgattgcagtacaaaaccttggcgaaaacagcgccatgttgttgatgctgggcatttactcgctggcggtaatggtaggcatcccggtcgtgcccattggcattggcttcggtgcgctgtttgcgctggcaataacggcgctgtggatctggcagcgccgtcattaa

SEQ ID NO: 458134 - DNA, 1041 bp, Shigella boydii
atgcaatatcaccgtataccccacagttcgctggaagtcagcacgctggggcttggcacgatgacgtttggtgaacagaacagcgaagccgacgcccacgcacaactcgactatgccgtcgctcagggcattaaccttatcgacgttgccgaaatgtacccagtacctccgcgccccgaaacgcaagggttaaccgaaacctacgtcggcaactggctggcgaaacatggcagccgcgaaaagttaattatcgcctccaaagtgagcggaccgtcgcgcaataatgacaagggcatccgcccggatcaggcgctggatcggaagaatatccgcgaagcgctgcatgacagcctcaagcgcctacagactgattacctcgatctttatcaggtgcactggccgcagcgcccgaccaactgcttcggcaaactcggttatagctggacggattctgcgcctgcggtttcgctgctggatacgctggacgcactggcagagtaccaacgcgcgggaaaaattcgttatatcggcgtgtcgaacgaaactgcatttggcgtaatgcgctacctgcatctggcggacaaacacgatctgccgagtattgtcaccattcagaacccttacagtctgttaaaccgcagttttgaagtaggtctggcagaagtcagccagtatgaagggggcgaactgctggcctattcatgcctgggtttcggcacgctgaccgggaaatatctcaatggtgcaaaacccgctggcgcacgtaatacgctctttagtcggttcacccgctatagcggtgagcaaacgcaaaaagccgtcgcggcgtatgttgatatcgccagacgtcatggcctggaccctgctcagatggcgctcgcgtttgtacgccgtcaaccgtttgttgccagcactctgctgggcgcaaccacgatggatcagctgaaaactaacatcgaaagtttgcatctggagttaagcgaagacgtattagctgaaattgaagcggtgcatcaggtttatacttatccggcaccataa

SEQ ID NO: 458135 - DNA, 219 bp, Shigella boydii; identical to SEQ ID NO: 2259

SEQ ID NO: 458136 - DNA, 714 bp, Shigella boydii
atgttatttgcatggataaccgatcctaacgcctggcttgcgctcggtacgctgacgctgctggagatcgttcttgggatcgacaatattattttcctttctctggtggtggcaaagcttcccacagcacaacgtgctcatgcgcgccgtctggggttggcgggagccatggttatgcgtctggcgctgctggcatcaatcgcctgggttacgcgcctgacaaatccgctttttacaatattcagtcaggaaatttctgcccgtgatttgattctgcttctgggtggcttgttccttatctggaaagccagcaaggaaatccacgaatccattgaaggtgaagaagaagggctgaaaacacgcgtttcatcattcctcggcgctatcgtgcagattatgctgctggatattatctttagcctcgactcggtgattacggctgtgggtctgtcagatcacctgtttattatgatggcagccgtggtgattgccgtaggcgtgatgatgttcgccgcgcgctcgattggtgattttgtcgaacgccatccttcggtaaaaatgctggcgctctctttcctgattctggtgggctttaccctgattctggaaagtttcgacatccacgtaccgaaaggttacatctacttcgcgatgttcttctctattgcggttgaaagcctcaacttgattcgcaacaaaaagaatccgctctga

SEQ ID NO: 458137 - DNA, 690 bp, Shigella boydii
atgtcccaacctcgcccactgctctctcctcccgaaactgaagaacagttgttagcgcaagcacagcaactttctggttatacattgggagaactggcggcacttgccgggctggttacgccagagaatttaaaacgcgataagggctggattggcgtgttactggagatctggctaggtgccagcgcagggagtaaacctgagcaagattttgctgctctgggcgtggaacttaaaactatccctgtggatagtcttggtcgtccgctggaaacaacattcgtttgtgttgccccgttaacgggtaatagcggggtgacctgggaaaccagccacgtgcgccacaagctcaaacgcgtactgtggataccggttgaaggcgagcgcagcatcccgctggcgcagcgtcgcgtaggatccccgttgctgtggaccccgaatgaagaggaagaccgacagctacgcgaagactgggaagaattaatggatatgattgttctcggtcaggttgagcggatcaccgctcgtcacggggaatatttacagataagaccgaaagcagcgaatgcgaaagcgcttaccgaagccattggtgcccggggcgaacggattctgacgctgccacgcggcttttatttgaagaagaatttcaccagtgcactactggcccgtcattttctgatccagtag

SEQ ID NO: 458138 - DNA, 147 bp, Shigella boydii; identical to SEQ ID NO: 2256

SEQ ID NO: 458139 - DNA, 531 bp, Shigella boydii
gtgattgatgacgatggctaccgcccaaacgtaggtatcgtgatttgtaatcgccaggggcaggtaatgtgggcccggcgatttggtcagcactcctggcaatttccgcaaggcggaatcaaccccggagaatccgcagagcaggcgatgtaccgtgaattgtttgaagaagtaggattaagccgcaaagacgttcgaatccttgcttcaacgcgtaactggttgcgctacaaattaccgaaacgtttggtgcgttgggacacgaagccggtttgtatcggccaaaaacaaaaatggtttctcttgcagctggtgagcggcgatgcagaaatcaatatgcaaaccagcagtacaccagagtttgacggctggcgatgggtaagttactggtatccggtcagacaggtggtgtcatttaaacgtgatgtctaccgtagggtaatgaaagagttcgcgagtgtggtgatgtcactgcaggaaaatacgccaaaaccacaaaacacatctgcttatcgacgtaaaagaggttaa

SEQ ID NO: 458140 - DNA, 2247 bp, Shigella boydii
atgctcactcgcctgcgcgaaatagtcgaaaaggtagccagcgcaccacgcctgaatgaggcgttaaatattctggttaccgacatctgtcttgcgatggataccgaggtctgttcggtctacctggccgatcatgatcgacgttgttactacctgatggcgacccgggggctgaaaaaaccacgcggtcgcactgtaacgctcgcgtttgatgaagggatcgtcggcctggttggcaggctggcggaaccgataaaccttgcagatgcgcaaaagcaccccagcttcaaatacatcccctccgtaaaagaagaacgtttccgcgcgtttttaggcgtaccaattattcaacgtcgccagttgcttggtgtactggtggtacagcaacgagagttgcgccagtatgacgaaagtgaagaatccttcctggtgacgcttgccacccagatggcagctattctttctcagtcgcagttgactgccttgtttgggcaatatcgccagacgcgaatccgcgcattaccggcagcacctggtgtggcgattgccgaaggctggcaggatgccacgttacctttaatggaacaggtgtatcaggcatcaacgctggatccggctctggaacgcgaacgattgaccggggcgctggaagaagcggcaaacgagtttcgccgctacagcaaacgctttgccgccggagcacaaaaagaaacggcggctattttcgatctttactcgcacctgctttcggacacccggctgcgtcgcgaattgtttgccgaggttgataaaggctcggtggcagagtgggcggtaaaaacggtcattgaaaaatttgccgaacagtttgccgcgctaagcgataactatctcaaagagcgggctggcgatttacgtgcgctgggtcagcgattgctgtttcatcttgatgacgctaatcaagggccgaacgcctggccggaacgtttcattctggtggcagatgaactgtcagcgacaactcttgctgagctgccccaggatcgcttagtcggtgttgtcgtgcgagatggcgcagccaactcccatgctgcgatcatggtacgtgcgctggggatccctaccgtgatgggcgcggatattcagccttcggtgctgcatcgtaggacgctgatcgttgatggctatcgcggtgaattgctggtcgatccggagccggtactgctgcaagaatatcagcggctaattagtgaagagattgagcttagccgtctggcggaagatgacgtcaatttacccgcgcagttaaaaagtggtgagcgtataaaagtcatgctcaatgctggtttaagcccggaacatgaagaaaaactgggcagccgtattgatggcatcggtctttatcgcactgaaatcccattcatgctgcaaagtggtttcccgtcggaagaagaacaggtggcgcagtatcaggggatgctgcaaatgttcaatgataaacccgtcaccttgcgtacgctggatgtcggagcagataagcagctgccttacatgccgatcagcgaagagaatccatgcctgggttggcgtgggattcgcattacgctcgatcagccggagatcttcttgatccaggtgcgggcgatgctgcgtgctaatgccgctacgggcaacctgaatattctgttgccgatggtcaccagcctcgatgaagttgacgaagcacgccgcctgattgaacgtgccggacgtgaagtcgaggagatgatcggttacgaaattcccaaaccacgtatcggcatcatgctggaagtaccgtcaatggtatttatgctgccgcatctggcaaagcgggtcgatttcatctctgttggcaccaacgatctgactcaatacattctggccgttgatcgcaacaatacccgggtggcgaacatttatgacagccttcatcctgcaatgttacgagctctggcaatgatcgcccgggaagcggaaatacatggtatcgatctccgtttgtgcggtgaaatggcgggcgatcccatgtgcgtggcaatcctcattgggcttgggtatcgccatctgtctatgaacggacgttctgtagcgcgggtaaaatacctgctgcggcgcattgattttgccgaagcagaaaatcttgcgcagcgtagtctggaagcgcaactggcgaccgaagttcgtcatcaggttgcagcctttatggagcgtcgcggcatgggcgggctgattcgcggagggttatag

SEQ ID NO: 458141 - DNA, 876 bp, Shigella boydii
atgaccagtagctatctgcattttccggagtttgatccggtcattttctcaataggacccgtggcgcttcactggtacggcctgatgtatctggtgggtttcatttttgcaatgtggctggcaacacgtcgggcgaatcgtccgggcagtggctggaccaaaaatgaagttgaaaacttactctatgcgggcttcctcggcgtcttcctcggtggacgtattggttatgttctgttctacaacttcccgcagtttatggccgatccgctgtatctgttccgtgtctgggacggcggcatgtccttccacggcggcctgattggcgttatcgtggtgatgattatcttcgcccgccgtactaaacgttccttcttccaggtctctgattttatcgcaccactcattccgtttggtcttggtgccgggcgtctgggcaactttattaacggtgaattgtggggccgcgttgacccgaacttcccgtttgccatgctgttccctggctcccgtacagaagatattttgctgctgcaaaccaacccgcagtggcaatccattttcgatacttacggtgtgctgccgcgccacccatcacagctttacgagctgttgctggaaggtgtagtgctgtttattatcctcaacctgtatattcgtaaaccgcgcccaatgggagctgtctcaggtttgttcctgattggttacggcgcgtttcgcatcattgttgagtttttccgccagcccgacgcgcagtttactggtgcctgggtgcagtacatcagcatgggacaaattctttccatcccgatgattgtcgcgggtgtgatcatgatggtctgggcatatcgtcgcagcccacagcaacacgtttcctga

SEQ ID NO: 458142 - DNA, 795 bp, Shigella boydii
atgaaacagtatttagaactgatgcaaaaagtgctcgacgaaggcacacagaaaaacgaccgtaccggaaccggaacgctttccatttttggtcatcagatgcgttttaacctgcaggatggattcccgctggtgacaactaaacgttgccacctgcgttccatcatccatgaactgctgtggtttctgcagggcgacactaacattgcttatctacacgaaaacaatgtcaccatctgggacgaatgggccgatgaaaacggcgacctcgggccagtgtatggtaaacagtggcgcgcctggccaacgccggatcgtcgtcatattgaccagatcactacggtactgaaccagctgaaaaacgacccggattcgcgccgcattattgtttcagcgtggaacgtaggcgaactggataaaatggcgctggcaccgtgccatgcgttcttccagttctatgtggcagacggcaaactctcttgccagctttatcagcgctcctgtgacgttttcctcggcctgccgtttaacattgccagctacgcgttactggtgcatatgatggcgcagcagtgtgatctggaagtgggcgattttgtctggacggggggcgacacgcacctgtacagcaatcatatggatcaaactcatctgcaattaagccgcgaaccgcgtccgctgccgaagttgattatcaaacgtaaacccgaatccatcttcgactaccgtttcgaagattttgagattgaaggctacgatccgcatccgggcattaaagcgccggtggctatctaa

SEQ ID NO: 458143 - DNA, 471 bp, Shigella boydii
atgaaaacacaacgtggttatacgctgattgaaacgctggtcgcgatgctgattttggtcatgctaagcgcaagtggactctatggctggcaatactggcagcagtcgcaacggctatggcaaaccgccagccaggcgcgggactatttgctctatttacgtgaagatgccaactggcataaccgcgaccacagtatcagcgttatcagggaggggacgttatggtgccttgtgagttccgctgctggggccaatacctgtcatggcagttcaccattggtctttgtgccacgctggcccgaagtcgaaatgagcgacctgacaccttcgcttgctttctttggcctgcgcaataccgcatgggccgggcatattcgcttcaaaaactcaacgggcgagtggtggctggtggtttcgccgtggggaagactccggctttgtcagcaaggagaaacagaaggatgcctgtaa

SEQ ID NO: 458144 - DNA, 564 bp, Shigella boydii
atgcctgtaaaagagcaaggtttttctctgctggaagtgttgattgctatggcgatcaatagcgtattgttgctgggggctgcacgctttctgcctgcgttacagcgtgaaagtttaacgagcacccgtaagctggcgctggaagatgaaatctggctgcgggtatttaccgtcgcgaagcatctccagagggcgggttattgtcatggcatctgtaccggcgaagggctggaaattgtcggacagggtgactgtatcattgtgcagtgggatgcgaacagtaacggtatctgggatcgcgaaccggtaaaagagtccgaccagattggatttcgtctgaaggagcatgtgctggaaacgctacgcggtgcgacatcctgtgaaggtaagggctgggataaagtcactaatccggatgccatcattatcgacacttttcaggtcgtacgtcaggatgtcagcggcttctcgccggtgttgacggttaatatgcgtgctgccagtaagtctgaaccgcaaaccgtggtgaatgccagctatagcgtgacaggattcaacctgtga

SEQ ID NO: 458145 - DNA, 408 bp, Shigella boydii
gtgaaccgcgaaaagggtgtttcgtcactggctctggtcctgatgctgctggttttgggtagtttgctattacaaggaatgagccaacaggatcgcagttttgcctctcgcgtgagcatggaaagtcagtcattgcgccgccaggccatcgttcagtcggcgctggcgtggggaaaaatgcactcctggcagacgcagccagcagttcagtgctcgcagtacgctgaaaccgatgcccaggtttgtttgcgtttactggcagataatgaagccttattgattgccggttatgaaggcgtttcgttgtggcgaacaggcgaagtcattgatggaaacattgttttttcgccaagcggctggagcgatttttgtccgctgaaagagagggcgttatgtcagcttccctga

SEQ ID NO: 458146 - DNA, 324 bp, Shigella boydii
atgtcagcttccctgaagaatcaacaaggctttagcctgccggaggtaatgttggcgatggtgttgatggtgatgattgtcactgcgttatcgggtttccagcgaacattaatgaacagtcttgccagcagaaaccagtaccaacagctctggcggcatggctggcagcaaacgcaactgcgcgcgatttcgccaccagctaactggcaggtcaaccgattgcagacatcgcaggcgggatgtgtcagcatcagcgttacgctagtttcacccgggggcagagaaggcgagatgacccgcctgcattgcccgaatcgtcagtag

SEQ ID NO: 458147 - DNA, 3369 bp, Shigella boydii
atgttaagggtctaccattccaatcgtctggacgtgctggaagcgttgatggagtttattgtcgaacgcgaacggctggacgatcctttcgaaccagagatgattctggtgcaaagtaccggtatggcacagtggctgcaaatgaccctgtcgcaaaagtttggtattgcggcaaacattgattttccgctgcctgcgagctttatctgggatatgttcgtccgggtgttaccggagatccccaaagagagcgcctttaacaaacagagcatgagctggaaactgatgactctgctgccacaactgttggagcacgaagactttaccctgttgcggcattatctgactgacgatagcgacaagcgaaaactgttccagctttcctcaaaagcggcggacctgtttgaccagtatctggtctatcgcccggagtggctggcacaatgggaaacaggacatttggttgaagggctgggagaagcacaggcctggcaagcgccgttgtggaaggcgctggtggaatatacccatgaactcggacaaccgcgctggcaccgcgcgaatctctatcagcgctttatcgaaacgctggagtccgcgacgacctgcccgccggggttaccttcgcgcgtctttatatgcggtatttccgcgttaccgcctgtttatctccaggcgctccaggcgctgggtaaacatattgaaatccatctcctgtttaccaacccctgccgttattactggggcgatattaaagatcctgcttatctggcgaaactgctgactcgtcagcgtcgacacagttttgaagatcgcgaattgccgctatttcgcgatagcgaaaatgccggacagctctttaacagcgatggtgaacaggatgtcgacaacccgctgctggcctcatgggggaagcttgggcgcgactacatttatctcctttctgacctggagagcagccaggagctggacgcctttgtcgatgtcacgccagataacctgctgcataacattcagtctgacattctggaactggaaaaccgtgccgttgctggtgtgaacatcgaagagttttcccgtagcgataacaaacgcccgcttgatccactggatagcagtatcaccttccacgtttgccatagcccgcagcgtgaagttgaagttttgcacgatcgcctgctggcgatgctggaagaagacccgacacttactccgcgcgacatcatcgtgatggtggctgatatcgacagctacagtccgtttattcaggctgtgtttggtagcgcacctgcggatcgttacctgccttacgccatttccgaccgtcgggcgcggcagtcgcatccggtactggaagcgtttatcagcctgttatcgttgccagacagccgctttgtgtcggaagacgtgctggcattactggatgtgccggtgctggcggcgcggtttgacatcaccgaagaagggctgcgttatttacgccagtgggtcaacgaatccggcattcgttgggggatagatgacgacaacgttcgcgagctggaactccccgccaccggacaacacacctggcgatttggcctgacgcgtatgttgctgggctacgcgatggagagcgcgcagggcgagtggcaatcggttctaccttatgatgagtcgagcggcttaattgcagaactggtggggcatctggcttcactgctaatgcagctaaacatctggcatcgcgggctggcacaggagcgtccgctagaagagtggttgccggtttgtcgcgatatgctcaacgccttcttcctgccggatgcggaaaccgaagcggcgatgacgctgatcgaacaacaatggcaggcgattatcgccgaaggtttaggtgcgcagtatggcgacgcggtgccgctgtcactattgcgtgatgaactggcacagcgtctggatcaagaacgtatcagccagcgttttctcgccggaccggttaacatttgtactctgatgccaatgcgttcaattccgttcaaagtggtttgcctgctgggaatgaacgacggcgtttatccacgtcagcttgcgccattgggctttgacctgatgagccagaaaccgaagcgtggcgaccgtagccgtcgcgatgacgaccgctacctgttcctggaagcgttaatttccgcgcagcaaaaactctatatcagttatatcgggctttccattcaggataacagtgaacgtttcccgtcggtactggtgcaggaactgatcgactacatcgggcaaagtcattatctaccgggcgatgaagcgctcaactgtgatgaaagcgaggcaagggtaaaagcgcatcttacctgcctccatacccggatgccgtttgatccacaaaactaccagccaggcgaacgacaaagctatgctcgtgaatggctacctgcggccagccgggctggtaaagcacattctgaatttgttcagccgctgccgtttaccttaccggaaaccgtgccgctggaaacgctacaacgattctgggcacatccggtgcgggcatttttccagatgcgtttgcaggtgaacttccgtaccgaagacagcgaaatccccgacaccgagccatttattctggaagggcttagccgttatcaaatcaatcagcagttattgaatgcactggttgagcaggatgatgccgaacgcttgttccgtcgcttccgggcggcaggggatttaccgtatggcgcttttggtgaaattttctgggaaactcagtgccaggagatgcagcagcttgccgacagagtcattgcctgtcgccagccggggcagagtatggaaattgatctcgcctgcaacggtgtgcagataactggctggttgccgcaggtgcagccggatggcctgttgcgctggcatccctctttattaagtgtggcgcagggaatgcaactttggctggaacaccttgtctactgtgccagcggtggtaatggtgaaagtcgcctttttctacgcaaagacggcgagtggcgttttccgccgcttgcagccgaacaggctttgcattacctctcacaactgattgaggggtatcgtgaagggatgtccgcgccattgctggtgttacctgaaagtggcggcgcgtggctaaaaacctgttatgacgcgcaaaacgatgccatgctggatgacgattccacgttgcaaaaagcccgtacgaaattccttcaggcttacgaaggcaacatgatggtgcgtggcgaaggtgatgatatctggtatcaaaggctctggcggcaattaacaccagagacaatggaggccatcgttgaacagtcgcaacgtttcctgttaccgctgtttcgctttaatcagtcatga

SEQ ID NO: 458148 - DNA, 2889 bp, Shigella boydii
atgccccgcagcacttggttcaaagcattattgttgttagttgccctttgggcacccttaagtcaggcagaaacgggatggcagccgattcaggaaaccatccgtaaaagtgataaagataaccgccagtatcaggctatacgtctggataacggtatggtggtcttgctggtttctgatccgcaggcagttaaatcgctctcggcgctggtggtgcccgttgggtcgctggaagatcccgaggcgtaccaggggctggcacattaccttgaacatatgagtctgatggggtcgaaaaagtacccgcaggctgacagtctggccgaatatctcaaaatgcacggcggtagtcacaatgccagcactgcgccgtatcgcacggctttctatctggaagttgagaacgacgccttgcctggtgcggtagaccgcctggccgatgctattgctgaacctttgctcgacaagaaatatgccgaacgtgagcgtaatgcggtgaacgctgaattaaccatggcgcgtacgcgtgacgggatgcgcatggcacaggtcagcgcagaaaccattaacccggcacaccccggttcaaagttttctggtggtaacctcgaaactttaagcgataaacctggtaatccggtgcagcaggcgctgaaagatttccacgagaagtactattccgccaatctgatgaaggcggttatttacagcaataaaccgctgccggagttggcaaaaatggcggcggacacctttggtcgcgtgccgaacaaagagagcaaaaaaccggaaatcaccgtgccggtagtcaccgacgcgcaaaagggcattatcattcattacgtcccggcactgccgcgtaaagttctgcgcgttgagtttcgcatcgataacaactcagcgaagttccgtagtaaaacggatgaattgattacctatctgattggtaatcgcagcccaggtacactttccgactggctgcaaaagcagggattagttgagggcattagcgccaactccgatcctatcgtcaacggcaacagcggcgtattagcgatctctgcgtctttaaccgataaaggcctggctaatcgcgatcaggttgtggcggcaatttttagctatctcaatctgttacgtgaaaaaggcattgataaacaatacttcgatgaactggcgaatgtgctggatatcgacttccgttatccgtcgatcacccgtgatatggattacgtcgaatggctggcagataccatgattcgcgttccggttgagcatacgctggatgcagtcaatattgccgatcggtacgatgctaaagcagtaaaagaacgtctggcgatgatgacgccgcagaatgcgcgtatctggtatatcagcccgaaagagccgcacaataaaacggcttattttgtcgatgcgccgtatcaggtcgataaaatcagcgaacaaactttcgctgactggcagcaaaaagctgccaatattgcgctctccttaccggagcttaacccctatattcctgacgatttctcgctgattaagtcagagaagaaatatgaccatccagagctgattgttgatgagtcgaatctgcgcgtggtgtatgcgccaagccgttatttttccagcgaacccaaagctgatgtcagcctgattttgcgtaatccgaaagccatggacagcgcccgcaatcaggtgatgtttgcgctcaatgattatctcgcagggctggcgcttgatcagttaagcaaccaggcgtcggttggtggcataagtttttccaccaacgctaacaacggccttatggttaatgctaatggttacacccagcgtctgccgcagctgttccaggcattgctcgaggggtactttagctataccgctacggaagatcagcttgagcaggcgaagtcttggtataaccagatgatggattccgcagaaaagggtaaagcgtttgagcaggcgattatgcccgcgcagatgctctcgcaagtgccgtacttctcgcgagatgaacggcgtaaaattttgccctccattacgttgaaagaggtgctggcctatcgcgacgccttaaaatcaggggctcgaccagagtttatggttatcggcaacatgaccgaggcccaggcaacaacgcaggcacgcgatgtgcaaaaacagttgggcgctgatggttcagagtggtgtcgaaacaaagatgtagtggtcgataaaaaacaatccgtcatctttgaaaaagccggtaacagcaccgactccgcactggcagcggtatttgtaccgactggctacgatgaatacaccagctcagcctatagctctctgttggggcagatcgtacagccgtggttctacaatcagttgcgtaccgaagaacaattgggctatgccgtgtttgcgtttccaatgagcgtggggcgtcagtggggcatgggcttccttttgcaaagcaatgataaacagccttcattcttgtgggagcgttacaaggcgtttttcccaaccgcagaggcaaaattgcgagcgatgaagccagatgagtttgcgcaaatccagcaggcggtaattacccagatgctgcaggcaccgcaaacgctcggcgaagaagcatcgaagttaagtaaagatttcgatcgcggcaatatgcgcttcgattcgcgtgataaaatcgtggcccagataaaactgctgacgccgcaaaaacttgctgatttcttccatcaggcggtggtcgagccgcaaggcatggctattctgtcgcagatttccggcagccagaacgggaaagccgaatatgtacaccctgaaggctggaaagtgtgggagaacgtcagcgcgttgcagcaaacaatgcccctgatgagtgaaaagaatgagtga

SEQ ID NO: 458149 - DNA, 3543 bp, Shigella boydii
atgagtgatgtcgccgagacactagatcctttgcgcttgcccttacagggtgagcgcctgattgaagcctctgccggcacaggcaaaacctttacgattgcggcgctctatttgcgcctgttacttggactaggcggttccgccgcctttccccgcccgctgaccgttgaagaactgctggtggtcacctttaccgaggctgccacggcagaattgcgtggtcgtatccgtagcaatatccatgagttgcgcatcgcctgtctgcgtgaaactaccgacaatccactgtacgaacgtctgctggaagagatcgacgataaagcgcaagccgcgcagtggttgttgttagccgaacggcagatggatgaagcggcagtctttactattcacggtttttgccagcgcatgctcaacctgaatgcctttgaatccggcatgctgtttgagcagcagctgattgaagatgagtctctgctacgttaccaggcctgcgccgatttctggcgtcgccactgctacccgctgccgcgtgaaatagcccaggtcgtctttgaaacctggaaagggccgcaggcgttgctgcgcgatattaatcgttatctgcaaggcgaagcgccggttatcaaagcaccgccgcccgatgatgaaacgctggcttcccgccacgcgcaaattgtggcgcgtattgctacggtaaaacagcagtggcgcgacgcagtgggtgaactggatgcgctgatcgaatcttctggtattgatcgacgcaagtttaaccgtagcaatcaggctaaatggatcgacaagatcagcgcctgggcagaagaagagaccaacagttatcagttgccggagtcgctggaaaaattctcccagcgtttcttagaagatcgcacgaaagccgggggggaaaccccgcgacatccactgtttgaggcgatcgatcaactgcttgcagaaccattgtcgatccgcgatctggtgatcacccgcgcattggctgagatccgcgaaacagtagcgcgtgaaaaacgccgccgtggcgaattgggttttgatgacatgttaagtcggctcgattccgcgctgcgtagcgaaagcggtgaggtgttggcagcggcgatccgtacgcgattcccggtggcaatgatcgatgaatttcaggataccgacccccagcagtaccgaatttttcgccgtatctggcaccatcagccggaaaccgcattgttgctgattggcgacccgaagcaggccatatatgcattccggggtgcggatatcttcacttatatgaaggcgcgtagtgaagttcacgcccactacactttagacaccaactggcgctccgcacctggaatggtgaacagtgtgaacaagcttttcagccagactgatgacgcgttcatgtttcgcgaaataccgtttattccagtgaaatcagccgggaaaaatcaggcgttacgttttgtatttaaaggtgaaacgcagcctgcgatgaaaatgtggctgatggaaggcgaaagctgcggcgttggcgactatcaaagtaccatggcgcaggtatgtgctgcgcaaatccgcgactggctacaagccggacagcggggcgaagcgttgctgatgaacggcgacgacgcgcgtccggtgcgtgcttcggacatcagtgtgctggtgcgcagccgccaggaggccgcccaggtgcgcgatgccttaacgttgctggaaatcccttccgtttacctttcgaaccgcgacagtgtttttgaaactctggaagcgcaggaaatgctttggttattgcaggcggtgatgacgcccgaacgtgagaacaccctgcgtagtgcgctggcaacgtcaatgatggggctgaacgcgctggatatcgaaacgctgaataatgacgaacatgcgtgggatgcggtagttgaagagttcgatggttatcggcaaatctggcgcaaacgtggcgttatgccgatgctgcgggcgctgatgtcggcgcgtaacattgcagaaaacttgctggcaacggcaggcggtgagcggcgtcttaccgatatcttgcatatcagcgaactgctacaagaagccggaacgcagctggaaagtgaacatgcgctggtacgctggttatcgcaacatatcctcgagccagacagtaatgcctccagccaacaaatgcgcctcgaaagtgataaacatctggtgcagattgtcacgatccataaatcgaaagggctggaatatccgctggtctggttgccatttattaccaatttccgcgtccaggatcaggcgttttatcacgatcgccactcgtttgaggcagttttggatcttaatgctgcgccaaaaagcgtcgacctcgcggaggtcgaacgtctggcggaagatctgcgtttgctttacgtggcgctaacgcgttcggtttggcattgcagtctcggcgttgcaccgctggtgcgccgtcgtggcgataaaaaaggtgacaccgacgtccaccaaagtgcgctcgggcgtttgctgcaaaaaggggaaccgcaagatgcggcagggcttcgcacctgtattgaagcgttatgcgatgatgatattgcctggcaaacggcacaaactggtgataaccagccctggcaggttaatgatgctttaactgcagaactgaatgcgaggacactacaacgattgcccggcgataactggcgtgtcaccagctactccggcttgcagcagcgtggtcacggtatcgctcaggatctgatgccacggctggatgttgatgccgcaggcgtggtcagcgtcgttgaagaaccgacgttaacaccgcatcagttcccgcgcggtgcgtcaccggggacattcttgcacagtttgtttgaagacctcgattttacccagccggttgacccgaactgggtacaggaaaaactggaactcggcggctttgaatcgcagtgggaaccgatgttgaccgagtggatcacggctgtcctccaggcacctctcaatgaaaagggtgttagcctgagtcagctttccgaccgcgataaacaggtggagatggagttttacctgccgattagcgaaccgctcatcgccagccagcttgatgcactaattcgccagtttgacccgctatccgctggctgcccgccgctggagttcatgcaggtacgcggcatgttaaaaggctttatcgacctagtattccgccacgaagggcgttattacctgctcgactataaatccaactggctgggtgaagacagttcggtttacacccaacaggctatggcagcagcgatgcaggcacaccgctatgatctgcaatatcagctttataccctggcgctgcatcgttatctgcgccatcgcattgctgattacgactatgatcgtcactttggcggcgttatctatctgttcctgcgtggcgttgataaagaacatccgcaacaagggatttacacaacccgacccaacgccgggttgattgccctgatggatgagatgtttgccggtatgaccctggaggaggcgtaa

SEQ ID NO: 458150 - DNA, 1827 bp, Shigella boydii
atgaaattgcaaaagcaattactggaagctgtggagcacaaacagctacgcccgctggatgtgcaatttgccctgaccgtggcgggagatgaacatcctgccgtcaccctcgcggcggcactgttaagtcatgatgccggagagggacacgtctgtttgccgctttcacgactggaaaataacgaggcgtcgcatccgctgttggcgacctgtgtcagtgaaatcggtgagctacaaaattgggaagaatgcttgctggcttctcaagcggtcagcaggggagatgaacccacgccgatgatcctctgtggcgatcgtctttatttgaatcgcatgtggtgtaacgagcggacggtagcgcgcttcttcaatgaggtgaatcatgccattgaggttgatgaagctctactggcgcaaaccctggacaaactttttccagtaagcgatgaaattaactggcaaaaagttgcagcggcagtggcgctgacgcggcggatctcggtgatttccggcggcccaggcaccggtaaaacgaccaccgtggcgaagttgctggcagcgttaattcaaatggccgacggcgaacgctgccgtatccgtctggctgcaccaacgggtaaagctgccgcgcgcttaaccgaatctctcggcaaggctttgcgacagttaccgctgaccgatgaacaaaagaaacgcattccggaagatgccagcactttgcaccgattgctgggcgcgcagccgggtagccagcgtttacgtcatcatgccggtaacccgctgcatcttgatgtgctggtggtagatgaagcgtcaatgatcgatctgcctatgatgtcgagactgatcgacgccttgcccgatcatgcgcgagtgatctttctcggcgatcgtgatcaactggcctcggttgaggctggggctgtgctgggcgatatctgcgcttatgccaacgcgggctttaccgccgagcgtgccaggcagctaagccgcctgacggggactcacgttccggcaggaaccggcacagaagcggcatctttgcgcgacagtctctgcctgctgcaaaaaagctatcgtttcggcagcgattctggcattggtcagttagctgcggcgatcaaccgtggtgataaaacggcagtgaaaaccgtttttcagcaggattttactgatatcgaaaaacgacttttacagagcggcgaagattatattgcgatgcttgaggaagctcttgcgggttatggacgttatctggatctgctgcaagcgcgtgccgagccggatttaatcattcaggcgttcaatgagtaccaacttttgtgcgccctgcgggaagggccgtttggcgtggctggactgaatgagcgaattgagcagtttatgcaacagaagcgcaaaattcatcgtcatccgcactctcgttggtacgaaggtcgaccggtgatgattgcccgtaatgacagcgcgcttgggttgtttaatggcgatatcggtattgcactggatcgcgggcaggggacgcgcgtctggtttgcgatgccggacggcaatattaagtctgtgcaaccgagtcgcttgccagagcacgaaactacgtgggcgatgacggtacataaatcgcagggatcggagttcgaccatgcggcgttgattttaccgagccaacgcacgccggtagtaacgcgagagctggtatacaccgcggtgacccgcgcgcgtcgccgtctgtcgctgtatgccgatgagcgtatattaagtgcggcaatcgccactcgtactgagcggcgcagtggtctggcggcgttgtttagttcgcgggaataa

SEQ ID NO: 458151 - DNA, 1332 bp, Shigella boydii
gtggtaaaggaacgtaaaaccgagctggtcgagggattccgccattcggttccctatatcaatacccaccggggaaaaacgtttgtcatcatgctcggcggtgaagccattgagcatgagaatttctccagtatcgttaatgatatcgggttgttgcacagcctcggcatccgtctggtggtggtctatggcgcacgtccgcagatcgacgcaaatctggccgtgcatcaccacgaaccgctgtatcacaagaatatacgtgtgaccgacgccaaaacactggaactggtgaagcaggctgcgggaacattgcaactggacatcactgctcgcctgtcgatgagtctcaataacacgccgctacagggcgcgcatatcaacgtcgtcagtggcaattttattattgcccagccgctgggcgtcgatgacggcgtggattactgccatagcgggcgtatccggcggattgatgaagacgcgatccatcgtcaactggacagcggtgcaatagtgctaatggggccggtcgctgtttcagtcactggcgagagctttaatctgacctcggaagagattgccactcaactggccatcaaactgaaagctgagaagatgattggtttttgctcttcacagggcgtcactaatgacgacggtgatattgtctcagaacttttccctaacgaagcgcaagcgcgggtagaagcccaggaagagaaaggcgattacaactccggtacggtgcgctttttgcgtggcgcagtgaaagcctgccgcagcggcgtgcgtcgctgtcatttaatcagttatcaggaagatggcgcgctgttgcaagagttgttctcacgcgacggtatcggtacgcagattgtgatggaaagcgccgagcagattcgtcgcgcaacaatcaacgatattggcggtattctggagttgattcgcccgctggagcagcaaggtattctggtgcgccgttctcgcgagcagctggagatggaaatcgacaaattcaccattattcagcgcgataacacgactattgcctgcgccgcgctctatccgttcccggaagagaagattggggaaatggcctgtgtggcagttcacccggattaccgcagttcatcacggggcgaggttctgctggaacgcattgccgctcaggcgaagcagagcggcttaagcaaattgtttgtgctgaccacgcgcagtattcactggttccaggaacgtggatttaccccggtggatattgatttactgcccgagagcaaaaagcagttgtacaactaccagcgtaaatccaaagtgttgatggcggatttagggtaa

SEQ ID NO: 458152 - DNA, 1254 bp, Shigella boydii
atgtcaggatccaacactgcaatcagccgtcgtcgtttactgcaaggcgcgggtgccatgtggctattgagcgtaagtcaggtcagtctggctgcggtcagccaggtcgtggcggtgcgcgtctggcctgcgtccagctacacccgtgtgacggtagaatcaaatcgtcagctgaaatataagcagttcgcgttgagtaaccctgaacgcgtggtggtggatatcgaagatgtaaacctgaactcggtactcaaggggatggcggcacaaattcgtgcagacgacccgttcatcaagtcggcgcgcgtcgggcaatttgacccgcagaccgtacggatggtttttgaattaaagcaaaacgtaaaaccgcagctgtttgcccttgcgccggtcgccgggtttaaagagcgtctggtgatggacctctatccggccaatgcacaggatatgcaggacccgctgctggcgctgctggaggattacaacaaaggcgacctcgaaaagcaggtgccgccagcacaaagtggtccacaaccgggtaaagcagggcgcgatcgtcctattgttattatgcttgaccctggccacggcggcgaagactccggtgcggtggggaaatacaaaacgcgcgaaaaagacgtggtattgcaaatagctcgccgtctgcgctctctgatcgagaaagagggcaatatgaaggtgtacatgacgcgcaatgaagacatcttcattccgttgcaagtgcgcgtagcaaaagcccaaaaacagcgtgctgacctgtttgtctctatccatgccgacgcctttaccagtcgtcagccgagcggttcctctgtgtttgcgctctcaaccaaaggtgcaaccagtactgcggcaaaatatctggcacaaacccagaacgcctcggacttgattggtggcgtgagcaaaagcggtgaccgctatgtcgaccacaccatgttcgatatggtgcagtcgctgaccattgccgacagcctgaagtttggtaaagcggtactgaataagctcggtaaaatcaacaagctgcataaaaatcaagttgaacaggccgggtttgccgtactaaaggcaccagatattccctccattctggtcgaaacggcgtttatcagtaacgttgaggaagagcgtaaactgaaaacggcgactttccagcaggaagttgcggagtctattcttgcggggattaaagcgtattttgccgatggggcgacgctggcgagaaggggatga

SEQ ID NO: 458153 - DNA, 678 bp, Shigella boydii
atgatcatcgaaaaagtcatgaacaataattgtgtacaggcatcggtgaacggacaggaggttatcatttctgggcctggcgttggttacaataaaaaatatggtatgtcggtccctgagcatcctgcaaaccggattttttatgtcagaaatgagcaaaaaaataaactctacaaattgattgagcatgtgggtattgagtatatttttgttgccgaaaagatagtgcattatgcggagagtaatctcgaaaaaaaactcaatccatcgctactactgattcttgctgatcacatttcgaatgcaatatcccgagtcgtctcaggcatacaaattaataatgttttccttgaggaaatcaaagcgttgtacaaagcagagtatgcaataagtcgtgatgcattaacaatcattaatgagcaatttagcgttcaactaccggatgatgagattggttttatagcattgcatattttaaataattatgaaaattcagttgattatgaatcagtaaggattattgagctgtctcaaaaaatcacggagcttattgaagttgtttataacagaagggtggacagaagttcatttaactactccagatttatgatgcaccttaaatatttttctagtcgtgtgttatgtaatgaaaaaaataaaacagaaaaatattggtga

SEQ ID NO: 458154 - DNA, 171 bp, Shigella boydii
atgtatcccatcgctctgttaagtgtatgtggtatgatgttagggctgggaagtggtttagccagcgatgatatggcaaaattcattccagtgttggctattccgttaattaaaaccatacttgattttattgttagccttggtttgttggtaatgactccaacttactga

SEQ ID NO: 458155 - DNA, 381 bp, Shigella boydii
atgctgggtgcggtggaacgccgcttcggcaacgatcttccgtcgtctccagtggagtggctgacggataatggttcatgctaccgggctaatgaaacacgccagttcgcccggatgttgggacttgaaccgaagaacacggcggtgcggagtccggagagtaacggaatagcagagagcttcgtgaaaacgataaagcgtgactacatcagtatcatgcccaaaccagacgggttaacggcagcaaagaaccttgcagaggcgttcgagcattataacgaatggcatccgcatagtgcgctgggttatcgctcgccacgggaatatctgcggcagcgggcttgtaatgggttaagtgataacagatgtctggaaatatag

SEQ ID NO: 458156 - DNA, 714 bp, Shigella boydii
atgaatgttaattacctgaatgattcagatctggattttcttcagcattgtagtgaggaacagttggcaaatttcgcccgattgctcacccataatgaaaaaggcaaaactcgcctctccagcgtactgatgcgcaacgaactgtttaaatcgatggaggggcatcccgagcaacatcgccgcaactggcagctgattgctggagaattacagcattttggtggcgatagtatcgccaacaaactgcgcggacacggtaaattgtatcgggccattttgctcgatgtttcaaaacgattgaagctgaaagccgacaaagagatgtctacgtttgaaattgagcaacagttactggaacaatttctgcgtaaaacctggaagaaaatggacgaggaacataagcaggagtttctgcacgcgttcgatgcgagggtgaatgagctggaagagctgctgccgctgctgatgaaagacaaattattggcaaaaggcgtgtcgcatttgctttccagccaactgacccgcattttacgcacccacgcagcaatgagcgtacttgggcatggtttgctgcgcggcgcggggctgggaggccctgtaggtgcggcactaaatggggttaaagcggtcagcggcagcgcctatcgcgtgacgattccagccgtactgcaaatcgcctgcctgcgccggatggttagcgccactcaggtctga

SEQ ID NO: 458157 - DNA, 567 bp, Shigella boydii
atgggcaacactaagttggctaatccggcaccgctgggcctgatgggcttcggcatgaccaccattctgcttaacctgcacaacgtgggttatttcgctctggacggtattattcttgccatgggcattttctacagcggcatcgcgcaaatttttgctggtctgctggagtacaaaaaaggcaacactttcggtttaaccgcattcacctcttacggttctttctggctgacgctggttgcgattctgctgatgccgaaactgggtctgaccgatgcgccaaatgcacagttccttggtgtctacctgggtctgtggggcgtatttacgctgtttatgttcttcggcacgctgaaaggagcacgcgttctgcaattcgttttctttagcctgactgtgctgtttgccctgctggcgatcggtaacattgccggtaacgccgcaatcatccactttgccggctggattggtctgatctgtggtgccagtgcaatctatctggcgatgggtgaagtactgaacgagcagtttggtcgcaccgttctgccgattggtgaatcccactaa

SEQ ID NO: 458158 - DNA, 588 bp, Shigella boydii
atgaatactttacgtattggcttagtttccatctctgatcgcgcatccagcggcgtttatcaggataaaggcatccctgcgctggaagaatggctgacatcggcgctaaccacgccgtttgaactggaaacccgcttaatccccgatgagcaggcgatcatcgagcaaacgttgtgtgagctagtggatgaaatgagttgccatctggtgctcaccacgggcggaactggcccggcgcgtcgtgacgtaacgcccgatgcgacgctggcagtagcggaccgcgagatgcctggctttggtgaacagatgcgccagataagcctgcattttgtaccaactgcgatcctttcgcgtcaggttggtgtgattcgcaaacaggcgctgatccttaacttacccggtcagccgaagtctattaaagagacgctggaaggtgtgaaggacgctgcgggtaacgttgtggtacacggtatttttgccagcgtaccgtactgcattcagttgctggaagggccatacgttgaaacggcaccagaagtggttgctgcattcagaccgaagagtgcaagacgcgacgttagcgaataa

SEQ ID NO: 458159 - DNA, 954 bp, Shigella boydii
atgacggacaaattgacctcccttcgtcagtacaccaccgtagtggccgacactggggacatcgcggcaatgaagctgtatcaaccgcaggatgccacaaccaacccttctctcattcttaacgcagcgcagattccggaataccgtaagttgattgatgatgctgtcgcctgggcgaaacagcagagcaacgatcgcgcgcagcagatcgtggacgcgaccgacaaactggcagtaaatattggtctggaaatcctgaaactggttccgggtcgtatctcaactgaagttgatgcgcgtctttcctatgacaccgaagcgtcaattgcgaaagcaaaacgcctgatcaaactctacaacgatgctggtattagcaacgatcgtattctgatcaaactggcttctacctggcagggtatccgtgctgcagaacagctggaaaaagaaggcatcaactgtaacctgaccctgctgttctccttcgctcaggctcgtgcttgtgcggaagcaggcgtgttcctgatctcgccatttgttggccgtattcttgactggtacaaagcgaatactgataagaaagagtacgctccggcagaagatccgggcgtggtttctgtatctgaaatctaccagtactacaaagagcacggttatgaaaccgtggttatgggcgcaagcttccgtaacatcggcgaaattctggaactggcaggctgcgaccgtcttaccatcgcacctacactgctgaaagagctggctgagagcgaaggggctatcgaacgtaaactgtcttacaccggcgaagtgaaagcgcgtccggcgcgtatcactgagtccgagttcctgtggcagcacaaccaggatccaatggcagtagataaactggcggaaggtatccgtaagtttgctattgaccaggaaaaactggaaaaaatgatcggcgatctgctgtaa

SEQ ID NO: 458160 - DNA, 1431 bp, Shigella boydii
atgccagattttttctcctttattaacagcgtcctttggggatcggtaatgatttacctgctcttcggcgcaggttgttggttcacttttcgcaccggatttgtgcagtttcgctacatccgccagtttggcaaaagtcttaaaaatagcattcatccacagccaggcggtttaacctcatttcagtcattgtgtaccagtcttgcggcgcgcgtgggtagcggcaacctggccggcgttgcgctggctattaccgccggtggacctagagccgtcttttggatgtgggttgccgcgtttatcggcatggcgacctcgtttgccgaatgttcccttgcacaactttataaagaacgtgacgtcaatgggcagtttcgtggcggaccggcatggtatatggcgcgcgggctggggatgcgttggatgggcgttctgttcgccgtctttttgctcatcgcctacggcataattttcagcggagttcaggcgaacgccgttgcccgagccctgagtttttcttttgattttcccccgctggtgacaggcattattctcgctgtctttgctctgctggcaatcactcgcggtcttcatggcgtcgcccggctcatgcaggggtttgtcccgttgatggcgataatctgggtgctgaccagcatggtgatttgcgtaataaatatcgggcaacttccccacgtcatttggtctatttttgagagtgcttttggctggcaggaagcggcaggcggcgcggcgggatataccttaagccaggcgattactaacggttttcagcgcagtatgttttccaatgaggcgggaatgggttcgacgccaaacgcggcagcggcagcggcgtcctggcctccgcatccggcagcgcaagggattgtccagatgattggcatttttatcgacaccctggtcatctgtacggcaagcgccatgctgatattactggcgggtaacgacacaacctacatgccgctggaaggtattcagcttatccagaaggcgatgcgggtgctaatgggttcctggggtgctgagtttgttaccctcgtggttattctgtttgccttcagctccatcgttgccaactacatttatgccgaaaacaatctcttctttttacgcctgaacacccctaaagcgatctggtgtttgcggatctgcaccttcgcaacggtcatcggcggcaccttgctaagccttccgctgatgtggcaactggcagatatcataatggcctgcatggctattaccaatttgaccgccattttactgctctcgcctgtggttcataccattgccagtgattatctacgccagcgtaaactcggcgtgcgcccggtgtttgatccgttgcgttatccggatatcggtcgccagctttctccggacgcgtgggatgatgtttcgcaggagtaa

SEQ ID NO: 458161 - DNA, 777 bp, Shigella boydii
atgctgattcttatttcacctgcgaaaacgcttgattaccaaagcccgttgaccaccacgcgctatacgctgccggagctgttagacaattcccagcagttgatccatgaagcgcggaaactgacgcctccgcagattagcacgctgatgcgcatcagcgacaaactggcgggtatcaacgccgctcgctttcatgactggcagccagatttcacgccggcgaatgcccgccaggcgattctggcgtttaaaggtgatgtctacaccggcttgcaggccgaaaccttcagcgaagacgatttcgattttgcccaacagcatttgcgaatgctttccggcttgtatggcgtactgcgcccgctcgatttaatgcagccttatcgtctggaaatggggatccgtcttgagaatgcccgagggaaagatctgtatcaattctggggagatatcatcaccaacaagctgaacgaggcgctcgcagcacaaggcgataatgtggtgattaatctggcgtcagatgagtattttaaatcggtgaagccgaagaaattgaatgccgagattatcaagccggtgttcctcgatgagaagaacggcaaatttaagatcatcagcttctacgctaagaaagcacgcggtctgatgagtcgtttcattattgaaaatcggctgaccaaaccagagcaactgactggttttaatagcgaaggttacttctttgatgaagcttcctccagcaatggcgaactggtgtttaaacgctacgagcagcgttaa

SEQ ID NO: 458162 - DNA, 297 bp, Shigella boydii
gtgaaaaagatgcaatctatcgtactcgcactttccctagttctggtcgctcccatggcagcacaggctgcggaaattacgttagtcccgtcagtaaaattacagataggcgatcgtgataatcgtggctattactgggatggaggtcactggcgcgaccacggctggtggaaacaacattatgaatggcgaggcaatcgctggcacccacacggaccgccgccaccgccgcgccaccataagaaagctcctcatgatcatcacggcggtcatggtccaggcaaacatcaccgctaa

SEQ ID NO: 458163 - DNA, 1287 bp, Shigella boydii
atgaaactctacaatctgaaagatcacaatgagcgggtcagctttgcgcaagccgtaacccaggggttgggcaaaaatcaggggctgttttttccgcacgacctgccggaattcagcctgactgaaattgatgagatgctgaagctggattttgtcacccgcagtgcgaagatcctctcggcgtttattggtgatgaaatcccgcaggaaatcctggaagagcgcgtgcgcgcggcgtttgccttcccggctccggtcgccaatgttgaaagcgatgtcggttgtctggaattgttccacgggccaacgctggcatttaaagatttcggcggtcgctttatggcacaaatgctgacccatattgcgggcgataagccagtgaccattctgaccgcgacctccggtgataccggagcggcagtggctcatgctttctacggtttaccgaatgtgaaagtggttatcctctatccacgaggcaaaatcagtccactgcaagaaaaactgttctgtacattgggcggcaatatcgaaactgttgccatcgacggcgatttcgatgcctgtcaggcgctggtgaagcaggcgtttgatgatgaagagctgaaagtggcgctggggttaaactcagctaactcgattaacatcagccgtttgctggcgcagatttgctactactttgaagcagttgcgcagctgccgcaggaagcgcgcaaccagctggttgtctcggtgccaagcggaaacttcggcgatttgacggcgggtctgctggcgaagtcactcggtctgccggtgaaacgttttattgctgcgaccaacgtgaacgataccgtgccacgtttcctgcacgacggtcagtggtcacccaaagcgactcaggcgacgttatccaacgcgatggacgtgagtcagccgaacaactggccgcgtgtggaagagttgttccgccgcaaaatctggcaactgaaagagctgggttatgcagccgtggatgatgaaaccacgcaacagacaatgcgtgagttaaaagaactgggctacacctcggagccgcacgctgccgtagcgtatcgtgcgctgcgtgaccagttgaatccaggcgaatatggcttgttcctcggcaccgcgcatccggcgaaatttaaagagagcgtggaagcgattctcggtgaaacgttggatctgccaaaagagctggcagaacgtgctgatttacccttgctttcacataatctgcccgccgattttgctgcgttgcgtaaattgatgatgaatcatcagtaa

SEQ ID NO: 458164 - DNA, 933 bp, Shigella boydii
atggttaaagtttatgccccggcttccagtgccaatatgagcgtcgggtttgatgtgctcggggcggcggtgacacctgttgatggtgcattgctcggagatgtagtcacggttgaggcggcagagacattcagtctcaacaacctcggacgctttgccgataagctgccgtcagaaccacgggaaaatatcgtttatcagtgctgggagcgtttttgccaggagcttggcaagcaaattccagtggcgatgactctggaaaagaatatgccaatcggttcgggcttaggctccagcgcctgttcggtggtcgcggcgctgatggcgatgaatgaacactgtggcaagccgcttaatgacactcgtttgctggctttgatgggcgagctggaaggacgaatctccggcagcattcattacgacaacgtggcaccgtgttttcttggtggtatgcagttgatgatcgaagaaaacgacattatcagccagcaagtgccagggtttgatgagtggctgtgggtgctggcgtatccggggattaaagtctcaacggcagaagccagggctattttaccggcgcagtatcgccgccaggattgcattgcgcacgggcgacatctggctggcttcattcacgcctgctattcccgtcagcctgagcttgccgcgaagctgatgaaagatgttatcgctgaaccctaccgtgaacggttactgcctggcttccggcaggcgcggcaggcggttgcggaaatcggcgcggtagcgagcggtatctccggctccggcccgaccttgttcgctctgtgtgacaagccggataccgcccagcgcgttgccgactggttgggtaagaactacctgcaaaatcaggaaggttttgttcatatttgccggctggatacggcgggcgcacgagtactggaaaactaa

SEQ ID NO: 458165 - DNA, 2463 bp, Shigella boydii
atgcgagtgttgaagttcggcggtacatcagtggcaaatgcagaacgttttctgcgtgttgccgatattctggaaagcaatgccaggcaggggcaggtggccaccgtcctctctgcccccgccaaaatcaccaaccacctggtggcgatgattgaaaaaaccattagcggccaggatgctttacccaatatcagcgatgccgaacgtatttttgccgaacttttgacgggactcgccgccgcccagccggggttcccgctggcgcaattgaaaactttcgtcgatcaggaatttgcccaaataaaacatgtcctgcatggcattagtttgttggggcagtgcccggatagcatcaacgctgcgctgatttgccgtggcgagaaaatgtcgatcgccattatggccggcgtgttagaagcgcgtggtcacaacgttaccgttatcgatccggtcgaaaaactgctggcagtggggcattacctcgaatctaccgtcgatattgctgagtccacccgccgtattgcggcaagccgcattccggctgatcacatggtgttgatggcaggtttcacctccggtaatgaaaaaggcgaactggtggtacttggacgtaacggttccgactactccgcggcggtgctggctgcctgtttacgcgccgattgttgcgagatttggacggacgttgacggggtctatacctgcgacccgcgtcaggtgcccgatgcgaggttgttgaagtcgatgtcctaccaggaagcgatggagctttcctacttcggcgctaaagttcttcacccccgcaccattacccccatcgcccagttccagatcccttgcctgattaaaaataccggaaatcctcaagcaccaggtacgctcattggtgccagccgtgatgaagacgaattaccggtcaaaggcatttccaatctgaataatatggcaatgttcagcgtttctggtccggggatgaaaggaatggtcggcatggcggcgcgcgtctttgctgcaatgtcacgcgcccgtatttccgtggtgctgattacgcaatcatcttccgaatacagtatcagtttctgcgttccacaaagcgactgtgtgcgagctgaacgggcaatgcaggaagagttctacctggaactgaaagaaggcttactggagccgctggcggtgacggaacggctggccattatctcggtggtaggtgatggtatgcgcaccttgcgtgggatctcggcgaaattctttgccgcgctggcccgcgccaatatcaacattgtcgccattgctcagggatcttctgaacgctcaatctctgtcgtggtaaataacgatgatgcgaccactggcgtgcgcgttactcatcagatgctgttcaataccgatcaggttatcgaagtgtttgtgattggcgtcggtggcgttggcggtgcgctgctggagcaactgaagcgtcaacaaagctggctgaagaataaacatatcgacttacgtgtctgcggtgttgccaactcgaaggcactgctcaccaatgtgcatggcctaaatctggaaaactggcaggaagaactggcgcaagccaaagagccgtttaatctcgggcgcttaattcgcctcgtgaaagaatatcatctgctgaacccggtcattgttgactgcacctccagccaggcagtggcggatcaatatgccgacttcttgcgcgaaggtttccacgttgtcacgccgaacaaaaaggccaacacctcgtcgatggattactaccatctgttgcgtcatgcggcggaaaaatcgcggcgtaaattcctctatgacaccaacgttggggctggattaccggttattgagaacctgcaaaatctgctcaatgctggtgatgaattgatgaagttctccggcattctttcaggttcgctttcttatatcttcggcaagttagacgaaggcatgagtttctccgaggcgactactctggcgcgggaaatgggttataccgaaccggatccgcgagatgatctttctggtatggatgtagcgcgtaagctattgattctcgctcgtgaaacgggacgtgaactggagctggcggatattgaaattgaacctgtgctgcccgcagagtttaacgctgagggtgatgttgccgcttttatggcgaatctgtcacagctcgacgatctctttgccgcgcgcgtggcgaaggcccgtgatgaaggaaaagttttgcgctatgttggcaatattgatgaagatggtgcctgccgcgtgaagattgccgaagtggatggtaatgatccgctgttcaaagtgaaaaatggcgaaaacgccctggccttttatagccactattatcagccgctgccgttggtgctgcgcggatatggtgcgggcaatgacgttacagctgccggtgtctttgccgatctgctacgtaccctctcatggaagttaggagtctga

SEQ ID NO: 458166 - DNA, 687 bp, Shigella boydii
atgcgtataacgattattctggtcgcacccgccagagcagaaaatattggggcagcggcgcgggcaatgaaaacgatgggttttagcgaactgcggattgtcgatagtcaggcacatctggagccagccactcgctgggtcgcacatggatctggtgatattattgataatattaaagtttttccgacactggttgaatcgttacacgatgtcgatttcactgtcgccaccactgcgcgcagtcgggcgaaatatcattactacgccacgccagtagaactggtgctgctgttagaggaaaaatcttcatggatgagccatgccgcgctggtgtttggtcgcgaagattccgggctgactaacgaagagttagcgttggctgacgttcttactggtgtgccgatggtggcggattatccttcgctcaatctggggcaggcggtgatggtctattgctatcaattagcaacattaatacaacaaccgacgaaaagtgacacaacggcagaccaacatcaactgcaagctttacgcgaacgagtcatggcattgctgacgactctggcagtggcagatgacataaaactggtcgactggttacaacaacgcctggggcttttagagcaacgagacacggcaatgttgcaccgtttgctgcatgatattgaaaaaaatatcaccaaataa

SEQ ID NO: 458167 - DNA, 717 bp, Shigella boydii
atgcagaccccgcacattcttatcgttgaagacgagttggtaacacgcaacgcgttgaaaagtattttcgaagcggaaggctatgatgttttcgaagcgacagatggcgcggaaatgcatcagatcctctctgaatatgacatcaacctggtgatcatggatatcaatctgccgggtaagaacggtcttctgttagcgcgtgaactgcgcgagcaggcgaatgttgcgttgatgttcctgactggccgtgacaacgaagtcgataaaattctcggcctcgaaatcggtgcagatgactacatcaccaaaccgttcaacccgcgtgaactgacgattcgtgcacgcaacctgctgtcccgtaccatgaatctgggtactgtcagcgaagaacgtcgtagcgttgaaagctacaagttcaatggttgggaactggacatcaacagccgttcgttgatcagccctgatggcgagcagtacaagctgccgcgcagcgagttccgcgccatgcttcacttctgtgaaaacccaggcaaaattcagtctcgtgctgaactgctgaagaaaatgaccggccgtgagctgaaaccacacgaccgtactgtagacgtgacgatccgccgtattcgtaaacatttcgaatctacgccggatacgccggaaatcatcgccaccatccacggtgaaggttatcgcttctgtggtgatctggaagattaa

SEQ ID NO: 458168 - DNA, 1353 bp, Shigella boydii
atgttgaaatcccccctgttctggaaaatgaccaccttgtttggtgcagtattgctgttgttgattccgataatgctgattcggcaagtgattgtcgaacgtgccgattaccgtagcgatgtggaagatgcgattcgccaaagtaccagcgggccgcaaaaactcgttgggccgcttatcgctattcctgtgaccgagctttatacggtgcaggaagaggataaaaccgtggagcggaaacgaagttttatccatttttggttacctgagtcattgatggttgatggcaatcagaacgtggaagaacgcaagatagggatttataccggtcaggtctggcacagtgatttaacgctaaaagccgatttcgatgtttcgcgtcttagcgagctcaacgcgccaaatatcatcttaggcaagccctttattgtgattagcgtcggggatgcgcgtggtattggtgtggtgaaagcgcctgaagttaacggaacggcactgaccattgaacccggtaccgggttagagcaaggcgggcagggcgtgcatatccctttacccgaaggggactggcggaagcagaacctgcagctgaatatggcactgaatttaagcggtaccggcgatctttctgtggtgcctgccgggcgtaatagcgaaatgaccttaaccagcaactggccgcatcccagttttttaggtgattttctaccagccaaacgggaagttagcgagtcaggttttcaggcgcaatggcaaagcagctggtttgctaataatctcggtgagcgttttgcttcaggcaatgataccggctgggaaaacttccccgcgtttagcgtcgcagtgacgacgccagccgatcaataccaattaacggaccgggcgactaagtacgccattctgctgattgcactgacttttatggcgttctttgtttttgaaacgctcaccgcgcaacgtttacacccaatgcaatatttgctggtggggctttcattggtgatgttttatttgctcttgctggcgctttctgaacatatcggttttaccgtggcatggataatcgccagtctgattggggcgttaatgaacggtatttatttgcaggcggtattgaaaggttggcgcaacagcatgttgtttaccctcgcgctgttgttgctggatggtgtgatgtggggactgctcaactctgccgatagcgcgctgttgttgggaaccagtgtgctggtggtggcgctggccggcatgatgtttgtgactcgtaatatcgactggtatgcgttttcactgccgaaaatgaaagccagtaaagaagttacaatggacgatcaattacgtatctggaaataa

SEQ ID NO: 458169 - DNA, 1425 bp, Shigella boydii
atgcgtatcggcatgcggttgctgctgggctattttttactggtggcggtggcggcctggttcgtactggctatttttgtcaaagaagttaaaccgggcgtgcgaagagcaacggaggggacgttgatcgacaccgcaacgttgctggcggagctggcgcgtcccgatttgctctctggggacccaacgcatgggcaactggcgcaggcgtttaatcagctacaacatcgtccgtttcgcgccaatatcggtggcattaacaaagtgcgcaatgaatatcatgtctatatgaccgattcgcagggtaaagtattgttcgattcggcaaataaagccgttgggcaggattattcgcgctggaatgacgtctggctaacgttgcgtggtcagtatggtgcgcgcagcacgttgcaaaatcctgccgatcccgaaagttcggtgatgtatgttgccgcgccgattatggacggctcgcggcttattggcgttttgagcgtaggcaaaccgaacgcggcgatggctccggtcattaagcgtagcgagcggcgaattttatgggccagcgccattttgctggggattgcactggtgattggcgcaggcatggtttggtggatcaaccgctccattgcccggctcactcgctatgccgattccgtcactgacaataagcccgttcctcttcctgaactcggcagtagcgagttgcgtaagcttgcgcaggcgctggaaagtatgcgcgtgaagctggaagggaaaaactatattgagcagtatgtttatgcgttaacccatgagctaaaaagcccactggcggcgattcgtggcgcggcggaaattttacgcgaaggtccgccaccggaagtggtggctcgttttaccgacaacattctgacgcaaaatgcgcgtatgcaggcattggtagaaacgttactacgccaggcaagactggagaatcgtcaggaagtcgttctgactgttgttgatgtggcggcattatttcgccgcgtcagcgaagcgcgcaccgtgcagttggcagaaaaaaacatcactctacatgttatgcccactgaggttaatgttgctgctgaaccggcgttactggagcaggcgctggggaatttactggataacgccatcgattttacccccgagagcggtcgcataacgctaagcgccgaagtggatcaggaacacgtcgcccttaaggtgctggataccggtagtggtattcctgactacgcgctgtcacgtatttttgaacgcttttactctttgccgcgtgcaaatgggcaaaaaagcagcggtctggggttggcgttcgtcagtgaggtcgcccgtttgtttaacggcgaagtcacgctgcgcaacgtgcaggaaggtggcgtgctggcctcgcttcgacttcaccgtcacttcacatag

SEQ ID NO: 458170 - DNA, 666 bp, Shigella boydii
gtggaagatgagcaagggatagccgacacgctggtctacatgttgcagcaggaaggttttgccgtcgaggtctttgagcgaggcttgccggtgctggataaagctcgccagctggttcccgacgtcatgattctcgacgttggtttgcctgatatcagcggctttgaattgtgcagccagttactggcgctccatccggcgttacctgtactgttcctgacggcccgaagtgaagaggtcgatcgcctgcttgggctggaaattggcgctgacgactatgtggctaaaccgttttcaccccgcgaagtgtgcgccagggtgcgcaccttactgcgtcgggtgaagaagttctcgtcgccgtctcccgtcatccgtattggtcattttgaattgaatgaacccgcggcgcagatcagctggtttgacacgccattaacgctgacgcggtatgagtttttattgctgaagacgttactcaagtcgccaggccgcgtctggtcccgccagcaactgatggatagcgtgtgggaagatgcgcaggacacctacgatcgcaccgttgatacccacattaaaacgttgcatgccaagctgcgtgccatcaaccccgatctttcaccgattaatactcatcgcggcatgggatatagcctgaggggcctgtaa

SEQ ID NO: 458171 - DNA, 474 bp, Shigella boydii
atgaaatacaagcatttgatcctgtctttaagcctgataatgctggggccattggctcatgcagaagagattggttcggtcgacaccgtatttaaaatgatcggcccggatcacaaaattgttgtggaagcctttgacgatcccgatgtgaaaaatgtcacctgttatgtgagccgggcgaaaacaggtggtattaaagggggattgggtctggcggaagatacctccgatgcggctatttcttgtcagcaagtcgggccgattgaactgtcggatcgtattaaaaacggcaaagctcagggcgaggtagtattcaaaaaacgcacgtccctggtctttaagtcgttacaggtcgtgcgcttttatgacgccaaacgcaacgcgctcgcttatctggcttactccgacaaagttgtagaaggttcgccgaaaaacgcgattagcgcggttcctgtcatgccgtggcggcaataa

SEQ ID NO: 458172 - DNA, 870 bp, Shigella boydii
atggatcaggccggcattattcgcgaccttttaatctggctggaaggtcatctggatcagcccctgtcgctcgacaatgtagcggcgaaagcaggttattccaagtggcacttacagagaatgtttaaagatgtcactggccatgctattggcgcgtatattcgtgctcgtcgtttgtcgaaatcggcggtcgcactacgcctgactgcgcgtccgattctggacatcgcgctgcaataccgcttcgactctcaacagacatttacccgcgcattcaagaagcagtttgcccagactcctgcactttaccgccgttctcctgaatggagcgcctttggtattcgcccgccgctacgtctgggtgaattcacaatgccagagcacaaatttgtcaccctggaagatacgccgctgattggtgttacccagagctactcctgttcgctggagcaaatctctgatttccgccatgaaatgcgttatcagttctggcacgattttctcggcaacgcgccgaccattccgccagtgctctacggcctgaatgaaacgcgtccgagtcaggataaagacgacgaacaagaggtattctataccaccgcgttagcccaggatcaggcagatggctatgtactgacggggcatccggtgatgctgcagggcggcgaatatgtgatgtttacctatgaaggtctgggaaccggcgtgcaggagtttatcctgacggtatacggaacgtgcatcccaatgctcaacctgacgcgccgtaaaggtcaggatattgagcgatactacccggcagaagacgccaaagcgggagatcgcccaattaatctgcgctgtgaactgctgattcctatccgccgttaa

SEQ ID NO: 458173 - DNA, 648 bp, Shigella boydii
atgttacaggtatacctagtccgccacggtgaaacgcagtggaacgccgagcgacgtattcagggccagtctgacagcccgctgaccgccaaaggtgagcaacaggcgatgcaggtggcaacccgtgccaaagagcttggcattacgcatattatcagtagcgatttaggacgcacccggcgtacggcggaaatcatcgcccaggcctgcggctgtgacatcatctttgattctcgcctgcgtgaattaaacatgggtgtgctggaaaaaagacatatcgattctctgaccgaagaagaagagaactggcgtcggcagctggtcaatggcaccgttgacgggcgtattcctgaaggcgagtcaatgcaggagctcagcgatcgcgtcaatgcggcactggaatcttgccgggacttaccgcagggaagccgaccgctgctggtgagccatggtattgcactgggatgtctggtgagtacgattctcggattaccagcatgggcagcgcgccgcttacgtctgcgtaactgttctatttcgcgcgtggattatcaggaaagcctgtggctggcgtctggctgggtcgttgaaaccgcaggggacatctcgcatctggacgcccctgcattagatgagctgcagcgttaa

SEQ ID NO: 458174 - DNA, 522 bp, Shigella boydii
atgcaccaagttgtctgtgcgaccaccaatcccgctaaaattcaggccattctgcaggcatttcacgagatcttcggcgaagaatcctgccatattgcatccgttgccgtcgagagcggtgtaccggaacagccctttggcagtgaggaaacgcgcgctggcgcacgaaatcgggtagcaaatgcccgccgtttacttccagaggctgatttttgggtggcgattgaagctggcatcgatggtgacagcactttcagttgggtggtgattgaaaacaccagccagcgcggcgaggcgcgttcggctactttgccgttacctgcggtgattctgcagaaagtgcgtgaaggtgaggcgcttggtcccgtgatgtcgcgttataccggtattgatgagattggtcgtaaggaaggggcgatcggcgtgtttaccgccgggaaactcactcgcgccagcgtctatcaccaggcggtgatcctggcgctgagtccgtttcacaatgccgtgtatcaggcattgtag

SEQ ID NO: 458175 - DNA, 297 bp, Shigella boydii
atggcagaacagcgtcaccaggagtggttacgttttgtcgacctgcttaagaatgcctaccaaaacgatctccatttaccgttgttaaacctgatgctgacgccagatgagcgcgaagcgttggggactcgcgtgcgtattgtcgaagagctgttgcgtggcgaaatgagtcagcgtgagttaaaaaatgaactcggcgcgggcatcgcgacgattacgcgtggatctaacagcctgaaagccgcgcccgtggagctgcgccagtggctggaagaggtgttgctgaaaagcgattga

SEQ ID NO: 458176 - DNA, 1938 bp, Shigella boydii
gtggaaaaagccaaacaagttacctggcggctgttggctgccggtgtctgtctgctgacggtcagcagcgtggcgcgagccgactcactggatgagcagcgtagccgttacgcgcaaatcaagcaggcctgggataatcgacaaatggatgtggtcgaacaaatgatgcctggactgaaggattatccgctttatccctacctagaataccgccagatcaccgatgatctgatgaatcaaccggcggtgacggtcactaactttgttcgcgctaaccccacgcttcctcccgctcgcacgctgcaatctcgtttcgtcaatgaactggcgcggcgtgaagactggcgtggcttgttagcctttagcccggaaaagcccggaactaccgaagcgcaatgtaattactactatgcgaaatggaacaccgggcagagtgaagaagcctggcaaggggcgaaagagctgtggctaaccggcaagagccagcctaacgcctgtgacaagttatttagcgtctggcgtgcgtcaggtaaacaagatccgctggcgtatttagagcgtatccgtctggcgatgaaagcgggtaacactggcctggtaacagtgctggcagggcagatgcctgccgattaccagactatcgcctcggcaatcatttcactggcgaacaaccctaatacggtactgaccttcgcgcgtacaaccggagcgaccgattttacccgtcaaatagcagcggtggcgtttgccagtgtggcgcggcaggatgctgaaaatgcacggctgatgatcccgtcgcttgcccaggcgcagcagcttaatgaagatcagattcaggagctgcgcgatatcgtcgcctggcgtttgatgggcaacgatgtcaccgacgagcaggcgaaatggcgcgatgacgccattatgcgctcgcaatccacgtcgttgattgaacgccgtgtgcgaatggcacttggcaccggcgatcgtcgcggcctgaatacctggctggcgcgtctgccgatggaagcaaaagagaaagatgaatggcgttactggcaggcggatttattgctggaacgcggacgtgaagctgaagcgaaagagattttgcatcaactcatgcaacagcgtggtttctacccgatggttgcagcacaacgcatcggagaagagtatgagctgaagattgataaagcgccgcagaatgttgacagcgccctgactcaggggccggagatggcgcgcgtgcgcgagttgatgtactggaatctcgataacaccgcgcgtagcgagtgggccaatctggtgaagagcaagtcaaaaacagagcaggctcaactggctcggtatgctttcaataaccaatggtgggatcttagcgttcaggcaacgatcgccgggaagctttgggatcatctggaagagcgattcccgctggcttacaacgatcttttcaaacgttacaccagtgggaaagagatcccgcaaagctatgcgatggcgattgcccgtcaggagagcgcctggaatccgaaagtgaaatcaccggtaggggccagcggcctgatgcagattatgcctggtacagcgacccatacggtgaagatgttctctattcctggttatagcagccctgggcaattgctggatccggaaacgaatatcaacattggcaccagttacctgcaatatgtttatcagcagtttggcaataaccgtattttctcctcagcagcttataacgccggacctggacgggtgcgaacctggcttggcaacagcgccgggcgtatcgacgctgtggcatttgtcgagagtattccgttctccgagacgcgcggttatgtgaagaacgtgctggcttatgacgcttactaccgttatttcatgggggataaaccgacgttgatgagcgccacggaatggggacgtcgttactga

SEQ ID NO: 458177 - DNA, 1668 bp, Shigella boydii
gtggctcaattcgtttataccatgcatcgtgtcggcaaagttgttccgccgaaacgtcatattttgaaaaacatctctctgagtttcttccctggggcaaaaattggtgtcctgggtctgaacggcgcgggtaagtctaccctgctgcgcattatggcgggcattgataaagacatcgaaggtgaagcgcgtccgcagccagacatcaagattggttacctgccgcaggaagcgcagctgaacccggaacacaccgtgcgtgagtccattgaagaagcggtttctgaagtggttaacgccctgaaacgcctggatgaagtgtatgcgctgtacgccgatccggatgccgattttgacaagctggccgctgaacaaggccgtctggaagagatcattcaggctcacgacggtcataacctgaacgtacagctggagcgtgcggcggatgcgctacgtctgccggactgggacgcgaaaatcgctaacctctccggtggtgagcgtcgtcgcgtagcgttgtgccgcctgctgctggaaaaaccagacatgctgctgctcgacgaaccgaccaaccacctggatgccgaatccgtggcctggctggaacgcttcctgcacgacttcgagggcaccgtggtggcgattacccacgaccgttacttcctcgataacgttgcaggctggatcctcgaacttgaccgcggtgaaggtattccgtgggaaggcaactactcctcctggctggagcagaaagatcagcgcctggcgcaggaagcttcacaagaagcggcgcgtcgtaagtcgatcgagaaagagctggagtgggtacgtcagggaactaaaggccgccagtcgaaaggtaaagcacgtctggcacgctttgaagagctgaacagcaccgaatatcagaaacgtaacgaaaccaacgaactgtttattccacctggaccgcgtctgggcgataaagtgctggaagtcagcaacctgcgtaaatcctacggtgatcgcctgctgattgatgacctgagcttctcgatcccgaaaggggcaatcgtcgggatcatcggtccgaacggcgcgggtaaatcgaccctgttccgtatgatctctggtcaggaacagccggacagcggcaccatcactttaggtgaaacggtgaaactggcatcggttgatcagttccgtgactcaatggataacagcaaaaccgtttgggaagaagtttccggcgggctggatattatgaagatcggcaacaccgagatgccaagccgcgcctacgttggccgctttaactttaaaggggttgatcagggtaaacgcgttggtgaactttccggtggtgagcgcggtcgtctgcatctggcgaagctgctgcaggttggcggcaacatgctgctgctcgacgaaccaaccaacgacctggatatcgaaaccctgcgcgcgctggaaaacgccctgctggagttcccgggctgtgcgatggttatctcgcacgaccgttggttcctcgaccgtatcgccacgcacatcctggactaccaggatgaaggtaaagttgagttcttcgaaggtaactttactgagtacgaagagtacaagaaacgcacgctgggcgcagacgcactggagccgaagcgtatcaagtacaagcgtattgcgaagtaa

SEQ ID NO: 458178 - DNA, 1233 bp, Shigella boydii
atgtcgtcatttgattacctgaaaactgccatcaagcaacagggctgcacgctacagcaggtagctgatgccagcggtatgaccaaagggtatttaagccagttactgaatgccaaaattaaaagccccagcgcgcaaaagctggaggcgttgcaccgttttttggggcttgaatttccccgacagaagaaaaccattggtgtcgtattcggtaagttctacccgctgcataccggacatatctaccttatccagcgcgcctgtagccaggttgacgagctgcatatcattatgggttttgacgatacccgcgaccgcgcgttgtttgaagacagcgccatgtcgcagcagcccacggtgccggatcgtctgcgctggttattacaaacttttaaatatcagaaaaatattcgcattcatgctttcaacgaagagggcatggagccgtatccgcacggctgggatgtgtggagcaacggcatcaaaaagtttatggctgaaaaggggattcagccggacctgatctacacctcggaagaagccgatgcgccacagtatatggaacatctggggatcgatacggtgctggtcgatccgaaacgtacctttatgagtatcagcggtgcgcagatccgcgaaaacccgttccgctactgggaatatattcctacggaagtgaagccgttctttgtacgtaccgtggcgatccttggtggcgagtcgagcggtaaatccaccctggtaaacaaacttgccaatatcttcaataccaccagtgcgtgggaatatggtcgcgattatgtcttttcacacctcggcggtgatgagatcgcattgcagtattccgattacgataaaatcgcgctgggccacgcacaatacattgattttgcagtgaaatatgccaataaagtggcgtttattgacactgattttgtcactacccaggcgttctgcaaaaagtacgaagggcgtgagcatccgttcgtacaggcgttgattgatgaataccgtttcgatctggtgatcctgctggagaacaacacgccgtgggtggcggatggtttacgcagcctcggcagttcggtggatcgcaaagagttccagaacttgctggtggagatgctggaagagaacaatatcgaattcgtgcgggttgaagaggacgattatgacagccgtttcctgcgctgcgtggagctggtgcgggagatgatgggggagcagagataa

SEQ ID NO: 458179 - DNA, 1383 bp, Shigella boydii
gtggcaaaagctccaaaacgcgcctttgtttgtaatgaatgcggggccgattatccgcgctggcaggggcagtgcagtgcctgtcatgcctggaacaccatcaccgaggtgcgtcttgctgcgtcgccaacggtggcgcgtaacgagcgtctcagcggctatgccggtagcgccggggtggcaaaagtccagaaactctccgatatcagccttgaagagctgccgcgtttttccaccggatttaaagagttcgaccgcgtactaggcggcggcgtggtgccgggaagcgccattctgattggcggtaacccaggtgcggggaaatccacgctgctactgcaaacgctgtgcaaactggcccagcagatgaaaacgctgtatgtcactggcgaagagtcgctgcaacaggtggcaatgcgcgctcatcgccttggcctgccgactgacaatctcaatatgttgtcggaaaccagcatcgaacagatctgcctgattgccgaagaagagcaaccgaaactgatggtaattgactcgatccaggtgatgcatatggcggatgtacaatcatcgcctggtagcgtggcgcaggtgcgtgaaacggcggcttatctgacgcgcttcgccaaaacgcgcggtgtggcgattgtcatggttgggcacgtaaccaaagatggctcgctggctggccctaaagtgctggaacactgtatcgactgttcggtgcttctggatggtgatgccgactcccgttttcgcaccttgcgcagccataaaaaccgcttcggcgcggtgaatgagctgggcgtcttcgcgatgaccgaacaggggctgcgtgaagtcagcaacccttcggcaattttcttaagtcgcggagatgaagtgacctccggcagctccgtgatggtggtgtgggaaggaacgcgtccgttgctggtggagattcaggcgctggtcgatcactcgatgatggcgaatccgcgccgcgtggcagtagggctggaacaaaaccgtctggcaatcctgctggctgtcttgcaccgtcacggtggtctgcaaatggccgatcaggatgtatttgtgaacgtggtcggcggcgtgaaggtaaccgaaaccagtgccgatttagcgttactgctggcgatggtttccagcctgcgtgacagaccgctgccacaggatctggtggtgtttggtgaagtcgggctggcaggggagatccgcccggtgcccagcggtcaggaacgaatttcagaagcggcgaaacacggttttcgccgggcgattgttccggcggctaacgtaccgaaaaaagcgccggaagggatgcagatttttggcgttaaaaaactctccgacgcgcttagcgtgttcgacgacttataa

SEQ ID NO: 458180 - DNA, 969 bp, Shigella boydii
atgcctaacattacctggtgcgacctgcctgaagatgtctctttatggcctggtctgcctctttcattaagtggtgatgaagtgatgccactggattaccacgcaggtcgtagcggctggctgctgtatggtcgtgggctggataaacagcgtctgacccaataccagagcaaactgggtgcggcgatggtgattgttgccgcctggtgcgtggaagattatcaggtgattcgtctggcaggttcactcaccgcacgggctacgcgcctggcccatgaagcgcaactggatgtcgccccgctggggaaaatcccgcacctgcgcacgccgggtttgctggtgatggacatggattccaccgccatccagattgaatgtattgatgaaattgccaaactggccggaacgggcgagatggtggcggaagtaaccgaacgggcgatgcgcggcgaactcgattttaccgccagcctgcgcagccgtgtggcgacgctgaaaggcgctgacgccaatattctgcaacaggtgcgtgaaaatctgccgctgatgccaggcttaacgcaactggtgctcaagctggaaacgctgggctggaaagtggcgattgcctccggcggctttactttctttgctgaatatctgcgcgacaagctgcgcctgaccgccgtggtagccaatgaactggagatcatggacggtaaatttaccggcaatgtgatcggcgacatcgtagacgcgcagtacaaagcgaaaactttgactcgcctcgcgcaggagtatgaaatcccgctggcgcagaccgtggcgattggcgatggagctaatgacctgccgatgatcaaagcagcagggctggggattgcctaccatgccaagccaaaagtgaatgaaaaggcggaagtcaccatccgtcacgctgacctgatgggggtattctgcatcctctctggcagcctgaatcagaagtaa

SEQ ID NO: 458181 - DNA, 645 bp, Shigella boydii
atggctcgcacaaaactgaaattccggctgcatcgggcagtgattgtcctgttctgtcttgccttgttagtggcgctgatgcagggagcgtcatggtttagtcaaaaccaccagcgacaacgtaatccacagctggaagaactggcccgcaccctggcgcgtcaggtaacgctgaacgttgcaccgctgatgcgtaccgactcaccggatgaaaaacgcattcaggcgatcctcgatcagttaacggatgaaagccgtatcctcgacgcgggtgtgtatgacgaacaaggcgatcttatcgcacgttctggcgaaagcgtcgaagtgcgcgaccggctggcgctcgacggtaaaaaagcgggcggctattttaaccagcagattgtcgaaccaattgccgggaaaaacggaccgctcggctatctgcgcctgacgctcgacacccatacgctcgccaccgaagcccaacaggtggataacaccactaacattttacgcctgatgttgctgctttcactggcaatcggcgtagtgctgacccgcacgctgctacagggtaaacgtacccactggcagcaatcgcccttcctgttaaccgccagcaaaccggtgccggaagaggaagaaagcgagaaaaaagagtga

SEQ ID NO: 458182 - DNA, 1017 bp, Shigella boydii
atgtccacattacgcctgctcatctctgactcttacgacccgtggtttaacctggcggtggaggagtgtatttttcgccagatgcccgccacgcagcgcgttctgtttctctggcgcaatgccgacacggtagtgattggtcgcgcgcagaacccgtggaaagagtgtaatacccggcggatggaagaagataacgtccgcctggcacggcgcagtagcggtggcggcgcggtgttccacgatctcggcaatacctgctttacctttatggctggcaagccggagtacgataaaaccatctccacgtcgattgtgctcaatgcgctgaacgcgcttggcgtcagcgccgaagcgtccgggcgtaacgatctggtggtgaaaaccgccgaaggcgaccgcaaagtctcaggatcggcctatcgcgaaaccaaagatcgtggcttccaccacggcaccttgctgctcaatgccgaccttagccgcctggcaaactatctcaatccggataaaaagaaactggcggcgaaaggcattacctcagtgcgttcccgcgtgaccaacctcaccgagctgctgccagggatcacccatgagcaggtttgcgaggccataaccaaggcctttttcgcccattatggcgagcgtgtagaagcggaaatcatctccccggacaaaacgccagacttgccaaacttcgccgaaatctttgcccgtcagagtagctgggaatggaacttcggtcaggctccggcattctcgcatctgctggatgaacgctttagctggggcggcgtggaactgcatttcgacgttgaaaaaggccatatcacccgcgcccaggtgtttaccgacagcctcaaccccgcgccgctggaagccctcgccgggcgactgcaaggctgcctgtaccgcgcggatatgctgcaacaagagtgcgaagcgctgttggttgacttcccggaccaggaaaaagagctacgggagttgtcgacgtggatagcgggggcggtaaggtaa

SEQ ID NO: 458183 - DNA, 150 bp, Shigella boydii
atgatcgatctggaaaaccaggagcgggagattatcaatttaatgttaagccagcgtatttcctggctagccgccgtgcgtatcaggcataaattatcgcttgctgaagtaagtaaaatgttaggtatctcgattaattctctaaaatag

SEQ ID NO: 458184 - DNA, 720 bp, Shigella boydii
atggctaccccacacattaatgcagaaatgggcgatttcgctgacgtagttttgatgccaggcgacccgctgcgtgcgaagtatattgctgaaactttccttgaagatgcccgtgaagtgaacaacgttcgcggtatgctgggcttcaccggtacttacaaaggccgcaaaatttccgtaatgggtcacggtatgggtatcccgtcctgctccatctacaccaaagaactgatcaccgatttcggcgtgaagaaaattatccgcgtgggttcctgtggcgcagttctgccgcacgtaaaactgcgcgacgtcgttatcggtatgggtgcctgcaccgattccaaagttaaccgcatccgttttaaagatcatgactttgccgctatcgctgactttgacatggtgcgtaacgcggtagacgcggctaaagcactgggcattgatgctcgcgttggtaacctgttctccgctgacctgttctactctccggacggcgaaatgttcgacgtgatggaaaaatacggcatcctcggcgtggaaatggaagcggctggtatctacggcgtcgctgcagaatttggcgcgaaagccctgaccatctgtaccgtgtctgaccacatccgcactcacgagcagaccactgccgctgagcgtcagaccaccttcaacgacatgatcaaaatcgcactggaatccgttctgctgggcgataaagagtaa

SEQ ID NO: 458185 - DNA, 1224 bp, Shigella boydii
atgaaacgtgcatttattatggtgctggactcattcggcatcggcgctacagaagatgcagaacgctttggtgacgtcggggctgacaccctgggtcatatcgcagaagcttgtgccaaaggcgaagctgataacggtcgtaaaggcccgctcaatctgccaaatctgacccgtctggggctggcgaaagcacacgaaggttctaccggtttcattccggcgggaatggacggcaacgctgaagttatcggcgcgtacgcatgggcgcacgaaatgtcatccggtaaagataccccgtctggtcactgggaaatcgccggtgtcccggttctgtttgagtggggatacttctccgatcacgaaaacagcttcccgcaagagctgctggataaactggtcgaacgcgctaatctgccgggttacctcggtaactgccactcttccggtacggtcattctggatcagctgggcgaagagcacatgaaaaccggcaagccgattttctatacctccgctgactccgtgttccagattgcctgccacgaagaaacctttggcctggataaactctacgaactgtgcgaaatcgcccgtgaagagctgaccaacggcggctacaacatcggtcgtgttatcgctcgtccgtttatcggtgacaaagccggtaacttccagcgtaccggtaaccgtcacgacctggctgttgagccgccagcaccgaccgtgctgcagaaactggttgatgaaaaacacggtcaggtggtttctgtcggtaaaattgcagacatctacgccaactgcggtatcaccaagaaagtgaaagcaactggcctggacgcgctgtttgacgccaccatcaaagagatgaaagaagcgggtgataacaccatcgtcttcaccaacttcgttgacttcgactcttcctggggccaccgtcgcgacgtcgccggttatgctgcgggtctggagctgttcgaccgccgtctgccggagctgatgtctttgctgcgcgatgacgacatcctgatcctcactgctgaccacggttgtgatccgacctggaccggtactgaccacacgcgtgaacacattccggtactggtttacggcccgaaagtaaaaccgggttcactgggtcaccgtgaaaccttcgcggatatcggccagactctggcaaaatattttggtacttctgatatggaatatggcaaagccatgttctga

SEQ ID NO: 458186 - DNA, 1323 bp, Shigella boydii
ttgtttctcgcacaagaaattattcgtaaaaaacgtgatggtcatgcactgagcgatgaagaaattcgtttctttatcaacggcattcgcgacaacactatctccgaagggcagattgccgccctcgcgatgaccattttcttccacgatatgacaatgcctgagcgtgtctcgctgaccatggcgatgcgagattcaggaaccgttctcgactggaaaagcctgcatctgaatggcccgattgttgataaacattccaccggcggcgtcggcgatgtcacttcgctgatgttggggccgatggtcgcagcctgcggcggctatattccgatgatctccggtcgcggcctcggtcatactggcggtacgctcgacaaactggaatccatccctggcttcgacattttcccggatgacaaccgtttccgcgaaattattaaagacgtcggcgtggcgattatcggtcagaccagctcactggctccggcggataaacgtttctacgcgacccgtgatattaccgcaaccgtggactccatcccgctgatcactgcctcgatcctggcgaagaaactggcggaaggtctggatgcgctggtgatggacgtgaaagtgggtagcggcgcgtttatgccgacctacgaactctctgaagcccttgccgaagcgattgttggcgtggctaacggcgctggcgtgcgcaccaccgcgctgctcaccgacatgaatcaggtactggcctccagtgcaggtaacgcggttgaagttcgtgaagcggtgcagttcctgacgggtgaatatcgtaacccgcgtctgtttgatgtcacgatggcgctgtgcgtggagatgctgatctccggcaaactggcgaaagatgacgccgaagcgcgcgcgaaattgcaggcggtgctggacaacggtaaagcggcagaagtctttggtcgtatggtagcggcacaaaaaggcccgaccgacttcgttgagaactacgcgaagtatctgccgacagcgatgctgacgaaagcagtctatgctgataccgaaggttttgtcagtgaaatggatacccgcgcgctggggatggcagtggttgcaatgggcggcggtcgtcgtcaggcatctgacaccatcgattacagcgtcggctttactgatatggcgcgtctgggcgaccaagtagacggtcagcgtccgctggcggttatccacgcgaaagacgaaaacagctggcaggaagcggcgaaagcggtgaaagcggcaattaaacttgccgataaagcaccggaaagcacaccaactgtctatcgccgtatcagcgaataa

SEQ ID NO: 458187 - DNA, 780 bp, Shigella boydii
atgactgatctgaaagcaagcagcctgcgtgcactgaaattgatggacctgaccaccctgaatgacgacgacaccgacgagaaagtaattgctctgtgtcatcagaccaaaactccggtcggcaataccgccgctatctgtatctatcctcgctttatcccgattgctcgcaaaacgctgaaagagcagggcaccccggaaatccgaatcgctacggtaaccaacttcccacacggtaacgatgacatcgaaatcgcgctggcagaaacccgtgcggcaatcgcctacggtgctgatgaagttgacgttgtgttcccgtaccgcgcgctgatggcgggtaacgagcaggttggttttgacctggtgaaagcctgtaaagaggcttgcgcggcagcgaatgtactgctgaaagtgatcatcgaaaccggcgaactgaaagacgaagcgctgatccgtaaagcgtctgaaatctccatcaaagcgggtgctgacttcatcaaaacctctaccggtaaagtggcagtgaacgcgacgccggaaagcgcgcgcatcatgatggaagtgatccgtgatatgggcgtagaaaaaaccgttggtttcaaaccggcgggcggcgtgcgtactgcggaagatgcgcagaaatatctcgccatcgcagatgaactgttcggtgctgactgggcagatgcgcgtcactaccgctttggtgcttccagcctgctggcaagcctgttgaaagcgctgggccacggtgacggtaagagcgccagcagctactaa

SEQ ID NO: 458188 - DNA, 306 bp, Shigella boydii
atgcccacttctcatgaaaatgcactgcaacaacgttgccagcaaattgtcaccagcccagtgcttagcccggagcagaagcgccattttctggctctggaagcagaaaacaatctgccttatccgcagcttcctgccgaagcccgccgcgcgctggatgagggtgtaatctgcgatatgtttgaaggtcatgcgccgtacaaaccgcgctatgtcttacccgattacgcccgttttctggcgaacggttccgattcgtttgggggtaacccaccgttatattcgtgcggtcttagtgcgctgtaa

SEQ ID NO: 458189 - DNA, 186 bp, Shigella boydii
atggaacgcttcttcaggagtctgaagaacgaatggatgccggtggtgggttacgtaagcttcagcgaggcagctcacgccataacggactatatcgttggatattacagcgcactaagaccgcacgaatataacggtgggttacccccaaacgaatcggaaccgttcgccagaaaacgggcgtaa

SEQ ID NO: 458190 - DNA, 696 bp, Shigella boydii
atgttcagaaaattagcagctgaatgttttggtactttctggcttgtttttggtggctgtggtagtgctgtactggccgcaggcttcccggaattaggcattggttttgccggcgtggcgttggcgttcggtctgaccgttctgacgatggcctttgctgttggtcatatttctggtggtcattttaacccggcggtcactattggtttatgggctggcggacgttttccggcaaaagaagtcgttggctacgtaattgcccaggttgtcggcggtattgttgcagcggcgctgctgtatttaattgccagtggtaaaacgggttttgacgcggcagccagcggttttgcttctaacggttatggcgagcattcaccaggcggttattccatgctttccgcgctggtagttgaactggtattgagtgcaggtttcctgttggtgatccacggcgcaaccgccaaattcgcgccagcaggttttgcgccgatcgctattggtctggccttaaccctgattcacttaattagtattccggtgactaacacttctgttaacccggcgcgcagcaccgcggttgctatcttccagggcggctgggcattagaacaactgtggttcttctgggtggtgccaattgtcggcggcattatcggtggtctgatttaccggaccctgctggaaaagcgtgattaa

SEQ ID NO: 458191 - DNA, 900 bp, Shigella boydii
atgttttctgggctgttaatcattctggttcccctgattgtgggttacctcattccgcttcgccaacaagctgcgttaaaagttattaatcagctattaagctggatggtttaccttattctcttttttatgggtatcagtctggcgtttctcgataacctcgccagtaacctgttggcgattctgcattattctgccgtcagtattaccgttattttactgtgtaatattgccgccctgatgtggctggagcgaggcctgccgtggcgcaaccaccatcagcaagaaaaactcccgtcgcgtattgcgatggcgctggagtcgctaaaactgtgcggcgtagtagtgattggttttgccattggtctgagtggactggctttcttacaacacgcgaccgaagccagtgaatacacgttaattttgctacttttcctcgttggtattcagttgcgcaataatggcatgaccttaaagcagattgtccttaatcgccggggaatgattgtcgccgtggtggtggttgtcagttcattaattggtggtttaattaacgcctttattcttgatctccccatcaataccgcgctggcaatggcctccggtttcggctggtattctctttccggtattttattgaccgaatcttttggtccggtaatcgggagcgcggcgttttttaatgatctggcccgtgaactgattgctattatgttgatccctgggctgattcgccgcagctgctctactgcactgggcttatgcggtgccacatcaatggatttcaccctacccgttcttcaacgtactggcgggctggatatggtcccggcggcaattgttcacggttttattcttagcctgttagtgccgatcctcatcgcctttttctctgcgtaa

SEQ ID NO: 458192 - DNA, 1653 bp, Shigella boydii
atgttttgtgtgcaatgtgaacaaactatccgtactccggcaggaaacggctgctcatacgcgcaggggatgtgtggtaaaacggcggaaacttctgaccttcaggatttactcatcgcggcgctgcaagggctttctgcctgggcggtaaaagcgcgtgaatacggcatcatcaaccacgatgttgacagcttcgcgccacgtgcctttttctcaaccctgaccaacgttaacttcgattctccgcgtattgtcggctacgctcgtgaagcgattgccttgcgcgaggcgctgaaagcacaatgcctggctgtagatgccaacgcgcgcgtcgataacccgatggctgacctgcaactggtgagcgatgatctcggcgagctgcaacgtcaggcagcagaatttacccctaacaaagataaagcggcgattggcgaaaacattctcggcctgcgtctgctgtgcctgtatggcctgaaaggtgcggcggcctatatggaacacgcgcatgttctcggtcaatacgacaacgatatttatgcccagtaccataaaatcatggcgtggctggggacctggcctgccgatatgaacgcgcttcttgagtgttcaatggaaatcggccagatgaacttcaaagtgatgagcattctggatgcaggcgaaaccggtaaatacggtcacccgacgccaacccaggtcaacgtcaaagcgacggcgggtaaatgcattctgatttccggtcacgatctcaaagatctctacaacctgctggaacagaccgaaggcacgggcgttaatgtctacacccacggcgaaatgctgcctgcgcatggctacccggagctgcgtaaattcaagcatctggtcggtaactacggcagcggctggcagaatcagcaagtggagttcgctcgtttccctggccccatcgtgatgacctcgaactgcatcatcgacccaaccgtaagcgcttatgacgatcgtatctggacccgcagcattgttggctggcctggcgtgcgtcatctggacggtgatgatttctctgcggttatcacccaagcgcaacagatggcaggcttcccgtacagcgaaattccgcaccttatcaccgtgggttttggtcgccagacgctgcttggcgctgctgatacgctgattgatctggtgagccgtgaaaaactgcgtcatatcttcctgcttggtggctgtgacggcgcacgcggcgagcgccactacttcaccgatttcgccaccatcgtgccggatgactgcctgatcctgaccctcgcctgtggtaaatatcgctttaacaaacttgagtttggcgatatcgaaggtctgccccgtctggtagatgcaggtcaatgtaacgatgcttactcagcgattattctggctgtcactctggcagagaaactgggctgtggtgtgaacgatctgccgctgtcgctggtgctctcctggtttgaacagaaagcgatcgtcattctgctgacgctgctttctctgggcgtgaaaaatatcgtcaccggcccgactgcacctggtttcctgacaccagacctgctggcggtgctgaacgagaaattcggcctgcgttctatcaccactgttgaagaagacatgaagcaactgttgagcgcgtaa

SEQ ID NO: 458193 - DNA, 969 bp, Shigella boydii
atgacgatgccaacgaatcaatgcccgtggcggatgcaggttcatcacattacgcaagaaacgccggatgtgtggacgatttccctgatttgccacgattactacccatatcgcgccgggcaatatgcactggtcagcgtgcgaaactcagcggaaacgctgcgtgcttacaccatttcctccacgccaggcgtgagtgaatatatcaccctgaccgtgcggcggattgatgacggtgtcggctcccagtggctgacgcgcgatgtaaaacgcggtgattatctctggctttcggacgcgatgggggaatttacctgcgacgataaagcagaagataaattcctgttgctggcggcaggctgcggcgtcacgccgattatgtcgatgcgtcgctggcttgcgaagaaccgtccacaggccgatgtgcgggtgatctacaacgtgcgtacgccgcaggatgttattttcgccgatgagtggcgtaactatccggtaacgctggtggcagaaaataacgttaccgaaggctttatcgctggtcgtctcactcgcgaactgctggcaggtgtacctgacttagcttcacgtaccgtgatgacctgcggcccggctccgtatatggattgggtagagcaggaagtgaaagcgctcggcgtgacgcgtttctttaaagagaaattcttcaccccagtagcagaagcggcgaccagcggtctgaaattcaccaaactgcaaccggcacgagaattttacgccccggttggcaccacgctactggaggcgctggaaagcaataacgttccggttgtcgctgcctgccgtgcgggtgtttgcggctgctgtaagacaaaagtggtttccggtgaatatacggtgagcagtacaatgacgctgaccgacgccgaaatcgctgaaggttacgtactggcctgctcctgccatccgcagggggatttggttctcgcataa

SEQ ID NO: 458194 - DNA, 1719 bp, Shigella boydii
atgaaacaaacggttgcagcttatatcgccaaaacactcgaatcggcaggggtgaaacgcatctggggagtcacaggcgactctctgaatggtcttagtgacagtcttaatcgcatgggcaccatcgagtggatgtccacccgccacgaagaagtggcggcctttgccgctggcgctgaagcacaacttagcggagaactggcggtctgcgccggatcgtgcggccccggcaacctgcacttaatcaacggcctgtttgattgccaccgcaatcacgttccggtactggcgattgccgctcatattccctccagcgaaattggcagcggctatttccaggaaacccacccacaagagctattccgcgaatgtagtcactattgcgagctggtttccagcccggagcagatcccacaagtactggcgattgccatgcgcaaagcggtgcttaaccgtggcgtttcggttgtcgtgttaccaggcgacgtggcgttaaaacctgcgccagaaggggcaaccacgcactggtatcatgcgccacaaccagtcgtgacgccggaagaagaagagttacgcaaactggcgcaactgctgcgttattccagcaatatcgccctgatgtgtggcagcggctgcgcgggggcgcataaagagttagttgagtttgctgggaaaattaaagcgcctattgttcatgccctgcgcggtaaagaacatgtcgaatacgataatccgtatgatgttggaatgaccgggttaatcggcttctcgtcaggtttccataccatgatgaacgccgacacgttagtgctactcggcacgcaatttccctaccgcgccttctacccgaccgatgccaaaatcattcagattgatatcaacccagccagcatcggcgctcacagcaaggtggatatggcactggtcggcgatatcaagtcgactctgcgtgcattgcttccattggtggaagaaaaagccgatcgcaagtttctggataaagcgctggaagattaccgcgacgcccgcaaagggctggacgatttagctaaaccgagcgagaaagccattcacccgcaatatctggcgcagcaaattagtcattttgccgccgatgacgctattttcacctgtgacgttggtacgccaacggtgtgggcggcacgttatctaaaaatgaacggcaagcgtcgcctgttaggttcgtttaaccacggttcgatggctaacgccatgccgcaggcgctgggtgcgcaggcgacagagccagaacgtcaggtggtcgccatgtgcggcgatggcggttttagcatgttgatgggcgatttcctctcagtagtgcagatgaaactgccagtgaaaattgtcgtctttaacaacagcgtgctgggctttgtggcgatggagatgaaagctggtggctatttgactgacggcaccgaactacacgacacaaactttgcccgcattgccgaagcgtgcggcattacgggtatccgtgtagaaaaagcgtctgaagttgatgaagccctgcaacgcgccttctccatcgacggtccggtgctggtggatgtggtggtcgccaaagaagagttagccattccaccgcagatcaaactcgaacaggccaaaggatttagcttgtatatgttgcgcgcaatcatcagcggacgcggcgatgaagtgatcgaactggcgaaaacgaactggctaaggtaa
